United States Patent Application Publication US 2016/0319361 A1 - sequence listing, part 12

SEQ ID NO: 306465 - DNA, 30 bp, Artificial Sequence
  Synthetic oligonucleotide
agagcaatcaactggttttacgtcgaaata

SEQ ID NO: 306466 - DNA, 30 bp, Artificial Sequence
  Synthetic oligonucleotide
gcgtgtggccttaagcagttctcggaaata

SEQ ID NO: 306467 - DNA, 30 bp, Artificial Sequence
  Synthetic oligonucleotide
gtgatatatgttccttacatgtcggaaata

SEQ ID NO: 306468 - DNA, 30 bp, Artificial Sequence
  Synthetic oligonucleotide
ctggaaaggcggatatagccggttgaaata

SEQ ID NO: 306469 - DNA, 30 bp, Artificial Sequence
  Synthetic oligonucleotide
gctgttaagcggcaaacgcttagataaata

SEQ ID NO: 306470 - DNA, 30 bp, Artificial Sequence
  Synthetic oligonucleotide
tacatagtcagccaaagaagagtctaaata

SEQ ID NO: 306471 - DNA, 30 bp, Artificial Sequence
  Synthetic oligonucleotide
acgtctaaagattggaggattaagtaaata

SEQ ID NO: 306472 - DNA, 30 bp, Artificial Sequence
  Synthetic oligonucleotide
caagtgggaacacggtcctacgattaaata

SEQ ID NO: 306473 - DNA, 30 bp, Artificial Sequence
  Synthetic oligonucleotide
gagttgtcactgcataaccgaccttaaata

SEQ ID NO: 306474 - DNA, 30 bp, Artificial Sequence
  Synthetic oligonucleotide
gaaacccaggttttaaggacagtaacaata

SEQ ID NO: 306475 - DNA, 30 bp, Artificial Sequence
  Synthetic oligonucleotide
tcaaaaaatctaacgcagtggaacacaata

SEQ ID NO: 306476 - DNA, 30 bp, Artificial Sequence
  Synthetic oligonucleotide
ttagcagcgctcagtacgggctccacaata

SEQ ID NO: 306477 - DNA, 30 bp, Artificial Sequence
  Synthetic oligonucleotide
ggtatcggtgcatgcggcgatggcacaata

SEQ ID NO: 306478 - DNA, 30 bp, Artificial Sequence
  Synthetic oligonucleotide
gactttcacaagcacagatttgtgacaata

SEQ ID NO: 306479 - DNA, 30 bp, Artificial Sequence
  Synthetic oligonucleotide
agagaccggcatggccatggccgtacaata

SEQ ID NO: 306480 - DNA, 30 bp, Artificial Sequence
  Synthetic oligonucleotide
ctccgcatagtgcgtaagggtttaccaata

SEQ ID NO: 306481 - DNA, 30 bp, Artificial Sequence
  Synthetic oligonucleotide
tgttcccggtgtggcagaagagtgccaata

SEQ ID NO: 306482 - DNA, 30 bp, Artificial Sequence
  Synthetic oligonucleotide
acaagcaagccttccagacgggctccaata

SEQ ID NO: 306483 - DNA, 30 bp, Artificial Sequence
  Synthetic oligonucleotide
atcattgaggtagattggatgcgtccaata

SEQ ID NO: 306484 - DNA, 30 bp, Artificial Sequence
  Synthetic oligonucleotide
tggaaaaaagaatatcacagagaggcaata

SEQ ID NO: 306485 - DNA, 30 bp, Artificial Sequence
  Synthetic oligonucleotide
tacatctcttcttctaaacggaatgcaata

SEQ ID NO: 306486 - DNA, 30 bp, Artificial Sequence
  Synthetic oligonucleotide
ctgaacatgactccaagtggggaatcaata

SEQ ID NO: 306487 - DNA, 30 bp, Artificial Sequence
  Synthetic oligonucleotide
ccctcatactgacatccgttcatatcaata

SEQ ID NO: 306488 - DNA, 30 bp, Artificial Sequence
  Synthetic oligonucleotide
ctccctttggtggtaatatgattctcaata

SEQ ID NO: 306489 - DNA, 30 bp, Artificial Sequence
  Synthetic oligonucleotide
ctcgcataggctccgagtaacgagtcaata

SEQ ID NO: 306490 - DNA, 30 bp, Artificial Sequence
  Synthetic oligonucleotide
tagcgggggcaccgtggaggtccgtcaata

SEQ ID NO: 306491 - DNA, 30 bp, Artificial Sequence
  Synthetic oligonucleotide
cgcatttaggcgcatcattcctggtcaata

SEQ ID NO: 306492 - DNA, 30 bp, Artificial Sequence
  Synthetic oligonucleotide
agcagaaacctggcaacttgaaattcaata

SEQ ID NO: 306493 - DNA, 30 bp, Artificial Sequence
  Synthetic oligonucleotide
gtctgtaggtgttaaaactaggattcaata

SEQ ID NO: 306494 - DNA, 30 bp, Artificial Sequence
  Synthetic oligonucleotide
tattatggttcagcgtgtcggtattcaata

SEQ ID NO: 306495 - DNA, 30 bp, Artificial Sequence
  Synthetic oligonucleotide
ggtgtcgtctgcaaagttagccgttcaata

SEQ ID NO: 306496 - DNA, 30 bp, Artificial Sequence
  Synthetic oligonucleotide
tacaacgatttttcccgtgtactttcaata

SEQ ID NO: 306497 - DNA, 30 bp, Artificial Sequence
  Synthetic oligonucleotide
ctcacgttagacagagacacataaagaata

SEQ ID NO: 306498 - DNA, 30 bp, Artificial Sequence
  Synthetic oligonucleotide
cggatttggtccataatactttaaagaata

SEQ ID NO: 306499 - DNA, 30 bp, Artificial Sequence
  Synthetic oligonucleotide
gccacatccgcttcgattcgcttaagaata

SEQ ID NO: 306500 - DNA, 30 bp, Artificial Sequence
  Synthetic oligonucleotide
attcgcaccataggacaaacaagcagaata

SEQ ID NO: 306501 - DNA, 30 bp, Artificial Sequence
  Synthetic oligonucleotide
ggtatcaggtcggccaggatgttgagaata

SEQ ID NO: 306502 - DNA, 30 bp, Artificial Sequence
  Synthetic oligonucleotide
atcgacagagtatatcccagcactagaata

SEQ ID NO: 306503 - DNA, 30 bp, Artificial Sequence
  Synthetic oligonucleotide
cgccgacctgtggcctcaaacacccgaata

SEQ ID NO: 306504 - DNA, 30 bp, Artificial Sequence
  Synthetic oligonucleotide
catacgatagtgaccccggaattccgaata

SEQ ID NO: 306505 - DNA, 30 bp, Artificial Sequence
  Synthetic oligonucleotide
cgtgattttaatgctcattagagtcgaata

SEQ ID NO: 306506 - DNA, 30 bp, Artificial Sequence
  Synthetic oligonucleotide
ctagctcatcagtgtctactgagtcgaata

SEQ ID NO: 306507 - DNA, 30 bp, Artificial Sequence
  Synthetic oligonucleotide
ccgcccggtctatcccttgcctccggaata

SEQ ID NO: 306508 - DNA, 30 bp, Artificial Sequence
  Synthetic oligonucleotide
tttaagagtgtggcgaaatgcgtcggaata

SEQ ID NO: 306509 - DNA, 30 bp, Artificial Sequence
  Synthetic oligonucleotide
ctgaaaccgactataccataggggggaata

SEQ ID NO: 306510 - DNA, 30 bp, Artificial Sequence
  Synthetic oligonucleotide
tcagatagtgctgattagtgatggggaata

SEQ ID NO: 306511 - DNA, 30 bp, Artificial Sequence
  Synthetic oligonucleotide
cgctttccagactatttatttctgggaata

SEQ ID NO: 306512 - DNA, 30 bp, Artificial Sequence
  Synthetic oligonucleotide
tcgcgtgattgtgtcggatcaactggaata

SEQ ID NO: 306513 - DNA, 30 bp, Artificial Sequence
  Synthetic oligonucleotide
cttagctagcgccgcgcaaggagtggaata

SEQ ID NO: 306514 - DNA, 30 bp, Artificial Sequence
  Synthetic oligonucleotide
accccctcgcttaatcaggaaacatgaata

SEQ ID NO: 306515 - DNA, 30 bp, Artificial Sequence
  Synthetic oligonucleotide
atggttatccgggccacaagaccatgaata

SEQ ID NO: 306516 - DNA, 30 bp, Artificial Sequence
  Synthetic oligonucleotide
caacggactaacgaactggtccgatgaata

SEQ ID NO: 306517 - DNA, 30 bp, Artificial Sequence
  Synthetic oligonucleotide
gcgaatcgctacacctgagatatatgaata

SEQ ID NO: 306518 - DNA, 30 bp, Artificial Sequence
  Synthetic oligonucleotide
cacatacttaggtcaatcagcgtatgaata

SEQ ID NO: 306519 - DNA, 30 bp, Artificial Sequence
  Synthetic oligonucleotide
tgtgcaatgcatgtgatctcaaagtgaata

SEQ ID NO: 306520 - DNA, 30 bp, Artificial Sequence
  Synthetic oligonucleotide
gtactaaaaacggacatccctcattgaata

SEQ ID NO: 306521 - DNA, 30 bp, Artificial Sequence
  Synthetic oligonucleotide
gggcctcagggaaactgttcttattgaata

SEQ ID NO: 306522 - DNA, 30 bp, Artificial Sequence
  Synthetic oligonucleotide
agttgcaattatacgacaggatgttgaata

SEQ ID NO: 306523 - DNA, 30 bp, Artificial Sequence
  Synthetic oligonucleotide
agttaaatagggagaaggtcatccataata

SEQ ID NO: 306524 - DNA, 30 bp, Artificial Sequence
  Synthetic oligonucleotide
agtccatatttcactcgttggcagataata

SEQ ID NO: 306525 - DNA, 30 bp, Artificial Sequence
  Synthetic oligonucleotide
cgcgtgaattacatgccttaatcgataata

SEQ ID NO: 306526 - DNA, 30 bp, Artificial Sequence
  Synthetic oligonucleotide
tgctttcgacaacgtttaagtaggataata

SEQ ID NO: 306527 - DNA, 30 bp, Artificial Sequence
  Synthetic oligonucleotide
gctagttggtaagcgggacgacgactaata

SEQ ID NO: 306528 - DNA, 30 bp, Artificial Sequence
  Synthetic oligonucleotide
tctgctgatgacacgtcaggtacgctaata

SEQ ID NO: 306529 - DNA, 30 bp, Artificial Sequence
  Synthetic oligonucleotide
taaggcacgggatgttgcctgagtctaata

SEQ ID NO: 306530 - DNA, 30 bp, Artificial Sequence
  Synthetic oligonucleotide
ttttgcatacaacatttgtaacaagtaata

SEQ ID NO: 306531 - DNA, 30 bp, Artificial Sequence
  Synthetic oligonucleotide
aatcgaatacataaaccactgtgagtaata

SEQ ID NO: 306532 - DNA, 30 bp, Artificial Sequence
  Synthetic oligonucleotide
actctggaacgggttaaattggacgtaata

SEQ ID NO: 306533 - DNA, 30 bp, Artificial Sequence
  Synthetic oligonucleotide
gcacgtaccccggaaaacagacaggtaata

SEQ ID NO: 306534 - DNA, 30 bp, Artificial Sequence
  Synthetic oligonucleotide
cgttgtgatcagcatatacactaggtaata

SEQ ID NO: 306535 - DNA, 30 bp, Artificial Sequence
  Synthetic oligonucleotide
ttagtccgcactgaccgaatggcggtaata

SEQ ID NO: 306536 - DNA, 30 bp, Artificial Sequence
  Synthetic oligonucleotide
ggaatattgataaaagaacccagggtaata

SEQ ID NO: 306537 - DNA, 30 bp, Artificial Sequence
  Synthetic oligonucleotide
tgtgcacaataggtcctacctcgggtaata

SEQ ID NO: 306538 - DNA, 30 bp, Artificial Sequence
  Synthetic oligonucleotide
aagtgtgcgagccggattcgtggggtaata

SEQ ID NO: 306539 - DNA, 30 bp, Artificial Sequence
  Synthetic oligonucleotide
ttgccgatgttccccaaaacttgggtaata

SEQ ID NO: 306540 - DNA, 30 bp, Artificial Sequence
  Synthetic oligonucleotide
gcgacgttaagactctttacgttggtaata

SEQ ID NO: 306541 - DNA, 30 bp, Artificial Sequence
  Synthetic oligonucleotide
caaggaggtcccgttctgcgcaatgtaata

SEQ ID NO: 306542 - DNA, 30 bp, Artificial Sequence
  Synthetic oligonucleotide
agcacgcgccggtgagtaaagaatgtaata

SEQ ID NO: 306543 - DNA, 30 bp, Artificial Sequence
  Synthetic oligonucleotide
acgaagagcgttcattcgtattatgtaata

SEQ ID NO: 306544 - DNA, 30 bp, Artificial Sequence
  Synthetic oligonucleotide
cggagtcgggtatgtgcgatcactgtaata

SEQ ID NO: 306545 - DNA, 30 bp, Artificial Sequence
  Synthetic oligonucleotide
acgtgtaacgtagagatctctactgtaata

SEQ ID NO: 306546 - DNA, 30 bp, Artificial Sequence
  Synthetic oligonucleotide
ccatactgacactattatctgcgtgtaata

SEQ ID NO: 306547 - DNA, 30 bp, Artificial Sequence
  Synthetic oligonucleotide
gtcccactaaaatattgtaattgtgtaata

SEQ ID NO: 306548 - DNA, 30 bp, Artificial Sequence
  Synthetic oligonucleotide
gagatgggataccttatggaagaattaata

SEQ ID NO: 306549 - DNA, 30 bp, Artificial Sequence
  Synthetic oligonucleotide
ctactattcaggatctaactacgattaata

SEQ ID NO: 306550 - DNA, 30 bp, Artificial Sequence
  Synthetic oligonucleotide
cctctttcccgggaatgcaagggattaata

SEQ ID NO: 306551 - DNA, 30 bp, Artificial Sequence
  Synthetic oligonucleotide
ggatagcgaggtcgccgcggggtattaata

SEQ ID NO: 306552 - DNA, 30 bp, Artificial Sequence
  Synthetic oligonucleotide
agacttgttcaggtagtgcttggcttaata

SEQ ID NO: 306553 - DNA, 30 bp, Artificial Sequence
  Synthetic oligonucleotide
cgcttaaatacgatcacactgagtttaata

SEQ ID NO: 306554 - DNA, 30 bp, Artificial Sequence
  Synthetic oligonucleotide
atatcgcggggtaagtctgtgcgcaacata

SEQ ID NO: 306555 - DNA, 30 bp, Artificial Sequence
  Synthetic oligonucleotide
gtcttcgctcgcgaacatttcctcaacata

SEQ ID NO: 306556 - DNA, 30 bp, Artificial Sequence
  Synthetic oligonucleotide
ggctccctggaccgagaggcgcagaacata

SEQ ID NO: 306557 - DNA, 30 bp, Artificial Sequence
  Synthetic oligonucleotide
cgccgtcagtgagtagttcggaggaacata

SEQ ID NO: 306558 - DNA, 30 bp, Artificial Sequence
  Synthetic oligonucleotide
aaagtattagctcgggctctgatgaacata

SEQ ID NO: 306559 - DNA, 30 bp, Artificial Sequence
  Synthetic oligonucleotide
gctgcttcctcacctagtcacttgaacata

SEQ ID NO: 306560 - DNA, 30 bp, Artificial Sequence
  Synthetic oligonucleotide
ggacatcacctcagcacgatccctaacata

SEQ ID NO: 306561 - DNA, 30 bp, Artificial Sequence
  Synthetic oligonucleotide
ccccgagaggacactatgtgtattaacata

SEQ ID NO: 306562 - DNA, 30 bp, Artificial Sequence
  Synthetic oligonucleotide
ccgtaggggacacaaacaataagacacata

SEQ ID NO: 306563 - DNA, 30 bp, Artificial Sequence
  Synthetic oligonucleotide
caaccactttataggtccgccacccacata

SEQ ID NO: 306564 - DNA, 30 bp, Artificial Sequence
  Synthetic oligonucleotide
tcgtccacctcgtaacacggtgagcacata

SEQ ID NO: 306565 - DNA, 30 bp, Artificial Sequence
  Synthetic oligonucleotide
ttcgagaagccctcaacggcaacgcacata

SEQ ID NO: 306566 - DNA, 30 bp, Artificial Sequence
  Synthetic oligonucleotide
ttagggtcctttggtaagtacctgcacata

SEQ ID NO: 306567 - DNA, 30 bp, Artificial Sequence
  Synthetic oligonucleotide
acccgaactcaagacttgagcaatcacata

SEQ ID NO: 306568 - DNA, 30 bp, Artificial Sequence
  Synthetic oligonucleotide
agtctaggggatctagaactataagacata

SEQ ID NO: 306569 - DNA, 30 bp, Artificial Sequence
  Synthetic oligonucleotide
ggaattcaccgcacagataatgcagacata

SEQ ID NO: 306570 - DNA, 30 bp, Artificial Sequence
  Synthetic oligonucleotide
taaaggagggttttgtctaaatcagacata

SEQ ID NO: 306571 - DNA, 30 bp, Artificial Sequence
  Synthetic oligonucleotide
gttaagattgttgcgtttcaacgcgacata

SEQ ID NO: 306572 - DNA, 30 bp, Artificial Sequence
  Synthetic oligonucleotide
atgaataaaagctatctactaaaggacata

SEQ ID NO: 306573 - DNA, 30 bp, Artificial Sequence
  Synthetic oligonucleotide
gactatagtcatgaaattgtaaaggacata

SEQ ID NO: 306574 - DNA, 30 bp, Artificial Sequence
  Synthetic oligonucleotide
acctcttttagagcaccggtgcgggacata

SEQ ID NO: 306575 - DNA, 30 bp, Artificial Sequence
  Synthetic oligonucleotide
ggtaaatcttcgagcgatgatcgggacata

SEQ ID NO: 306576 - DNA, 30 bp, Artificial Sequence
  Synthetic oligonucleotide
tggacagatgcgtaaatgtccgtggacata

SEQ ID NO: 306577 - DNA, 30 bp, Artificial Sequence
  Synthetic oligonucleotide
tcacctccgctttacatcgacttggacata

SEQ ID NO: 306578 - DNA, 30 bp, Artificial Sequence
  Synthetic oligonucleotide
tctcggagtaggagatgaaaggatgacata

SEQ ID NO: 306579 - DNA, 30 bp, Artificial Sequence
  Synthetic oligonucleotide
aaatggtgagttccgtcacaaggtgacata

SEQ ID NO: 306580 - DNA, 30 bp, Artificial Sequence
  Synthetic oligonucleotide
tctgatcgacgaggcattatcattgacata

SEQ ID NO: 306581 - DNA, 30 bp, Artificial Sequence
  Synthetic oligonucleotide
ccggccacggatcaaggcactcaatacata

SEQ ID NO: 306582 - DNA, 30 bp, Artificial Sequence
  Synthetic oligonucleotide
atttggttgtcttatcagctataatacata

SEQ ID NO: 306583 - DNA, 30 bp, Artificial Sequence
  Synthetic oligonucleotide
gtgtgcgtagcattttaggaatactacata

SEQ ID NO: 306584 - DNA, 30 bp, Artificial Sequence
  Synthetic oligonucleotide
cacataaactataacagctttagctacata

SEQ ID NO: 306585 - DNA, 30 bp, Artificial Sequence
  Synthetic oligonucleotide
gatatggcgtaaggtctatacggctacata

SEQ ID NO: 306586 - DNA, 30 bp, Artificial Sequence
  Synthetic oligonucleotide
cccttacgtatcgggagtcgccagtacata

SEQ ID NO: 306587 - DNA, 30 bp, Artificial Sequence
  Synthetic oligonucleotide
caacatccatgcccttaacgtacgtacata

SEQ ID NO: 306588 - DNA, 30 bp, Artificial Sequence
  Synthetic oligonucleotide
tatgacaaaatgatcaaaacaccttacata

SEQ ID NO: 306589 - DNA, 30 bp, Artificial Sequence
  Synthetic oligonucleotide
ctcgtgggacttgtaagctttggttacata

SEQ ID NO: 306590 - DNA, 30 bp, Artificial Sequence
  Synthetic oligonucleotide
atcatcgtgatcgagcgtaattgttacata

SEQ ID NO: 306591 - DNA, 30 bp, Artificial Sequence
  Synthetic oligonucleotide
tcacagtatacggtcagatatatttacata

SEQ ID NO: 306592 - DNA, 30 bp, Artificial Sequence
  Synthetic oligonucleotide
gaagaaaatactctaattaagcgaaccata

SEQ ID NO: 306593 - DNA, 30 bp, Artificial Sequence
  Synthetic oligonucleotide
gagtttccaaatggaatatcaaacaccata

SEQ ID NO: 306594 - DNA, 30 bp, Artificial Sequence
  Synthetic oligonucleotide
tctgagagttcagtactcgtcgccaccata

SEQ ID NO: 306595 - DNA, 30 bp, Artificial Sequence
  Synthetic oligonucleotide
gaagctgttaccgcaaccagaggtaccata

SEQ ID NO: 306596 - DNA, 31 bp, Artificial Sequence
  Synthetic oligonucleotide
cgactgcttctcacagtcacgaaaccccata

SEQ ID NO: 306597 - DNA, 30 bp, Artificial Sequence
  Synthetic oligonucleotide
catgcgtggcattgcacgtgcccccccata

SEQ ID NO: 306598 - DNA, 30 bp, Artificial Sequence
  Synthetic oligonucleotide
cggcaaaattgttatggcgtaaagcccata

SEQ ID NO: 306599 - DNA, 30 bp, Artificial Sequence
  Synthetic oligonucleotide
gatactatattgcacatccatgagcccata

SEQ ID NO: 306600 - DNA, 30 bp, Artificial Sequence
  Synthetic oligonucleotide
tccgtctaaatcgtttcggcgactcccata

SEQ ID NO: 306601 - DNA, 30 bp, Artificial Sequence
  Synthetic oligonucleotide
taagaattaattgtaaacccgaccgccata

SEQ ID NO: 306602 - DNA, 30 bp, Artificial Sequence
  Synthetic oligonucleotide
tattttgttggaaaactctggcgggccata

SEQ ID NO: 306603 - DNA, 30 bp, Artificial Sequence
  Synthetic oligonucleotide
cacgccttcgtcatggggatctgggccata

SEQ ID NO: 306604 - DNA, 30 bp, Artificial Sequence
  Synthetic oligonucleotide
actttctggtcgagccgggtacctgccata

SEQ ID NO: 306605 - DNA, 30 bp, Artificial Sequence
  Synthetic oligonucleotide
tgctatgtgactcgtgcatcaggtgccata

SEQ ID NO: 306606 - DNA, 30 bp, Artificial Sequence
  Synthetic oligonucleotide
gtataggtggtggagctctcaattgccata

SEQ ID NO: 306607 - DNA, 30 bp, Artificial Sequence
  Synthetic oligonucleotide
tgctgtaatcaacggctaccggactccata

SEQ ID NO: 306608 - DNA, 30 bp, Artificial Sequence
  Synthetic oligonucleotide
tatggtaagataagacatgacacctccata

SEQ ID NO: 306609 - DNA, 30 bp, Artificial Sequence
  Synthetic oligonucleotide
aaaaagctgattcggctgaagggctccata

SEQ ID NO: 306610 - DNA, 30 bp, Artificial Sequence
  Synthetic oligonucleotide
caatctgtgtactctgtcgacatctccata

SEQ ID NO: 306611 - DNA, 30 bp, Artificial Sequence
  Synthetic oligonucleotide
gagtcatccatcagatcatgcatctccata

SEQ ID NO: 306612 - DNA, 30 bp, Artificial Sequence
  Synthetic oligonucleotide
agacgtgtagaatcgtcttgcaggtccata

SEQ ID NO: 306613 - DNA, 30 bp, Artificial Sequence
  Synthetic oligonucleotide
gtaacatccagaagcctggccagttccata

SEQ ID NO: 306614 - DNA, 30 bp, Artificial Sequence
  Synthetic oligonucleotide
tacaatccacagtggagaagattttccata

SEQ ID NO: 306615 - DNA, 30 bp, Artificial Sequence
  Synthetic oligonucleotide
tagcgccgggcgtccatctcagaaagcata

SEQ ID NO: 306616 - DNA, 30 bp, Artificial Sequence
  Synthetic oligonucleotide
gggagtgtttcggccctcggcagaagcata

SEQ ID NO: 306617 - DNA, 30 bp, Artificial Sequence
  Synthetic oligonucleotide
atcacattttagaatcatggtgacagcata

SEQ ID NO: 306618 - DNA, 30 bp, Artificial Sequence
  Synthetic oligonucleotide
gctcgctattcatgtgaaaagatcagcata

SEQ ID NO: 306619 - DNA, 30 bp, Artificial Sequence
  Synthetic oligonucleotide
acgacctttcagctgaggggtacacgcata

SEQ ID NO: 306620 - DNA, 30 bp, Artificial Sequence
  Synthetic oligonucleotide
gagactatgtaagactgtccaagacgcata

SEQ ID NO: 306621 - DNA, 30 bp, Artificial Sequence
  Synthetic oligonucleotide
tccacggactcagccggacgtggccgcata

SEQ ID NO: 306622 - DNA, 30 bp, Artificial Sequence
  Synthetic oligonucleotide
attgtcgggtgggcccagcgggctcgcata

SEQ ID NO: 306623 - DNA, 30 bp, Artificial Sequence
  Synthetic oligonucleotide
ctgaacaataacgtgttgggggctcgcata

SEQ ID NO: 306624 - DNA, 30 bp, Artificial Sequence
  Synthetic oligonucleotide
tctcgggcaggcaccttcaggagtcgcata

SEQ ID NO: 306625 - DNA, 31 bp, Artificial Sequence
  Synthetic oligonucleotide
cggtcttaaaattaatttaactcgcggcata

SEQ ID NO: 306626 - DNA, 31 bp, Artificial Sequence
  Synthetic oligonucleotide
ggcccggaggttaaacagcggctcgggcata

SEQ ID NO: 306627 - DNA, 30 bp, Artificial Sequence
  Synthetic oligonucleotide
agcactgaagattattgaacaaggggcata

SEQ ID NO: 306628 - DNA, 30 bp, Artificial Sequence
  Synthetic oligonucleotide
tgatcctcctatcttccttcgaggggcata

SEQ ID NO: 306629 - DNA, 30 bp, Artificial Sequence
  Synthetic oligonucleotide
aaagaaggtaacccggaaatcctgggcata

SEQ ID NO: 306630 - DNA, 30 bp, Artificial Sequence
  Synthetic oligonucleotide
agggggtagtgctagtatcatgtgggcata

SEQ ID NO: 306631 - DNA, 30 bp, Artificial Sequence
  Synthetic oligonucleotide
agtccgacaagactaagtccggttggcata

SEQ ID NO: 306632 - DNA, 30 bp, Artificial Sequence
  Synthetic oligonucleotide
ggcttcaacgagtccgattatgcatgcata

SEQ ID NO: 306633 - DNA, 30 bp, Artificial Sequence
  Synthetic oligonucleotide
gacgttaatcacctgcactagggatgcata

SEQ ID NO: 306634 - DNA, 30 bp, Artificial Sequence
  Synthetic oligonucleotide
ggttgggccaaacagatggtcgtatgcata

SEQ ID NO: 306635 - DNA, 30 bp, Artificial Sequence
  Synthetic oligonucleotide
gccgtggcccctatgcacaggaggtgcata

SEQ ID NO: 306636 - DNA, 30 bp, Artificial Sequence
  Synthetic oligonucleotide
tgggcagtgactcgcaagcggcggtgcata

SEQ ID NO: 306637 - DNA, 30 bp, Artificial Sequence
  Synthetic oligonucleotide
cctaagtgatacggttatgattgttgcata

SEQ ID NO: 306638 - DNA, 30 bp, Artificial Sequence
  Synthetic oligonucleotide
atagttaaccgaggcggatcgcaaatcata

SEQ ID NO: 306639 - DNA, 30 bp, Artificial Sequence
  Synthetic oligonucleotide
cctatccgccgaccgacgatttaaatcata

SEQ ID NO: 306640 - DNA, 30 bp, Artificial Sequence
  Synthetic oligonucleotide
tgagtgagttgtcgcacgaaaggaatcata

SEQ ID NO: 306641 - DNA, 30 bp, Artificial Sequence
  Synthetic oligonucleotide
gtcggcgttgctggtcccggtgagatcata

SEQ ID NO: 306642 - DNA, 30 bp, Artificial Sequence
  Synthetic oligonucleotide
gcaatgccgttgtggtgatgccggatcata

SEQ ID NO: 306643 - DNA, 30 bp, Artificial Sequence
  Synthetic oligonucleotide
ccaagactgcgggcggatatccggatcata

SEQ ID NO: 306644 - DNA, 30 bp, Artificial Sequence
  Synthetic oligonucleotide
gatcatcaaatgctcaggcgagctatcata

SEQ ID NO: 306645 - DNA, 30 bp, Artificial Sequence
  Synthetic oligonucleotide
ttgaaccacagcgccacagctgctatcata

SEQ ID NO: 306646 - DNA, 30 bp, Artificial Sequence
  Synthetic oligonucleotide
agcctcgcgatcaatattttgggtatcata

SEQ ID NO: 306647 - DNA, 30 bp, Artificial Sequence
  Synthetic oligonucleotide
gtacggattgtacttagcgatgacctcata

SEQ ID NO: 306648 - DNA, 30 bp, Artificial Sequence
  Synthetic oligonucleotide
cggtagttcatgagtattggccatctcata

SEQ ID NO: 306649 - DNA, 30 bp, Artificial Sequence
  Synthetic oligonucleotide
gtgacagccacaattcagatggatctcata

SEQ ID NO: 306650 - DNA, 30 bp, Artificial Sequence
  Synthetic oligonucleotide
cgggctttttctctgccggaaaacgtcata

SEQ ID NO: 306651 - DNA, 30 bp, Artificial Sequence
  Synthetic oligonucleotide
gatgccttccaagatgagaagtccgtcata

SEQ ID NO: 306652 - DNA, 30 bp, Artificial Sequence
  Synthetic oligonucleotide
ggcacggcatataatcctctgctggtcata

SEQ ID NO: 306653 - DNA, 30 bp, Artificial Sequence
  Synthetic oligonucleotide
atgccgacacggggttcgccctctgtcata

SEQ ID NO: 306654 - DNA, 30 bp, Artificial Sequence
  Synthetic oligonucleotide
tatggcattgggtcatactagtaattcata

SEQ ID NO: 306655 - DNA, 30 bp, Artificial Sequence
  Synthetic oligonucleotide
gtagatgtggccaattcggtattattcata

SEQ ID NO: 306656 - DNA, 30 bp, Artificial Sequence
  Synthetic oligonucleotide
atttgagacggtctaggcaacgtcttcata

SEQ ID NO: 306657 - DNA, 30 bp, Artificial Sequence
  Synthetic oligonucleotide
cgcctttggtactcggaagcgttgttcata

SEQ ID NO: 306658 - DNA, 30 bp, Artificial Sequence
  Synthetic oligonucleotide
cggttgcgctaactatcatccaatttcata

SEQ ID NO: 306659 - DNA, 30 bp, Artificial Sequence
  Synthetic oligonucleotide
atttatgcactagatgtacgctatttcata

SEQ ID NO: 306660 - DNA, 30 bp, Artificial Sequence
  Synthetic oligonucleotide
taaccccggggaaactactgctgaaagata

SEQ ID NO: 306661 - DNA, 30 bp, Artificial Sequence
  Synthetic oligonucleotide
aggtggtttagtcggtatatgttaaagata

SEQ ID NO: 306662 - DNA, 30 bp, Artificial Sequence
  Synthetic oligonucleotide
tgtgggcgatgcgcggcggggcataagata

SEQ ID NO: 306663 - DNA, 30 bp, Artificial Sequence
  Synthetic oligonucleotide
aaaattgcatacagttaattccgacagata

SEQ ID NO: 306664 - DNA, 30 bp, Artificial Sequence
  Synthetic oligonucleotide
taacataaacggtagttatgtctacagata

SEQ ID NO: 306665 - DNA, 30 bp, Artificial Sequence
  Synthetic oligonucleotide
agagcggggacggtaacatcattacagata

SEQ ID NO: 306666 - DNA, 30 bp, Artificial Sequence
  Synthetic oligonucleotide
atgcagttaataggaaaggcctgccagata

SEQ ID NO: 306667 - DNA, 30 bp, Artificial Sequence
  Synthetic oligonucleotide
ctgactgcatcactgcaggaggagcagata

SEQ ID NO: 306668 - DNA, 30 bp, Artificial Sequence
  Synthetic oligonucleotide
ctgcatggaggccctcgttgggcgcagata

SEQ ID NO: 306669 - DNA, 30 bp, Artificial Sequence
  Synthetic oligonucleotide
aatccccgccacatcactgagcggcagata

SEQ ID NO: 306670 - DNA, 30 bp, Artificial Sequence
  Synthetic oligonucleotide
gatgactgttggaatacaaaggggcagata

SEQ ID NO: 306671 - DNA, 30 bp, Artificial Sequence
  Synthetic oligonucleotide
atacaagtaacacaactagagttgcagata

SEQ ID NO: 306672 - DNA, 30 bp, Artificial Sequence
  Synthetic oligonucleotide
ctgtgtttggtcaagcttagtactcagata

SEQ ID NO: 306673 - DNA, 30 bp, Artificial Sequence
  Synthetic oligonucleotide
taggttgataagcctttaaatggtcagata

SEQ ID NO: 306674 - DNA, 30 bp, Artificial Sequence
  Synthetic oligonucleotide
gtcgggtcaatcccctgaatccttcagata

SEQ ID NO: 306675 - DNA, 30 bp, Artificial Sequence
  Synthetic oligonucleotide
tgattgaacaggacacatgtcgcagagata

SEQ ID NO: 306676 - DNA, 30 bp, Artificial Sequence
  Synthetic oligonucleotide
ggggtaataggcggaggagggagagagata

SEQ ID NO: 306677 - DNA, 31 bp, Artificial Sequence
  Synthetic oligonucleotide
cccaatccgttcgacgcttagagtggagata

SEQ ID NO: 306678 - DNA, 30 bp, Artificial Sequence
  Synthetic oligonucleotide
acgctaggtagcaccattcctgctgagata

SEQ ID NO: 306679 - DNA, 30 bp, Artificial Sequence
  Synthetic oligonucleotide
agctagctatcatgctacagtctatagata

SEQ ID NO: 306680 - DNA, 30 bp, Artificial Sequence
  Synthetic oligonucleotide
tgcaacgcgcctaacatgcagtactagata

SEQ ID NO: 306681 - DNA, 30 bp, Artificial Sequence
  Synthetic oligonucleotide
aaacggttggggaaggtacggtactagata

SEQ ID NO: 306682 - DNA, 30 bp, Artificial Sequence
  Synthetic oligonucleotide
gccagagtttcattttatcacacctagata

SEQ ID NO: 306683 - DNA, 30 bp, Artificial Sequence
  Synthetic oligonucleotide
tgggaaggtttaactgggaataagtagata

SEQ ID NO: 306684 - DNA, 30 bp, Artificial Sequence
  Synthetic oligonucleotide
tgagatcgagcattactactccagtagata

SEQ ID NO: 306685 - DNA, 30 bp, Artificial Sequence
  Synthetic oligonucleotide
ttgaagccaaccggcagatcatggtagata

SEQ ID NO: 306686 - DNA, 30 bp, Artificial Sequence
  Synthetic oligonucleotide
tcgaagtaatcaggtttaacagacacgata

SEQ ID NO: 306687 - DNA, 30 bp, Artificial Sequence
  Synthetic oligonucleotide
gcaatgacattgggagcacgcgttacgata

SEQ ID NO: 306688 - DNA, 30 bp, Artificial Sequence
  Synthetic oligonucleotide
acatttggattgtcaggcgtatgaccgata

SEQ ID NO: 306689 - DNA, 30 bp, Artificial Sequence
  Synthetic oligonucleotide
attcagtccgagtacagaagtttaccgata

SEQ ID NO: 306690 - DNA, 30 bp, Artificial Sequence
  Synthetic oligonucleotide
caggattcggattaaaaaagatacccgata

SEQ ID NO: 306691 - DNA, 30 bp, Artificial Sequence
  Synthetic oligonucleotide
ggactggcgttgccgttccctgccccgata

SEQ ID NO: 306692 - DNA, 30 bp, Artificial Sequence
  Synthetic oligonucleotide
tttcgcctaagggtgaagttatgtgcgata

SEQ ID NO: 306693 - DNA, 30 bp, Artificial Sequence
  Synthetic oligonucleotide
tggctcccatggcggttctttgtatcgata

SEQ ID NO: 306694 - DNA, 30 bp, Artificial Sequence
  Synthetic oligonucleotide
agtttggttaaggtaaagaggatctcgata

SEQ ID NO: 306695 - DNA, 30 bp, Artificial Sequence
  Synthetic oligonucleotide
tcagcccatcgaacgtgggggatctcgata

SEQ ID NO: 306696 - DNA, 30 bp, Artificial Sequence
  Synthetic oligonucleotide
ccggacctgatcagagttcttgtgtcgata

SEQ ID NO: 306697 - DNA, 30 bp, Artificial Sequence
  Synthetic oligonucleotide
catggacctatgagctattgcttgtcgata

SEQ ID NO: 306698 - DNA, 30 bp, Artificial Sequence
  Synthetic oligonucleotide
gcaatgagaaatttttgactccgttcgata

SEQ ID NO: 306699 - DNA, 30 bp, Artificial Sequence
  Synthetic oligonucleotide
tggccagttaacagtctggttgtttcgata

SEQ ID NO: 306700 - DNA, 30 bp, Artificial Sequence
  Synthetic oligonucleotide
ggagcccgccataaagttttgtaaaggata

SEQ ID NO: 306701 - DNA, 30 bp, Artificial Sequence
  Synthetic oligonucleotide
gttggttgcaacggattcaacgtaaggata

SEQ ID NO: 306702 - DNA, 30 bp, Artificial Sequence
  Synthetic oligonucleotide
gtagcatagttgctatcggctgtaaggata

SEQ ID NO: 306703 - DNA, 30 bp, Artificial Sequence
  Synthetic oligonucleotide
ctggactttaaccggaagtagggcaggata

SEQ ID NO: 306704 - DNA, 30 bp, Artificial Sequence
  Synthetic oligonucleotide
cgtgaagtcgctacaagatcaatcaggata

SEQ ID NO: 306705 - DNA, 30 bp, Artificial Sequence
  Synthetic oligonucleotide
gattgctttgtggattagttcaagaggata

SEQ ID NO: 306706 - DNA, 30 bp, Artificial Sequence
  Synthetic oligonucleotide
tctgatcggcacatcccggagtagaggata

SEQ ID NO: 306707 - DNA, 30 bp, Artificial Sequence
  Synthetic oligonucleotide
tggactcctggtggtcgggaatgtaggata

SEQ ID NO: 306708 - DNA, 30 bp, Artificial Sequence
  Synthetic oligonucleotide
gtctaagcatttagcggctcggttaggata

SEQ ID NO: 306709 - DNA, 30 bp, Artificial Sequence
  Synthetic oligonucleotide
cttaacgaattcgaacttgaacaacggata

SEQ ID NO: 306710 - DNA, 30 bp, Artificial Sequence
  Synthetic oligonucleotide
cacacaaataatatacggttaccacggata

SEQ ID NO: 306711 - DNA, 30 bp, Artificial Sequence
  Synthetic oligonucleotide
agtaggcaccagggctaggttgcacggata

SEQ ID NO: 306712 - DNA, 30 bp, Artificial Sequence
  Synthetic oligonucleotide
ctccggaggcccagaaaatcctcacggata

SEQ ID NO: 306713 - DNA, 30 bp, Artificial Sequence
  Synthetic oligonucleotide
agggttcctttacgatggtactgacggata

SEQ ID NO: 306714 - DNA, 30 bp, Artificial Sequence
  Synthetic oligonucleotide
tgtagcgtttccaccgcataggaccggata

SEQ ID NO: 306715 - DNA, 30 bp, Artificial Sequence
  Synthetic oligonucleotide
gccgctacatgggtgcatcgacagcggata

SEQ ID NO: 306716 - DNA, 30 bp, Artificial Sequence
  Synthetic oligonucleotide
aacgaatggttaaagccggggggtcggata

SEQ ID NO: 306717 - DNA, 30 bp, Artificial Sequence
  Synthetic oligonucleotide
tcccgtggtacggtagtgttgtccgggata

SEQ ID NO: 306718 - DNA, 30 bp, Artificial Sequence
  Synthetic oligonucleotide
cggctgtcattcaaggcataggcggggata

SEQ ID NO: 306719 - DNA, 30 bp, Artificial Sequence
  Synthetic oligonucleotide
ctcataaactataccactttctcggggata

SEQ ID NO: 306720 - DNA, 30 bp, Artificial Sequence
  Synthetic oligonucleotide
tgtaggatggtaccggcatgtggggggata

SEQ ID NO: 306721 - DNA, 30 bp, Artificial Sequence
  Synthetic oligonucleotide
atcggcttggacaagttgtcattggggata

SEQ ID NO: 306722 - DNA, 30 bp, Artificial Sequence
  Synthetic oligonucleotide
aacaatagcttgctgaatgtgtatgggata

SEQ ID NO: 306723 - DNA, 30 bp, Artificial Sequence
  Synthetic oligonucleotide
agttttggtaggtcccctttaactgggata

SEQ ID NO: 306724 - DNA, 30 bp, Artificial Sequence
  Synthetic oligonucleotide
ttcatgagtgctacgagtatgattgggata

SEQ ID NO: 306725 - DNA, 30 bp, Artificial Sequence
  Synthetic oligonucleotide
gcattattgtcttgaccccgaccatggata

SEQ ID NO: 306726 - DNA, 30 bp, Artificial Sequence
  Synthetic oligonucleotide
catagagtatatatttgcgcaagatggata

SEQ ID NO: 306727 - DNA, 30 bp, Artificial Sequence
  Synthetic oligonucleotide
gctctgtacctgcaatagatgagctggata

SEQ ID NO: 306728 - DNA, 30 bp, Artificial Sequence
  Synthetic oligonucleotide
gacttcacgtcgcgaaattttagctggata

SEQ ID NO: 306729 - DNA, 30 bp, Artificial Sequence
  Synthetic oligonucleotide
atgacgcgtgagatagagtcgtgctggata

SEQ ID NO: 306730 - DNA, 30 bp, Artificial Sequence
  Synthetic oligonucleotide
ttgggcacgcctctgcaaccgcattggata

SEQ ID NO: 306731 - DNA, 30 bp, Artificial Sequence
  Synthetic oligonucleotide
ttagtaatcgtgcgagggaagtcttggata

SEQ ID NO: 306732 - DNA, 30 bp, Artificial Sequence
  Synthetic oligonucleotide
cggtttacggatgtacaccgggaaatgata

SEQ ID NO: 306733 - DNA, 30 bp, Artificial Sequence
  Synthetic oligonucleotide
gccaagcatgatggcgagtatataatgata

SEQ ID NO: 306734 - DNA, 30 bp, Artificial Sequence
  Synthetic oligonucleotide
tgctcataaggaaaggaattcgtaatgata

SEQ ID NO: 306735 - DNA, 30 bp, Artificial Sequence
  Synthetic oligonucleotide
tgtaatcttggttaaacagttgtaatgata

SEQ ID NO: 306736 - DNA, 30 bp, Artificial Sequence
  Synthetic oligonucleotide
gtcgaaggggtgtaaactgaccagatgata

SEQ ID NO: 306737 - DNA, 30 bp, Artificial Sequence
  Synthetic oligonucleotide
ttccgcatcatgttaacagtagcgatgata

SEQ ID NO: 306738 - DNA, 30 bp, Artificial Sequence
  Synthetic oligonucleotide
ggcttggggtcatggtaccagcctatgata

SEQ ID NO: 306739 - DNA, 30 bp, Artificial Sequence
  Synthetic oligonucleotide
ccaagatgtgatgcagagtcatctatgata

SEQ ID NO: 306740 - DNA, 30 bp, Artificial Sequence
  Synthetic oligonucleotide
tttgtgaaggtggctgtacgttctatgata

SEQ ID NO: 306741 - DNA, 30 bp, Artificial Sequence
  Synthetic oligonucleotide
tctaccgagttaaccattcctcgtatgata

SEQ ID NO: 306742 - DNA, 30 bp, Artificial Sequence
  Synthetic oligonucleotide
cacagtcactagacaaaaagctgactgata

SEQ ID NO: 306743 - DNA, 30 bp, Artificial Sequence
  Synthetic oligonucleotide
cgaagtcctatagatcgtgcgatcctgata

SEQ ID NO: 306744 - DNA, 30 bp, Artificial Sequence
  Synthetic oligonucleotide
tcagcacgcagacctggagtcccgctgata

SEQ ID NO: 306745 - DNA, 30 bp, Artificial Sequence
  Synthetic oligonucleotide
ggattaccatgcgagcataggatgctgata

SEQ ID NO: 306746 - DNA, 30 bp, Artificial Sequence
  Synthetic oligonucleotide
aaaatgaaccctttaacagtgcgtctgata

SEQ ID NO: 306747 - DNA, 30 bp, Artificial Sequence
  Synthetic oligonucleotide
atataaaaggaatctgttttgcgagtgata

SEQ ID NO: 306748 - DNA, 30 bp, Artificial Sequence
  Synthetic oligonucleotide
agccctaccatgacattgatggtcgtgata

SEQ ID NO: 306749 - DNA, 30 bp, Artificial Sequence
  Synthetic oligonucleotide
atggtccatgaaccatttatgactgtgata

SEQ ID NO: 306750 - DNA, 30 bp, Artificial Sequence
  Synthetic oligonucleotide
atactgggcattgaagcatttgctgtgata

SEQ ID NO: 306751 - DNA, 30 bp, Artificial Sequence
  Synthetic oligonucleotide
ccaagactgggcgctggagccagtgtgata

SEQ ID NO: 306752 - DNA, 30 bp, Artificial Sequence
  Synthetic oligonucleotide
gagttaagttgatgtcggtggagtgtgata

SEQ ID NO: 306753 - DNA, 30 bp, Artificial Sequence
  Synthetic oligonucleotide
ggatccatgctaacatgtagggtcttgata

SEQ ID NO: 306754 - DNA, 30 bp, Artificial Sequence
  Synthetic oligonucleotide
gtgcacttcatagtagctccgtagttgata

SEQ ID NO: 306755 - DNA, 30 bp, Artificial Sequence
  Synthetic oligonucleotide
ataactcaccaataggccctgtggttgata

SEQ ID NO: 306756 - DNA, 30 bp, Artificial Sequence
  Synthetic oligonucleotide
ggtcaatttaactcgctagtggaaaatata

SEQ ID NO: 306757 - DNA, 30 bp, Artificial Sequence
  Synthetic oligonucleotide
aattttgcagcgtgcagaatgtcaaatata

SEQ ID NO: 306758 - DNA, 30 bp, Artificial Sequence
  Synthetic oligonucleotide
ggttcattatgcgaggcatctgacaatata

SEQ ID NO: 306759 - DNA, 30 bp, Artificial Sequence
  Synthetic oligonucleotide
gggacagcacgtaattaatatttcaatata

SEQ ID NO: 306760 - DNA, 30 bp, Artificial Sequence
  Synthetic oligonucleotide
tatcctaagcggtctatagaaccgaatata

SEQ ID NO: 306761 - DNA, 30 bp, Artificial Sequence
  Synthetic oligonucleotide
gtaataaagcttagtcatgaggcgaatata

SEQ ID NO: 306762 - DNA, 30 bp, Artificial Sequence
  Synthetic oligonucleotide
taagagattgctgagggacactctaatata

SEQ ID NO: 306763 - DNA, 30 bp, Artificial Sequence
  Synthetic oligonucleotide
tcgttctataacggaagagactgtaatata

SEQ ID NO: 306764 - DNA, 30 bp, Artificial Sequence
  Synthetic oligonucleotide
tgaattccataaaaagtgcaacaccatata

SEQ ID NO: 306765 - DNA, 30 bp, Artificial Sequence
  Synthetic oligonucleotide
ggctctctagaacaccatgtagggcatata

SEQ ID NO: 306766 - DNA, 30 bp, Artificial Sequence
  Synthetic oligonucleotide
cagatccccgcgttgccgatggctcatata

SEQ ID NO: 306767 - DNA, 30 bp, Artificial Sequence
  Synthetic oligonucleotide
cgtctgtggtcaggggtacgataagatata

SEQ ID NO: 306768 - DNA, 30 bp, Artificial Sequence
  Synthetic oligonucleotide
cgtcaatccatctatgattgtcacgatata

SEQ ID NO: 306769 - DNA, 30 bp, Artificial Sequence
  Synthetic oligonucleotide
catttggaaatttatggtaagagcgatata

SEQ ID NO: 306770 - DNA, 30 bp, Artificial Sequence
  Synthetic oligonucleotide
ttcgtgttaggccaaagatcagtcgatata

SEQ ID NO: 306771 - DNA, 30 bp, Artificial Sequence
  Synthetic oligonucleotide
ttcaagacctagactgccaagtaggatata

SEQ ID NO: 306772 - DNA, 30 bp, Artificial Sequence
  Synthetic oligonucleotide
ggtctccctatccctgggtgagtggatata

SEQ ID NO: 306773 - DNA, 30 bp, Artificial Sequence
  Synthetic oligonucleotide
gattgagagggtaggtcgggtgtggatata

SEQ ID NO: 306774 - DNA, 30 bp, Artificial Sequence
  Synthetic oligonucleotide
gcgaatcagttagtacccaagttggatata

SEQ ID NO: 306775 - DNA, 30 bp, Artificial Sequence
  Synthetic oligonucleotide
gcacagtgactcagtctgccacatgatata

SEQ ID NO: 306776 - DNA, 30 bp, Artificial Sequence
  Synthetic oligonucleotide
taatagtacagtgcgccgaaccgtgatata

SEQ ID NO: 306777 - DNA, 30 bp, Artificial Sequence
  Synthetic oligonucleotide
taaacgtgggtcgacgaacaacaatatata

SEQ ID NO: 306778 - DNA, 30 bp, Artificial Sequence
  Synthetic oligonucleotide
tactaacctacacgatttcgaacctatata

SEQ ID NO: 306779 - DNA, 30 bp, Artificial Sequence
  Synthetic oligonucleotide
atgtggacgagtatatgataactctatata

SEQ ID NO: 306780 - DNA, 30 bp, Artificial Sequence
  Synthetic oligonucleotide
cgcaaacatggagaattttatatttatata

SEQ ID NO: 306781 - DNA, 30 bp, Artificial Sequence
  Synthetic oligonucleotide
aaatcagaatgttaatgcctctaaactata

SEQ ID NO: 306782 - DNA, 30 bp, Artificial Sequence
  Synthetic oligonucleotide
tcatagtacaatcaaagatctagtactata

SEQ ID NO: 306783 - DNA, 30 bp, Artificial Sequence
  Synthetic oligonucleotide
gcgtcagagtgtgctcagtggcgacctata

SEQ ID NO: 306784 - DNA, 30 bp, Artificial Sequence
  Synthetic oligonucleotide
taccctgataaaagtacaattaaccctata

SEQ ID NO: 306785 - DNA, 30 bp, Artificial Sequence
  Synthetic oligonucleotide
ggtaatatagaactcttgagccgtcctata

SEQ ID NO: 306786 - DNA, 30 bp, Artificial Sequence
  Synthetic oligonucleotide
acatcatcctaacacctaattaaagctata

SEQ ID NO: 306787 - DNA, 30 bp, Artificial Sequence
  Synthetic oligonucleotide
ttgtagacattgtgtcactctgcagctata

SEQ ID NO: 306788 - DNA, 30 bp, Artificial Sequence
  Synthetic oligonucleotide
caaaactgcttgtggttgggcatagctata

SEQ ID NO: 306789 - DNA, 30 bp, Artificial Sequence
  Synthetic oligonucleotide
agagatccttcgcttgatcgactcgctata

SEQ ID NO: 306790 - DNA, 30 bp, Artificial Sequence
  Synthetic oligonucleotide
tatataacatttccaaagaataaggctata

SEQ ID NO: 306791 - DNA, 30 bp, Artificial Sequence
  Synthetic oligonucleotide
tgtaaaagttggctgacggtgagtgctata

SEQ ID NO: 306792 - DNA, 30 bp, Artificial Sequence
  Synthetic oligonucleotide
ctgatccggggtcgtagacttcactctata

SEQ ID NO: 306793 - DNA, 30 bp, Artificial Sequence
  Synthetic oligonucleotide
gtatgagttcgtgaaaagcagaagtctata

SEQ ID NO: 306794 - DNA, 30 bp, Artificial Sequence
  Synthetic oligonucleotide
tagcgcatgttaggtccgaatcagtctata

SEQ ID NO: 306795 - DNA, 30 bp, Artificial Sequence
  Synthetic oligonucleotide
ttgacgatattttaaggggctcagtctata

SEQ ID NO: 306796 - DNA, 30 bp, Artificial Sequence
  Synthetic oligonucleotide
cgtcttgggtcctgtttggcattgtctata

SEQ ID NO: 306797 - DNA, 30 bp, Artificial Sequence
  Synthetic oligonucleotide
gtaacatctgtactttaaacagattctata

SEQ ID NO: 306798 - DNA, 30 bp, Artificial Sequence
  Synthetic oligonucleotide
tcaactgatacgactaactcagcttctata

SEQ ID NO: 306799 - DNA, 30 bp, Artificial Sequence
  Synthetic oligonucleotide
agcgagtacccaagttgttgcggttctata

SEQ ID NO: 306800 - DNA, 30 bp, Artificial Sequence
  Synthetic oligonucleotide
actagctaaccgtcttggagtctttctata

SEQ ID NO: 306801 - DNA, 30 bp, Artificial Sequence
  Synthetic oligonucleotide
acatgctgtgtttggaagtttacaagtata

SEQ ID NO: 306802 - DNA, 40 bp, Artificial Sequence
  Synthetic oligonucleotide
aattctagtgttgttttggacaagagttgtcagaagtata

SEQ ID NO: 306803 - DNA, 30 bp, Artificial Sequence
  Synthetic oligonucleotide
gatcagttccagccactcgggagaagtata

SEQ ID NO: 306804 - DNA, 30 bp, Artificial Sequence
  Synthetic oligonucleotide
cctaagtcggtctcacagggaataagtata

SEQ ID NO: 306805 - DNA, 30 bp, Artificial Sequence
  Synthetic oligonucleotide
aatagcgagcagattaagaggcacagtata

SEQ ID NO: 306806 - DNA, 30 bp, Artificial Sequence
  Synthetic oligonucleotide
gtctcacgttagtatggtagagccagtata

SEQ ID NO: 306807 - DNA, 30 bp, Artificial Sequence
  Synthetic oligonucleotide
agtcgcacataataagagggtgggagtata

SEQ ID NO: 306808 - DNA, 30 bp, Artificial Sequence
  Synthetic oligonucleotide
ggtattagagattttaggataaatagtata

SEQ ID NO: 306809 - DNA, 30 bp, Artificial Sequence
  Synthetic oligonucleotide
ggatgactctgtggagttgacggtagtata

SEQ ID NO: 306810 - DNA, 30 bp, Artificial Sequence
  Synthetic oligonucleotide
tagatctcaaaaaggaccccctgtagtata

SEQ ID NO: 306811 - DNA, 30 bp, Artificial Sequence
  Synthetic oligonucleotide
tgatatggacgtttatcaacgcttagtata

SEQ ID NO: 306812 - DNA, 30 bp, Artificial Sequence
  Synthetic oligonucleotide
gcgctatactctctgtgatcatttagtata

SEQ ID NO: 306813 - DNA, 30 bp, Artificial Sequence
  Synthetic oligonucleotide
atcctatcttatatacattactttagtata

SEQ ID NO: 306814 - DNA, 30 bp, Artificial Sequence
  Synthetic oligonucleotide
agaagataacccttgcctgagtcacgtata

SEQ ID NO: 306815 - DNA, 30 bp, Artificial Sequence
  Synthetic oligonucleotide
gcagccgccaggtcaccatagatacgtata

SEQ ID NO: 306816 - DNA, 30 bp, Artificial Sequence
  Synthetic oligonucleotide
gcccgttcagatgtaaaaattccaggtata

SEQ ID NO: 306817 - DNA, 30 bp, Artificial Sequence
  Synthetic oligonucleotide
gtaggcggtccgtagcttacgttaggtata

SEQ ID NO: 306818 - DNA, 30 bp, Artificial Sequence
  Synthetic oligonucleotide
aactttacacctgaactattccccggtata

SEQ ID NO: 306819 - DNA, 30 bp, Artificial Sequence
  Synthetic oligonucleotide
caatctacagtcgtttcattgatcggtata

SEQ ID NO: 306820 - DNA, 30 bp, Artificial Sequence
  Synthetic oligonucleotide
agggtaccagatggtctcccgaagggtata

SEQ ID NO: 306821 - DNA, 30 bp, Artificial Sequence
  Synthetic oligonucleotide
agaaagcgtggatgagtcaaagtgggtata

SEQ ID NO: 306822 - DNA, 30 bp, Artificial Sequence
  Synthetic oligonucleotide
gtactattatataacgagaccaatggtata

SEQ ID NO: 306823 - DNA, 30 bp, Artificial Sequence
  Synthetic oligonucleotide
caccaagatggtcatgtcggggcctgtata

SEQ ID NO: 306824 - DNA, 30 bp, Artificial Sequence
  Synthetic oligonucleotide
gcgatgctttcgtgctgaaattgctgtata

SEQ ID NO: 306825 - DNA, 30 bp, Artificial Sequence
  Synthetic oligonucleotide
gaagcctgggattgtcggcaattctgtata

SEQ ID NO: 306826 - DNA, 30 bp, Artificial Sequence
  Synthetic oligonucleotide
ggggcataaattttggaaggacattgtata

SEQ ID NO: 306827 - DNA, 30 bp, Artificial Sequence
  Synthetic oligonucleotide
atttaggcgattataatgcatctttgtata

SEQ ID NO: 306828 - DNA, 30 bp, Artificial Sequence
  Synthetic oligonucleotide
ttagcaagccttacactattgttaattata

SEQ ID NO: 306829 - DNA, 30 bp, Artificial Sequence
  Synthetic oligonucleotide
ctggtgatacagtgacgccccaccattata

SEQ ID NO: 306830 - DNA, 30 bp, Artificial Sequence
  Synthetic oligonucleotide
cgagatctagtttacaatctggtcattata

SEQ ID NO: 306831 - DNA, 30 bp, Artificial Sequence
  Synthetic oligonucleotide
gatctagtgtgtgatctacgttagattata

SEQ ID NO: 306832 - DNA, 30 bp, Artificial Sequence
  Synthetic oligonucleotide
acagcaggggttcacatttaccctattata

SEQ ID NO: 306833 - DNA, 30 bp, Artificial Sequence
  Synthetic oligonucleotide
gctggcgggacatttttagtggctattata

SEQ ID NO: 306834 - DNA, 30 bp, Artificial Sequence
  Synthetic oligonucleotide
aagttaacagcatttgattttcttattata

SEQ ID NO: 306835 - DNA, 31 bp, Artificial Sequence
  Synthetic oligonucleotide
cagaaaccaagagtataaggtttaacttata

SEQ ID NO: 306836 - DNA, 30 bp, Artificial Sequence
  Synthetic oligonucleotide
gtgcacgtaacggtgtctcaacgccttata

SEQ ID NO: 306837 - DNA, 30 bp, Artificial Sequence
  Synthetic oligonucleotide
cttttcgtaatctgcccaaggttccttata

SEQ ID NO: 306838 - DNA, 30 bp, Artificial Sequence
  Synthetic oligonucleotide
ttagcgagtgcactagaattccagcttata

SEQ ID NO: 306839 - DNA, 30 bp, Artificial Sequence
  Synthetic oligonucleotide
ttacgaactgactttacccatgcgcttata

SEQ ID NO: 306840 - DNA, 30 bp, Artificial Sequence
  Synthetic oligonucleotide
agctgtttgatagatggtcatgcgcttata

SEQ ID NO: 306841 - DNA, 30 bp, Artificial Sequence
  Synthetic oligonucleotide
aactgcgtgggatccgtgactaggcttata

SEQ ID NO: 306842 - DNA, 30 bp, Artificial Sequence
  Synthetic oligonucleotide
atgagcattggtagtcaggatcatcttata

SEQ ID NO: 306843 - DNA, 30 bp, Artificial Sequence
  Synthetic oligonucleotide
cccttatgaatgttaatcatggctcttata

SEQ ID NO: 306844 - DNA, 30 bp, Artificial Sequence
  Synthetic oligonucleotide
aagaagtcacgccgatctcgataagttata

SEQ ID NO: 306845 - DNA, 30 bp, Artificial Sequence
  Synthetic oligonucleotide
agccacgtgcagtatgcagaaacagttata

SEQ ID NO: 306846 - DNA, 30 bp, Artificial Sequence
  Synthetic oligonucleotide
acattacggtgcccagacgaaacagttata

SEQ ID NO: 306847 - DNA, 30 bp, Artificial Sequence
  Synthetic oligonucleotide
tcccacaagctaagttagaaaggcgttata

SEQ ID NO: 306848 - DNA, 30 bp, Artificial Sequence
  Synthetic oligonucleotide
attcgtgtgtggagctagaagaaggttata

SEQ ID NO: 306849 - DNA, 30 bp, Artificial Sequence
  Synthetic oligonucleotide
acactttatgtggtacgcggttaggttata

SEQ ID NO: 306850 - DNA, 30 bp, Artificial Sequence
  Synthetic oligonucleotide
acggtttaacaaatgaatgcaacggttata

SEQ ID NO: 306851 - DNA, 30 bp, Artificial Sequence
  Synthetic oligonucleotide
gaaggaaacactgactgtgtcacggttata

SEQ ID NO: 306852 - DNA, 30 bp, Artificial Sequence
  Synthetic oligonucleotide
actatgcctgcactcagagttagggttata

SEQ ID NO: 306853 - DNA, 30 bp, Artificial Sequence
  Synthetic oligonucleotide
tggtaatcgaccaaaacagcgttggttata

SEQ ID NO: 306854 - DNA, 30 bp, Artificial Sequence
  Synthetic oligonucleotide
agcacggctgagggttccggccatgttata

SEQ ID NO: 306855 - DNA, 30 bp, Artificial Sequence
  Synthetic oligonucleotide
ctctgtatcaataccatagggcatgttata

SEQ ID NO: 306856 - DNA, 30 bp, Artificial Sequence
  Synthetic oligonucleotide
tctataaaagaacaagtgtcctatgttata

SEQ ID NO: 306857 - DNA, 30 bp, Artificial Sequence
  Synthetic oligonucleotide
ggttcttcacaattgatccagtgtgttata

SEQ ID NO: 306858 - DNA, 30 bp, Artificial Sequence
  Synthetic oligonucleotide
caccatcgtgttcagttattagttgttata

SEQ ID NO: 306859 - DNA, 30 bp, Artificial Sequence
  Synthetic oligonucleotide
cgttaacttgacaggtcgacgggatttata

SEQ ID NO: 306860 - DNA, 30 bp, Artificial Sequence
  Synthetic oligonucleotide
agtgcttattgggatgagtgaacctttata

SEQ ID NO: 306861 - DNA, 30 bp, Artificial Sequence
  Synthetic oligonucleotide
ggggttatagggagttcttttaggtttata

SEQ ID NO: 306862 - DNA, 31 bp, Artificial Sequence
  Synthetic oligonucleotide
atcgccgctgtaggtcggactggaaaaacta

SEQ ID NO: 306863 - DNA, 30 bp, Artificial Sequence
  Synthetic oligonucleotide
ggtgcaagccagagcttcttttaaaaacta

SEQ ID NO: 306864 - DNA, 30 bp, Artificial Sequence
  Synthetic oligonucleotide
ctgcgatggtcaaccctgtttgcaaaacta

SEQ ID NO: 306865 - DNA, 30 bp, Artificial Sequence
  Synthetic oligonucleotide
ttaatcctgtcgggccggaatcagaaacta

SEQ ID NO: 306866 - DNA, 30 bp, Artificial Sequence
  Synthetic oligonucleotide
tgaccaaatcttacgatcaattcgaaacta

SEQ ID NO: 306867 - DNA, 30 bp, Artificial Sequence
  Synthetic oligonucleotide
ctaacaatgtagtgatagggtactaaacta

SEQ ID NO: 306868 - DNA, 30 bp, Artificial Sequence
  Synthetic oligonucleotide
taaataccgtctttcgcaaatcctaaacta

SEQ ID NO: 306869 - DNA, 30 bp, Artificial Sequence
  Synthetic oligonucleotide
tctggttccaatggggttggttaccaacta

SEQ ID NO: 306870 - DNA, 30 bp, Artificial Sequence
  Synthetic oligonucleotide
cctcaacactgaagctcttgcatgcaacta

SEQ ID NO: 306871 - DNA, 30 bp, Artificial Sequence
  Synthetic oligonucleotide
ctgttcggccggtttctgaaacgtcaacta

SEQ ID NO: 306872 - DNA, 30 bp, Artificial Sequence
  Synthetic oligonucleotide
aaggtcagttttgatagagcgcttcaacta

SEQ ID NO: 306873 - DNA, 30 bp, Artificial Sequence
  Synthetic oligonucleotide
gtaaattgcgcggcctaaaaccaagaacta

SEQ ID NO: 306874 - DNA, 30 bp, Artificial Sequence
  Synthetic oligonucleotide
gcacacataaatttaggactgaacgaacta

SEQ ID NO: 306875 - DNA, 30 bp, Artificial Sequence
  Synthetic oligonucleotide
ctataggaattgcttcagatcaccgaacta

SEQ ID NO: 306876 - DNA, 30 bp, Artificial Sequence
  Synthetic oligonucleotide
ttgacccgctttatagcaactaccgaacta

SEQ ID NO: 306877 - DNA, 30 bp, Artificial Sequence
  Synthetic oligonucleotide
aaatatggaggacgaagtgtactcgaacta

SEQ ID NO: 306878 - DNA, 30 bp, Artificial Sequence
  Synthetic oligonucleotide
ctcccgtccccggccatggtgtgtgaacta

SEQ ID NO: 306879 - DNA, 30 bp, Artificial Sequence
  Synthetic oligonucleotide
gatggttaggcgtgaaggttttttgaacta

SEQ ID NO: 306880 - DNA, 30 bp, Artificial Sequence
  Synthetic oligonucleotide
cgatcctagccccaggaagcacaataacta

SEQ ID NO: 306881 - DNA, 30 bp, Artificial Sequence
  Synthetic oligonucleotide
tcttgcatacagggatatcagttataacta

SEQ ID NO: 306882 - DNA, 30 bp, Artificial Sequence
  Synthetic oligonucleotide
agccgagctatataggtccgtaactaacta

SEQ ID NO: 306883 - DNA, 30 bp, Artificial Sequence
  Synthetic oligonucleotide
atacttgtgtaaaggtgccaggcctaacta

SEQ ID NO: 306884 - DNA, 30 bp, Artificial Sequence
  Synthetic oligonucleotide
gagaattttgaagagatccgtgcgtaacta

SEQ ID NO: 306885 - DNA, 30 bp, Artificial Sequence
  Synthetic oligonucleotide
ttggggattttcctatggcgggtgtaacta

SEQ ID NO: 306886 - DNA, 30 bp, Artificial Sequence
  Synthetic oligonucleotide
gatgctgaaacctgagcaagggattaacta

SEQ ID NO: 306887 - DNA, 30 bp, Artificial Sequence
  Synthetic oligonucleotide
agaacgcggatagacaagcccgcaacacta

SEQ ID NO: 306888 - DNA, 30 bp, Artificial Sequence
  Synthetic oligonucleotide
ataaaggaggtgtactgatattcaacacta

SEQ ID NO: 306889 - DNA, 30 bp, Artificial Sequence
  Synthetic oligonucleotide
tggtggcagtatcgaaaggctggaacacta

SEQ ID NO: 306890 - DNA, 30 bp, Artificial Sequence
  Synthetic oligonucleotide
cgctgaccgtttcacggtacgaccacacta

SEQ ID NO: 306891 - DNA, 30 bp, Artificial Sequence
  Synthetic oligonucleotide
aacaattggatacagatcactgccacacta

SEQ ID NO: 306892 - DNA, 30 bp, Artificial Sequence
  Synthetic oligonucleotide
tcttccacgtgagcaccaattatcacacta

SEQ ID NO: 306893 - DNA, 30 bp, Artificial Sequence
  Synthetic oligonucleotide
aaggacactcaaagtcccttaaagacacta

SEQ ID NO: 306894 - DNA, 30 bp, Artificial Sequence
  Synthetic oligonucleotide
atattgggtgacagttatgtgcagacacta

SEQ ID NO: 306895 - DNA, 30 bp, Artificial Sequence
  Synthetic oligonucleotide
cggacggaggaaaatggcaaatagacacta

SEQ ID NO: 306896 - DNA, 30 bp, Artificial Sequence
  Synthetic oligonucleotide
ttcattgtagtactgagagcgtatacacta

SEQ ID NO: 306897 - DNA, 30 bp, Artificial Sequence
  Synthetic oligonucleotide
ctgattaaaaatgttagtatccctacacta

SEQ ID NO: 306898 - DNA, 30 bp, Artificial Sequence
  Synthetic oligonucleotide
gttaatgcctgaccggtcggcggaccacta

SEQ ID NO: 306899 - DNA, 30 bp, Artificial Sequence
  Synthetic oligonucleotide
tcgacgtggtttgcggccgcatagccacta

SEQ ID NO: 306900 - DNA, 30 bp, Artificial Sequence
  Synthetic oligonucleotide
gaataacaaaagtaatcgacaatgccacta

SEQ ID NO: 306901 - DNA, 30 bp, Artificial Sequence
  Synthetic oligonucleotide
ggccttgcgccgaggagcggtgatccacta

SEQ ID NO: 306902 - DNA, 30 bp, Artificial Sequence
  Synthetic oligonucleotide
accgataatctagatcaaattcgtccacta

SEQ ID NO: 306903 - DNA, 30 bp, Artificial Sequence
  Synthetic oligonucleotide
ggctacctatataagatataggaagcacta

SEQ ID NO: 306904 - DNA, 30 bp, Artificial Sequence
  Synthetic oligonucleotide
agttctccaccaatatcgccttgagcacta

SEQ ID NO: 306905 - DNA, 30 bp, Artificial Sequence
  Synthetic oligonucleotide
ttgacatatattgcgtctcactcggcacta

SEQ ID NO: 306906 - DNA, 30 bp, Artificial Sequence
  Synthetic oligonucleotide
atgtctgcgtgaacctgccaactggcacta

SEQ ID NO: 306907 - DNA, 30 bp, Artificial Sequence
  Synthetic oligonucleotide
attggggcaagggccagggctcatgcacta

SEQ ID NO: 306908 - DNA, 30 bp, Artificial Sequence
  Synthetic oligonucleotide
agttcagaggcggttaacctctctgcacta

SEQ ID NO: 306909 - DNA, 30 bp, Artificial Sequence
  Synthetic oligonucleotide
cagagatttcaggcagacccgaaatcacta

SEQ ID NO: 306910 - DNA, 30 bp, Artificial Sequence
  Synthetic oligonucleotide
cgtctgcacgtcttgggcagagaatcacta

SEQ ID NO: 306911 - DNA, 30 bp, Artificial Sequence
  Synthetic oligonucleotide
gggcagcccttactgatattctgatcacta

SEQ ID NO: 306912 - DNA, 30 bp, Artificial Sequence
  Synthetic oligonucleotide
cgtaaataggtctgaagcgagacctcacta

SEQ ID NO: 306913 - DNA, 30 bp, Artificial Sequence
  Synthetic oligonucleotide
taaacttatgggtcaaccaccctgtcacta

SEQ ID NO: 306914 - DNA, 30 bp, Artificial Sequence
  Synthetic oligonucleotide
tgcttttatggaaccacggtagattcacta

SEQ ID NO: 306915 - DNA, 30 bp, Artificial Sequence
  Synthetic oligonucleotide
ccgaaacgacgtccacatttagtttcacta

SEQ ID NO: 306916 - DNA, 30 bp, Artificial Sequence
  Synthetic oligonucleotide
tttggcatgaggggcgcaaatgagagacta

SEQ ID NO: 306917 - DNA, 30 bp, Artificial Sequence
  Synthetic oligonucleotide
caaaatgttttaagttcgtgaagacgacta

SEQ ID NO: 306918 - DNA, 30 bp, Artificial Sequence
  Synthetic oligonucleotide
tccccacactcgccgccactccgacgacta

SEQ ID NO: 306919 - DNA, 30 bp, Artificial Sequence
  Synthetic oligonucleotide
atacggtctccgcatccagcgccgcgacta

SEQ ID NO: 306920 - DNA, 30 bp, Artificial Sequence
  Synthetic oligonucleotide
cagtaagtcccgggccgaccaaatcgacta

SEQ ID NO: 306921 - DNA, 30 bp, Artificial Sequence
  Synthetic oligonucleotide
cattatgccgtgactcgctaaataggacta

SEQ ID NO: 306922 - DNA, 30 bp, Artificial Sequence
  Synthetic oligonucleotide
gcataccgtaactccatagaacatggacta

SEQ ID NO: 306923 - DNA, 30 bp, Artificial Sequence
  Synthetic oligonucleotide
ttatgcggtctggctaactgagatggacta

SEQ ID NO: 306924 - DNA, 30 bp, Artificial Sequence
  Synthetic oligonucleotide
tcatccccagtccgtcagtgttctggacta

SEQ ID NO: 306925 - DNA, 30 bp, Artificial Sequence
  Synthetic oligonucleotide
cgtggaaggcttgtcctgccaggatgacta

SEQ ID NO: 306926 - DNA, 30 bp, Artificial Sequence
  Synthetic oligonucleotide
gtaatcgtcaccgagattccgctatgacta

SEQ ID NO: 306927 - DNA, 30 bp, Artificial Sequence
  Synthetic oligonucleotide
ccccccggctataccccgcgggactgacta

SEQ ID NO: 306928 - DNA, 30 bp, Artificial Sequence
  Synthetic oligonucleotide
agtgtttcgcttatgtacggatactgacta

SEQ ID NO: 306929 - DNA, 30 bp, Artificial Sequence
  Synthetic oligonucleotide
actttgcccaatccatcggcacgctgacta

SEQ ID NO: 306930 - DNA, 30 bp, Artificial Sequence
  Synthetic oligonucleotide
aaagattccagtaacccaaacttgtgacta

SEQ ID NO: 306931 - DNA, 30 bp, Artificial Sequence
  Synthetic oligonucleotide
tcacaccaggctagtggagctccttgacta

SEQ ID NO: 306932 - DNA, 30 bp, Artificial Sequence
  Synthetic oligonucleotide
caaatggcaacacgggaatgacaaatacta

SEQ ID NO: 306933 - DNA, 30 bp, Artificial Sequence
  Synthetic oligonucleotide
gcttgacaaggaagcgtaggtgaaatacta

SEQ ID NO: 306934 - DNA, 30 bp, Artificial Sequence
  Synthetic oligonucleotide
ttgggaatttcgaaggttctatgaatacta

SEQ ID NO: 306935 - DNA, 30 bp, Artificial Sequence
  Synthetic oligonucleotide
gctgccaagaactagcggcaggtaatacta

SEQ ID NO: 306936 - DNA, 30 bp, Artificial Sequence
  Synthetic oligonucleotide
ggagattaaaacgtaggacatagcatacta

SEQ ID NO: 306937 - DNA, 30 bp, Artificial Sequence
  Synthetic oligonucleotide
aaatgatatacggtagattcgggcatacta

SEQ ID NO: 306938 - DNA, 30 bp, Artificial Sequence
  Synthetic oligonucleotide
gtagcgttatgcgcttcacaacagatacta

SEQ ID NO: 306939 - DNA, 30 bp, Artificial Sequence
  Synthetic oligonucleotide
cgttcgtcttcagtccatacggagatacta

SEQ ID NO: 306940 - DNA, 30 bp, Artificial Sequence
  Synthetic oligonucleotide
ccgtcgttgcgtggtacacaacatatacta

SEQ ID NO: 306941 - DNA, 30 bp, Artificial Sequence
  Synthetic oligonucleotide
catgtcgcgtgcgaggagtttgttatacta

SEQ ID NO: 306942 - DNA, 30 bp, Artificial Sequence
  Synthetic oligonucleotide
agcgaattaaccttaaccctcgaagtacta

SEQ ID NO: 306943 - DNA, 30 bp, Artificial Sequence
  Synthetic oligonucleotide
taggatataaagtgttttactctagtacta

SEQ ID NO: 306944 - DNA, 30 bp, Artificial Sequence
  Synthetic oligonucleotide
cggcgtgtaccgatgatgcgcacattacta

SEQ ID NO: 306945 - DNA, 30 bp, Artificial Sequence
  Synthetic oligonucleotide
gactgatagaaaaagagcgtgggattacta

SEQ ID NO: 306946 - DNA, 30 bp, Artificial Sequence
  Synthetic oligonucleotide
ggacaatgaagtttagatcggagcttacta

SEQ ID NO: 306947 - DNA, 30 bp, Artificial Sequence
  Synthetic oligonucleotide
gccgaggagtggcgctcaagaggcttacta

SEQ ID NO: 306948 - DNA, 30 bp, Artificial Sequence
  Synthetic oligonucleotide
tcaatcctactaggtgcaaagaggttacta

SEQ ID NO: 306949 - DNA, 30 bp, Artificial Sequence
  Synthetic oligonucleotide
ctggtagatgcccagaatgaagatttacta

SEQ ID NO: 306950 - DNA, 30 bp, Artificial Sequence
  Synthetic oligonucleotide
accagcgccaaatctacaggtgctttacta

SEQ ID NO: 306951 - DNA, 30 bp, Artificial Sequence
  Synthetic oligonucleotide
ggcgagggtgtaaccgcattttctttacta

SEQ ID NO: 306952 - DNA, 30 bp, Artificial Sequence
  Synthetic oligonucleotide
gtctagaagtcatagcaagcacgtttacta

SEQ ID NO: 306953 - DNA, 30 bp, Artificial Sequence
  Synthetic oligonucleotide
gccgataggagcttattagatccgaaccta

SEQ ID NO: 306954 - DNA, 30 bp, Artificial Sequence
  Synthetic oligonucleotide
agcgggaactcttgtggcttaaataaccta

SEQ ID NO: 306955 - DNA, 30 bp, Artificial Sequence
  Synthetic oligonucleotide
gcaaagaacaggcaacagaccgttaaccta

SEQ ID NO: 306956 - DNA, 30 bp, Artificial Sequence
  Synthetic oligonucleotide
cgccatgtagtcggtttggttgttaaccta

SEQ ID NO: 306957 - DNA, 30 bp, Artificial Sequence
  Synthetic oligonucleotide
cagcggcaacttctcgttgggctccaccta

SEQ ID NO: 306958 - DNA, 30 bp, Artificial Sequence
  Synthetic oligonucleotide
cgggtttaatcgtcgacaaagcagcaccta

SEQ ID NO: 306959 - DNA, 30 bp, Artificial Sequence
  Synthetic oligonucleotide
attgagaaaagtaatttgtatcctcaccta

SEQ ID NO: 306960 - DNA, 30 bp, Artificial Sequence
  Synthetic oligonucleotide
tgtgtgcaacatcgtagatgccaagaccta

SEQ ID NO: 306961 - DNA, 30 bp, Artificial Sequence
  Synthetic oligonucleotide
gcatagtaggcactgcccgagctcgaccta

SEQ ID NO: 306962 - DNA, 30 bp, Artificial Sequence
  Synthetic oligonucleotide
cgatcaaagtaggtggaagtcccggaccta

SEQ ID NO: 306963 - DNA, 30 bp, Artificial Sequence
  Synthetic oligonucleotide
gacaagctggtacgtaggaacagggaccta

SEQ ID NO: 306964 - DNA, 30 bp, Artificial Sequence
  Synthetic oligonucleotide
taaatcttggtgatggtcgttggtgaccta

SEQ ID NO: 306965 - DNA, 30 bp, Artificial Sequence
  Synthetic oligonucleotide
actattccccaagtagaattgtcctaccta

SEQ ID NO: 306966 - DNA, 30 bp, Artificial Sequence
  Synthetic oligonucleotide
aggcacggggccgtcattaagatctaccta

SEQ ID NO: 306967 - DNA, 30 bp, Artificial Sequence
  Synthetic oligonucleotide
agttagtagaaggccgacgaagtgtaccta

SEQ ID NO: 306968 - DNA, 30 bp, Artificial Sequence
  Synthetic oligonucleotide
ccctagggtaggtagaaacgcctttaccta

SEQ ID NO: 306969 - DNA, 30 bp, Artificial Sequence
  Synthetic oligonucleotide
tatcagcgagacatatgcgaggaaacccta

SEQ ID NO: 306970 - DNA, 30 bp, Artificial Sequence
  Synthetic oligonucleotide
gcacgccacttgcagactctgcacacccta

SEQ ID NO: 306971 - DNA, 30 bp, Artificial Sequence
  Synthetic oligonucleotide
tacccgtgcagatatgatacctagacccta

SEQ ID NO: 306972 - DNA, 30 bp, Artificial Sequence
  Synthetic oligonucleotide
ggtagtcacttggtcactgtatcgacccta

SEQ ID NO: 306973 - DNA, 30 bp, Artificial Sequence
  Synthetic oligonucleotide
aacggagatgtacagtagcgtgatacccta

SEQ ID NO: 306974 - DNA, 30 bp, Artificial Sequence
  Synthetic oligonucleotide
atgacatatcagctgtacgtcaaaccccta

SEQ ID NO: 306975 - DNA, 30 bp, Artificial Sequence
  Synthetic oligonucleotide
atgatggttcgtggatcttggaggccccta

SEQ ID NO: 306976 - DNA, 30 bp, Artificial Sequence
  Synthetic oligonucleotide
ccagagcatttgcgttcaatctatccccta

SEQ ID NO: 306977 - DNA, 30 bp, Artificial Sequence
  Synthetic oligonucleotide
ccaacaggatgtctgtcaagtcttccccta

SEQ ID NO: 306978 - DNA, 30 bp, Artificial Sequence
  Synthetic oligonucleotide
atcctagtggaatcggctactgaagcccta

SEQ ID NO: 306979 - DNA, 30 bp, Artificial Sequence
  Synthetic oligonucleotide
ccgctaccgtctatctaattaccagcccta

SEQ ID NO: 306980 - DNA, 30 bp, Artificial Sequence
  Synthetic oligonucleotide
aacactgcgtcctcggccgactccgcccta

SEQ ID NO: 306981 - DNA, 30 bp, Artificial Sequence
  Synthetic oligonucleotide
cagagttttgataaatggtcaagcgcccta

SEQ ID NO: 306982 - DNA, 30 bp, Artificial Sequence
  Synthetic oligonucleotide
attctacgatcgtctcggtgtggcgcccta

SEQ ID NO: 306983 - DNA, 30 bp, Artificial Sequence
  Synthetic oligonucleotide
tcgtcgcattctaaccttggcctcgcccta

SEQ ID NO: 306984 - DNA, 30 bp, Artificial Sequence
  Synthetic oligonucleotide
tgagtaggtcttaagtggctcggggcccta

SEQ ID NO: 306985 - DNA, 30 bp, Artificial Sequence
  Synthetic oligonucleotide
tgtaaaggtactttcgatcactgtgcccta

SEQ ID NO: 306986 - DNA, 30 bp, Artificial Sequence
  Synthetic oligonucleotide
ttactcactgccatgggcctccaatcccta

SEQ ID NO: 306987 - DNA, 30 bp, Artificial Sequence
  Synthetic oligonucleotide
cctaggtccggttaactaacctaatcccta

SEQ ID NO: 306988 - DNA, 30 bp, Artificial Sequence
  Synthetic oligonucleotide
tttccacgggtaaggtatttcaagtcccta

SEQ ID NO: 306989 - DNA, 30 bp, Artificial Sequence
  Synthetic oligonucleotide
caaggattgataaatctactccggtcccta

SEQ ID NO: 306990 - DNA, 30 bp, Artificial Sequence
  Synthetic oligonucleotide
gtccgggcgattgctgtatggagttcccta

SEQ ID NO: 306991 - DNA, 30 bp, Artificial Sequence
  Synthetic oligonucleotide
caagatcttatagcaaaaaacctttcccta

SEQ ID NO: 306992 - DNA, 30 bp, Artificial Sequence
  Synthetic oligonucleotide
ctggcaatggaggccagcggatgaagccta

SEQ ID NO: 306993 - DNA, 30 bp, Artificial Sequence
  Synthetic oligonucleotide
tgacaatgtagggagataaagacgagccta

SEQ ID NO: 306994 - DNA, 30 bp, Artificial Sequence
  Synthetic oligonucleotide
accaggtcttatcaggccggtacgagccta

SEQ ID NO: 306995 - DNA, 30 bp, Artificial Sequence
  Synthetic oligonucleotide
cttctaacagtatttaccaataggagccta

SEQ ID NO: 306996 - DNA, 30 bp, Artificial Sequence
  Synthetic oligonucleotide
gaagaccggaaacttttctttttgagccta

SEQ ID NO: 306997 - DNA, 30 bp, Artificial Sequence
  Synthetic oligonucleotide
ggtacgctcagggctctcgggcatagccta

SEQ ID NO: 306998 - DNA, 30 bp, Artificial Sequence
  Synthetic oligonucleotide
caggcggtgttctatgccttttatagccta

SEQ ID NO: 306999 - DNA, 30 bp, Artificial Sequence
  Synthetic oligonucleotide
tattccgtggacctccgtcagggtagccta

SEQ ID NO: 307000 - DNA, 30 bp, Artificial Sequence
  Synthetic oligonucleotide
caggctattcatatataaagggttagccta

SEQ ID NO: 307001 - DNA, 30 bp, Artificial Sequence
  Synthetic oligonucleotide
gaatatcactcagtgacaatgtttagccta

SEQ ID NO: 307002 - DNA, 30 bp, Artificial Sequence
  Synthetic oligonucleotide
ataccggtataggcggatgtctaacgccta

SEQ ID NO: 307003 - DNA, 30 bp, Artificial Sequence
  Synthetic oligonucleotide
aaagaagcagcttcctaagggtcacgccta

SEQ ID NO: 307004 - DNA, 30 bp, Artificial Sequence
  Synthetic oligonucleotide
gcggtcatagggtgagcaaaacgccgccta

SEQ ID NO: 307005 - DNA, 30 bp, Artificial Sequence
  Synthetic oligonucleotide
catccgtgaccgacttggggctgccgccta

SEQ ID NO: 307006 - DNA, 30 bp, Artificial Sequence
  Synthetic oligonucleotide
attacgatgccatcctatattgtccgccta

SEQ ID NO: 307007 - DNA, 30 bp, Artificial Sequence
  Synthetic oligonucleotide
cgcgattttgcaagtactcatgcgcgccta

SEQ ID NO: 307008 - DNA, 30 bp, Artificial Sequence
  Synthetic oligonucleotide
cctcgaaaggctcttggtcgtaggcgccta

SEQ ID NO: 307009 - DNA, 30 bp, Artificial Sequence
  Synthetic oligonucleotide
ttgtctcttggcgaggcttcgttgcgccta

SEQ ID NO: 307010 - DNA, 30 bp, Artificial Sequence
  Synthetic oligonucleotide
ctaaactgctaagctacgccatccggccta

SEQ ID NO: 307011 - DNA, 30 bp, Artificial Sequence
  Synthetic oligonucleotide
gaggatcaccgtccgaccttgatcggccta

SEQ ID NO: 307012 - DNA, 30 bp, Artificial Sequence
  Synthetic oligonucleotide
atgtataggtaatcctctcgtaagggccta

SEQ ID NO: 307013 - DNA, 30 bp, Artificial Sequence
  Synthetic oligonucleotide
aatcgtcaacgcacgcgcccctagggccta

SEQ ID NO: 307014 - DNA, 30 bp, Artificial Sequence
  Synthetic oligonucleotide
ctgactacgtgtagggaggaaccgggccta

SEQ ID NO: 307015 - DNA, 30 bp, Artificial Sequence
  Synthetic oligonucleotide
tagaccggttcgaatgcagagtggggccta

SEQ ID NO: 307016 - DNA, 30 bp, Artificial Sequence
  Synthetic oligonucleotide
tagaaaagtactatcacctcccatggccta

SEQ ID NO: 307017 - DNA, 30 bp, Artificial Sequence
  Synthetic oligonucleotide
gtggaccgcactcaagcaagaattggccta

SEQ ID NO: 307018 - DNA, 30 bp, Artificial Sequence
  Synthetic oligonucleotide
ggatagagattgtgtgcatagaaatgccta

SEQ ID NO: 307019 - DNA, 30 bp, Artificial Sequence
  Synthetic oligonucleotide
gttagttccgtcggtgacagtatctgccta

SEQ ID NO: 307020 - DNA, 30 bp, Artificial Sequence
  Synthetic oligonucleotide
aacatctaggccgcttggactacgtgccta

SEQ ID NO: 307021 - DNA, 30 bp, Artificial Sequence
  Synthetic oligonucleotide
tgcttacgtacgtagtttacggcgtgccta

SEQ ID NO: 307022 - DNA, 30 bp, Artificial Sequence
  Synthetic oligonucleotide
gacatgatctgtccagtcgtattgtgccta

SEQ ID NO: 307023 - DNA, 30 bp, Artificial Sequence
  Synthetic oligonucleotide
gcgtgagggcgccattatctgaacatccta

SEQ ID NO: 307024 - DNA, 30 bp, Artificial Sequence
  Synthetic oligonucleotide
ttggtgtccagttatcttcccaggatccta

SEQ ID NO: 307025 - DNA, 30 bp, Artificial Sequence
  Synthetic oligonucleotide
tcaacatgagtttaatctggtatgatccta

SEQ ID NO: 307026 - DNA, 30 bp, Artificial Sequence
  Synthetic oligonucleotide
agaaccacgtatatttcaaggcttatccta

SEQ ID NO: 307027 - DNA, 31 bp, Artificial Sequence
  Synthetic oligonucleotide
ccttgcattgtaccggggtgcaccactccta

SEQ ID NO: 307028 - DNA, 30 bp, Artificial Sequence
  Synthetic oligonucleotide
agttgtaaaggccgtgtgtacgcgctccta

SEQ ID NO: 307029 - DNA, 30 bp, Artificial Sequence
  Synthetic oligonucleotide
gtgggtgatattagtcgacttatagtccta

SEQ ID NO: 307030 - DNA, 30 bp, Artificial Sequence
  Synthetic oligonucleotide
cattgttaacaatggacaccctgcgtccta

SEQ ID NO: 307031 - DNA, 30 bp, Artificial Sequence
  Synthetic oligonucleotide
ggaccacattaccggacgtaaacggtccta

SEQ ID NO: 307032 - DNA, 30 bp, Artificial Sequence
  Synthetic oligonucleotide
agtaaccgcgcgggatcaattccggtccta

SEQ ID NO: 307033 - DNA, 30 bp, Artificial Sequence
  Synthetic oligonucleotide
tttggggtaactctcgcactggaattccta

SEQ ID NO: 307034 - DNA, 30 bp, Artificial Sequence
  Synthetic oligonucleotide
cagggtgatatgcgaccgtcaaggttccta

SEQ ID NO: 307035 - DNA, 30 bp, Artificial Sequence
  Synthetic oligonucleotide
aacggggattgccccagtccggatttccta

SEQ ID NO: 307036 - DNA, 30 bp, Artificial Sequence
  Synthetic oligonucleotide
ctgtctctgtatctttcggtatttttccta

SEQ ID NO: 307037 - DNA, 30 bp, Artificial Sequence
  Synthetic oligonucleotide
actccagtgccccgcacagggcaaaagcta

SEQ ID NO: 307038 - DNA, 30 bp, Artificial Sequence
  Synthetic oligonucleotide
gatacttgccgtcatatggattgaaagcta

SEQ ID NO: 307039 - DNA, 30 bp, Artificial Sequence
  Synthetic oligonucleotide
tatgaatagggagcctgttccgtaaagcta

SEQ ID NO: 307040 - DNA, 30 bp, Artificial Sequence
  Synthetic oligonucleotide
atgcctagctacgtgcaagcaatcaagcta

SEQ ID NO: 307041 - DNA, 30 bp, Artificial Sequence
  Synthetic oligonucleotide
ttacatgcagttgccgtgaacatgaagcta

SEQ ID NO: 307042 - DNA, 30 bp, Artificial Sequence
  Synthetic oligonucleotide
tccgtacgtcaaccgcaatacgtgaagcta

SEQ ID NO: 307043 - DNA, 30 bp, Artificial Sequence
  Synthetic oligonucleotide
cgttttttaaagagtgattaacaacagcta

SEQ ID NO: 307044 - DNA, 30 bp, Artificial Sequence
  Synthetic oligonucleotide
gcagtactttagcgtgctggtgtacagcta

SEQ ID NO: 307045 - DNA, 30 bp, Artificial Sequence
  Synthetic oligonucleotide
ttcatgagagtgccattgtaaccccagcta

SEQ ID NO: 307046 - DNA, 30 bp, Artificial Sequence
  Synthetic oligonucleotide
taggtttgaatggggttattccgccagcta

SEQ ID NO: 307047 - DNA, 30 bp, Artificial Sequence
  Synthetic oligonucleotide
tgtacggtatccatggcagcaatccagcta

SEQ ID NO: 307048 - DNA, 30 bp, Artificial Sequence
  Synthetic oligonucleotide
gatagacggggaatttcacccatccagcta

SEQ ID NO: 307049 - DNA, 30 bp, Artificial Sequence
  Synthetic oligonucleotide
tactgcggacggtgctcgtagtcgcagcta

SEQ ID NO: 307050 - DNA, 30 bp, Artificial Sequence
  Synthetic oligonucleotide
caaggtcaacactagatgaatctgcagcta

SEQ ID NO: 307051 - DNA, 30 bp, Artificial Sequence
  Synthetic oligonucleotide
ggttgtggctcatgcgcgtacggtcagcta

SEQ ID NO: 307052 - DNA, 30 bp, Artificial Sequence
  Synthetic oligonucleotide
tggagcggaaaaccacgtaaataagagcta

SEQ ID NO: 307053 - DNA, 30 bp, Artificial Sequence
  Synthetic oligonucleotide
ccggtcatggtctcttcctggaacgagcta

SEQ ID NO: 307054 - DNA, 30 bp, Artificial Sequence
  Synthetic oligonucleotide
gtacctagtcaagtgcaccgcagcgagcta

SEQ ID NO: 307055 - DNA, 30 bp, Artificial Sequence
  Synthetic oligonucleotide
ttgtaagatgccgaactgcttggcgagcta

SEQ ID NO: 307056 - DNA, 30 bp, Artificial Sequence
  Synthetic oligonucleotide
ctctgacaatgtcttgcaaacggggagcta

SEQ ID NO: 307057 - DNA, 30 bp, Artificial Sequence
  Synthetic oligonucleotide
gcttgtaataccagacagtttatggagcta

SEQ ID NO: 307058 - DNA, 30 bp, Artificial Sequence
  Synthetic oligonucleotide
aacccttccgaaacactcattggatagcta

SEQ ID NO: 307059 - DNA, 30 bp, Artificial Sequence
  Synthetic oligonucleotide
ggtgcataaatcaaagattgcaactagcta

SEQ ID NO: 307060 - DNA, 30 bp, Artificial Sequence
  Synthetic oligonucleotide
ctgtgggcctgatgattagattactagcta

SEQ ID NO: 307061 - DNA, 30 bp, Artificial Sequence
  Synthetic oligonucleotide
caacggagttgcgttccttggctctagcta

SEQ ID NO: 307062 - DNA, 30 bp, Artificial Sequence
  Synthetic oligonucleotide
gtcacggttctcgtttctcgtaaaacgcta

SEQ ID NO: 307063 - DNA, 30 bp, Artificial Sequence
  Synthetic oligonucleotide
ccagacggtaagcatcgattggcaacgcta

SEQ ID NO: 307064 - DNA, 30 bp, Artificial Sequence
  Synthetic oligonucleotide
cggaatgtagattcttcattagacacgcta

SEQ ID NO: 307065 - DNA, 30 bp, Artificial Sequence
  Synthetic oligonucleotide
gtattaaccttacggtagtcatcgacgcta

SEQ ID NO: 307066 - DNA, 30 bp, Artificial Sequence
  Synthetic oligonucleotide
aggaaaaccaccgaaaagccccggacgcta

SEQ ID NO: 307067 - DNA, 30 bp, Artificial Sequence
  Synthetic oligonucleotide
acacctcggttcagatataccgggacgcta

SEQ ID NO: 307068 - DNA, 30 bp, Artificial Sequence
  Synthetic oligonucleotide
gcaagcaggatgggttgttgtgggacgcta

SEQ ID NO: 307069 - DNA, 30 bp, Artificial Sequence
  Synthetic oligonucleotide
atttattacactgttgccgtatgaccgcta

SEQ ID NO: 307070 - DNA, 30 bp, Artificial Sequence
  Synthetic oligonucleotide
caatgttctcctttagagggtcagccgcta

SEQ ID NO: 307071 - DNA, 30 bp, Artificial Sequence
  Synthetic oligonucleotide
tggatagcagttttcatttaagatccgcta

SEQ ID NO: 307072 - DNA, 30 bp, Artificial Sequence
  Synthetic oligonucleotide
cccttgttaccttcagcgctatatccgcta

SEQ ID NO: 307073 - DNA, 30 bp, Artificial Sequence
  Synthetic oligonucleotide
gccaccccggccccatgcggcttggcgcta

SEQ ID NO: 307074 - DNA, 30 bp, Artificial Sequence
  Synthetic oligonucleotide
cgaaacgagtatacattggttgatgcgcta

SEQ ID NO: 307075 - DNA, 30 bp, Artificial Sequence
  Synthetic oligonucleotide
ctgggtctggagcgagaagcgtttgcgcta

SEQ ID NO: 307076 - DNA, 30 bp, Artificial Sequence
  Synthetic oligonucleotide
accggtggggccagaacgccttgatcgcta

SEQ ID NO: 307077 - DNA, 30 bp, Artificial Sequence
  Synthetic oligonucleotide
gaagatgcacccgttaaccgtacgtcgcta

SEQ ID NO: 307078 - DNA, 30 bp, Artificial Sequence
  Synthetic oligonucleotide
aacggttcattccagctagccgcgtcgcta

SEQ ID NO: 307079 - DNA, 30 bp, Artificial Sequence
  Synthetic oligonucleotide
gcccatatactacaacgatgttaaaggcta

SEQ ID NO: 307080 - DNA, 30 bp, Artificial Sequence
  Synthetic oligonucleotide
cactcgtattaagcctcggtcctaaggcta

SEQ ID NO: 307081 - DNA, 30 bp, Artificial Sequence
  Synthetic oligonucleotide
cagcgctgtttcgacactcgtggcaggcta

SEQ ID NO: 307082 - DNA, 30 bp, Artificial Sequence
  Synthetic oligonucleotide
ggtaaaagtctagctgagttctcgaggcta

SEQ ID NO: 307083 - DNA, 30 bp, Artificial Sequence
  Synthetic oligonucleotide
tcaggtcgagtagcgcccccttcgaggcta

SEQ ID NO: 307084 - DNA, 31 bp, Artificial Sequence
  Synthetic oligonucleotide
gtttcgggcgagcgaatgcggatggaggcta

SEQ ID NO: 307085 - DNA, 30 bp, Artificial Sequence
  Synthetic oligonucleotide
tattggctcatgcttaggcctaataggcta

SEQ ID NO: 307086 - DNA, 30 bp, Artificial Sequence
  Synthetic oligonucleotide
cagtctggggtactttcccgaggtaggcta

SEQ ID NO: 307087 - DNA, 30 bp, Artificial Sequence
  Synthetic oligonucleotide
gttagtaataaataagttaccgttaggcta

SEQ ID NO: 307088 - DNA, 30 bp, Artificial Sequence
  Synthetic oligonucleotide
tggatgcgtcaaactatctctcctcggcta

SEQ ID NO: 307089 - DNA, 30 bp, Artificial Sequence
  Synthetic oligonucleotide
agggaaggtcaatttccgaaatctcggcta

SEQ ID NO: 307090 - DNA, 30 bp, Artificial Sequence
  Synthetic oligonucleotide
tcccctcggcagaagtgtctgatagggcta

SEQ ID NO: 307091 - DNA, 30 bp, Artificial Sequence
  Synthetic oligonucleotide
cggttacaggttgataagacttccgggcta

SEQ ID NO: 307092 - DNA, 30 bp, Artificial Sequence
  Synthetic oligonucleotide
ccctagaaatgactcttcatacgggggcta

SEQ ID NO: 307093 - DNA, 30 bp, Artificial Sequence
  Synthetic oligonucleotide
cgagtggtttagacccgaactatggggcta

SEQ ID NO: 307094 - DNA, 30 bp, Artificial Sequence
  Synthetic oligonucleotide
cttgatccagcccatagttggggtgggcta

SEQ ID NO: 307095 - DNA, 30 bp, Artificial Sequence
  Synthetic oligonucleotide
gaccaaagatgagcggcatgctgtgggcta

SEQ ID NO: 307096 - DNA, 30 bp, Artificial Sequence
  Synthetic oligonucleotide
taaacctaccccccgttttccggatggcta

SEQ ID NO: 307097 - DNA, 30 bp, Artificial Sequence
  Synthetic oligonucleotide
aactaacgattttgggagctgtgatggcta

SEQ ID NO: 307098 - DNA, 30 bp, Artificial Sequence
  Synthetic oligonucleotide
ccacgaaagacacagagaggaggctggcta

SEQ ID NO: 307099 - DNA, 30 bp, Artificial Sequence
  Synthetic oligonucleotide
tctgtcaggggtgtactccccggctggcta

SEQ ID NO: 307100 - DNA, 30 bp, Artificial Sequence
  Synthetic oligonucleotide
tcgccaataatgagaatataactgtggcta

SEQ ID NO: 307101 - DNA, 30 bp, Artificial Sequence
  Synthetic oligonucleotide
cctatggctcttcgttttgccccttggcta

SEQ ID NO: 307102 - DNA, 30 bp, Artificial Sequence
  Synthetic oligonucleotide
tctaacgcaatatagtgacaccgaatgcta

SEQ ID NO: 307103 - DNA, 30 bp, Artificial Sequence
  Synthetic oligonucleotide
cgcgtgtataattgatttgcatgaatgcta

SEQ ID NO: 307104 - DNA, 30 bp, Artificial Sequence
  Synthetic oligonucleotide
cagtcaatcaattgtcctatctacatgcta

SEQ ID NO: 307105 - DNA, 30 bp, Artificial Sequence
  Synthetic oligonucleotide
acatgtggctaatcctccaagggcatgcta

SEQ ID NO: 307106 - DNA, 30 bp, Artificial Sequence
  Synthetic oligonucleotide
ctctcaggcgaaaggtagtttctactgcta

SEQ ID NO: 307107 - DNA, 30 bp, Artificial Sequence
  Synthetic oligonucleotide
caggttgatagtgtacaatctgtactgcta

SEQ ID NO: 307108 - DNA, 30 bp, Artificial Sequence
  Synthetic oligonucleotide
gtaatggataaaagtacaatagagctgcta

SEQ ID NO: 307109 - DNA, 30 bp, Artificial Sequence
  Synthetic oligonucleotide
acaactagcgagtcgggatataatctgcta

SEQ ID NO: 307110 - DNA, 30 bp, Artificial Sequence
  Synthetic oligonucleotide
agtcatgggtgtgtagatattaatctgcta

SEQ ID NO: 307111 - DNA, 30 bp, Artificial Sequence
  Synthetic oligonucleotide
gaataggacaggagtcgattggatctgcta

SEQ ID NO: 307112 - DNA, 31 bp, Artificial Sequence
  Synthetic oligonucleotide
tattgtccaccgataaaaacatactctgcta

SEQ ID NO: 307113 - DNA, 30 bp, Artificial Sequence
  Synthetic oligonucleotide
tacaaaatatgccgtatgggcgctctgcta

SEQ ID NO: 307114 - DNA, 30 bp, Artificial Sequence
  Synthetic oligonucleotide
agattaattctcgtttaccttattctgcta

SEQ ID NO: 307115 - DNA, 30 bp, Artificial Sequence
  Synthetic oligonucleotide
tatccccatctagccatctgatttctgcta

SEQ ID NO: 307116 - DNA, 30 bp, Artificial Sequence
  Synthetic oligonucleotide
gttaaaataacgtggtgttaagacgtgcta

SEQ ID NO: 307117 - DNA, 30 bp, Artificial Sequence
  Synthetic oligonucleotide
ccggactcggggataggcgtgagcgtgcta

SEQ ID NO: 307118 - DNA, 30 bp, Artificial Sequence
  Synthetic oligonucleotide
gtgcctacttaaagtacatcacttgtgcta

SEQ ID NO: 307119 - DNA, 30 bp, Artificial Sequence
  Synthetic oligonucleotide
gaagtaattcaatccgaacgggttgtgcta

SEQ ID NO: 307120 - DNA, 30 bp, Artificial Sequence
  Synthetic oligonucleotide
cggtcatcatattatttgctataattgcta

SEQ ID NO: 307121 - DNA, 30 bp, Artificial Sequence
  Synthetic oligonucleotide
cataagtgtagtggttgcaatacattgcta

SEQ ID NO: 307122 - DNA, 30 bp, Artificial Sequence
  Synthetic oligonucleotide
acatagtgttctgaggttataccattgcta

SEQ ID NO: 307123 - DNA, 30 bp, Artificial Sequence
  Synthetic oligonucleotide
atgcatggcaatatgttgactttcttgcta

SEQ ID NO: 307124 - DNA, 30 bp, Artificial Sequence
  Synthetic oligonucleotide
taagcaatatgggaagaagtgtatttgcta

SEQ ID NO: 307125 - DNA, 30 bp, Artificial Sequence
  Synthetic oligonucleotide
tagagtcaggttcggacccggtctttgcta

SEQ ID NO: 307126 - DNA, 30 bp, Artificial Sequence
  Synthetic oligonucleotide
gaaagtcccaccctgagtcaaggaaatcta

SEQ ID NO: 307127 - DNA, 30 bp, Artificial Sequence
  Synthetic oligonucleotide
gaggataagggcaggacggcacacaatcta

SEQ ID NO: 307128 - DNA, 30 bp, Artificial Sequence
  Synthetic oligonucleotide
atgcttagtaagtagccagacaagaatcta

SEQ ID NO: 307129 - DNA, 30 bp, Artificial Sequence
  Synthetic oligonucleotide
aacgtatcgtcgatatcgctttagaatcta

SEQ ID NO: 307130 - DNA, 30 bp, Artificial Sequence
  Synthetic oligonucleotide
tgaaccggtcgttggagcaagtggaatcta

SEQ ID NO: 307131 - DNA, 30 bp, Artificial Sequence
  Synthetic oligonucleotide
aatggatgtgggcccgtctagaataatcta

SEQ ID NO: 307132 - DNA, 30 bp, Artificial Sequence
  Synthetic oligonucleotide
tacagacatttctggttacggcataatcta

SEQ ID NO: 307133 - DNA, 30 bp, Artificial Sequence
  Synthetic oligonucleotide
gacgcgcccaatgacgctggcgttaatcta

SEQ ID NO: 307134 - DNA, 30 bp, Artificial Sequence
  Synthetic oligonucleotide
ggttgatcgtgagttgtgcgtttacatcta

SEQ ID NO: 307135 - DNA, 30 bp, Artificial Sequence
  Synthetic oligonucleotide
ctaaggctctaacatcccgggtaccatcta

SEQ ID NO: 307136 - DNA, 29 bp, Artificial Sequence
  Synthetic oligonucleotide
catagggaacggtagttcgttcccatcta

SEQ ID NO: 307137 - DNA, 30 bp, Artificial Sequence
  Synthetic oligonucleotide
cctgtatatccgcagggccacgtccatcta

SEQ ID NO: 307138 - DNA, 30 bp, Artificial Sequence
  Synthetic oligonucleotide
aatgtgggattaggtaccgataatcatcta

SEQ ID NO: 307139 - DNA, 30 bp, Artificial Sequence
  Synthetic oligonucleotide
gtcggtaaaagtgcaacttgagatcatcta

SEQ ID NO: 307140 - DNA, 30 bp, Artificial Sequence
  Synthetic oligonucleotide
agcacttggcttatctttagctaagatcta

SEQ ID NO: 307141 - DNA, 30 bp, Artificial Sequence
  Synthetic oligonucleotide
atcgtataagtttctggcctgcgggatcta

SEQ ID NO: 307142 - DNA, 30 bp, Artificial Sequence
  Synthetic oligonucleotide
gaggggcatgatcgctatcaatatgatcta

SEQ ID NO: 307143 - DNA, 30 bp, Artificial Sequence
  Synthetic oligonucleotide
tggaattcaatattatgctcatgtgatcta

SEQ ID NO: 307144 - DNA, 30 bp, Artificial Sequence
  Synthetic oligonucleotide
gggtccaggaggaattcgcgatttgatcta

SEQ ID NO: 307145 - DNA, 30 bp, Artificial Sequence
  Synthetic oligonucleotide
tcttggacccgcgttctatgcatatatcta

SEQ ID NO: 307146 - DNA, 30 bp, Artificial Sequence
  Synthetic oligonucleotide
actcctggctacagcgttgagttatatcta

SEQ ID NO: 307147 - DNA, 30 bp, Artificial Sequence
  Synthetic oligonucleotide
ggcgggtcccacacttggacagcctatcta

SEQ ID NO: 307148 - DNA, 30 bp, Artificial Sequence
  Synthetic oligonucleotide
accttggatcgtatacccgcaggctatcta

SEQ ID NO: 307149 - DNA, 30 bp, Artificial Sequence
  Synthetic oligonucleotide
cccaccgggaataccgcaattatctatcta

SEQ ID NO: 307150 - DNA, 30 bp, Artificial Sequence
  Synthetic oligonucleotide
cgtagtcttgttgaattaggactctatcta

SEQ ID NO: 307151 - DNA, 30 bp, Artificial Sequence
  Synthetic oligonucleotide
tgcatgccgaaatcatgagacgtttatcta

SEQ ID NO: 307152 - DNA, 30 bp, Artificial Sequence
  Synthetic oligonucleotide
acacagatagggagttatttggtttatcta

SEQ ID NO: 307153 - DNA, 30 bp, Artificial Sequence
  Synthetic oligonucleotide
ttgctatgacggtaggaataaaaaactcta

SEQ ID NO: 307154 - DNA, 30 bp, Artificial Sequence
  Synthetic oligonucleotide
aataaggtgtcgtaatttaaagaaactcta

SEQ ID NO: 307155 - DNA, 30 bp, Artificial Sequence
  Synthetic oligonucleotide
aaacagcattggacaccagcggaaactcta

SEQ ID NO: 307156 - DNA, 30 bp, Artificial Sequence
  Synthetic oligonucleotide
gttcgatcttaatgatgtgatctaactcta

SEQ ID NO: 307157 - DNA, 30 bp, Artificial Sequence
  Synthetic oligonucleotide
agtggagtatcttagtccgttgctactcta

SEQ ID NO: 307158 - DNA, 30 bp, Artificial Sequence
  Synthetic oligonucleotide
ggagtgggttagtccgcgaaaagacctcta

SEQ ID NO: 307159 - DNA, 30 bp, Artificial Sequence
  Synthetic oligonucleotide
tgcaaaacaaaattctttgagttacctcta

SEQ ID NO: 307160 - DNA, 30 bp, Artificial Sequence
  Synthetic oligonucleotide
gtaatactggtatgacattaactgcctcta

SEQ ID NO: 307161 - DNA, 30 bp, Artificial Sequence
  Synthetic oligonucleotide
gcaaccctctcgtccctcttgtgtcctcta

SEQ ID NO: 307162 - DNA, 30 bp, Artificial Sequence
  Synthetic oligonucleotide
acaaactcgttatagcactcctttcctcta

SEQ ID NO: 307163 - DNA, 30 bp, Artificial Sequence
  Synthetic oligonucleotide
cggctctagtggcatacggttcaagctcta

SEQ ID NO: 307164 - DNA, 30 bp, Artificial Sequence
  Synthetic oligonucleotide
gatcgagttctaattcccttccaggctcta

SEQ ID NO: 307165 - DNA, 30 bp, Artificial Sequence
  Synthetic oligonucleotide
agcttgaatctggccgatcaacgatctcta

SEQ ID NO: 307166 - DNA, 30 bp, Artificial Sequence
  Synthetic oligonucleotide
gtgacggcgctctcggtaagcatatctcta

SEQ ID NO: 307167 - DNA, 30 bp, Artificial Sequence
  Synthetic oligonucleotide
gatttgcgtcgcgaggaacccgtgtctcta

SEQ ID NO: 307168 - DNA, 30 bp, Artificial Sequence
  Synthetic oligonucleotide
ctagcgaaggtccaatttagggcttctcta

SEQ ID NO: 307169 - DNA, 30 bp, Artificial Sequence
  Synthetic oligonucleotide
actcggtgcgcactacatattaaaagtcta

SEQ ID NO: 307170 - DNA, 30 bp, Artificial Sequence
  Synthetic oligonucleotide
cagggttccctagcagctctttcaagtcta

SEQ ID NO: 307171 - DNA, 30 bp, Artificial Sequence
  Synthetic oligonucleotide
atccgaggaaattgttggggggtcagtcta

SEQ ID NO: 307172 - DNA, 30 bp, Artificial Sequence
  Synthetic oligonucleotide
aagccggcacattcatgggaggcgagtcta

SEQ ID NO: 307173 - DNA, 30 bp, Artificial Sequence
  Synthetic oligonucleotide
gctttcatgtcggctacacgccggagtcta

SEQ ID NO: 307174 - DNA, 30 bp, Artificial Sequence
  Synthetic oligonucleotide
gcattgggctcatcatagagtgtgagtcta

SEQ ID NO: 307175 - DNA, 30 bp, Artificial Sequence
  Synthetic oligonucleotide
catttagggaccagctaaaattatagtcta

SEQ ID NO: 307176 - DNA, 30 bp, Artificial Sequence
  Synthetic oligonucleotide
tcagtagaaggaacatgataatgtagtcta

SEQ ID NO: 307177 - DNA, 30 bp, Artificial Sequence
  Synthetic oligonucleotide
agtcgtcctggtcgcgcatccattagtcta

SEQ ID NO: 307178 - DNA, 30 bp, Artificial Sequence
  Synthetic oligonucleotide
gttttctggagaaccaccgacacacgtcta

SEQ ID NO: 307179 - DNA, 30 bp, Artificial Sequence
  Synthetic oligonucleotide
gagggtcagattgccagcccgacacgtcta

SEQ ID NO: 307180 - DNA, 30 bp, Artificial Sequence
  Synthetic oligonucleotide
cctggaaattcccgcctaactacacgtcta

SEQ ID NO: 307181 - DNA, 30 bp, Artificial Sequence
  Synthetic oligonucleotide
gaagtcctttaattataccatggacgtcta

SEQ ID NO: 307182 - DNA, 30 bp, Artificial Sequence
  Synthetic oligonucleotide
acaactgtccgagcacgccttatacgtcta

SEQ ID NO: 307183 - DNA, 30 bp, Artificial Sequence
  Synthetic oligonucleotide
agcttctttcggtttagcaacaagcgtcta

SEQ ID NO: 307184 - DNA, 30 bp, Artificial Sequence
  Synthetic oligonucleotide
ataaggaacgttcatgctgcagtgcgtcta

SEQ ID NO: 307185 - DNA, 30 bp, Artificial Sequence
  Synthetic oligonucleotide
caaggcatcgattcgatctacggtcgtcta

SEQ ID NO: 307186 - DNA, 30 bp, Artificial Sequence
  Synthetic oligonucleotide
aggtctcgcgcacacccacaacgaggtcta

SEQ ID NO: 307187 - DNA, 30 bp, Artificial Sequence
  Synthetic oligonucleotide
atacgacgcacgtggtggacactaggtcta

SEQ ID NO: 307188 - DNA, 30 bp, Artificial Sequence
  Synthetic oligonucleotide
gagaagatgaacgacggcaccaacggtcta

SEQ ID NO: 307189 - DNA, 30 bp, Artificial Sequence
  Synthetic oligonucleotide
gatgagcggctttgcagcgacgccggtcta

SEQ ID NO: 307190 - DNA, 30 bp, Artificial Sequence
  Synthetic oligonucleotide
cgaaactaggaggggtcatatagcggtcta

SEQ ID NO: 307191 - DNA, 30 bp, Artificial Sequence
  Synthetic oligonucleotide
gcgctagtcgagagatattgaatcggtcta

SEQ ID NO: 307192 - DNA, 30 bp, Artificial Sequence
  Synthetic oligonucleotide
gtcattacgctctaataaccccggggtcta

SEQ ID NO: 307193 - DNA, 30 bp, Artificial Sequence
  Synthetic oligonucleotide
atttgagtagttgttcttagagtgggtcta

SEQ ID NO: 307194 - DNA, 30 bp, Artificial Sequence
  Synthetic oligonucleotide
tcaacctaacgcttgttatatcgtggtcta

SEQ ID NO: 307195 - DNA, 30 bp, Artificial Sequence
  Synthetic oligonucleotide
acaccggctaaagattagtcgtgtggtcta

SEQ ID NO: 307196 - DNA, 30 bp, Artificial Sequence
  Synthetic oligonucleotide
ctttcagaaagacgacgagcagttggtcta

SEQ ID NO: 307197 - DNA, 30 bp, Artificial Sequence
  Synthetic oligonucleotide
gaatccgggcctcaatatagaaaatgtcta

SEQ ID NO: 307198 - DNA, 30 bp, Artificial Sequence
  Synthetic oligonucleotide
gcgcaacagggatattccaggttatgtcta

SEQ ID NO: 307199 - DNA, 30 bp, Artificial Sequence
  Synthetic oligonucleotide
tgtgctccaccaccaatcttgtgctgtcta

SEQ ID NO: 307200 - DNA, 30 bp, Artificial Sequence
  Synthetic oligonucleotide
gccccctcaacacgtgaatcgtagtgtcta

SEQ ID NO: 307201 - DNA, 30 bp, Artificial Sequence
  Synthetic oligonucleotide
ctgtggccgtgcggcttcaggacttgtcta

SEQ ID NO: 307202 - DNA, 30 bp, Artificial Sequence
  Synthetic oligonucleotide
gtatatggtggtctgtttcattgaattcta

SEQ ID NO: 307203 - DNA, 30 bp, Artificial Sequence
  Synthetic oligonucleotide
ccctccagtgtcaaaggcatattaattcta

SEQ ID NO: 307204 - DNA, 30 bp, Artificial Sequence
  Synthetic oligonucleotide
gcgtggtatgcagatatcggttgtattcta

SEQ ID NO: 307205 - DNA, 30 bp, Artificial Sequence
  Synthetic oligonucleotide
atcccacgccccgagacgcataaacttcta

SEQ ID NO: 307206 - DNA, 30 bp, Artificial Sequence
  Synthetic oligonucleotide
cgaacggccattcaaatagaccaccttcta

SEQ ID NO: 307207 - DNA, 30 bp, Artificial Sequence
  Synthetic oligonucleotide
ggctgcggcgcaccgctggcgttccttcta

SEQ ID NO: 307208 - DNA, 30 bp, Artificial Sequence
  Synthetic oligonucleotide
cgcattgattttgagataacatgtcttcta

SEQ ID NO: 307209 - DNA, 30 bp, Artificial Sequence
  Synthetic oligonucleotide
gaaggcttagaaaaatgtatctaagttcta

SEQ ID NO: 307210 - DNA, 30 bp, Artificial Sequence
  Synthetic oligonucleotide
gtgggcgaaaatcccgtgtacggagttcta

SEQ ID NO: 307211 - DNA, 30 bp, Artificial Sequence
  Synthetic oligonucleotide
aactcgtataataggtcggccaacgttcta

SEQ ID NO: 307212 - DNA, 30 bp, Artificial Sequence
  Synthetic oligonucleotide
gagatacgttggattttgtcaatcgttcta

SEQ ID NO: 307213 - DNA, 30 bp, Artificial Sequence
  Synthetic oligonucleotide
taataatcatgcgtaccggttctggttcta

SEQ ID NO: 307214 - DNA, 30 bp, Artificial Sequence
  Synthetic oligonucleotide
tggcctgagtaatgcctaggcagatttcta

SEQ ID NO: 307215 - DNA, 30 bp, Artificial Sequence
  Synthetic oligonucleotide
aacctgcccgaactaaatgagcgctttcta

SEQ ID NO: 307216 - DNA, 30 bp, Artificial Sequence
  Synthetic oligonucleotide
gtgccattcaactaacagaccatttttcta

SEQ ID NO: 307217 - DNA, 30 bp, Artificial Sequence
  Synthetic oligonucleotide
gtcacagtgaaccacgcagaaggcaaagta

SEQ ID NO: 307218 - DNA, 30 bp, Artificial Sequence
  Synthetic oligonucleotide
cgttggcgtcatccggtggcggcgaaagta

SEQ ID NO: 307219 - DNA, 30 bp, Artificial Sequence
  Synthetic oligonucleotide
cataacgggcgcttgtaataaaggaaagta

SEQ ID NO: 307220 - DNA, 30 bp, Artificial Sequence
  Synthetic oligonucleotide
gcagcgaacgggttatatctagctaaagta

SEQ ID NO: 307221 - DNA, 30 bp, Artificial Sequence
  Synthetic oligonucleotide
gcagagtagcgcagtaacggcgctaaagta

SEQ ID NO: 307222 - DNA, 30 bp, Artificial Sequence
  Synthetic oligonucleotide
aaaacctaatggtggggggtgtctaaagta

SEQ ID NO: 307223 - DNA, 30 bp, Artificial Sequence
  Synthetic oligonucleotide
taatccatgagtgtttctctgacacaagta

SEQ ID NO: 307224 - DNA, 30 bp, Artificial Sequence
  Synthetic oligonucleotide
gagcgcgacaagttctatgggccccaagta

SEQ ID NO: 307225 - DNA, 30 bp, Artificial Sequence
  Synthetic oligonucleotide
accgtggtaatatgcgggattccccaagta

SEQ ID NO: 307226 - DNA, 30 bp, Artificial Sequence
  Synthetic oligonucleotide
ggtcagatcagcgaggccgggggccaagta

SEQ ID NO: 307227 - DNA, 30 bp, Artificial Sequence
  Synthetic oligonucleotide
gtataaatggagtaattaaatctccaagta

SEQ ID NO: 307228 - DNA, 30 bp, Artificial Sequence
  Synthetic oligonucleotide
cgccaccgttaatacccacggccgcaagta

SEQ ID NO: 307229 - DNA, 30 bp, Artificial Sequence
  Synthetic oligonucleotide
gttcagagaaagagcgttgggcgtcaagta

SEQ ID NO: 307230 - DNA, 31 bp, Artificial Sequence
  Synthetic oligonucleotide
gcagtgggagacacgcttggggcttcaagta

SEQ ID NO: 307231 - DNA, 30 bp, Artificial Sequence
  Synthetic oligonucleotide
gggtggggcttcatatcggaaacggaagta

SEQ ID NO: 307232 - DNA, 30 bp, Artificial Sequence
  Synthetic oligonucleotide
tcgtgttaagggcggaatccaactgaagta

SEQ ID NO: 307233 - DNA, 30 bp, Artificial Sequence
  Synthetic oligonucleotide
ggtagggagtacactggcgcgggtgaagta

SEQ ID NO: 307234 - DNA, 30 bp, Artificial Sequence
  Synthetic oligonucleotide
ggattagctcttaagtccacttgtgaagta

SEQ ID NO: 307235 - DNA, 30 bp, Artificial Sequence
  Synthetic oligonucleotide
aaactagtgcaaaagcaactgcgataagta

SEQ ID NO: 307236 - DNA, 30 bp, Artificial Sequence
  Synthetic oligonucleotide
ccgatatataatagacgcccccactaagta

SEQ ID NO: 307237 - DNA, 30 bp, Artificial Sequence
  Synthetic oligonucleotide
gaagcgcggtgtactctaattcactaagta

SEQ ID NO: 307238 - DNA, 30 bp, Artificial Sequence
  Synthetic oligonucleotide
tgcctgaagacagacaaagcattctaagta

SEQ ID NO: 307239 - DNA, 30 bp, Artificial Sequence
  Synthetic oligonucleotide
agggtgagcacccagtgcgtctattaagta

SEQ ID NO: 307240 - DNA, 30 bp, Artificial Sequence
  Synthetic oligonucleotide
ccttaaggactcgcagtaaccgcttaagta

SEQ ID NO: 307241 - DNA, 30 bp, Artificial Sequence
  Synthetic oligonucleotide
gaaccgcgcccacggctggagagttaagta

SEQ ID NO: 307242 - DNA, 30 bp, Artificial Sequence
  Synthetic oligonucleotide
tagtcttgctagattatgttagtttaagta

SEQ ID NO: 307243 - DNA, 30 bp, Artificial Sequence
  Synthetic oligonucleotide
tcgatggtaaggaagaatccgtagacagta

SEQ ID NO: 307244 - DNA, 30 bp, Artificial Sequence
  Synthetic oligonucleotide
cgcatactctgagggacaagcccgacagta

SEQ ID NO: 307245 - DNA, 30 bp, Artificial Sequence
  Synthetic oligonucleotide
tggaaatgtcttcggcgctcggcgacagta

SEQ ID NO: 307246 - DNA, 30 bp, Artificial Sequence
  Synthetic oligonucleotide
ttacttttcacccatctaagagttacagta

SEQ ID NO: 307247 - DNA, 30 bp, Artificial Sequence
  Synthetic oligonucleotide
tagggagtaaacaagtcaccctttacagta

SEQ ID NO: 307248 - DNA, 30 bp, Artificial Sequence
  Synthetic oligonucleotide
cttattacgtccaggattactcgaccagta

SEQ ID NO: 307249 - DNA, 30 bp, Artificial Sequence
  Synthetic oligonucleotide
atagagcggaaaagttgattagccgcagta

SEQ ID NO: 307250 - DNA, 30 bp, Artificial Sequence
  Synthetic oligonucleotide
cgcaaacccgtactcgctcacgttgcagta

SEQ ID NO: 307251 - DNA, 30 bp, Artificial Sequence
  Synthetic oligonucleotide
ttatttactagatgagtaacgtcctcagta

SEQ ID NO: 307252 - DNA, 30 bp, Artificial Sequence
  Synthetic oligonucleotide
cgtatgacggcatgtacttttagctcagta

SEQ ID NO: 307253 - DNA, 30 bp, Artificial Sequence
  Synthetic oligonucleotide
cgactggtaacagccaaatcaatctcagta

SEQ ID NO: 307254 - DNA, 30 bp, Artificial Sequence
  Synthetic oligonucleotide
agggtttaagacgaagccttaatctcagta

SEQ ID NO: 307255 - DNA, 30 bp, Artificial Sequence
  Synthetic oligonucleotide
aggaatacaatgctggtgttagcgtcagta

SEQ ID NO: 307256 - DNA, 30 bp, Artificial Sequence
  Synthetic oligonucleotide
acctcgatccgttggcaacattcgtcagta

SEQ ID NO: 307257 - DNA, 30 bp, Artificial Sequence
  Synthetic oligonucleotide
tatagcccctacgtacgtgacggttcagta

SEQ ID NO: 307258 - DNA, 30 bp, Artificial Sequence
  Synthetic oligonucleotide
gaattacgggtatgcccatggctttcagta

SEQ ID NO: 307259 - DNA, 30 bp, Artificial Sequence
  Synthetic oligonucleotide
atcgggagccccctagacgtcaccagagta

SEQ ID NO: 307260 - DNA, 30 bp, Artificial Sequence
  Synthetic oligonucleotide
gacgcgccggagaatacccggcagagagta

SEQ ID NO: 307261 - DNA, 30 bp, Artificial Sequence
  Synthetic oligonucleotide
ttatgttagtggtcacatggcaggagagta

SEQ ID NO: 307262 - DNA, 30 bp, Artificial Sequence
  Synthetic oligonucleotide
ggcagccacacgctttaccttctgagagta

SEQ ID NO: 307263 - DNA, 30 bp, Artificial Sequence
  Synthetic oligonucleotide
ctcccgccaaagacaggagcacatagagta

SEQ ID NO: 307264 - DNA, 31 bp, Artificial Sequence
  Synthetic oligonucleotide
actgtttgcgagatcgtcgccgtcccgagta

SEQ ID NO: 307265 - DNA, 30 bp, Artificial Sequence
  Synthetic oligonucleotide
ttatgtggggacgtgttcattatccgagta

SEQ ID NO: 307266 - DNA, 30 bp, Artificial Sequence
  Synthetic oligonucleotide
cctccggcgcgtctttttcgaataggagta

SEQ ID NO: 307267 - DNA, 30 bp, Artificial Sequence
  Synthetic oligonucleotide
gaccgcgggcatatgaacaaccgcggagta

SEQ ID NO: 307268 - DNA, 30 bp, Artificial Sequence
  Synthetic oligonucleotide
tttcgacaagatgcagattcgggcggagta

SEQ ID NO: 307269 - DNA, 30 bp, Artificial Sequence
  Synthetic oligonucleotide
atgggcactcctgccttaggactcggagta

SEQ ID NO: 307270 - DNA, 30 bp, Artificial Sequence
  Synthetic oligonucleotide
aacagtataacaagcacgtagcgtggagta

SEQ ID NO: 307271 - DNA, 30 bp, Artificial Sequence
  Synthetic oligonucleotide
gatgctgcgtcaggttcaaacattggagta

SEQ ID NO: 307272 - DNA, 30 bp, Artificial Sequence
  Synthetic oligonucleotide
tgccagaatggcagtcatcctcttggagta

SEQ ID NO: 307273 - DNA, 30 bp, Artificial Sequence
  Synthetic oligonucleotide
ataagccacgggtcgcactttccatgagta

SEQ ID NO: 307274 - DNA, 30 bp, Artificial Sequence
  Synthetic oligonucleotide
accactccaattaacacatgtgcatgagta

SEQ ID NO: 307275 - DNA, 30 bp, Artificial Sequence
  Synthetic oligonucleotide
gcgtgattttacaataacatacggtgagta

SEQ ID NO: 307276 - DNA, 30 bp, Artificial Sequence
  Synthetic oligonucleotide
tgagtcttcgcacatgaaaggtacatagta

SEQ ID NO: 307277 - DNA, 30 bp, Artificial Sequence
  Synthetic oligonucleotide
catccaaatacataacgcaacgagatagta

SEQ ID NO: 307278 - DNA, 30 bp, Artificial Sequence
  Synthetic oligonucleotide
caagtacccatcgtcagacctctgatagta

SEQ ID NO: 307279 - DNA, 30 bp, Artificial Sequence
  Synthetic oligonucleotide
agagcgtagcacaccccagttaatatagta

SEQ ID NO: 307280 - DNA, 30 bp, Artificial Sequence
  Synthetic oligonucleotide
tatgttggttatcagatagattctatagta

SEQ ID NO: 307281 - DNA, 30 bp, Artificial Sequence
  Synthetic oligonucleotide
ggttgaaccgcggtgatgagtgttatagta

SEQ ID NO: 307282 - DNA, 30 bp, Artificial Sequence
  Synthetic oligonucleotide
ctagtgtggtttcactgtacgcaactagta

SEQ ID NO: 307283 - DNA, 30 bp, Artificial Sequence
  Synthetic oligonucleotide
tggctttacgaatcgagttatcaactagta

SEQ ID NO: 307284 - DNA, 30 bp, Artificial Sequence
  Synthetic oligonucleotide
ttcgggtggcaacagcgtgctttactagta

SEQ ID NO: 307285 - DNA, 30 bp, Artificial Sequence
  Synthetic oligonucleotide
cttccgccaccaaacaaattggtgctagta

SEQ ID NO: 307286 - DNA, 30 bp, Artificial Sequence
  Synthetic oligonucleotide
ttattgaagttaatctcagtcaatctagta

SEQ ID NO: 307287 - DNA, 30 bp, Artificial Sequence
  Synthetic oligonucleotide
gtccattgtagatcttatgtacgtctagta

SEQ ID NO: 307288 - DNA, 30 bp, Artificial Sequence
  Synthetic oligonucleotide
agaggtttgaggctcaaagttcttctagta

SEQ ID NO: 307289 - DNA, 30 bp, Artificial Sequence
  Synthetic oligonucleotide
gtctcaggcctctttggggacatagtagta

SEQ ID NO: 307290 - DNA, 30 bp, Artificial Sequence
  Synthetic oligonucleotide
cgatttctatatatgattaagctagtagta

SEQ ID NO: 307291 - DNA, 30 bp, Artificial Sequence
  Synthetic oligonucleotide
gcaacagcttatcgcaaatgtaaggtagta

SEQ ID NO: 307292 - DNA, 30 bp, Artificial Sequence
  Synthetic oligonucleotide
ggaactacgaattttcgcctgtaggtagta

SEQ ID NO: 307293 - DNA, 30 bp, Artificial Sequence
  Synthetic oligonucleotide
tcgtcttaccttatgctgcgaggggtagta

SEQ ID NO: 307294 - DNA, 30 bp, Artificial Sequence
  Synthetic oligonucleotide
tagaaacgtgacgtggacacgtatgtagta

SEQ ID NO: 307295 - DNA, 30 bp, Artificial Sequence
  Synthetic oligonucleotide
ggcgaagagcaaaaaggcctcactgtagta

SEQ ID NO: 307296 - DNA, 30 bp, Artificial Sequence
  Synthetic oligonucleotide
agagtgtactatatatcagatagtgtagta

SEQ ID NO: 307297 - DNA, 29 bp, Artificial Sequence
  Synthetic oligonucleotide
tgcttattatttgagcaccagttgtagta

SEQ ID NO: 307298 - DNA, 30 bp, Artificial Sequence
  Synthetic oligonucleotide
agcaataagaagttttatcactttgtagta

SEQ ID NO: 307299 - DNA, 30 bp, Artificial Sequence
  Synthetic oligonucleotide
tcccgaaaatggtcttgagccagattagta

SEQ ID NO: 307300 - DNA, 30 bp, Artificial Sequence
  Synthetic oligonucleotide
ccgagcctccgagtcgtggtctgcttagta

SEQ ID NO: 307301 - DNA, 30 bp, Artificial Sequence
  Synthetic oligonucleotide
tatccgttaaccggatttaagttgttagta

SEQ ID NO: 307302 - DNA, 30 bp, Artificial Sequence
  Synthetic oligonucleotide
aatatgcggaacacatactccactttagta

SEQ ID NO: 307303 - DNA, 30 bp, Artificial Sequence
  Synthetic oligonucleotide
gcctacaccttgcaccacaaaagtttagta

SEQ ID NO: 307304 - DNA, 30 bp, Artificial Sequence
  Synthetic oligonucleotide
ggagcgaacgtcagagaccttagtttagta

SEQ ID NO: 307305 - DNA, 30 bp, Artificial Sequence
  Synthetic oligonucleotide
aaggcttaccctgcacatcacattttagta

SEQ ID NO: 307306 - DNA, 30 bp, Artificial Sequence
  Synthetic oligonucleotide
gacatctaatgggtggataaagttttagta

SEQ ID NO: 307307 - DNA, 30 bp, Artificial Sequence
  Synthetic oligonucleotide
gtcaaggccctatacgtagggacaaacgta

SEQ ID NO: 307308 - DNA, 30 bp, Artificial Sequence
  Synthetic oligonucleotide
acccctcagcaaaccaagtcgggaaacgta

SEQ ID NO: 307309 - DNA, 30 bp, Artificial Sequence
  Synthetic oligonucleotide
atacgactgcactggggagtacagaacgta

SEQ ID NO: 307310 - DNA, 30 bp, Artificial Sequence
  Synthetic oligonucleotide
tttggtacatggtgttgaaaccagaacgta

SEQ ID NO: 307311 - DNA, 30 bp, Artificial Sequence
  Synthetic oligonucleotide
agcagattagttataagctctcctaacgta

SEQ ID NO: 307312 - DNA, 30 bp, Artificial Sequence
  Synthetic oligonucleotide
attaccagggatttcgggatgtgtaacgta

SEQ ID NO: 307313 - DNA, 30 bp, Artificial Sequence
  Synthetic oligonucleotide
ctgttgtcccaacgcacggagtgacacgta

SEQ ID NO: 307314 - DNA, 30 bp, Artificial Sequence
  Synthetic oligonucleotide
accgcgaccacgtagacgatacccgacgta

SEQ ID NO: 307315 - DNA, 30 bp, Artificial Sequence
  Synthetic oligonucleotide
ccctctccaagcgccttcattagcgacgta

SEQ ID NO: 307316 - DNA, 30 bp, Artificial Sequence
  Synthetic oligonucleotide
ataccaagtagtatacatgcggtcgacgta

SEQ ID NO: 307317 - DNA, 30 bp, Artificial Sequence
  Synthetic oligonucleotide
tccccctggctctcgtaggccccctacgta

SEQ ID NO: 307318 - DNA, 30 bp, Artificial Sequence
  Synthetic oligonucleotide
aatgcttatagaaccggtaaggagtacgta

SEQ ID NO: 307319 - DNA, 30 bp, Artificial Sequence
  Synthetic oligonucleotide
tgtgatcaccctagatctacaatttacgta

SEQ ID NO: 307320 - DNA, 30 bp, Artificial Sequence
  Synthetic oligonucleotide
ggacagatagtatttgaggcactttacgta

SEQ ID NO: 307321 - DNA, 30 bp, Artificial Sequence
  Synthetic oligonucleotide
gcgccgtgtttcgcaaaaattgaaaccgta

SEQ ID NO: 307322 - DNA, 30 bp, Artificial Sequence
  Synthetic oligonucleotide
gttcaagtctccgaaggacaacccaccgta

SEQ ID NO: 307323 - DNA, 30 bp, Artificial Sequence
  Synthetic oligonucleotide
atctatgtatcctagggaaatagcaccgta

SEQ ID NO: 307324 - DNA, 30 bp, Artificial Sequence
  Synthetic oligonucleotide
ccatgcaggctaaaccacgagccgaccgta

SEQ ID NO: 307325 - DNA, 30 bp, Artificial Sequence
  Synthetic oligonucleotide
gcacatacaacgccagcgtgacgacccgta

SEQ ID NO: 307326 - DNA, 30 bp, Artificial Sequence
  Synthetic oligonucleotide
gtccataagtccacggaaaatggacccgta

SEQ ID NO: 307327 - DNA, 30 bp, Artificial Sequence
  Synthetic oligonucleotide
ttcgagcgttgtagtacgagaccccccgta

SEQ ID NO: 307328 - DNA, 30 bp, Artificial Sequence
  Synthetic oligonucleotide
agattttcgcaaatttatattcatcccgta

SEQ ID NO: 307329 - DNA, 30 bp, Artificial Sequence
  Synthetic oligonucleotide
gggctgttgctggcgactttaagtcccgta

SEQ ID NO: 307330 - DNA, 30 bp, Artificial Sequence
  Synthetic oligonucleotide
ggtcgttcgagcctattttgtagtcccgta

SEQ ID NO: 307331 - DNA, 31 bp, Artificial Sequence
  Synthetic oligonucleotide
gcgaggcgggactgctaagaagcgtcccgta

SEQ ID NO: 307332 - DNA, 30 bp, Artificial Sequence
  Synthetic oligonucleotide
aatggtaggtatcgtagagtgcgtcccgta

SEQ ID NO: 307333 - DNA, 30 bp, Artificial Sequence
  Synthetic oligonucleotide
aactagtctcgtgttagcactacggccgta

SEQ ID NO: 307334 - DNA, 30 bp, Artificial Sequence
  Synthetic oligonucleotide
gagccgcgttctctcaaaacgccggccgta

SEQ ID NO: 307335 - DNA, 30 bp, Artificial Sequence
  Synthetic oligonucleotide
acagcgtcgtttagggccatctgggccgta

SEQ ID NO: 307336 - DNA, 30 bp, Artificial Sequence
  Synthetic oligonucleotide
cactaacacccacaggtgtaggcatccgta

SEQ ID NO: 307337 - DNA, 30 bp, Artificial Sequence
  Synthetic oligonucleotide
agcgcaaaagggcacgggcagcgctccgta

SEQ ID NO: 307338 - DNA, 30 bp, Artificial Sequence
  Synthetic oligonucleotide
aattgagaagcagacaggttcgagtccgta

SEQ ID NO: 307339 - DNA, 30 bp, Artificial Sequence
  Synthetic oligonucleotide
tccatcaggaaatccatctgttcgtccgta

SEQ ID NO: 307340 - DNA, 30 bp, Artificial Sequence
  Synthetic oligonucleotide
atacgtgttgccgcatgcgcctggtccgta

SEQ ID NO: 307341 - DNA, 30 bp, Artificial Sequence
  Synthetic oligonucleotide
tgaatctcaggcgtgtgatggcattccgta

SEQ ID NO: 307342 - DNA, 30 bp, Artificial Sequence
  Synthetic oligonucleotide
ctcatatcctcctattgttcagcaagcgta

SEQ ID NO: 307343 - DNA, 30 bp, Artificial Sequence
  Synthetic oligonucleotide
gctcatacaaaactaaaagtttcaagcgta

SEQ ID NO: 307344 - DNA, 30 bp, Artificial Sequence
  Synthetic oligonucleotide
cattttccttaaaggacactccgaagcgta

SEQ ID NO: 307345 - DNA, 30 bp, Artificial Sequence
  Synthetic oligonucleotide
cgctagtactgattcttcctccgaagcgta

SEQ ID NO: 307346 - DNA, 30 bp, Artificial Sequence
  Synthetic oligonucleotide
actcgaggctggctcaaagtttccagcgta

SEQ ID NO: 307347 - DNA, 30 bp, Artificial Sequence
  Synthetic oligonucleotide
gaattacatggtgctcacagaagcagcgta

SEQ ID NO: 307348 - DNA, 30 bp, Artificial Sequence
  Synthetic oligonucleotide
gcacaatctcgttccgaggagagcagcgta

SEQ ID NO: 307349 - DNA, 30 bp, Artificial Sequence
  Synthetic oligonucleotide
tcgcctggcccctcctttctcttcagcgta

SEQ ID NO: 307350 - DNA, 30 bp, Artificial Sequence
  Synthetic oligonucleotide
tcaaccagccacaccctgattaagagcgta

SEQ ID NO: 307351 - DNA, 30 bp, Artificial Sequence
  Synthetic oligonucleotide
acacgcacagcagacagccctggccgcgta

SEQ ID NO: 307352 - DNA, 30 bp, Artificial Sequence
  Synthetic oligonucleotide
tcacccgtatcatacctagcgttgcgcgta

SEQ ID NO: 307353 - DNA, 30 bp, Artificial Sequence
  Synthetic oligonucleotide
cataacaccttgatttacaacagcggcgta

SEQ ID NO: 307354 - DNA, 30 bp, Artificial Sequence
  Synthetic oligonucleotide
taacgtgtagttttggcccactgcggcgta

SEQ ID NO: 307355 - DNA, 30 bp, Artificial Sequence
  Synthetic oligonucleotide
tgagtgcagctaggacggcatctcggcgta

SEQ ID NO: 307356 - DNA, 30 bp, Artificial Sequence
  Synthetic oligonucleotide
ccggtccactggagacactggtcgggcgta

SEQ ID NO: 307357 - DNA, 30 bp, Artificial Sequence
  Synthetic oligonucleotide
aacacacgacaagtgcatgggcggggcgta

SEQ ID NO: 307358 - DNA, 30 bp, Artificial Sequence
  Synthetic oligonucleotide
gaaagggatccggctcaagcttggggcgta

SEQ ID NO: 307359 - DNA, 30 bp, Artificial Sequence
  Synthetic oligonucleotide
ctcggaaaaaaagtatcaccaatgggcgta

SEQ ID NO: 307360 - DNA, 30 bp, Artificial Sequence
  Synthetic oligonucleotide
taagaatggtggagcacagttactggcgta

SEQ ID NO: 307361 - DNA, 30 bp, Artificial Sequence
  Synthetic oligonucleotide
accagtcagctatcatcagaggctggcgta

SEQ ID NO: 307362 - DNA, 30 bp, Artificial Sequence
  Synthetic oligonucleotide
gtacatatgtaagcggcggtgattggcgta

SEQ ID NO: 307363 - DNA, 30 bp, Artificial Sequence
  Synthetic oligonucleotide
tggatataacgcacaatataactctgcgta

SEQ ID NO: 307364 - DNA, 30 bp, Artificial Sequence
  Synthetic oligonucleotide
tataattaacgaccaccctattagtgcgta

SEQ ID NO: 307365 - DNA, 30 bp, Artificial Sequence
  Synthetic oligonucleotide
atcagggttaatagtgctgtaaggtgcgta

SEQ ID NO: 307366 - DNA, 30 bp, Artificial Sequence
  Synthetic oligonucleotide
attaagccctagaacgtgccgcaaatcgta

SEQ ID NO: 307367 - DNA, 30 bp, Artificial Sequence
  Synthetic oligonucleotide
gtgtgagtctcctccagttcccgaatcgta

SEQ ID NO: 307368 - DNA, 30 bp, Artificial Sequence
  Synthetic oligonucleotide
caggaaaccgatggacagtgggacatcgta

SEQ ID NO: 307369 - DNA, 30 bp, Artificial Sequence
  Synthetic oligonucleotide
gttggtcatcctcgtgctggaaggatcgta

SEQ ID NO: 307370 - DNA, 30 bp, Artificial Sequence
  Synthetic oligonucleotide
tgtaacggcatggtcgacatcagactcgta

SEQ ID NO: 307371 - DNA, 30 bp, Artificial Sequence
  Synthetic oligonucleotide
atgtaggctcacaagtaaataattctcgta

SEQ ID NO: 307372 - DNA, 30 bp, Artificial Sequence
  Synthetic oligonucleotide
actcagtcaactctcgcctggggagtcgta

SEQ ID NO: 307373 - DNA, 30 bp, Artificial Sequence
  Synthetic oligonucleotide
tgtctgcacaagaagacactcgtagtcgta

SEQ ID NO: 307374 - DNA, 30 bp, Artificial Sequence
  Synthetic oligonucleotide
caacaggttcggctcgcgtctgacgtcgta

SEQ ID NO: 307375 - DNA, 30 bp, Artificial Sequence
  Synthetic oligonucleotide
cgtgtggaatgccgacgtataagcgtcgta

SEQ ID NO: 307376 - DNA, 30 bp, Artificial Sequence
  Synthetic oligonucleotide
attcaattccggctgggccaagtcgtcgta

SEQ ID NO: 307377 - DNA, 30 bp, Artificial Sequence
  Synthetic oligonucleotide
aaatccagggcgcgggggtagcgggtcgta

SEQ ID NO: 307378 - DNA, 30 bp, Artificial Sequence
  Synthetic oligonucleotide
tgcgcgttaaaaaccgagacggatgtcgta

SEQ ID NO: 307379 - DNA, 30 bp, Artificial Sequence
  Synthetic oligonucleotide
ctgtggaccacccgcagagtcatattcgta

SEQ ID NO: 307380 - DNA, 30 bp, Artificial Sequence
  Synthetic oligonucleotide
ttgggtacacaatttggtaagggcttcgta

SEQ ID NO: 307381 - DNA, 30 bp, Artificial Sequence
  Synthetic oligonucleotide
ggctttgctcttcatgtaactttcttcgta

SEQ ID NO: 307382 - DNA, 30 bp, Artificial Sequence
  Synthetic oligonucleotide
atcgtttcaagttttaaagctgggttcgta

SEQ ID NO: 307383 - DNA, 30 bp, Artificial Sequence
  Synthetic oligonucleotide
catagtcgcctcagcggtaagactttcgta

SEQ ID NO: 307384 - DNA, 30 bp, Artificial Sequence
  Synthetic oligonucleotide
caggaacaagtttaccgacgtgctttcgta

SEQ ID NO: 307385 - DNA, 30 bp, Artificial Sequence
  Synthetic oligonucleotide
gaccggggcttttccgcacaaggtttcgta

SEQ ID NO: 307386 - DNA, 30 bp, Artificial Sequence
  Synthetic oligonucleotide
gacaggttgttttgaacgtttgcaaaggta

SEQ ID NO: 307387 - DNA, 30 bp, Artificial Sequence
  Synthetic oligonucleotide
aagtaatttcttgcaacatttcgaaaggta

SEQ ID NO: 307388 - DNA, 30 bp, Artificial Sequence
  Synthetic oligonucleotide
gctatattgatttgagaatttggaaaggta

SEQ ID NO: 307389 - DNA, 30 bp, Artificial Sequence
  Synthetic oligonucleotide
aggtttcccgacggtatacgtgtaaaggta

SEQ ID NO: 307390 - DNA, 30 bp, Artificial Sequence
  Synthetic oligonucleotide
acttaaggtaccgtgtgtgtacccaaggta

SEQ ID NO: 307391 - DNA, 30 bp, Artificial Sequence
  Synthetic oligonucleotide
gatttgcagaagatggaagcatcgaaggta

SEQ ID NO: 307392 - DNA, 30 bp, Artificial Sequence
  Synthetic oligonucleotide
gcaattgcgatttgtagggttttacaggta

SEQ ID NO: 307393 - DNA, 30 bp, Artificial Sequence
  Synthetic oligonucleotide
gcccttcagatgacgacttcatcccaggta

SEQ ID NO: 307394 - DNA, 30 bp, Artificial Sequence
  Synthetic oligonucleotide
tgttgctcatctagactacggggccaggta

SEQ ID NO: 307395 - DNA, 30 bp, Artificial Sequence
  Synthetic oligonucleotide
gactagtcaggctcattttggaatcaggta

SEQ ID NO: 307396 - DNA, 30 bp, Artificial Sequence
  Synthetic oligonucleotide
ggtgcttcacaaccaggctctactcaggta

SEQ ID NO: 307397 - DNA, 30 bp, Artificial Sequence
  Synthetic oligonucleotide
ttgtgaacccacctgcttgatagtcaggta

SEQ ID NO: 307398 - DNA, 30 bp, Artificial Sequence
  Synthetic oligonucleotide
ttcaagtaccgatggctcaatcgtcaggta

SEQ ID NO: 307399 - DNA, 30 bp, Artificial Sequence
  Synthetic oligonucleotide
gaatctcacaactgccgagcctgagaggta

SEQ ID NO: 307400 - DNA, 30 bp, Artificial Sequence
  Synthetic oligonucleotide
attagttcatactggcgaataatagaggta

SEQ ID NO: 307401 - DNA, 30 bp, Artificial Sequence
  Synthetic oligonucleotide
ctcgcttaatctgatccgaatccggaggta

SEQ ID NO: 307402 - DNA, 30 bp, Artificial Sequence
  Synthetic oligonucleotide
tttcagaaggacgatttgaatgcggaggta

SEQ ID NO: 307403 - DNA, 30 bp, Artificial Sequence
  Synthetic oligonucleotide
atggactcgctgattcctaggaatgaggta

SEQ ID NO: 307404 - DNA, 30 bp, Artificial Sequence
  Synthetic oligonucleotide
gtgagatatttatggagatcatatgaggta

SEQ ID NO: 307405 - DNA, 30 bp, Artificial Sequence
  Synthetic oligonucleotide
tagggagacatcactcattggcctgaggta

SEQ ID NO: 307406 - DNA, 30 bp, Artificial Sequence
  Synthetic oligonucleotide
ttgacctacgcgagccgccgttgataggta

SEQ ID NO: 307407 - DNA, 30 bp, Artificial Sequence
  Synthetic oligonucleotide
tgcgatctcttggcaccattagattaggta

SEQ ID NO: 307408 - DNA, 30 bp, Artificial Sequence
  Synthetic oligonucleotide
tccactacacagcggattgcccgttaggta

SEQ ID NO: 307409 - DNA, 31 bp, Artificial Sequence
  Synthetic oligonucleotide
aagcaattggagaaggttggctggttaggta

SEQ ID NO: 307410 - DNA, 30 bp, Artificial Sequence
  Synthetic oligonucleotide
acgccactctaccagggcaactgttaggta

SEQ ID NO: 307411 - DNA, 30 bp, Artificial Sequence
  Synthetic oligonucleotide
taggatttcgcgtccagcgtcaaaacggta

SEQ ID NO: 307412 - DNA, 30 bp, Artificial Sequence
  Synthetic oligonucleotide
ccaagcgacgtaaagaaatagatcacggta

SEQ ID NO: 307413 - DNA, 30 bp, Artificial Sequence
  Synthetic oligonucleotide
aatcaactccctcacgtaggatcgacggta

SEQ ID NO: 307414 - DNA, 30 bp, Artificial Sequence
  Synthetic oligonucleotide
tgcattctcatgaaggccgggaatacggta

SEQ ID NO: 307415 - DNA, 30 bp, Artificial Sequence
  Synthetic oligonucleotide
tttataaagcagatttgcgagtctacggta

SEQ ID NO: 307416 - DNA, 30 bp, Artificial Sequence
  Synthetic oligonucleotide
acagttgtatcggccagacacagtacggta

SEQ ID NO: 307417 - DNA, 30 bp, Artificial Sequence
  Synthetic oligonucleotide
cgggctgggctggggaagctacgaccggta

SEQ ID NO: 307418 - DNA, 30 bp, Artificial Sequence
  Synthetic oligonucleotide
taatcgcggatctggttggaagggccggta

SEQ ID NO: 307419 - DNA, 30 bp, Artificial Sequence
  Synthetic oligonucleotide
caagataaagttgtcgcttgtcatccggta

SEQ ID NO: 307420 - DNA, 31 bp, Artificial Sequence
  Synthetic oligonucleotide
aatctttgacgttgaaatcacccaagcggta

SEQ ID NO: 307421 - DNA, 30 bp, Artificial Sequence
  Synthetic oligonucleotide
tctggatgttaggtggctgacacagcggta

SEQ ID NO: 307422 - DNA, 30 bp, Artificial Sequence
  Synthetic oligonucleotide
gatatacactggcgtcataagtccgcggta

SEQ ID NO: 307423 - DNA, 30 bp, Artificial Sequence
  Synthetic oligonucleotide
acagacggtagacgcctacctcaggcggta

SEQ ID NO: 307424 - DNA, 30 bp, Artificial Sequence
  Synthetic oligonucleotide
acccttcacgcgtgttatctcgaggcggta

SEQ ID NO: 307425 - DNA, 30 bp, Artificial Sequence
  Synthetic oligonucleotide
ctaacaccgaaggctgtggcagcggcggta

SEQ ID NO: 307426 - DNA, 30 bp, Artificial Sequence
  Synthetic oligonucleotide
gacttaatagtaggtcgactaagtgcggta

SEQ ID NO: 307427 - DNA, 30 bp, Artificial Sequence
  Synthetic oligonucleotide
aggcggtgggtaccgtacaacagtgcggta

SEQ ID NO: 307428 - DNA, 30 bp, Artificial Sequence
  Synthetic oligonucleotide
tgggctcgcttggatgttgaagttgcggta

SEQ ID NO: 307429 - DNA, 30 bp, Artificial Sequence
  Synthetic oligonucleotide
cctcagtactttacccaaaagggatcggta

SEQ ID NO: 307430 - DNA, 30 bp, Artificial Sequence
  Synthetic oligonucleotide
ctgcgccggaagcttcccttcccctcggta

SEQ ID NO: 307431 - DNA, 30 bp, Artificial Sequence
  Synthetic oligonucleotide
gtagggcttactaatgatttgaggtcggta

SEQ ID NO: 307432 - DNA, 30 bp, Artificial Sequence
  Synthetic oligonucleotide
tacttgacgtctgggtggagcaaaagggta

SEQ ID NO: 307433 - DNA, 30 bp, Artificial Sequence
  Synthetic oligonucleotide
tagttttgtgtcgttaaacctggcagggta

SEQ ID NO: 307434 - DNA, 30 bp, Artificial Sequence
  Synthetic oligonucleotide
acgtgacctgtaatacagactatcagggta

SEQ ID NO: 307435 - DNA, 30 bp, Artificial Sequence
  Synthetic oligonucleotide
ccctggcgcaatcgttatgtaaagagggta

SEQ ID NO: 307436 - DNA, 30 bp, Artificial Sequence
  Synthetic oligonucleotide
agcccacctgaagttcctggccagagggta

SEQ ID NO: 307437 - DNA, 30 bp, Artificial Sequence
  Synthetic oligonucleotide
gtccactcagtcgacatgtcgccgagggta

SEQ ID NO: 307438 - DNA, 30 bp, Artificial Sequence
  Synthetic oligonucleotide
ggagaacttatttgacgcaaggtgagggta

SEQ ID NO: 307439 - DNA, 30 bp, Artificial Sequence
  Synthetic oligonucleotide
ggaaatctcccaagttacaaccatagggta

SEQ ID NO: 307440 - DNA, 30 bp, Artificial Sequence
  Synthetic oligonucleotide
gggtgtacctggcaatgctgtgaacgggta

SEQ ID NO: 307441 - DNA, 30 bp, Artificial Sequence
  Synthetic oligonucleotide
acgtttattccgaatagttcagggcgggta

SEQ ID NO: 307442 - DNA, 30 bp, Artificial Sequence
  Synthetic oligonucleotide
aacactatcttgtggcattctcgaggggta

SEQ ID NO: 307443 - DNA, 30 bp, Artificial Sequence
  Synthetic oligonucleotide
atatcgctcaaggaagattccgtcggggta

SEQ ID NO: 307444 - DNA, 30 bp, Artificial Sequence
  Synthetic oligonucleotide
acacgtggtttacgcgggttacatggggta

SEQ ID NO: 307445 - DNA, 30 bp, Artificial Sequence
  Synthetic oligonucleotide
cggacctcctctgctcgtatttatggggta

SEQ ID NO: 307446 - DNA, 30 bp, Artificial Sequence
  Synthetic oligonucleotide
tgaggaatacattcctcttggactggggta

SEQ ID NO: 307447 - DNA, 30 bp, Artificial Sequence
  Synthetic oligonucleotide
acccactacgaagttgattatgcatgggta

SEQ ID NO: 307448 - DNA, 30 bp, Artificial Sequence
  Synthetic oligonucleotide
catggtgtccatttaggtccttgatgggta

SEQ ID NO: 307449 - DNA, 30 bp, Artificial Sequence
  Synthetic oligonucleotide
ccaaataatttacatgcgtgagtatgggta

SEQ ID NO: 307450 - DNA, 30 bp, Artificial Sequence
  Synthetic oligonucleotide
ggccgcgccgcaccacgtagagcctgggta

SEQ ID NO: 307451 - DNA, 30 bp, Artificial Sequence
  Synthetic oligonucleotide
gtgatagaaaaatacagaatattctgggta

SEQ ID NO: 307452 - DNA, 30 bp, Artificial Sequence
  Synthetic oligonucleotide
agtatccgacaaatccactatttctgggta

SEQ ID NO: 307453 - DNA, 30 bp, Artificial Sequence
  Synthetic oligonucleotide
ggcagtggtggaggatgagggccgtgggta

SEQ ID NO: 307454 - DNA, 30 bp, Artificial Sequence
  Synthetic oligonucleotide
catcagaaaacgaccgcgggggggtgggta

SEQ ID NO: 307455 - DNA, 30 bp, Artificial Sequence
  Synthetic oligonucleotide
atacaaatatcatgacgtaaaatgtgggta

SEQ ID NO: 307456 - DNA, 30 bp, Artificial Sequence
  Synthetic oligonucleotide
gactccttaagaatggcacgcatgtgggta

SEQ ID NO: 307457 - DNA, 30 bp, Artificial Sequence
  Synthetic oligonucleotide
aattgcctcgagaggtggatattgtgggta

SEQ ID NO: 307458 - DNA, 30 bp, Artificial Sequence
  Synthetic oligonucleotide
gtttagcggatcgtacctgcggcttgggta

SEQ ID NO: 307459 - DNA, 30 bp, Artificial Sequence
  Synthetic oligonucleotide
tgctacgcgactggtgcatggttttgggta

SEQ ID NO: 307460 - DNA, 30 bp, Artificial Sequence
  Synthetic oligonucleotide
gtaatatagttactgcagcgcgaaatggta

SEQ ID NO: 307461 - DNA, 30 bp, Artificial Sequence
  Synthetic oligonucleotide
agagacttctctgtcggccgtagaatggta

SEQ ID NO: 307462 - DNA, 30 bp, Artificial Sequence
  Synthetic oligonucleotide
agccgtaaaagagtttccgctcacatggta

SEQ ID NO: 307463 - DNA, 30 bp, Artificial Sequence
  Synthetic oligonucleotide
gtcacgcatcacctgagtgctcggatggta

SEQ ID NO: 307464 - DNA, 30 bp, Artificial Sequence
  Synthetic oligonucleotide
ctattgattcaaaagagtccatgtatggta

SEQ ID NO: 307465 - DNA, 30 bp, Artificial Sequence
  Synthetic oligonucleotide
tggcgcgcagcgttaagcctatcactggta

SEQ ID NO: 307466 - DNA, 30 bp, Artificial Sequence
  Synthetic oligonucleotide
atgcgcgcgttttggcgttcaatcctggta

SEQ ID NO: 307467 - DNA, 30 bp, Artificial Sequence
  Synthetic oligonucleotide
gatcataggtaccaactgcttggtctggta

SEQ ID NO: 307468 - DNA, 30 bp, Artificial Sequence
  Synthetic oligonucleotide
actgacttatgtgagacgcgtaaagtggta

SEQ ID NO: 307469 - DNA, 30 bp, Artificial Sequence
  Synthetic oligonucleotide
tatgtaccgtccgtcaattacacagtggta

SEQ ID NO: 307470 - DNA, 30 bp, Artificial Sequence
  Synthetic oligonucleotide
gttgggggccagcgggtttgttgagtggta

SEQ ID NO: 307471 - DNA, 30 bp, Artificial Sequence
  Synthetic oligonucleotide
gtgaatgaagttttttgagaaacggtggta

SEQ ID NO: 307472 - DNA, 30 bp, Artificial Sequence
  Synthetic oligonucleotide
ctggctgagcgcgtttgttcttcggtggta

SEQ ID NO: 307473 - DNA, 30 bp, Artificial Sequence
  Synthetic oligonucleotide
atacggagctggtgttacaacatggtggta

SEQ ID NO: 307474 - DNA, 30 bp, Artificial Sequence
  Synthetic oligonucleotide
ctgaacggtcaggcttgttatgtggtggta

SEQ ID NO: 307475 - DNA, 30 bp, Artificial Sequence
  Synthetic oligonucleotide
cctatggaagttcaagtcgtcgaattggta

SEQ ID NO: 307476 - DNA, 30 bp, Artificial Sequence
  Synthetic oligonucleotide
cccagttaaacttatttaatagctttggta

SEQ ID NO: 307477 - DNA, 30 bp, Artificial Sequence
  Synthetic oligonucleotide
gctcatttggagacaccgatgggtttggta

SEQ ID NO: 307478 - DNA, 30 bp, Artificial Sequence
  Synthetic oligonucleotide
ctaaagccaaaccctggcgtagaaaatgta

SEQ ID NO: 307479 - DNA, 30 bp, Artificial Sequence
  Synthetic oligonucleotide
tacgataataaaccgcgcaatccaaatgta

SEQ ID NO: 307480 - DNA, 30 bp, Artificial Sequence
  Synthetic oligonucleotide
aaccagtccccgcaaacgcttataaatgta

SEQ ID NO: 307481 - DNA, 30 bp, Artificial Sequence
  Synthetic oligonucleotide
ttaaagggtataggacgagcagccaatgta

SEQ ID NO: 307482 - DNA, 30 bp, Artificial Sequence
  Synthetic oligonucleotide
tagccttgagaattcagggaggtcaatgta

SEQ ID NO: 307483 - DNA, 30 bp, Artificial Sequence
  Synthetic oligonucleotide
gcccgactctaatacttaaaacagaatgta

SEQ ID NO: 307484 - DNA, 30 bp, Artificial Sequence
  Synthetic oligonucleotide
ttcagtagaatatcagaaaattataatgta

SEQ ID NO: 307485 - DNA, 30 bp, Artificial Sequence
  Synthetic oligonucleotide
tgctcctggacaatagttacccgtaatgta

SEQ ID NO: 307486 - DNA, 30 bp, Artificial Sequence
  Synthetic oligonucleotide
ggtccaatctagtgtgaaagaacacatgta

SEQ ID NO: 307487 - DNA, 30 bp, Artificial Sequence
  Synthetic oligonucleotide
tgtagaatttggaagaatatgcgacatgta

SEQ ID NO: 307488 - DNA, 30 bp, Artificial Sequence
  Synthetic oligonucleotide
gctgtgaggaaaaggaaaaagtaccatgta

SEQ ID NO: 307489 - DNA, 30 bp, Artificial Sequence
  Synthetic oligonucleotide
acagtggcaatttcaggaagtatgcatgta

SEQ ID NO: 307490 - DNA, 30 bp, Artificial Sequence
  Synthetic oligonucleotide
cttagtgtacaattagccaccactcatgta

SEQ ID NO: 307491 - DNA, 30 bp, Artificial Sequence
  Synthetic oligonucleotide
aagatgcaacccaaccgtcccacagatgta

SEQ ID NO: 307492 - DNA, 30 bp, Artificial Sequence
  Synthetic oligonucleotide
cttagccctgtagagcccctgccagatgta

SEQ ID NO: 307493 - DNA, 30 bp, Artificial Sequence
  Synthetic oligonucleotide
gaaacctaaaggcggtttagtccagatgta

SEQ ID NO: 307494 - DNA, 30 bp, Artificial Sequence
  Synthetic oligonucleotide
ctcaggcggtattgtaggacatgcgatgta

SEQ ID NO: 307495 - DNA, 30 bp, Artificial Sequence
  Synthetic oligonucleotide
agtcggtggttagctacgagtaaggatgta

SEQ ID NO: 307496 - DNA, 30 bp, Artificial Sequence
  Synthetic oligonucleotide
tcgtgattcatgaacccgcagggatatgta

SEQ ID NO: 307497 - DNA, 30 bp, Artificial Sequence
  Synthetic oligonucleotide
ggtgctttaacacgcgtatgaatatatgta

SEQ ID NO: 307498 - DNA, 30 bp, Artificial Sequence
  Synthetic oligonucleotide
tagctctcatgatcctgtgtcctatatgta

SEQ ID NO: 307499 - DNA, 30 bp, Artificial Sequence
  Synthetic oligonucleotide
tgttacaaactacatgatccggtctatgta

SEQ ID NO: 307500 - DNA, 30 bp, Artificial Sequence
  Synthetic oligonucleotide
tataaaattcatacggacgggttgtatgta

SEQ ID NO: 307501 - DNA, 30 bp, Artificial Sequence
  Synthetic oligonucleotide
cgaattttaaaggggcgtagacattatgta

SEQ ID NO: 307502 - DNA, 30 bp, Artificial Sequence
  Synthetic oligonucleotide
ctcgacatgaccgtgcattgactttatgta

SEQ ID NO: 307503 - DNA, 30 bp, Artificial Sequence
  Synthetic oligonucleotide
agtcctgtgctctatcttccctaaactgta

SEQ ID NO: 307504 - DNA, 30 bp, Artificial Sequence
  Synthetic oligonucleotide
acaggtatacctttctaagcaataactgta

SEQ ID NO: 307505 - DNA, 30 bp, Artificial Sequence
  Synthetic oligonucleotide
gcgttgcgaacccagcgtatggacactgta

SEQ ID NO: 307506 - DNA, 30 bp, Artificial Sequence
  Synthetic oligonucleotide
ttgaatatcgttctgcgcatattcactgta

SEQ ID NO: 307507 - DNA, 30 bp, Artificial Sequence
  Synthetic oligonucleotide
acaacgcaacagtcctattgatggactgta

SEQ ID NO: 307508 - DNA, 30 bp, Artificial Sequence
  Synthetic oligonucleotide
aagtctgagtatagccatgcattgactgta

SEQ ID NO: 307509 - DNA, 30 bp, Artificial Sequence
  Synthetic oligonucleotide
atagttcacccccaggctataggtactgta

SEQ ID NO: 307510 - DNA, 30 bp, Artificial Sequence
  Synthetic oligonucleotide
ctacactcactaggaattgccattactgta

SEQ ID NO: 307511 - DNA, 30 bp, Artificial Sequence
  Synthetic oligonucleotide
ctggttgaactattgtcggtacaacctgta

SEQ ID NO: 307512 - DNA, 30 bp, Artificial Sequence
  Synthetic oligonucleotide
tgtgtgtggaacttgctaattgtacctgta

SEQ ID NO: 307513 - DNA, 30 bp, Artificial Sequence
  Synthetic oligonucleotide
cggcagctgatgtaaatatgttaccctgta

SEQ ID NO: 307514 - DNA, 30 bp, Artificial Sequence
  Synthetic oligonucleotide
catatatcggtcagcagggcaggccctgta

SEQ ID NO: 307515 - DNA, 30 bp, Artificial Sequence
  Synthetic oligonucleotide
cattgacacgggagctcagtgaaagctgta

SEQ ID NO: 307516 - DNA, 30 bp, Artificial Sequence
  Synthetic oligonucleotide
acaatgagcgcgcttttcgataccgctgta

SEQ ID NO: 307517 - DNA, 30 bp, Artificial Sequence
  Synthetic oligonucleotide
ttaggatgacggatttaagtgagcgctgta

SEQ ID NO: 307518 - DNA, 30 bp, Artificial Sequence
  Synthetic oligonucleotide
caaaggtcacagcttttggatcgggctgta

SEQ ID NO: 307519 - DNA, 30 bp, Artificial Sequence
  Synthetic oligonucleotide
atactacacgtcttttaccggtatgctgta

SEQ ID NO: 307520 - DNA, 30 bp, Artificial Sequence
  Synthetic oligonucleotide
ataggaaaggggcggcatatttaatctgta

SEQ ID NO: 307521 - DNA, 30 bp, Artificial Sequence
  Synthetic oligonucleotide
gtaacagcctacggaaggccaaactctgta

SEQ ID NO: 307522 - DNA, 30 bp, Artificial Sequence
  Synthetic oligonucleotide
taactattcaataaggctatttgttctgta

SEQ ID NO: 307523 - DNA, 30 bp, Artificial Sequence
  Synthetic oligonucleotide
gaaggatacccatgatttttgacaagtgta

SEQ ID NO: 307524 - DNA, 30 bp, Artificial Sequence
  Synthetic oligonucleotide
tatattgcctactggagaaggtacagtgta

SEQ ID NO: 307525 - DNA, 30 bp, Artificial Sequence
  Synthetic oligonucleotide
taaataaatagctcttggattcccagtgta

SEQ ID NO: 307526 - DNA, 30 bp, Artificial Sequence
  Synthetic oligonucleotide
aaagcacgaaacgagttttggacgagtgta

SEQ ID NO: 307527 - DNA, 30 bp, Artificial Sequence
  Synthetic oligonucleotide
cgtacacctagcgcttcggaatcgagtgta

SEQ ID NO: 307528 - DNA, 30 bp, Artificial Sequence
  Synthetic oligonucleotide
gctattggtcatgatcttcggcaacgtgta

SEQ ID NO: 307529 - DNA, 30 bp, Artificial Sequence
  Synthetic oligonucleotide
atttatgcatattggaaggatacccgtgta

SEQ ID NO: 307530 - DNA, 30 bp, Artificial Sequence
  Synthetic oligonucleotide
actctaatgcaacagtcttagcgccgtgta

SEQ ID NO: 307531 - DNA, 30 bp, Artificial Sequence
  Synthetic oligonucleotide
aagctggcgtgatcacgtaaagtccgtgta

SEQ ID NO: 307532 - DNA, 30 bp, Artificial Sequence
  Synthetic oligonucleotide
ctgagttagttgagctttgcgaagcgtgta

SEQ ID NO: 307533 - DNA, 30 bp, Artificial Sequence
  Synthetic oligonucleotide
taactactctgcaacttcgctatgcgtgta

SEQ ID NO: 307534 - DNA, 31 bp, Artificial Sequence
  Synthetic oligonucleotide
cggttctagtttgaatatgtgcgctcgtgta

SEQ ID NO: 307535 - DNA, 30 bp, Artificial Sequence
  Synthetic oligonucleotide
cggtagcaagtatttttgcagcttcgtgta

SEQ ID NO: 307536 - DNA, 30 bp, Artificial Sequence
  Synthetic oligonucleotide
ccctccgggtaaatgggcgggcgaggtgta

SEQ ID NO: 307537 - DNA, 30 bp, Artificial Sequence
  Synthetic oligonucleotide
tacagtagtcagcaagcagctttaggtgta

SEQ ID NO: 307538 - DNA, 30 bp, Artificial Sequence
  Synthetic oligonucleotide
tcattctgtgtgatttgggaagccggtgta

SEQ ID NO: 307539 - DNA, 30 bp, Artificial Sequence
  Synthetic oligonucleotide
ggggcagttgattagtgaggtgagggtgta

SEQ ID NO: 307540 - DNA, 30 bp, Artificial Sequence
  Synthetic oligonucleotide
caaatccgtgtcctatgtttggtgggtgta

SEQ ID NO: 307541 - DNA, 30 bp, Artificial Sequence
  Synthetic oligonucleotide
tcaggatagaacatagcggcattgggtgta

SEQ ID NO: 307542 - DNA, 30 bp, Artificial Sequence
  Synthetic oligonucleotide
gagtatacgtcctactgaagtcgtggtgta

SEQ ID NO: 307543 - DNA, 30 bp, Artificial Sequence
  Synthetic oligonucleotide
atggagaaagtggaagtttcgggatgtgta

SEQ ID NO: 307544 - DNA, 30 bp, Artificial Sequence
  Synthetic oligonucleotide
ttagcgcatttcacccggtagagctgtgta

SEQ ID NO: 307545 - DNA, 30 bp, Artificial Sequence
  Synthetic oligonucleotide
ttgacacctgtgtaacctacctattgtgta

SEQ ID NO: 307546 - DNA, 30 bp, Artificial Sequence
  Synthetic oligonucleotide
cgatatcctgcgtcgtctacgacaattgta

SEQ ID NO: 307547 - DNA, 30 bp, Artificial Sequence
  Synthetic oligonucleotide
aggtgcaaggtctgtgaagaagacattgta

SEQ ID NO: 307548 - DNA, 30 bp, Artificial Sequence
  Synthetic oligonucleotide
aaattcaggatcagtcgagttcgcattgta

SEQ ID NO: 307549 - DNA, 30 bp, Artificial Sequence
  Synthetic oligonucleotide
tacttagagattgtccagaagtgcattgta

SEQ ID NO: 307550 - DNA, 30 bp, Artificial Sequence
  Synthetic oligonucleotide
tcgtcttccttatctatcatctcgattgta

SEQ ID NO: 307551 - DNA, 30 bp, Artificial Sequence
  Synthetic oligonucleotide
tgcgttacaaccttggtgtattgtattgta

SEQ ID NO: 307552 - DNA, 30 bp, Artificial Sequence
  Synthetic oligonucleotide
ataacgtggtacttgaagtcttgtattgta

SEQ ID NO: 307553 - DNA, 30 bp, Artificial Sequence
  Synthetic oligonucleotide
ctatacctgcgagtgcaccataaacttgta

SEQ ID NO: 307554 - DNA, 30 bp, Artificial Sequence
  Synthetic oligonucleotide
atttggtgttcccgatttgaaacagttgta

SEQ ID NO: 307555 - DNA, 30 bp, Artificial Sequence
  Synthetic oligonucleotide
tggttccctaaccgggaagtcttggttgta

SEQ ID NO: 307556 - DNA, 30 bp, Artificial Sequence
  Synthetic oligonucleotide
taccatcataacgaaggccaggatgttgta

SEQ ID NO: 307557 - DNA, 30 bp, Artificial Sequence
  Synthetic oligonucleotide
catgtaggtttccaatactcccaatttgta

SEQ ID NO: 307558 - DNA, 30 bp, Artificial Sequence
  Synthetic oligonucleotide
agggggcgatgcaaacttctgaggtttgta

SEQ ID NO: 307559 - DNA, 30 bp, Artificial Sequence
  Synthetic oligonucleotide
tattactgtactgacttttgtcggtttgta

SEQ ID NO: 307560 - DNA, 30 bp, Artificial Sequence
  Synthetic oligonucleotide
acgtgaaggtaatcgccttcgacttttgta

SEQ ID NO: 307561 - DNA, 30 bp, Artificial Sequence
  Synthetic oligonucleotide
agtgacagatatgaatatcggacttttgta

SEQ ID NO: 307562 - DNA, 30 bp, Artificial Sequence
  Synthetic oligonucleotide
ctgggcgagcaaaaaagatctatttttgta

SEQ ID NO: 307563 - DNA, 30 bp, Artificial Sequence
  Synthetic oligonucleotide
aggaattaagccacgccattgtcaaaatta

SEQ ID NO: 307564 - DNA, 30 bp, Artificial Sequence
  Synthetic oligonucleotide
cgactagccatcttagtgcaacgaaaatta

SEQ ID NO: 307565 - DNA, 30 bp, Artificial Sequence
  Synthetic oligonucleotide
actagaaacaatggtcaacccaacaaatta

SEQ ID NO: 307566 - DNA, 30 bp, Artificial Sequence
  Synthetic oligonucleotide
aagcacgaagccgatctactctccaaatta

SEQ ID NO: 307567 - DNA, 30 bp, Artificial Sequence
  Synthetic oligonucleotide
gaccgatacggtgggctaggagcgaaatta

SEQ ID NO: 307568 - DNA, 30 bp, Artificial Sequence
  Synthetic oligonucleotide
actctattgttatacaggaaccggaaatta

SEQ ID NO: 307569 - DNA, 30 bp, Artificial Sequence
  Synthetic oligonucleotide
ccgcgcgctagcaaaatagggattaaatta

SEQ ID NO: 307570 - DNA, 30 bp, Artificial Sequence
  Synthetic oligonucleotide
gcgtcccgggtatgctcacccgaacaatta

SEQ ID NO: 307571 - DNA, 30 bp, Artificial Sequence
  Synthetic oligonucleotide
acaatagggctacttaattgataacaatta

SEQ ID NO: 307572 - DNA, 30 bp, Artificial Sequence
  Synthetic oligonucleotide
atcggttgtgtgaacctagtctcacaatta

SEQ ID NO: 307573 - DNA, 30 bp, Artificial Sequence
  Synthetic oligonucleotide
tctcgtgtgtggcgattcacgggacaatta

SEQ ID NO: 307574 - DNA, 30 bp, Artificial Sequence
  Synthetic oligonucleotide
gcgatgaccgcacccacagaaaaccaatta

SEQ ID NO: 307575 - DNA, 30 bp, Artificial Sequence
  Synthetic oligonucleotide
accggaagtggatttgtaaaccaccaatta

SEQ ID NO: 307576 - DNA, 30 bp, Artificial Sequence
  Synthetic oligonucleotide
tcgtaattttccaattgtcgggaccaatta

SEQ ID NO: 307577 - DNA, 30 bp, Artificial Sequence
  Synthetic oligonucleotide
agggcaccgttgtgttcggcatcgcaatta

SEQ ID NO: 307578 - DNA, 30 bp, Artificial Sequence
  Synthetic oligonucleotide
ggcgatgaggacaatcaagacaatcaatta

SEQ ID NO: 307579 - DNA, 30 bp, Artificial Sequence
  Synthetic oligonucleotide
ctttactgacgccagaagcacagagaatta

SEQ ID NO: 307580 - DNA, 30 bp, Artificial Sequence
  Synthetic oligonucleotide
ctgctatgcgagcactctgttcgagaatta

SEQ ID NO: 307581 - DNA, 30 bp, Artificial Sequence
  Synthetic oligonucleotide
aaaatttcgagattagagcccctagaatta

SEQ ID NO: 307582 - DNA, 30 bp, Artificial Sequence
  Synthetic oligonucleotide
agatgacttgtgaatcacgccgaggaatta

SEQ ID NO: 307583 - DNA, 31 bp, Artificial Sequence
  Synthetic oligonucleotide
gtaccgcacagcactgttcgtggaggaatta

SEQ ID NO: 307584 - DNA, 30 bp, Artificial Sequence
  Synthetic oligonucleotide
ttgctgcatcaagtgcaatacacggaatta

SEQ ID NO: 307585 - DNA, 30 bp, Artificial Sequence
  Synthetic oligonucleotide
acgtcctgtgtgagatttctttcggaatta

SEQ ID NO: 307586 - DNA, 30 bp, Artificial Sequence
  Synthetic oligonucleotide
cactcggaatcttagttggttgatgaatta

SEQ ID NO: 307587 - DNA, 30 bp, Artificial Sequence
  Synthetic oligonucleotide
taagagtgctcgggaggtcaaggtgaatta

SEQ ID NO: 307588 - DNA, 30 bp, Artificial Sequence
  Synthetic oligonucleotide
cggcgcgaacgcttatgatggcaataatta

SEQ ID NO: 307589 - DNA, 30 bp, Artificial Sequence
  Synthetic oligonucleotide
ctcgtgcccgtattaggacacacataatta

SEQ ID NO: 307590 - DNA, 30 bp, Artificial Sequence
  Synthetic oligonucleotide
ttaactatcgtctccccaagaggctaatta

SEQ ID NO: 307591 - DNA, 30 bp, Artificial Sequence
  Synthetic oligonucleotide
ggatctcgataccatgacaatgcttaatta

SEQ ID NO: 307592 - DNA, 30 bp, Artificial Sequence
  Synthetic oligonucleotide
tgacactactttagtgttttaggttaatta

SEQ ID NO: 307593 - DNA, 30 bp, Artificial Sequence
  Synthetic oligonucleotide
tcgtacggtgctacttatatcgtaacatta

SEQ ID NO: 307594 - DNA, 30 bp, Artificial Sequence
  Synthetic oligonucleotide
aggattatggtctgactctgcgacacatta

SEQ ID NO: 307595 - DNA, 30 bp, Artificial Sequence
  Synthetic oligonucleotide
ccgcggccgacaaggtaatgctacacatta

SEQ ID NO: 307596 - DNA, 30 bp, Artificial Sequence
  Synthetic oligonucleotide
ctggaggcaggtgcatttcaacagacatta

SEQ ID NO: 307597 - DNA, 30 bp, Artificial Sequence
  Synthetic oligonucleotide
gacagtatacacgatcattgttatacatta

SEQ ID NO: 307598 - DNA, 30 bp, Artificial Sequence
  Synthetic oligonucleotide
cgatggagcctatttgtcgactctacatta

SEQ ID NO: 307599 - DNA, 30 bp, Artificial Sequence
  Synthetic oligonucleotide
atttgcgtaaatcggcttgtctgtacatta

SEQ ID NO: 307600 - DNA, 30 bp, Artificial Sequence
  Synthetic oligonucleotide
gcctgttataattcgagtgccgttacatta

SEQ ID NO: 307601 - DNA, 30 bp, Artificial Sequence
  Synthetic oligonucleotide
ttgtgtgcgcaataagatgaataaccatta

SEQ ID NO: 307602 - DNA, 30 bp, Artificial Sequence
  Synthetic oligonucleotide
ggtagggaggggccgttcataggaccatta

SEQ ID NO: 307603 - DNA, 30 bp, Artificial Sequence
  Synthetic oligonucleotide
ttgttatttgttacgtgcttgtacccatta

SEQ ID NO: 307604 - DNA, 30 bp, Artificial Sequence
  Synthetic oligonucleotide
ggaatgatccccccgacgatacgcccatta

SEQ ID NO: 307605 - DNA, 30 bp, Artificial Sequence
  Synthetic oligonucleotide
ttagtgggatccctccagtggaagccatta

SEQ ID NO: 307606 - DNA, 30 bp, Artificial Sequence
  Synthetic oligonucleotide
tcgaccagttaactgattaaatcgccatta

SEQ ID NO: 307607 - DNA, 30 bp, Artificial Sequence
  Synthetic oligonucleotide
ttcattatacaggccagatcgaggccatta

SEQ ID NO: 307608 - DNA, 30 bp, Artificial Sequence
  Synthetic oligonucleotide
aattgtgcccggttaaagagggctccatta

SEQ ID NO: 307609 - DNA, 30 bp, Artificial Sequence
  Synthetic oligonucleotide
actgctacgaatgatgcctaaacagcatta

SEQ ID NO: 307610 - DNA, 30 bp, Artificial Sequence
  Synthetic oligonucleotide
acaaaatacagtagcgatcgaggagcatta

SEQ ID NO: 307611 - DNA, 30 bp, Artificial Sequence
  Synthetic oligonucleotide
taaaagatgtatcgtcacaaatgcgcatta

SEQ ID NO: 307612 - DNA, 30 bp, Artificial Sequence
  Synthetic oligonucleotide
tgatttaaacgctaaatgagctgcgcatta

SEQ ID NO: 307613 - DNA, 30 bp, Artificial Sequence
  Synthetic oligonucleotide
gaattactcacgaagcctatactcgcatta

SEQ ID NO: 307614 - DNA, 30 bp, Artificial Sequence
  Synthetic oligonucleotide
taaggccacgtagtctggggccaggcatta

SEQ ID NO: 307615 - DNA, 30 bp, Artificial Sequence
  Synthetic oligonucleotide
tttccggataagggcagtaaagcatcatta

SEQ ID NO: 307616 - DNA, 30 bp, Artificial Sequence
  Synthetic oligonucleotide
tgtaataacttacaaattcgatcatcatta

SEQ ID NO: 307617 - DNA, 30 bp, Artificial Sequence
  Synthetic oligonucleotide
acccggcatcgcatatctgagctatcatta

SEQ ID NO: 307618 - DNA, 30 bp, Artificial Sequence
  Synthetic oligonucleotide
ggattgccgctaacctctaagagctcatta

SEQ ID NO: 307619 - DNA, 30 bp, Artificial Sequence
  Synthetic oligonucleotide
gcagcgtcggtctagaaggacaagtcatta

SEQ ID NO: 307620 - DNA, 30 bp, Artificial Sequence
  Synthetic oligonucleotide
tacgttcacccggaatgtaataggtcatta

SEQ ID NO: 307621 - DNA, 30 bp, Artificial Sequence
  Synthetic oligonucleotide
atagcggacataagcactacagtgtcatta

SEQ ID NO: 307622 - DNA, 30 bp, Artificial Sequence
  Synthetic oligonucleotide
tctacacatgtgggactgttatgttcatta

SEQ ID NO: 307623 - DNA, 30 bp, Artificial Sequence
  Synthetic oligonucleotide
accgcgccttgtgcaattaagtgttcatta

SEQ ID NO: 307624 - DNA, 30 bp, Artificial Sequence
  Synthetic oligonucleotide
cagtggggctggtatcagctgttttcatta

SEQ ID NO: 307625 - DNA, 30 bp, Artificial Sequence
  Synthetic oligonucleotide
ttgacacgagatgatgttacataaagatta

SEQ ID NO: 307626 - DNA, 30 bp, Artificial Sequence
  Synthetic oligonucleotide
gtttaagcgctcagtcgacacacaagatta

SEQ ID NO: 307627 - DNA, 30 bp, Artificial Sequence
  Synthetic oligonucleotide
ggatgggcttagattttttcggtaagatta

SEQ ID NO: 307628 - DNA, 30 bp, Artificial Sequence
  Synthetic oligonucleotide
acagcgtcttaggtttcgtagagcagatta

SEQ ID NO: 307629 - DNA, 30 bp, Artificial Sequence
  Synthetic oligonucleotide
ggatcatgatgctatgcagccggcagatta

SEQ ID NO: 307630 - DNA, 30 bp, Artificial Sequence
  Synthetic oligonucleotide
tgaccgacggcctccagtctcaggagatta

SEQ ID NO: 307631 - DNA, 30 bp, Artificial Sequence
  Synthetic oligonucleotide
gtacgatgattacttgtaacgtatagatta

SEQ ID NO: 307632 - DNA, 30 bp, Artificial Sequence
  Synthetic oligonucleotide
tgtggggtgctgtgagtcccgtatagatta

SEQ ID NO: 307633 - DNA, 30 bp, Artificial Sequence
  Synthetic oligonucleotide
gtgtcggcaagaccccttgggcctagatta

SEQ ID NO: 307634 - DNA, 30 bp, Artificial Sequence
  Synthetic oligonucleotide
gtagaagttgtggttgacatcattagatta

SEQ ID NO: 307635 - DNA, 30 bp, Artificial Sequence
  Synthetic oligonucleotide
ctattcgcgtgtaactcttgaggacgatta

SEQ ID NO: 307636 - DNA, 30 bp, Artificial Sequence
  Synthetic oligonucleotide
ggagggactatagtcttaattcgtcgatta

SEQ ID NO: 307637 - DNA, 30 bp, Artificial Sequence
  Synthetic oligonucleotide
cggtacttacacaccgccgtttttcgatta

SEQ ID NO: 307638 - DNA, 30 bp, Artificial Sequence
  Synthetic oligonucleotide
gtcggatgtaactgatcagttgaaggatta

SEQ ID NO: 307639 - DNA, 30 bp, Artificial Sequence
  Synthetic oligonucleotide
ccgccggggtccctatatcactaaggatta

SEQ ID NO: 307640 - DNA, 30 bp, Artificial Sequence
  Synthetic oligonucleotide
tgatggtgagaaatatgggcttcaggatta

SEQ ID NO: 307641 - DNA, 30 bp, Artificial Sequence
  Synthetic oligonucleotide
ttcaagtgagagttcacccggagaggatta

SEQ ID NO: 307642 - DNA, 30 bp, Artificial Sequence
  Synthetic oligonucleotide
aagttagacgtggaacttgcctccggatta

SEQ ID NO: 307643 - DNA, 30 bp, Artificial Sequence
  Synthetic oligonucleotide
tacactggatgctacttgccgggcggatta

SEQ ID NO: 307644 - DNA, 30 bp, Artificial Sequence
  Synthetic oligonucleotide
ttcggaatacctgcatgaggagagggatta

SEQ ID NO: 307645 - DNA, 30 bp, Artificial Sequence
  Synthetic oligonucleotide
tcgacaagggcttaagtatatccgggatta

SEQ ID NO: 307646 - DNA, 30 bp, Artificial Sequence
  Synthetic oligonucleotide
aagtcctctccattaggaatcgggggatta

SEQ ID NO: 307647 - DNA, 30 bp, Artificial Sequence
  Synthetic oligonucleotide
gagagcaactgcaggcttctctctggatta

SEQ ID NO: 307648 - DNA, 30 bp, Artificial Sequence
  Synthetic oligonucleotide
agcacgctagcagcgctgagtgaatgatta

SEQ ID NO: 307649 - DNA, 30 bp, Artificial Sequence
  Synthetic oligonucleotide
atattgagtggaaaagagacttaatgatta

SEQ ID NO: 307650 - DNA, 30 bp, Artificial Sequence
  Synthetic oligonucleotide
gaagataactacttaacgacgttatgatta

SEQ ID NO: 307651 - DNA, 30 bp, Artificial Sequence
  Synthetic oligonucleotide
ggtacgttccgacgatgaaattactgatta

SEQ ID NO: 307652 - DNA, 30 bp, Artificial Sequence
  Synthetic oligonucleotide
cgtatggcgtccggcttcgttaaaatatta

SEQ ID NO: 307653 - DNA, 30 bp, Artificial Sequence
  Synthetic oligonucleotide
taagctacgatgcggaagcaacgaatatta

SEQ ID NO: 307654 - DNA, 30 bp, Artificial Sequence
  Synthetic oligonucleotide
tttattgcgtgaactctaggcgccatatta

SEQ ID NO: 307655 - DNA, 30 bp, Artificial Sequence
  Synthetic oligonucleotide
tcatcccacccggaatttccgtccatatta

SEQ ID NO: 307656 - DNA, 30 bp, Artificial Sequence
  Synthetic oligonucleotide
gatgaggaagttgactcaggtggcatatta

SEQ ID NO: 307657 - DNA, 30 bp, Artificial Sequence
  Synthetic oligonucleotide
gtcaacttaatgtgtcattcgaagatatta

SEQ ID NO: 307658 - DNA, 30 bp, Artificial Sequence
  Synthetic oligonucleotide
tgtaacaaatggtacggggcagagatatta

SEQ ID NO: 307659 - DNA, 30 bp, Artificial Sequence
  Synthetic oligonucleotide
actaagcgttagagggaaaacgatatatta

SEQ ID NO: 307660 - DNA, 30 bp, Artificial Sequence
  Synthetic oligonucleotide
tcagggttatcactagtactccttatatta

SEQ ID NO: 307661 - DNA, 30 bp, Artificial Sequence
  Synthetic oligonucleotide
attataagccgatagaaagaagttatatta

SEQ ID NO: 307662 - DNA, 30 bp, Artificial Sequence
  Synthetic oligonucleotide
cttccattgagccaagaaggatttatatta

SEQ ID NO: 307663 - DNA, 30 bp, Artificial Sequence
  Synthetic oligonucleotide
gtggggctaagtgggcgtatggccctatta

SEQ ID NO: 307664 - DNA, 30 bp, Artificial Sequence
  Synthetic oligonucleotide
ggccctagacgtattctcgcaagcctatta

SEQ ID NO: 307665 - DNA, 30 bp, Artificial Sequence
  Synthetic oligonucleotide
gcgatcgcactcggcgggctgacgctatta

SEQ ID NO: 307666 - DNA, 30 bp, Artificial Sequence
  Synthetic oligonucleotide
tcggccacccctagcccagatcatctatta

SEQ ID NO: 307667 - DNA, 30 bp, Artificial Sequence
  Synthetic oligonucleotide
tcaatggttaacatactacaaggtctatta

SEQ ID NO: 307668 - DNA, 30 bp, Artificial Sequence
  Synthetic oligonucleotide
ccatgtcaaaaaaaaggtattatcgtatta

SEQ ID NO: 307669 - DNA, 30 bp, Artificial Sequence
  Synthetic oligonucleotide
catcccgtggtctaccgcgatgcggtatta

SEQ ID NO: 307670 - DNA, 30 bp, Artificial Sequence
  Synthetic oligonucleotide
cagcaatatatgattaacattcgggtatta

SEQ ID NO: 307671 - DNA, 30 bp, Artificial Sequence
  Synthetic oligonucleotide
ggatctttcctaacgaagtcatgggtatta

SEQ ID NO: 307672 - DNA, 30 bp, Artificial Sequence
  Synthetic oligonucleotide
cgtccacggctagcgcttttatcattatta

SEQ ID NO: 307673 - DNA, 30 bp, Artificial Sequence
  Synthetic oligonucleotide
aaggcgcagttgtagagatcgaacttatta

SEQ ID NO: 307674 - DNA, 30 bp, Artificial Sequence
  Synthetic oligonucleotide
tagtggtcattccgcctggaagacttatta

SEQ ID NO: 307675 - DNA, 30 bp, Artificial Sequence
  Synthetic oligonucleotide
gcgtttggcaggtaaatatacttgttatta

SEQ ID NO: 307676 - DNA, 30 bp, Artificial Sequence
  Synthetic oligonucleotide
tgtaggaggtaactcctcacttatttatta

SEQ ID NO: 307677 - DNA, 30 bp, Artificial Sequence
  Synthetic oligonucleotide
acattgtaggctgtaccgggtcgtttatta

SEQ ID NO: 307678 - DNA, 30 bp, Artificial Sequence
  Synthetic oligonucleotide
aactcggtagcattagtaggaggtttatta

SEQ ID NO: 307679 - DNA, 30 bp, Artificial Sequence
  Synthetic oligonucleotide
gtatggtgtatcagtcacgcggaaaactta

SEQ ID NO: 307680 - DNA, 30 bp, Artificial Sequence
  Synthetic oligonucleotide
gggcgaaacatttacgtgtgggaaaactta

SEQ ID NO: 307681 - DNA, 30 bp, Artificial Sequence
  Synthetic oligonucleotide
cctctccgaagtttaggctactgaaactta

SEQ ID NO: 307682 - DNA, 30 bp, Artificial Sequence
  Synthetic oligonucleotide
aaggcctgtacacgcaattctctaaactta

SEQ ID NO: 307683 - DNA, 30 bp, Artificial Sequence
  Synthetic oligonucleotide
tcccagagtaggtgaagccctagcaactta

SEQ ID NO: 307684 - DNA, 30 bp, Artificial Sequence
  Synthetic oligonucleotide
gacagataccaacgccgtacggtcaactta

SEQ ID NO: 307685 - DNA, 30 bp, Artificial Sequence
  Synthetic oligonucleotide
cttttgtgtgaaggaaaggacaggaactta

SEQ ID NO: 307686 - DNA, 30 bp, Artificial Sequence
  Synthetic oligonucleotide
ggcgaagattatccatcaaggttacactta

SEQ ID NO: 307687 - DNA, 30 bp, Artificial Sequence
  Synthetic oligonucleotide
tcacctaaaattatcgcacgggaccactta

SEQ ID NO: 307688 - DNA, 30 bp, Artificial Sequence
  Synthetic oligonucleotide
cacaagatctattcgcaagcgcagcactta

SEQ ID NO: 307689 - DNA, 30 bp, Artificial Sequence
  Synthetic oligonucleotide
tcaagaccgttactggcgccccggcactta

SEQ ID NO: 307690 - DNA, 30 bp, Artificial Sequence
  Synthetic oligonucleotide
tccagatagaatcctatgtgtcgtcactta

SEQ ID NO: 307691 - DNA, 30 bp, Artificial Sequence
  Synthetic oligonucleotide
gtccaagtacgcgatgcacgatgagactta

SEQ ID NO: 307692 - DNA, 30 bp, Artificial Sequence
  Synthetic oligonucleotide
gtggactacttgtcgcaacacctagactta

SEQ ID NO: 307693 - DNA, 30 bp, Artificial Sequence
  Synthetic oligonucleotide
tactctacacacgtcagatcggacgactta

SEQ ID NO: 307694 - DNA, 30 bp, Artificial Sequence
  Synthetic oligonucleotide
atgcccacgtgccattcagactccgactta

SEQ ID NO: 307695 - DNA, 30 bp, Artificial Sequence
  Synthetic oligonucleotide
ccccgatggtagtacatgcaagaggactta

SEQ ID NO: 307696 - DNA, 30 bp, Artificial Sequence
  Synthetic oligonucleotide
cgctgcgcacacattaagcacgcggactta

SEQ ID NO: 307697 - DNA, 30 bp, Artificial Sequence
  Synthetic oligonucleotide
gtcgggataaccccgctgactggggactta

SEQ ID NO: 307698 - DNA, 30 bp, Artificial Sequence
  Synthetic oligonucleotide
ggtctcatggcggtgtaaggtttggactta

SEQ ID NO: 307699 - DNA, 30 bp, Artificial Sequence
  Synthetic oligonucleotide
tcgactcctgatgccataaaaccctactta

SEQ ID NO: 307700 - DNA, 30 bp, Artificial Sequence
  Synthetic oligonucleotide
gtagcaagatatataggcacctcctactta

SEQ ID NO: 307701 - DNA, 30 bp, Artificial Sequence
  Synthetic oligonucleotide
tcgagtctcagcaagtccctccgctactta

SEQ ID NO: 307702 - DNA, 30 bp, Artificial Sequence
  Synthetic oligonucleotide
tgaaagccttggtatgagtaatgctactta

SEQ ID NO: 307703 - DNA, 30 bp, Artificial Sequence
  Synthetic oligonucleotide
gtatcatgcgtcacgatcaggatctactta

SEQ ID NO: 307704 - DNA, 30 bp, Artificial Sequence
  Synthetic oligonucleotide
acgctgattctgagcacagccgtctactta

SEQ ID NO: 307705 - DNA, 30 bp, Artificial Sequence
  Synthetic oligonucleotide
gtacgctgaatagactactgtccgtactta

SEQ ID NO: 307706 - DNA, 30 bp, Artificial Sequence
  Synthetic oligonucleotide
cacgagctgaatttatggtaccggtactta

SEQ ID NO: 307707 - DNA, 30 bp, Artificial Sequence
  Synthetic oligonucleotide
agttaggtggtggcgggttaattgtactta

SEQ ID NO: 307708 - DNA, 30 bp, Artificial Sequence
  Synthetic oligonucleotide
agtatccgagtggtaccactcatttactta

SEQ ID NO: 307709 - DNA, 30 bp, Artificial Sequence
  Synthetic oligonucleotide
tacagttacagctcaactgacctttactta

SEQ ID NO: 307710 - DNA, 30 bp, Artificial Sequence
  Synthetic oligonucleotide
ggccttcaagggacgtataggacaacctta

SEQ ID NO: 307711 - DNA, 30 bp, Artificial Sequence
  Synthetic oligonucleotide
ccctttcaacgctctggggtatggacctta

SEQ ID NO: 307712 - DNA, 30 bp, Artificial Sequence
  Synthetic oligonucleotide
gaccatccgatatccgaaatagatacctta

SEQ ID NO: 307713 - DNA, 30 bp, Artificial Sequence
  Synthetic oligonucleotide
ctcattattactcccatcaacattacctta

SEQ ID NO: 307714 - DNA, 30 bp, Artificial Sequence
  Synthetic oligonucleotide
cttaaaatgactctgcgcctgattacctta

SEQ ID NO: 307715 - DNA, 30 bp, Artificial Sequence
  Synthetic oligonucleotide
tccttttaagcccaaaaatggcacccctta

SEQ ID NO: 307716 - DNA, 30 bp, Artificial Sequence
  Synthetic oligonucleotide
ggctcgaaaaaaacctaggtgcggccctta

SEQ ID NO: 307717 - DNA, 30 bp, Artificial Sequence
  Synthetic oligonucleotide
ggtgtaaaaaggatacaaccaaccgcctta

SEQ ID NO: 307718 - DNA, 30 bp, Artificial Sequence
  Synthetic oligonucleotide
ccgagaatggccgagtccatgtgggcctta

SEQ ID NO: 307719 - DNA, 30 bp, Artificial Sequence
  Synthetic oligonucleotide
acatgcgagctttgcttcgagatggcctta

SEQ ID NO: 307720 - DNA, 30 bp, Artificial Sequence
  Synthetic oligonucleotide
accagctacactgactcgtcgccatcctta

SEQ ID NO: 307721 - DNA, 30 bp, Artificial Sequence
  Synthetic oligonucleotide
actgtaggttgagtctcgggtatatcctta

SEQ ID NO: 307722 - DNA, 30 bp, Artificial Sequence
  Synthetic oligonucleotide
tagtgtgagagagtattatctgtgtcctta

SEQ ID NO: 307723 - DNA, 30 bp, Artificial Sequence
  Synthetic oligonucleotide
acggtctgcgacaaagctcgcaattcctta

SEQ ID NO: 307724 - DNA, 30 bp, Artificial Sequence
  Synthetic oligonucleotide
ataaatatcggataacagctgacaagctta

SEQ ID NO: 307725 - DNA, 30 bp, Artificial Sequence
  Synthetic oligonucleotide
gtttaattgtgggtttaacggagaagctta

SEQ ID NO: 307726 - DNA, 30 bp, Artificial Sequence
  Synthetic oligonucleotide
gaaacgacgtttgtagatatctacagctta

SEQ ID NO: 307727 - DNA, 30 bp, Artificial Sequence
  Synthetic oligonucleotide
gctcgtgtggctgactagcacgagagctta

SEQ ID NO: 307728 - DNA, 30 bp, Artificial Sequence
  Synthetic oligonucleotide
ggagctgttctacagagcggacggagctta

SEQ ID NO: 307729 - DNA, 30 bp, Artificial Sequence
  Synthetic oligonucleotide
ctaaacctcgcagtgctgacggtgagctta

SEQ ID NO: 307730 - DNA, 30 bp, Artificial Sequence
  Synthetic oligonucleotide
tcggggtctcagttagtttgggaacgctta

SEQ ID NO: 307731 - DNA, 30 bp, Artificial Sequence
  Synthetic oligonucleotide
tacgcgatggttgttattctgtcacgctta

SEQ ID NO: 307732 - DNA, 30 bp, Artificial Sequence
  Synthetic oligonucleotide
tcatccagatctggatcatttaagcgctta

SEQ ID NO: 307733 - DNA, 30 bp, Artificial Sequence
  Synthetic oligonucleotide
tttcaatgtatgtatgtaaaaaggcgctta

SEQ ID NO: 307734 - DNA, 30 bp, Artificial Sequence
  Synthetic oligonucleotide
ggctacccgtcatgtttgaactatcgctta

SEQ ID NO: 307735 - DNA, 30 bp, Artificial Sequence
  Synthetic oligonucleotide
ccggactaagacggtataaattgtcgctta

SEQ ID NO: 307736 - DNA, 30 bp, Artificial Sequence
  Synthetic oligonucleotide
aagtagctgacaacctgaaactcaggctta

SEQ ID NO: 307737 - DNA, 30 bp, Artificial Sequence
  Synthetic oligonucleotide
acttatcaccgcaccgtgacattcggctta

SEQ ID NO: 307738 - DNA, 30 bp, Artificial Sequence
  Synthetic oligonucleotide
gtgattccaaaagaagcacttgtgggctta

SEQ ID NO: 307739 - DNA, 30 bp, Artificial Sequence
  Synthetic oligonucleotide
tctagtatgtgggcttaccttcgtggctta

SEQ ID NO: 307740 - DNA, 30 bp, Artificial Sequence
  Synthetic oligonucleotide
tgagatggcctaaaatgtgaagcatgctta

SEQ ID NO: 307741 - DNA, 30 bp, Artificial Sequence
  Synthetic oligonucleotide
ctagaagggcgcccaacctgccgatgctta

SEQ ID NO: 307742 - DNA, 30 bp, Artificial Sequence
  Synthetic oligonucleotide
tagtgcttgcggatctacataacctgctta

SEQ ID NO: 307743 - DNA, 30 bp, Artificial Sequence
  Synthetic oligonucleotide
agatgaccaagattaaatactgaaatctta

SEQ ID NO: 307744 - DNA, 30 bp, Artificial Sequence
  Synthetic oligonucleotide
gtgaagcgccacaactttcaatgaatctta

SEQ ID NO: 307745 - DNA, 30 bp, Artificial Sequence
  Synthetic oligonucleotide
gcttctcagatgtcgccgggtcacatctta

SEQ ID NO: 307746 - DNA, 30 bp, Artificial Sequence
  Synthetic oligonucleotide
aaaaacgttggagggaaaccttacatctta

SEQ ID NO: 307747 - DNA, 30 bp, Artificial Sequence
  Synthetic oligonucleotide
acaaaaggagaggaggggactggcatctta

SEQ ID NO: 307748 - DNA, 30 bp, Artificial Sequence
  Synthetic oligonucleotide
agtgcaatcatacgtgcctacgtcatctta

SEQ ID NO: 307749 - DNA, 30 bp, Artificial Sequence
  Synthetic oligonucleotide
acggtcaagtaggaatctcagttcatctta

SEQ ID NO: 307750 - DNA, 30 bp, Artificial Sequence
  Synthetic oligonucleotide
acaggcgcagaccgttcatttccgatctta

SEQ ID NO: 307751 - DNA, 30 bp, Artificial Sequence
  Synthetic oligonucleotide
cttagatcttgggtggtgagtgggatctta

SEQ ID NO: 307752 - DNA, 30 bp, Artificial Sequence
  Synthetic oligonucleotide
tttctcgaaagtcacaagttggtgatctta

SEQ ID NO: 307753 - DNA, 30 bp, Artificial Sequence
  Synthetic oligonucleotide
atcaaggatgaatcagcactcgatatctta

SEQ ID NO: 307754 - DNA, 30 bp, Artificial Sequence
  Synthetic oligonucleotide
atacaaatgacgtcgcaatgagctatctta

SEQ ID NO: 307755 - DNA, 30 bp, Artificial Sequence
  Synthetic oligonucleotide
aatagtccacttcgggggcgacttatctta

SEQ ID NO: 307756 - DNA, 30 bp, Artificial Sequence
  Synthetic oligonucleotide
actagtattttatgtgagtaagacctctta

SEQ ID NO: 307757 - DNA, 30 bp, Artificial Sequence
  Synthetic oligonucleotide
tccccaaatcgtcggatgtaaacgctctta

SEQ ID NO: 307758 - DNA, 30 bp, Artificial Sequence
  Synthetic oligonucleotide
agatccacatcacaacctttaaggctctta

SEQ ID NO: 307759 - DNA, 30 bp, Artificial Sequence
  Synthetic oligonucleotide
gtgagtttaatcgaattgagggggctctta

SEQ ID NO: 307760 - DNA, 30 bp, Artificial Sequence
  Synthetic oligonucleotide
ctaaacgttcgaacctccacaaatctctta

SEQ ID NO: 307761 - DNA, 30 bp, Artificial Sequence
  Synthetic oligonucleotide
gtcgcctagagagatgtacgcgatctctta

SEQ ID NO: 307762 - DNA, 30 bp, Artificial Sequence
  Synthetic oligonucleotide
ccgaacataggagtcccgatgaaagtctta

SEQ ID NO: 307763 - DNA, 30 bp, Artificial Sequence
  Synthetic oligonucleotide
ccgttgcgcactcagcaaactaccgtctta

SEQ ID NO: 307764 - DNA, 30 bp, Artificial Sequence
  Synthetic oligonucleotide
tcaagtgtaaacataacgtccaaggtctta

SEQ ID NO: 307765 - DNA, 31 bp, Artificial Sequence
  Synthetic oligonucleotide
tacgaccgtttataccaccggtgaggtctta

SEQ ID NO: 307766 - DNA, 30 bp, Artificial Sequence
  Synthetic oligonucleotide
atcggtctatcgtacttctcacgggtctta

SEQ ID NO: 307767 - DNA, 30 bp, Artificial Sequence
  Synthetic oligonucleotide
acacgcgacgctgtttctgctggggtctta

SEQ ID NO: 307768 - DNA, 30 bp, Artificial Sequence
  Synthetic oligonucleotide
gcgtatgatgtttacatcggatctgtctta

SEQ ID NO: 307769 - DNA, 30 bp, Artificial Sequence
  Synthetic oligonucleotide
aagcggcttatacattatactattgtctta

SEQ ID NO: 307770 - DNA, 30 bp, Artificial Sequence
  Synthetic oligonucleotide
gaaagctcggatcgaagcgtgtttgtctta

SEQ ID NO: 307771 - DNA, 30 bp, Artificial Sequence
  Synthetic oligonucleotide
taaatctgttgagcggtaaactaattctta

SEQ ID NO: 307772 - DNA, 30 bp, Artificial Sequence
  Synthetic oligonucleotide
accggccggtgctccggaagaatattctta

SEQ ID NO: 307773 - DNA, 30 bp, Artificial Sequence
  Synthetic oligonucleotide
ggtttctaaaggtaaatgagtcaaaagtta

SEQ ID NO: 307774 - DNA, 30 bp, Artificial Sequence
  Synthetic oligonucleotide
atacacttcgtgcgcgccagggaaaagtta

SEQ ID NO: 307775 - DNA, 30 bp, Artificial Sequence
  Synthetic oligonucleotide
accacaatagggagtccggagagaaagtta

SEQ ID NO: 307776 - DNA, 30 bp, Artificial Sequence
  Synthetic oligonucleotide
aggcctacatgagaaggtgttagaaagtta

SEQ ID NO: 307777 - DNA, 30 bp, Artificial Sequence
  Synthetic oligonucleotide
cttccacgggttaggtggggaactaagtta

SEQ ID NO: 307778 - DNA, 30 bp, Artificial Sequence
  Synthetic oligonucleotide
atgaggtctattactagtgctggtaagtta

SEQ ID NO: 307779 - DNA, 30 bp, Artificial Sequence
  Synthetic oligonucleotide
ggaccagtgcatgctcaggaagaacagtta

SEQ ID NO: 307780 - DNA, 30 bp, Artificial Sequence
  Synthetic oligonucleotide
taagtttcggggctcctacggggacagtta

SEQ ID NO: 307781 - DNA, 30 bp, Artificial Sequence
  Synthetic oligonucleotide
aacgaatactaatgtatgcggcagcagtta

SEQ ID NO: 307782 - DNA, 30 bp, Artificial Sequence
  Synthetic oligonucleotide
cgggtgtgcatgcatactcactagcagtta

SEQ ID NO: 307783 - DNA, 30 bp, Artificial Sequence
  Synthetic oligonucleotide
cccggttatatcgagtagctcgctcagtta

SEQ ID NO: 307784 - DNA, 30 bp, Artificial Sequence
  Synthetic oligonucleotide
gacggttaggattccataaatcaagagtta

SEQ ID NO: 307785 - DNA, 30 bp, Artificial Sequence
  Synthetic oligonucleotide
aaaaggactaatcacgccgacacagagtta

SEQ ID NO: 307786 - DNA, 30 bp, Artificial Sequence
  Synthetic oligonucleotide
taaaaacgaagttaggttgctgcagagtta

SEQ ID NO: 307787 - DNA, 30 bp, Artificial Sequence
  Synthetic oligonucleotide
aaagtcggctggcgtaattatcccgagtta

SEQ ID NO: 307788 - DNA, 30 bp, Artificial Sequence
  Synthetic oligonucleotide
ccgcccaaatataggtgattggccgagtta

SEQ ID NO: 307789 - DNA, 30 bp, Artificial Sequence
  Synthetic oligonucleotide
gttttgcccaatgttgttcgaaaggagtta

SEQ ID NO: 307790 - DNA, 30 bp, Artificial Sequence
  Synthetic oligonucleotide
ccggtgccaatggggcattataaggagtta

SEQ ID NO: 307791 - DNA, 30 bp, Artificial Sequence
  Synthetic oligonucleotide
tggagatttcaccactgcctctaggagtta

SEQ ID NO: 307792 - DNA, 30 bp, Artificial Sequence
  Synthetic oligonucleotide
acgacccaccctggtagctgtatggagtta

SEQ ID NO: 307793 - DNA, 30 bp, Artificial Sequence
  Synthetic oligonucleotide
atcgcttagcaagttcacctcaatgagtta

SEQ ID NO: 307794 - DNA, 30 bp, Artificial Sequence
  Synthetic oligonucleotide
ttgtttacttatactattagatctgagtta

SEQ ID NO: 307795 - DNA, 30 bp, Artificial Sequence
  Synthetic oligonucleotide
atggtcattggctcggccctgtgtgagtta

SEQ ID NO: 307796 - DNA, 30 bp, Artificial Sequence
  Synthetic oligonucleotide
gagaactcaaccccaggctggcaatagtta

SEQ ID NO: 307797 - DNA, 30 bp, Artificial Sequence
  Synthetic oligonucleotide
tgcatagctctcactctagtaggatagtta

SEQ ID NO: 307798 - DNA, 30 bp, Artificial Sequence
  Synthetic oligonucleotide
gcgaaccgctattgtcaacggttatagtta

SEQ ID NO: 307799 - DNA, 30 bp, Artificial Sequence
  Synthetic oligonucleotide
ggagccttttatacgggaccttcctagtta

SEQ ID NO: 307800 - DNA, 30 bp, Artificial Sequence
  Synthetic oligonucleotide
aggtgcttgctcacagcgttgtagtagtta

SEQ ID NO: 307801 - DNA, 30 bp, Artificial Sequence
  Synthetic oligonucleotide
tggccaacgggtgatctgaaaacgtagtta

SEQ ID NO: 307802 - DNA, 30 bp, Artificial Sequence
  Synthetic oligonucleotide
taaggaatacgcggtaaaagttaaacgtta

SEQ ID NO: 307803 - DNA, 30 bp, Artificial Sequence
  Synthetic oligonucleotide
ctgagattttaaggatggaaattcacgtta

SEQ ID NO: 307804 - DNA, 30 bp, Artificial Sequence
  Synthetic oligonucleotide
aataaaacggcgtcctcgtcaatgacgtta

SEQ ID NO: 307805 - DNA, 29 bp, Artificial Sequence
  Synthetic oligonucleotide
atcgttaacacagaccagccatgacgtta

SEQ ID NO: 307806 - DNA, 30 bp, Artificial Sequence
  Synthetic oligonucleotide
gggattggtccatgtttattcaatacgtta

SEQ ID NO: 307807 - DNA, 30 bp, Artificial Sequence
  Synthetic oligonucleotide
gttagggtggggttctgtataataccgtta

SEQ ID NO: 307808 - DNA, 30 bp, Artificial Sequence
  Synthetic oligonucleotide
caagttataaaacacaatcccgacccgtta

SEQ ID NO: 307809 - DNA, 30 bp, Artificial Sequence
  Synthetic oligonucleotide
aagcgattgtaagagtacacgacgccgtta

SEQ ID NO: 307810 - DNA, 30 bp, Artificial Sequence
  Synthetic oligonucleotide
atcgggtcctatattgctaataatccgtta

SEQ ID NO: 307811 - DNA, 30 bp, Artificial Sequence
  Synthetic oligonucleotide
tctatcaggcgaacgcttgccgatccgtta

SEQ ID NO: 307812 - DNA, 30 bp, Artificial Sequence
  Synthetic oligonucleotide
attcgcagcggaccacctctcactccgtta

SEQ ID NO: 307813 - DNA, 30 bp, Artificial Sequence
  Synthetic oligonucleotide
ctcgtcaccgagcagtgggctcaagcgtta

SEQ ID NO: 307814 - DNA, 30 bp, Artificial Sequence
  Synthetic oligonucleotide
atcattatcccaggaagtacgcacgcgtta

SEQ ID NO: 307815 - DNA, 30 bp, Artificial Sequence
  Synthetic oligonucleotide
ctaggagcgcgcgtctatttataggcgtta

SEQ ID NO: 307816 - DNA, 30 bp, Artificial Sequence
  Synthetic oligonucleotide
gggaacggacaagataacgtccgggcgtta

SEQ ID NO: 307817 - DNA, 30 bp, Artificial Sequence
  Synthetic oligonucleotide
atggaattgcatcagtatgaacttgcgtta

SEQ ID NO: 307818 - DNA, 30 bp, Artificial Sequence
  Synthetic oligonucleotide
tacttgtaacaattaaactgatttgcgtta

SEQ ID NO: 307819 - DNA, 30 bp, Artificial Sequence
  Synthetic oligonucleotide
ctgaaaaagtatctcgtcatgcaatcgtta

SEQ ID NO: 307820 - DNA, 30 bp, Artificial Sequence
  Synthetic oligonucleotide
gccctacgtgttgcgccgtacttatcgtta

SEQ ID NO: 307821 - DNA, 30 bp, Artificial Sequence
  Synthetic oligonucleotide
ttttgcaaagtgacagggcggttatcgtta

SEQ ID NO: 307822 - DNA, 30 bp, Artificial Sequence
  Synthetic oligonucleotide
gcgcccgttggcccgaggtggcgctcgtta

SEQ ID NO: 307823 - DNA, 30 bp, Artificial Sequence
  Synthetic oligonucleotide
tatggataagtaacttctagcaaaaggtta

SEQ ID NO: 307824 - DNA, 30 bp, Artificial Sequence
  Synthetic oligonucleotide
gcggctgcgcttatacggtcgataaggtta

SEQ ID NO: 307825 - DNA, 30 bp, Artificial Sequence
  Synthetic oligonucleotide
cattgtaggattatttttttgttcaggtta

SEQ ID NO: 307826 - DNA, 30 bp, Artificial Sequence
  Synthetic oligonucleotide
agattggccaaaaagttttttacgaggtta

SEQ ID NO: 307827 - DNA, 30 bp, Artificial Sequence
  Synthetic oligonucleotide
cactctgaggcaatccatatggtgaggtta

SEQ ID NO: 307828 - DNA, 30 bp, Artificial Sequence
  Synthetic oligonucleotide
attgaaatatgtgtcattccctttaggtta

SEQ ID NO: 307829 - DNA, 30 bp, Artificial Sequence
  Synthetic oligonucleotide
ggtagtgtaccgctgatatgacaacggtta

SEQ ID NO: 307830 - DNA, 30 bp, Artificial Sequence
  Synthetic oligonucleotide
atatgttgttcacacaggcaccgacggtta

SEQ ID NO: 307831 - DNA, 30 bp, Artificial Sequence
  Synthetic oligonucleotide
acggctggcccagcaaggaaagtacggtta

SEQ ID NO: 307832 - DNA, 30 bp, Artificial Sequence
  Synthetic oligonucleotide
cagcgataggctgactaaacagcgcggtta

SEQ ID NO: 307833 - DNA, 30 bp, Artificial Sequence
  Synthetic oligonucleotide
actgctagggcaacgatttatactcggtta

SEQ ID NO: 307834 - DNA, 30 bp, Artificial Sequence
  Synthetic oligonucleotide
attatggattgacacccgacagaagggtta

SEQ ID NO: 307835 - DNA, 30 bp, Artificial Sequence
  Synthetic oligonucleotide
gttcgtaggtaacctaatggggaagggtta

SEQ ID NO: 307836 - DNA, 30 bp, Artificial Sequence
  Synthetic oligonucleotide
catccagcattaatctgtcattcagggtta

SEQ ID NO: 307837 - DNA, 30 bp, Artificial Sequence
  Synthetic oligonucleotide
cagctggatgtgcctaatcgcatagggtta

SEQ ID NO: 307838 - DNA, 30 bp, Artificial Sequence
  Synthetic oligonucleotide
ccttgcacggtgtctaattaacacgggtta

SEQ ID NO: 307839 - DNA, 30 bp, Artificial Sequence
  Synthetic oligonucleotide
gtagattcacgttaaagaaaccacgggtta

SEQ ID NO: 307840 - DNA, 30 bp, Artificial Sequence
  Synthetic oligonucleotide
gcattgctgaagtagtcagtaggcgggtta

SEQ ID NO: 307841 - DNA, 34 bp, Artificial Sequence
  Synthetic oligonucleotide
tatagagcaggcagtgatgggtggttgcgggtta

SEQ ID NO: 307842 - DNA, 30 bp, Artificial Sequence
  Synthetic oligonucleotide
ggaggtcgctgatgcggcaacggggggtta

SEQ ID NO: 307843 - DNA, 30 bp, Artificial Sequence
  Synthetic oligonucleotide
gcagggagagttcagttgcaacgtgggtta

SEQ ID NO: 307844 - DNA, 30 bp, Artificial Sequence
  Synthetic oligonucleotide
ctaggggggcgatgtcctggttaatggtta

SEQ ID NO: 307845 - DNA, 30 bp, Artificial Sequence
  Synthetic oligonucleotide
gtccctcaatgcgacgttggaagatggtta

SEQ ID NO: 307846 - DNA, 30 bp, Artificial Sequence
  Synthetic oligonucleotide
tgaacgcctagatgtaccccgaactggtta

SEQ ID NO: 307847 - DNA, 30 bp, Artificial Sequence
  Synthetic oligonucleotide
tggggactgacccgacgattaagctggtta

SEQ ID NO: 307848 - DNA, 31 bp, Artificial Sequence
  Synthetic oligonucleotide
tgaaggtgaattgttgtatttgaagtggtta

SEQ ID NO: 307849 - DNA, 30 bp, Artificial Sequence
  Synthetic oligonucleotide
aataaagttgctcaaccgtgcgagtggtta

SEQ ID NO: 307850 - DNA, 30 bp, Artificial Sequence
  Synthetic oligonucleotide
ggatttataacaaggaaatcgaattggtta

SEQ ID NO: 307851 - DNA, 30 bp, Artificial Sequence
  Synthetic oligonucleotide
tgagtggggtgggagggcgagtgttggtta

SEQ ID NO: 307852 - DNA, 30 bp, Artificial Sequence
  Synthetic oligonucleotide
caccccccagcaagacatgtacagatgtta

SEQ ID NO: 307853 - DNA, 30 bp, Artificial Sequence
  Synthetic oligonucleotide
cctacatccgaaacacgattacggatgtta

SEQ ID NO: 307854 - DNA, 30 bp, Artificial Sequence
  Synthetic oligonucleotide
tactaaacgaaaatcgaaggatgtatgtta

SEQ ID NO: 307855 - DNA, 30 bp, Artificial Sequence
  Synthetic oligonucleotide
cgcattccggagtgcccggacacactgtta

SEQ ID NO: 307856 - DNA, 30 bp, Artificial Sequence
  Synthetic oligonucleotide
atgtgatagtttcgagcctctccactgtta

SEQ ID NO: 307857 - DNA, 30 bp, Artificial Sequence
  Synthetic oligonucleotide
gctcactgacgaatgaacgatgtcctgtta

SEQ ID NO: 307858 - DNA, 30 bp, Artificial Sequence
  Synthetic oligonucleotide
cgatcaatatatcaactctgtttgctgtta

SEQ ID NO: 307859 - DNA, 30 bp, Artificial Sequence
  Synthetic oligonucleotide
tccgctagtaacagcttgtgacgtctgtta

SEQ ID NO: 307860 - DNA, 30 bp, Artificial Sequence
  Synthetic oligonucleotide
ttgggaccagaaccgcgttgacccgtgtta

SEQ ID NO: 307861 - DNA, 30 bp, Artificial Sequence
  Synthetic oligonucleotide
atctgactcacgcacttcaaaaatgtgtta

SEQ ID NO: 307862 - DNA, 30 bp, Artificial Sequence
  Synthetic oligonucleotide
aaatccaattaggagtcggattatgtgtta

SEQ ID NO: 307863 - DNA, 30 bp, Artificial Sequence
  Synthetic oligonucleotide
tcagacgctgattggactgaggctgtgtta

SEQ ID NO: 307864 - DNA, 30 bp, Artificial Sequence
  Synthetic oligonucleotide
caagtcacgtgagtaacatttaacttgtta

SEQ ID NO: 307865 - DNA, 30 bp, Artificial Sequence
  Synthetic oligonucleotide
actaagctgaaagggcagacagcgttgtta

SEQ ID NO: 307866 - DNA, 30 bp, Artificial Sequence
  Synthetic oligonucleotide
agatacaggtttggcattgaactgttgtta

SEQ ID NO: 307867 - DNA, 30 bp, Artificial Sequence
  Synthetic oligonucleotide
aactaatagttcgaacgttccttgttgtta

SEQ ID NO: 307868 - DNA, 30 bp, Artificial Sequence
  Synthetic oligonucleotide
gttggcctagactagacttagccaaattta

SEQ ID NO: 307869 - DNA, 30 bp, Artificial Sequence
  Synthetic oligonucleotide
aatacgaggcacgttggtaagtgaaattta

SEQ ID NO: 307870 - DNA, 30 bp, Artificial Sequence
  Synthetic oligonucleotide
attgccatcggtgaaccgactagcaattta

SEQ ID NO: 307871 - DNA, 30 bp, Artificial Sequence
  Synthetic oligonucleotide
agttcagtgagctttgaactacataattta

SEQ ID NO: 307872 - DNA, 30 bp, Artificial Sequence
  Synthetic oligonucleotide
ggatagaatcaccacaggggttataattta

SEQ ID NO: 307873 - DNA, 30 bp, Artificial Sequence
  Synthetic oligonucleotide
gcgatctggttttgtagtgggcgtaattta

SEQ ID NO: 307874 - DNA, 30 bp, Artificial Sequence
  Synthetic oligonucleotide
caacctgctgctgtcatgtaacttaattta

SEQ ID NO: 307875 - DNA, 30 bp, Artificial Sequence
  Synthetic oligonucleotide
agtgtgtttctttggctaggtgttaattta

SEQ ID NO: 307876 - DNA, 30 bp, Artificial Sequence
  Synthetic oligonucleotide
gtataacctagttcttttacatcacattta

SEQ ID NO: 307877 - DNA, 30 bp, Artificial Sequence
  Synthetic oligonucleotide
gttaacggctccccgggctcgatacattta

SEQ ID NO: 307878 - DNA, 30 bp, Artificial Sequence
  Synthetic oligonucleotide
gtgtgaattggaggcaggtgaaagcattta

SEQ ID NO: 307879 - DNA, 30 bp, Artificial Sequence
  Synthetic oligonucleotide
cagcttcaccacatattgagttatcattta

SEQ ID NO: 307880 - DNA, 30 bp, Artificial Sequence
  Synthetic oligonucleotide
acctagtgcgaatactcaagaagtcattta

SEQ ID NO: 307881 - DNA, 40 bp, Artificial Sequence
  Synthetic oligonucleotide
acactcattgacaattaaaacttttcgtcattttcattta

SEQ ID NO: 307882 - DNA, 30 bp, Artificial Sequence
  Synthetic oligonucleotide
acggagattcatcgttgacgtaaagattta

SEQ ID NO: 307883 - DNA, 30 bp, Artificial Sequence
  Synthetic oligonucleotide
tacgtaagtcagcaagtaccatccgattta

SEQ ID NO: 307884 - DNA, 30 bp, Artificial Sequence
  Synthetic oligonucleotide
attgttctctcacacattcggcaggattta

SEQ ID NO: 307885 - DNA, 30 bp, Artificial Sequence
  Synthetic oligonucleotide
cgttggaaattctcgaagaacggggattta

SEQ ID NO: 307886 - DNA, 30 bp, Artificial Sequence
  Synthetic oligonucleotide
tggggtagagaccaacgagtgtttgattta

SEQ ID NO: 307887 - DNA, 30 bp, Artificial Sequence
  Synthetic oligonucleotide
gcgtaacaacggtcgagcacggaatattta

SEQ ID NO: 307888 - DNA, 30 bp, Artificial Sequence
  Synthetic oligonucleotide
taagtaaggatcgtaataagagtatattta

SEQ ID NO: 307889 - DNA, 30 bp, Artificial Sequence
  Synthetic oligonucleotide
tgaagtacgtgcactccccatacgtattta

SEQ ID NO: 307890 - DNA, 30 bp, Artificial Sequence
  Synthetic oligonucleotide
gggaacagtatcaattcaagggggtattta

SEQ ID NO: 307891 - DNA, 30 bp, Artificial Sequence
  Synthetic oligonucleotide
cgggaaaaaattgtgtggccaggttattta

SEQ ID NO: 307892 - DNA, 30 bp, Artificial Sequence
  Synthetic oligonucleotide
ttcaggatcagtggtagatggggttattta

SEQ ID NO: 307893 - DNA, 30 bp, Artificial Sequence
  Synthetic oligonucleotide
cacggagaagtgggcatcgtaatttattta

SEQ ID NO: 307894 - DNA, 30 bp, Artificial Sequence
  Synthetic oligonucleotide
gcactgagtttatagccttatttttattta

SEQ ID NO: 307895 - DNA, 30 bp, Artificial Sequence
  Synthetic oligonucleotide
tttgtagccaccacaccacagaacacttta

SEQ ID NO: 307896 - DNA, 30 bp, Artificial Sequence
  Synthetic oligonucleotide
ccctagctttagaacgtaacggtcacttta

SEQ ID NO: 307897 - DNA, 30 bp, Artificial Sequence
  Synthetic oligonucleotide
ttggtgcgctcaagacattcaacgacttta

SEQ ID NO: 307898 - DNA, 30 bp, Artificial Sequence
  Synthetic oligonucleotide
ttagtagcgcgaaagctacgtccgacttta

SEQ ID NO: 307899 - DNA, 30 bp, Artificial Sequence
  Synthetic oligonucleotide
gtcatgactccaaatgtaactcggacttta

SEQ ID NO: 307900 - DNA, 30 bp, Artificial Sequence
  Synthetic oligonucleotide
cacgctgattcaaacaaatggaatacttta

SEQ ID NO: 307901 - DNA, 30 bp, Artificial Sequence
  Synthetic oligonucleotide
acatgtactcggacaacaagagctacttta

SEQ ID NO: 307902 - DNA, 30 bp, Artificial Sequence
  Synthetic oligonucleotide
cacgtcaattagatcggttttttgccttta

SEQ ID NO: 307903 - DNA, 30 bp, Artificial Sequence
  Synthetic oligonucleotide
gggggcatcgaggctatagatccagcttta

SEQ ID NO: 307904 - DNA, 30 bp, Artificial Sequence
  Synthetic oligonucleotide
taaaaggctcctgagtaagtgtgggcttta

SEQ ID NO: 307905 - DNA, 30 bp, Artificial Sequence
  Synthetic oligonucleotide
ggcagtttgctggatgctcacttggcttta

SEQ ID NO: 307906 - DNA, 30 bp, Artificial Sequence
  Synthetic oligonucleotide
acccttcagaaacagcggcatagtgcttta

SEQ ID NO: 307907 - DNA, 30 bp, Artificial Sequence
  Synthetic oligonucleotide
cggcgtcctgcaaaacctccaatatcttta

SEQ ID NO: 307908 - DNA, 30 bp, Artificial Sequence
  Synthetic oligonucleotide
cgtcgggggtgcagtctgggtgtctcttta

SEQ ID NO: 307909 - DNA, 30 bp, Artificial Sequence
  Synthetic oligonucleotide
aaccttgggttgtggagaagctggtcttta

SEQ ID NO: 307910 - DNA, 30 bp, Artificial Sequence
  Synthetic oligonucleotide
ctcagaagtagcgctagtaacgattcttta

SEQ ID NO: 307911 - DNA, 30 bp, Artificial Sequence
  Synthetic oligonucleotide
tcaagccacatggctccgaatacaagttta

SEQ ID NO: 307912 - DNA, 30 bp, Artificial Sequence
  Synthetic oligonucleotide
atatggattcgtgagcgctaggcaagttta

SEQ ID NO: 307913 - DNA, 30 bp, Artificial Sequence
  Synthetic oligonucleotide
ctcaggtagaaacacacaatctgaagttta

SEQ ID NO: 307914 - DNA, 30 bp, Artificial Sequence
  Synthetic oligonucleotide
tcgttcgaaggtgcctaattcaacagttta

SEQ ID NO: 307915 - DNA, 30 bp, Artificial Sequence
  Synthetic oligonucleotide
cgcgaggcgatcctctaccgtcacagttta

SEQ ID NO: 307916 - DNA, 30 bp, Artificial Sequence
  Synthetic oligonucleotide
gcatgattcaccctcgttctatccagttta

SEQ ID NO: 307917 - DNA, 30 bp, Artificial Sequence
  Synthetic oligonucleotide
cgtttagactcaaataggtcggtcagttta

SEQ ID NO: 307918 - DNA, 30 bp, Artificial Sequence
  Synthetic oligonucleotide
aagtgccctcctgcggattgtcagagttta

SEQ ID NO: 307919 - DNA, 30 bp, Artificial Sequence
  Synthetic oligonucleotide
gtgttactagtggcacgcgccgatagttta

SEQ ID NO: 307920 - DNA, 30 bp, Artificial Sequence
  Synthetic oligonucleotide
ttagttaataggtacatagcctatagttta

SEQ ID NO: 307921 - DNA, 30 bp, Artificial Sequence
  Synthetic oligonucleotide
tatactacgggctatggaggtcctagttta

SEQ ID NO: 307922 - DNA, 30 bp, Artificial Sequence
  Synthetic oligonucleotide
taccgtatgattcgtcaaatgcgtagttta

SEQ ID NO: 307923 - DNA, 30 bp, Artificial Sequence
  Synthetic oligonucleotide
cgttggacgcaactctactcaggacgttta

SEQ ID NO: 307924 - DNA, 30 bp, Artificial Sequence
  Synthetic oligonucleotide
tcggcaatatgtgtacagggagtccgttta

SEQ ID NO: 307925 - DNA, 30 bp, Artificial Sequence
  Synthetic oligonucleotide
cttggtcgtatggcgtctcgtccgcgttta

SEQ ID NO: 307926 - DNA, 30 bp, Artificial Sequence
  Synthetic oligonucleotide
ccttgtcagtttggtttcctctctcgttta

SEQ ID NO: 307927 - DNA, 30 bp, Artificial Sequence
  Synthetic oligonucleotide
cctgtcagtaattaacagcttagtcgttta

SEQ ID NO: 307928 - DNA, 30 bp, Artificial Sequence
  Synthetic oligonucleotide
agcacgctacaatattccgagcttcgttta

SEQ ID NO: 307929 - DNA, 30 bp, Artificial Sequence
  Synthetic oligonucleotide
atgaggatgggtcgtgaggcataaggttta

SEQ ID NO: 307930 - DNA, 30 bp, Artificial Sequence
  Synthetic oligonucleotide
caaagcggataatgcaggcatgcaggttta

SEQ ID NO: 307931 - DNA, 30 bp, Artificial Sequence
  Synthetic oligonucleotide
gataccacaaggaaccagtgtataggttta

SEQ ID NO: 307932 - DNA, 30 bp, Artificial Sequence
  Synthetic oligonucleotide
ctttctgcgtgatggtattaagtaggttta

SEQ ID NO: 307933 - DNA, 26 bp, Artificial Sequence
  Synthetic oligonucleotide
cataaccgggccatctctagggttta

SEQ ID NO: 307934 - DNA, 30 bp, Artificial Sequence
  Synthetic oligonucleotide
atgctgctgtcgatttgggatccatgttta

SEQ ID NO: 307935 - DNA, 30 bp, Artificial Sequence
  Synthetic oligonucleotide
ccgcctaaatcgagttgggcacgatgttta

SEQ ID NO: 307936 - DNA, 30 bp, Artificial Sequence
  Synthetic oligonucleotide
atcccgtcacaagagccatagggatgttta

SEQ ID NO: 307937 - DNA, 30 bp, Artificial Sequence
  Synthetic oligonucleotide
caagcatatcgtcgattcactatatgttta

SEQ ID NO: 307938 - DNA, 30 bp, Artificial Sequence
  Synthetic oligonucleotide
tgacggcaccggtcgacaaacgtatgttta

SEQ ID NO: 307939 - DNA, 30 bp, Artificial Sequence
  Synthetic oligonucleotide
ccagggtcactcgaatcactgcactgttta

SEQ ID NO: 307940 - DNA, 30 bp, Artificial Sequence
  Synthetic oligonucleotide
acgccactgatagggtcatccggctgttta

SEQ ID NO: 307941 - DNA, 30 bp, Artificial Sequence
  Synthetic oligonucleotide
caccgaaatgtataagtctatcagtgttta

SEQ ID NO: 307942 - DNA, 30 bp, Artificial Sequence
  Synthetic oligonucleotide
tagtacccgagatttggacgaacgtgttta

SEQ ID NO: 307943 - DNA, 30 bp, Artificial Sequence
  Synthetic oligonucleotide
cactgttaacgccgaccggagttgtgttta

SEQ ID NO: 307944 - DNA, 30 bp, Artificial Sequence
  Synthetic oligonucleotide
gtccacagccagctgaaaaggcattgttta

SEQ ID NO: 307945 - DNA, 30 bp, Artificial Sequence
  Synthetic oligonucleotide
cctatcatgtccggcgattcaacttgttta

SEQ ID NO: 307946 - DNA, 30 bp, Artificial Sequence
  Synthetic oligonucleotide
ctattgcttgttactttataggcgatttta

SEQ ID NO: 307947 - DNA, 30 bp, Artificial Sequence
  Synthetic oligonucleotide
agtaccacatgttagtgagagtctatttta

SEQ ID NO: 307948 - DNA, 30 bp, Artificial Sequence
  Synthetic oligonucleotide
agtcacagtgagcggtaatgagagctttta

SEQ ID NO: 307949 - DNA, 30 bp, Artificial Sequence
  Synthetic oligonucleotide
tcgatggcaccgccccaaaacggtctttta

SEQ ID NO: 307950 - DNA, 30 bp, Artificial Sequence
  Synthetic oligonucleotide
gttatgcccatctatagtatgacagtttta

SEQ ID NO: 307951 - DNA, 30 bp, Artificial Sequence
  Synthetic oligonucleotide
gcgggcttaaagtgaagtgagccagtttta

SEQ ID NO: 307952 - DNA, 30 bp, Artificial Sequence
  Synthetic oligonucleotide
atgtcagctcaagctgctagcttggtttta

SEQ ID NO: 307953 - DNA, 30 bp, Artificial Sequence
  Synthetic oligonucleotide
gcatacagcagtcggatgatcaatgtttta

SEQ ID NO: 307954 - DNA, 30 bp, Artificial Sequence
  Synthetic oligonucleotide
gagtcaagtgcaaggcacatgacattttta

SEQ ID NO: 307955 - DNA, 30 bp, Artificial Sequence
  Synthetic oligonucleotide
gacaatcctagattagatctaatattttta

SEQ ID NO: 307956 - DNA, 30 bp, Artificial Sequence
  Synthetic oligonucleotide
ggtctagagccgcgccgtgtccacttttta

SEQ ID NO: 307957 - DNA, 30 bp, Artificial Sequence
  Synthetic oligonucleotide
actcgtaatcgggaatagttgcgcttttta

SEQ ID NO: 307958 - DNA, 30 bp, Artificial Sequence
  Synthetic oligonucleotide
atccgcgcacctcagccttagccaaaaaac

SEQ ID NO: 307959 - DNA, 30 bp, Artificial Sequence
  Synthetic oligonucleotide
cgcagtcgttagtcaaagtggagaaaaaac

SEQ ID NO: 307960 - DNA, 30 bp, Artificial Sequence
  Synthetic oligonucleotide
atcgggcatgtgtcacgagacataaaaaac

SEQ ID NO: 307961 - DNA, 30 bp, Artificial Sequence
  Synthetic oligonucleotide
actctcgtgagagtaggtactataaaaaac

SEQ ID NO: 307962 - DNA, 30 bp, Artificial Sequence
  Synthetic oligonucleotide
gattgggcggcaggccggaatgacaaaaac

SEQ ID NO: 307963 - DNA, 30 bp, Artificial Sequence
  Synthetic oligonucleotide
gtactcgctccaacctggagttacaaaaac

SEQ ID NO: 307964 - DNA, 30 bp, Artificial Sequence
  Synthetic oligonucleotide
gttggtgttgtcgtgcgtattagcaaaaac

SEQ ID NO: 307965 - DNA, 30 bp, Artificial Sequence
  Synthetic oligonucleotide
catgagctcagtcgttgcaaatagaaaaac

SEQ ID NO: 307966 - DNA, 29 bp, Artificial Sequence
  Synthetic oligonucleotide
acctttagtatggtataggtttgaaaaac

SEQ ID NO: 307967 - DNA, 30 bp, Artificial Sequence
  Synthetic oligonucleotide
taaaggccataggcataatcgtataaaaac

SEQ ID NO: 307968 - DNA, 30 bp, Artificial Sequence
  Synthetic oligonucleotide
ttcaagggtagcgggaatcctcgacaaaac

SEQ ID NO: 307969 - DNA, 30 bp, Artificial Sequence
  Synthetic oligonucleotide
gaagcgctacaagcggttcgaatacaaaac

SEQ ID NO: 307970 - DNA, 30 bp, Artificial Sequence
  Synthetic oligonucleotide
ggtaatattctctataaaaggtgccaaaac

SEQ ID NO: 307971 - DNA, 30 bp, Artificial Sequence
  Synthetic oligonucleotide
gtctgctaggtgtcaacaggaacgcaaaac

SEQ ID NO: 307972 - DNA, 30 bp, Artificial Sequence
  Synthetic oligonucleotide
tcaaacttttatgatactttatcgcaaaac

SEQ ID NO: 307973 - DNA, 30 bp, Artificial Sequence
  Synthetic oligonucleotide
gtgatcaactataatgaccatggtcaaaac

SEQ ID NO: 307974 - DNA, 30 bp, Artificial Sequence
  Synthetic oligonucleotide
gagggcttccatatggttgacctagaaaac

SEQ ID NO: 307975 - DNA, 30 bp, Artificial Sequence
  Synthetic oligonucleotide
gaggagaatggtttcagtgaattcgaaaac

SEQ ID NO: 307976 - DNA, 30 bp, Artificial Sequence
  Synthetic oligonucleotide
catatagtaattcagaaaaaacgggaaaac

SEQ ID NO: 307977 - DNA, 30 bp, Artificial Sequence
  Synthetic oligonucleotide
aagtgagcgggcaggctgtggcgtgaaaac

SEQ ID NO: 307978 - DNA, 30 bp, Artificial Sequence
  Synthetic oligonucleotide
agaaaggggtacatcagtttatgtgaaaac

SEQ ID NO: 307979 - DNA, 30 bp, Artificial Sequence
  Synthetic oligonucleotide
gtgttattttgtgggtcgaacattgaaaac

SEQ ID NO: 307980 - DNA, 30 bp, Artificial Sequence
  Synthetic oligonucleotide
cggattggggtaggaagaggtgcataaaac

SEQ ID NO: 307981 - DNA, 30 bp, Artificial Sequence
  Synthetic oligonucleotide
caacctgtggagcgtaacataagataaaac

SEQ ID NO: 307982 - DNA, 30 bp, Artificial Sequence
  Synthetic oligonucleotide
ggtagtttgcaatgtgctgtggtataaaac

SEQ ID NO: 307983 - DNA, 30 bp, Artificial Sequence
  Synthetic oligonucleotide
catcggcggggatacgctttgttataaaac

SEQ ID NO: 307984 - DNA, 30 bp, Artificial Sequence
  Synthetic oligonucleotide
tgacgccctagtcttaatagaatctaaaac

SEQ ID NO: 307985 - DNA, 30 bp, Artificial Sequence
  Synthetic oligonucleotide
cagtcttcgaacacgactttaaagtaaaac

SEQ ID NO: 307986 - DNA, 30 bp, Artificial Sequence
  Synthetic oligonucleotide
ccacgcggtttgaggcacgctgcgtaaaac

SEQ ID NO: 307987 - DNA, 30 bp, Artificial Sequence
  Synthetic oligonucleotide
aagagtgttgtcacaataatttattaaaac

SEQ ID NO: 307988 - DNA, 30 bp, Artificial Sequence
  Synthetic oligonucleotide
ttggatgcaccaaatcagagggcttaaaac

SEQ ID NO: 307989 - DNA, 30 bp, Artificial Sequence
  Synthetic oligonucleotide
atatagcgtgagctgccttgatcaacaaac

SEQ ID NO: 307990 - DNA, 30 bp, Artificial Sequence
  Synthetic oligonucleotide
ataattaaaattgggtgagaattcacaaac

SEQ ID NO: 307991 - DNA, 30 bp, Artificial Sequence
  Synthetic oligonucleotide
agggggaaccttttccccaatgagacaaac

SEQ ID NO: 307992 - DNA, 30 bp, Artificial Sequence
  Synthetic oligonucleotide
gtgttagggcgcgggttgctgtatacaaac

SEQ ID NO: 307993 - DNA, 30 bp, Artificial Sequence
  Synthetic oligonucleotide
ggctccagctcagtcacggatgttccaaac

SEQ ID NO: 307994 - DNA, 30 bp, Artificial Sequence
  Synthetic oligonucleotide
acttttagcgacacgggagccgtagcaaac

SEQ ID NO: 307995 - DNA, 30 bp, Artificial Sequence
  Synthetic oligonucleotide
tcgcggctagttgctacaattgcggcaaac

SEQ ID NO: 307996 - DNA, 30 bp, Artificial Sequence
  Synthetic oligonucleotide
tgtcaacgtgccgttagaggtgttgcaaac

SEQ ID NO: 307997 - DNA, 30 bp, Artificial Sequence
  Synthetic oligonucleotide
cacggtacgttctggtttcccgagtcaaac

SEQ ID NO: 307998 - DNA, 30 bp, Artificial Sequence
  Synthetic oligonucleotide
tatacagccctagaacacatagcgtcaaac

SEQ ID NO: 307999 - DNA, 30 bp, Artificial Sequence
  Synthetic oligonucleotide
gccgagcattgggaaatgagcgattcaaac

SEQ ID NO: 308000 - DNA, 30 bp, Artificial Sequence
  Synthetic oligonucleotide
gtatcaggaatactatacaagacttcaaac

SEQ ID NO: 308001 - DNA, 30 bp, Artificial Sequence
  Synthetic oligonucleotide
aataacaaaccaacgccgttgtgcagaaac

SEQ ID NO: 308002 - DNA, 30 bp, Artificial Sequence
  Synthetic oligonucleotide
tataaagaacaacagaataatttcagaaac

SEQ ID NO: 308003 - DNA, 30 bp, Artificial Sequence
  Synthetic oligonucleotide
gcgttataacatacggatgtcgagagaaac

SEQ ID NO: 308004 - DNA, 30 bp, Artificial Sequence
  Synthetic oligonucleotide
gtggtaacaccctcagggggtcggagaaac

SEQ ID NO: 308005 - DNA, 30 bp, Artificial Sequence
  Synthetic oligonucleotide
gatgtaaaaccccagatgttttggagaaac

SEQ ID NO: 308006 - DNA, 30 bp, Artificial Sequence
  Synthetic oligonucleotide
cggggtctttgttggtaaagaatgagaaac

SEQ ID NO: 308007 - DNA, 30 bp, Artificial Sequence
  Synthetic oligonucleotide
gcgttcgcggaatcttttgttcttagaaac

SEQ ID NO: 308008 - DNA, 30 bp, Artificial Sequence
  Synthetic oligonucleotide
gaatccaactgcctgacgttagaacgaaac

SEQ ID NO: 308009 - DNA, 30 bp, Artificial Sequence
  Synthetic oligonucleotide
gccatttcttgtggtgtgatggaacgaaac

SEQ ID NO: 308010 - DNA, 30 bp, Artificial Sequence
  Synthetic oligonucleotide
ttgcaactctttaccggatgaagccgaaac

SEQ ID NO: 308011 - DNA, 30 bp, Artificial Sequence
  Synthetic oligonucleotide
actatataagatagagaaagttcgcgaaac

SEQ ID NO: 308012 - DNA, 30 bp, Artificial Sequence
  Synthetic oligonucleotide
ttgctgctgtgcccagcctgtgatcgaaac

SEQ ID NO: 308013 - DNA, 30 bp, Artificial Sequence
  Synthetic oligonucleotide
gcaagtccattacatcacagaaaaggaaac

SEQ ID NO: 308014 - DNA, 30 bp, Artificial Sequence
  Synthetic oligonucleotide
acgggccacggcgtatttagcaaaggaaac

SEQ ID NO: 308015 - DNA, 30 bp, Artificial Sequence
  Synthetic oligonucleotide
aaaagttaaggagcgtacagtgaaggaaac

SEQ ID NO: 308016 - DNA, 30 bp, Artificial Sequence
  Synthetic oligonucleotide
cccgcttatgactaatttgggacaggaaac

SEQ ID NO: 308017 - DNA, 30 bp, Artificial Sequence
  Synthetic oligonucleotide
cgcggtattctttatacggtaagaggaaac

SEQ ID NO: 308018 - DNA, 30 bp, Artificial Sequence
  Synthetic oligonucleotide
gccttgccattcgcgaagtctcacggaaac

SEQ ID NO: 308019 - DNA, 30 bp, Artificial Sequence
  Synthetic oligonucleotide
gggcggtgtgtgtggcgcacttacggaaac

SEQ ID NO: 308020 - DNA, 30 bp, Artificial Sequence
  Synthetic oligonucleotide
gtgctggtgccccacgtcgcgcagggaaac

SEQ ID NO: 308021 - DNA, 30 bp, Artificial Sequence
  Synthetic oligonucleotide
acatgcactagtcatccactaaggggaaac

SEQ ID NO: 308022 - DNA, 30 bp, Artificial Sequence
  Synthetic oligonucleotide
gcttatatcaggcctcaggcgaggggaaac

SEQ ID NO: 308023 - DNA, 30 bp, Artificial Sequence
  Synthetic oligonucleotide
agcatggatcccacaagataccgtggaaac

SEQ ID NO: 308024 - DNA, 30 bp, Artificial Sequence
  Synthetic oligonucleotide
gcaggtgatcatactcattgggaatgaaac

SEQ ID NO: 308025 - DNA, 30 bp, Artificial Sequence
  Synthetic oligonucleotide
cgaagaatcgtaaagttcgaactatgaaac

SEQ ID NO: 308026 - DNA, 30 bp, Artificial Sequence
  Synthetic oligonucleotide
ggtctccggcaccatcagcaacactgaaac

SEQ ID NO: 308027 - DNA, 30 bp, Artificial Sequence
  Synthetic oligonucleotide
agacgtccccatcggtacaggagctgaaac

SEQ ID NO: 308028 - DNA, 30 bp, Artificial Sequence
  Synthetic oligonucleotide
aacgatctgtttccataccgaaattgaaac

SEQ ID NO: 308029 - DNA, 30 bp, Artificial Sequence
  Synthetic oligonucleotide
caacaagtgcaggtccccgtgggttgaaac

SEQ ID NO: 308030 - DNA, 30 bp, Artificial Sequence
  Synthetic oligonucleotide
ggcccgtcctcgtctaaactcgaaataaac

SEQ ID NO: 308031 - DNA, 30 bp, Artificial Sequence
  Synthetic oligonucleotide
atctagactagtaaaaggtaaggaataaac

SEQ ID NO: 308032 - DNA, 30 bp, Artificial Sequence
  Synthetic oligonucleotide
ggaaatgtcatatatatatcgtgaataaac

SEQ ID NO: 308033 - DNA, 30 bp, Artificial Sequence
  Synthetic oligonucleotide
cttggcgccagagtaccatccgccataaac

SEQ ID NO: 308034 - DNA, 30 bp, Artificial Sequence
  Synthetic oligonucleotide
ataatcagtcaatggccggctacgataaac

SEQ ID NO: 308035 - DNA, 30 bp, Artificial Sequence
  Synthetic oligonucleotide
gcacggttcacattaaatctaccgataaac

SEQ ID NO: 308036 - DNA, 30 bp, Artificial Sequence
  Synthetic oligonucleotide
cctaccgagaagcgggtgcatccgataaac

SEQ ID NO: 308037 - DNA, 30 bp, Artificial Sequence
  Synthetic oligonucleotide
tgacgaagtcttgggttagactatataaac

SEQ ID NO: 308038 - DNA, 30 bp, Artificial Sequence
  Synthetic oligonucleotide
gggcgatatactgactagttgtctataaac

SEQ ID NO: 308039 - DNA, 30 bp, Artificial Sequence
  Synthetic oligonucleotide
tctacgcccatcagacatctttttataaac

SEQ ID NO: 308040 - DNA, 30 bp, Artificial Sequence
  Synthetic oligonucleotide
gtaatccctcaccggaaaaccgaactaaac

SEQ ID NO: 308041 - DNA, 30 bp, Artificial Sequence
  Synthetic oligonucleotide
gctggtgtcggttttacttcataactaaac

SEQ ID NO: 308042 - DNA, 30 bp, Artificial Sequence
  Synthetic oligonucleotide
cccgatagcgtgccgcgatctagactaaac

SEQ ID NO: 308043 - DNA, 30 bp, Artificial Sequence
  Synthetic oligonucleotide
acagtaagatagttcctcaaaggactaaac

SEQ ID NO: 308044 - DNA, 30 bp, Artificial Sequence
  Synthetic oligonucleotide
gtcagactctcttccgtggaggccctaaac

SEQ ID NO: 308045 - DNA, 29 bp, Artificial Sequence
  Synthetic oligonucleotide
atcatgagcactaagtactcagcctaaac

SEQ ID NO: 308046 - DNA, 31 bp, Artificial Sequence
  Synthetic oligonucleotide
aaggctgtagactctgtcttgcgagctaaac

SEQ ID NO: 308047 - DNA, 31 bp, Artificial Sequence
  Synthetic oligonucleotide
tggggagaagttaaaaagagaaactctaaac

SEQ ID NO: 308048 - DNA, 30 bp, Artificial Sequence
  Synthetic oligonucleotide
tctaaagccacgcgtgccccgtaagtaaac

SEQ ID NO: 308049 - DNA, 30 bp, Artificial Sequence
  Synthetic oligonucleotide
acatttggagcaatctcaatgttagtaaac

SEQ ID NO: 308050 - DNA, 30 bp, Artificial Sequence
  Synthetic oligonucleotide
tgtattaggcccaagtacccgcttgtaaac

SEQ ID NO: 308051 - DNA, 30 bp, Artificial Sequence
  Synthetic oligonucleotide
tataggtcgaacgcctggatacgcttaaac

SEQ ID NO: 308052 - DNA, 30 bp, Artificial Sequence
  Synthetic oligonucleotide
gtatgaacagacagattcgtaggcttaaac

SEQ ID NO: 308053 - DNA, 30 bp, Artificial Sequence
  Synthetic oligonucleotide
cgactccttggaaagcgagcctagttaaac

SEQ ID NO: 308054 - DNA, 30 bp, Artificial Sequence
  Synthetic oligonucleotide
agtgaatatgataaatggttttggttaaac

SEQ ID NO: 308055 - DNA, 30 bp, Artificial Sequence
  Synthetic oligonucleotide
caaaatgatactgggaacgacatgttaaac

SEQ ID NO: 308056 - DNA, 30 bp, Artificial Sequence
  Synthetic oligonucleotide
agtgttgagttgatttgctttcatttaaac

SEQ ID NO: 308057 - DNA, 31 bp, Artificial Sequence
  Synthetic oligonucleotide
gagcccacaagtctcgttcagcgctttaaac

SEQ ID NO: 308058 - DNA, 30 bp, Artificial Sequence
  Synthetic oligonucleotide
actacgcatttcattctcggagaaaacaac

SEQ ID NO: 308059 - DNA, 30 bp, Artificial Sequence
  Synthetic oligonucleotide
agaatgtggacccgtaaggtattaaacaac

SEQ ID NO: 308060 - DNA, 30 bp, Artificial Sequence
  Synthetic oligonucleotide
aaagaacacgcgccgaatatagacaacaac

SEQ ID NO: 308061 - DNA, 30 bp, Artificial Sequence
  Synthetic oligonucleotide
ttaattaaacaatgaaccgcatacaacaac

SEQ ID NO: 308062 - DNA, 30 bp, Artificial Sequence
  Synthetic oligonucleotide
gagggcgttaaataggattttgccaacaac

SEQ ID NO: 308063 - DNA, 31 bp, Artificial Sequence
  Synthetic oligonucleotide
tatcgagcagatgccagagtgtgtcaacaac

SEQ ID NO: 308064 - DNA, 30 bp, Artificial Sequence
  Synthetic oligonucleotide
acaagtacttcgtaagcatgtaaccacaac

SEQ ID NO: 308065 - DNA, 30 bp, Artificial Sequence
  Synthetic oligonucleotide
gttagggagttttcccgcgcttcgcacaac

SEQ ID NO: 308066 - DNA, 30 bp, Artificial Sequence
  Synthetic oligonucleotide
gatgaccgtctgtagttgagcaggcacaac

SEQ ID NO: 308067 - DNA, 30 bp, Artificial Sequence
  Synthetic oligonucleotide
cgatctttcaaagtcgggaccgatcacaac

SEQ ID NO: 308068 - DNA, 30 bp, Artificial Sequence
  Synthetic oligonucleotide
agatttggatcggtatatacgggtcacaac

SEQ ID NO: 308069 - DNA, 30 bp, Artificial Sequence
  Synthetic oligonucleotide
tcatctgtagaaattcccggtcttcacaac

SEQ ID NO: 308070 - DNA, 30 bp, Artificial Sequence
  Synthetic oligonucleotide
gggtaaggttgacccacagctaaagacaac

SEQ ID NO: 308071 - DNA, 30 bp, Artificial Sequence
  Synthetic oligonucleotide
ggtgttaggcacagaaacccactagacaac

SEQ ID NO: 308072 - DNA, 30 bp, Artificial Sequence
  Synthetic oligonucleotide
ataagcgttttctttgtgctatacgacaac

SEQ ID NO: 308073 - DNA, 30 bp, Artificial Sequence
  Synthetic oligonucleotide
agtaagactcgggggaccacatgcgacaac

SEQ ID NO: 308074 - DNA, 30 bp, Artificial Sequence
  Synthetic oligonucleotide
atgcccaggttgggatatccactggacaac

SEQ ID NO: 308075 - DNA, 30 bp, Artificial Sequence
  Synthetic oligonucleotide
tacgcaggggggcccgacctgctggacaac

SEQ ID NO: 308076 - DNA, 30 bp, Artificial Sequence
  Synthetic oligonucleotide
tctgtaattcgccacggggaaagatacaac

SEQ ID NO: 308077 - DNA, 30 bp, Artificial Sequence
  Synthetic oligonucleotide
gttccggagatctaggcgggtcggtacaac

SEQ ID NO: 308078 - DNA, 30 bp, Artificial Sequence
  Synthetic oligonucleotide
gggtccaccccctaacaacagccaaccaac

SEQ ID NO: 308079 - DNA, 30 bp, Artificial Sequence
  Synthetic oligonucleotide
cggctcattattattcgtattggcaccaac

SEQ ID NO: 308080 - DNA, 30 bp, Artificial Sequence
  Synthetic oligonucleotide
tgcagtcggtaggtacgttagtggaccaac

SEQ ID NO: 308081 - DNA, 30 bp, Artificial Sequence
  Synthetic oligonucleotide
atatgcactgattccatcgatcaacccaac

SEQ ID NO: 308082 - DNA, 30 bp, Artificial Sequence
  Synthetic oligonucleotide
cggttatgagctgcggaatctagccccaac

SEQ ID NO: 308083 - DNA, 30 bp, Artificial Sequence
  Synthetic oligonucleotide
tacttgttcgcaaatatactaggccccaac

SEQ ID NO: 308084 - DNA, 30 bp, Artificial Sequence
  Synthetic oligonucleotide
gccagactgtaggataaagcctgccccaac

SEQ ID NO: 308085 - DNA, 30 bp, Artificial Sequence
  Synthetic oligonucleotide
ccacatacagctggaactgctatccccaac

SEQ ID NO: 308086 - DNA, 30 bp, Artificial Sequence
  Synthetic oligonucleotide
cttaatgttataacgaaagagtcgcccaac

SEQ ID NO: 308087 - DNA, 30 bp, Artificial Sequence
  Synthetic oligonucleotide
tgtatcgggcaagtaacattctaagccaac

SEQ ID NO: 308088 - DNA, 30 bp, Artificial Sequence
  Synthetic oligonucleotide
aaaaagcggctaatggtacatatggccaac

SEQ ID NO: 308089 - DNA, 30 bp, Artificial Sequence
  Synthetic oligonucleotide
aaatccaatcggacaagaatatatgccaac

SEQ ID NO: 308090 - DNA, 30 bp, Artificial Sequence
  Synthetic oligonucleotide
cagcgtgcagtaccttttaagcgatccaac

SEQ ID NO: 308091 - DNA, 30 bp, Artificial Sequence
  Synthetic oligonucleotide
atagacccatcactggacacgcactccaac

SEQ ID NO: 308092 - DNA, 30 bp, Artificial Sequence
  Synthetic oligonucleotide
atctgagggaattgcagtgcatagtccaac

SEQ ID NO: 308093 - DNA, 30 bp, Artificial Sequence
  Synthetic oligonucleotide
gggtaaggacagcggtattcaacgtccaac

SEQ ID NO: 308094 - DNA, 30 bp, Artificial Sequence
  Synthetic oligonucleotide
tacatccccagggcgtacgaggcgtccaac

SEQ ID NO: 308095 - DNA, 30 bp, Artificial Sequence
  Synthetic oligonucleotide
gttgataacagtacgtgacaattgtccaac

SEQ ID NO: 308096 - DNA, 30 bp, Artificial Sequence
  Synthetic oligonucleotide
aaatgtgacagcccggtagcattgtccaac

SEQ ID NO: 308097 - DNA, 30 bp, Artificial Sequence
  Synthetic oligonucleotide
cgggagttatacagcgacgacttgtccaac

SEQ ID NO: 308098 - DNA, 30 bp, Artificial Sequence
  Synthetic oligonucleotide
tacgccggctattgtgataccatttccaac

SEQ ID NO: 308099 - DNA, 30 bp, Artificial Sequence
  Synthetic oligonucleotide
agctcggttgttgggtgtactggaagcaac

SEQ ID NO: 308100 - DNA, 30 bp, Artificial Sequence
  Synthetic oligonucleotide
ctcaattccgggattgggagtataagcaac

SEQ ID NO: 308101 - DNA, 31 bp, Artificial Sequence
  Synthetic oligonucleotide
cgtcaggggaacgagggtttaacacagcaac

SEQ ID NO: 308102 - DNA, 30 bp, Artificial Sequence
  Synthetic oligonucleotide
cgagcagaagccgtgctggagatcagcaac

SEQ ID NO: 308103 - DNA, 30 bp, Artificial Sequence
  Synthetic oligonucleotide
atcgggtttacgagtgccttaaatagcaac

SEQ ID NO: 308104 - DNA, 30 bp, Artificial Sequence
  Synthetic oligonucleotide
gccgccatgcgagcttagtatcatagcaac

SEQ ID NO: 308105 - DNA, 30 bp, Artificial Sequence
  Synthetic oligonucleotide
gcacgagcgcgggtcttcttttaacgcaac

SEQ ID NO: 308106 - DNA, 30 bp, Artificial Sequence
  Synthetic oligonucleotide
cccaacgggtttcaacgagcgtcaggcaac

SEQ ID NO: 308107 - DNA, 30 bp, Artificial Sequence
  Synthetic oligonucleotide
cccggcccggaattgtggtcattaggcaac

SEQ ID NO: 308108 - DNA, 30 bp, Artificial Sequence
  Synthetic oligonucleotide
ggaattacaagtcgatagtaatacggcaac

SEQ ID NO: 308109 - DNA, 30 bp, Artificial Sequence
  Synthetic oligonucleotide
acatcatgaaatctggtactgcccggcaac

SEQ ID NO: 308110 - DNA, 30 bp, Artificial Sequence
  Synthetic oligonucleotide
tccgggtatatccagcccatcgtcggcaac

SEQ ID NO: 308111 - DNA, 30 bp, Artificial Sequence
  Synthetic oligonucleotide
agattcctatagggatatcgtctgggcaac

SEQ ID NO: 308112 - DNA, 30 bp, Artificial Sequence
  Synthetic oligonucleotide
catcctttgcggatttccacagtgggcaac

SEQ ID NO: 308113 - DNA, 30 bp, Artificial Sequence
  Synthetic oligonucleotide
gcctccggtctgtggactcttgtgggcaac

SEQ ID NO: 308114 - DNA, 30 bp, Artificial Sequence
  Synthetic oligonucleotide
ccttgccaagactatgtacagtatggcaac

SEQ ID NO: 308115 - DNA, 30 bp, Artificial Sequence
  Synthetic oligonucleotide
tacggccactagccagggaatgttggcaac

SEQ ID NO: 308116 - DNA, 30 bp, Artificial Sequence
  Synthetic oligonucleotide
tttaggtcataagaccactatgttggcaac

SEQ ID NO: 308117 - DNA, 30 bp, Artificial Sequence
  Synthetic oligonucleotide
cttcgcgaatagttgtgtgtatttggcaac

SEQ ID NO: 308118 - DNA, 30 bp, Artificial Sequence
  Synthetic oligonucleotide
agctggcgatacggaagtataggctgcaac

SEQ ID NO: 308119 - DNA, 30 bp, Artificial Sequence
  Synthetic oligonucleotide
aacgcggctgtttgaggagagtgctgcaac

SEQ ID NO: 308120 - DNA, 30 bp, Artificial Sequence
  Synthetic oligonucleotide
ggcgtatttaaagcaagaacccggtgcaac

SEQ ID NO: 308121 - DNA, 30 bp, Artificial Sequence
  Synthetic oligonucleotide
cattcagcctagactctcctggtgtgcaac

SEQ ID NO: 308122 - DNA, 30 bp, Artificial Sequence
  Synthetic oligonucleotide
cacgccgtctcctaccgccgttattgcaac

SEQ ID NO: 308123 - DNA, 31 bp, Artificial Sequence
  Synthetic oligonucleotide
aaaagcctaatgatccggtcccccttgcaac

SEQ ID NO: 308124 - DNA, 30 bp, Artificial Sequence
  Synthetic oligonucleotide
ggtcaaattacaaatcagttaagaatcaac

SEQ ID NO: 308125 - DNA, 30 bp, Artificial Sequence
  Synthetic oligonucleotide
ttctacctataactcaaggatcgaatcaac

SEQ ID NO: 308126 - DNA, 30 bp, Artificial Sequence
  Synthetic oligonucleotide
agcaattacaatcgccgaattataatcaac

SEQ ID NO: 308127 - DNA, 30 bp, Artificial Sequence
  Synthetic oligonucleotide
tggatcctggtgaggtagatggtcatcaac

SEQ ID NO: 308128 - DNA, 30 bp, Artificial Sequence
  Synthetic oligonucleotide
ttgcgtcaaaatttgttgcggaagatcaac

SEQ ID NO: 308129 - DNA, 30 bp, Artificial Sequence
  Synthetic oligonucleotide
tgataacacgaggggggccttcatatcaac

SEQ ID NO: 308130 - DNA, 30 bp, Artificial Sequence
  Synthetic oligonucleotide
atataggtcataaatgacacaggtatcaac

SEQ ID NO: 308131 - DNA, 30 bp, Artificial Sequence
  Synthetic oligonucleotide
tatcataacttttggatcgtctgactcaac

SEQ ID NO: 308132 - DNA, 30 bp, Artificial Sequence
  Synthetic oligonucleotide
gtcatgtaaatactaaactttagcctcaac

SEQ ID NO: 308133 - DNA, 30 bp, Artificial Sequence
  Synthetic oligonucleotide
gggaatggtcgcggaccggtatggctcaac

SEQ ID NO: 308134 - DNA, 30 bp, Artificial Sequence
  Synthetic oligonucleotide
gtggcgtgggacttgtaaacttatctcaac

SEQ ID NO: 308135 - DNA, 30 bp, Artificial Sequence
  Synthetic oligonucleotide
atgccttattcggtctattttatcgtcaac

SEQ ID NO: 308136 - DNA, 30 bp, Artificial Sequence
  Synthetic oligonucleotide
gggctgtgtgacaggggttctcaggtcaac

SEQ ID NO: 308137 - DNA, 30 bp, Artificial Sequence
  Synthetic oligonucleotide
cgcagaggaccttcggacagtgcggtcaac

SEQ ID NO: 308138 - DNA, 30 bp, Artificial Sequence
  Synthetic oligonucleotide
tcaaagtaaagtggctcagttaatgtcaac

SEQ ID NO: 308139 - DNA, 30 bp, Artificial Sequence
  Synthetic oligonucleotide
ccagaaaccgccgaggacattcaattcaac

SEQ ID NO: 308140 - DNA, 30 bp, Artificial Sequence
  Synthetic oligonucleotide
aacatgctgggagtcgtctcatgattcaac

SEQ ID NO: 308141 - DNA, 30 bp, Artificial Sequence
  Synthetic oligonucleotide
ccggggaacgacctgcgtggacgcttcaac

SEQ ID NO: 308142 - DNA, 30 bp, Artificial Sequence
  Synthetic oligonucleotide
aggcgctctcagggtagtcggggcttcaac

SEQ ID NO: 308143 - DNA, 30 bp, Artificial Sequence
  Synthetic oligonucleotide
cacacaacgtcggggcgtagcatgttcaac

SEQ ID NO: 308144 - DNA, 30 bp, Artificial Sequence
  Synthetic oligonucleotide
tcagtggttacagttaacgttgatttcaac

SEQ ID NO: 308145 - DNA, 30 bp, Artificial Sequence
  Synthetic oligonucleotide
taggatccgcggagttcgttcattttcaac

SEQ ID NO: 308146 - DNA, 30 bp, Artificial Sequence
  Synthetic oligonucleotide
cgatgaccgctgaatgagtaagttttcaac

SEQ ID NO: 308147 - DNA, 30 bp, Artificial Sequence
  Synthetic oligonucleotide
cggaccgtcccatatacgcttctaaagaac

SEQ ID NO: 308148 - DNA, 30 bp, Artificial Sequence
  Synthetic oligonucleotide
acctcgacagctcatgatcattagaagaac

SEQ ID NO: 308149 - DNA, 30 bp, Artificial Sequence
  Synthetic oligonucleotide
ttctagtctggcgtgttagctacgaagaac

SEQ ID NO: 308150 - DNA, 30 bp, Artificial Sequence
  Synthetic oligonucleotide
gagacactcgaacgtttcaggtggaagaac

SEQ ID NO: 308151 - DNA, 30 bp, Artificial Sequence
  Synthetic oligonucleotide
tccggatcctcatatctatatgcccagaac

SEQ ID NO: 308152 - DNA, 30 bp, Artificial Sequence
  Synthetic oligonucleotide
agatgtacgatggcccctggaatgcagaac

SEQ ID NO: 308153 - DNA, 30 bp, Artificial Sequence
  Synthetic oligonucleotide
tatacaaacaagtggttctatgctcagaac

SEQ ID NO: 308154 - DNA, 30 bp, Artificial Sequence
  Synthetic oligonucleotide
caagcagcggatttatggtctgctcagaac

SEQ ID NO: 308155 - DNA, 30 bp, Artificial Sequence
  Synthetic oligonucleotide
atactggacctctttaagcaaggcgagaac

SEQ ID NO: 308156 - DNA, 30 bp, Artificial Sequence
  Synthetic oligonucleotide
tcgcttggcttcgccttgggtctcgagaac

SEQ ID NO: 308157 - DNA, 30 bp, Artificial Sequence
  Synthetic oligonucleotide
cctgaatagtgtatttcaactagggagaac

SEQ ID NO: 308158 - DNA, 30 bp, Artificial Sequence
  Synthetic oligonucleotide
ccaagcccaatacgcggtataatggagaac

SEQ ID NO: 308159 - DNA, 30 bp, Artificial Sequence
  Synthetic oligonucleotide
agctaacgtcaccgctaagttatggagaac

SEQ ID NO: 308160 - DNA, 30 bp, Artificial Sequence
  Synthetic oligonucleotide
agggcccagttattcgcctgcaatgagaac

SEQ ID NO: 308161 - DNA, 30 bp, Artificial Sequence
  Synthetic oligonucleotide
tgcgttaaggggtcagcgggaatctagaac

SEQ ID NO: 308162 - DNA, 30 bp, Artificial Sequence
  Synthetic oligonucleotide
tgataatctagcgtaggccgcgcgtagaac

SEQ ID NO: 308163 - DNA, 30 bp, Artificial Sequence
  Synthetic oligonucleotide
agggggcggcaattaatccgtgcgtagaac

SEQ ID NO: 308164 - DNA, 30 bp, Artificial Sequence
  Synthetic oligonucleotide
atgccacccagataccgattgatgtagaac

SEQ ID NO: 308165 - DNA, 30 bp, Artificial Sequence
  Synthetic oligonucleotide
aaatgataagcctaacagaaccattagaac

SEQ ID NO: 308166 - DNA, 30 bp, Artificial Sequence
  Synthetic oligonucleotide
cacacgctaattaaacttatctgttagaac

SEQ ID NO: 308167 - DNA, 30 bp, Artificial Sequence
  Synthetic oligonucleotide
tcggctttaaacctcatgggtctttagaac

SEQ ID NO: 308168 - DNA, 30 bp, Artificial Sequence
  Synthetic oligonucleotide
aatgaagtagcgctttatgtcacgacgaac

SEQ ID NO: 308169 - DNA, 30 bp, Artificial Sequence
  Synthetic oligonucleotide
gataatccccccgtcatacacgggacgaac

SEQ ID NO: 308170 - DNA, 30 bp, Artificial Sequence
  Synthetic oligonucleotide
ctcttgcgtaatcagagggggggcccgaac

SEQ ID NO: 308171 - DNA, 30 bp, Artificial Sequence
  Synthetic oligonucleotide
ccgttggcagacactacgcggtagccgaac

SEQ ID NO: 308172 - DNA, 30 bp, Artificial Sequence
  Synthetic oligonucleotide
cagcacgacagcgtcagggtcaggccgaac

SEQ ID NO: 308173 - DNA, 30 bp, Artificial Sequence
  Synthetic oligonucleotide
cgcggacgcgtataagtcagcttgccgaac

SEQ ID NO: 308174 - DNA, 30 bp, Artificial Sequence
  Synthetic oligonucleotide
tactgccatttaatcgtcaatcctccgaac

SEQ ID NO: 308175 - DNA, 30 bp, Artificial Sequence
  Synthetic oligonucleotide
ctctagtgtagcggaaagtaggctccgaac

SEQ ID NO: 308176 - DNA, 30 bp, Artificial Sequence
  Synthetic oligonucleotide
tttgactatggcactctacttggtccgaac

SEQ ID NO: 308177 - DNA, 30 bp, Artificial Sequence
  Synthetic oligonucleotide
gtgaaatgaagaattgtaaggtccgcgaac

SEQ ID NO: 308178 - DNA, 30 bp, Artificial Sequence
  Synthetic oligonucleotide
acaaaaggggcgctcgagcgcagcgcgaac

SEQ ID NO: 308179 - DNA, 30 bp, Artificial Sequence
  Synthetic oligonucleotide
cggtaagcttcggatggtggatgcgcgaac

SEQ ID NO: 308180 - DNA, 30 bp, Artificial Sequence
  Synthetic oligonucleotide
gattctagtttcgaaagcatagaggcgaac

SEQ ID NO: 308181 - DNA, 30 bp, Artificial Sequence
  Synthetic oligonucleotide
tggggagtgcctataaggacgagggcgaac

SEQ ID NO: 308182 - DNA, 30 bp, Artificial Sequence
  Synthetic oligonucleotide
ggcgggagagtcgaagcggtagctgcgaac

SEQ ID NO: 308183 - DNA, 30 bp, Artificial Sequence
  Synthetic oligonucleotide
ttgcgatgttacccataaacggttgcgaac

SEQ ID NO: 308184 - DNA, 30 bp, Artificial Sequence
  Synthetic oligonucleotide
ggttgtggtggtctaacacaataatcgaac

SEQ ID NO: 308185 - DNA, 30 bp, Artificial Sequence
  Synthetic oligonucleotide
acaaaatgatggaggcgcccaggatcgaac

SEQ ID NO: 308186 - DNA, 29 bp, Artificial Sequence
  Synthetic oligonucleotide
cgcaataatttcgggtagggctctcgaac

SEQ ID NO: 308187 - DNA, 30 bp, Artificial Sequence
  Synthetic oligonucleotide
tcctggggccacgtaatggacgagtcgaac

SEQ ID NO: 308188 - DNA, 30 bp, Artificial Sequence
  Synthetic oligonucleotide
agggctttcgaaccatttctcagttcgaac

SEQ ID NO: 308189 - DNA, 30 bp, Artificial Sequence
  Synthetic oligonucleotide
tcccgagtaaatttgctgagttaaaggaac

SEQ ID NO: 308190 - DNA, 30 bp, Artificial Sequence
  Synthetic oligonucleotide
tgtgggcgtatgttaaagacatcaaggaac

SEQ ID NO: 308191 - DNA, 30 bp, Artificial Sequence
  Synthetic oligonucleotide
tctcgtaaagaccttcgcgtgaccaggaac

SEQ ID NO: 308192 - DNA, 30 bp, Artificial Sequence
  Synthetic oligonucleotide
tgctgctaacagcgacagaataccaggaac

SEQ ID NO: 308193 - DNA, 30 bp, Artificial Sequence
  Synthetic oligonucleotide
tatggcaaccggtgaaaacctctcaggaac

SEQ ID NO: 308194 - DNA, 30 bp, Artificial Sequence
  Synthetic oligonucleotide
gagtcttacagaacagttggaagtaggaac

SEQ ID NO: 308195 - DNA, 30 bp, Artificial Sequence
  Synthetic oligonucleotide
ccttggcaagagtgggaaggtacgcggaac

SEQ ID NO: 308196 - DNA, 30 bp, Artificial Sequence
  Synthetic oligonucleotide
tatgtgaggtatgatctattttggcggaac

SEQ ID NO: 308197 - DNA, 30 bp, Artificial Sequence
  Synthetic oligonucleotide
aggatcatatacataagggggcatcggaac

SEQ ID NO: 308198 - DNA, 30 bp, Artificial Sequence
  Synthetic oligonucleotide
tttgcccgtagagcaaagtgccctcggaac

SEQ ID NO: 308199 - DNA, 30 bp, Artificial Sequence
  Synthetic oligonucleotide
acaatgggaataacccggcagtgggggaac

SEQ ID NO: 308200 - DNA, 30 bp, Artificial Sequence
  Synthetic oligonucleotide
cccacgacgttagcactctccaaatggaac

SEQ ID NO: 308201 - DNA, 30 bp, Artificial Sequence
  Synthetic oligonucleotide
atcactacaacagttggtttaacatggaac

SEQ ID NO: 308202 - DNA, 30 bp, Artificial Sequence
  Synthetic oligonucleotide
aaatatttgggtcagacaccgacatggaac

SEQ ID NO: 308203 - DNA, 30 bp, Artificial Sequence
  Synthetic oligonucleotide
gtacatcagaaatttcgaatctgatggaac

SEQ ID NO: 308204 - DNA, 30 bp, Artificial Sequence
  Synthetic oligonucleotide
ggcgaaccgagaatcatgcccgcctggaac

SEQ ID NO: 308205 - DNA, 30 bp, Artificial Sequence
  Synthetic oligonucleotide
ggctggaggtccgatcattggccgtggaac

SEQ ID NO: 308206 - DNA, 30 bp, Artificial Sequence
  Synthetic oligonucleotide
ccttcatttaagaactcgtttgattggaac

SEQ ID NO: 308207 - DNA, 30 bp, Artificial Sequence
  Synthetic oligonucleotide
tccttatcctggtggcccataccttggaac

SEQ ID NO: 308208 - DNA, 30 bp, Artificial Sequence
  Synthetic oligonucleotide
aattggcaaagggaaaattcagcttggaac

SEQ ID NO: 308209 - DNA, 30 bp, Artificial Sequence
  Synthetic oligonucleotide
gcttatagaggacgatggtcgaaaatgaac

SEQ ID NO: 308210 - DNA, 30 bp, Artificial Sequence
  Synthetic oligonucleotide
tgacgaggtcaccagcgtacggcaatgaac

SEQ ID NO: 308211 - DNA, 30 bp, Artificial Sequence
  Synthetic oligonucleotide
atagtacatatgttaagacgtatcatgaac

SEQ ID NO: 308212 - DNA, 30 bp, Artificial Sequence
  Synthetic oligonucleotide
ccaccagattcgtatactagaacgatgaac

SEQ ID NO: 308213 - DNA, 30 bp, Artificial Sequence
  Synthetic oligonucleotide
agcaacccggggctgggatcccggatgaac

SEQ ID NO: 308214 - DNA, 30 bp, Artificial Sequence
  Synthetic oligonucleotide
aggaggcgcggaagtccaaccgggatgaac

SEQ ID NO: 308215 - DNA, 30 bp, Artificial Sequence
  Synthetic oligonucleotide
ttacctgaagacgggccgtaaatcctgaac

SEQ ID NO: 308216 - DNA, 28 bp, Artificial Sequence
  Synthetic oligonucleotide
ccggactcgtcagagttgtgaagtgaac

SEQ ID NO: 308217 - DNA, 30 bp, Artificial Sequence
  Synthetic oligonucleotide
aaaggggtcaaggttggtgctgccgtgaac

SEQ ID NO: 308218 - DNA, 30 bp, Artificial Sequence
  Synthetic oligonucleotide
aaatctctgctagatgataaaaaggtgaac

SEQ ID NO: 308219 - DNA, 30 bp, Artificial Sequence
  Synthetic oligonucleotide
ttctatacgggaccgccacagtcggtgaac

SEQ ID NO: 308220 - DNA, 30 bp, Artificial Sequence
  Synthetic oligonucleotide
agtctagaaagcaggcctaaacttgtgaac

SEQ ID NO: 308221 - DNA, 30 bp, Artificial Sequence
  Synthetic oligonucleotide
gactggccgctaaggggccaaaccttgaac

SEQ ID NO: 308222 - DNA, 30 bp, Artificial Sequence
  Synthetic oligonucleotide
gtcgacggggattagtgctgaaccttgaac

SEQ ID NO: 308223 - DNA, 30 bp, Artificial Sequence
  Synthetic oligonucleotide
atgcagtattgatctctgatcaccttgaac

SEQ ID NO: 308224 - DNA, 30 bp, Artificial Sequence
  Synthetic oligonucleotide
agtcacataacgaatgtaaattagttgaac

SEQ ID NO: 308225 - DNA, 30 bp, Artificial Sequence
  Synthetic oligonucleotide
ctctcggatatgtaatctcatgatttgaac

SEQ ID NO: 308226 - DNA, 30 bp, Artificial Sequence
  Synthetic oligonucleotide
gtggatccttacatgttcaagcctttgaac

SEQ ID NO: 308227 - DNA, 30 bp, Artificial Sequence
  Synthetic oligonucleotide
tagactgtgacgtgccccttcccaaataac

SEQ ID NO: 308228 - DNA, 30 bp, Artificial Sequence
  Synthetic oligonucleotide
ggtattgggttccgcacaactaacaataac

SEQ ID NO: 308229 - DNA, 30 bp, Artificial Sequence
  Synthetic oligonucleotide
cggcatagtagactgaggtaaagcaataac

SEQ ID NO: 308230 - DNA, 30 bp, Artificial Sequence
  Synthetic oligonucleotide
tgtgcttcacgcgtccatgtgaagaataac

SEQ ID NO: 308231 - DNA, 30 bp, Artificial Sequence
  Synthetic oligonucleotide
ttcagaggagaaccagcggctgagaataac

SEQ ID NO: 308232 - DNA, 30 bp, Artificial Sequence
  Synthetic oligonucleotide
agtaataaatacagcctcaaagataataac

SEQ ID NO: 308233 - DNA, 30 bp, Artificial Sequence
  Synthetic oligonucleotide
cgggaatttttttacgggactgctaataac

SEQ ID NO: 308234 - DNA, 30 bp, Artificial Sequence
  Synthetic oligonucleotide
aaaccattagtacgtcctgttgctaataac

SEQ ID NO: 308235 - DNA, 30 bp, Artificial Sequence
  Synthetic oligonucleotide
cgcctgtgacgtggctagacaggtaataac

SEQ ID NO: 308236 - DNA, 30 bp, Artificial Sequence
  Synthetic oligonucleotide
cgttttccaaaggaaggtgagaaacataac

SEQ ID NO: 308237 - DNA, 30 bp, Artificial Sequence
  Synthetic oligonucleotide
tcggaagtacgtatagttcatagacataac

SEQ ID NO: 308238 - DNA, 30 bp, Artificial Sequence
  Synthetic oligonucleotide
aacgcataccccggaagttttctccataac

SEQ ID NO: 308239 - DNA, 30 bp, Artificial Sequence
  Synthetic oligonucleotide
cgccgcggtttacgatagaatgatcataac

SEQ ID NO: 308240 - DNA, 30 bp, Artificial Sequence
  Synthetic oligonucleotide
ggaatcgaaataggcctctgatacgataac

SEQ ID NO: 308241 - DNA, 30 bp, Artificial Sequence
  Synthetic oligonucleotide
tttgctgaatttcagggctacgtcgataac

SEQ ID NO: 308242 - DNA, 30 bp, Artificial Sequence
  Synthetic oligonucleotide
caagagtataggtttgcgtgtttcgataac

SEQ ID NO: 308243 - DNA, 30 bp, Artificial Sequence
  Synthetic oligonucleotide
tacatggccagtactctacttcaggataac

SEQ ID NO: 308244 - DNA, 30 bp, Artificial Sequence
  Synthetic oligonucleotide
attggtggttacattgtaacatgggataac

SEQ ID NO: 308245 - DNA, 30 bp, Artificial Sequence
  Synthetic oligonucleotide
gatctgagccgaacgtgtattgtggataac

SEQ ID NO: 308246 - DNA, 30 bp, Artificial Sequence
  Synthetic oligonucleotide
acaatgatatataatacccaaaatgataac

SEQ ID NO: 308247 - DNA, 30 bp, Artificial Sequence
  Synthetic oligonucleotide
ataccaaggcttttgaagcctggtgataac

SEQ ID NO: 308248 - DNA, 30 bp, Artificial Sequence
  Synthetic oligonucleotide
aacattgcgtcactctgggtttcatataac

SEQ ID NO: 308249 - DNA, 30 bp, Artificial Sequence
  Synthetic oligonucleotide
cagttagagtaacttgttggaaggtataac

SEQ ID NO: 308250 - DNA, 30 bp, Artificial Sequence
  Synthetic oligonucleotide
attgcaaccataaacgcgttaatgtataac

SEQ ID NO: 308251 - DNA, 30 bp, Artificial Sequence
  Synthetic oligonucleotide
cttaggcagggttaaacgtgattttataac

SEQ ID NO: 308252 - DNA, 30 bp, Artificial Sequence
  Synthetic oligonucleotide
aatgtggttagggtaagttccgaaactaac

SEQ ID NO: 308253 - DNA, 30 bp, Artificial Sequence
  Synthetic oligonucleotide
ctagtgggaaaagcgcctttaaccactaac

SEQ ID NO: 308254 - DNA, 30 bp, Artificial Sequence
  Synthetic oligonucleotide
tagtcgaccggccttgtgcttcagactaac

SEQ ID NO: 308255 - DNA, 30 bp, Artificial Sequence
  Synthetic oligonucleotide
gtggacttaggtcttgatgacaaacctaac

SEQ ID NO: 308256 - DNA, 30 bp, Artificial Sequence
  Synthetic oligonucleotide
tgtaggtgccaggtaaatgttaaacctaac

SEQ ID NO: 308257 - DNA, 30 bp, Artificial Sequence
  Synthetic oligonucleotide
agcaagttggggcatgttcacatacctaac

SEQ ID NO: 308258 - DNA, 30 bp, Artificial Sequence
  Synthetic oligonucleotide
aagttatgtgcacaatacgtgggccctaac

SEQ ID NO: 308259 - DNA, 30 bp, Artificial Sequence
  Synthetic oligonucleotide
gcaaaaaggtgggctcagtcaaggcctaac

SEQ ID NO: 308260 - DNA, 30 bp, Artificial Sequence
  Synthetic oligonucleotide
gttggcttaagagataaagttgtgcctaac

SEQ ID NO: 308261 - DNA, 30 bp, Artificial Sequence
  Synthetic oligonucleotide
ctgtctcctaactgggtctaagtagctaac

SEQ ID NO: 308262 - DNA, 30 bp, Artificial Sequence
  Synthetic oligonucleotide
tggaacccgtaaacttacaatttagctaac

SEQ ID NO: 308263 - DNA, 30 bp, Artificial Sequence
  Synthetic oligonucleotide
tcatgatagccaggtggttggggcgctaac

SEQ ID NO: 308264 - DNA, 30 bp, Artificial Sequence
  Synthetic oligonucleotide
aaaccgacacattgctgtgatttcgctaac

SEQ ID NO: 308265 - DNA, 30 bp, Artificial Sequence
  Synthetic oligonucleotide
catggagtgactctagagttcagggctaac

SEQ ID NO: 308266 - DNA, 30 bp, Artificial Sequence
  Synthetic oligonucleotide
tatacgcccgcatcgcctgccggggctaac

SEQ ID NO: 308267 - DNA, 30 bp, Artificial Sequence
  Synthetic oligonucleotide
gtgaaggacagcctgtgggccgcatctaac

SEQ ID NO: 308268 - DNA, 30 bp, Artificial Sequence
  Synthetic oligonucleotide
cccgcgaccatatcaggtagttcatctaac

SEQ ID NO: 308269 - DNA, 30 bp, Artificial Sequence
  Synthetic oligonucleotide
atatgattccccaccattaattactctaac

SEQ ID NO: 308270 - DNA, 30 bp, Artificial Sequence
  Synthetic oligonucleotide
agcgcttcgcgtaacgtacacacctctaac

SEQ ID NO: 308271 - DNA, 30 bp, Artificial Sequence
  Synthetic oligonucleotide
tatcctaagaggcaccacagaccctctaac

SEQ ID NO: 308272 - DNA, 30 bp, Artificial Sequence
  Synthetic oligonucleotide
accatctacgtggctaaagcgacgtctaac

SEQ ID NO: 308273 - DNA, 30 bp, Artificial Sequence
  Synthetic oligonucleotide
aagccaagcgttccagcatccatgtctaac

SEQ ID NO: 308274 - DNA, 30 bp, Artificial Sequence
  Synthetic oligonucleotide
gctgtcaacggtcaagttaacttgtctaac

SEQ ID NO: 308275 - DNA, 30 bp, Artificial Sequence
  Synthetic oligonucleotide
ttcctcaaacaagagctaccagattctaac

SEQ ID NO: 308276 - DNA, 30 bp, Artificial Sequence
  Synthetic oligonucleotide
tctggccatgttgcgtgaagcacttctaac

SEQ ID NO: 308277 - DNA, 30 bp, Artificial Sequence
  Synthetic oligonucleotide
gaagttgcgttatgcagttggcgttctaac

SEQ ID NO: 308278 - DNA, 30 bp, Artificial Sequence
  Synthetic oligonucleotide
caagacgagtcgctcccaataggttctaac

SEQ ID NO: 308279 - DNA, 30 bp, Artificial Sequence
  Synthetic oligonucleotide
tcaccgctttatgacataaaactttctaac

SEQ ID NO: 308280 - DNA, 30 bp, Artificial Sequence
  Synthetic oligonucleotide
cgctatgccattgttgcgatataaagtaac

SEQ ID NO: 308281 - DNA, 30 bp, Artificial Sequence
  Synthetic oligonucleotide
ccgtgggcgacctctgacagtttaagtaac

SEQ ID NO: 308282 - DNA, 30 bp, Artificial Sequence
  Synthetic oligonucleotide
aacaggacgccagaaacgtaaaacagtaac

SEQ ID NO: 308283 - DNA, 30 bp, Artificial Sequence
  Synthetic oligonucleotide
gacatatgaccaaggcagtgtagcagtaac

SEQ ID NO: 308284 - DNA, 30 bp, Artificial Sequence
  Synthetic oligonucleotide
cgggtatccgcggacggacaacgcagtaac

SEQ ID NO: 308285 - DNA, 30 bp, Artificial Sequence
  Synthetic oligonucleotide
cgttctttaattatagtgatactcagtaac

SEQ ID NO: 308286 - DNA, 30 bp, Artificial Sequence
  Synthetic oligonucleotide
aactttcaacctctaaaggagtcgagtaac

SEQ ID NO: 308287 - DNA, 30 bp, Artificial Sequence
  Synthetic oligonucleotide
agtgtaccaacgcaagcgcaggggagtaac

SEQ ID NO: 308288 - DNA, 30 bp, Artificial Sequence
  Synthetic oligonucleotide
agtcattgctgtggtaaggggagacgtaac

SEQ ID NO: 308289 - DNA, 30 bp, Artificial Sequence
  Synthetic oligonucleotide
gggggtctggcccagcaggtgttccgtaac

SEQ ID NO: 308290 - DNA, 30 bp, Artificial Sequence
  Synthetic oligonucleotide
tgaaaaaatcacaccggggttcggcgtaac

SEQ ID NO: 308291 - DNA, 30 bp, Artificial Sequence
  Synthetic oligonucleotide
cgtggattgagacgccgctgcttgcgtaac

SEQ ID NO: 308292 - DNA, 30 bp, Artificial Sequence
  Synthetic oligonucleotide
ctcactcctaacggttgcgtcactcgtaac

SEQ ID NO: 308293 - DNA, 30 bp, Artificial Sequence
  Synthetic oligonucleotide
cagccgtgaagttgtgtacttgctcgtaac

SEQ ID NO: 308294 - DNA, 30 bp, Artificial Sequence
  Synthetic oligonucleotide
tacggatggactggtttgtcagaaggtaac

SEQ ID NO: 308295 - DNA, 30 bp, Artificial Sequence
  Synthetic oligonucleotide
agaagggtactaggatataccgaaggtaac

SEQ ID NO: 308296 - DNA, 30 bp, Artificial Sequence
  Synthetic oligonucleotide
ctggacccttaaacacgtcacaagggtaac

SEQ ID NO: 308297 - DNA, 30 bp, Artificial Sequence
  Synthetic oligonucleotide
gtgtaaagtcctgacagacaaattggtaac

SEQ ID NO: 308298 - DNA, 30 bp, Artificial Sequence
  Synthetic oligonucleotide
gcgaactaaacccggcactaacgatgtaac

SEQ ID NO: 308299 - DNA, 30 bp, Artificial Sequence
  Synthetic oligonucleotide
gcgcctgccatcagcctaacgcgatgtaac

SEQ ID NO: 308300 - DNA, 30 bp, Artificial Sequence
  Synthetic oligonucleotide
cacatttcaatgtagtaattactatgtaac

SEQ ID NO: 308301 - DNA, 30 bp, Artificial Sequence
  Synthetic oligonucleotide
gcctaatggatccaaaccgatttatgtaac

SEQ ID NO: 308302 - DNA, 30 bp, Artificial Sequence
  Synthetic oligonucleotide
gtatcggagtgattacggaatcactgtaac

SEQ ID NO: 308303 - DNA, 30 bp, Artificial Sequence
  Synthetic oligonucleotide
ccggggcggtatgtcgttggttcctgtaac

SEQ ID NO: 308304 - DNA, 30 bp, Artificial Sequence
  Synthetic oligonucleotide
gcaattcacaaatcattaagttgctgtaac

SEQ ID NO: 308305 - DNA, 30 bp, Artificial Sequence
  Synthetic oligonucleotide
gctactttggagtacggtcgtcagtgtaac

SEQ ID NO: 308306 - DNA, 30 bp, Artificial Sequence
  Synthetic oligonucleotide
gtagttcaagcgccagaccaggggtgtaac

SEQ ID NO: 308307 - DNA, 30 bp, Artificial Sequence
  Synthetic oligonucleotide
tccctggttacaacgtgctgaacttgtaac

SEQ ID NO: 308308 - DNA, 30 bp, Artificial Sequence
  Synthetic oligonucleotide
tttggactgccgtgttgggatccaattaac

SEQ ID NO: 308309 - DNA, 30 bp, Artificial Sequence
  Synthetic oligonucleotide
tgtgagggggcggcgtcggcgtccattaac

SEQ ID NO: 308310 - DNA, 30 bp, Artificial Sequence
  Synthetic oligonucleotide
cacggttatacaattaggcgttccattaac

SEQ ID NO: 308311 - DNA, 30 bp, Artificial Sequence
  Synthetic oligonucleotide
aatgtcccacccatgagacagcggattaac

SEQ ID NO: 308312 - DNA, 30 bp, Artificial Sequence
  Synthetic oligonucleotide
aaaaactaattgctctccttgatgattaac

SEQ ID NO: 308313 - DNA, 30 bp, Artificial Sequence
  Synthetic oligonucleotide
tgagactctaactcagtgtctcgtattaac

SEQ ID NO: 308314 - DNA, 30 bp, Artificial Sequence
  Synthetic oligonucleotide
tccagatctgacatggtagggattattaac

SEQ ID NO: 308315 - DNA, 30 bp, Artificial Sequence
  Synthetic oligonucleotide
agagtgtctggcgagtgataatttattaac

SEQ ID NO: 308316 - DNA, 30 bp, Artificial Sequence
  Synthetic oligonucleotide
actttaaagtcgaaactaccgtttattaac

SEQ ID NO: 308317 - DNA, 30 bp, Artificial Sequence
  Synthetic oligonucleotide
ggaagttgcgtaggcacattcagacttaac

SEQ ID NO: 308318 - DNA, 30 bp, Artificial Sequence
  Synthetic oligonucleotide
gcgggccaggagagtttatggttacttaac

SEQ ID NO: 308319 - DNA, 30 bp, Artificial Sequence
  Synthetic oligonucleotide
acagattctgggacggtcacagagcttaac

SEQ ID NO: 308320 - DNA, 30 bp, Artificial Sequence
  Synthetic oligonucleotide
gctaagcctttctacgggcaagtgcttaac

SEQ ID NO: 308321 - DNA, 30 bp, Artificial Sequence
  Synthetic oligonucleotide
acaaaataagcgtgctgcggccatcttaac

SEQ ID NO: 308322 - DNA, 30 bp, Artificial Sequence
  Synthetic oligonucleotide
tggagatcgccaattgtgttcgctcttaac

SEQ ID NO: 308323 - DNA, 30 bp, Artificial Sequence
  Synthetic oligonucleotide
acattagtagacaggggctaatgagttaac

SEQ ID NO: 308324 - DNA, 30 bp, Artificial Sequence
  Synthetic oligonucleotide
gagatcagggtaccctcggagtgagttaac

SEQ ID NO: 308325 - DNA, 30 bp, Artificial Sequence
  Synthetic oligonucleotide
gcattcgtcctgcccgctaggtaggttaac

SEQ ID NO: 308326 - DNA, 30 bp, Artificial Sequence
  Synthetic oligonucleotide
ccgccgactatgtaacctcggtcggttaac

SEQ ID NO: 308327 - DNA, 29 bp, Artificial Sequence
  Synthetic oligonucleotide
aaggtgtgggaggatggttgtatgttaac

SEQ ID NO: 308328 - DNA, 30 bp, Artificial Sequence
  Synthetic oligonucleotide
aggagctattaagggggtttgctctttaac

SEQ ID NO: 308329 - DNA, 30 bp, Artificial Sequence
  Synthetic oligonucleotide
ctcgttttgaagcatcctgtcgcgtttaac

SEQ ID NO: 308330 - DNA, 30 bp, Artificial Sequence
  Synthetic oligonucleotide
gtgccgttaacctcagataaagattttaac

SEQ ID NO: 308331 - DNA, 30 bp, Artificial Sequence
  Synthetic oligonucleotide
gcctcagataaagtctttggcaaaaaacac

SEQ ID NO: 308332 - DNA, 30 bp, Artificial Sequence
  Synthetic oligonucleotide
agcagatgtataaaaccgacctggaaacac

SEQ ID NO: 308333 - DNA, 30 bp, Artificial Sequence
  Synthetic oligonucleotide
tacatgcatcgtttgtaatgtcgtaaacac

SEQ ID NO: 308334 - DNA, 30 bp, Artificial Sequence
  Synthetic oligonucleotide
tataggaatactcaatgcaagtgtaaacac

SEQ ID NO: 308335 - DNA, 30 bp, Artificial Sequence
  Synthetic oligonucleotide
taataaatcccgggatgccggttacaacac

SEQ ID NO: 308336 - DNA, 30 bp, Artificial Sequence
  Synthetic oligonucleotide
cgcagggtttaataatatttatcgcaacac

SEQ ID NO: 308337 - DNA, 30 bp, Artificial Sequence
  Synthetic oligonucleotide
ccactgagcggctgagtaaattggcaacac

SEQ ID NO: 308338 - DNA, 30 bp, Artificial Sequence
  Synthetic oligonucleotide
gcggggtgtgatggccggcctcctcaacac

SEQ ID NO: 308339 - DNA, 30 bp, Artificial Sequence
  Synthetic oligonucleotide
ctcacgatcggtttagagagtacagaacac

SEQ ID NO: 308340 - DNA, 30 bp, Artificial Sequence
  Synthetic oligonucleotide
tggagggccatcaccgcgtgcatagaacac

SEQ ID NO: 308341 - DNA, 30 bp, Artificial Sequence
  Synthetic oligonucleotide
taccaccaggtacagctggagctagaacac

SEQ ID NO: 308342 - DNA, 30 bp, Artificial Sequence
  Synthetic oligonucleotide
taacactattcagtgtgattcaacgaacac

SEQ ID NO: 308343 - DNA, 30 bp, Artificial Sequence
  Synthetic oligonucleotide
caccttcaagtgagaagcgtccaggaacac

SEQ ID NO: 308344 - DNA, 30 bp, Artificial Sequence
  Synthetic oligonucleotide
ttacaggcctatcatattctgtcggaacac

SEQ ID NO: 308345 - DNA, 30 bp, Artificial Sequence
  Synthetic oligonucleotide
ttatttcgcaagagaacactccgataacac

SEQ ID NO: 308346 - DNA, 30 bp, Artificial Sequence
  Synthetic oligonucleotide
ttgacgaaatccaagggggttggataacac

SEQ ID NO: 308347 - DNA, 30 bp, Artificial Sequence
  Synthetic oligonucleotide
atagcagcataggatactcagatataacac

SEQ ID NO: 308348 - DNA, 30 bp, Artificial Sequence
  Synthetic oligonucleotide
gccgtctgccttaagagaagtgtataacac

SEQ ID NO: 308349 - DNA, 30 bp, Artificial Sequence
  Synthetic oligonucleotide
taagcgcagcttttcaatttattttaacac

SEQ ID NO: 308350 - DNA, 30 bp, Artificial Sequence
  Synthetic oligonucleotide
gctgtacatacgactcagaccgtaacacac

SEQ ID NO: 308351 - DNA, 30 bp, Artificial Sequence
  Synthetic oligonucleotide
cgagcgctgacactattcggattgacacac

SEQ ID NO: 308352 - DNA, 30 bp, Artificial Sequence
  Synthetic oligonucleotide
cagggttgtcaattctagtacaacccacac

SEQ ID NO: 308353 - DNA, 30 bp, Artificial Sequence
  Synthetic oligonucleotide
gataatcagtatcagcggagcgacccacac

SEQ ID NO: 308354 - DNA, 30 bp, Artificial Sequence
  Synthetic oligonucleotide
gggtctgtctattcctacaagaccccacac

SEQ ID NO: 308355 - DNA, 30 bp, Artificial Sequence
  Synthetic oligonucleotide
agcaccgaatctacctagcctggcccacac

SEQ ID NO: 308356 - DNA, 31 bp, Artificial Sequence
  Synthetic oligonucleotide
ttttcacttctggatgagcatcgcgccacac

SEQ ID NO: 308357 - DNA, 30 bp, Artificial Sequence
  Synthetic oligonucleotide
ggattctagcttggataatttgggccacac

SEQ ID NO: 308358 - DNA, 30 bp, Artificial Sequence
  Synthetic oligonucleotide
cgggtccctccattcttgctatctccacac

SEQ ID NO: 308359 - DNA, 30 bp, Artificial Sequence
  Synthetic oligonucleotide
atattataccaatgttcattgggtccacac

SEQ ID NO: 308360 - DNA, 30 bp, Artificial Sequence
  Synthetic oligonucleotide
cttaatcctgagagggctgggaccgcacac

SEQ ID NO: 308361 - DNA, 30 bp, Artificial Sequence
  Synthetic oligonucleotide
cactatagaaacttggggatttaggcacac

SEQ ID NO: 308362 - DNA, 30 bp, Artificial Sequence
  Synthetic oligonucleotide
ttaatcacgagagaatggaggtcggcacac

SEQ ID NO: 308363 - DNA, 30 bp, Artificial Sequence
  Synthetic oligonucleotide
gggtggttctacacctgtgatagggcacac

SEQ ID NO: 308364 - DNA, 30 bp, Artificial Sequence
  Synthetic oligonucleotide
cagcagcacaattacccgctagatgcacac

SEQ ID NO: 308365 - DNA, 30 bp, Artificial Sequence
  Synthetic oligonucleotide
aatcccaaacggagttggaagcctgcacac

SEQ ID NO: 308366 - DNA, 30 bp, Artificial Sequence
  Synthetic oligonucleotide
taaggaattaggtccggctcggttgcacac

SEQ ID NO: 308367 - DNA, 30 bp, Artificial Sequence
  Synthetic oligonucleotide
ggcccggtgataggatcggcggactcacac

SEQ ID NO: 308368 - DNA, 30 bp, Artificial Sequence
  Synthetic oligonucleotide
gattgtggcgacagtttgagatcttcacac

SEQ ID NO: 308369 - DNA, 30 bp, Artificial Sequence
  Synthetic oligonucleotide
cagtaacctctgacagaaaaaagttcacac

SEQ ID NO: 308370 - DNA, 30 bp, Artificial Sequence
  Synthetic oligonucleotide
agggacatgggcatcagggtcggttcacac

SEQ ID NO: 308371 - DNA, 30 bp, Artificial Sequence
  Synthetic oligonucleotide
agcagaaagagtggtctaaggttttcacac

SEQ ID NO: 308372 - DNA, 30 bp, Artificial Sequence
  Synthetic oligonucleotide
tcggtttacgcgctgggcacctcaagacac

SEQ ID NO: 308373 - DNA, 30 bp, Artificial Sequence
  Synthetic oligonucleotide
ttgcgatctgcagatacttaaagaagacac

SEQ ID NO: 308374 - DNA, 30 bp, Artificial Sequence
  Synthetic oligonucleotide
aaagacagtggtaatgtttatgtcagacac

SEQ ID NO: 308375 - DNA, 30 bp, Artificial Sequence
  Synthetic oligonucleotide
ctggagcttgtctaattggccttgagacac

SEQ ID NO: 308376 - DNA, 30 bp, Artificial Sequence
  Synthetic oligonucleotide
ccaggaagtgtactgataagtggacgacac

SEQ ID NO: 308377 - DNA, 30 bp, Artificial Sequence
  Synthetic oligonucleotide
cttgaaggggtagtaagatatccccgacac

SEQ ID NO: 308378 - DNA, 30 bp, Artificial Sequence
  Synthetic oligonucleotide
taagtcgggtcgtagcgctataggcgacac

SEQ ID NO: 308379 - DNA, 30 bp, Artificial Sequence
  Synthetic oligonucleotide
ccatatagaaggcacggttcatatcgacac

SEQ ID NO: 308380 - DNA, 30 bp, Artificial Sequence
  Synthetic oligonucleotide
catcaaggtcggttcgggaacataggacac

SEQ ID NO: 308381 - DNA, 30 bp, Artificial Sequence
  Synthetic oligonucleotide
gaatgttatgtaagcctcgataccggacac

SEQ ID NO: 308382 - DNA, 30 bp, Artificial Sequence
  Synthetic oligonucleotide
gaccgtatgctgcacccatacgagggacac

SEQ ID NO: 308383 - DNA, 30 bp, Artificial Sequence
  Synthetic oligonucleotide
aagctcgcgattataactaaaccatgacac

SEQ ID NO: 308384 - DNA, 30 bp, Artificial Sequence
  Synthetic oligonucleotide
taggtgtcaccacttatagaggcgtgacac

SEQ ID NO: 308385 - DNA, 30 bp, Artificial Sequence
  Synthetic oligonucleotide
aagcaagactgtgacggtacccattgacac

SEQ ID NO: 308386 - DNA, 30 bp, Artificial Sequence
  Synthetic oligonucleotide
cgatagaatttaggtgcatggatttgacac

SEQ ID NO: 308387 - DNA, 30 bp, Artificial Sequence
  Synthetic oligonucleotide
agacgatgctaccgccaccgggtttgacac

SEQ ID NO: 308388 - DNA, 30 bp, Artificial Sequence
  Synthetic oligonucleotide
gtcgtataaagacttatgatacacatacac

SEQ ID NO: 308389 - DNA, 30 bp, Artificial Sequence
  Synthetic oligonucleotide
attgatgtatagaacacacatgccatacac

SEQ ID NO: 308390 - DNA, 30 bp, Artificial Sequence
  Synthetic oligonucleotide
tgactaaccgatcctgttttactcatacac

SEQ ID NO: 308391 - DNA, 30 bp, Artificial Sequence
  Synthetic oligonucleotide
tgtatacagtgctgaagtaatcggatacac

SEQ ID NO: 308392 - DNA, 30 bp, Artificial Sequence
  Synthetic oligonucleotide
tacggagtatctttgcggacctggatacac

SEQ ID NO: 308393 - DNA, 30 bp, Artificial Sequence
  Synthetic oligonucleotide
gctataatgctaacatcgaagagtatacac

SEQ ID NO: 308394 - DNA, 30 bp, Artificial Sequence
  Synthetic oligonucleotide
aggtttgagctggtctacttgacactacac

SEQ ID NO: 308395 - DNA, 30 bp, Artificial Sequence
  Synthetic oligonucleotide
tgaggtcgatatttgctccggtgactacac

SEQ ID NO: 308396 - DNA, 30 bp, Artificial Sequence
  Synthetic oligonucleotide
tacggttttggaagttacaaatgcctacac

SEQ ID NO: 308397 - DNA, 30 bp, Artificial Sequence
  Synthetic oligonucleotide
gaagttcagacaaaccatgaaatcctacac

SEQ ID NO: 308398 - DNA, 30 bp, Artificial Sequence
  Synthetic oligonucleotide
gcgatcaaaagggtgctacacctcctacac

SEQ ID NO: 308399 - DNA, 30 bp, Artificial Sequence
  Synthetic oligonucleotide
aggtgaatttcgtgtatcccagtcctacac

SEQ ID NO: 308400 - DNA, 30 bp, Artificial Sequence
  Synthetic oligonucleotide
gcccgcaacctttggacacttaatctacac

SEQ ID NO: 308401 - DNA, 30 bp, Artificial Sequence
  Synthetic oligonucleotide
aagatacgcgatgcttacgaatgtctacac

SEQ ID NO: 308402 - DNA, 30 bp, Artificial Sequence
  Synthetic oligonucleotide
gcacgttcgctttaaaattaagtagtacac

SEQ ID NO: 308403 - DNA, 30 bp, Artificial Sequence
  Synthetic oligonucleotide
gggacagttgcgttagctctacgcgtacac

SEQ ID NO: 308404 - DNA, 30 bp, Artificial Sequence
  Synthetic oligonucleotide
aatacgctcagcgaactacttcgcgtacac

SEQ ID NO: 308405 - DNA, 30 bp, Artificial Sequence
  Synthetic oligonucleotide
gggacttatgggcgtgtgaggggcgtacac

SEQ ID NO: 308406 - DNA, 30 bp, Artificial Sequence
  Synthetic oligonucleotide
gtgtcacctgtgcgattagaaaatgtacac

SEQ ID NO: 308407 - DNA, 30 bp, Artificial Sequence
  Synthetic oligonucleotide
gagtacgggtgcatgaaatggcttgtacac

SEQ ID NO: 308408 - DNA, 30 bp, Artificial Sequence
  Synthetic oligonucleotide
tccaactcacatactcttattcttgtacac

SEQ ID NO: 308409 - DNA, 30 bp, Artificial Sequence
  Synthetic oligonucleotide
aaacggggaggtgtccctttaggattacac

SEQ ID NO: 308410 - DNA, 30 bp, Artificial Sequence
  Synthetic oligonucleotide
gcgggggcggggccggtatatctattacac

SEQ ID NO: 308411 - DNA, 30 bp, Artificial Sequence
  Synthetic oligonucleotide
cagcgttaaatatgctgttagaagttacac

SEQ ID NO: 308412 - DNA, 30 bp, Artificial Sequence
  Synthetic oligonucleotide
atacgctattatatcagtcgagctttacac

SEQ ID NO: 308413 - DNA, 30 bp, Artificial Sequence
  Synthetic oligonucleotide
tttgcactagcatgccataaagcaaaccac

SEQ ID NO: 308414 - DNA, 30 bp, Artificial Sequence
  Synthetic oligonucleotide
cagtttgtatcgataatgacattgaaccac

SEQ ID NO: 308415 - DNA, 30 bp, Artificial Sequence
  Synthetic oligonucleotide
cgggccagttaaggctcaaggttgaaccac

SEQ ID NO: 308416 - DNA, 30 bp, Artificial Sequence
  Synthetic oligonucleotide
tccgtcgctattcatttagctcataaccac

SEQ ID NO: 308417 - DNA, 30 bp, Artificial Sequence
  Synthetic oligonucleotide
cgccatttcgcaagccgtgcgaaacaccac

SEQ ID NO: 308418 - DNA, 30 bp, Artificial Sequence
  Synthetic oligonucleotide
ccaacggatgatcatcttccaccccaccac

SEQ ID NO: 308419 - DNA, 30 bp, Artificial Sequence
  Synthetic oligonucleotide
gagtactactagcaaccctcctgccaccac

SEQ ID NO: 308420 - DNA, 30 bp, Artificial Sequence
  Synthetic oligonucleotide
ccgggctcgtatgaatagtacccgcaccac

SEQ ID NO: 308421 - DNA, 30 bp, Artificial Sequence
  Synthetic oligonucleotide
gctgctggcttttattcgggtggtcaccac

SEQ ID NO: 308422 - DNA, 30 bp, Artificial Sequence
  Synthetic oligonucleotide
gtactacaacggcgtgggctacttcaccac

SEQ ID NO: 308423 - DNA, 30 bp, Artificial Sequence
  Synthetic oligonucleotide
cctcatgccgtaattccacgatttcaccac

SEQ ID NO: 308424 - DNA, 30 bp, Artificial Sequence
  Synthetic oligonucleotide
tactgatgagctattaatgagtttcaccac

SEQ ID NO: 308425 - DNA, 30 bp, Artificial Sequence
  Synthetic oligonucleotide
tctcctgcgctcatataggctaaagaccac

SEQ ID NO: 308426 - DNA, 30 bp, Artificial Sequence
  Synthetic oligonucleotide
tcctttgagcaggatagtagtatagaccac

SEQ ID NO: 308427 - DNA, 30 bp, Artificial Sequence
  Synthetic oligonucleotide
tggggaccgtccctaattataaacgaccac

SEQ ID NO: 308428 - DNA, 29 bp, Artificial Sequence
  Synthetic oligonucleotide
tttaataacacacagtcaagaatgaccac

SEQ ID NO: 308429 - DNA, 30 bp, Artificial Sequence
  Synthetic oligonucleotide
tacaaatgccatttggagtcctatgaccac

SEQ ID NO: 308430 - DNA, 30 bp, Artificial Sequence
  Synthetic oligonucleotide
attacggcgtgggttcgtaatgttgaccac

SEQ ID NO: 308431 - DNA, 30 bp, Artificial Sequence
  Synthetic oligonucleotide
aaaacgaaacaacccgccataccctaccac

SEQ ID NO: 308432 - DNA, 29 bp, Artificial Sequence
  Synthetic oligonucleotide
tgctgtgccaggaattaagatcttaccac

SEQ ID NO: 308433 - DNA, 30 bp, Artificial Sequence
  Synthetic oligonucleotide
tttggtacttcacgagctggcccaacccac

SEQ ID NO: 308434 - DNA, 29 bp, Artificial Sequence
  Synthetic oligonucleotide
tgatttccagacgacaaatagagacccac

SEQ ID NO: 308435 - DNA, 30 bp, Artificial Sequence
  Synthetic oligonucleotide
gatccgccccagcggattcgatagacccac

SEQ ID NO: 308436 - DNA, 30 bp, Artificial Sequence
  Synthetic oligonucleotide
cgattatttccccacatcctgagtacccac

SEQ ID NO: 308437 - DNA, 30 bp, Artificial Sequence
  Synthetic oligonucleotide
ccctcaaggaccgtcggcccacgtacccac

SEQ ID NO: 308438 - DNA, 30 bp, Artificial Sequence
  Synthetic oligonucleotide
tgatagaagcacatggatgcgctaccccac

SEQ ID NO: 308439 - DNA, 30 bp, Artificial Sequence
  Synthetic oligonucleotide
cagctggccaaggtaccgacgtagccccac

SEQ ID NO: 308440 - DNA, 30 bp, Artificial Sequence
  Synthetic oligonucleotide
tggttgaacaacgggtccagttcgccccac

SEQ ID NO: 308441 - DNA, 30 bp, Artificial Sequence
  Synthetic oligonucleotide
atatgacggttcggtcagattcatccccac

SEQ ID NO: 308442 - DNA, 30 bp, Artificial Sequence
  Synthetic oligonucleotide
ctaatataggtggacaatgcctatccccac

SEQ ID NO: 308443 - DNA, 30 bp, Artificial Sequence
  Synthetic oligonucleotide
gatatgagtaggggagataactctccccac

SEQ ID NO: 308444 - DNA, 30 bp, Artificial Sequence
  Synthetic oligonucleotide
cagagcgctaggctgtccaggcaggcccac

SEQ ID NO: 308445 - DNA, 30 bp, Artificial Sequence
  Synthetic oligonucleotide
tgtttccatagctgtactccagaaagccac

SEQ ID NO: 308446 - DNA, 30 bp, Artificial Sequence
  Synthetic oligonucleotide
cttacccagcccgggccactgttcagccac

SEQ ID NO: 308447 - DNA, 30 bp, Artificial Sequence
  Synthetic oligonucleotide
ctgcggacaaaagggagggcttggagccac

SEQ ID NO: 308448 - DNA, 30 bp, Artificial Sequence
  Synthetic oligonucleotide
gttgaaatggaactccaccgtgtgagccac

SEQ ID NO: 308449 - DNA, 28 bp, Artificial Sequence
  Synthetic oligonucleotide
cgtcctaagctcggctcggaatagccac

SEQ ID NO: 308450 - DNA, 30 bp, Artificial Sequence
  Synthetic oligonucleotide
gtttgtcaaccgggggaaaacactagccac

SEQ ID NO: 308451 - DNA, 30 bp, Artificial Sequence
  Synthetic oligonucleotide
gagattgtaggacataaaggcgttagccac

SEQ ID NO: 308452 - DNA, 30 bp, Artificial Sequence
  Synthetic oligonucleotide
tgtagccttctcggccttgaaaaacgccac

SEQ ID NO: 308453 - DNA, 30 bp, Artificial Sequence
  Synthetic oligonucleotide
aggtatgggaagtcaggagccgctcgccac

SEQ ID NO: 308454 - DNA, 30 bp, Artificial Sequence
  Synthetic oligonucleotide
aagacgacactcagacgcaatgctcgccac

SEQ ID NO: 308455 - DNA, 30 bp, Artificial Sequence
  Synthetic oligonucleotide
ggcatttaaaagtaacccgggccaggccac

SEQ ID NO: 308456 - DNA, 30 bp, Artificial Sequence
  Synthetic oligonucleotide
ggaccttgcttcaattcacttccaggccac

SEQ ID NO: 308457 - DNA, 30 bp, Artificial Sequence
  Synthetic oligonucleotide
accggcagacagcgttaaagcgacggccac

SEQ ID NO: 308458 - DNA, 30 bp, Artificial Sequence
  Synthetic oligonucleotide
atagcgtgacaggccaagtacggcggccac

SEQ ID NO: 308459 - DNA, 30 bp, Artificial Sequence
  Synthetic oligonucleotide
atacaggggctagttggtttgtggggccac

SEQ ID NO: 308460 - DNA, 30 bp, Artificial Sequence
  Synthetic oligonucleotide
ctagattttgtccatacgtggttgggccac

SEQ ID NO: 308461 - DNA, 30 bp, Artificial Sequence
  Synthetic oligonucleotide
gcatatggtggcgccaaaaggtgctgccac

SEQ ID NO: 308462 - DNA, 30 bp, Artificial Sequence
  Synthetic oligonucleotide
tggtcaagcagggaagaaaattgctgccac

SEQ ID NO: 308463 - DNA, 30 bp, Artificial Sequence
  Synthetic oligonucleotide
agtcacaagtccttgtgaccgatttgccac

SEQ ID NO: 308464 - DNA, 30 bp, Artificial Sequence
  Synthetic oligonucleotide
gacagacgtgagtacacgtaagaaatccac

SEQ ID NO: 308465 - DNA, 30 bp, Artificial Sequence
  Synthetic oligonucleotide
ccaggtgaaactctgtacttcataatccac

SEQ ID NO: 308466 - DNA, 30 bp, Artificial Sequence
  Synthetic oligonucleotide
tgcgatcgcagtattttcccctccatccac

SEQ ID NO: 308467 - DNA, 30 bp, Artificial Sequence
  Synthetic oligonucleotide
gatgagctgagctacacggacatcatccac

SEQ ID NO: 308468 - DNA, 30 bp, Artificial Sequence
  Synthetic oligonucleotide
gcgcgggagctgtcttagataaggatccac

SEQ ID NO: 308469 - DNA, 31 bp, Artificial Sequence
  Synthetic oligonucleotide
ctctgtggaagcataatttcgtaggatccac

SEQ ID NO: 308470 - DNA, 30 bp, Artificial Sequence
  Synthetic oligonucleotide
ttcctagagttaaatagataagagctccac

SEQ ID NO: 308471 - DNA, 30 bp, Artificial Sequence
  Synthetic oligonucleotide
ctaatcttcgagtataagttaaccgtccac

SEQ ID NO: 308472 - DNA, 30 bp, Artificial Sequence
  Synthetic oligonucleotide
tcggcaagcatcgtggccccttccgtccac

SEQ ID NO: 308473 - DNA, 30 bp, Artificial Sequence
  Synthetic oligonucleotide
accctttgcaaagcttatattcgcgtccac

SEQ ID NO: 308474 - DNA, 30 bp, Artificial Sequence
  Synthetic oligonucleotide
cggttgctcttaggaggggcgttcgtccac

SEQ ID NO: 308475 - DNA, 30 bp, Artificial Sequence
  Synthetic oligonucleotide
tttcaggtaggcaccgaggtccctgtccac

SEQ ID NO: 308476 - DNA, 30 bp, Artificial Sequence
  Synthetic oligonucleotide
gaaagaggtggaaagtagcccgcgttccac

SEQ ID NO: 308477 - DNA, 30 bp, Artificial Sequence
  Synthetic oligonucleotide
ttccggggcatattagccctagggttccac

SEQ ID NO: 308478 - DNA, 30 bp, Artificial Sequence
  Synthetic oligonucleotide
gaagaacaaacctgttttcagggtttccac

SEQ ID NO: 308479 - DNA, 30 bp, Artificial Sequence
  Synthetic oligonucleotide
tgaagatagaccacttgtgccctcaagcac

SEQ ID NO: 308480 - DNA, 30 bp, Artificial Sequence
  Synthetic oligonucleotide
ttggactggaccgttcgttcggcgaagcac

SEQ ID NO: 308481 - DNA, 30 bp, Artificial Sequence
  Synthetic oligonucleotide
caggacacgacgtcctgcggcatgaagcac

SEQ ID NO: 308482 - DNA, 30 bp, Artificial Sequence
  Synthetic oligonucleotide
gacctatccccgcctgtccgtcgtaagcac

SEQ ID NO: 308483 - DNA, 30 bp, Artificial Sequence
  Synthetic oligonucleotide
gtttcaactaatcccacacctaaccagcac

SEQ ID NO: 308484 - DNA, 30 bp, Artificial Sequence
  Synthetic oligonucleotide
ttgttaatatgccgatgaaacaagcagcac

SEQ ID NO: 308485 - DNA, 30 bp, Artificial Sequence
  Synthetic oligonucleotide
tatatttcgaaacatcattactatcagcac

SEQ ID NO: 308486 - DNA, 30 bp, Artificial Sequence
  Synthetic oligonucleotide
attgcttgtgtgtacgaatgaggagagcac

SEQ ID NO: 308487 - DNA, 30 bp, Artificial Sequence
  Synthetic oligonucleotide
gaggctgctgtcgcctggattaacgagcac

SEQ ID NO: 308488 - DNA, 30 bp, Artificial Sequence
  Synthetic oligonucleotide
tgtctacctggtacggtccgaacggagcac

SEQ ID NO: 308489 - DNA, 30 bp, Artificial Sequence
  Synthetic oligonucleotide
aaacgaatcacacccaccagcacggagcac

SEQ ID NO: 308490 - DNA, 30 bp, Artificial Sequence
  Synthetic oligonucleotide
gctgtgtagctccgttaacagcttgagcac

SEQ ID NO: 308491 - DNA, 30 bp, Artificial Sequence
  Synthetic oligonucleotide
tatcgttgtcgtgtgtctactcaatagcac

SEQ ID NO: 308492 - DNA, 30 bp, Artificial Sequence
  Synthetic oligonucleotide
gcctctgttcaaaagggctcattatagcac

SEQ ID NO: 308493 - DNA, 30 bp, Artificial Sequence
  Synthetic oligonucleotide
tgcgcagatgctcggagtctggactagcac

SEQ ID NO: 308494 - DNA, 30 bp, Artificial Sequence
  Synthetic oligonucleotide
ctctagctagtccactaccttggctagcac

SEQ ID NO: 308495 - DNA, 30 bp, Artificial Sequence
  Synthetic oligonucleotide
ttgggccggtttcaggatgagaagtagcac

SEQ ID NO: 308496 - DNA, 30 bp, Artificial Sequence
  Synthetic oligonucleotide
ctggtgtacatgcgtgaaccggggtagcac

SEQ ID NO: 308497 - DNA, 30 bp, Artificial Sequence
  Synthetic oligonucleotide
caagagtctggtgatcacttagcttagcac

SEQ ID NO: 308498 - DNA, 30 bp, Artificial Sequence
  Synthetic oligonucleotide
gtcaggaatgcgttcagtttgatttagcac

SEQ ID NO: 308499 - DNA, 30 bp, Artificial Sequence
  Synthetic oligonucleotide
gtatggagcggtgctcaggtcttttagcac

SEQ ID NO: 308500 - DNA, 30 bp, Artificial Sequence
  Synthetic oligonucleotide
ggctcggggttctaggaaaaaaaaacgcac

SEQ ID NO: 308501 - DNA, 30 bp, Artificial Sequence
  Synthetic oligonucleotide
attgtgtctggaacccaagctggaacgcac

SEQ ID NO: 308502 - DNA, 30 bp, Artificial Sequence
  Synthetic oligonucleotide
accgggttaaggtaataatagataacgcac

SEQ ID NO: 308503 - DNA, 30 bp, Artificial Sequence
  Synthetic oligonucleotide
gtcaaccagcaagaacatataaagacgcac

SEQ ID NO: 308504 - DNA, 30 bp, Artificial Sequence
  Synthetic oligonucleotide
tgaagttacgaatgaggcacaggtacgcac

SEQ ID NO: 308505 - DNA, 30 bp, Artificial Sequence
  Synthetic oligonucleotide
ctaatgctgtaaatgagggcgtttacgcac

SEQ ID NO: 308506 - DNA, 30 bp, Artificial Sequence
  Synthetic oligonucleotide
ccgtttaaataaccacattttccaccgcac

SEQ ID NO: 308507 - DNA, 30 bp, Artificial Sequence
  Synthetic oligonucleotide
cccgcgtggaaatctcggagatcaccgcac

SEQ ID NO: 308508 - DNA, 30 bp, Artificial Sequence
  Synthetic oligonucleotide
tagacgcaacgagttctcgtgtacccgcac

SEQ ID NO: 308509 - DNA, 30 bp, Artificial Sequence
  Synthetic oligonucleotide
tccaagtacagtggcggacaggggccgcac

SEQ ID NO: 308510 - DNA, 30 bp, Artificial Sequence
  Synthetic oligonucleotide
ttgttccgtcgcccttgcaatatgccgcac

SEQ ID NO: 308511 - DNA, 30 bp, Artificial Sequence
  Synthetic oligonucleotide
gtgatgcatttaatgtcccccgttccgcac

SEQ ID NO: 308512 - DNA, 30 bp, Artificial Sequence
  Synthetic oligonucleotide
tctaacttcgagatctaaggcgttccgcac

SEQ ID NO: 308513 - DNA, 30 bp, Artificial Sequence
  Synthetic oligonucleotide
gccttctcggctgtgtcggtgtaagcgcac

SEQ ID NO: 308514 - DNA, 30 bp, Artificial Sequence
  Synthetic oligonucleotide
catactgcacgcacatacggctgagcgcac

SEQ ID NO: 308515 - DNA, 30 bp, Artificial Sequence
  Synthetic oligonucleotide
aacctatggtacggactgacaggggcgcac

SEQ ID NO: 308516 - DNA, 30 bp, Artificial Sequence
  Synthetic oligonucleotide
aaaggattgtctacaacggtaacatcgcac

SEQ ID NO: 308517 - DNA, 30 bp, Artificial Sequence
  Synthetic oligonucleotide
catgggtggtcggcggtcatactctcgcac

SEQ ID NO: 308518 - DNA, 30 bp, Artificial Sequence
  Synthetic oligonucleotide
gttgggttggtatctagggcaaggtcgcac

SEQ ID NO: 308519 - DNA, 30 bp, Artificial Sequence
  Synthetic oligonucleotide
tgggatgcgcagtcacgtagagggtcgcac

SEQ ID NO: 308520 - DNA, 30 bp, Artificial Sequence
  Synthetic oligonucleotide
ttatacaccctttctcgtgttttgtcgcac

SEQ ID NO: 308521 - DNA, 30 bp, Artificial Sequence
  Synthetic oligonucleotide
cactaggtcatttcttgcctttgttcgcac

SEQ ID NO: 308522 - DNA, 30 bp, Artificial Sequence
  Synthetic oligonucleotide
aatgcgggatttacaaacctactttcgcac

SEQ ID NO: 308523 - DNA, 30 bp, Artificial Sequence
  Synthetic oligonucleotide
actttattaagtgggtcagcgaaaaggcac

SEQ ID NO: 308524 - DNA, 30 bp, Artificial Sequence
  Synthetic oligonucleotide
taatgttagaaaacatggggtcaaaggcac

SEQ ID NO: 308525 - DNA, 30 bp, Artificial Sequence
  Synthetic oligonucleotide
caaatggaccagtgatgttctaccaggcac

SEQ ID NO: 308526 - DNA, 30 bp, Artificial Sequence
  Synthetic oligonucleotide
ccgtaccaattcgggttccatcagaggcac

SEQ ID NO: 308527 - DNA, 30 bp, Artificial Sequence
  Synthetic oligonucleotide
atgtaagcataggtttctgttgggaggcac

SEQ ID NO: 308528 - DNA, 30 bp, Artificial Sequence
  Synthetic oligonucleotide
gtacggaacaggctagcttatcataggcac

SEQ ID NO: 308529 - DNA, 30 bp, Artificial Sequence
  Synthetic oligonucleotide
gggccatataaagatgcagcgaaacggcac

SEQ ID NO: 308530 - DNA, 30 bp, Artificial Sequence
  Synthetic oligonucleotide
agcgatgtagcgctccctcgggaacggcac

SEQ ID NO: 308531 - DNA, 30 bp, Artificial Sequence
  Synthetic oligonucleotide
tcgtactgacgtggctaagaacgccggcac

SEQ ID NO: 308532 - DNA, 30 bp, Artificial Sequence
  Synthetic oligonucleotide
gacaaaggactgcgaaattcacttcggcac

SEQ ID NO: 308533 - DNA, 30 bp, Artificial Sequence
  Synthetic oligonucleotide
taacaaccgtcgcgagacctttacgggcac

SEQ ID NO: 308534 - DNA, 30 bp, Artificial Sequence
  Synthetic oligonucleotide
tgtaacgtgcgctcgttcgtcggcgggcac

SEQ ID NO: 308535 - DNA, 30 bp, Artificial Sequence
  Synthetic oligonucleotide
aagtctagccccacgagcccgacggggcac

SEQ ID NO: 308536 - DNA, 30 bp, Artificial Sequence
  Synthetic oligonucleotide
cagatctcaccgacaactattcctgggcac

SEQ ID NO: 308537 - DNA, 30 bp, Artificial Sequence
  Synthetic oligonucleotide
attcagcgttttgaccgatggggatggcac

SEQ ID NO: 308538 - DNA, 30 bp, Artificial Sequence
  Synthetic oligonucleotide
tgtgcctcgaccgagtactgggcctggcac

SEQ ID NO: 308539 - DNA, 30 bp, Artificial Sequence
  Synthetic oligonucleotide
gtatacgactttaactcacctgcctggcac

SEQ ID NO: 308540 - DNA, 30 bp, Artificial Sequence
  Synthetic oligonucleotide
ggcagagagttggctgcctcaggctggcac

SEQ ID NO: 308541 - DNA, 30 bp, Artificial Sequence
  Synthetic oligonucleotide
acatgctttaatcgcttgactacgtggcac

SEQ ID NO: 308542 - DNA, 30 bp, Artificial Sequence
  Synthetic oligonucleotide
taagtgctatagtatggctacccgtggcac

SEQ ID NO: 308543 - DNA, 30 bp, Artificial Sequence
  Synthetic oligonucleotide
tgcttagcagagggtagggggaggtggcac

SEQ ID NO: 308544 - DNA, 30 bp, Artificial Sequence
  Synthetic oligonucleotide
gggacattcttatggtcggcgtattggcac

SEQ ID NO: 308545 - DNA, 30 bp, Artificial Sequence
  Synthetic oligonucleotide
acgctcccagtataaaagtggaaaatgcac

SEQ ID NO: 308546 - DNA, 30 bp, Artificial Sequence
  Synthetic oligonucleotide
tcaccacgcttctatcattagacgatgcac

SEQ ID NO: 308547 - DNA, 30 bp, Artificial Sequence
  Synthetic oligonucleotide
gcggagcttcacctcagcctagggatgcac

SEQ ID NO: 308548 - DNA, 30 bp, Artificial Sequence
  Synthetic oligonucleotide
aggccagattgtatattcgtggatatgcac

SEQ ID NO: 308549 - DNA, 30 bp, Artificial Sequence
  Synthetic oligonucleotide
agcctccgcggttgtctacggtgtatgcac

SEQ ID NO: 308550 - DNA, 30 bp, Artificial Sequence
  Synthetic oligonucleotide
gctcaataacttcataccttccacctgcac

SEQ ID NO: 308551 - DNA, 30 bp, Artificial Sequence
  Synthetic oligonucleotide
cttcgggaaggagcgtaacgcgacctgcac

SEQ ID NO: 308552 - DNA, 29 bp, Artificial Sequence
  Synthetic oligonucleotide
cagaagtcaggtaacgaagtcgcctgcac

SEQ ID NO: 308553 - DNA, 30 bp, Artificial Sequence
  Synthetic oligonucleotide
aacacagtagaaacgtcgactgcgctgcac

SEQ ID NO: 308554 - DNA, 30 bp, Artificial Sequence
  Synthetic oligonucleotide
gtagtcggggtccctgggtggcggctgcac

SEQ ID NO: 308555 - DNA, 30 bp, Artificial Sequence
  Synthetic oligonucleotide
ctcagttgttgaaccgtacaaatgctgcac

SEQ ID NO: 308556 - DNA, 30 bp, Artificial Sequence
  Synthetic oligonucleotide
atatctacgaccagtgcaagtgatctgcac

SEQ ID NO: 308557 - DNA, 30 bp, Artificial Sequence
  Synthetic oligonucleotide
gtctatgaactttgtacgatgagtctgcac

SEQ ID NO: 308558 - DNA, 30 bp, Artificial Sequence
  Synthetic oligonucleotide
ggtagtacggggcgctgcttatgtctgcac

SEQ ID NO: 308559 - DNA, 30 bp, Artificial Sequence
  Synthetic oligonucleotide
aggtatgcaaccacgtctgcaccagtgcac

SEQ ID NO: 308560 - DNA, 30 bp, Artificial Sequence
  Synthetic oligonucleotide
atgcaaaggcaaacccaatttcgggtgcac

SEQ ID NO: 308561 - DNA, 30 bp, Artificial Sequence
  Synthetic oligonucleotide
agacttgctggcctacgtcataatgtgcac

SEQ ID NO: 308562 - DNA, 30 bp, Artificial Sequence
  Synthetic oligonucleotide
gatcacacctgtccattaggtattgtgcac

SEQ ID NO: 308563 - DNA, 30 bp, Artificial Sequence
  Synthetic oligonucleotide
gatgtcccttcacatagacggtttgtgcac

SEQ ID NO: 308564 - DNA, 30 bp, Artificial Sequence
  Synthetic oligonucleotide
ttgttctacatagattcgaatccattgcac

SEQ ID NO: 308565 - DNA, 30 bp, Artificial Sequence
  Synthetic oligonucleotide
gataccgtgtaatgcccctagctattgcac

SEQ ID NO: 308566 - DNA, 30 bp, Artificial Sequence
  Synthetic oligonucleotide
acgacggttatttaagaatgacgcttgcac

SEQ ID NO: 308567 - DNA, 30 bp, Artificial Sequence
  Synthetic oligonucleotide
acatagctccacggaggacgccggttgcac

SEQ ID NO: 308568 - DNA, 30 bp, Artificial Sequence
  Synthetic oligonucleotide
gcgcgctgcggaacatacgttcttttgcac

SEQ ID NO: 308569 - DNA, 30 bp, Artificial Sequence
  Synthetic oligonucleotide
ccgtccattactatgtataatgttttgcac

SEQ ID NO: 308570 - DNA, 30 bp, Artificial Sequence
  Synthetic oligonucleotide
gggctcatggattactcgaacaacaatcac

SEQ ID NO: 308571 - DNA, 30 bp, Artificial Sequence
  Synthetic oligonucleotide
tgttacagaattattgctcgacgcaatcac

SEQ ID NO: 308572 - DNA, 30 bp, Artificial Sequence
  Synthetic oligonucleotide
agacactaccgcttcagaccgcgcaatcac

SEQ ID NO: 308573 - DNA, 30 bp, Artificial Sequence
  Synthetic oligonucleotide
caacccatattaaaataggggttcaatcac

SEQ ID NO: 308574 - DNA, 30 bp, Artificial Sequence
  Synthetic oligonucleotide
ccgtccagggtcattgtctacgataatcac

SEQ ID NO: 308575 - DNA, 30 bp, Artificial Sequence
  Synthetic oligonucleotide
agcaccagtgcctgagcccaggcacatcac

SEQ ID NO: 308576 - DNA, 30 bp, Artificial Sequence
  Synthetic oligonucleotide
ttcaggggccgtgacctggcataccatcac

SEQ ID NO: 308577 - DNA, 30 bp, Artificial Sequence
  Synthetic oligonucleotide
taaaggagaccctttatacttcgccatcac

SEQ ID NO: 308578 - DNA, 30 bp, Artificial Sequence
  Synthetic oligonucleotide
caggtataaccgtatcgcttccagcatcac

SEQ ID NO: 308579 - DNA, 30 bp, Artificial Sequence
  Synthetic oligonucleotide
cggatccacggaacggacgctccgcatcac

SEQ ID NO: 308580 - DNA, 30 bp, Artificial Sequence
  Synthetic oligonucleotide
cattcctcaaagcaagagcgttctcatcac

SEQ ID NO: 308581 - DNA, 30 bp, Artificial Sequence
  Synthetic oligonucleotide
atacgttcggagggtctaaatattcatcac

SEQ ID NO: 308582 - DNA, 30 bp, Artificial Sequence
  Synthetic oligonucleotide
cgtctatgaccgatgcaattcgccgatcac

SEQ ID NO: 308583 - DNA, 30 bp, Artificial Sequence
  Synthetic oligonucleotide
cttgaagttagataatagcaagttgatcac

SEQ ID NO: 308584 - DNA, 30 bp, Artificial Sequence
  Synthetic oligonucleotide
atctaaactcggtatagatgaatatatcac

SEQ ID NO: 308585 - DNA, 30 bp, Artificial Sequence
  Synthetic oligonucleotide
gaggaaatgattttcccagcacactatcac

SEQ ID NO: 308586 - DNA, 30 bp, Artificial Sequence
  Synthetic oligonucleotide
gtcctcctcggtacagcgccatattatcac

SEQ ID NO: 308587 - DNA, 30 bp, Artificial Sequence
  Synthetic oligonucleotide
gcagtacatgatctacagcattgaactcac

SEQ ID NO: 308588 - DNA, 30 bp, Artificial Sequence
  Synthetic oligonucleotide
tggctagacctatcctttctcaccactcac

SEQ ID NO: 308589 - DNA, 30 bp, Artificial Sequence
  Synthetic oligonucleotide
tatggggggtcagaatgatctttcactcac

SEQ ID NO: 308590 - DNA, 30 bp, Artificial Sequence
  Synthetic oligonucleotide
acttcagacttggagagagtcaagactcac

SEQ ID NO: 308591 - DNA, 30 bp, Artificial Sequence
  Synthetic oligonucleotide
taaaggcgcaacgttatttctacgactcac

SEQ ID NO: 308592 - DNA, 30 bp, Artificial Sequence
  Synthetic oligonucleotide
cttggcgactgaggtttatactggactcac

SEQ ID NO: 308593 - DNA, 30 bp, Artificial Sequence
  Synthetic oligonucleotide
gacagagataagttgctctcggatactcac

SEQ ID NO: 308594 - DNA, 30 bp, Artificial Sequence
  Synthetic oligonucleotide
atcctcatgacgcacaattggagtactcac

SEQ ID NO: 308595 - DNA, 30 bp, Artificial Sequence
  Synthetic oligonucleotide
cagggaggtgtattagattattcccctcac

SEQ ID NO: 308596 - DNA, 30 bp, Artificial Sequence
  Synthetic oligonucleotide
aattcaaatggcccgtgaaggtagcctcac

SEQ ID NO: 308597 - DNA, 30 bp, Artificial Sequence
  Synthetic oligonucleotide
ccctgcgggtactgaggttggccgcctcac

SEQ ID NO: 308598 - DNA, 30 bp, Artificial Sequence
  Synthetic oligonucleotide
ggggctggacacaatacttagattcctcac

SEQ ID NO: 308599 - DNA, 30 bp, Artificial Sequence
  Synthetic oligonucleotide
agtaatacccggtatgatccaaaagctcac

SEQ ID NO: 308600 - DNA, 30 bp, Artificial Sequence
  Synthetic oligonucleotide
actgggttgaccactgactttcccgctcac

SEQ ID NO: 308601 - DNA, 30 bp, Artificial Sequence
  Synthetic oligonucleotide
agggaaagagatgactcactgggcgctcac

SEQ ID NO: 308602 - DNA, 30 bp, Artificial Sequence
  Synthetic oligonucleotide
agttataccgtgagtaatcatattgctcac

SEQ ID NO: 308603 - DNA, 30 bp, Artificial Sequence
  Synthetic oligonucleotide
aggttgtggttgtggccaggtcactctcac

SEQ ID NO: 308604 - DNA, 30 bp, Artificial Sequence
  Synthetic oligonucleotide
tggcacttttcactggactcgtagtctcac

SEQ ID NO: 308605 - DNA, 30 bp, Artificial Sequence
  Synthetic oligonucleotide
acgcgtacatcctaccagtgtaggtctcac

SEQ ID NO: 308606 - DNA, 30 bp, Artificial Sequence
  Synthetic oligonucleotide
gagtgtagtacgagcatacgaggttctcac

SEQ ID NO: 308607 - DNA, 30 bp, Artificial Sequence
  Synthetic oligonucleotide
ttcagacaatgatttccgctaagcagtcac

SEQ ID NO: 308608 - DNA, 30 bp, Artificial Sequence
  Synthetic oligonucleotide
gatctaatccgggtcgatgtaggcagtcac

SEQ ID NO: 308609 - DNA, 30 bp, Artificial Sequence
  Synthetic oligonucleotide
aagttgcttgaattttgccgttcgagtcac

SEQ ID NO: 308610 - DNA, 30 bp, Artificial Sequence
  Synthetic oligonucleotide
tgtagccccggagatataggtggacgtcac

SEQ ID NO: 308611 - DNA, 30 bp, Artificial Sequence
  Synthetic oligonucleotide
atagtccatgcgtaaaatgaattacgtcac

SEQ ID NO: 308612 - DNA, 30 bp, Artificial Sequence
  Synthetic oligonucleotide
gtgggtctcgctttgggtcaataccgtcac

SEQ ID NO: 308613 - DNA, 30 bp, Artificial Sequence
  Synthetic oligonucleotide
aagtactccgcccgggtgtgaccgcgtcac

SEQ ID NO: 308614 - DNA, 30 bp, Artificial Sequence
  Synthetic oligonucleotide
cctagccctaccctcaacaaccctcgtcac

SEQ ID NO: 308615 - DNA, 30 bp, Artificial Sequence
  Synthetic oligonucleotide
tcgttcaccgtcggcgttacaggtcgtcac

SEQ ID NO: 308616 - DNA, 30 bp, Artificial Sequence
  Synthetic oligonucleotide
taagttatggttagtctctcctcaggtcac

SEQ ID NO: 308617 - DNA, 30 bp, Artificial Sequence
  Synthetic oligonucleotide
aaagcatggacgcgttcaattataggtcac

SEQ ID NO: 308618 - DNA, 30 bp, Artificial Sequence
  Synthetic oligonucleotide
acccggcaagggcttagacggcgcggtcac

SEQ ID NO: 308619 - DNA, 30 bp, Artificial Sequence
  Synthetic oligonucleotide
cggtaagtagccttatggtgtcgcggtcac

SEQ ID NO: 308620 - DNA, 30 bp, Artificial Sequence
  Synthetic oligonucleotide
attttcagcgtcttgcgcgtaaagggtcac

SEQ ID NO: 308621 - DNA, 30 bp, Artificial Sequence
  Synthetic oligonucleotide
gagtatggacctgccattcactagggtcac

SEQ ID NO: 308622 - DNA, 30 bp, Artificial Sequence
  Synthetic oligonucleotide
ggctggatgtcttaatgtgagcgtggtcac

SEQ ID NO: 308623 - DNA, 30 bp, Artificial Sequence
  Synthetic oligonucleotide
ggcagttcataaatcactcgttttggtcac

SEQ ID NO: 308624 - DNA, 30 bp, Artificial Sequence
  Synthetic oligonucleotide
ttttgtaacatccggactggataatgtcac

SEQ ID NO: 308625 - DNA, 30 bp, Artificial Sequence
  Synthetic oligonucleotide
ctatgggtataccgaaaattaacatgtcac

SEQ ID NO: 308626 - DNA, 30 bp, Artificial Sequence
  Synthetic oligonucleotide
ttcatatgttacctttctcggaactgtcac

SEQ ID NO: 308627 - DNA, 30 bp, Artificial Sequence
  Synthetic oligonucleotide
atccgcttattgatataaaccccgtgtcac

SEQ ID NO: 308628 - DNA, 30 bp, Artificial Sequence
  Synthetic oligonucleotide
cagaaaatgtagcgcatcagagggtgtcac

SEQ ID NO: 308629 - DNA, 30 bp, Artificial Sequence
  Synthetic oligonucleotide
ggcattagtgagaggttggttccttgtcac

SEQ ID NO: 308630 - DNA, 30 bp, Artificial Sequence
  Synthetic oligonucleotide
agtaagggcaatgggggttgcttttgtcac

SEQ ID NO: 308631 - DNA, 30 bp, Artificial Sequence
  Synthetic oligonucleotide
atttctccaagtggtggggtcggaattcac

SEQ ID NO: 308632 - DNA, 30 bp, Artificial Sequence
  Synthetic oligonucleotide
atcgggtactacattataaagaccattcac

SEQ ID NO: 308633 - DNA, 30 bp, Artificial Sequence
  Synthetic oligonucleotide
ttcatggcatcgtgactctctaccattcac

SEQ ID NO: 308634 - DNA, 30 bp, Artificial Sequence
  Synthetic oligonucleotide
caaatggtaacccttaaagggtccattcac

SEQ ID NO: 308635 - DNA, 30 bp, Artificial Sequence
  Synthetic oligonucleotide
aacgtcgccgggtcctacttggatattcac

SEQ ID NO: 308636 - DNA, 30 bp, Artificial Sequence
  Synthetic oligonucleotide
tggaatcggacttgcatggatagtattcac

SEQ ID NO: 308637 - DNA, 30 bp, Artificial Sequence
  Synthetic oligonucleotide
gcaaggtgctaccgttaataacgtattcac

SEQ ID NO: 308638 - DNA, 30 bp, Artificial Sequence
  Synthetic oligonucleotide
tcgtcgactttaagcttgccggttattcac

SEQ ID NO: 308639 - DNA, 30 bp, Artificial Sequence
  Synthetic oligonucleotide
tgcaacacttcaggaggcggcccacttcac

SEQ ID NO: 308640 - DNA, 30 bp, Artificial Sequence
  Synthetic oligonucleotide
ccatgcatggcggcatatcgatggcttcac

SEQ ID NO: 308641 - DNA, 30 bp, Artificial Sequence
  Synthetic oligonucleotide
tgaccaaatgggagcttgagaatgcttcac

SEQ ID NO: 308642 - DNA, 30 bp, Artificial Sequence
  Synthetic oligonucleotide
ccctacgcactctcaggcaaaaaagttcac

SEQ ID NO: 308643 - DNA, 30 bp, Artificial Sequence
  Synthetic oligonucleotide
atgctaatcaaggccttcaaattcgttcac

SEQ ID NO: 308644 - DNA, 30 bp, Artificial Sequence
  Synthetic oligonucleotide
ggtggaccggcgggaagagtcttcgttcac

SEQ ID NO: 308645 - DNA, 30 bp, Artificial Sequence
  Synthetic oligonucleotide
ccctacgccaccagaggtctggaggttcac

SEQ ID NO: 308646 - DNA, 30 bp, Artificial Sequence
  Synthetic oligonucleotide
tggctaggcaagtccgggattcgggttcac

SEQ ID NO: 308647 - DNA, 30 bp, Artificial Sequence
  Synthetic oligonucleotide
cgagtggcttccaacgtattacttgttcac

SEQ ID NO: 308648 - DNA, 30 bp, Artificial Sequence
  Synthetic oligonucleotide
atctgcttcgggggtcagaaccactttcac

SEQ ID NO: 308649 - DNA, 30 bp, Artificial Sequence
  Synthetic oligonucleotide
tcagggaagcagagtgagcgtgactttcac

SEQ ID NO: 308650 - DNA, 30 bp, Artificial Sequence
  Synthetic oligonucleotide
cttgattggtacagcgacgttccctttcac

SEQ ID NO: 308651 - DNA, 30 bp, Artificial Sequence
  Synthetic oligonucleotide
cagtgtctggcaaatccacgttagtttcac

SEQ ID NO: 308652 - DNA, 30 bp, Artificial Sequence
  Synthetic oligonucleotide
ctcgctgatcgtaagccccttgggtttcac

SEQ ID NO: 308653 - DNA, 30 bp, Artificial Sequence
  Synthetic oligonucleotide
caacgtagccccagtgaatgtccttttcac

SEQ ID NO: 308654 - DNA, 30 bp, Artificial Sequence
  Synthetic oligonucleotide
tgaaagcacggatcctccgttccttttcac

SEQ ID NO: 308655 - DNA, 34 bp, Artificial Sequence
  Synthetic oligonucleotide
gatactataccaccacgtgtccatcagaaaagac

SEQ ID NO: 308656 - DNA, 30 bp, Artificial Sequence
  Synthetic oligonucleotide
gccaaacgagttttcccgggtaacaaagac

SEQ ID NO: 308657 - DNA, 30 bp, Artificial Sequence
  Synthetic oligonucleotide
gcgggccctgaattcagattacacaaagac

SEQ ID NO: 308658 - DNA, 31 bp, Artificial Sequence
  Synthetic oligonucleotide
cccagatactgggggcattggagacaaagac

SEQ ID NO: 308659 - DNA, 30 bp, Artificial Sequence
  Synthetic oligonucleotide
agtttcctaagccaggacatctacaaagac

SEQ ID NO: 308660 - DNA, 30 bp, Artificial Sequence
  Synthetic oligonucleotide
attgggggtggaatcccgaggtccaaagac

SEQ ID NO: 308661 - DNA, 30 bp, Artificial Sequence
  Synthetic oligonucleotide
ttatcacatgctatggcaaaaatcaaagac

SEQ ID NO: 308662 - DNA, 30 bp, Artificial Sequence
  Synthetic oligonucleotide
gaagcttgtctcatcacgagtaagaaagac

SEQ ID NO: 308663 - DNA, 30 bp, Artificial Sequence
  Synthetic oligonucleotide
attgatgtggcgctcaggagatgccaagac

SEQ ID NO: 308664 - DNA, 30 bp, Artificial Sequence
  Synthetic oligonucleotide
tctaaagactacgtaagggcttcgcaagac

SEQ ID NO: 308665 - DNA, 30 bp, Artificial Sequence
  Synthetic oligonucleotide
ttcttgcatcatagctttagacctcaagac

SEQ ID NO: 308666 - DNA, 30 bp, Artificial Sequence
  Synthetic oligonucleotide
tataggaggtggatgcggttgggtcaagac

SEQ ID NO: 308667 - DNA, 30 bp, Artificial Sequence
  Synthetic oligonucleotide
agaacctggcgagtccctccgtgagaagac

SEQ ID NO: 308668 - DNA, 30 bp, Artificial Sequence
  Synthetic oligonucleotide
caggaaactagaggctgcacattagaagac

SEQ ID NO: 308669 - DNA, 30 bp, Artificial Sequence
  Synthetic oligonucleotide
ttgatcatgtgcagtgcagggttagaagac

SEQ ID NO: 308670 - DNA, 30 bp, Artificial Sequence
  Synthetic oligonucleotide
ctacgaacaccggactgagcagatgaagac

SEQ ID NO: 308671 - DNA, 30 bp, Artificial Sequence
  Synthetic oligonucleotide
gtaatcaacaagtccatggtgtctgaagac

SEQ ID NO: 308672 - DNA, 30 bp, Artificial Sequence
  Synthetic oligonucleotide
taaagtctggttcgattgaggcaataagac

SEQ ID NO: 308673 - DNA, 30 bp, Artificial Sequence
  Synthetic oligonucleotide
atacgtatacatggtcagccgagataagac

SEQ ID NO: 308674 - DNA, 30 bp, Artificial Sequence
  Synthetic oligonucleotide
agaataccaacgggttatacatgataagac

SEQ ID NO: 308675 - DNA, 30 bp, Artificial Sequence
  Synthetic oligonucleotide
agtctagtgttcggtgaacgtttataagac

SEQ ID NO: 308676 - DNA, 30 bp, Artificial Sequence
  Synthetic oligonucleotide
gcgtacatgaccccggctaagggctaagac

SEQ ID NO: 308677 - DNA, 30 bp, Artificial Sequence
  Synthetic oligonucleotide
gcgagtacttggagtggaggagtctaagac

SEQ ID NO: 308678 - DNA, 30 bp, Artificial Sequence
  Synthetic oligonucleotide
gctccccctgactcggggcgggtctaagac

SEQ ID NO: 308679 - DNA, 30 bp, Artificial Sequence
  Synthetic oligonucleotide
caagcgacttacatgagcttggggtaagac

SEQ ID NO: 308680 - DNA, 30 bp, Artificial Sequence
  Synthetic oligonucleotide
ctgcctataacacaaccagtggtttaagac

SEQ ID NO: 308681 - DNA, 30 bp, Artificial Sequence
  Synthetic oligonucleotide
tagcggcgcataacttacgctttttaagac

SEQ ID NO: 308682 - DNA, 30 bp, Artificial Sequence
  Synthetic oligonucleotide
gcatcgttagcccagcccttcacaacagac

SEQ ID NO: 308683 - DNA, 30 bp, Artificial Sequence
  Synthetic oligonucleotide
agtattcttaaacgccttgagagaacagac

SEQ ID NO: 308684 - DNA, 30 bp, Artificial Sequence
  Synthetic oligonucleotide
cgtcatagttcaagttacgctataacagac

SEQ ID NO: 308685 - DNA, 30 bp, Artificial Sequence
  Synthetic oligonucleotide
gcaagatgggaatgcctaccttccacagac

SEQ ID NO: 308686 - DNA, 30 bp, Artificial Sequence
  Synthetic oligonucleotide
gcatcgaaaaagttaagctttagcacagac

SEQ ID NO: 308687 - DNA, 30 bp, Artificial Sequence
  Synthetic oligonucleotide
ttgatctcgacattagtcgttaagacagac

SEQ ID NO: 308688 - DNA, 30 bp, Artificial Sequence
  Synthetic oligonucleotide
cttcagtgcttggcattcagttaaccagac

SEQ ID NO: 308689 - DNA, 30 bp, Artificial Sequence
  Synthetic oligonucleotide
cttgctcggtctaaccttattgccccagac

SEQ ID NO: 308690 - DNA, 30 bp, Artificial Sequence
  Synthetic oligonucleotide
gctactatctattaaggataggtcccagac

SEQ ID NO: 308691 - DNA, 30 bp, Artificial Sequence
  Synthetic oligonucleotide
tcatgagatacttaggtacgtcatccagac

SEQ ID NO: 308692 - DNA, 30 bp, Artificial Sequence
  Synthetic oligonucleotide
tttatcacgcccctggaaacatcagcagac

SEQ ID NO: 308693 - DNA, 30 bp, Artificial Sequence
  Synthetic oligonucleotide
taccgcctacttaccacacatggagcagac

SEQ ID NO: 308694 - DNA, 30 bp, Artificial Sequence
  Synthetic oligonucleotide
atgcaaaaatattcaaactaagacgcagac

SEQ ID NO: 308695 - DNA, 30 bp, Artificial Sequence
  Synthetic oligonucleotide
caatgggtctcccgtcccaatggcgcagac

SEQ ID NO: 308696 - DNA, 31 bp, Artificial Sequence
  Synthetic oligonucleotide
accaagaatcttgctaataacctaggcagac

SEQ ID NO: 308697 - DNA, 30 bp, Artificial Sequence
  Synthetic oligonucleotide
cttagcatccgagctgctgggatggcagac

SEQ ID NO: 308698 - DNA, 30 bp, Artificial Sequence
  Synthetic oligonucleotide
ctatattagagaagtcgcacccgtgcagac

SEQ ID NO: 308699 - DNA, 30 bp, Artificial Sequence
  Synthetic oligonucleotide
cgggtgtcatgcagagcactctcgtcagac

SEQ ID NO: 308700 - DNA, 31 bp, Artificial Sequence
  Synthetic oligonucleotide
agatgcctccaagctcactggcctgtcagac

SEQ ID NO: 308701 - DNA, 30 bp, Artificial Sequence
  Synthetic oligonucleotide
aggttacttctggtaacgaccccttcagac

SEQ ID NO: 308702 - DNA, 30 bp, Artificial Sequence
  Synthetic oligonucleotide
ttaggcgggggctgcaaagggtccagagac

SEQ ID NO: 308703 - DNA, 30 bp, Artificial Sequence
  Synthetic oligonucleotide
cagacactccgcgttcgtcgttcgagagac

SEQ ID NO: 308704 - DNA, 30 bp, Artificial Sequence
  Synthetic oligonucleotide
gtagttaaataggcaagatacaatagagac

SEQ ID NO: 308705 - DNA, 30 bp, Artificial Sequence
  Synthetic oligonucleotide
gattacactacgggcgagttgaaacgagac

SEQ ID NO: 308706 - DNA, 30 bp, Artificial Sequence
  Synthetic oligonucleotide
aaggtctactcgcatgtctttacacgagac

SEQ ID NO: 308707 - DNA, 30 bp, Artificial Sequence
  Synthetic oligonucleotide
cagtcattctaggcccatttacgccgagac

SEQ ID NO: 308708 - DNA, 30 bp, Artificial Sequence
  Synthetic oligonucleotide
gggtgactattaggagagaatccgcgagac

SEQ ID NO: 308709 - DNA, 30 bp, Artificial Sequence
  Synthetic oligonucleotide
gtgatgggtataatgttttaacgtcgagac

SEQ ID NO: 308710 - DNA, 30 bp, Artificial Sequence
  Synthetic oligonucleotide
gaaaaatcgtcgtggcgatcatttcgagac

SEQ ID NO: 308711 - DNA, 30 bp, Artificial Sequence
  Synthetic oligonucleotide
tgcactcgattacagtgtcggtaaggagac

SEQ ID NO: 308712 - DNA, 30 bp, Artificial Sequence
  Synthetic oligonucleotide
atgcgcacattaatcatggcgccaggagac

SEQ ID NO: 308713 - DNA, 30 bp, Artificial Sequence
  Synthetic oligonucleotide
ctttatggccttttctacagatcaggagac

SEQ ID NO: 308714 - DNA, 30 bp, Artificial Sequence
  Synthetic oligonucleotide
gttcgtgtactgccttgctccggaggagac

SEQ ID NO: 308715 - DNA, 30 bp, Artificial Sequence
  Synthetic oligonucleotide
tgcttctgctcccttctattcttcggagac

SEQ ID NO: 308716 - DNA, 30 bp, Artificial Sequence
  Synthetic oligonucleotide
ttgctagtcctatggagcaaggagggagac

SEQ ID NO: 308717 - DNA, 30 bp, Artificial Sequence
  Synthetic oligonucleotide
cgtcgggttccgccggtggcaaatggagac

SEQ ID NO: 308718 - DNA, 30 bp, Artificial Sequence
  Synthetic oligonucleotide
aatatgtacgaacatacatacggtggagac

SEQ ID NO: 308719 - DNA, 30 bp, Artificial Sequence
  Synthetic oligonucleotide
tggcttatagcagatccgctgaaatgagac

SEQ ID NO: 308720 - DNA, 30 bp, Artificial Sequence
  Synthetic oligonucleotide
tctaggcaccgattgcttgtctaatgagac

SEQ ID NO: 308721 - DNA, 30 bp, Artificial Sequence
  Synthetic oligonucleotide
ggtatatgaacaaagccatctatatgagac

SEQ ID NO: 308722 - DNA, 30 bp, Artificial Sequence
  Synthetic oligonucleotide
taaggattgcctatgcattcacagtgagac

SEQ ID NO: 308723 - DNA, 30 bp, Artificial Sequence
  Synthetic oligonucleotide
gggtaacggtaccgcccactatagtgagac

SEQ ID NO: 308724 - DNA, 30 bp, Artificial Sequence
  Synthetic oligonucleotide
gaactaataagtcgtggtttactgtgagac

SEQ ID NO: 308725 - DNA, 30 bp, Artificial Sequence
  Synthetic oligonucleotide
tgcctatctgatgcgctcgcgcgttgagac

SEQ ID NO: 308726 - DNA, 30 bp, Artificial Sequence
  Synthetic oligonucleotide
tatctgacacgaaaaaagttctgaatagac

SEQ ID NO: 308727 - DNA, 30 bp, Artificial Sequence
  Synthetic oligonucleotide
cgttagaaaatgtgatcgcgtttaatagac

SEQ ID NO: 308728 - DNA, 30 bp, Artificial Sequence
  Synthetic oligonucleotide
gatcggtttaaaatacgtacatacatagac

SEQ ID NO: 308729 - DNA, 30 bp, Artificial Sequence
  Synthetic oligonucleotide
ctacgtgcccgaacaaaatcgctcatagac

SEQ ID NO: 308730 - DNA, 30 bp, Artificial Sequence
  Synthetic oligonucleotide
ttatagcgcagttagaattaggagatagac

SEQ ID NO: 308731 - DNA, 30 bp, Artificial Sequence
  Synthetic oligonucleotide
gcgatgttaattctaatttgcgggatagac

SEQ ID NO: 308732 - DNA, 30 bp, Artificial Sequence
  Synthetic oligonucleotide
aagctgacctatccgagggattatatagac

SEQ ID NO: 308733 - DNA, 30 bp, Artificial Sequence
  Synthetic oligonucleotide
tggggtgagacagggtataggcgtatagac

SEQ ID NO: 308734 - DNA, 30 bp, Artificial Sequence
  Synthetic oligonucleotide
gagccaagggtctagacggttcgtatagac

SEQ ID NO: 308735 - DNA, 30 bp, Artificial Sequence
  Synthetic oligonucleotide
cagccgtacgtttactattgaaacctagac

SEQ ID NO: 308736 - DNA, 30 bp, Artificial Sequence
  Synthetic oligonucleotide
aaaagagtaatcaaattgcaaaggctagac

SEQ ID NO: 308737 - DNA, 30 bp, Artificial Sequence
  Synthetic oligonucleotide
gatcaacgtatgatcccagtcttgctagac

SEQ ID NO: 308738 - DNA, 30 bp, Artificial Sequence
  Synthetic oligonucleotide
agcggccgttccacgtagtgaaatctagac

SEQ ID NO: 308739 - DNA, 30 bp, Artificial Sequence
  Synthetic oligonucleotide
tgagatcacttcataccacgggatctagac

SEQ ID NO: 308740 - DNA, 30 bp, Artificial Sequence
  Synthetic oligonucleotide
gatctaagaaagatgaaagtatatctagac

SEQ ID NO: 308741 - DNA, 30 bp, Artificial Sequence
  Synthetic oligonucleotide
ggcgtccgcgcatacagtcaattagtagac

SEQ ID NO: 308742 - DNA, 30 bp, Artificial Sequence
  Synthetic oligonucleotide
tacgggaaggcagtctatacgaaggtagac

SEQ ID NO: 308743 - DNA, 30 bp, Artificial Sequence
  Synthetic oligonucleotide
tcagtcattctttctagtcacgtggtagac

SEQ ID NO: 308744 - DNA, 30 bp, Artificial Sequence
  Synthetic oligonucleotide
cctaactggtggagcagcgcggtggtagac

SEQ ID NO: 308745 - DNA, 30 bp, Artificial Sequence
  Synthetic oligonucleotide
ggagcgtacgtgcccgtacgtagtgtagac

SEQ ID NO: 308746 - DNA, 30 bp, Artificial Sequence
  Synthetic oligonucleotide
cacgacaggggggtacaaagataattagac

SEQ ID NO: 308747 - DNA, 30 bp, Artificial Sequence
  Synthetic oligonucleotide
cgtgaagtctctagtagctacacattagac

SEQ ID NO: 308748 - DNA, 29 bp, Artificial Sequence
  Synthetic oligonucleotide
gctggggcctataaggcgcaatattagac

SEQ ID NO: 308749 - DNA, 30 bp, Artificial Sequence
  Synthetic oligonucleotide
gcaacattcataaaaggggcgtccttagac

SEQ ID NO: 308750 - DNA, 30 bp, Artificial Sequence
  Synthetic oligonucleotide
ccgttcctttcgtattcgttattcttagac

SEQ ID NO: 308751 - DNA, 30 bp, Artificial Sequence
  Synthetic oligonucleotide
atgaggctgatcgcggtcttgtagttagac

SEQ ID NO: 308752 - DNA, 30 bp, Artificial Sequence
  Synthetic oligonucleotide
atggatagtggggtatgtgtccggttagac

SEQ ID NO: 308753 - DNA, 30 bp, Artificial Sequence
  Synthetic oligonucleotide
gataagtcacggctcataatgtaaaacgac

SEQ ID NO: 308754 - DNA, 30 bp, Artificial Sequence
  Synthetic oligonucleotide
ttgcatagacactataacaggttcaacgac

SEQ ID NO: 308755 - DNA, 30 bp, Artificial Sequence
  Synthetic oligonucleotide
ggatatatgttgaattctctcgataacgac

SEQ ID NO: 308756 - DNA, 30 bp, Artificial Sequence
  Synthetic oligonucleotide
taggggtccactcaagattttattaacgac

SEQ ID NO: 308757 - DNA, 30 bp, Artificial Sequence
  Synthetic oligonucleotide
gggccatatatgcacacgctgaaacacgac

SEQ ID NO: 308758 - DNA, 30 bp, Artificial Sequence
  Synthetic oligonucleotide
cactgggtacaaccaaggtgttcgcacgac

SEQ ID NO: 308759 - DNA, 30 bp, Artificial Sequence
  Synthetic oligonucleotide
ctggcaacagtctttgtttggcatcacgac

SEQ ID NO: 308760 - DNA, 30 bp, Artificial Sequence
  Synthetic oligonucleotide
caatttgtcaggcaaaatttagctcacgac

SEQ ID NO: 308761 - DNA, 30 bp, Artificial Sequence
  Synthetic oligonucleotide
tctgtgagtgcgccatcgtctcgtcacgac

SEQ ID NO: 308762 - DNA, 30 bp, Artificial Sequence
  Synthetic oligonucleotide
gtaatatattatttctttggtcgtcacgac

SEQ ID NO: 308763 - DNA, 30 bp, Artificial Sequence
  Synthetic oligonucleotide
cgtgcatttctgagtcttcgagttcacgac

SEQ ID NO: 308764 - DNA, 30 bp, Artificial Sequence
  Synthetic oligonucleotide
gaaacatgtcgagggggtttctaagacgac

SEQ ID NO: 308765 - DNA, 30 bp, Artificial Sequence
  Synthetic oligonucleotide
tgctccatcgcgtctgaccaaacagacgac

SEQ ID NO: 308766 - DNA, 30 bp, Artificial Sequence
  Synthetic oligonucleotide
ttagaaaatagttaaccatctgcggacgac

SEQ ID NO: 308767 - DNA, 30 bp, Artificial Sequence
  Synthetic oligonucleotide
aatagaccaaaagttcaactattggacgac

SEQ ID NO: 308768 - DNA, 30 bp, Artificial Sequence
  Synthetic oligonucleotide
gcaatgacgcgaccgaactactatgacgac

SEQ ID NO: 308769 - DNA, 30 bp, Artificial Sequence
  Synthetic oligonucleotide
acggtgtgccctctgtaatagattgacgac

SEQ ID NO: 308770 - DNA, 30 bp, Artificial Sequence
  Synthetic oligonucleotide
gaatggtccacccccggtcaggcgtacgac

SEQ ID NO: 308771 - DNA, 30 bp, Artificial Sequence
  Synthetic oligonucleotide
tgacggggtaggggactcgcgcggtacgac

SEQ ID NO: 308772 - DNA, 30 bp, Artificial Sequence
  Synthetic oligonucleotide
atactacaaggggacagcgtaaattacgac

SEQ ID NO: 308773 - DNA, 30 bp, Artificial Sequence
  Synthetic oligonucleotide
atagagattgaacctggtttaacttacgac

SEQ ID NO: 308774 - DNA, 30 bp, Artificial Sequence
  Synthetic oligonucleotide
tgcggaccttctgctggccagctttacgac

SEQ ID NO: 308775 - DNA, 30 bp, Artificial Sequence
  Synthetic oligonucleotide
aatttcagagtggctgactaagcgaccgac

SEQ ID NO: 308776 - DNA, 30 bp, Artificial Sequence
  Synthetic oligonucleotide
tttctcttacgagaatgtctgaggaccgac

SEQ ID NO: 308777 - DNA, 30 bp, Artificial Sequence
  Synthetic oligonucleotide
cgtacaaccataccgaaatgacggaccgac

SEQ ID NO: 308778 - DNA, 30 bp, Artificial Sequence
  Synthetic oligonucleotide
gccaaaaactatgtatatgagtctaccgac

SEQ ID NO: 308779 - DNA, 30 bp, Artificial Sequence
  Synthetic oligonucleotide
cgcaccggaaaggacataatagttaccgac

SEQ ID NO: 308780 - DNA, 30 bp, Artificial Sequence
  Synthetic oligonucleotide
tactcccctgctgcctgatgttaagccgac

SEQ ID NO: 308781 - DNA, 30 bp, Artificial Sequence
  Synthetic oligonucleotide
ttgcgctcatcactgtagtggaaatccgac

SEQ ID NO: 308782 - DNA, 30 bp, Artificial Sequence
  Synthetic oligonucleotide
tcgttgaggcgagtgactgttcaatccgac

SEQ ID NO: 308783 - DNA, 30 bp, Artificial Sequence
  Synthetic oligonucleotide
gcaatctatattagctccaaataatccgac

SEQ ID NO: 308784 - DNA, 30 bp, Artificial Sequence
  Synthetic oligonucleotide
tgtgcggggggacagcaaggacgatccgac

SEQ ID NO: 308785 - DNA, 30 bp, Artificial Sequence
  Synthetic oligonucleotide
ggggaggttatccgaacggcattatccgac

SEQ ID NO: 308786 - DNA, 30 bp, Artificial Sequence
  Synthetic oligonucleotide
cctagatagttacaagttataaactccgac

SEQ ID NO: 308787 - DNA, 30 bp, Artificial Sequence
  Synthetic oligonucleotide
agtccctgatgtcaagttacgaactccgac

SEQ ID NO: 308788 - DNA, 30 bp, Artificial Sequence
  Synthetic oligonucleotide
gcagaacgacgccaattggctacctccgac

SEQ ID NO: 308789 - DNA, 30 bp, Artificial Sequence
  Synthetic oligonucleotide
tcaaacatggaacgtgctttaaggtccgac

SEQ ID NO: 308790 - DNA, 30 bp, Artificial Sequence
  Synthetic oligonucleotide
tgggtgagccgcaataggccgtggtccgac

SEQ ID NO: 308791 - DNA, 30 bp, Artificial Sequence
  Synthetic oligonucleotide
ctatctaaacacgttttagactgaagcgac

SEQ ID NO: 308792 - DNA, 30 bp, Artificial Sequence
  Synthetic oligonucleotide
cgtcagttcggcgcgaacgttaagagcgac

SEQ ID NO: 308793 - DNA, 30 bp, Artificial Sequence
  Synthetic oligonucleotide
tggtcatagtgattgtcctcttggagcgac

SEQ ID NO: 308794 - DNA, 30 bp, Artificial Sequence
  Synthetic oligonucleotide
catgacccgatactttgccacaatcgcgac

SEQ ID NO: 308795 - DNA, 30 bp, Artificial Sequence
  Synthetic oligonucleotide
actaataccgttgcccccagacctcgcgac

SEQ ID NO: 308796 - DNA, 30 bp, Artificial Sequence
  Synthetic oligonucleotide
gtcggagcgccgtgtgagactcctcgcgac

SEQ ID NO: 308797 - DNA, 30 bp, Artificial Sequence
  Synthetic oligonucleotide
cgcctgtgcacttgcatgctcggtcgcgac

SEQ ID NO: 308798 - DNA, 30 bp, Artificial Sequence
  Synthetic oligonucleotide
tcccgcggcaagaggtcgtgctggggcgac

SEQ ID NO: 308799 - DNA, 30 bp, Artificial Sequence
  Synthetic oligonucleotide
attacggggggaacacaggcctgtggcgac

SEQ ID NO: 308800 - DNA, 30 bp, Artificial Sequence
  Synthetic oligonucleotide
agttaagagatataggtactggtgtgcgac

SEQ ID NO: 308801 - DNA, 29 bp, Artificial Sequence
  Synthetic oligonucleotide
ctattagtgcgcctacatcccggatcgac

SEQ ID NO: 308802 - DNA, 30 bp, Artificial Sequence
  Synthetic oligonucleotide
gcaaggttggtagcaggattccgactcgac

SEQ ID NO: 308803 - DNA, 30 bp, Artificial Sequence
  Synthetic oligonucleotide
tccgttaatgagttattacaggtactcgac

SEQ ID NO: 308804 - DNA, 30 bp, Artificial Sequence
  Synthetic oligonucleotide
ctgagcgggttatgacagttacgcctcgac

SEQ ID NO: 308805 - DNA, 30 bp, Artificial Sequence
  Synthetic oligonucleotide
aacctatggcccaacacctggtggctcgac

SEQ ID NO: 308806 - DNA, 31 bp, Artificial Sequence
  Synthetic oligonucleotide
ttcgctacaccgccccttggcctgtctcgac

SEQ ID NO: 308807 - DNA, 30 bp, Artificial Sequence
  Synthetic oligonucleotide
gcggactatgtttatataaggacagtcgac

SEQ ID NO: 308808 - DNA, 30 bp, Artificial Sequence
  Synthetic oligonucleotide
gataggtgactcacaatttgtagagtcgac

SEQ ID NO: 308809 - DNA, 30 bp, Artificial Sequence
  Synthetic oligonucleotide
tcactctccacagatctctcaatggtcgac

SEQ ID NO: 308810 - DNA, 30 bp, Artificial Sequence
  Synthetic oligonucleotide
ttagcggagaacgtgaggtctgtggtcgac

SEQ ID NO: 308811 - DNA, 30 bp, Artificial Sequence
  Synthetic oligonucleotide
tgacattcgtgacagggtcggtatgtcgac

SEQ ID NO: 308812 - DNA, 30 bp, Artificial Sequence
  Synthetic oligonucleotide
aagttacggtcatgcttgactcaattcgac

SEQ ID NO: 308813 - DNA, 30 bp, Artificial Sequence
  Synthetic oligonucleotide
ggtgagtctctgggggggcacggtttcgac

SEQ ID NO: 308814 - DNA, 30 bp, Artificial Sequence
  Synthetic oligonucleotide
ctcacaggacaatctgttcctcttttcgac

SEQ ID NO: 308815 - DNA, 30 bp, Artificial Sequence
  Synthetic oligonucleotide
cggctgaaagttacgcacagacaaaaggac

SEQ ID NO: 308816 - DNA, 30 bp, Artificial Sequence
  Synthetic oligonucleotide
tcgggatactccctccgtatcacaaaggac

SEQ ID NO: 308817 - DNA, 30 bp, Artificial Sequence
  Synthetic oligonucleotide
gggcgggtggtttagtcaaatccaaaggac

SEQ ID NO: 308818 - DNA, 30 bp, Artificial Sequence
  Synthetic oligonucleotide
tatagtactgaacgggtttgcgcaaaggac

SEQ ID NO: 308819 - DNA, 30 bp, Artificial Sequence
  Synthetic oligonucleotide
ggtgcataccaatttgtcagctcaaaggac

SEQ ID NO: 308820 - DNA, 30 bp, Artificial Sequence
  Synthetic oligonucleotide
atttttaccaacgcacaggatcgcaaggac

SEQ ID NO: 308821 - DNA, 29 bp, Artificial Sequence
  Synthetic oligonucleotide
caacacccctcacagcatgcatcaaggac

SEQ ID NO: 308822 - DNA, 30 bp, Artificial Sequence
  Synthetic oligonucleotide
cggtaggtcacggatcttggatataaggac

SEQ ID NO: 308823 - DNA, 30 bp, Artificial Sequence
  Synthetic oligonucleotide
acattcactgttgccaacctggctaaggac

SEQ ID NO: 308824 - DNA, 30 bp, Artificial Sequence
  Synthetic oligonucleotide
tacaaggccgaacgcctagaagtacaggac

SEQ ID NO: 308825 - DNA, 30 bp, Artificial Sequence
  Synthetic oligonucleotide
ctgagggtttgaaatcaagctttacaggac

SEQ ID NO: 308826 - DNA, 30 bp, Artificial Sequence
  Synthetic oligonucleotide
tgcacatacaagaattctggtaggcaggac

SEQ ID NO: 308827 - DNA, 30 bp, Artificial Sequence
  Synthetic oligonucleotide
gcgcagctgcggcgcccagttaggcaggac

SEQ ID NO: 308828 - DNA, 30 bp, Artificial Sequence
  Synthetic oligonucleotide
gccgggaccagggcgaacaacgggcaggac

SEQ ID NO: 308829 - DNA, 30 bp, Artificial Sequence
  Synthetic oligonucleotide
tttcgcggcgggtgagcatttgatcaggac

SEQ ID NO: 308830 - DNA, 30 bp, Artificial Sequence
  Synthetic oligonucleotide
tggaaatcacctagttccgaatgtcaggac

SEQ ID NO: 308831 - DNA, 30 bp, Artificial Sequence
  Synthetic oligonucleotide
ttcgcacattaaagcgtagttaaagaggac

SEQ ID NO: 308832 - DNA, 30 bp, Artificial Sequence
  Synthetic oligonucleotide
taatgtctcctacgagaaccgccagaggac

SEQ ID NO: 308833 - DNA, 30 bp, Artificial Sequence
  Synthetic oligonucleotide
ggtcagtgaaacccgggtgattgagaggac

SEQ ID NO: 308834 - DNA, 30 bp, Artificial Sequence
  Synthetic oligonucleotide
attgggtattgtcagagtaccttagaggac

SEQ ID NO: 308835 - DNA, 30 bp, Artificial Sequence
  Synthetic oligonucleotide
ggggtatgctacgtggatttcctggaggac

SEQ ID NO: 308836 - DNA, 30 bp, Artificial Sequence
  Synthetic oligonucleotide
gtcatagtatgataataagcgtctgaggac

SEQ ID NO: 308837 - DNA, 30 bp, Artificial Sequence
  Synthetic oligonucleotide
aaatacccgggaacatggtgaattgaggac

SEQ ID NO: 308838 - DNA, 30 bp, Artificial Sequence
  Synthetic oligonucleotide
agatagacatttcacatgatagcataggac

SEQ ID NO: 308839 - DNA, 30 bp, Artificial Sequence
  Synthetic oligonucleotide
tgacccgtacgctggtctgaggggtaggac

SEQ ID NO: 308840 - DNA, 30 bp, Artificial Sequence
  Synthetic oligonucleotide
ttggcggtcatggtgcaccgcagttaggac

SEQ ID NO: 308841 - DNA, 30 bp, Artificial Sequence
  Synthetic oligonucleotide
atgggaatccctaatctggctgtttaggac

SEQ ID NO: 308842 - DNA, 30 bp, Artificial Sequence
  Synthetic oligonucleotide
cattagttgttcaaaccggaaccgacggac

SEQ ID NO: 308843 - DNA, 30 bp, Artificial Sequence
  Synthetic oligonucleotide
tcgtggtcattattacattagaggacggac

SEQ ID NO: 308844 - DNA, 30 bp, Artificial Sequence
  Synthetic oligonucleotide
ggttcaaaaaatgaagggggactgacggac

SEQ ID NO: 308845 - DNA, 30 bp, Artificial Sequence
  Synthetic oligonucleotide
acgcgttatcaccgcacagtgtatacggac

SEQ ID NO: 308846 - DNA, 30 bp, Artificial Sequence
  Synthetic oligonucleotide
taagtaatgggcgattgtagaggtacggac

SEQ ID NO: 308847 - DNA, 30 bp, Artificial Sequence
  Synthetic oligonucleotide
caagtgggccggcacggtagcggtacggac

SEQ ID NO: 308848 - DNA, 30 bp, Artificial Sequence
  Synthetic oligonucleotide
ccaacgtatgacgtggcccagtgtacggac

SEQ ID NO: 308849 - DNA, 30 bp, Artificial Sequence
  Synthetic oligonucleotide
gtcactggagggcccggccaaattacggac

SEQ ID NO: 308850 - DNA, 30 bp, Artificial Sequence
  Synthetic oligonucleotide
aacggccttgatgcagatctaagaccggac

SEQ ID NO: 308851 - DNA, 30 bp, Artificial Sequence
  Synthetic oligonucleotide
ctagaggcgttcgcccgcagtgagccggac

SEQ ID NO: 308852 - DNA, 30 bp, Artificial Sequence
  Synthetic oligonucleotide
gtatccacgctcgtattcgtcaggccggac

SEQ ID NO: 308853 - DNA, 30 bp, Artificial Sequence
  Synthetic oligonucleotide
ccacctccgaatggatgttgtatgccggac

SEQ ID NO: 308854 - DNA, 30 bp, Artificial Sequence
  Synthetic oligonucleotide
ggggaagatcgagcgttcgtccgtccggac

SEQ ID NO: 308855 - DNA, 30 bp, Artificial Sequence
  Synthetic oligonucleotide
gacagtacttactcgtcttcataagcggac

SEQ ID NO: 308856 - DNA, 30 bp, Artificial Sequence
  Synthetic oligonucleotide
gcggactgccaagccgacagtaacgcggac

SEQ ID NO: 308857 - DNA, 31 bp, Artificial Sequence
  Synthetic oligonucleotide
aatgcgtagtctatggcgtagacccgcggac

SEQ ID NO: 308858 - DNA, 30 bp, Artificial Sequence
  Synthetic oligonucleotide
atgttgtcgtagactactctgcaggcggac

SEQ ID NO: 308859 - DNA, 30 bp, Artificial Sequence
  Synthetic oligonucleotide
gccggggattgctattttgtaacggcggac

SEQ ID NO: 308860 - DNA, 30 bp, Artificial Sequence
  Synthetic oligonucleotide
cgcatattacaagctgaagtgccctcggac

SEQ ID NO: 308861 - DNA, 30 bp, Artificial Sequence
  Synthetic oligonucleotide
tcatgaacgtgagagtcacatctttcggac

SEQ ID NO: 308862 - DNA, 30 bp, Artificial Sequence
  Synthetic oligonucleotide
agaccatttcgttttgggtattaaagggac

SEQ ID NO: 308863 - DNA, 30 bp, Artificial Sequence
  Synthetic oligonucleotide
agacagtagtatcggggtttacacagggac

SEQ ID NO: 308864 - DNA, 30 bp, Artificial Sequence
  Synthetic oligonucleotide
cggaatgaactggggggggtagccagggac

SEQ ID NO: 308865 - DNA, 30 bp, Artificial Sequence
  Synthetic oligonucleotide
gatgaagcggcggatgggcttgggagggac

SEQ ID NO: 308866 - DNA, 30 bp, Artificial Sequence
  Synthetic oligonucleotide
tacatatcagccatagactttgatagggac

SEQ ID NO: 308867 - DNA, 30 bp, Artificial Sequence
  Synthetic oligonucleotide
atggtctgaccttataaggtagttagggac

SEQ ID NO: 308868 - DNA, 30 bp, Artificial Sequence
  Synthetic oligonucleotide
cctgatgtgggggagggggtgcaacgggac

SEQ ID NO: 308869 - DNA, 30 bp, Artificial Sequence
  Synthetic oligonucleotide
ttcattacactaaaaagacgggaacgggac

SEQ ID NO: 308870 - DNA, 31 bp, Artificial Sequence
  Synthetic oligonucleotide
tcttacaaggatcaaatcctggttacgggac

SEQ ID NO: 308871 - DNA, 30 bp, Artificial Sequence
  Synthetic oligonucleotide
caccgcgcacacggcagaggtcagcgggac

SEQ ID NO: 308872 - DNA, 30 bp, Artificial Sequence
  Synthetic oligonucleotide
tacaggtctcggccgctagagtagcgggac

SEQ ID NO: 308873 - DNA, 30 bp, Artificial Sequence
  Synthetic oligonucleotide
aaatggatggcatctctaagtgtgcgggac

SEQ ID NO: 308874 - DNA, 30 bp, Artificial Sequence
  Synthetic oligonucleotide
acatcgcgcgctacagaatatgatcgggac

SEQ ID NO: 308875 - DNA, 30 bp, Artificial Sequence
  Synthetic oligonucleotide
ccgcctcgttaatggacagtatttcgggac

SEQ ID NO: 308876 - DNA, 30 bp, Artificial Sequence
  Synthetic oligonucleotide
ttttgcgcgacatataagacatcaggggac

SEQ ID NO: 308877 - DNA, 30 bp, Artificial Sequence
  Synthetic oligonucleotide
cggttcgtagcaggtttgctacacggggac

SEQ ID NO: 308878 - DNA, 30 bp, Artificial Sequence
  Synthetic oligonucleotide
agacgctgttgaacgcatgagcccggggac

SEQ ID NO: 308879 - DNA, 30 bp, Artificial Sequence
  Synthetic oligonucleotide
catatggctataaccgactggacgggggac

SEQ ID NO: 308880 - DNA, 30 bp, Artificial Sequence
  Synthetic oligonucleotide
atagatgacttatagaggcgtaggggggac

SEQ ID NO: 308881 - DNA, 30 bp, Artificial Sequence
  Synthetic oligonucleotide
agggcttgaggagccgactacctgggggac

SEQ ID NO: 308882 - DNA, 30 bp, Artificial Sequence
  Synthetic oligonucleotide
acaacttaattgcatacggaagtgggggac

SEQ ID NO: 308883 - DNA, 30 bp, Artificial Sequence
  Synthetic oligonucleotide
gggattaatctttgggacgcgaatggggac

SEQ ID NO: 308884 - DNA, 30 bp, Artificial Sequence
  Synthetic oligonucleotide
caaccttgaaagtagtccagtaatggggac

SEQ ID NO: 308885 - DNA, 30 bp, Artificial Sequence
  Synthetic oligonucleotide
ccacaggtctaatgacgttggtgtggggac

SEQ ID NO: 308886 - DNA, 30 bp, Artificial Sequence
  Synthetic oligonucleotide
gtgagctacttatattgacgccttggggac

SEQ ID NO: 308887 - DNA, 30 bp, Artificial Sequence
  Synthetic oligonucleotide
aaaaagatactcaggggaagaaaaatggac

SEQ ID NO: 308888 - DNA, 30 bp, Artificial Sequence
  Synthetic oligonucleotide
aaaactaataagacaatttcgaaaatggac

SEQ ID NO: 308889 - DNA, 30 bp, Artificial Sequence
  Synthetic oligonucleotide
cgggtctcataacgccctaggacaatggac

SEQ ID NO: 308890 - DNA, 30 bp, Artificial Sequence
  Synthetic oligonucleotide
atgtccaacccacaattaatgcacatggac

SEQ ID NO: 308891 - DNA, 30 bp, Artificial Sequence
  Synthetic oligonucleotide
tccgttagtaaacgtactgaggacatggac

SEQ ID NO: 308892 - DNA, 30 bp, Artificial Sequence
  Synthetic oligonucleotide
aacccctgagtagagagtgggacgatggac

SEQ ID NO: 308893 - DNA, 30 bp, Artificial Sequence
  Synthetic oligonucleotide
gcaaaccccctacgaaggttaggtatggac

SEQ ID NO: 308894 - DNA, 30 bp, Artificial Sequence
  Synthetic oligonucleotide
ccgttgctggtagctgacagcatactggac

SEQ ID NO: 308895 - DNA, 30 bp, Artificial Sequence
  Synthetic oligonucleotide
tgacaatcatattggcccctgtctctggac

SEQ ID NO: 308896 - DNA, 30 bp, Artificial Sequence
  Synthetic oligonucleotide
ggggggaatacgttgttaccgaaagtggac

SEQ ID NO: 308897 - DNA, 30 bp, Artificial Sequence
  Synthetic oligonucleotide
atttagctgagtttagcattacaagtggac

SEQ ID NO: 308898 - DNA, 30 bp, Artificial Sequence
  Synthetic oligonucleotide
tagtcatgtatctccggagggctagtggac

SEQ ID NO: 308899 - DNA, 30 bp, Artificial Sequence
  Synthetic oligonucleotide
gtattggatcacaatttaacctgcgtggac

SEQ ID NO: 308900 - DNA, 30 bp, Artificial Sequence
  Synthetic oligonucleotide
gattacaacggtagggagacatgggtggac

SEQ ID NO: 308901 - DNA, 30 bp, Artificial Sequence
  Synthetic oligonucleotide
tacaataaaagtcgtttgcaacctgtggac

SEQ ID NO: 308902 - DNA, 30 bp, Artificial Sequence
  Synthetic oligonucleotide
agtcactacgtgctgggttcgtttgtggac

SEQ ID NO: 308903 - DNA, 30 bp, Artificial Sequence
  Synthetic oligonucleotide
tggtagcaacgtagtctcgcttacttggac

SEQ ID NO: 308904 - DNA, 30 bp, Artificial Sequence
  Synthetic oligonucleotide
catgatttagtgttgctttccgccttggac

SEQ ID NO: 308905 - DNA, 30 bp, Artificial Sequence
  Synthetic oligonucleotide
tccgatgatatgataagtctacagttggac

SEQ ID NO: 308906 - DNA, 30 bp, Artificial Sequence
  Synthetic oligonucleotide
acgacgagactgagcttaatgtatttggac

SEQ ID NO: 308907 - DNA, 30 bp, Artificial Sequence
  Synthetic oligonucleotide
cggtcgttcctgaaggcattgaaaaatgac

SEQ ID NO: 308908 - DNA, 30 bp, Artificial Sequence
  Synthetic oligonucleotide
agtcgatcgccatgtcaacctcaaaatgac

SEQ ID NO: 308909 - DNA, 30 bp, Artificial Sequence
  Synthetic oligonucleotide
gggtgaggcgagccggttggaccaaatgac

SEQ ID NO: 308910 - DNA, 30 bp, Artificial Sequence
  Synthetic oligonucleotide
cgtttgtgatgtcaatcattgttaaatgac

SEQ ID NO: 308911 - DNA, 30 bp, Artificial Sequence
  Synthetic oligonucleotide
agtaatgatacgtaccccacggccaatgac

SEQ ID NO: 308912 - DNA, 30 bp, Artificial Sequence
  Synthetic oligonucleotide
acttcggtctcaggttataatgcgaatgac

SEQ ID NO: 308913 - DNA, 30 bp, Artificial Sequence
  Synthetic oligonucleotide
cgggctaggcaccgatcgcactgtaatgac

SEQ ID NO: 308914 - DNA, 30 bp, Artificial Sequence
  Synthetic oligonucleotide
gctgtcggcgatgaccgtttgcttaatgac

SEQ ID NO: 308915 - DNA, 30 bp, Artificial Sequence
  Synthetic oligonucleotide
atcggggcgcttgggcgcgctggacatgac

SEQ ID NO: 308916 - DNA, 30 bp, Artificial Sequence
  Synthetic oligonucleotide
tggtatgccgacaagtccgctctccatgac

SEQ ID NO: 308917 - DNA, 30 bp, Artificial Sequence
  Synthetic oligonucleotide
agaaagtaaatagttatggtcaggcatgac

SEQ ID NO: 308918 - DNA, 30 bp, Artificial Sequence
  Synthetic oligonucleotide
ctcaccccacgtagatacatagatcatgac

SEQ ID NO: 308919 - DNA, 30 bp, Artificial Sequence
  Synthetic oligonucleotide
tattagatgggctaccacgaaggagatgac

SEQ ID NO: 308920 - DNA, 30 bp, Artificial Sequence
  Synthetic oligonucleotide
agtctacatcactcaggacaggtcgatgac

SEQ ID NO: 308921 - DNA, 30 bp, Artificial Sequence
  Synthetic oligonucleotide
ataggcgatgcgtgtaccgtcccggatgac

SEQ ID NO: 308922 - DNA, 30 bp, Artificial Sequence
  Synthetic oligonucleotide
tactgttaaaagaacttctaggctgatgac

SEQ ID NO: 308923 - DNA, 30 bp, Artificial Sequence
  Synthetic oligonucleotide
cttggaggtatttccgaaccgaaatatgac

SEQ ID NO: 308924 - DNA, 30 bp, Artificial Sequence
  Synthetic oligonucleotide
caatttaccacgcaagacgattaatatgac

SEQ ID NO: 308925 - DNA, 30 bp, Artificial Sequence
  Synthetic oligonucleotide
tgtatcaaaagtcataaatagatatatgac

SEQ ID NO: 308926 - DNA, 30 bp, Artificial Sequence
  Synthetic oligonucleotide
cgctccgggggactcgagtggctatatgac

SEQ ID NO: 308927 - DNA, 30 bp, Artificial Sequence
  Synthetic oligonucleotide
ggagctcgttcaataattacggactatgac

SEQ ID NO: 308928 - DNA, 30 bp, Artificial Sequence
  Synthetic oligonucleotide
gtttgttggtacggtcccgggcagtatgac

SEQ ID NO: 308929 - DNA, 30 bp, Artificial Sequence
  Synthetic oligonucleotide
agtagataggggcatgtacttctaactgac

SEQ ID NO: 308930 - DNA, 30 bp, Artificial Sequence
  Synthetic oligonucleotide
atgatatccatgttcccacacagcactgac

SEQ ID NO: 308931 - DNA, 30 bp, Artificial Sequence
  Synthetic oligonucleotide
acatagggtcaagagcttgcaaagactgac

SEQ ID NO: 308932 - DNA, 30 bp, Artificial Sequence
  Synthetic oligonucleotide
gcacctgcaaggaacttcatacggactgac

SEQ ID NO: 308933 - DNA, 30 bp, Artificial Sequence
  Synthetic oligonucleotide
tggcctgcagggtacactgatacacctgac

SEQ ID NO: 308934 - DNA, 30 bp, Artificial Sequence
  Synthetic oligonucleotide
agcaaaaggtcgcgtccatcaggacctgac

SEQ ID NO: 308935 - DNA, 30 bp, Artificial Sequence
  Synthetic oligonucleotide
attagtcgtattgcatacttgctacctgac

SEQ ID NO: 308936 - DNA, 30 bp, Artificial Sequence
  Synthetic oligonucleotide
ctataacgctataattgcgtttgccctgac

SEQ ID NO: 308937 - DNA, 30 bp, Artificial Sequence
  Synthetic oligonucleotide
gtaaggtactggacggtttaaaggcctgac

SEQ ID NO: 308938 - DNA, 30 bp, Artificial Sequence
  Synthetic oligonucleotide
tatcgttcctttgtatcaaacaaagctgac

SEQ ID NO: 308939 - DNA, 30 bp, Artificial Sequence
  Synthetic oligonucleotide
gaatctttcttaaaggggaacgaggctgac

SEQ ID NO: 308940 - DNA, 30 bp, Artificial Sequence
  Synthetic oligonucleotide
acagattgggccctgcgcgatgaggctgac

SEQ ID NO: 308941 - DNA, 30 bp, Artificial Sequence
  Synthetic oligonucleotide
gatcctgtgaggggtgtggcatgggctgac

SEQ ID NO: 308942 - DNA, 30 bp, Artificial Sequence
  Synthetic oligonucleotide
gataatcggccacatcctaataaatctgac

SEQ ID NO: 308943 - DNA, 30 bp, Artificial Sequence
  Synthetic oligonucleotide
gagagtgggggagtgtacagctactctgac

SEQ ID NO: 308944 - DNA, 30 bp, Artificial Sequence
  Synthetic oligonucleotide
cacctgagcccggccgcgatgggctctgac

SEQ ID NO: 308945 - DNA, 30 bp, Artificial Sequence
  Synthetic oligonucleotide
ccttgggaattcaaacctaaggggtctgac

SEQ ID NO: 308946 - DNA, 30 bp, Artificial Sequence
  Synthetic oligonucleotide
cgggtattatgcactgtagctctgtctgac

SEQ ID NO: 308947 - DNA, 30 bp, Artificial Sequence
  Synthetic oligonucleotide
atacgcaactaccggccaaaagaaagtgac

SEQ ID NO: 308948 - DNA, 30 bp, Artificial Sequence
  Synthetic oligonucleotide
tcaatgaaggtccacgtagcgcgaagtgac

SEQ ID NO: 308949 - DNA, 30 bp, Artificial Sequence
  Synthetic oligonucleotide
cgaaattttcatttcaatgcgattagtgac

SEQ ID NO: 308950 - DNA, 30 bp, Artificial Sequence
  Synthetic oligonucleotide
gtttcgtcatagggcatttgtgaacgtgac

SEQ ID NO: 308951 - DNA, 30 bp, Artificial Sequence
  Synthetic oligonucleotide
tcagtgagcattgtgatatccccccgtgac

SEQ ID NO: 308952 - DNA, 30 bp, Artificial Sequence
  Synthetic oligonucleotide
cgcgtccgggagagtccggagccgcgtgac

SEQ ID NO: 308953 - DNA, 30 bp, Artificial Sequence
  Synthetic oligonucleotide
atgttccaccgagttattagatcgcgtgac

SEQ ID NO: 308954 - DNA, 30 bp, Artificial Sequence
  Synthetic oligonucleotide
acgactctggccgtgcaggtcatgcgtgac

SEQ ID NO: 308955 - DNA, 30 bp, Artificial Sequence
  Synthetic oligonucleotide
ttagagttcgggcctgaatcaaacggtgac

SEQ ID NO: 308956 - DNA, 30 bp, Artificial Sequence
  Synthetic oligonucleotide
gaccttaaccaggggaggcctggcggtgac

SEQ ID NO: 308957 - DNA, 30 bp, Artificial Sequence
  Synthetic oligonucleotide
atttcagaatagggatgtgtattcggtgac

SEQ ID NO: 308958 - DNA, 30 bp, Artificial Sequence
  Synthetic oligonucleotide
cataaacctgtggacttcttggagggtgac

SEQ ID NO: 308959 - DNA, 31 bp, Artificial Sequence
  Synthetic oligonucleotide
gtacgcaaggtgttggatcaatccgggtgac

SEQ ID NO: 308960 - DNA, 30 bp, Artificial Sequence
  Synthetic oligonucleotide
aggtgtcatcaaaggttacaacctggtgac

SEQ ID NO: 308961 - DNA, 30 bp, Artificial Sequence
  Synthetic oligonucleotide
tcggagtgtgttaccaccacaagtggtgac

SEQ ID NO: 308962 - DNA, 30 bp, Artificial Sequence
  Synthetic oligonucleotide
tgaattcacgtcggtaagtactgtggtgac

SEQ ID NO: 308963 - DNA, 30 bp, Artificial Sequence
  Synthetic oligonucleotide
gacagagaagtcgactgtaaacttggtgac

SEQ ID NO: 308964 - DNA, 30 bp, Artificial Sequence
  Synthetic oligonucleotide
gttatataggtatttcagtgatttggtgac

SEQ ID NO: 308965 - DNA, 30 bp, Artificial Sequence
  Synthetic oligonucleotide
cgtccggcccctataactgctgtatgtgac

SEQ ID NO: 308966 - DNA, 30 bp, Artificial Sequence
  Synthetic oligonucleotide
cggctctttaagaggttcaccaattgtgac

SEQ ID NO: 308967 - DNA, 30 bp, Artificial Sequence
  Synthetic oligonucleotide
tggatttgcagtgcgaggaaggaaattgac

SEQ ID NO: 308968 - DNA, 30 bp, Artificial Sequence
  Synthetic oligonucleotide
tggcttgaatgcgttgatgtaagaattgac

SEQ ID NO: 308969 - DNA, 30 bp, Artificial Sequence
  Synthetic oligonucleotide
atcaatagtcgaaccgctccacgaattgac

SEQ ID NO: 308970 - DNA, 30 bp, Artificial Sequence
  Synthetic oligonucleotide
atagcttcgaggtagtacactataattgac

SEQ ID NO: 308971 - DNA, 30 bp, Artificial Sequence
  Synthetic oligonucleotide
gtggtgagggtcttagccggaagcattgac

SEQ ID NO: 308972 - DNA, 30 bp, Artificial Sequence
  Synthetic oligonucleotide
ctatttctttcacgaacatagagtattgac

SEQ ID NO: 308973 - DNA, 30 bp, Artificial Sequence
  Synthetic oligonucleotide
gcgtagggacgcatatgtcgtgttattgac

SEQ ID NO: 308974 - DNA, 30 bp, Artificial Sequence
  Synthetic oligonucleotide
cgtatacccggtccaggttcgatacttgac

SEQ ID NO: 308975 - DNA, 30 bp, Artificial Sequence
  Synthetic oligonucleotide
tacacaatgtgtcacgcgacattacttgac

SEQ ID NO: 308976 - DNA, 30 bp, Artificial Sequence
  Synthetic oligonucleotide
tttaggaaatatgaaaccacacaccttgac

SEQ ID NO: 308977 - DNA, 30 bp, Artificial Sequence
  Synthetic oligonucleotide
agcgcgtggaccggacctgaccaccttgac

SEQ ID NO: 308978 - DNA, 30 bp, Artificial Sequence
  Synthetic oligonucleotide
gaaaccaaatggggcgtaccgtagcttgac

SEQ ID NO: 308979 - DNA, 30 bp, Artificial Sequence
  Synthetic oligonucleotide
gccgctgagtacacttgcctcccgcttgac

SEQ ID NO: 308980 - DNA, 30 bp, Artificial Sequence
  Synthetic oligonucleotide
cccaggtctacaaagggacgctggcttgac

SEQ ID NO: 308981 - DNA, 30 bp, Artificial Sequence
  Synthetic oligonucleotide
atgctctggtctggtaattacatagttgac

SEQ ID NO: 308982 - DNA, 30 bp, Artificial Sequence
  Synthetic oligonucleotide
ttaaaaagattgtgttttctgatagttgac

SEQ ID NO: 308983 - DNA, 30 bp, Artificial Sequence
  Synthetic oligonucleotide
ttaatctctggtaatgagaaggtagttgac

SEQ ID NO: 308984 - DNA, 30 bp, Artificial Sequence
  Synthetic oligonucleotide
acgatcctatgatccttcgtatcggttgac

SEQ ID NO: 308985 - DNA, 30 bp, Artificial Sequence
  Synthetic oligonucleotide
atggacatccgggaaagcccgctggttgac

SEQ ID NO: 308986 - DNA, 30 bp, Artificial Sequence
  Synthetic oligonucleotide
gccatccgtgctgagataatcggtgttgac

SEQ ID NO: 308987 - DNA, 30 bp, Artificial Sequence
  Synthetic oligonucleotide
attgatacgtcgatgcgctgtcaatttgac

SEQ ID NO: 308988 - DNA, 30 bp, Artificial Sequence
  Synthetic oligonucleotide
tagtgttgactagatggccccgaatttgac

SEQ ID NO: 308989 - DNA, 30 bp, Artificial Sequence
  Synthetic oligonucleotide
agtacgcaccggtagctgagctcatttgac

SEQ ID NO: 308990 - DNA, 30 bp, Artificial Sequence
  Synthetic oligonucleotide
cagccaaggatcactagagctcgatttgac

SEQ ID NO: 308991 - DNA, 30 bp, Artificial Sequence
  Synthetic oligonucleotide
atagcccagtagactgggcgcctgtttgac

SEQ ID NO: 308992 - DNA, 30 bp, Artificial Sequence
  Synthetic oligonucleotide
gggtccccgttcgatctgaagtcttttgac

SEQ ID NO: 308993 - DNA, 30 bp, Artificial Sequence
  Synthetic oligonucleotide
tcacggcttaataagggtggtagttttgac

SEQ ID NO: 308994 - DNA, 30 bp, Artificial Sequence
  Synthetic oligonucleotide
ccagaactgtgaaactacgtacgttttgac

SEQ ID NO: 308995 - DNA, 30 bp, Artificial Sequence
  Synthetic oligonucleotide
gaaagtgtggtgcgtaactgtcgttttgac

SEQ ID NO: 308996 - DNA, 30 bp, Artificial Sequence
  Synthetic oligonucleotide
cgtggcaaggtacgggggtttccaaaatac

SEQ ID NO: 308997 - DNA, 30 bp, Artificial Sequence
  Synthetic oligonucleotide
ctccatcactcccagtccagcgcgaaatac

SEQ ID NO: 308998 - DNA, 30 bp, Artificial Sequence
  Synthetic oligonucleotide
atcatgcaaggattcgactccgggaaatac

SEQ ID NO: 308999 - DNA, 30 bp, Artificial Sequence
  Synthetic oligonucleotide
tgaaccacggacaacgccagaatgaaatac

SEQ ID NO: 309000 - DNA, 30 bp, Artificial Sequence
  Synthetic oligonucleotide
tgttggacagactcagttgtctataaatac

SEQ ID NO: 309001 - DNA, 30 bp, Artificial Sequence
  Synthetic oligonucleotide
cggttttggcaatccttttcacgtaaatac

SEQ ID NO: 309002 - DNA, 30 bp, Artificial Sequence
  Synthetic oligonucleotide
aagagtctatacgcggtccgacgtaaatac

SEQ ID NO: 309003 - DNA, 30 bp, Artificial Sequence
  Synthetic oligonucleotide
acccgcatccgtgaaacatataatcaatac

SEQ ID NO: 309004 - DNA, 30 bp, Artificial Sequence
  Synthetic oligonucleotide
gataatactgtcagagctgcccatcaatac

SEQ ID NO: 309005 - DNA, 30 bp, Artificial Sequence
  Synthetic oligonucleotide
caatgccgtgtatatacatatcatcaatac

SEQ ID NO: 309006 - DNA, 30 bp, Artificial Sequence
  Synthetic oligonucleotide
agtaattgcatttttggacgggctcaatac

SEQ ID NO: 309007 - DNA, 30 bp, Artificial Sequence
  Synthetic oligonucleotide
aggtaagcccacagcttctgtgttcaatac

SEQ ID NO: 309008 - DNA, 30 bp, Artificial Sequence
  Synthetic oligonucleotide
gtggtttgtgataggatagccgaagaatac

SEQ ID NO: 309009 - DNA, 30 bp, Artificial Sequence
  Synthetic oligonucleotide
gcttatccaggatagaactgggaagaatac

SEQ ID NO: 309010 - DNA, 30 bp, Artificial Sequence
  Synthetic oligonucleotide
gtgctacggacggcgggggacacagaatac

SEQ ID NO: 309011 - DNA, 30 bp, Artificial Sequence
  Synthetic oligonucleotide
tctgataaattttcgaattaatgagaatac

SEQ ID NO: 309012 - DNA, 30 bp, Artificial Sequence
  Synthetic oligonucleotide
taaacttacacgagacctcgttgagaatac

SEQ ID NO: 309013 - DNA, 30 bp, Artificial Sequence
  Synthetic oligonucleotide
caatgcttacatcaccttatcatcgaatac

SEQ ID NO: 309014 - DNA, 30 bp, Artificial Sequence
  Synthetic oligonucleotide
gttgtgtgtggtgagtgttacacggaatac

SEQ ID NO: 309015 - DNA, 30 bp, Artificial Sequence
  Synthetic oligonucleotide
ttcgtctcagccacacaacacttggaatac

SEQ ID NO: 309016 - DNA, 30 bp, Artificial Sequence
  Synthetic oligonucleotide
ctggcggtagatgtagtactacatgaatac

SEQ ID NO: 309017 - DNA, 30 bp, Artificial Sequence
  Synthetic oligonucleotide
gttgcgtcgaaatgtagggtggatgaatac

SEQ ID NO: 309018 - DNA, 30 bp, Artificial Sequence
  Synthetic oligonucleotide
aatagcactggcatcgaagcctttgaatac

SEQ ID NO: 309019 - DNA, 30 bp, Artificial Sequence
  Synthetic oligonucleotide
gggataaggcagggagtgatgtttgaatac

SEQ ID NO: 309020 - DNA, 30 bp, Artificial Sequence
  Synthetic oligonucleotide
tggctgggagtgttggtgtctaaataatac

SEQ ID NO: 309021 - DNA, 30 bp, Artificial Sequence
  Synthetic oligonucleotide
gtaagatgcggcgattggtgccgataatac

SEQ ID NO: 309022 - DNA, 30 bp, Artificial Sequence
  Synthetic oligonucleotide
ggaaatccggctgaggggaaaatataatac

SEQ ID NO: 309023 - DNA, 30 bp, Artificial Sequence
  Synthetic oligonucleotide
cacggcaatcttcacactcatctataatac

SEQ ID NO: 309024 - DNA, 30 bp, Artificial Sequence
  Synthetic oligonucleotide
tttatggacgcaacaatgtgaggctaatac

SEQ ID NO: 309025 - DNA, 30 bp, Artificial Sequence
  Synthetic oligonucleotide
cagtcattccgttcccgtaatcggtaatac

SEQ ID NO: 309026 - DNA, 30 bp, Artificial Sequence
  Synthetic oligonucleotide
tcgcagatcagacaccctaacgggtaatac

SEQ ID NO: 309027 - DNA, 30 bp, Artificial Sequence
  Synthetic oligonucleotide
agtgagtaaactgatcgaaggccttaatac

SEQ ID NO: 309028 - DNA, 30 bp, Artificial Sequence
  Synthetic oligonucleotide
ttactaacgtgtgcgagtgtgtcttaatac

SEQ ID NO: 309029 - DNA, 30 bp, Artificial Sequence
  Synthetic oligonucleotide
gcagatgctaacgttccacagtcaacatac

SEQ ID NO: 309030 - DNA, 30 bp, Artificial Sequence
  Synthetic oligonucleotide
ctccgtgtttagttggggaaacacacatac

SEQ ID NO: 309031 - DNA, 30 bp, Artificial Sequence
  Synthetic oligonucleotide
gaggtcgttagctagcgagatttcacatac

SEQ ID NO: 309032 - DNA, 30 bp, Artificial Sequence
  Synthetic oligonucleotide
acttatattggcatgaaacaaaggacatac

SEQ ID NO: 309033 - DNA, 30 bp, Artificial Sequence
  Synthetic oligonucleotide
gcgtgggaggatgcattatgtgggacatac

SEQ ID NO: 309034 - DNA, 30 bp, Artificial Sequence
  Synthetic oligonucleotide
agcaagcgaagcgcagacactctgacatac

SEQ ID NO: 309035 - DNA, 30 bp, Artificial Sequence
  Synthetic oligonucleotide
catcagtgcaggagaaggtatgctacatac

SEQ ID NO: 309036 - DNA, 30 bp, Artificial Sequence
  Synthetic oligonucleotide
gggggcagcataatgcctagttgtacatac

SEQ ID NO: 309037 - DNA, 30 bp, Artificial Sequence
  Synthetic oligonucleotide
agcagtatatgacctatagacaatccatac

SEQ ID NO: 309038 - DNA, 30 bp, Artificial Sequence
  Synthetic oligonucleotide
tcgggacaccgaggagcggcacatccatac

SEQ ID NO: 309039 - DNA, 30 bp, Artificial Sequence
  Synthetic oligonucleotide
tgctactgagattactattcgactccatac

SEQ ID NO: 309040 - DNA, 30 bp, Artificial Sequence
  Synthetic oligonucleotide
aatgcgatagacagttccgtgagtccatac

SEQ ID NO: 309041 - DNA, 30 bp, Artificial Sequence
  Synthetic oligonucleotide
tcgctatcatgatcccgctgacgagcatac

SEQ ID NO: 309042 - DNA, 30 bp, Artificial Sequence
  Synthetic oligonucleotide
gcattctcgtcaaatattaagaaggcatac

SEQ ID NO: 309043 - DNA, 30 bp, Artificial Sequence
  Synthetic oligonucleotide
ttgggggagtcttacgctccgggggcatac

SEQ ID NO: 309044 - DNA, 30 bp, Artificial Sequence
  Synthetic oligonucleotide
agctctacatcaacataacaacttgcatac

SEQ ID NO: 309045 - DNA, 30 bp, Artificial Sequence
  Synthetic oligonucleotide
cgcggtcacggtagtgattagagatcatac

SEQ ID NO: 309046 - DNA, 30 bp, Artificial Sequence
  Synthetic oligonucleotide
ttgatctaatgagcaacgatcacctcatac

SEQ ID NO: 309047 - DNA, 30 bp, Artificial Sequence
  Synthetic oligonucleotide
ggtaatttcctgcagggcttgctctcatac

SEQ ID NO: 309048 - DNA, 30 bp, Artificial Sequence
  Synthetic oligonucleotide
ctgagggacctttaatctggcacgtcatac

SEQ ID NO: 309049 - DNA, 30 bp, Artificial Sequence
  Synthetic oligonucleotide
ttctgctagtacaaacaagggatttcatac

SEQ ID NO: 309050 - DNA, 30 bp, Artificial Sequence
  Synthetic oligonucleotide
ttctcatgcatagataagcggacaagatac

SEQ ID NO: 309051 - DNA, 30 bp, Artificial Sequence
  Synthetic oligonucleotide
cgagaccatatattcgcgggtacaagatac

SEQ ID NO: 309052 - DNA, 30 bp, Artificial Sequence
  Synthetic oligonucleotide
acaacatttattggtggtaaatcaagatac

SEQ ID NO: 309053 - DNA, 30 bp, Artificial Sequence
  Synthetic oligonucleotide
gagaagcgagatgcaattggagtaagatac

SEQ ID NO: 309054 - DNA, 30 bp, Artificial Sequence
  Synthetic oligonucleotide
ctgaggccggaggttcttagtgtaagatac

SEQ ID NO: 309055 - DNA, 30 bp, Artificial Sequence
  Synthetic oligonucleotide
acgggtgtagtagtcactcaggacagatac

SEQ ID NO: 309056 - DNA, 30 bp, Artificial Sequence
  Synthetic oligonucleotide
cgaatatagtaaacatggaaacggagatac

SEQ ID NO: 309057 - DNA, 30 bp, Artificial Sequence
  Synthetic oligonucleotide
caggttgcatcagcatacctgctacgatac

SEQ ID NO: 309058 - DNA, 30 bp, Artificial Sequence
  Synthetic oligonucleotide
gtgatagagacgcaaactggtcgccgatac

SEQ ID NO: 309059 - DNA, 30 bp, Artificial Sequence
  Synthetic oligonucleotide
aatgttatcttagccaacagaaagcgatac

SEQ ID NO: 309060 - DNA, 30 bp, Artificial Sequence
  Synthetic oligonucleotide
agcataagggacatcggggagtttcgatac

SEQ ID NO: 309061 - DNA, 30 bp, Artificial Sequence
  Synthetic oligonucleotide
ttataaggaaacgcgacacagcgaggatac

SEQ ID NO: 309062 - DNA, 30 bp, Artificial Sequence
  Synthetic oligonucleotide
ggctagtggagaatcttggagccgggatac

SEQ ID NO: 309063 - DNA, 30 bp, Artificial Sequence
  Synthetic oligonucleotide
aggatacatattggtcgattttggggatac

SEQ ID NO: 309064 - DNA, 30 bp, Artificial Sequence
  Synthetic oligonucleotide
tatgtcgacgtattaaattttcgtggatac

SEQ ID NO: 309065 - DNA, 30 bp, Artificial Sequence
  Synthetic oligonucleotide
gtgagccgtaagctaggtcaccaatgatac

SEQ ID NO: 309066 - DNA, 30 bp, Artificial Sequence
  Synthetic oligonucleotide
caggtttaaaatatcctggaggtatgatac

SEQ ID NO: 309067 - DNA, 30 bp, Artificial Sequence
  Synthetic oligonucleotide
gctcgaacctagggttacttagagtgatac

SEQ ID NO: 309068 - DNA, 30 bp, Artificial Sequence
  Synthetic oligonucleotide
gcataatgcatgtgtagtcaggcaatatac

SEQ ID NO: 309069 - DNA, 27 bp, Artificial Sequence
  Synthetic oligonucleotide
gcaggaagcctgatgcgatgaatatac

SEQ ID NO: 309070 - DNA, 30 bp, Artificial Sequence
  Synthetic oligonucleotide
tgattaagcggaaaaacaacggacatatac

SEQ ID NO: 309071 - DNA, 30 bp, Artificial Sequence
  Synthetic oligonucleotide
actctgaaactgagggtgcatctcatatac

SEQ ID NO: 309072 - DNA, 30 bp, Artificial Sequence
  Synthetic oligonucleotide
gacttcgcgatgtactggtgcgtcatatac

SEQ ID NO: 309073 - DNA, 30 bp, Artificial Sequence
  Synthetic oligonucleotide
aggtacatccaacgcactgttgtcatatac

SEQ ID NO: 309074 - DNA, 30 bp, Artificial Sequence
  Synthetic oligonucleotide
tagagagtgcacgggagtgaagagatatac

SEQ ID NO: 309075 - DNA, 30 bp, Artificial Sequence
  Synthetic oligonucleotide
gcatagtgcaggtgttatagagagatatac

SEQ ID NO: 309076 - DNA, 30 bp, Artificial Sequence
  Synthetic oligonucleotide
ttatccaataggccgaaaatacggatatac

SEQ ID NO: 309077 - DNA, 30 bp, Artificial Sequence
  Synthetic oligonucleotide
cacctcgtgggttatataaatctactatac

SEQ ID NO: 309078 - DNA, 30 bp, Artificial Sequence
  Synthetic oligonucleotide
acaaggttaggggagaaaccatacctatac

SEQ ID NO: 309079 - DNA, 30 bp, Artificial Sequence
  Synthetic oligonucleotide
catgagtcactcaacgacgaccgcctatac

SEQ ID NO: 309080 - DNA, 29 bp, Artificial Sequence
  Synthetic oligonucleotide
ttagtaccacaatggatcttatcctatac

SEQ ID NO: 309081 - DNA, 30 bp, Artificial Sequence
  Synthetic oligonucleotide
cactttggacagtgctaacgtaagctatac

SEQ ID NO: 309082 - DNA, 30 bp, Artificial Sequence
  Synthetic oligonucleotide
gatcaaagttagcgcgctgactatctatac

SEQ ID NO: 309083 - DNA, 30 bp, Artificial Sequence
  Synthetic oligonucleotide
agtcgggaatgccactcaccccctctatac

SEQ ID NO: 309084 - DNA, 30 bp, Artificial Sequence
  Synthetic oligonucleotide
ggaaccctatctgggataagagctctatac

SEQ ID NO: 309085 - DNA, 30 bp, Artificial Sequence
  Synthetic oligonucleotide
cctcaacctaagtggataggatgtctatac

SEQ ID NO: 309086 - DNA, 30 bp, Artificial Sequence
  Synthetic oligonucleotide
gcaagaggtgattcaccaccagaagtatac

SEQ ID NO: 309087 - DNA, 30 bp, Artificial Sequence
  Synthetic oligonucleotide
gatgctcaattatagaggttcccagtatac

SEQ ID NO: 309088 - DNA, 30 bp, Artificial Sequence
  Synthetic oligonucleotide
cagaaatctgcttaacacccgggagtatac

SEQ ID NO: 309089 - DNA, 30 bp, Artificial Sequence
  Synthetic oligonucleotide
tacacgaatgataggtatccgtgagtatac

SEQ ID NO: 309090 - DNA, 30 bp, Artificial Sequence
  Synthetic oligonucleotide
atgcgaggaccgggcctgacattcgtatac

SEQ ID NO: 309091 - DNA, 30 bp, Artificial Sequence
  Synthetic oligonucleotide
ctgggcgataaatgcgggttgcaggtatac

SEQ ID NO: 309092 - DNA, 30 bp, Artificial Sequence
  Synthetic oligonucleotide
atgggcttctgggtcaagtttcatgtatac

SEQ ID NO: 309093 - DNA, 30 bp, Artificial Sequence
  Synthetic oligonucleotide
ggttctcagccttgcaagagcccattatac

SEQ ID NO: 309094 - DNA, 30 bp, Artificial Sequence
  Synthetic oligonucleotide
tgttggctcatcatatttcaggccttatac

SEQ ID NO: 309095 - DNA, 30 bp, Artificial Sequence
  Synthetic oligonucleotide
agcggcgggtcggatgtaggttagttatac

SEQ ID NO: 309096 - DNA, 30 bp, Artificial Sequence
  Synthetic oligonucleotide
ttcgcgccgccgaacttgcgaaggttatac

SEQ ID NO: 309097 - DNA, 30 bp, Artificial Sequence
  Synthetic oligonucleotide
gctatgctttgggcacatgtgcctttatac

SEQ ID NO: 309098 - DNA, 30 bp, Artificial Sequence
  Synthetic oligonucleotide
acacgggtaatccatatcacatgtttatac

SEQ ID NO: 309099 - DNA, 30 bp, Artificial Sequence
  Synthetic oligonucleotide
tactgtgtggtctagaaggaggaaaactac

SEQ ID NO: 309100 - DNA, 30 bp, Artificial Sequence
  Synthetic oligonucleotide
gcgggtggctatgatcccccaggaaactac

SEQ ID NO: 309101 - DNA, 30 bp, Artificial Sequence
  Synthetic oligonucleotide
attaaggggaaccttactccagggaactac

SEQ ID NO: 309102 - DNA, 30 bp, Artificial Sequence
  Synthetic oligonucleotide
tccaggcatcgatgggtttcggcacactac

SEQ ID NO: 309103 - DNA, 30 bp, Artificial Sequence
  Synthetic oligonucleotide
ggccaaataccgtgtgattcatcccactac

SEQ ID NO: 309104 - DNA, 30 bp, Artificial Sequence
  Synthetic oligonucleotide
atggtaagttcggcgcctgttagccactac

SEQ ID NO: 309105 - DNA, 30 bp, Artificial Sequence
  Synthetic oligonucleotide
aactgttaaattatggggggtctccactac

SEQ ID NO: 309106 - DNA, 30 bp, Artificial Sequence
  Synthetic oligonucleotide
gtggcgtgcgcggtgcttggcaggcactac

SEQ ID NO: 309107 - DNA, 30 bp, Artificial Sequence
  Synthetic oligonucleotide
ctgttcgcggggtgacacgtaacagactac

SEQ ID NO: 309108 - DNA, 30 bp, Artificial Sequence
  Synthetic oligonucleotide
catggctgaagaggcgctgcgggagactac

SEQ ID NO: 309109 - DNA, 30 bp, Artificial Sequence
  Synthetic oligonucleotide
aaaaggaatatgttgggaccaatagactac

SEQ ID NO: 309110 - DNA, 30 bp, Artificial Sequence
  Synthetic oligonucleotide
gcccacttgacaacttctccatgcgactac

SEQ ID NO: 309111 - DNA, 30 bp, Artificial Sequence
  Synthetic oligonucleotide
ggcgccgtctcttaatggcagaaggactac

SEQ ID NO: 309112 - DNA, 30 bp, Artificial Sequence
  Synthetic oligonucleotide
acatgctctgcgctatctgaaactgactac

SEQ ID NO: 309113 - DNA, 30 bp, Artificial Sequence
  Synthetic oligonucleotide
tgacgtagtataaagcgaaaatggtactac

SEQ ID NO: 309114 - DNA, 30 bp, Artificial Sequence
  Synthetic oligonucleotide
ctgtgtggggaaacaaggaggttttactac

SEQ ID NO: 309115 - DNA, 30 bp, Artificial Sequence
  Synthetic oligonucleotide
tcaagagtgttagcctactcctcaacctac

SEQ ID NO: 309116 - DNA, 30 bp, Artificial Sequence
  Synthetic oligonucleotide
aaagcgtgccgagagtaagtggtaacctac

SEQ ID NO: 309117 - DNA, 30 bp, Artificial Sequence
  Synthetic oligonucleotide
gccaatatgtgcgacgaaacggtcacctac

SEQ ID NO: 309118 - DNA, 30 bp, Artificial Sequence
  Synthetic oligonucleotide
cgccaacctgtttataagtgaaagacctac

SEQ ID NO: 309119 - DNA, 30 bp, Artificial Sequence
  Synthetic oligonucleotide
agggcgtcacattttaggaggataccctac

SEQ ID NO: 309120 - DNA, 30 bp, Artificial Sequence
  Synthetic oligonucleotide
atagctcttggtagcagaactatgccctac

SEQ ID NO: 309121 - DNA, 30 bp, Artificial Sequence
  Synthetic oligonucleotide
gcgagggggtgactatgctccgctccctac

SEQ ID NO: 309122 - DNA, 30 bp, Artificial Sequence
  Synthetic oligonucleotide
cgcgtattgcaatgcgcggaacgtccctac

SEQ ID NO: 309123 - DNA, 30 bp, Artificial Sequence
  Synthetic oligonucleotide
agctacagtggggtctaagtccaagcctac

SEQ ID NO: 309124 - DNA, 30 bp, Artificial Sequence
  Synthetic oligonucleotide
gatcataccaaattaaaggtgaacgcctac

SEQ ID NO: 309125 - DNA, 30 bp, Artificial Sequence
  Synthetic oligonucleotide
attgagtggtgctgttcggtgaacgcctac

SEQ ID NO: 309126 - DNA, 30 bp, Artificial Sequence
  Synthetic oligonucleotide
cttggcggcgtatattgggttcagtcctac

SEQ ID NO: 309127 - DNA, 30 bp, Artificial Sequence
  Synthetic oligonucleotide
actaaagcacttggaaaaggtaggtcctac

SEQ ID NO: 309128 - DNA, 30 bp, Artificial Sequence
  Synthetic oligonucleotide
ccgattgtgttttcctttgtgttttcctac

SEQ ID NO: 309129 - DNA, 30 bp, Artificial Sequence
  Synthetic oligonucleotide
atcattgacgtgtttagagaacaaagctac

SEQ ID NO: 309130 - DNA, 30 bp, Artificial Sequence
  Synthetic oligonucleotide
gactagctgtttaaacatttgtgcagctac

SEQ ID NO: 309131 - DNA, 30 bp, Artificial Sequence
  Synthetic oligonucleotide
tacaggtggcattctctgctaatcagctac

SEQ ID NO: 309132 - DNA, 30 bp, Artificial Sequence
  Synthetic oligonucleotide
gaacacaggctgttggaaacacggagctac

SEQ ID NO: 309133 - DNA, 30 bp, Artificial Sequence
  Synthetic oligonucleotide
tactatcaccgggatgtgcgcatgagctac

SEQ ID NO: 309134 - DNA, 30 bp, Artificial Sequence
  Synthetic oligonucleotide
gtctatagctgttagtacactcctagctac

SEQ ID NO: 309135 - DNA, 30 bp, Artificial Sequence
  Synthetic oligonucleotide
tggtatatgcggggatccggatgtagctac

SEQ ID NO: 309136 - DNA, 30 bp, Artificial Sequence
  Synthetic oligonucleotide
cagacactagggattgggttgcaacgctac

SEQ ID NO: 309137 - DNA, 30 bp, Artificial Sequence
  Synthetic oligonucleotide
aagcctcgccagggccaccttggacgctac

SEQ ID NO: 309138 - DNA, 30 bp, Artificial Sequence
  Synthetic oligonucleotide
aacggcgctgatagttcctgtgaccgctac

SEQ ID NO: 309139 - DNA, 30 bp, Artificial Sequence
  Synthetic oligonucleotide
gagcaatcgagcactgtggtgaagcgctac

SEQ ID NO: 309140 - DNA, 30 bp, Artificial Sequence
  Synthetic oligonucleotide
cacattggtcaggcactgtcggcgcgctac

SEQ ID NO: 309141 - DNA, 30 bp, Artificial Sequence
  Synthetic oligonucleotide
gaggcttagatttgtcccagagccggctac

SEQ ID NO: 309142 - DNA, 29 bp, Artificial Sequence
  Synthetic oligonucleotide
gcagcgtgactctctatcaatttggctac

SEQ ID NO: 309143 - DNA, 30 bp, Artificial Sequence
  Synthetic oligonucleotide
tgtaccgaactgctatatcgatggtgctac

SEQ ID NO: 309144 - DNA, 30 bp, Artificial Sequence
  Synthetic oligonucleotide
cgccaacaattatttacatgtatgtgctac

SEQ ID NO: 309145 - DNA, 30 bp, Artificial Sequence
  Synthetic oligonucleotide
aatttgggcctgttctgattaaattgctac

SEQ ID NO: 309146 - DNA, 30 bp, Artificial Sequence
  Synthetic oligonucleotide
tagcgaactaactcacattttggaatctac

SEQ ID NO: 309147 - DNA, 30 bp, Artificial Sequence
  Synthetic oligonucleotide
ccgcaggttcgtgtcgaatcttgaatctac

SEQ ID NO: 309148 - DNA, 29 bp, Artificial Sequence
  Synthetic oligonucleotide
cgccactgcggaggattctgggcatctac

SEQ ID NO: 309149 - DNA, 30 bp, Artificial Sequence
  Synthetic oligonucleotide
ggggtcagctgtcagagatggccgatctac

SEQ ID NO: 309150 - DNA, 30 bp, Artificial Sequence
  Synthetic oligonucleotide
ggtaggacggatgttcaggcatcgatctac

SEQ ID NO: 309151 - DNA, 30 bp, Artificial Sequence
  Synthetic oligonucleotide
tagctaagggcacgcggtacattgatctac

SEQ ID NO: 309152 - DNA, 30 bp, Artificial Sequence
  Synthetic oligonucleotide
ccacgtgaatcgttggtaaagattatctac

SEQ ID NO: 309153 - DNA, 30 bp, Artificial Sequence
  Synthetic oligonucleotide
ggagtcatcgacctagtttcttttatctac

SEQ ID NO: 309154 - DNA, 30 bp, Artificial Sequence
  Synthetic oligonucleotide
accattttcgccacaaccacaccactctac

SEQ ID NO: 309155 - DNA, 30 bp, Artificial Sequence
  Synthetic oligonucleotide
gggggatcagggtagtggctaccactctac

SEQ ID NO: 309156 - DNA, 30 bp, Artificial Sequence
  Synthetic oligonucleotide
ctgggaatagtatagtaccggctcctctac

SEQ ID NO: 309157 - DNA, 30 bp, Artificial Sequence
  Synthetic oligonucleotide
ctgcagaaaggaactagtatccacgtctac

SEQ ID NO: 309158 - DNA, 30 bp, Artificial Sequence
  Synthetic oligonucleotide
ggtcaagggtgctacatgtttgtcgtctac

SEQ ID NO: 309159 - DNA, 30 bp, Artificial Sequence
  Synthetic oligonucleotide
agctggaccttcaaaaaggagactgtctac

SEQ ID NO: 309160 - DNA, 30 bp, Artificial Sequence
  Synthetic oligonucleotide
aggttctgagctttggaatagggtgtctac

SEQ ID NO: 309161 - DNA, 30 bp, Artificial Sequence
  Synthetic oligonucleotide
acgaacactgcacgttacatttttgtctac

SEQ ID NO: 309162 - DNA, 31 bp, Artificial Sequence
  Synthetic oligonucleotide
agctactcaaacctactgtttacaattctac

SEQ ID NO: 309163 - DNA, 30 bp, Artificial Sequence
  Synthetic oligonucleotide
tccctgaccggagaataaaatgaattctac

SEQ ID NO: 309164 - DNA, 30 bp, Artificial Sequence
  Synthetic oligonucleotide
atacctgaagactagtttatctgattctac

SEQ ID NO: 309165 - DNA, 30 bp, Artificial Sequence
  Synthetic oligonucleotide
cggccgcttctcaagaaaccaacgttctac

SEQ ID NO: 309166 - DNA, 30 bp, Artificial Sequence
  Synthetic oligonucleotide
tccaataatgaaacagttaatagtttctac

SEQ ID NO: 309167 - DNA, 30 bp, Artificial Sequence
  Synthetic oligonucleotide
cagcgagcgaccttagaaatatcaaagtac

SEQ ID NO: 309168 - DNA, 30 bp, Artificial Sequence
  Synthetic oligonucleotide
tcgttctataattttggggtgacgaagtac

SEQ ID NO: 309169 - DNA, 30 bp, Artificial Sequence
  Synthetic oligonucleotide
ataaataacttatattgtagtccgaagtac

SEQ ID NO: 309170 - DNA, 30 bp, Artificial Sequence
  Synthetic oligonucleotide
ggtatgttgactacgaactcctggaagtac

SEQ ID NO: 309171 - DNA, 30 bp, Artificial Sequence
  Synthetic oligonucleotide
cacgccgaagtaattatggtcgtgaagtac

SEQ ID NO: 309172 - DNA, 30 bp, Artificial Sequence
  Synthetic oligonucleotide
acattagactctttgtaagggtttaagtac

SEQ ID NO: 309173 - DNA, 30 bp, Artificial Sequence
  Synthetic oligonucleotide
agccgaattgacctatagatttgacagtac

SEQ ID NO: 309174 - DNA, 30 bp, Artificial Sequence
  Synthetic oligonucleotide
tgccaattttaccatagctgtgtacagtac

SEQ ID NO: 309175 - DNA, 30 bp, Artificial Sequence
  Synthetic oligonucleotide
tgcattactgacgccaatagatcccagtac

SEQ ID NO: 309176 - DNA, 30 bp, Artificial Sequence
  Synthetic oligonucleotide
ccacggcggttatttacgcaaaggcagtac

SEQ ID NO: 309177 - DNA, 30 bp, Artificial Sequence
  Synthetic oligonucleotide
tattccacttggtagttcttgcatcagtac

SEQ ID NO: 309178 - DNA, 30 bp, Artificial Sequence
  Synthetic oligonucleotide
tgataacctcaagggttttgctatcagtac

SEQ ID NO: 309179 - DNA, 30 bp, Artificial Sequence
  Synthetic oligonucleotide
agcccgggttcggtgccttgcggagagtac

SEQ ID NO: 309180 - DNA, 30 bp, Artificial Sequence
  Synthetic oligonucleotide
gccataacgcgggcgtaggtttgcgagtac

SEQ ID NO: 309181 - DNA, 30 bp, Artificial Sequence
  Synthetic oligonucleotide
caccagccaatgtcatgcgtcacggagtac

SEQ ID NO: 309182 - DNA, 30 bp, Artificial Sequence
  Synthetic oligonucleotide
agtgccggaggatcagcgttgatggagtac

SEQ ID NO: 309183 - DNA, 30 bp, Artificial Sequence
  Synthetic oligonucleotide
gacttggaaccacatcaagctctggagtac

SEQ ID NO: 309184 - DNA, 30 bp, Artificial Sequence
  Synthetic oligonucleotide
gatgcaaacagtttagagcactaatagtac

SEQ ID NO: 309185 - DNA, 30 bp, Artificial Sequence
  Synthetic oligonucleotide
tagctaatcgaattgctgtaagcatagtac

SEQ ID NO: 309186 - DNA, 30 bp, Artificial Sequence
  Synthetic oligonucleotide
tttcttaagaggatagtttaaatatagtac

SEQ ID NO: 309187 - DNA, 30 bp, Artificial Sequence
  Synthetic oligonucleotide
attaataaatatgttatttcagagtagtac

SEQ ID NO: 309188 - DNA, 30 bp, Artificial Sequence
  Synthetic oligonucleotide
ttaaggacattttaagtgaccggttagtac

SEQ ID NO: 309189 - DNA, 30 bp, Artificial Sequence
  Synthetic oligonucleotide
agtttgaaatcgaatacggtagtaacgtac

SEQ ID NO: 309190 - DNA, 30 bp, Artificial Sequence
  Synthetic oligonucleotide
tataaactgtcagaggccaccaagacgtac

SEQ ID NO: 309191 - DNA, 30 bp, Artificial Sequence
  Synthetic oligonucleotide
ggtaaatagtgcaaggatcgtgatacgtac

SEQ ID NO: 309192 - DNA, 30 bp, Artificial Sequence
  Synthetic oligonucleotide
tccaaggcgtcgggggaacaggttacgtac

SEQ ID NO: 309193 - DNA, 30 bp, Artificial Sequence
  Synthetic oligonucleotide
cttgaccaccgtatgccggcggatccgtac

SEQ ID NO: 309194 - DNA, 31 bp, Artificial Sequence
  Synthetic oligonucleotide
atgcgtctcacttcttttgagtacagcgtac

SEQ ID NO: 309195 - DNA, 30 bp, Artificial Sequence
  Synthetic oligonucleotide
agctgcttctctagttaatactgagcgtac

SEQ ID NO: 309196 - DNA, 30 bp, Artificial Sequence
  Synthetic oligonucleotide
cttccccgagtaaagtgactcgacgcgtac

SEQ ID NO: 309197 - DNA, 30 bp, Artificial Sequence
  Synthetic oligonucleotide
agctaaaattgatctatctccacggcgtac

SEQ ID NO: 309198 - DNA, 30 bp, Artificial Sequence
  Synthetic oligonucleotide
atccagtaccacaagctaagaactgcgtac

SEQ ID NO: 309199 - DNA, 30 bp, Artificial Sequence
  Synthetic oligonucleotide
gtggtttgtggtgactaaggaattgcgtac

SEQ ID NO: 309200 - DNA, 30 bp, Artificial Sequence
  Synthetic oligonucleotide
cgtttgagtcttgagcaacggcgctcgtac

SEQ ID NO: 309201 - DNA, 30 bp, Artificial Sequence
  Synthetic oligonucleotide
cattcggaaaccgcccttgtaaagtcgtac

SEQ ID NO: 309202 - DNA, 30 bp, Artificial Sequence
  Synthetic oligonucleotide
aacattacctcacataaattcatttcgtac

SEQ ID NO: 309203 - DNA, 30 bp, Artificial Sequence
  Synthetic oligonucleotide
aagtgagtatcacaatgttcgttttcgtac

SEQ ID NO: 309204 - DNA, 30 bp, Artificial Sequence
  Synthetic oligonucleotide
gcgttaatttctctaaatatggcaaggtac

SEQ ID NO: 309205 - DNA, 30 bp, Artificial Sequence
  Synthetic oligonucleotide
tcgaaacgaacgccactccctgcaaggtac

SEQ ID NO: 309206 - DNA, 30 bp, Artificial Sequence
  Synthetic oligonucleotide
tgcttgtagagtgtattctcttgaaggtac

SEQ ID NO: 309207 - DNA, 30 bp, Artificial Sequence
  Synthetic oligonucleotide
ggcggcggaagagtaaccacaccgaggtac

SEQ ID NO: 309208 - DNA, 30 bp, Artificial Sequence
  Synthetic oligonucleotide
caccatacacgtcgtcaggctaataggtac

SEQ ID NO: 309209 - DNA, 30 bp, Artificial Sequence
  Synthetic oligonucleotide
agggccatgtgtttcaaatgtcataggtac

SEQ ID NO: 309210 - DNA, 30 bp, Artificial Sequence
  Synthetic oligonucleotide
tcctgagcagacttctgaacacaacggtac

SEQ ID NO: 309211 - DNA, 30 bp, Artificial Sequence
  Synthetic oligonucleotide
taaaacaatttactaaagctgcgacggtac

SEQ ID NO: 309212 - DNA, 30 bp, Artificial Sequence
  Synthetic oligonucleotide
tgaaagtaaagctcacgaacagtacggtac

SEQ ID NO: 309213 - DNA, 30 bp, Artificial Sequence
  Synthetic oligonucleotide
acttacgccataattcagttcaaccggtac

SEQ ID NO: 309214 - DNA, 30 bp, Artificial Sequence
  Synthetic oligonucleotide
tgctgtagatcgtaagcgaataatcggtac

SEQ ID NO: 309215 - DNA, 30 bp, Artificial Sequence
  Synthetic oligonucleotide
agtttaggtgcgatagttattagtcggtac

SEQ ID NO: 309216 - DNA, 30 bp, Artificial Sequence
  Synthetic oligonucleotide
gccgctgtgagctaaacgggccaagggtac

SEQ ID NO: 309217 - DNA, 30 bp, Artificial Sequence
  Synthetic oligonucleotide
tccgtgttcttatgaagtccgacagggtac

SEQ ID NO: 309218 - DNA, 30 bp, Artificial Sequence
  Synthetic oligonucleotide
agagattaatttgacgagtagaacgggtac

SEQ ID NO: 309219 - DNA, 30 bp, Artificial Sequence
  Synthetic oligonucleotide
cgttgattgtatccctccttgcgggggtac

SEQ ID NO: 309220 - DNA, 30 bp, Artificial Sequence
  Synthetic oligonucleotide
acgagggcctacgcagctatatatgggtac

SEQ ID NO: 309221 - DNA, 30 bp, Artificial Sequence
  Synthetic oligonucleotide
gtgttggggtaattcggcctaccatggtac

SEQ ID NO: 309222 - DNA, 30 bp, Artificial Sequence
  Synthetic oligonucleotide
aaaaccgaattgtacaacgatcattggtac

SEQ ID NO: 309223 - DNA, 30 bp, Artificial Sequence
  Synthetic oligonucleotide
gttgtattggcgcgcctccatacaatgtac

SEQ ID NO: 309224 - DNA, 30 bp, Artificial Sequence
  Synthetic oligonucleotide
tactcagcgtcgaaactggtgcacatgtac

SEQ ID NO: 309225 - DNA, 30 bp, Artificial Sequence
  Synthetic oligonucleotide
actcaaggttgtttgaaggtatgcatgtac

SEQ ID NO: 309226 - DNA, 30 bp, Artificial Sequence
  Synthetic oligonucleotide
tcaagatcgagtggcactgctgtcatgtac

SEQ ID NO: 309227 - DNA, 30 bp, Artificial Sequence
  Synthetic oligonucleotide
aagcgcactccatagttgggccctatgtac

SEQ ID NO: 309228 - DNA, 30 bp, Artificial Sequence
  Synthetic oligonucleotide
gctcggccgcctgttctgtgaagtatgtac

SEQ ID NO: 309229 - DNA, 30 bp, Artificial Sequence
  Synthetic oligonucleotide
agagtacgcagtgctcatcaccttatgtac

SEQ ID NO: 309230 - DNA, 30 bp, Artificial Sequence
  Synthetic oligonucleotide
aatacgggcttattacaatggcttatgtac

SEQ ID NO: 309231 - DNA, 30 bp, Artificial Sequence
  Synthetic oligonucleotide
cttgccatggtcttactcaagcgactgtac

SEQ ID NO: 309232 - DNA, 30 bp, Artificial Sequence
  Synthetic oligonucleotide
atggccgatgcggttagggtgcagctgtac

SEQ ID NO: 309233 - DNA, 30 bp, Artificial Sequence
  Synthetic oligonucleotide
attaaataccacactggagcactgctgtac

SEQ ID NO: 309234 - DNA, 30 bp, Artificial Sequence
  Synthetic oligonucleotide
cttgggagtatcgggatgctgagtctgtac

SEQ ID NO: 309235 - DNA, 30 bp, Artificial Sequence
  Synthetic oligonucleotide
ctcccggagcaaacagggtgggaagtgtac

SEQ ID NO: 309236 - DNA, 30 bp, Artificial Sequence
  Synthetic oligonucleotide
tttcagacctacggcgttgaaggagtgtac

SEQ ID NO: 309237 - DNA, 30 bp, Artificial Sequence
  Synthetic oligonucleotide
acatttatttctattgcgtcagccgtgtac

SEQ ID NO: 309238 - DNA, 30 bp, Artificial Sequence
  Synthetic oligonucleotide
ggagctatggtcaacgcgtgataggtgtac

SEQ ID NO: 309239 - DNA, 30 bp, Artificial Sequence
  Synthetic oligonucleotide
atacgcgcttgcatatggtttccggtgtac

SEQ ID NO: 309240 - DNA, 30 bp, Artificial Sequence
  Synthetic oligonucleotide
tccaggtggattgagtatccttctgtgtac

SEQ ID NO: 309241 - DNA, 30 bp, Artificial Sequence
  Synthetic oligonucleotide
gtactgtgagattagtgcaagtttgtgtac

SEQ ID NO: 309242 - DNA, 30 bp, Artificial Sequence
  Synthetic oligonucleotide
ctcaataaataatgtcggaaggtattgtac

SEQ ID NO: 309243 - DNA, 30 bp, Artificial Sequence
  Synthetic oligonucleotide
gaggaacgcttggatgtgtgagccttgtac

SEQ ID NO: 309244 - DNA, 30 bp, Artificial Sequence
  Synthetic oligonucleotide
cgtatgggtgaagaccacttcgcgttgtac

SEQ ID NO: 309245 - DNA, 30 bp, Artificial Sequence
  Synthetic oligonucleotide
gtcagtcacactagccacattttgttgtac

SEQ ID NO: 309246 - DNA, 30 bp, Artificial Sequence
  Synthetic oligonucleotide
gccacgggcaaaaacctcaactgaaattac

SEQ ID NO: 309247 - DNA, 30 bp, Artificial Sequence
  Synthetic oligonucleotide
cgctgagaacttttctttccgaccaattac

SEQ ID NO: 309248 - DNA, 30 bp, Artificial Sequence
  Synthetic oligonucleotide
ataacaacagtgggagaattctcgaattac

SEQ ID NO: 309249 - DNA, 30 bp, Artificial Sequence
  Synthetic oligonucleotide
ctcaacatgcaatcacggttaaggaattac

SEQ ID NO: 309250 - DNA, 30 bp, Artificial Sequence
  Synthetic oligonucleotide
ctagacatgcatagactaaccgggaattac

SEQ ID NO: 309251 - DNA, 30 bp, Artificial Sequence
  Synthetic oligonucleotide
gttaccaaaagccaggtaaaaggtaattac

SEQ ID NO: 309252 - DNA, 30 bp, Artificial Sequence
  Synthetic oligonucleotide
ttcttctatggtaagaagaacgaacattac

SEQ ID NO: 309253 - DNA, 30 bp, Artificial Sequence
  Synthetic oligonucleotide
taaacggtttgtcgcaatccaagacattac

SEQ ID NO: 309254 - DNA, 30 bp, Artificial Sequence
  Synthetic oligonucleotide
cggatgacttccgtctgcaggttacattac

SEQ ID NO: 309255 - DNA, 30 bp, Artificial Sequence
  Synthetic oligonucleotide
agccggaatgcaggacgaaattcccattac

SEQ ID NO: 309256 - DNA, 30 bp, Artificial Sequence
  Synthetic oligonucleotide
acaacgagtacacgccttcggatccattac

SEQ ID NO: 309257 - DNA, 30 bp, Artificial Sequence
  Synthetic oligonucleotide
gtagcgaacttataattacggtatcattac

SEQ ID NO: 309258 - DNA, 30 bp, Artificial Sequence
  Synthetic oligonucleotide
tccgacgaccactcgcatgccagtcattac

SEQ ID NO: 309259 - DNA, 30 bp, Artificial Sequence
  Synthetic oligonucleotide
cctctgttcggtgtgccagctattcattac

SEQ ID NO: 309260 - DNA, 30 bp, Artificial Sequence
  Synthetic oligonucleotide
aaaaacgttcggtggccatccgacgattac

SEQ ID NO: 309261 - DNA, 30 bp, Artificial Sequence
  Synthetic oligonucleotide
cactagggagtgtatttttcgggcgattac

SEQ ID NO: 309262 - DNA, 30 bp, Artificial Sequence
  Synthetic oligonucleotide
agtggcgcaacaagattttttagggattac

SEQ ID NO: 309263 - DNA, 30 bp, Artificial Sequence
  Synthetic oligonucleotide
gggtccaggtcacacgtgggatgggattac

SEQ ID NO: 309264 - DNA, 30 bp, Artificial Sequence
  Synthetic oligonucleotide
cacccgaacctaaaggaatttctggattac

SEQ ID NO: 309265 - DNA, 30 bp, Artificial Sequence
  Synthetic oligonucleotide
cttgtttcaagaagtatggaatatgattac

SEQ ID NO: 309266 - DNA, 30 bp, Artificial Sequence
  Synthetic oligonucleotide
tcaccccctaaaccgaggaattctgattac

SEQ ID NO: 309267 - DNA, 30 bp, Artificial Sequence
  Synthetic oligonucleotide
ctccgtaagcgacctcccgttaaatattac

SEQ ID NO: 309268 - DNA, 30 bp, Artificial Sequence
  Synthetic oligonucleotide
gcaggaaaattacgatgatttagatattac

SEQ ID NO: 309269 - DNA, 30 bp, Artificial Sequence
  Synthetic oligonucleotide
tgaagctcagctaccacgatggactattac

SEQ ID NO: 309270 - DNA, 30 bp, Artificial Sequence
  Synthetic oligonucleotide
tcgcggcttagaccctaagttgcctattac

SEQ ID NO: 309271 - DNA, 30 bp, Artificial Sequence
  Synthetic oligonucleotide
cacatccagataccgatcacggagtattac

SEQ ID NO: 309272 - DNA, 30 bp, Artificial Sequence
  Synthetic oligonucleotide
ataattgtttccataagttggggcacttac

SEQ ID NO: 309273 - DNA, 30 bp, Artificial Sequence
  Synthetic oligonucleotide
gcaaacaaatgtgtctgacacgggacttac

SEQ ID NO: 309274 - DNA, 30 bp, Artificial Sequence
  Synthetic oligonucleotide
aaatgggcgtgacgtgaacgcaatacttac

SEQ ID NO: 309275 - DNA, 30 bp, Artificial Sequence
  Synthetic oligonucleotide
ttacataccgactagtttactgaaccttac

SEQ ID NO: 309276 - DNA, 30 bp, Artificial Sequence
  Synthetic oligonucleotide
acgcttatcgcatgtcagtagagagcttac

SEQ ID NO: 309277 - DNA, 30 bp, Artificial Sequence
  Synthetic oligonucleotide
gcgataagacagacattgtgcatcgcttac

SEQ ID NO: 309278 - DNA, 30 bp, Artificial Sequence
  Synthetic oligonucleotide
agtcccccgttgggctttacgttggcttac

SEQ ID NO: 309279 - DNA, 30 bp, Artificial Sequence
  Synthetic oligonucleotide
ggactctccatcgcgattaaaattgcttac

SEQ ID NO: 309280 - DNA, 30 bp, Artificial Sequence
  Synthetic oligonucleotide
atatgctttcaagaaccatcagggtcttac

SEQ ID NO: 309281 - DNA, 30 bp, Artificial Sequence
  Synthetic oligonucleotide
atctaaaaccacgcgcagaggtgaagttac

SEQ ID NO: 309282 - DNA, 30 bp, Artificial Sequence
  Synthetic oligonucleotide
ttatgcacgcgaactaggagattaagttac

SEQ ID NO: 309283 - DNA, 30 bp, Artificial Sequence
  Synthetic oligonucleotide
ccgagcctatatgggaggcgtctcagttac

SEQ ID NO: 309284 - DNA, 30 bp, Artificial Sequence
  Synthetic oligonucleotide
tatataacgacctcggaaaacacgagttac

SEQ ID NO: 309285 - DNA, 30 bp, Artificial Sequence
  Synthetic oligonucleotide
gtatatggaaagttcttactgccgagttac

SEQ ID NO: 309286 - DNA, 30 bp, Artificial Sequence
  Synthetic oligonucleotide
tgctgggttaagggccacataacacgttac

SEQ ID NO: 309287 - DNA, 30 bp, Artificial Sequence
  Synthetic oligonucleotide
ttccgccggtctcgattatctcaccgttac

SEQ ID NO: 309288 - DNA, 30 bp, Artificial Sequence
  Synthetic oligonucleotide
ttacgcgtatagttctctattcaccgttac

SEQ ID NO: 309289 - DNA, 30 bp, Artificial Sequence
  Synthetic oligonucleotide
aataatcataagctattcctatgccgttac

SEQ ID NO: 309290 - DNA, 30 bp, Artificial Sequence
  Synthetic oligonucleotide
tatgcgtgcaggatgcgggactgccgttac

SEQ ID NO: 309291 - DNA, 30 bp, Artificial Sequence
  Synthetic oligonucleotide
tgtggacgcccgttcgtagaggagcgttac

SEQ ID NO: 309292 - DNA, 30 bp, Artificial Sequence
  Synthetic oligonucleotide
ccgatgtgtatccagatatggtggcgttac

SEQ ID NO: 309293 - DNA, 30 bp, Artificial Sequence
  Synthetic oligonucleotide
attcgaaggtaactctcagaagggggttac

SEQ ID NO: 309294 - DNA, 30 bp, Artificial Sequence
  Synthetic oligonucleotide
tatgacgtccagtcgatatttcatggttac

SEQ ID NO: 309295 - DNA, 30 bp, Artificial Sequence
  Synthetic oligonucleotide
gtgccacatctgtctaagagaagtggttac

SEQ ID NO: 309296 - DNA, 30 bp, Artificial Sequence
  Synthetic oligonucleotide
atcaaaagaacacagtgtaaggtatgttac

SEQ ID NO: 309297 - DNA, 30 bp, Artificial Sequence
  Synthetic oligonucleotide
tcacagaaacattttacacgctgctgttac

SEQ ID NO: 309298 - DNA, 30 bp, Artificial Sequence
  Synthetic oligonucleotide
atagtggaaccaaaatggttcgagtgttac

SEQ ID NO: 309299 - DNA, 30 bp, Artificial Sequence
  Synthetic oligonucleotide
tagtagtatcctgcccaaacgatttgttac

SEQ ID NO: 309300 - DNA, 30 bp, Artificial Sequence
  Synthetic oligonucleotide
gatgagaagtcaattgtatcgtaaatttac

SEQ ID NO: 309301 - DNA, 30 bp, Artificial Sequence
  Synthetic oligonucleotide
ggtaaaccgggcgtggtcgatcccatttac

SEQ ID NO: 309302 - DNA, 30 bp, Artificial Sequence
  Synthetic oligonucleotide
aaaaagccacgacttctatagaagatttac

SEQ ID NO: 309303 - DNA, 30 bp, Artificial Sequence
  Synthetic oligonucleotide
cacgtagccacaaaaatatgttggatttac

SEQ ID NO: 309304 - DNA, 30 bp, Artificial Sequence
  Synthetic oligonucleotide
atacccggttacaaatagttcgtgatttac

SEQ ID NO: 309305 - DNA, 30 bp, Artificial Sequence
  Synthetic oligonucleotide
aaaattgttcacaatgggtcggatatttac

SEQ ID NO: 309306 - DNA, 30 bp, Artificial Sequence
  Synthetic oligonucleotide
gaggcgaatacgcgcactggtagtatttac

SEQ ID NO: 309307 - DNA, 30 bp, Artificial Sequence
  Synthetic oligonucleotide
tccaccaccaatcgttcaacttgcctttac

SEQ ID NO: 309308 - DNA, 30 bp, Artificial Sequence
  Synthetic oligonucleotide
gctcatcgtatgttggaggctgagctttac

SEQ ID NO: 309309 - DNA, 30 bp, Artificial Sequence
  Synthetic oligonucleotide
acgttatgggtctatcggttccggctttac

SEQ ID NO: 309310 - DNA, 30 bp, Artificial Sequence
  Synthetic oligonucleotide
acgcatgggaagcttatcctgaatctttac

SEQ ID NO: 309311 - DNA, 30 bp, Artificial Sequence
  Synthetic oligonucleotide
atgtgtggtgtaagaaagaactttctttac

SEQ ID NO: 309312 - DNA, 30 bp, Artificial Sequence
  Synthetic oligonucleotide
taagttgtagatgatgaatagagagtttac

SEQ ID NO: 309313 - DNA, 30 bp, Artificial Sequence
  Synthetic oligonucleotide
tccatgcgcgggttgatggaaaccgtttac

SEQ ID NO: 309314 - DNA, 30 bp, Artificial Sequence
  Synthetic oligonucleotide
tctcagaacaccgaaagtcaaccggtttac

SEQ ID NO: 309315 - DNA, 30 bp, Artificial Sequence
  Synthetic oligonucleotide
attatggtgggtacagaccaggcggtttac

SEQ ID NO: 309316 - DNA, 30 bp, Artificial Sequence
  Synthetic oligonucleotide
atcggttaggagggaccggacatggtttac

SEQ ID NO: 309317 - DNA, 30 bp, Artificial Sequence
  Synthetic oligonucleotide
tatagcgagcatagcgattttagtgtttac

SEQ ID NO: 309318 - DNA, 30 bp, Artificial Sequence
  Synthetic oligonucleotide
ctgacggattagcccagagactaattttac

SEQ ID NO: 309319 - DNA, 30 bp, Artificial Sequence
  Synthetic oligonucleotide
acgcggccttatcagggtcggtcattttac

SEQ ID NO: 309320 - DNA, 30 bp, Artificial Sequence
  Synthetic oligonucleotide
gaagacgctcacgagcagcgaagattttac

SEQ ID NO: 309321 - DNA, 30 bp, Artificial Sequence
  Synthetic oligonucleotide
cgatatgtgtgcttcgaatattccttttac

SEQ ID NO: 309322 - DNA, 30 bp, Artificial Sequence
  Synthetic oligonucleotide
acgtggaatttgccacgcgtactcttttac

SEQ ID NO: 309323 - DNA, 30 bp, Artificial Sequence
  Synthetic oligonucleotide
ccgggcagggacggcaccctatggttttac

SEQ ID NO: 309324 - DNA, 30 bp, Artificial Sequence
  Synthetic oligonucleotide
ccgatcccacaaaccaaatctcttttttac

SEQ ID NO: 309325 - DNA, 30 bp, Artificial Sequence
  Synthetic oligonucleotide
ccacaaccgatccgtcactacgttttttac

SEQ ID NO: 309326 - DNA, 30 bp, Artificial Sequence
  Synthetic oligonucleotide
gtcgcgctgggttatccttgtgtaaaaacc

SEQ ID NO: 309327 - DNA, 30 bp, Artificial Sequence
  Synthetic oligonucleotide
ccatatccgttggaaaacgttggcaaaacc

SEQ ID NO: 309328 - DNA, 30 bp, Artificial Sequence
  Synthetic oligonucleotide
tcaccagcctacgcacagaaaccacaaacc

SEQ ID NO: 309329 - DNA, 30 bp, Artificial Sequence
  Synthetic oligonucleotide
aacgtatttgttacaggtggccgacaaacc

SEQ ID NO: 309330 - DNA, 30 bp, Artificial Sequence
  Synthetic oligonucleotide
aacgctgcgctcggagacgattgacaaacc

SEQ ID NO: 309331 - DNA, 30 bp, Artificial Sequence
  Synthetic oligonucleotide
tccaattgcataaaggctacaatacaaacc

SEQ ID NO: 309332 - DNA, 30 bp, Artificial Sequence
  Synthetic oligonucleotide
caaacctatcgagtattttacatacaaacc

SEQ ID NO: 309333 - DNA, 30 bp, Artificial Sequence
  Synthetic oligonucleotide
gacaggatccacttgaggtcctagcaaacc

SEQ ID NO: 309334 - DNA, 30 bp, Artificial Sequence
  Synthetic oligonucleotide
gagctacggctagatcggtcttagcaaacc

SEQ ID NO: 309335 - DNA, 30 bp, Artificial Sequence
  Synthetic oligonucleotide
gcacggattgacatgggaactacgcaaacc

SEQ ID NO: 309336 - DNA, 30 bp, Artificial Sequence
  Synthetic oligonucleotide
gcgtctatgataacgcagagaaggcaaacc

SEQ ID NO: 309337 - DNA, 30 bp, Artificial Sequence
  Synthetic oligonucleotide
acggtgctgactcggtacttccaagaaacc

SEQ ID NO: 309338 - DNA, 30 bp, Artificial Sequence
  Synthetic oligonucleotide
ggaccacatctcggtgtattgaccgaaacc

SEQ ID NO: 309339 - DNA, 30 bp, Artificial Sequence
  Synthetic oligonucleotide
cgcgcggagtcatgcaaagactgcgaaacc

SEQ ID NO: 309340 - DNA, 30 bp, Artificial Sequence
  Synthetic oligonucleotide
acatatcacagtccaatacgccatgaaacc

SEQ ID NO: 309341 - DNA, 30 bp, Artificial Sequence
  Synthetic oligonucleotide
tcgtgcttcccaataacggggcatgaaacc

SEQ ID NO: 309342 - DNA, 30 bp, Artificial Sequence
  Synthetic oligonucleotide
ggatacaaattaacactgctttatgaaacc

SEQ ID NO: 309343 - DNA, 30 bp, Artificial Sequence
  Synthetic oligonucleotide
cccgggacaacgttcagcgcaagctaaacc

SEQ ID NO: 309344 - DNA, 30 bp, Artificial Sequence
  Synthetic oligonucleotide
tagttggatccggggggaagttgctaaacc

SEQ ID NO: 309345 - DNA, 30 bp, Artificial Sequence
  Synthetic oligonucleotide
caaatagtagagtaccaggatatttaaacc

SEQ ID NO: 309346 - DNA, 30 bp, Artificial Sequence
  Synthetic oligonucleotide
cggcagtattcccttaatcgagtttaaacc

SEQ ID NO: 309347 - DNA, 31 bp, Artificial Sequence
  Synthetic oligonucleotide
ccgtcagttcaatcgagggcccttttaaacc

SEQ ID NO: 309348 - DNA, 30 bp, Artificial Sequence
  Synthetic oligonucleotide
tccccacggttacattaagaaataacaacc

SEQ ID NO: 309349 - DNA, 30 bp, Artificial Sequence
  Synthetic oligonucleotide
accatctcaacgctccgaatctggacaacc

SEQ ID NO: 309350 - DNA, 30 bp, Artificial Sequence
  Synthetic oligonucleotide
catcctgattatggtgggctgcagccaacc

SEQ ID NO: 309351 - DNA, 30 bp, Artificial Sequence
  Synthetic oligonucleotide
cgatgggatatttaatctacagtgccaacc

SEQ ID NO: 309352 - DNA, 30 bp, Artificial Sequence
  Synthetic oligonucleotide
gatagcaagcacggccgcgcgtcagcaacc

SEQ ID NO: 309353 - DNA, 30 bp, Artificial Sequence
  Synthetic oligonucleotide
gagagctcctcggataaggaaatagcaacc

SEQ ID NO: 309354 - DNA, 30 bp, Artificial Sequence
  Synthetic oligonucleotide
accgcccaagttcgtgtagccagggcaacc

SEQ ID NO: 309355 - DNA, 30 bp, Artificial Sequence
  Synthetic oligonucleotide
gcttaatcgggcaggcccgacggggcaacc

SEQ ID NO: 309356 - DNA, 30 bp, Artificial Sequence
  Synthetic oligonucleotide
gatgcatctctcctgcctactctggcaacc

SEQ ID NO: 309357 - DNA, 30 bp, Artificial Sequence
  Synthetic oligonucleotide
gccttctagatagagagaataaatgcaacc

SEQ ID NO: 309358 - DNA, 30 bp, Artificial Sequence
  Synthetic oligonucleotide
taaagaaacccccctaaatacggtgcaacc

SEQ ID NO: 309359 - DNA, 30 bp, Artificial Sequence
  Synthetic oligonucleotide
atcggccacccaacaaaccaagtatcaacc

SEQ ID NO: 309360 - DNA, 30 bp, Artificial Sequence
  Synthetic oligonucleotide
tgcggaagaaccgcgctatgcaggtcaacc

SEQ ID NO: 309361 - DNA, 30 bp, Artificial Sequence
  Synthetic oligonucleotide
cgtgtcacccgggataatccggtgtcaacc

SEQ ID NO: 309362 - DNA, 30 bp, Artificial Sequence
  Synthetic oligonucleotide
ccatactcattcatcttaaatacttcaacc

SEQ ID NO: 309363 - DNA, 30 bp, Artificial Sequence
  Synthetic oligonucleotide
gctgagcttaggcggatcatgtgaagaacc

SEQ ID NO: 309364 - DNA, 30 bp, Artificial Sequence
  Synthetic oligonucleotide
aaaccacgcaagcatagcctggacagaacc

SEQ ID NO: 309365 - DNA, 30 bp, Artificial Sequence
  Synthetic oligonucleotide
atccgctgccaaattcttagccggagaacc

SEQ ID NO: 309366 - DNA, 30 bp, Artificial Sequence
  Synthetic oligonucleotide
gctggctccagcaatcccccattgagaacc

SEQ ID NO: 309367 - DNA, 30 bp, Artificial Sequence
  Synthetic oligonucleotide
ggaatctgcggaagaatggtaggtagaacc

SEQ ID NO: 309368 - DNA, 30 bp, Artificial Sequence
  Synthetic oligonucleotide
tactggcgagggaccttatggggtagaacc

SEQ ID NO: 309369 - DNA, 30 bp, Artificial Sequence
  Synthetic oligonucleotide
aacagatataggtcacacgtgcttagaacc

SEQ ID NO: 309370 - DNA, 30 bp, Artificial Sequence
  Synthetic oligonucleotide
tgggtattgctttagccttgcgaacgaacc

SEQ ID NO: 309371 - DNA, 30 bp, Artificial Sequence
  Synthetic oligonucleotide
ccctgtccttagagaacgtcacaccgaacc

SEQ ID NO: 309372 - DNA, 30 bp, Artificial Sequence
  Synthetic oligonucleotide
tagaccaatctttgataagttgaccgaacc

SEQ ID NO: 309373 - DNA, 30 bp, Artificial Sequence
  Synthetic oligonucleotide
gagaaccgatctgtatactaattccgaacc

SEQ ID NO: 309374 - DNA, 30 bp, Artificial Sequence
  Synthetic oligonucleotide
agcaggagcgctgggactgatttccgaacc

SEQ ID NO: 309375 - DNA, 30 bp, Artificial Sequence
  Synthetic oligonucleotide
tacataacaattacgcggagatcgcgaacc

SEQ ID NO: 309376 - DNA, 30 bp, Artificial Sequence
  Synthetic oligonucleotide
atatcattctcccgagagaattggcgaacc

SEQ ID NO: 309377 - DNA, 30 bp, Artificial Sequence
  Synthetic oligonucleotide
tccagtattgcgagatccaacttgcgaacc

SEQ ID NO: 309378 - DNA, 30 bp, Artificial Sequence
  Synthetic oligonucleotide
gatttacattgctcttagtagactcgaacc

SEQ ID NO: 309379 - DNA, 30 bp, Artificial Sequence
  Synthetic oligonucleotide
cccagactttaaagcgatacctctcgaacc

SEQ ID NO: 309380 - DNA, 30 bp, Artificial Sequence
  Synthetic oligonucleotide
ctgtatttgatttgtaccttgtctcgaacc

SEQ ID NO: 309381 - DNA, 30 bp, Artificial Sequence
  Synthetic oligonucleotide
attcctacaggagtctcgatacgtcgaacc

SEQ ID NO: 309382 - DNA, 30 bp, Artificial Sequence
  Synthetic oligonucleotide
ctgtcccggagggtaaacacccttcgaacc

SEQ ID NO: 309383 - DNA, 30 bp, Artificial Sequence
  Synthetic oligonucleotide
tgtgcgaggtcgcatgccaggccaggaacc

SEQ ID NO: 309384 - DNA, 30 bp, Artificial Sequence
  Synthetic oligonucleotide
aaaagctctccggagtagtatggaggaacc

SEQ ID NO: 309385 - DNA, 30 bp, Artificial Sequence
  Synthetic oligonucleotide
cgagagtggcaaatgaaaataatcggaacc

SEQ ID NO: 309386 - DNA, 30 bp, Artificial Sequence
  Synthetic oligonucleotide
aaggttcgggggagtaggcggatcggaacc

SEQ ID NO: 309387 - DNA, 30 bp, Artificial Sequence
  Synthetic oligonucleotide
cttcgtgggtgcctgcagaattcgggaacc

SEQ ID NO: 309388 - DNA, 30 bp, Artificial Sequence
  Synthetic oligonucleotide
cacgagtgccagttctggaaacgtggaacc

SEQ ID NO: 309389 - DNA, 30 bp, Artificial Sequence
  Synthetic oligonucleotide
cttaggcttaccccggtacgtgaatgaacc

SEQ ID NO: 309390 - DNA, 30 bp, Artificial Sequence
  Synthetic oligonucleotide
caaaatgtgtatgggatgccataatgaacc

SEQ ID NO: 309391 - DNA, 29 bp, Artificial Sequence
  Synthetic oligonucleotide
taggcgacgcatcaacctttccatgaacc

SEQ ID NO: 309392 - DNA, 30 bp, Artificial Sequence
  Synthetic oligonucleotide
tgacccagctgccagttctacgagtgaacc

SEQ ID NO: 309393 - DNA, 30 bp, Artificial Sequence
  Synthetic oligonucleotide
gggttcggcgtatatgcaattacgtgaacc

SEQ ID NO: 309394 - DNA, 30 bp, Artificial Sequence
  Synthetic oligonucleotide
tgagccaccgtaattccatatccgtgaacc

SEQ ID NO: 309395 - DNA, 30 bp, Artificial Sequence
  Synthetic oligonucleotide
ccataatagaataacacagaggtgtgaacc

SEQ ID NO: 309396 - DNA, 30 bp, Artificial Sequence
  Synthetic oligonucleotide
aggagcgcgcgaagcctaagccattgaacc

SEQ ID NO: 309397 - DNA, 30 bp, Artificial Sequence
  Synthetic oligonucleotide
tgtgtcaaacaagggctaccctattgaacc

SEQ ID NO: 309398 - DNA, 30 bp, Artificial Sequence
  Synthetic oligonucleotide
taatattacaagctcacttgggcaataacc

SEQ ID NO: 309399 - DNA, 30 bp, Artificial Sequence
  Synthetic oligonucleotide
gaggtatgcagacaatatatgtacataacc

SEQ ID NO: 309400 - DNA, 30 bp, Artificial Sequence
  Synthetic oligonucleotide
tgcaagagggttccgtcctaaatcataacc

SEQ ID NO: 309401 - DNA, 30 bp, Artificial Sequence
  Synthetic oligonucleotide
gccaggattcctttagagagccggataacc

SEQ ID NO: 309402 - DNA, 29 bp, Artificial Sequence
  Synthetic oligonucleotide
attcaaatataagtaatgcgaatataacc

SEQ ID NO: 309403 - DNA, 30 bp, Artificial Sequence
  Synthetic oligonucleotide
tggcgtagcgacgctagaagtgctataacc

SEQ ID NO: 309404 - DNA, 30 bp, Artificial Sequence
  Synthetic oligonucleotide
caatctatatgcaagtccatgattataacc

SEQ ID NO: 309405 - DNA, 30 bp, Artificial Sequence
  Synthetic oligonucleotide
gcatcaacatgtgaccgtcatattataacc

SEQ ID NO: 309406 - DNA, 30 bp, Artificial Sequence
  Synthetic oligonucleotide
agcagggcgtcgaaactggttcacctaacc

SEQ ID NO: 309407 - DNA, 30 bp, Artificial Sequence
  Synthetic oligonucleotide
tagcgatctcgcatagccggcctcgtaacc

SEQ ID NO: 309408 - DNA, 30 bp, Artificial Sequence
  Synthetic oligonucleotide
gattcgagcagaccgctagaggaggtaacc

SEQ ID NO: 309409 - DNA, 31 bp, Artificial Sequence
  Synthetic oligonucleotide
gttctgcgtacggttcactagaagggtaacc

SEQ ID NO: 309410 - DNA, 30 bp, Artificial Sequence
  Synthetic oligonucleotide
tataacccggctctgccgacatgggtaacc

SEQ ID NO: 309411 - DNA, 30 bp, Artificial Sequence
  Synthetic oligonucleotide
gattgttgcccaacttgggcagatgtaacc

SEQ ID NO: 309412 - DNA, 30 bp, Artificial Sequence
  Synthetic oligonucleotide
caagatatgagcctcattctgggtgtaacc

SEQ ID NO: 309413 - DNA, 30 bp, Artificial Sequence
  Synthetic oligonucleotide
gttgtttaagtgcgcaacacaccattaacc

SEQ ID NO: 309414 - DNA, 30 bp, Artificial Sequence
  Synthetic oligonucleotide
cttaatatgtatgtgtacctttccttaacc

SEQ ID NO: 309415 - DNA, 30 bp, Artificial Sequence
  Synthetic oligonucleotide
ctcgtagggattgctcgaatgttgttaacc

SEQ ID NO: 309416 - DNA, 30 bp, Artificial Sequence
  Synthetic oligonucleotide
ggtgtgttgcgatatattcgttatttaacc

SEQ ID NO: 309417 - DNA, 30 bp, Artificial Sequence
  Synthetic oligonucleotide
acattttagaatctcaagccataaaacacc

SEQ ID NO: 309418 - DNA, 30 bp, Artificial Sequence
  Synthetic oligonucleotide
tgataagctgtgaacaatgctgcaaacacc

SEQ ID NO: 309419 - DNA, 30 bp, Artificial Sequence
  Synthetic oligonucleotide
gcgcaaagagtctcctgatagggaaacacc

SEQ ID NO: 309420 - DNA, 30 bp, Artificial Sequence
  Synthetic oligonucleotide
acgctgtgatatgaaaactcgcggaacacc

SEQ ID NO: 309421 - DNA, 30 bp, Artificial Sequence
  Synthetic oligonucleotide
tcctatgaccaccgcggaccttggaacacc

SEQ ID NO: 309422 - DNA, 30 bp, Artificial Sequence
  Synthetic oligonucleotide
ctccccgtacagaggcgtgaccaacacacc

SEQ ID NO: 309423 - DNA, 30 bp, Artificial Sequence
  Synthetic oligonucleotide
agtaagcattttcggacgatgaaccacacc

SEQ ID NO: 309424 - DNA, 30 bp, Artificial Sequence
  Synthetic oligonucleotide
atggttctgacacaatgagacgcgcacacc

SEQ ID NO: 309425 - DNA, 30 bp, Artificial Sequence
  Synthetic oligonucleotide
tccctagcgggggaaatactggtgcacacc

SEQ ID NO: 309426 - DNA, 30 bp, Artificial Sequence
  Synthetic oligonucleotide
cactacatgacaattggttgtcatcacacc

SEQ ID NO: 309427 - DNA, 30 bp, Artificial Sequence
  Synthetic oligonucleotide
tagccactcagcgcatttcgaagtcacacc

SEQ ID NO: 309428 - DNA, 30 bp, Artificial Sequence
  Synthetic oligonucleotide
ttccaaagggcatcagtatagctagacacc

SEQ ID NO: 309429 - DNA, 30 bp, Artificial Sequence
  Synthetic oligonucleotide
tagataccaatgccacagacggtagacacc

SEQ ID NO: 309430 - DNA, 27 bp, Artificial Sequence
  Synthetic oligonucleotide
gaaaacctccatatagggaaggacacc

SEQ ID NO: 309431 - DNA, 30 bp, Artificial Sequence
  Synthetic oligonucleotide
gtaagtcatcctagacctcggagggacacc

SEQ ID NO: 309432 - DNA, 30 bp, Artificial Sequence
  Synthetic oligonucleotide
ctactagagcttgcagtcacgcgtgacacc

SEQ ID NO: 309433 - DNA, 30 bp, Artificial Sequence
  Synthetic oligonucleotide
agggttgacaggccagagtccgcatacacc

SEQ ID NO: 309434 - DNA, 30 bp, Artificial Sequence
  Synthetic oligonucleotide
aggctccgaccgagagcggcgctgtacacc

SEQ ID NO: 309435 - DNA, 30 bp, Artificial Sequence
  Synthetic oligonucleotide
agccgtaatgaatgccgtaaattcaccacc

SEQ ID NO: 309436 - DNA, 30 bp, Artificial Sequence
  Synthetic oligonucleotide
cacataaacaggggcggtagcctgaccacc

SEQ ID NO: 309437 - DNA, 30 bp, Artificial Sequence
  Synthetic oligonucleotide
aaatgatcgtggtaaacgaactaccccacc

SEQ ID NO: 309438 - DNA, 30 bp, Artificial Sequence
  Synthetic oligonucleotide
cgcttacaggaatggcgggggcgccccacc

SEQ ID NO: 309439 - DNA, 30 bp, Artificial Sequence
  Synthetic oligonucleotide
cactatcatgggagagtagcaggccccacc

SEQ ID NO: 309440 - DNA, 30 bp, Artificial Sequence
  Synthetic oligonucleotide
taagaaccttcccaactcgcagtcgccacc

SEQ ID NO: 309441 - DNA, 30 bp, Artificial Sequence
  Synthetic oligonucleotide
ggatttcgctatagtgcacttcaggccacc

SEQ ID NO: 309442 - DNA, 30 bp, Artificial Sequence
  Synthetic oligonucleotide
tgttaacaatggcgacgtactgaggccacc

SEQ ID NO: 309443 - DNA, 30 bp, Artificial Sequence
  Synthetic oligonucleotide
ctccaagttaaatagcgtatgtcggccacc

SEQ ID NO: 309444 - DNA, 30 bp, Artificial Sequence
  Synthetic oligonucleotide
gccaccacttcctgtactaggggggccacc

SEQ ID NO: 309445 - DNA, 30 bp, Artificial Sequence
  Synthetic oligonucleotide
taaggggaggcagccatgtcagtggccacc

SEQ ID NO: 309446 - DNA, 30 bp, Artificial Sequence
  Synthetic oligonucleotide
taggccattttttcgcgtgtgcatgccacc

SEQ ID NO: 309447 - DNA, 30 bp, Artificial Sequence
  Synthetic oligonucleotide
agaaagcaatgttcaagctaacgatccacc

SEQ ID NO: 309448 - DNA, 30 bp, Artificial Sequence
  Synthetic oligonucleotide
gaaggctaggcctatttgccatgttccacc

SEQ ID NO: 309449 - DNA, 30 bp, Artificial Sequence
  Synthetic oligonucleotide
tggctacgggaagccttaatattttccacc

SEQ ID NO: 309450 - DNA, 30 bp, Artificial Sequence
  Synthetic oligonucleotide
tgcccccaaaacctgcgacttaaaagcacc

SEQ ID NO: 309451 - DNA, 30 bp, Artificial Sequence
  Synthetic oligonucleotide
acgtcggtaggaaccggcgttgcgagcacc

SEQ ID NO: 309452 - DNA, 30 bp, Artificial Sequence
  Synthetic oligonucleotide
gaatcgtccgagcttgatctagatagcacc

SEQ ID NO: 309453 - DNA, 30 bp, Artificial Sequence
  Synthetic oligonucleotide
gttcgttagagtttaagagactagcgcacc

SEQ ID NO: 309454 - DNA, 30 bp, Artificial Sequence
  Synthetic oligonucleotide
tggcaatctttccaaagtacgtagcgcacc

SEQ ID NO: 309455 - DNA, 30 bp, Artificial Sequence
  Synthetic oligonucleotide
ggaaatactttcccagggtggcatcgcacc

SEQ ID NO: 309456 - DNA, 30 bp, Artificial Sequence
  Synthetic oligonucleotide
atggatggtctctagtgttgcccaggcacc

SEQ ID NO: 309457 - DNA, 30 bp, Artificial Sequence
  Synthetic oligonucleotide
tcttaaggtaaaatcaagcctcgcggcacc

SEQ ID NO: 309458 - DNA, 30 bp, Artificial Sequence
  Synthetic oligonucleotide
ttgcatgccgaataagcaggaacgggcacc

SEQ ID NO: 309459 - DNA, 30 bp, Artificial Sequence
  Synthetic oligonucleotide
attacagatgcgcaccttaacgtgggcacc

SEQ ID NO: 309460 - DNA, 30 bp, Artificial Sequence
  Synthetic oligonucleotide
gagggcgttagtacgatcacacactgcacc

SEQ ID NO: 309461 - DNA, 30 bp, Artificial Sequence
  Synthetic oligonucleotide
accatactagtagcctccgctagctgcacc

SEQ ID NO: 309462 - DNA, 30 bp, Artificial Sequence
  Synthetic oligonucleotide
acgttatgctttacctaggggcgctgcacc

SEQ ID NO: 309463 - DNA, 30 bp, Artificial Sequence
  Synthetic oligonucleotide
agttgacggttaggctgcagactctgcacc

SEQ ID NO: 309464 - DNA, 30 bp, Artificial Sequence
  Synthetic oligonucleotide
ccaggagacggctacgtgatagtctgcacc

SEQ ID NO: 309465 - DNA, 30 bp, Artificial Sequence
  Synthetic oligonucleotide
atacgttgatttctctggcagataatcacc

SEQ ID NO: 309466 - DNA, 30 bp, Artificial Sequence
  Synthetic oligonucleotide
cattcatgatgcggtgggcatcacatcacc

SEQ ID NO: 309467 - DNA, 30 bp, Artificial Sequence
  Synthetic oligonucleotide
aaagccactctagctagccgaatcatcacc

SEQ ID NO: 309468 - DNA, 31 bp, Artificial Sequence
  Synthetic oligonucleotide
gtgtagtccaacattagcaggtaagatcacc

SEQ ID NO: 309469 - DNA, 30 bp, Artificial Sequence
  Synthetic oligonucleotide
caatgcatgtagaaggttaccccgatcacc

SEQ ID NO: 309470 - DNA, 30 bp, Artificial Sequence
  Synthetic oligonucleotide
ctggtgcctcttaacccatgggcgatcacc

SEQ ID NO: 309471 - DNA, 30 bp, Artificial Sequence
  Synthetic oligonucleotide
atgccctcaagaagataaactgggatcacc

SEQ ID NO: 309472 - DNA, 30 bp, Artificial Sequence
  Synthetic oligonucleotide
gaatacaaaataagagtcgcaaatatcacc

SEQ ID NO: 309473 - DNA, 30 bp, Artificial Sequence
  Synthetic oligonucleotide
catcaatgagagctcggtatacatatcacc

SEQ ID NO: 309474 - DNA, 30 bp, Artificial Sequence
  Synthetic oligonucleotide
ggctgccaggacggttaggaagatatcacc

SEQ ID NO: 309475 - DNA, 30 bp, Artificial Sequence
  Synthetic oligonucleotide
cgcttgttttaatgccatgtatttatcacc

SEQ ID NO: 309476 - DNA, 30 bp, Artificial Sequence
  Synthetic oligonucleotide
taattgtccaggtctctcgaagaactcacc

SEQ ID NO: 309477 - DNA, 30 bp, Artificial Sequence
  Synthetic oligonucleotide
tgaaactcatcggctagacatcccctcacc

SEQ ID NO: 309478 - DNA, 30 bp, Artificial Sequence
  Synthetic oligonucleotide
tggacgccagcaccgcgcagcgaagtcacc

SEQ ID NO: 309479 - DNA, 30 bp, Artificial Sequence
  Synthetic oligonucleotide
taaaccaacactcgctggttaggggtcacc

SEQ ID NO: 309480 - DNA, 30 bp, Artificial Sequence
  Synthetic oligonucleotide
aaacagtacagtcatatcaaatgggtcacc

SEQ ID NO: 309481 - DNA, 30 bp, Artificial Sequence
  Synthetic oligonucleotide
ctttacaaccgtcaaactgttatggtcacc

SEQ ID NO: 309482 - DNA, 30 bp, Artificial Sequence
  Synthetic oligonucleotide
ttattggcttgttcttcgagagttgtcacc

SEQ ID NO: 309483 - DNA, 30 bp, Artificial Sequence
  Synthetic oligonucleotide
cgtggagctctcctaactgaggtattcacc

SEQ ID NO: 309484 - DNA, 30 bp, Artificial Sequence
  Synthetic oligonucleotide
atccgcgttgaagttttggcatccttcacc

SEQ ID NO: 309485 - DNA, 30 bp, Artificial Sequence
  Synthetic oligonucleotide
agacgatgttactctagggcattgttcacc

SEQ ID NO: 309486 - DNA, 30 bp, Artificial Sequence
  Synthetic oligonucleotide
gcagagcacattctcatgggttgtttcacc

SEQ ID NO: 309487 - DNA, 30 bp, Artificial Sequence
  Synthetic oligonucleotide
gtggggcaaatgcgtccttctgcaaagacc

SEQ ID NO: 309488 - DNA, 30 bp, Artificial Sequence
  Synthetic oligonucleotide
gatagtaaagaggaataacgcgacaagacc

SEQ ID NO: 309489 - DNA, 30 bp, Artificial Sequence
  Synthetic oligonucleotide
tgtatctagagctgaaccatttctaagacc

SEQ ID NO: 309490 - DNA, 30 bp, Artificial Sequence
  Synthetic oligonucleotide
ggaggatgtatacactagcgattacagacc

SEQ ID NO: 309491 - DNA, 30 bp, Artificial Sequence
  Synthetic oligonucleotide
atgccgcggttaacgtcccgcccccagacc

SEQ ID NO: 309492 - DNA, 30 bp, Artificial Sequence
  Synthetic oligonucleotide
gtttcgggtgggagcgaacgaaggcagacc

SEQ ID NO: 309493 - DNA, 30 bp, Artificial Sequence
  Synthetic oligonucleotide
tatttggcgggatcttgtaaatggcagacc

SEQ ID NO: 309494 - DNA, 30 bp, Artificial Sequence
  Synthetic oligonucleotide
tgcatctttgttaaaacaccatggcagacc

SEQ ID NO: 309495 - DNA, 30 bp, Artificial Sequence
  Synthetic oligonucleotide
ctgtagcggttccggatggaatatcagacc

SEQ ID NO: 309496 - DNA, 30 bp, Artificial Sequence
  Synthetic oligonucleotide
tcattctggagcggattggtagtagagacc

SEQ ID NO: 309497 - DNA, 30 bp, Artificial Sequence
  Synthetic oligonucleotide
gagacaggggatttgggttacatcgagacc

SEQ ID NO: 309498 - DNA, 30 bp, Artificial Sequence
  Synthetic oligonucleotide
aacggaatccttacaaccggtacggagacc

SEQ ID NO: 309499 - DNA, 30 bp, Artificial Sequence
  Synthetic oligonucleotide
cgatcccacgagtaggacgggatggagacc

SEQ ID NO: 309500 - DNA, 30 bp, Artificial Sequence
  Synthetic oligonucleotide
aagtttaaaccgatgtttacctatgagacc

SEQ ID NO: 309501 - DNA, 30 bp, Artificial Sequence
  Synthetic oligonucleotide
tacggtcgggtaatgataagaagtgagacc

SEQ ID NO: 309502 - DNA, 30 bp, Artificial Sequence
  Synthetic oligonucleotide
tttgattatacatgagaccgacaatagacc

SEQ ID NO: 309503 - DNA, 30 bp, Artificial Sequence
  Synthetic oligonucleotide
ccccaacatgcgagaataaccaactagacc

SEQ ID NO: 309504 - DNA, 30 bp, Artificial Sequence
  Synthetic oligonucleotide
atgagctttctgaagtaatcgtgctagacc

SEQ ID NO: 309505 - DNA, 30 bp, Artificial Sequence
  Synthetic oligonucleotide
gcgtcggccagcacttcgctcgcgtagacc

SEQ ID NO: 309506 - DNA, 30 bp, Artificial Sequence
  Synthetic oligonucleotide
ttgccgtcgggataaacttgacggtagacc

SEQ ID NO: 309507 - DNA, 30 bp, Artificial Sequence
  Synthetic oligonucleotide
ttccaataactcaggtctgaccaaacgacc

SEQ ID NO: 309508 - DNA, 30 bp, Artificial Sequence
  Synthetic oligonucleotide
gagagtctgtccctctttatagaaacgacc

SEQ ID NO: 309509 - DNA, 30 bp, Artificial Sequence
  Synthetic oligonucleotide
acagtatgcgctcgtcacagaagcacgacc

SEQ ID NO: 309510 - DNA, 30 bp, Artificial Sequence
  Synthetic oligonucleotide
cgggtatgtctggacgtacgtgtcacgacc

SEQ ID NO: 309511 - DNA, 30 bp, Artificial Sequence
  Synthetic oligonucleotide
ggtggccgtcgcgctgctggggtgacgacc

SEQ ID NO: 309512 - DNA, 30 bp, Artificial Sequence
  Synthetic oligonucleotide
cctttcatcatgaaaatgatgagtacgacc

SEQ ID NO: 309513 - DNA, 30 bp, Artificial Sequence
  Synthetic oligonucleotide
aatagtaggcaaaatacagaaattacgacc

SEQ ID NO: 309514 - DNA, 30 bp, Artificial Sequence
  Synthetic oligonucleotide
ccgatgtaaacggcgcctcgagcaccgacc

SEQ ID NO: 309515 - DNA, 30 bp, Artificial Sequence
  Synthetic oligonucleotide
ggggtacccgccccgcggggagtgccgacc

SEQ ID NO: 309516 - DNA, 30 bp, Artificial Sequence
  Synthetic oligonucleotide
atagcataggcattgtccctgtaagcgacc

SEQ ID NO: 309517 - DNA, 30 bp, Artificial Sequence
  Synthetic oligonucleotide
aggtacagtagcggaacctagatagcgacc

SEQ ID NO: 309518 - DNA, 30 bp, Artificial Sequence
  Synthetic oligonucleotide
ttaagaagaccgtaaagccacgccgcgacc

SEQ ID NO: 309519 - DNA, 30 bp, Artificial Sequence
  Synthetic oligonucleotide
taggacacgcacctttcgcttcgcgcgacc

SEQ ID NO: 309520 - DNA, 30 bp, Artificial Sequence
  Synthetic oligonucleotide
tcgacatactcaatggcccagtatgcgacc

SEQ ID NO: 309521 - DNA, 30 bp, Artificial Sequence
  Synthetic oligonucleotide
gccaagcagagtcaggtgggaggtgcgacc

SEQ ID NO: 309522 - DNA, 30 bp, Artificial Sequence
  Synthetic oligonucleotide
tattcgtgtgtcgctttagggggatcgacc

SEQ ID NO: 309523 - DNA, 30 bp, Artificial Sequence
  Synthetic oligonucleotide
acattttggctagggatacgttggtcgacc

SEQ ID NO: 309524 - DNA, 30 bp, Artificial Sequence
  Synthetic oligonucleotide
ggtcagcgggagatactggactgttcgacc

SEQ ID NO: 309525 - DNA, 30 bp, Artificial Sequence
  Synthetic oligonucleotide
taagaagacgggtggactccattttcgacc

SEQ ID NO: 309526 - DNA, 30 bp, Artificial Sequence
  Synthetic oligonucleotide
tagtccggaatgaagcggaagcgaaggacc

SEQ ID NO: 309527 - DNA, 30 bp, Artificial Sequence
  Synthetic oligonucleotide
ctcctcagtcgtaccccgtagttaaggacc

SEQ ID NO: 309528 - DNA, 30 bp, Artificial Sequence
  Synthetic oligonucleotide
gagagggctccaatagagctccgcaggacc

SEQ ID NO: 309529 - DNA, 30 bp, Artificial Sequence
  Synthetic oligonucleotide
gcacgttgaagacgggatgtggtcaggacc

SEQ ID NO: 309530 - DNA, 30 bp, Artificial Sequence
  Synthetic oligonucleotide
aacgccccctatgtgatatcaatgaggacc

SEQ ID NO: 309531 - DNA, 30 bp, Artificial Sequence
  Synthetic oligonucleotide
ttgaaaggtttccctttaagtggtaggacc

SEQ ID NO: 309532 - DNA, 30 bp, Artificial Sequence
  Synthetic oligonucleotide
cagtcatggtcgcgtcacccttttaggacc

SEQ ID NO: 309533 - DNA, 30 bp, Artificial Sequence
  Synthetic oligonucleotide
cagatcgaggacgagtagatgaaacggacc

SEQ ID NO: 309534 - DNA, 30 bp, Artificial Sequence
  Synthetic oligonucleotide
cggaagaactggctcatacgaaaccggacc

SEQ ID NO: 309535 - DNA, 30 bp, Artificial Sequence
  Synthetic oligonucleotide
caggagatgttgtcatacagtttccggacc

SEQ ID NO: 309536 - DNA, 30 bp, Artificial Sequence
  Synthetic oligonucleotide
cgtatggagtgctgtttcgccgagcggacc

SEQ ID NO: 309537 - DNA, 30 bp, Artificial Sequence
  Synthetic oligonucleotide
atcggtaataggcggtggttagttcggacc

SEQ ID NO: 309538 - DNA, 30 bp, Artificial Sequence
  Synthetic oligonucleotide
acaatctctaagactacaagtcaagggacc

SEQ ID NO: 309539 - DNA, 30 bp, Artificial Sequence
  Synthetic oligonucleotide
tccacaaagacggctactaccagagggacc

SEQ ID NO: 309540 - DNA, 30 bp, Artificial Sequence
  Synthetic oligonucleotide
atccatttatacaacgggaataacgggacc

SEQ ID NO: 309541 - DNA, 30 bp, Artificial Sequence
  Synthetic oligonucleotide
ttcggttaggccgagcttgcagccgggacc

SEQ ID NO: 309542 - DNA, 30 bp, Artificial Sequence
  Synthetic oligonucleotide
taaacgcggcgcaacgtcactatcgggacc

SEQ ID NO: 309543 - DNA, 30 bp, Artificial Sequence
  Synthetic oligonucleotide
attctataagagtcacgagtggcggggacc

SEQ ID NO: 309544 - DNA, 30 bp, Artificial Sequence
  Synthetic oligonucleotide
ttcgtgaaagtgacaggcatgtctgggacc

SEQ ID NO: 309545 - DNA, 30 bp, Artificial Sequence
  Synthetic oligonucleotide
gtacctctccagtaattgaatgcatggacc

SEQ ID NO: 309546 - DNA, 30 bp, Artificial Sequence
  Synthetic oligonucleotide
gtgagacatactcaagctgggctatggacc

SEQ ID NO: 309547 - DNA, 30 bp, Artificial Sequence
  Synthetic oligonucleotide
ctaaagcgtctgagtaatgcagactggacc

SEQ ID NO: 309548 - DNA, 30 bp, Artificial Sequence
  Synthetic oligonucleotide
atataggcaaatggatctactatgtggacc

SEQ ID NO: 309549 - DNA, 30 bp, Artificial Sequence
  Synthetic oligonucleotide
atgaaatatagcagcttttccttttggacc

SEQ ID NO: 309550 - DNA, 30 bp, Artificial Sequence
  Synthetic oligonucleotide
gccgtatgtaactaaaaacatggaatgacc

SEQ ID NO: 309551 - DNA, 30 bp, Artificial Sequence
  Synthetic oligonucleotide
gcggactggtccaagagttgcgacatgacc

SEQ ID NO: 309552 - DNA, 30 bp, Artificial Sequence
  Synthetic oligonucleotide
atatcttccattaggcacgagcatatgacc

SEQ ID NO: 309553 - DNA, 30 bp, Artificial Sequence
  Synthetic oligonucleotide
tggatcaatattatcgcttgacaactgacc

SEQ ID NO: 309554 - DNA, 30 bp, Artificial Sequence
  Synthetic oligonucleotide
tacgcgcgctaggaagccgaaacactgacc

SEQ ID NO: 309555 - DNA, 30 bp, Artificial Sequence
  Synthetic oligonucleotide
ttgttcttatgcaaagccaaaaacctgacc

SEQ ID NO: 309556 - DNA, 30 bp, Artificial Sequence
  Synthetic oligonucleotide
gtaaggtaggccggggtcagcccgctgacc

SEQ ID NO: 309557 - DNA, 30 bp, Artificial Sequence
  Synthetic oligonucleotide
atccatttttgaggcaaaacggatctgacc

SEQ ID NO: 309558 - DNA, 30 bp, Artificial Sequence
  Synthetic oligonucleotide
ctcagtccaaaaaggtacaaatatctgacc

SEQ ID NO: 309559 - DNA, 30 bp, Artificial Sequence
  Synthetic oligonucleotide
aagaggagtttccagttgggtagtctgacc

SEQ ID NO: 309560 - DNA, 30 bp, Artificial Sequence
  Synthetic oligonucleotide
gaatgcccgcaagtgaccatgaaagtgacc

SEQ ID NO: 309561 - DNA, 30 bp, Artificial Sequence
  Synthetic oligonucleotide
cgatgtaacagaaaagcgtctgaagtgacc

SEQ ID NO: 309562 - DNA, 30 bp, Artificial Sequence
  Synthetic oligonucleotide
gcacagtgtaccaattcattgaccgtgacc

SEQ ID NO: 309563 - DNA, 30 bp, Artificial Sequence
  Synthetic oligonucleotide
gggaacgcgctcataccttactccgtgacc

SEQ ID NO: 309564 - DNA, 30 bp, Artificial Sequence
  Synthetic oligonucleotide
gcaagaacgtgtttagcaggttcggtgacc

SEQ ID NO: 309565 - DNA, 30 bp, Artificial Sequence
  Synthetic oligonucleotide
cacgttgcaaatttctgcaaagatgtgacc

SEQ ID NO: 309566 - DNA, 30 bp, Artificial Sequence
  Synthetic oligonucleotide
aagatacaaaatccctgcttagtattgacc

SEQ ID NO: 309567 - DNA, 30 bp, Artificial Sequence
  Synthetic oligonucleotide
cgattcgttcataacttgtgggacttgacc

SEQ ID NO: 309568 - DNA, 30 bp, Artificial Sequence
  Synthetic oligonucleotide
gtcgattgtctgagtaagtgactcttgacc

SEQ ID NO: 309569 - DNA, 30 bp, Artificial Sequence
  Synthetic oligonucleotide
cttgagcgacggacgggtactccgttgacc

SEQ ID NO: 309570 - DNA, 30 bp, Artificial Sequence
  Synthetic oligonucleotide
gaattgagaagatcggtgcaagctttgacc

SEQ ID NO: 309571 - DNA, 30 bp, Artificial Sequence
  Synthetic oligonucleotide
agatcactaaagggtcaccggagtttgacc

SEQ ID NO: 309572 - DNA, 30 bp, Artificial Sequence
  Synthetic oligonucleotide
catggtggggtcacacagacggagaatacc

SEQ ID NO: 309573 - DNA, 30 bp, Artificial Sequence
  Synthetic oligonucleotide
gtttggaatcgaacaaagactccgaatacc

SEQ ID NO: 309574 - DNA, 30 bp, Artificial Sequence
  Synthetic oligonucleotide
gcaattacacagcgtccttcttcgaatacc

SEQ ID NO: 309575 - DNA, 30 bp, Artificial Sequence
  Synthetic oligonucleotide
taggccttgtcgggcatcaacgggaatacc

SEQ ID NO: 309576 - DNA, 30 bp, Artificial Sequence
  Synthetic oligonucleotide
ggttgtgtgtcagttgcatgacaacatacc

SEQ ID NO: 309577 - DNA, 30 bp, Artificial Sequence
  Synthetic oligonucleotide
gtatggtgacattgtacccacacacatacc

SEQ ID NO: 309578 - DNA, 30 bp, Artificial Sequence
  Synthetic oligonucleotide
agctatgtcgtaagcacatggaggcatacc

SEQ ID NO: 309579 - DNA, 30 bp, Artificial Sequence
  Synthetic oligonucleotide
aagagacctcttacgtgggaatatcatacc

SEQ ID NO: 309580 - DNA, 30 bp, Artificial Sequence
  Synthetic oligonucleotide
tttgtcttgggcagtcgataaactcatacc

SEQ ID NO: 309581 - DNA, 30 bp, Artificial Sequence
  Synthetic oligonucleotide
ccacaggctaagcggcagatacgtcatacc

SEQ ID NO: 309582 - DNA, 30 bp, Artificial Sequence
  Synthetic oligonucleotide
ctgagtaaggttctccttaggcgtcatacc

SEQ ID NO: 309583 - DNA, 30 bp, Artificial Sequence
  Synthetic oligonucleotide
gtcagcgttcgaggagcttattttcatacc

SEQ ID NO: 309584 - DNA, 30 bp, Artificial Sequence
  Synthetic oligonucleotide
gagggtccagtgctcgtttctacagatacc

SEQ ID NO: 309585 - DNA, 30 bp, Artificial Sequence
  Synthetic oligonucleotide
tgaccttaatggtcgtatcaagcagatacc

SEQ ID NO: 309586 - DNA, 30 bp, Artificial Sequence
  Synthetic oligonucleotide
gacttaaagctccaagggttgagagatacc

SEQ ID NO: 309587 - DNA, 30 bp, Artificial Sequence
  Synthetic oligonucleotide
atgcgagtatcggacctccttcgagatacc

SEQ ID NO: 309588 - DNA, 30 bp, Artificial Sequence
  Synthetic oligonucleotide
gaggttaaggcgtgtgctgtaatagatacc

SEQ ID NO: 309589 - DNA, 30 bp, Artificial Sequence
  Synthetic oligonucleotide
tgtaaggctcattgacgcaagctcgatacc

SEQ ID NO: 309590 - DNA, 30 bp, Artificial Sequence
  Synthetic oligonucleotide
aatggatttgattataaatgaaaggatacc

SEQ ID NO: 309591 - DNA, 30 bp, Artificial Sequence
  Synthetic oligonucleotide
ctgggcatcttgggaaggtagaaggatacc

SEQ ID NO: 309592 - DNA, 30 bp, Artificial Sequence
  Synthetic oligonucleotide
tctacgcttgctgagtaagtgagggatacc

SEQ ID NO: 309593 - DNA, 30 bp, Artificial Sequence
  Synthetic oligonucleotide
tattacgctacctatctaaaagctgatacc

SEQ ID NO: 309594 - DNA, 30 bp, Artificial Sequence
  Synthetic oligonucleotide
atcgctatcgagatcgagacacaatatacc

SEQ ID NO: 309595 - DNA, 30 bp, Artificial Sequence
  Synthetic oligonucleotide
atcatcgagcgagggatactatagtatacc

SEQ ID NO: 309596 - DNA, 30 bp, Artificial Sequence
  Synthetic oligonucleotide
gcgagtagaacgccaatggtatcaactacc

SEQ ID NO: 309597 - DNA, 30 bp, Artificial Sequence
  Synthetic oligonucleotide
aaccccacgctatggcgggctaccactacc

SEQ ID NO: 309598 - DNA, 30 bp, Artificial Sequence
  Synthetic oligonucleotide
taattgcagaagaacttcttgagcactacc

SEQ ID NO: 309599 - DNA, 30 bp, Artificial Sequence
  Synthetic oligonucleotide
tatccgttaagccagttggtgccgactacc

SEQ ID NO: 309600 - DNA, 30 bp, Artificial Sequence
  Synthetic oligonucleotide
ctctatcacgtcaaaccttcgagtactacc

SEQ ID NO: 309601 - DNA, 30 bp, Artificial Sequence
  Synthetic oligonucleotide
aacctcggcaatatagtataaggtactacc

SEQ ID NO: 309602 - DNA, 30 bp, Artificial Sequence
  Synthetic oligonucleotide
tgactcatgccagcttttctaatacctacc

SEQ ID NO: 309603 - DNA, 30 bp, Artificial Sequence
  Synthetic oligonucleotide
ccgttaaacaggagagttcaggcccctacc

SEQ ID NO: 309604 - DNA, 30 bp, Artificial Sequence
  Synthetic oligonucleotide
aggtcgcaaccatctgtcgacaatcctacc

SEQ ID NO: 309605 - DNA, 30 bp, Artificial Sequence
  Synthetic oligonucleotide
tgcttagcagcggcacagtttattcctacc

SEQ ID NO: 309606 - DNA, 30 bp, Artificial Sequence
  Synthetic oligonucleotide
gctttcttggacaattcgcccgttcctacc

SEQ ID NO: 309607 - DNA, 30 bp, Artificial Sequence
  Synthetic oligonucleotide
tagtcgatattcaagcgaatgcaggctacc

SEQ ID NO: 309608 - DNA, 30 bp, Artificial Sequence
  Synthetic oligonucleotide
cattcgtatcaacggtcaacaagggctacc

SEQ ID NO: 309609 - DNA, 30 bp, Artificial Sequence
  Synthetic oligonucleotide
ctggatgattgggtcgcgtatcgggctacc

SEQ ID NO: 309610 - DNA, 30 bp, Artificial Sequence
  Synthetic oligonucleotide
ttgaacggagagcccggtaaccatgctacc

SEQ ID NO: 309611 - DNA, 30 bp, Artificial Sequence
  Synthetic oligonucleotide
taaatgtgccggcgggccagatttgctacc

SEQ ID NO: 309612 - DNA, 30 bp, Artificial Sequence
  Synthetic oligonucleotide
ggacgcaaccatccacacgaggactctacc

SEQ ID NO: 309613 - DNA, 30 bp, Artificial Sequence
  Synthetic oligonucleotide
tagagcagtctttcgccgcatacctctacc

SEQ ID NO: 309614 - DNA, 30 bp, Artificial Sequence
  Synthetic oligonucleotide
gagcacgcttcagggaatgcaatctctacc

SEQ ID NO: 309615 - DNA, 30 bp, Artificial Sequence
  Synthetic oligonucleotide
gtcccataagcattctgcggcgggtctacc

SEQ ID NO: 309616 - DNA, 30 bp, Artificial Sequence
  Synthetic oligonucleotide
tataattgtatactttatcaaacttctacc

SEQ ID NO: 309617 - DNA, 30 bp, Artificial Sequence
  Synthetic oligonucleotide
ctaaaatagtcttgcactaaataaagtacc

SEQ ID NO: 309618 - DNA, 30 bp, Artificial Sequence
  Synthetic oligonucleotide
gtagttttccatcagggcatggcaagtacc

SEQ ID NO: 309619 - DNA, 30 bp, Artificial Sequence
  Synthetic oligonucleotide
ccccggacagatgatgttgatggcagtacc

SEQ ID NO: 309620 - DNA, 30 bp, Artificial Sequence
  Synthetic oligonucleotide
gacctcgtctgcaaacggattttgagtacc

SEQ ID NO: 309621 - DNA, 30 bp, Artificial Sequence
  Synthetic oligonucleotide
atcccaaatgtagcaggaggacatagtacc

SEQ ID NO: 309622 - DNA, 30 bp, Artificial Sequence
  Synthetic oligonucleotide
atgtacggaaagggagtgtcataacgtacc

SEQ ID NO: 309623 - DNA, 30 bp, Artificial Sequence
  Synthetic oligonucleotide
acaaatcaagcccacttgatttatcgtacc

SEQ ID NO: 309624 - DNA, 30 bp, Artificial Sequence
  Synthetic oligonucleotide
gatacttctgcgagttcaatggttcgtacc

SEQ ID NO: 309625 - DNA, 30 bp, Artificial Sequence
  Synthetic oligonucleotide
gcgggggatcgttgtaatctacgaggtacc

SEQ ID NO: 309626 - DNA, 30 bp, Artificial Sequence
  Synthetic oligonucleotide
cagcctacccagccacacttaggaggtacc

SEQ ID NO: 309627 - DNA, 30 bp, Artificial Sequence
  Synthetic oligonucleotide
acttcgtgaacccagtattcggtaggtacc

SEQ ID NO: 309628 - DNA, 30 bp, Artificial Sequence
  Synthetic oligonucleotide
agaactgtttcaagatgctaaagcggtacc

SEQ ID NO: 309629 - DNA, 30 bp, Artificial Sequence
  Synthetic oligonucleotide
gggagtaaaagggttatatatggcggtacc

SEQ ID NO: 309630 - DNA, 30 bp, Artificial Sequence
  Synthetic oligonucleotide
gaaggggaggaattatatttagggggtacc

SEQ ID NO: 309631 - DNA, 30 bp, Artificial Sequence
  Synthetic oligonucleotide
tgtgtatgttgtcagcataaaatgggtacc

SEQ ID NO: 309632 - DNA, 30 bp, Artificial Sequence
  Synthetic oligonucleotide
aagtcattacgactttaaccgtatggtacc

SEQ ID NO: 309633 - DNA, 30 bp, Artificial Sequence
  Synthetic oligonucleotide
cttagttctgttttggagtttgctggtacc

SEQ ID NO: 309634 - DNA, 31 bp, Artificial Sequence
  Synthetic oligonucleotide
ggttaaaccagtctgggcaagaggtggtacc

SEQ ID NO: 309635 - DNA, 30 bp, Artificial Sequence
  Synthetic oligonucleotide
accatgcgaaaagcaccttggaaatgtacc

SEQ ID NO: 309636 - DNA, 30 bp, Artificial Sequence
  Synthetic oligonucleotide
ctttgttgaatgtcgaaagtgtaatgtacc

SEQ ID NO: 309637 - DNA, 30 bp, Artificial Sequence
  Synthetic oligonucleotide
agctatgcagccaaccggctcccatgtacc

SEQ ID NO: 309638 - DNA, 31 bp, Artificial Sequence
  Synthetic oligonucleotide
aagttccaacgcagtgtaaggatgatgtacc

SEQ ID NO: 309639 - DNA, 30 bp, Artificial Sequence
  Synthetic oligonucleotide
atatgatggtaattggaacacgtatgtacc

SEQ ID NO: 309640 - DNA, 30 bp, Artificial Sequence
  Synthetic oligonucleotide
aatggttaaagggagtgcgtatactgtacc

SEQ ID NO: 309641 - DNA, 30 bp, Artificial Sequence
  Synthetic oligonucleotide
atgctctgatatgtagtgatagcgtgtacc

SEQ ID NO: 309642 - DNA, 30 bp, Artificial Sequence
  Synthetic oligonucleotide
atggcctacttgacaagccagaggtgtacc

SEQ ID NO: 309643 - DNA, 30 bp, Artificial Sequence
  Synthetic oligonucleotide
cgccggctcgagtgagctcggaattgtacc

SEQ ID NO: 309644 - DNA, 30 bp, Artificial Sequence
  Synthetic oligonucleotide
acctggttcttagatttggtgtattgtacc

SEQ ID NO: 309645 - DNA, 30 bp, Artificial Sequence
  Synthetic oligonucleotide
cgacgcaaatgcgtacttaaatcaattacc

SEQ ID NO: 309646 - DNA, 30 bp, Artificial Sequence
  Synthetic oligonucleotide
accaaggcctactggcgcctattaattacc

SEQ ID NO: 309647 - DNA, 30 bp, Artificial Sequence
  Synthetic oligonucleotide
tccaccaggagatctgattctaagattacc

SEQ ID NO: 309648 - DNA, 31 bp, Artificial Sequence
  Synthetic oligonucleotide
caatggtctgtcgggactattgacgattacc

SEQ ID NO: 309649 - DNA, 30 bp, Artificial Sequence
  Synthetic oligonucleotide
cccacacatacgagaggccatccgattacc

SEQ ID NO: 309650 - DNA, 30 bp, Artificial Sequence
  Synthetic oligonucleotide
tattacaatgattgagtatatgtgattacc

SEQ ID NO: 309651 - DNA, 30 bp, Artificial Sequence
  Synthetic oligonucleotide
gtagcaccactggagtatttgagtattacc

SEQ ID NO: 309652 - DNA, 30 bp, Artificial Sequence
  Synthetic oligonucleotide
ggggcaggggtcaatcaatttgcacttacc

SEQ ID NO: 309653 - DNA, 30 bp, Artificial Sequence
  Synthetic oligonucleotide
aatagcggtttttaatggtgccagcttacc

SEQ ID NO: 309654 - DNA, 30 bp, Artificial Sequence
  Synthetic oligonucleotide
acaagttcgggggtaactagagttcttacc

SEQ ID NO: 309655 - DNA, 30 bp, Artificial Sequence
  Synthetic oligonucleotide
gaaggacactgttctacctacagagttacc

SEQ ID NO: 309656 - DNA, 30 bp, Artificial Sequence
  Synthetic oligonucleotide
gtcccgttacggcccaaaggaaatgttacc

SEQ ID NO: 309657 - DNA, 30 bp, Artificial Sequence
  Synthetic oligonucleotide
acttggcccctaacgctatacgatgttacc

SEQ ID NO: 309658 - DNA, 30 bp, Artificial Sequence
  Synthetic oligonucleotide
aacttagaggtgtctcctctggctgttacc

SEQ ID NO: 309659 - DNA, 30 bp, Artificial Sequence
  Synthetic oligonucleotide
aatcctactgaggatgtacctttctttacc

SEQ ID NO: 309660 - DNA, 30 bp, Artificial Sequence
  Synthetic oligonucleotide
gcatgtaatcagcgggtttctgcgtttacc

SEQ ID NO: 309661 - DNA, 30 bp, Artificial Sequence
  Synthetic oligonucleotide
cccgtcagttaatttggcatggcaaaaccc

SEQ ID NO: 309662 - DNA, 30 bp, Artificial Sequence
  Synthetic oligonucleotide
aagtgtcatgtatacactgtgggaaaaccc

SEQ ID NO: 309663 - DNA, 30 bp, Artificial Sequence
  Synthetic oligonucleotide
ctatggggtcattactcactagggaaaccc

SEQ ID NO: 309664 - DNA, 30 bp, Artificial Sequence
  Synthetic oligonucleotide
tgcatggacacgaaactccgaacacaaccc

SEQ ID NO: 309665 - DNA, 30 bp, Artificial Sequence
  Synthetic oligonucleotide
agtccaaggacgccacacttaggacaaccc

SEQ ID NO: 309666 - DNA, 30 bp, Artificial Sequence
  Synthetic oligonucleotide
ctgtggctcccggttgagggcggacaaccc

SEQ ID NO: 309667 - DNA, 30 bp, Artificial Sequence
  Synthetic oligonucleotide
gttggggaggcggttagcagaaagcaaccc

SEQ ID NO: 309668 - DNA, 30 bp, Artificial Sequence
  Synthetic oligonucleotide
gggtagacgacgcggtgcgtatggcaaccc

SEQ ID NO: 309669 - DNA, 29 bp, Artificial Sequence
  Synthetic oligonucleotide
caacccgaattctacctcgccctcaaccc

SEQ ID NO: 309670 - DNA, 30 bp, Artificial Sequence
  Synthetic oligonucleotide
cccgttctggagatgatgatcattcaaccc

SEQ ID NO: 309671 - DNA, 30 bp, Artificial Sequence
  Synthetic oligonucleotide
ttgtcctggaaattccacaggattcaaccc

SEQ ID NO: 309672 - DNA, 30 bp, Artificial Sequence
  Synthetic oligonucleotide
caaatgtgcaactaatccatggcagaaccc

SEQ ID NO: 309673 - DNA, 30 bp, Artificial Sequence
  Synthetic oligonucleotide
tatcaatagacacgctaataatgcgaaccc

SEQ ID NO: 309674 - DNA, 30 bp, Artificial Sequence
  Synthetic oligonucleotide
gtcctaaccattgcagtggggggataaccc

SEQ ID NO: 309675 - DNA, 30 bp, Artificial Sequence
  Synthetic oligonucleotide
gtcatatcagagctagccaagatctaaccc

SEQ ID NO: 309676 - DNA, 30 bp, Artificial Sequence
  Synthetic oligonucleotide
tgcatcgtcatgcaggtgctcatgtaaccc

SEQ ID NO: 309677 - DNA, 30 bp, Artificial Sequence
  Synthetic oligonucleotide
gtgcgtttagcaatttacgggcgaacaccc

SEQ ID NO: 309678 - DNA, 30 bp, Artificial Sequence
  Synthetic oligonucleotide
ttaggagcaactattgctcatgtaacaccc

SEQ ID NO: 309679 - DNA, 30 bp, Artificial Sequence
  Synthetic oligonucleotide
tacgttctctacgtttgtaaaaatacaccc

SEQ ID NO: 309680 - DNA, 30 bp, Artificial Sequence
  Synthetic oligonucleotide
agtgtcgccacacaacagcccggaccaccc

SEQ ID NO: 309681 - DNA, 30 bp, Artificial Sequence
  Synthetic oligonucleotide
cggctattcgttaacctgttttacccaccc

SEQ ID NO: 309682 - DNA, 30 bp, Artificial Sequence
  Synthetic oligonucleotide
tcccgaaggagctcgattaggcctccaccc

SEQ ID NO: 309683 - DNA, 30 bp, Artificial Sequence
  Synthetic oligonucleotide
ccccagggtctacgaggtctcatagcaccc

SEQ ID NO: 309684 - DNA, 30 bp, Artificial Sequence
  Synthetic oligonucleotide
gagtggcacgacgattaacagtgcgcaccc

SEQ ID NO: 309685 - DNA, 30 bp, Artificial Sequence
  Synthetic oligonucleotide
taatagacccggcgagtactataggcaccc

SEQ ID NO: 309686 - DNA, 30 bp, Artificial Sequence
  Synthetic oligonucleotide
acttgcggtgcgatcgggtggacggcaccc

SEQ ID NO: 309687 - DNA, 30 bp, Artificial Sequence
  Synthetic oligonucleotide
caatcagtggaaatatgcaattatgcaccc

SEQ ID NO: 309688 - DNA, 30 bp, Artificial Sequence
  Synthetic oligonucleotide
ctgcaggaggatcagtgaatttaatcaccc

SEQ ID NO: 309689 - DNA, 30 bp, Artificial Sequence
  Synthetic oligonucleotide
tatagtcgcaatgtggggcagtactcaccc

SEQ ID NO: 309690 - DNA, 30 bp, Artificial Sequence
  Synthetic oligonucleotide
gaatatccacgatgtaagttttagtcaccc

SEQ ID NO: 309691 - DNA, 30 bp, Artificial Sequence
  Synthetic oligonucleotide
ttacttgcgggggttgcttaaacgtcaccc

SEQ ID NO: 309692 - DNA, 30 bp, Artificial Sequence
  Synthetic oligonucleotide
actagcgtagtatgaaaacgcaattcaccc

SEQ ID NO: 309693 - DNA, 30 bp, Artificial Sequence
  Synthetic oligonucleotide
tctccgttagtctctctcatcaacagaccc

SEQ ID NO: 309694 - DNA, 30 bp, Artificial Sequence
  Synthetic oligonucleotide
tgttacttagactctctctacaagagaccc

SEQ ID NO: 309695 - DNA, 29 bp, Artificial Sequence
  Synthetic oligonucleotide
agggtaagctcgtcaagtgtaagagaccc

SEQ ID NO: 309696 - DNA, 30 bp, Artificial Sequence
  Synthetic oligonucleotide
ccgggttgagggtatcatgcgtagagaccc

SEQ ID NO: 309697 - DNA, 30 bp, Artificial Sequence
  Synthetic oligonucleotide
ggtatgtcgaacagggaaccctggagaccc

SEQ ID NO: 309698 - DNA, 30 bp, Artificial Sequence
  Synthetic oligonucleotide
ctaaatatttttataatagtttggagaccc

SEQ ID NO: 309699 - DNA, 30 bp, Artificial Sequence
  Synthetic oligonucleotide
cgccggtggccagtagaaaaaatgagaccc

SEQ ID NO: 309700 - DNA, 30 bp, Artificial Sequence
  Synthetic oligonucleotide
acatgccttaaaagctgtaataatagaccc

SEQ ID NO: 309701 - DNA, 29 bp, Artificial Sequence
  Synthetic oligonucleotide
ttaaaaagtatagatgaacacaacgaccc

SEQ ID NO: 309702 - DNA, 30 bp, Artificial Sequence
  Synthetic oligonucleotide
atgggtgaattacgttataattcgcgaccc

SEQ ID NO: 309703 - DNA, 30 bp, Artificial Sequence
  Synthetic oligonucleotide
cggggatttactaattgactttcgcgaccc

SEQ ID NO: 309704 - DNA, 30 bp, Artificial Sequence
  Synthetic oligonucleotide
aggtattcgtaggactagcgctccggaccc

SEQ ID NO: 309705 - DNA, 30 bp, Artificial Sequence
  Synthetic oligonucleotide
ttgtcggtcttggccgcgaacctcggaccc

SEQ ID NO: 309706 - DNA, 30 bp, Artificial Sequence
  Synthetic oligonucleotide
caagtttcatgggcgttaggggtcggaccc

SEQ ID NO: 309707 - DNA, 30 bp, Artificial Sequence
  Synthetic oligonucleotide
ctacaggacaagaacagattcgagggaccc

SEQ ID NO: 309708 - DNA, 30 bp, Artificial Sequence
  Synthetic oligonucleotide
ctctcaccccttacaacctgcaggggaccc

SEQ ID NO: 309709 - DNA, 30 bp, Artificial Sequence
  Synthetic oligonucleotide
ttagcgattgtcttagtcctgttgggaccc

SEQ ID NO: 309710 - DNA, 30 bp, Artificial Sequence
  Synthetic oligonucleotide
gcaagagcaataaaagttaccgatggaccc

SEQ ID NO: 309711 - DNA, 30 bp, Artificial Sequence
  Synthetic oligonucleotide
taatccatgaggctttaatctgaatgaccc

SEQ ID NO: 309712 - DNA, 30 bp, Artificial Sequence
  Synthetic oligonucleotide
cactgacccccgcgtaagattagatgaccc

SEQ ID NO: 309713 - DNA, 30 bp, Artificial Sequence
  Synthetic oligonucleotide
gtatgagcccatatacaacagtagtgaccc

SEQ ID NO: 309714 - DNA, 30 bp, Artificial Sequence
  Synthetic oligonucleotide
aaagtgcccttcgcacgtcagacaataccc

SEQ ID NO: 309715 - DNA, 30 bp, Artificial Sequence
  Synthetic oligonucleotide
accaaacaagggatatcaggttcaataccc

SEQ ID NO: 309716 - DNA, 30 bp, Artificial Sequence
  Synthetic oligonucleotide
cgacctgttgatgcataccaaggcataccc

SEQ ID NO: 309717 - DNA, 30 bp, Artificial Sequence
  Synthetic oligonucleotide
atagcgcggtaccgagcgtcgttactaccc

SEQ ID NO: 309718 - DNA, 30 bp, Artificial Sequence
  Synthetic oligonucleotide
tcccgggaggaacacagaacggtgctaccc

SEQ ID NO: 309719 - DNA, 30 bp, Artificial Sequence
  Synthetic oligonucleotide
gtaaaaatatcgccgtcttaaaatctaccc

SEQ ID NO: 309720 - DNA, 30 bp, Artificial Sequence
  Synthetic oligonucleotide
gagccaagtagcgcttggtggtgagtaccc

SEQ ID NO: 309721 - DNA, 30 bp, Artificial Sequence
  Synthetic oligonucleotide
cgtgcgaggtgccgcaaactgtgagtaccc

SEQ ID NO: 309722 - DNA, 30 bp, Artificial Sequence
  Synthetic oligonucleotide
gccaccataagtggcgagagcttagtaccc

SEQ ID NO: 309723 - DNA, 30 bp, Artificial Sequence
  Synthetic oligonucleotide
ttctcagcttggaggagatgtggcgtaccc

SEQ ID NO: 309724 - DNA, 30 bp, Artificial Sequence
  Synthetic oligonucleotide
gtcgggtattgcgcacagcacccattaccc

SEQ ID NO: 309725 - DNA, 30 bp, Artificial Sequence
  Synthetic oligonucleotide
gctcagaaggtgcgtttcggttggttaccc

SEQ ID NO: 309726 - DNA, 30 bp, Artificial Sequence
  Synthetic oligonucleotide
tgtagaaagacccacctcaccgctttaccc

SEQ ID NO: 309727 - DNA, 30 bp, Artificial Sequence
  Synthetic oligonucleotide
acaccgtccagcgacgggccaggtttaccc

SEQ ID NO: 309728 - DNA, 30 bp, Artificial Sequence
  Synthetic oligonucleotide
catattccaggacgtgctggatacaacccc

SEQ ID NO: 309729 - DNA, 30 bp, Artificial Sequence
  Synthetic oligonucleotide
gtaatactggtatggcccggtacacacccc

SEQ ID NO: 309730 - DNA, 30 bp, Artificial Sequence
  Synthetic oligonucleotide
tcagctccagttagtgaccattgacacccc

SEQ ID NO: 309731 - DNA, 30 bp, Artificial Sequence
  Synthetic oligonucleotide
tccgtacatgttggagaattactacacccc

SEQ ID NO: 309732 - DNA, 30 bp, Artificial Sequence
  Synthetic oligonucleotide
acttgagcgccagattaagggttccacccc

SEQ ID NO: 309733 - DNA, 30 bp, Artificial Sequence
  Synthetic oligonucleotide
gaaatctgtgacacggaaaatgagcacccc

SEQ ID NO: 309734 - DNA, 30 bp, Artificial Sequence
  Synthetic oligonucleotide
ttactgggtctcaaaaatgctggtcacccc

SEQ ID NO: 309735 - DNA, 30 bp, Artificial Sequence
  Synthetic oligonucleotide
ggcacaatgtacgcaccacggcccgacccc

SEQ ID NO: 309736 - DNA, 26 bp, Artificial Sequence
  Synthetic oligonucleotide
agcccagtgcaaaggctgcatacccc

SEQ ID NO: 309737 - DNA, 30 bp, Artificial Sequence
  Synthetic oligonucleotide
gtagtgggtagcgaagctctgcgatacccc

SEQ ID NO: 309738 - DNA, 30 bp, Artificial Sequence
  Synthetic oligonucleotide
acacagttagggtccgtcttaacgtacccc

SEQ ID NO: 309739 - DNA, 30 bp, Artificial Sequence
  Synthetic oligonucleotide
gtttgaatcacaaagcaaacattgtacccc

SEQ ID NO: 309740 - DNA, 30 bp, Artificial Sequence
  Synthetic oligonucleotide
acgtgtcagtcagtcgactgaccaaccccc

SEQ ID NO: 309741 - DNA, 30 bp, Artificial Sequence
  Synthetic oligonucleotide
gaccccgcttgacgacaaaataccaccccc

SEQ ID NO: 309742 - DNA, 30 bp, Artificial Sequence
  Synthetic oligonucleotide
ttagggtagcgtgatacctgaaagaccccc

SEQ ID NO: 309743 - DNA, 30 bp, Artificial Sequence
  Synthetic oligonucleotide
gagcagtagcgtgtaacgcctctacccccc

SEQ ID NO: 309744 - DNA, 30 bp, Artificial Sequence
  Synthetic oligonucleotide
ttcatagcattgggatgggtgaaccccccc

SEQ ID NO: 309745 - DNA, 30 bp, Artificial Sequence
  Synthetic oligonucleotide
agtaagcgatgaatgttacgtacccccccc

SEQ ID NO: 309746 - DNA, 30 bp, Artificial Sequence
  Synthetic oligonucleotide
tgagttcgcgggctgttcgggaagcccccc

SEQ ID NO: 309747 - DNA, 30 bp, Artificial Sequence
  Synthetic oligonucleotide
ggaccataacaggggattgtgggtcccccc

SEQ ID NO: 309748 - DNA, 30 bp, Artificial Sequence
  Synthetic oligonucleotide
tgtacttcaagaatgtaaggggttcccccc

SEQ ID NO: 309749 - DNA, 30 bp, Artificial Sequence
  Synthetic oligonucleotide
gcggacaggtgctggtgaagaccagccccc

SEQ ID NO: 309750 - DNA, 30 bp, Artificial Sequence
  Synthetic oligonucleotide
gtgatgtgcgtgaaactcagcgtagccccc

SEQ ID NO: 309751 - DNA, 30 bp, Artificial Sequence
  Synthetic oligonucleotide
tgttctgtattgctggagccacacgccccc

SEQ ID NO: 309752 - DNA, 30 bp, Artificial Sequence
  Synthetic oligonucleotide
ccttagatgttttgctcgccatgcgccccc

SEQ ID NO: 309753 - DNA, 30 bp, Artificial Sequence
  Synthetic oligonucleotide
aaaagtaaaaagcgagaactgtaggccccc

SEQ ID NO: 309754 - DNA, 30 bp, Artificial Sequence
  Synthetic oligonucleotide
atcatttcgagggcatgagcttaggccccc

SEQ ID NO: 309755 - DNA, 30 bp, Artificial Sequence
  Synthetic oligonucleotide
cagcaactatacaagcctctcagggccccc

SEQ ID NO: 309756 - DNA, 30 bp, Artificial Sequence
  Synthetic oligonucleotide
tcaattccggggttgtcggtcatggccccc

SEQ ID NO: 309757 - DNA, 30 bp, Artificial Sequence
  Synthetic oligonucleotide
cgtggcccgaatggcaagaatgcatccccc

SEQ ID NO: 309758 - DNA, 30 bp, Artificial Sequence
  Synthetic oligonucleotide
ggaggaaatttatggaagggggtatccccc

SEQ ID NO: 309759 - DNA, 30 bp, Artificial Sequence
  Synthetic oligonucleotide
tataatcgtagctcatattggaactccccc

SEQ ID NO: 309760 - DNA, 30 bp, Artificial Sequence
  Synthetic oligonucleotide
ccctaaatatcctccaaaaagtggtccccc

SEQ ID NO: 309761 - DNA, 30 bp, Artificial Sequence
  Synthetic oligonucleotide
ggaaatcgtccattattctatagttccccc

SEQ ID NO: 309762 - DNA, 30 bp, Artificial Sequence
  Synthetic oligonucleotide
atatattggcacgaagtccacaacagcccc

SEQ ID NO: 309763 - DNA, 30 bp, Artificial Sequence
  Synthetic oligonucleotide
gcaaacttatgatgtattcacgacagcccc

SEQ ID NO: 309764 - DNA, 30 bp, Artificial Sequence
  Synthetic oligonucleotide
ggacccaaaagtgttctgggcaatagcccc

SEQ ID NO: 309765 - DNA, 30 bp, Artificial Sequence
  Synthetic oligonucleotide
aaggaggtattactttaaagagatagcccc

SEQ ID NO: 309766 - DNA, 30 bp, Artificial Sequence
  Synthetic oligonucleotide
ttgtataccgcttgagggaggactagcccc

SEQ ID NO: 309767 - DNA, 30 bp, Artificial Sequence
  Synthetic oligonucleotide
gcggatccgtatgccgggttatctagcccc

SEQ ID NO: 309768 - DNA, 30 bp, Artificial Sequence
  Synthetic oligonucleotide
tccggtctctagattgaaacaattagcccc

SEQ ID NO: 309769 - DNA, 30 bp, Artificial Sequence
  Synthetic oligonucleotide
aacggcccgacggggccagagacccgcccc

SEQ ID NO: 309770 - DNA, 30 bp, Artificial Sequence
  Synthetic oligonucleotide
aaccaagtccattcataacgtgcgcgcccc

SEQ ID NO: 309771 - DNA, 30 bp, Artificial Sequence
  Synthetic oligonucleotide
gccgatgaaggcggcgcaggatcgcgcccc

SEQ ID NO: 309772 - DNA, 30 bp, Artificial Sequence
  Synthetic oligonucleotide
atgactgattcaccacttatctcgcgcccc

SEQ ID NO: 309773 - DNA, 30 bp, Artificial Sequence
  Synthetic oligonucleotide
cgaccgcgcaatgcgggacacgaaggcccc

SEQ ID NO: 309774 - DNA, 30 bp, Artificial Sequence
  Synthetic oligonucleotide
gcgagggggaagtctcgatcgtaaggcccc

SEQ ID NO: 309775 - DNA, 30 bp, Artificial Sequence
  Synthetic oligonucleotide
gtggccggatgtgcaccattacacggcccc

SEQ ID NO: 309776 - DNA, 30 bp, Artificial Sequence
  Synthetic oligonucleotide
cataacttcacagatcggaccatgggcccc

SEQ ID NO: 309777 - DNA, 30 bp, Artificial Sequence
  Synthetic oligonucleotide
accacggctcaccgcgtgtttttgggcccc

SEQ ID NO: 309778 - DNA, 30 bp, Artificial Sequence
  Synthetic oligonucleotide
caagatactgagtaggcatctagtggcccc

SEQ ID NO: 309779 - DNA, 30 bp, Artificial Sequence
  Synthetic oligonucleotide
gttaggcgcggatcagtcttgggatgcccc

SEQ ID NO: 309780 - DNA, 30 bp, Artificial Sequence
  Synthetic oligonucleotide
gcattggccattagaaccactctatgcccc

SEQ ID NO: 309781 - DNA, 30 bp, Artificial Sequence
  Synthetic oligonucleotide
agtcaattgtttttcatgaagcactgcccc

SEQ ID NO: 309782 - DNA, 31 bp, Artificial Sequence
  Synthetic oligonucleotide
tgatcaagcaacgctagattggaaaatcccc

SEQ ID NO: 309783 - DNA, 30 bp, Artificial Sequence
  Synthetic oligonucleotide
gagtgaggagtgggacgagctcaaatcccc

SEQ ID NO: 309784 - DNA, 30 bp, Artificial Sequence
  Synthetic oligonucleotide
tgtgtagttatgtgcctcgctccaatcccc

SEQ ID NO: 309785 - DNA, 30 bp, Artificial Sequence
  Synthetic oligonucleotide
ctatagctggcgccagtgcccgggatcccc

SEQ ID NO: 309786 - DNA, 30 bp, Artificial Sequence
  Synthetic oligonucleotide
ttggagctggtcctcacggccgccctcccc

SEQ ID NO: 309787 - DNA, 30 bp, Artificial Sequence
  Synthetic oligonucleotide
cgcgtaacgtacatttggcggctagtcccc

SEQ ID NO: 309788 - DNA, 30 bp, Artificial Sequence
  Synthetic oligonucleotide
ctaagagactgaacgaagcgctaggtcccc

SEQ ID NO: 309789 - DNA, 30 bp, Artificial Sequence
  Synthetic oligonucleotide
tcgctagaccggaatcaattacgggtcccc

SEQ ID NO: 309790 - DNA, 30 bp, Artificial Sequence
  Synthetic oligonucleotide
gggtctatgaacgcctcgaccggggtcccc

SEQ ID NO: 309791 - DNA, 30 bp, Artificial Sequence
  Synthetic oligonucleotide
gatgcatccgtcacttggattgctgtcccc

SEQ ID NO: 309792 - DNA, 30 bp, Artificial Sequence
  Synthetic oligonucleotide
cctttacatcgcgactctggaagtgtcccc

SEQ ID NO: 309793 - DNA, 30 bp, Artificial Sequence
  Synthetic oligonucleotide
tgcttagtcgaacgcgctgccagcttcccc

SEQ ID NO: 309794 - DNA, 30 bp, Artificial Sequence
  Synthetic oligonucleotide
cgtggttagccgttataagtccagttcccc

SEQ ID NO: 309795 - DNA, 30 bp, Artificial Sequence
  Synthetic oligonucleotide
tccggtaccgcgtcgggaatccggttcccc

SEQ ID NO: 309796 - DNA, 30 bp, Artificial Sequence
  Synthetic oligonucleotide
ggagcatcgctcaactatgcctatttcccc

SEQ ID NO: 309797 - DNA, 30 bp, Artificial Sequence
  Synthetic oligonucleotide
acaaatatagaacacggacttcgtttcccc

SEQ ID NO: 309798 - DNA, 30 bp, Artificial Sequence
  Synthetic oligonucleotide
gacccccaacacgtgtgtgcgcgcaagccc

SEQ ID NO: 309799 - DNA, 30 bp, Artificial Sequence
  Synthetic oligonucleotide
gaagagatatgagacatacctttcaagccc

SEQ ID NO: 309800 - DNA, 30 bp, Artificial Sequence
  Synthetic oligonucleotide
ctccgagcgttcaacaaggttgtgaagccc

SEQ ID NO: 309801 - DNA, 30 bp, Artificial Sequence
  Synthetic oligonucleotide
aggtactggagaatccacctttctaagccc

SEQ ID NO: 309802 - DNA, 30 bp, Artificial Sequence
  Synthetic oligonucleotide
gtccctcgccaagtgaggtgccttaagccc

SEQ ID NO: 309803 - DNA, 30 bp, Artificial Sequence
  Synthetic oligonucleotide
tatcttagcggaaaagattgtttccagccc

SEQ ID NO: 309804 - DNA, 30 bp, Artificial Sequence
  Synthetic oligonucleotide
gaagtaggtacgagagcgggatagcagccc

SEQ ID NO: 309805 - DNA, 30 bp, Artificial Sequence
  Synthetic oligonucleotide
ataacctggcccaagtgggctatgcagccc

SEQ ID NO: 309806 - DNA, 30 bp, Artificial Sequence
  Synthetic oligonucleotide
ctcacctgggggtgggtaagacaagagccc

SEQ ID NO: 309807 - DNA, 30 bp, Artificial Sequence
  Synthetic oligonucleotide
ttgatttcgtagaaattttatcccgagccc

SEQ ID NO: 309808 - DNA, 30 bp, Artificial Sequence
  Synthetic oligonucleotide
cgccgaagattaagaactgctggcgagccc

SEQ ID NO: 309809 - DNA, 30 bp, Artificial Sequence
  Synthetic oligonucleotide
ataaggtagggtcggggggggccggagccc

SEQ ID NO: 309810 - DNA, 30 bp, Artificial Sequence
  Synthetic oligonucleotide
catacagagaggcaccaagagtcggagccc

SEQ ID NO: 309811 - DNA, 30 bp, Artificial Sequence
  Synthetic oligonucleotide
aagtgaacaattaatgctctcggctagccc

SEQ ID NO: 309812 - DNA, 30 bp, Artificial Sequence
  Synthetic oligonucleotide
accctcaaagttagtaataaggcgtagccc

SEQ ID NO: 309813 - DNA, 30 bp, Artificial Sequence
  Synthetic oligonucleotide
tacttgtgttcgggaaaccaatggtagccc

SEQ ID NO: 309814 - DNA, 30 bp, Artificial Sequence
  Synthetic oligonucleotide
ataagctctgaatcgaataggtattagccc

SEQ ID NO: 309815 - DNA, 30 bp, Artificial Sequence
  Synthetic oligonucleotide
tagattcgatgtatggtcttcggcacgccc

SEQ ID NO: 309816 - DNA, 30 bp, Artificial Sequence
  Synthetic oligonucleotide
atgggcccgtagatgcagccgacgacgccc

SEQ ID NO: 309817 - DNA, 30 bp, Artificial Sequence
  Synthetic oligonucleotide
gtgctaggaggcggagtaactacgacgccc

SEQ ID NO: 309818 - DNA, 30 bp, Artificial Sequence
  Synthetic oligonucleotide
agaggatcgtggtcaggaggcttgacgccc

SEQ ID NO: 309819 - DNA, 30 bp, Artificial Sequence
  Synthetic oligonucleotide
acagtccgaacctgtagttgctctacgccc

SEQ ID NO: 309820 - DNA, 30 bp, Artificial Sequence
  Synthetic oligonucleotide
tcactggagtaatcaaaacattgtacgccc

SEQ ID NO: 309821 - DNA, 30 bp, Artificial Sequence
  Synthetic oligonucleotide
gggctggagccgtgaactatggttacgccc

SEQ ID NO: 309822 - DNA, 30 bp, Artificial Sequence
  Synthetic oligonucleotide
gatactcgggcgttagccaatccaccgccc

SEQ ID NO: 309823 - DNA, 30 bp, Artificial Sequence
  Synthetic oligonucleotide
gggatcgagtaccctcatctttagccgccc

SEQ ID NO: 309824 - DNA, 30 bp, Artificial Sequence
  Synthetic oligonucleotide
acagcctctctagataatcaaggtgcgccc

SEQ ID NO: 309825 - DNA, 30 bp, Artificial Sequence
  Synthetic oligonucleotide
ggtgtacacgtaggcggtgttggtgcgccc

SEQ ID NO: 309826 - DNA, 30 bp, Artificial Sequence
  Synthetic oligonucleotide
acaatcgcaacgcaacatgctattgcgccc

SEQ ID NO: 309827 - DNA, 30 bp, Artificial Sequence
  Synthetic oligonucleotide
agcactttattaataccaaccaaatcgccc

SEQ ID NO: 309828 - DNA, 30 bp, Artificial Sequence
  Synthetic oligonucleotide
tatccgattacctgaaggcgtacatcgccc

SEQ ID NO: 309829 - DNA, 30 bp, Artificial Sequence
  Synthetic oligonucleotide
gtaggctcgctctgggtcactaagtcgccc

SEQ ID NO: 309830 - DNA, 30 bp, Artificial Sequence
  Synthetic oligonucleotide
aggtgcctggcagctacgaatccaaggccc

SEQ ID NO: 309831 - DNA, 30 bp, Artificial Sequence
  Synthetic oligonucleotide
ggtacgaaggacatgccgtattcaaggccc

SEQ ID NO: 309832 - DNA, 30 bp, Artificial Sequence
  Synthetic oligonucleotide
ggcagatttcttttctgaccctcgaggccc

SEQ ID NO: 309833 - DNA, 30 bp, Artificial Sequence
  Synthetic oligonucleotide
gcgagccgaacgacctttgtaaaacggccc

SEQ ID NO: 309834 - DNA, 30 bp, Artificial Sequence
  Synthetic oligonucleotide
gagacggagccgtagaaaatgcagcggccc

SEQ ID NO: 309835 - DNA, 30 bp, Artificial Sequence
  Synthetic oligonucleotide
tagacggctattgactcgggtaggcggccc

SEQ ID NO: 309836 - DNA, 30 bp, Artificial Sequence
  Synthetic oligonucleotide
gtatccccagattgttccatgcggcggccc

SEQ ID NO: 309837 - DNA, 30 bp, Artificial Sequence
  Synthetic oligonucleotide
gtatgttctaagccatctggtcatcggccc

SEQ ID NO: 309838 - DNA, 30 bp, Artificial Sequence
  Synthetic oligonucleotide
gcatggcgaagaaagttataatgtcggccc

SEQ ID NO: 309839 - DNA, 30 bp, Artificial Sequence
  Synthetic oligonucleotide
cagaaccttgtgttaaggagtcgagggccc

SEQ ID NO: 309840 - DNA, 30 bp, Artificial Sequence
  Synthetic oligonucleotide
cctcgtcagggaactctgagtatagggccc

SEQ ID NO: 309841 - DNA, 30 bp, Artificial Sequence
  Synthetic oligonucleotide
aaagcccccctaagccatatgagcgggccc

SEQ ID NO: 309842 - DNA, 30 bp, Artificial Sequence
  Synthetic oligonucleotide
ccgaacccttgaagtgtcggtctcgggccc

SEQ ID NO: 309843 - DNA, 30 bp, Artificial Sequence
  Synthetic oligonucleotide
agggcaaaaagggatgagctagtggggccc

SEQ ID NO: 309844 - DNA, 30 bp, Artificial Sequence
  Synthetic oligonucleotide
taatagccccatccggtgaagagtgggccc

SEQ ID NO: 309845 - DNA, 30 bp, Artificial Sequence
  Synthetic oligonucleotide
cgcattatcaacacaaacggacgtgggccc

SEQ ID NO: 309846 - DNA, 30 bp, Artificial Sequence
  Synthetic oligonucleotide
gttccgctaggaacctacatcgttgggccc

SEQ ID NO: 309847 - DNA, 30 bp, Artificial Sequence
  Synthetic oligonucleotide
agcaggcgggcggacggaggtgcatggccc

SEQ ID NO: 309848 - DNA, 30 bp, Artificial Sequence
  Synthetic oligonucleotide
ggtatggtgagtcacgggtaaagatggccc

SEQ ID NO: 309849 - DNA, 30 bp, Artificial Sequence
  Synthetic oligonucleotide
tgcccggcatcaggcgtttgggcgtggccc

SEQ ID NO: 309850 - DNA, 30 bp, Artificial Sequence
  Synthetic oligonucleotide
taaagtactagtaactaccgtcggtggccc

SEQ ID NO: 309851 - DNA, 30 bp, Artificial Sequence
  Synthetic oligonucleotide
gcccgtcaccctccttgtcaaccttggccc

SEQ ID NO: 309852 - DNA, 30 bp, Artificial Sequence
  Synthetic oligonucleotide
ccaggtttacttggagataccgcttggccc

SEQ ID NO: 309853 - DNA, 30 bp, Artificial Sequence
  Synthetic oligonucleotide
ggaaagttggtgccagcgagcccaatgccc

SEQ ID NO: 309854 - DNA, 30 bp, Artificial Sequence
  Synthetic oligonucleotide
tccaatcccgtacctaaggtaggaatgccc

SEQ ID NO: 309855 - DNA, 30 bp, Artificial Sequence
  Synthetic oligonucleotide
caccactcaaaaagatagtgcttaatgccc

SEQ ID NO: 309856 - DNA, 30 bp, Artificial Sequence
  Synthetic oligonucleotide
acgcttatatagattagttcgtacatgccc

SEQ ID NO: 309857 - DNA, 30 bp, Artificial Sequence
  Synthetic oligonucleotide
atcccaatgcacgggtaatcacccatgccc

SEQ ID NO: 309858 - DNA, 30 bp, Artificial Sequence
  Synthetic oligonucleotide
aatctatcaaagccaccgagacccctgccc

SEQ ID NO: 309859 - DNA, 30 bp, Artificial Sequence
  Synthetic oligonucleotide
tttggcgtttgaatttaagtgtcgctgccc

SEQ ID NO: 309860 - DNA, 30 bp, Artificial Sequence
  Synthetic oligonucleotide
attatggacataggctagagccaggtgccc

SEQ ID NO: 309861 - DNA, 30 bp, Artificial Sequence
  Synthetic oligonucleotide
gcttgtgattcggcgcgcaactcattgccc

SEQ ID NO: 309862 - DNA, 30 bp, Artificial Sequence
  Synthetic oligonucleotide
aagactgcggcacgctcgctcaagttgccc

SEQ ID NO: 309863 - DNA, 30 bp, Artificial Sequence
  Synthetic oligonucleotide
gatttgtcggtggaatgatggctgttgccc

SEQ ID NO: 309864 - DNA, 31 bp, Artificial Sequence
  Synthetic oligonucleotide
gaggtgtagttatgcggcaattgttttgccc

SEQ ID NO: 309865 - DNA, 30 bp, Artificial Sequence
  Synthetic oligonucleotide
cgtcccttaattctcgtttgttttttgccc

SEQ ID NO: 309866 - DNA, 30 bp, Artificial Sequence
  Synthetic oligonucleotide
taccgcggcgaaagataattatcaaatccc

SEQ ID NO: 309867 - DNA, 30 bp, Artificial Sequence
  Synthetic oligonucleotide
cgtgagtttagagttcggccaaccaatccc

SEQ ID NO: 309868 - DNA, 30 bp, Artificial Sequence
  Synthetic oligonucleotide
acttgagtcgaacgtctctttgtcaatccc

SEQ ID NO: 309869 - DNA, 30 bp, Artificial Sequence
  Synthetic oligonucleotide
ttggtcatgtggttggatcgacataatccc

SEQ ID NO: 309870 - DNA, 30 bp, Artificial Sequence
  Synthetic oligonucleotide
aggggcaattcaactcagctccctaatccc

SEQ ID NO: 309871 - DNA, 30 bp, Artificial Sequence
  Synthetic oligonucleotide
ggggagcccaaagcaaggactcctaatccc

SEQ ID NO: 309872 - DNA, 30 bp, Artificial Sequence
  Synthetic oligonucleotide
tcgcccgtgatcggctattgcgctaatccc

SEQ ID NO: 309873 - DNA, 30 bp, Artificial Sequence
  Synthetic oligonucleotide
tctgggccactcgtaattttaattaatccc

SEQ ID NO: 309874 - DNA, 30 bp, Artificial Sequence
  Synthetic oligonucleotide
catgacagtccagactaccctatacatccc

SEQ ID NO: 309875 - DNA, 30 bp, Artificial Sequence
  Synthetic oligonucleotide
taatagctaaacagtgtttcaaatcatccc

SEQ ID NO: 309876 - DNA, 30 bp, Artificial Sequence
  Synthetic oligonucleotide
ggaccgtaaggggtttgatctcgtcatccc

SEQ ID NO: 309877 - DNA, 30 bp, Artificial Sequence
  Synthetic oligonucleotide
agtcattacagttgccaagtatcagatccc

SEQ ID NO: 309878 - DNA, 30 bp, Artificial Sequence
  Synthetic oligonucleotide
agtatgtatgtagtatcagtggcggatccc

SEQ ID NO: 309879 - DNA, 30 bp, Artificial Sequence
  Synthetic oligonucleotide
acgctctgtccatcgtaattgcgggatccc

SEQ ID NO: 309880 - DNA, 30 bp, Artificial Sequence
  Synthetic oligonucleotide
ttggatagactcggtatgtgattggatccc

SEQ ID NO: 309881 - DNA, 30 bp, Artificial Sequence
  Synthetic oligonucleotide
aatgttgagaacatgttaaccgctgatccc

SEQ ID NO: 309882 - DNA, 30 bp, Artificial Sequence
  Synthetic oligonucleotide
tatccggtgttagttgcaatcgaatatccc

SEQ ID NO: 309883 - DNA, 30 bp, Artificial Sequence
  Synthetic oligonucleotide
gtagtgagtcacagtcagagggtctatccc

SEQ ID NO: 309884 - DNA, 30 bp, Artificial Sequence
  Synthetic oligonucleotide
acttgatttactaccgattgaaagtatccc

SEQ ID NO: 309885 - DNA, 30 bp, Artificial Sequence
  Synthetic oligonucleotide
ccgaatattcaaatcaactagatttatccc

SEQ ID NO: 309886 - DNA, 30 bp, Artificial Sequence
  Synthetic oligonucleotide
ctcttaatacgctacaacaccaaaactccc

SEQ ID NO: 309887 - DNA, 30 bp, Artificial Sequence
  Synthetic oligonucleotide
cgtaggagatacagcataaggaaaactccc

SEQ ID NO: 309888 - DNA, 30 bp, Artificial Sequence
  Synthetic oligonucleotide
atgcttctagtggtggctgttgcaactccc

SEQ ID NO: 309889 - DNA, 30 bp, Artificial Sequence
  Synthetic oligonucleotide
ccaggggtacacgtagaacccttaactccc

SEQ ID NO: 309890 - DNA, 30 bp, Artificial Sequence
  Synthetic oligonucleotide
cgtcgtttattgaccacgccttccactccc

SEQ ID NO: 309891 - DNA, 30 bp, Artificial Sequence
  Synthetic oligonucleotide
aacacctcaaatatccgaattaaacctccc

SEQ ID NO: 309892 - DNA, 30 bp, Artificial Sequence
  Synthetic oligonucleotide
cgttctatttagtgacacaaaaaccctccc

SEQ ID NO: 309893 - DNA, 30 bp, Artificial Sequence
  Synthetic oligonucleotide
tcactatgtgccatgagacaacctcctccc

SEQ ID NO: 309894 - DNA, 30 bp, Artificial Sequence
  Synthetic oligonucleotide
ggctgggcgacttcaatgcctggagctccc

SEQ ID NO: 309895 - DNA, 30 bp, Artificial Sequence
  Synthetic oligonucleotide
atgcctaggggtttagctaggatagctccc

SEQ ID NO: 309896 - DNA, 30 bp, Artificial Sequence
  Synthetic oligonucleotide
cccaagcgtatgccccgaatgggcgctccc

SEQ ID NO: 309897 - DNA, 30 bp, Artificial Sequence
  Synthetic oligonucleotide
tttcatatcgggtttgccgagcgtgctccc

SEQ ID NO: 309898 - DNA, 30 bp, Artificial Sequence
  Synthetic oligonucleotide
ctggataaatgcccaactgccctatctccc

SEQ ID NO: 309899 - DNA, 30 bp, Artificial Sequence
  Synthetic oligonucleotide
ctctccactagggctagtctcgtaagtccc

SEQ ID NO: 309900 - DNA, 30 bp, Artificial Sequence
  Synthetic oligonucleotide
tatgcaaggttcggatctcgggtgagtccc

SEQ ID NO: 309901 - DNA, 30 bp, Artificial Sequence
  Synthetic oligonucleotide
gcacgccccacctctgaatgatatagtccc

SEQ ID NO: 309902 - DNA, 31 bp, Artificial Sequence
  Synthetic oligonucleotide
gccagggtagtcgggttttcgacttagtccc

SEQ ID NO: 309903 - DNA, 30 bp, Artificial Sequence
  Synthetic oligonucleotide
gctaggaatgttcgattcacattacgtccc

SEQ ID NO: 309904 - DNA, 31 bp, Artificial Sequence
  Synthetic oligonucleotide
accggtgcttcgcattctgcgatagcgtccc

SEQ ID NO: 309905 - DNA, 30 bp, Artificial Sequence
  Synthetic oligonucleotide
tattgtgtcagctgcccttggcggcgtccc

SEQ ID NO: 309906 - DNA, 30 bp, Artificial Sequence
  Synthetic oligonucleotide
aaacggttacgaatgacgtcacgaggtccc

SEQ ID NO: 309907 - DNA, 30 bp, Artificial Sequence
  Synthetic oligonucleotide
gatgatagctcctatgcaaacgtaggtccc

SEQ ID NO: 309908 - DNA, 30 bp, Artificial Sequence
  Synthetic oligonucleotide
ccggtgtagatacatttagcgcagggtccc

SEQ ID NO: 309909 - DNA, 30 bp, Artificial Sequence
  Synthetic oligonucleotide
cttcacctacgagtggacgctcagggtccc

SEQ ID NO: 309910 - DNA, 30 bp, Artificial Sequence
  Synthetic oligonucleotide
ctagtaagttatctcggcgtctagggtccc

SEQ ID NO: 309911 - DNA, 30 bp, Artificial Sequence
  Synthetic oligonucleotide
ctgtataacaaccgttttcgccgtggtccc

SEQ ID NO: 309912 - DNA, 30 bp, Artificial Sequence
  Synthetic oligonucleotide
gatgaaggtcttaagacatggattggtccc

SEQ ID NO: 309913 - DNA, 30 bp, Artificial Sequence
  Synthetic oligonucleotide
aggatgccttggatggggacttcatgtccc

SEQ ID NO: 309914 - DNA, 30 bp, Artificial Sequence
  Synthetic oligonucleotide
tatcaataagcgcactcaagagcctgtccc

SEQ ID NO: 309915 - DNA, 30 bp, Artificial Sequence
  Synthetic oligonucleotide
aggcctgatgccgggaactccgagtgtccc

SEQ ID NO: 309916 - DNA, 30 bp, Artificial Sequence
  Synthetic oligonucleotide
gcaagcaaggttaccctcggttggtgtccc

SEQ ID NO: 309917 - DNA, 30 bp, Artificial Sequence
  Synthetic oligonucleotide
gtgccggttcacgtataggtattgtgtccc

SEQ ID NO: 309918 - DNA, 30 bp, Artificial Sequence
  Synthetic oligonucleotide
ttccggagggtccaaatggggccttgtccc

SEQ ID NO: 309919 - DNA, 30 bp, Artificial Sequence
  Synthetic oligonucleotide
ttagtaggttcatattcgcctgtttgtccc

SEQ ID NO: 309920 - DNA, 30 bp, Artificial Sequence
  Synthetic oligonucleotide
aaacgttggtggctctagtaagtaattccc

SEQ ID NO: 309921 - DNA, 30 bp, Artificial Sequence
  Synthetic oligonucleotide
gtacgtgtattagacgcggtagagattccc

SEQ ID NO: 309922 - DNA, 30 bp, Artificial Sequence
  Synthetic oligonucleotide
caggcctcggtcatctaattaccgattccc

SEQ ID NO: 309923 - DNA, 30 bp, Artificial Sequence
  Synthetic oligonucleotide
cttgcgtcagagaacgtcccgatgattccc

SEQ ID NO: 309924 - DNA, 30 bp, Artificial Sequence
  Synthetic oligonucleotide
gccacggctaggctagcgcagcgacttccc

SEQ ID NO: 309925 - DNA, 30 bp, Artificial Sequence
  Synthetic oligonucleotide
aatttcttgaagcgctaatgcacccttccc

SEQ ID NO: 309926 - DNA, 30 bp, Artificial Sequence
  Synthetic oligonucleotide
cgaacatggcgccagggaatttcgcttccc

SEQ ID NO: 309927 - DNA, 30 bp, Artificial Sequence
  Synthetic oligonucleotide
gccaaaaaaggttaacctaaaatgcttccc

SEQ ID NO: 309928 - DNA, 30 bp, Artificial Sequence
  Synthetic oligonucleotide
gcaatgggccacaagttcatggctcttccc

SEQ ID NO: 309929 - DNA, 30 bp, Artificial Sequence
  Synthetic oligonucleotide
aagtttctgacgggtgcgacatgggttccc

SEQ ID NO: 309930 - DNA, 30 bp, Artificial Sequence
  Synthetic oligonucleotide
gacggaatcccaaatcctctctgggttccc

SEQ ID NO: 309931 - DNA, 30 bp, Artificial Sequence
  Synthetic oligonucleotide
taggtcaagaagagaacataccctgttccc

SEQ ID NO: 309932 - DNA, 30 bp, Artificial Sequence
  Synthetic oligonucleotide
aagtgccgcatccgatatgtatgtgttccc

SEQ ID NO: 309933 - DNA, 30 bp, Artificial Sequence
  Synthetic oligonucleotide
ccaagatgttattgggaataatcgtttccc

SEQ ID NO: 309934 - DNA, 30 bp, Artificial Sequence
  Synthetic oligonucleotide
taaattgtccagctgtcgtttctgtttccc

SEQ ID NO: 309935 - DNA, 30 bp, Artificial Sequence
  Synthetic oligonucleotide
gctgctctcagaacgctgagaccaaaagcc

SEQ ID NO: 309936 - DNA, 30 bp, Artificial Sequence
  Synthetic oligonucleotide
ggatccgcagcacgggacgtaaacaaagcc

SEQ ID NO: 309937 - DNA, 30 bp, Artificial Sequence
  Synthetic oligonucleotide
atgtttcaccgggtgcttacgtacaaagcc

SEQ ID NO: 309938 - DNA, 30 bp, Artificial Sequence
  Synthetic oligonucleotide
cagagggttgttagaactcttaggaaagcc

SEQ ID NO: 309939 - DNA, 30 bp, Artificial Sequence
  Synthetic oligonucleotide
gcaaagcggttagcactgggaatacaagcc

SEQ ID NO: 309940 - DNA, 30 bp, Artificial Sequence
  Synthetic oligonucleotide
atcgttatctgaccgaaggacctccaagcc

SEQ ID NO: 309941 - DNA, 30 bp, Artificial Sequence
  Synthetic oligonucleotide
ggtacaagggtcgtactcttgcatcaagcc

SEQ ID NO: 309942 - DNA, 30 bp, Artificial Sequence
  Synthetic oligonucleotide
ctcactagtaggttaaagggctaagaagcc

SEQ ID NO: 309943 - DNA, 30 bp, Artificial Sequence
  Synthetic oligonucleotide
ggtggacggttatgacagcccagcgaagcc

SEQ ID NO: 309944 - DNA, 30 bp, Artificial Sequence
  Synthetic oligonucleotide
tcatgtagcggcttcggtcaggaggaagcc

SEQ ID NO: 309945 - DNA, 30 bp, Artificial Sequence
  Synthetic oligonucleotide
ttccggtgggcgtacaacagatcggaagcc

SEQ ID NO: 309946 - DNA, 30 bp, Artificial Sequence
  Synthetic oligonucleotide
ttgtagtaacgtgaccgccaatgggaagcc

SEQ ID NO: 309947 - DNA, 30 bp, Artificial Sequence
  Synthetic oligonucleotide
catttccctcttgtcctacgtcttgaagcc

SEQ ID NO: 309948 - DNA, 30 bp, Artificial Sequence
  Synthetic oligonucleotide
ggtgtaggcaacaatcaggactaataagcc

SEQ ID NO: 309949 - DNA, 30 bp, Artificial Sequence
  Synthetic oligonucleotide
caccgtgggggtcgatatttggtataagcc

SEQ ID NO: 309950 - DNA, 30 bp, Artificial Sequence
  Synthetic oligonucleotide
acagtttgcattgttgtaagcgggtaagcc

SEQ ID NO: 309951 - DNA, 30 bp, Artificial Sequence
  Synthetic oligonucleotide
tgggtcgtcgctcataaaccatcttaagcc

SEQ ID NO: 309952 - DNA, 30 bp, Artificial Sequence
  Synthetic oligonucleotide
ggccagttgggaaactagctcagttaagcc

SEQ ID NO: 309953 - DNA, 30 bp, Artificial Sequence
  Synthetic oligonucleotide
taggttggataccatggtgcttaaacagcc

SEQ ID NO: 309954 - DNA, 30 bp, Artificial Sequence
  Synthetic oligonucleotide
acgctggtatgcggcgcgtgaagaacagcc

SEQ ID NO: 309955 - DNA, 30 bp, Artificial Sequence
  Synthetic oligonucleotide
taaaatgccggaacgcggggagtcacagcc

SEQ ID NO: 309956 - DNA, 30 bp, Artificial Sequence
  Synthetic oligonucleotide
tatctcataaatgcgcccagagagacagcc

SEQ ID NO: 309957 - DNA, 30 bp, Artificial Sequence
  Synthetic oligonucleotide
agatccagtccgcgatactccgcgacagcc

SEQ ID NO: 309958 - DNA, 30 bp, Artificial Sequence
  Synthetic oligonucleotide
aagcagaaagagatgttatatcatacagcc

SEQ ID NO: 309959 - DNA, 30 bp, Artificial Sequence
  Synthetic oligonucleotide
actgccgatacatggttattttatacagcc

SEQ ID NO: 309960 - DNA, 30 bp, Artificial Sequence
  Synthetic oligonucleotide
aacgagctgcataaggtcagtgacccagcc

SEQ ID NO: 309961 - DNA, 30 bp, Artificial Sequence
  Synthetic oligonucleotide
taatggggtatagtggcctatgagccagcc

SEQ ID NO: 309962 - DNA, 30 bp, Artificial Sequence
  Synthetic oligonucleotide
catcctcccacacgcgaccaaccgccagcc

SEQ ID NO: 309963 - DNA, 30 bp, Artificial Sequence
  Synthetic oligonucleotide
cactcgtaagtcagttgacgggtgccagcc

SEQ ID NO: 309964 - DNA, 30 bp, Artificial Sequence
  Synthetic oligonucleotide
gggctttatgttaatattgctactccagcc

SEQ ID NO: 309965 - DNA, 30 bp, Artificial Sequence
  Synthetic oligonucleotide
accgataagtccatctcctgcgaggcagcc

SEQ ID NO: 309966 - DNA, 30 bp, Artificial Sequence
  Synthetic oligonucleotide
agtacgtgggttgaaacctattgggcagcc

SEQ ID NO: 309967 - DNA, 30 bp, Artificial Sequence
  Synthetic oligonucleotide
cagacactaaccacatcaagctatgcagcc

SEQ ID NO: 309968 - DNA, 30 bp, Artificial Sequence
  Synthetic oligonucleotide
tcggagaatcagatagctgatagatcagcc

SEQ ID NO: 309969 - DNA, 30 bp, Artificial Sequence
  Synthetic oligonucleotide
ggggcgctctgggaattacattgatcagcc

SEQ ID NO: 309970 - DNA, 30 bp, Artificial Sequence
  Synthetic oligonucleotide
cgacggagaaccccggttttcgactcagcc

SEQ ID NO: 309971 - DNA, 30 bp, Artificial Sequence
  Synthetic oligonucleotide
tgtgtgatacttgtgctaggacggtcagcc

SEQ ID NO: 309972 - DNA, 30 bp, Artificial Sequence
  Synthetic oligonucleotide
gtaacttcagccttcgacatatattcagcc

SEQ ID NO: 309973 - DNA, 30 bp, Artificial Sequence
  Synthetic oligonucleotide
cctggacgaatgctagtggtccgaagagcc

SEQ ID NO: 309974 - DNA, 30 bp, Artificial Sequence
  Synthetic oligonucleotide
atgtgcgttactagctcttgccacagagcc

SEQ ID NO: 309975 - DNA, 30 bp, Artificial Sequence
  Synthetic oligonucleotide
ttattgggatacaacatcgtttggagagcc

SEQ ID NO: 309976 - DNA, 30 bp, Artificial Sequence
  Synthetic oligonucleotide
tatggtacgtaatgttgcccggatagagcc

SEQ ID NO: 309977 - DNA, 30 bp, Artificial Sequence
  Synthetic oligonucleotide
accgagcttaatctgcaacactgtagagcc

SEQ ID NO: 309978 - DNA, 30 bp, Artificial Sequence
  Synthetic oligonucleotide
tgtgcctgagtccagtttgggatccgagcc

SEQ ID NO: 309979 - DNA, 30 bp, Artificial Sequence
  Synthetic oligonucleotide
gtcgataactggaattcaacgggtcgagcc

SEQ ID NO: 309980 - DNA, 30 bp, Artificial Sequence
  Synthetic oligonucleotide
tcaagggtcgggatgtatggatacggagcc

SEQ ID NO: 309981 - DNA, 30 bp, Artificial Sequence
  Synthetic oligonucleotide
ggataagagccttcgtagaaaagcggagcc

SEQ ID NO: 309982 - DNA, 30 bp, Artificial Sequence
  Synthetic oligonucleotide
tctagatcacacgtggtaggtgcgggagcc

SEQ ID NO: 309983 - DNA, 30 bp, Artificial Sequence
  Synthetic oligonucleotide
taaatttgaagatagtactgttcgggagcc

SEQ ID NO: 309984 - DNA, 30 bp, Artificial Sequence
  Synthetic oligonucleotide
gtcttggttccgaaacgagaaagtggagcc

SEQ ID NO: 309985 - DNA, 30 bp, Artificial Sequence
  Synthetic oligonucleotide
caacgatatatagtctgttgctttggagcc

SEQ ID NO: 309986 - DNA, 30 bp, Artificial Sequence
  Synthetic oligonucleotide
caggaccgatagggccctgccgactgagcc

SEQ ID NO: 309987 - DNA, 30 bp, Artificial Sequence
  Synthetic oligonucleotide
aaaactcgcatgcagggttgatagtgagcc

SEQ ID NO: 309988 - DNA, 30 bp, Artificial Sequence
  Synthetic oligonucleotide
acataccgaagtgagaccacgctttgagcc

SEQ ID NO: 309989 - DNA, 30 bp, Artificial Sequence
  Synthetic oligonucleotide
ataccgccttgacagaagtgcgacatagcc

SEQ ID NO: 309990 - DNA, 30 bp, Artificial Sequence
  Synthetic oligonucleotide
tccccgcataggggaaattttatcatagcc

SEQ ID NO: 309991 - DNA, 30 bp, Artificial Sequence
  Synthetic oligonucleotide
cttgacgaattgttaagcattttcatagcc

SEQ ID NO: 309992 - DNA, 30 bp, Artificial Sequence
  Synthetic oligonucleotide
cgcgacacgggtacttctgccaagatagcc

SEQ ID NO: 309993 - DNA, 30 bp, Artificial Sequence
  Synthetic oligonucleotide
gtcaggctctgcctaggtattcagatagcc

SEQ ID NO: 309994 - DNA, 30 bp, Artificial Sequence
  Synthetic oligonucleotide
agtatcttgcttcggggtgttttgatagcc

SEQ ID NO: 309995 - DNA, 30 bp, Artificial Sequence
  Synthetic oligonucleotide
cagccgcctgaatgttcatatggactagcc

SEQ ID NO: 309996 - DNA, 30 bp, Artificial Sequence
  Synthetic oligonucleotide
tgagggattcccagaaactgggacctagcc

SEQ ID NO: 309997 - DNA, 30 bp, Artificial Sequence
  Synthetic oligonucleotide
cagcatggaccttctgtgtaggcgctagcc

SEQ ID NO: 309998 - DNA, 30 bp, Artificial Sequence
  Synthetic oligonucleotide
taccattagatgcgtaaagtccggctagcc

SEQ ID NO: 309999 - DNA, 30 bp, Artificial Sequence
  Synthetic oligonucleotide
tgctaagagtgtaaaacaattgggctagcc

SEQ ID NO: 310000 - DNA, 30 bp, Artificial Sequence
  Synthetic oligonucleotide
tatgttcaatgagtcgcccgcaaagtagcc

SEQ ID NO: 310001 - DNA, 30 bp, Artificial Sequence
  Synthetic oligonucleotide
caagctaccgacccttagggcacagtagcc

SEQ ID NO: 310002 - DNA, 30 bp, Artificial Sequence
  Synthetic oligonucleotide
taatcagtacgtacagtcggactagtagcc

SEQ ID NO: 310003 - DNA, 30 bp, Artificial Sequence
  Synthetic oligonucleotide
tattttggacggctgggtcttttcgtagcc

SEQ ID NO: 310004 - DNA, 30 bp, Artificial Sequence
  Synthetic oligonucleotide
gggatccaacaccggcgtatgggggtagcc

SEQ ID NO: 310005 - DNA, 30 bp, Artificial Sequence
  Synthetic oligonucleotide
ttcgaaaagatatagccagtcatattagcc

SEQ ID NO: 310006 - DNA, 30 bp, Artificial Sequence
  Synthetic oligonucleotide
attaagtagagacagcaccacgacttagcc

SEQ ID NO: 310007 - DNA, 30 bp, Artificial Sequence
  Synthetic oligonucleotide
caacgttaacgtaatgggctacgcttagcc

SEQ ID NO: 310008 - DNA, 30 bp, Artificial Sequence
  Synthetic oligonucleotide
ttggacaggcgggtgggggcggagttagcc

SEQ ID NO: 310009 - DNA, 30 bp, Artificial Sequence
  Synthetic oligonucleotide
agcaagattaattggcgaatccggttagcc

SEQ ID NO: 310010 - DNA, 30 bp, Artificial Sequence
  Synthetic oligonucleotide
gacgccagctggatgcgcgttaatttagcc

SEQ ID NO: 310011 - DNA, 30 bp, Artificial Sequence
  Synthetic oligonucleotide
gtattcccgccctacgtaaggcataacgcc

SEQ ID NO: 310012 - DNA, 30 bp, Artificial Sequence
  Synthetic oligonucleotide
ctttaaagttccgagtctgaagataacgcc

SEQ ID NO: 310013 - DNA, 30 bp, Artificial Sequence
  Synthetic oligonucleotide
taaaacgtaggaacgccgactagacacgcc

SEQ ID NO: 310014 - DNA, 30 bp, Artificial Sequence
  Synthetic oligonucleotide
gggcgcagtccgtttaatattaagcacgcc

SEQ ID NO: 310015 - DNA, 30 bp, Artificial Sequence
  Synthetic oligonucleotide
actgccgggatagcaccgattagagacgcc

SEQ ID NO: 310016 - DNA, 30 bp, Artificial Sequence
  Synthetic oligonucleotide
cagatttgtgcaacaaaatatcgagacgcc

SEQ ID NO: 310017 - DNA, 30 bp, Artificial Sequence
  Synthetic oligonucleotide
gcgggagcccggtcatcatactacgacgcc

SEQ ID NO: 310018 - DNA, 30 bp, Artificial Sequence
  Synthetic oligonucleotide
tctaacagccacggtacatacatcgacgcc

SEQ ID NO: 310019 - DNA, 30 bp, Artificial Sequence
  Synthetic oligonucleotide
gtcctttggcaaggtgttagcgtcgacgcc

SEQ ID NO: 310020 - DNA, 30 bp, Artificial Sequence
  Synthetic oligonucleotide
ctattaactcctgtccatccgacggacgcc

SEQ ID NO: 310021 - DNA, 30 bp, Artificial Sequence
  Synthetic oligonucleotide
cctcttatgcggatataggtgacggacgcc

SEQ ID NO: 310022 - DNA, 30 bp, Artificial Sequence
  Synthetic oligonucleotide
gtagactcatcacataataggatggacgcc

SEQ ID NO: 310023 - DNA, 30 bp, Artificial Sequence
  Synthetic oligonucleotide
gactaccggatacaatgggcacctgacgcc

SEQ ID NO: 310024 - DNA, 30 bp, Artificial Sequence
  Synthetic oligonucleotide
gaaaccatagtggcactgacggcatacgcc

SEQ ID NO: 310025 - DNA, 30 bp, Artificial Sequence
  Synthetic oligonucleotide
acatgtctggtcccatacttacgatacgcc

SEQ ID NO: 310026 - DNA, 30 bp, Artificial Sequence
  Synthetic oligonucleotide
cggtgatcacatccgcagaaaggctacgcc

SEQ ID NO: 310027 - DNA, 30 bp, Artificial Sequence
  Synthetic oligonucleotide
cagctaaatagctgggcgcgctgctacgcc

SEQ ID NO: 310028 - DNA, 30 bp, Artificial Sequence
  Synthetic oligonucleotide
tcgcagggaaaaaatacggtcaagtacgcc

SEQ ID NO: 310029 - DNA, 30 bp, Artificial Sequence
  Synthetic oligonucleotide
gagagcaatgcattgcatatatagtacgcc

SEQ ID NO: 310030 - DNA, 30 bp, Artificial Sequence
  Synthetic oligonucleotide
gaaaccgggaagcgattcccctgttacgcc

SEQ ID NO: 310031 - DNA, 30 bp, Artificial Sequence
  Synthetic oligonucleotide
gtaggcgaagaactctctgttgtttacgcc

SEQ ID NO: 310032 - DNA, 30 bp, Artificial Sequence
  Synthetic oligonucleotide
aaatgctttgcgagaaaatgacacaccgcc

SEQ ID NO: 310033 - DNA, 30 bp, Artificial Sequence
  Synthetic oligonucleotide
cagatcaacggacacgatgtttagaccgcc

SEQ ID NO: 310034 - DNA, 30 bp, Artificial Sequence
  Synthetic oligonucleotide
ttgcccgaagaggggcccttaaggaccgcc

SEQ ID NO: 310035 - DNA, 30 bp, Artificial Sequence
  Synthetic oligonucleotide
aatcgacctcctacggccgatcggaccgcc

SEQ ID NO: 310036 - DNA, 30 bp, Artificial Sequence
  Synthetic oligonucleotide
aggcacaaaatttttctggccgataccgcc

SEQ ID NO: 310037 - DNA, 30 bp, Artificial Sequence
  Synthetic oligonucleotide
gcgaaggtgtcacgatccaagcaacccgcc

SEQ ID NO: 310038 - DNA, 30 bp, Artificial Sequence
  Synthetic oligonucleotide
tggaattaccgccagcagaaggcgcccgcc

SEQ ID NO: 310039 - DNA, 30 bp, Artificial Sequence
  Synthetic oligonucleotide
ggatagtcgatatcatgcgttcatcccgcc

SEQ ID NO: 310040 - DNA, 30 bp, Artificial Sequence
  Synthetic oligonucleotide
gggatatgagaagcggggtaatcagccgcc

SEQ ID NO: 310041 - DNA, 30 bp, Artificial Sequence
  Synthetic oligonucleotide
tttggggtagggggtatcgaaatagccgcc

SEQ ID NO: 310042 - DNA, 30 bp, Artificial Sequence
  Synthetic oligonucleotide
gttcggtgattctcttggctacatgccgcc

SEQ ID NO: 310043 - DNA, 30 bp, Artificial Sequence
  Synthetic oligonucleotide
tgtctgcgtatcgctatacggtcatccgcc

SEQ ID NO: 310044 - DNA, 30 bp, Artificial Sequence
  Synthetic oligonucleotide
tttccgacgacccgctacgaaatatccgcc

SEQ ID NO: 310045 - DNA, 30 bp, Artificial Sequence
  Synthetic oligonucleotide
aaacgatctgcattgcaaaaattgtccgcc

SEQ ID NO: 310046 - DNA, 30 bp, Artificial Sequence
  Synthetic oligonucleotide
tccgatgctagttccttagttcgttccgcc

SEQ ID NO: 310047 - DNA, 30 bp, Artificial Sequence
  Synthetic oligonucleotide
cactagcttgctacaacatggtgcagcgcc

SEQ ID NO: 310048 - DNA, 30 bp, Artificial Sequence
  Synthetic oligonucleotide
gaaggcgcctcactcatatcttgcagcgcc

SEQ ID NO: 310049 - DNA, 30 bp, Artificial Sequence
  Synthetic oligonucleotide
ttcgagagggcaggtggaggctcgagcgcc

SEQ ID NO: 310050 - DNA, 30 bp, Artificial Sequence
  Synthetic oligonucleotide
atgtcggctaacgtgacttcacctagcgcc

SEQ ID NO: 310051 - DNA, 30 bp, Artificial Sequence
  Synthetic oligonucleotide
agtatccggccaaagtgagggtgtagcgcc

SEQ ID NO: 310052 - DNA, 30 bp, Artificial Sequence
  Synthetic oligonucleotide
agggaaacatagtgtatagacaaacgcgcc

SEQ ID NO: 310053 - DNA, 30 bp, Artificial Sequence
  Synthetic oligonucleotide
ctcacagacatccctcaaatcatacgcgcc

SEQ ID NO: 310054 - DNA, 30 bp, Artificial Sequence
  Synthetic oligonucleotide
gactgggacagttgccattatatgcgcgcc

SEQ ID NO: 310055 - DNA, 30 bp, Artificial Sequence
  Synthetic oligonucleotide
tacaggtttaagggccaatgtttgcgcgcc

SEQ ID NO: 310056 - DNA, 30 bp, Artificial Sequence
  Synthetic oligonucleotide
ctcgcaaatgccttccgtatcgttcgcgcc

SEQ ID NO: 310057 - DNA, 30 bp, Artificial Sequence
  Synthetic oligonucleotide
gcgcccgtgaaactatcgttaagaggcgcc

SEQ ID NO: 310058 - DNA, 30 bp, Artificial Sequence
  Synthetic oligonucleotide
taccggatcgcttagttaaattgaggcgcc

SEQ ID NO: 310059 - DNA, 30 bp, Artificial Sequence
  Synthetic oligonucleotide
ggaggttcaatatgttcactttggggcgcc

SEQ ID NO: 310060 - DNA, 30 bp, Artificial Sequence
  Synthetic oligonucleotide
tggcaaggtatagaatggggagtgggcgcc

SEQ ID NO: 310061 - DNA, 31 bp, Artificial Sequence
  Synthetic oligonucleotide
ggtaatctcgaccttcggatggtctggcgcc

SEQ ID NO: 310062 - DNA, 30 bp, Artificial Sequence
  Synthetic oligonucleotide
gctggacagttgccaaaggaacgctgcgcc

SEQ ID NO: 310063 - DNA, 30 bp, Artificial Sequence
  Synthetic oligonucleotide
atttcggaagaatagtatctctaaatcgcc

SEQ ID NO: 310064 - DNA, 30 bp, Artificial Sequence
  Synthetic oligonucleotide
gtgttgttttgtcttaaacgccggatcgcc

SEQ ID NO: 310065 - DNA, 30 bp, Artificial Sequence
  Synthetic oligonucleotide
aaccaattaatactctaacggcggatcgcc

SEQ ID NO: 310066 - DNA, 30 bp, Artificial Sequence
  Synthetic oligonucleotide
cagtctcaatacgtgactggtatgatcgcc

SEQ ID NO: 310067 - DNA, 30 bp, Artificial Sequence
  Synthetic oligonucleotide
cgtgtataactcattcaacgcgatatcgcc

SEQ ID NO: 310068 - DNA, 30 bp, Artificial Sequence
  Synthetic oligonucleotide
ggggcgagactgtttgacctgttactcgcc

SEQ ID NO: 310069 - DNA, 30 bp, Artificial Sequence
  Synthetic oligonucleotide
gtagcaaaatcggattttggaatcctcgcc

SEQ ID NO: 310070 - DNA, 30 bp, Artificial Sequence
  Synthetic oligonucleotide
ttataagcactcagaaagcggcatctcgcc

SEQ ID NO: 310071 - DNA, 30 bp, Artificial Sequence
  Synthetic oligonucleotide
cgaaggctttatatacacgtcatagtcgcc

SEQ ID NO: 310072 - DNA, 30 bp, Artificial Sequence
  Synthetic oligonucleotide
gtactttgtttccatcgtaatgaggtcgcc

SEQ ID NO: 310073 - DNA, 30 bp, Artificial Sequence
  Synthetic oligonucleotide
tgcggtcgccacgcccaatttggggtcgcc

SEQ ID NO: 310074 - DNA, 30 bp, Artificial Sequence
  Synthetic oligonucleotide
tacttatcttatggccggtaccatgtcgcc

SEQ ID NO: 310075 - DNA, 30 bp, Artificial Sequence
  Synthetic oligonucleotide
accacgcaccacggtgctaaatgtgtcgcc

SEQ ID NO: 310076 - DNA, 30 bp, Artificial Sequence
  Synthetic oligonucleotide
gcaggtttgggagattacagtgtcttcgcc

SEQ ID NO: 310077 - DNA, 30 bp, Artificial Sequence
  Synthetic oligonucleotide
tgttaagcggccctctcggatgggttcgcc

SEQ ID NO: 310078 - DNA, 30 bp, Artificial Sequence
  Synthetic oligonucleotide
ataaggttcacaggaactgatgggttcgcc

SEQ ID NO: 310079 - DNA, 30 bp, Artificial Sequence
  Synthetic oligonucleotide
atgattggtgaaaggcaccaggttttcgcc

SEQ ID NO: 310080 - DNA, 31 bp, Artificial Sequence
  Synthetic oligonucleotide
ctaccccttctcataactaattaaaaaggcc

SEQ ID NO: 310081 - DNA, 30 bp, Artificial Sequence
  Synthetic oligonucleotide
agatttaagctttgacacggaacaaaggcc

SEQ ID NO: 310082 - DNA, 30 bp, Artificial Sequence
  Synthetic oligonucleotide
actcctcaagagcttgttccccgaaaggcc

SEQ ID NO: 310083 - DNA, 30 bp, Artificial Sequence
  Synthetic oligonucleotide
accttcaaaaggatttctgctggtaaggcc

SEQ ID NO: 310084 - DNA, 30 bp, Artificial Sequence
  Synthetic oligonucleotide
atctgtcaggcaacaaatcggattaaggcc

SEQ ID NO: 310085 - DNA, 30 bp, Artificial Sequence
  Synthetic oligonucleotide
tgagaggacggatgtttcagagcgcaggcc

SEQ ID NO: 310086 - DNA, 30 bp, Artificial Sequence
  Synthetic oligonucleotide
ttctaaccctctcagagttggcctcaggcc

SEQ ID NO: 310087 - DNA, 30 bp, Artificial Sequence
  Synthetic oligonucleotide
atgttttttttagaataggcctgcgaggcc

SEQ ID NO: 310088 - DNA, 30 bp, Artificial Sequence
  Synthetic oligonucleotide
tatagtcagggctgtcattttatcgaggcc

SEQ ID NO: 310089 - DNA, 30 bp, Artificial Sequence
  Synthetic oligonucleotide
gacacgaagactaacacgataccggaggcc

SEQ ID NO: 310090 - DNA, 30 bp, Artificial Sequence
  Synthetic oligonucleotide
gcgcaagaggccagaaatgactcggaggcc

SEQ ID NO: 310091 - DNA, 30 bp, Artificial Sequence
  Synthetic oligonucleotide
gggatttacgatgggtatcgactggaggcc

SEQ ID NO: 310092 - DNA, 30 bp, Artificial Sequence
  Synthetic oligonucleotide
agaaaagtgatcgttccgactaatgaggcc

SEQ ID NO: 310093 - DNA, 30 bp, Artificial Sequence
  Synthetic oligonucleotide
tagggttaaaggtagctttgtaatgaggcc

SEQ ID NO: 310094 - DNA, 30 bp, Artificial Sequence
  Synthetic oligonucleotide
gcgagtcctcgcgtggtacttcttgaggcc

SEQ ID NO: 310095 - DNA, 30 bp, Artificial Sequence
  Synthetic oligonucleotide
gaggttcaacgtgcccccaatgttgaggcc

SEQ ID NO: 310096 - DNA, 30 bp, Artificial Sequence
  Synthetic oligonucleotide
gagcactgcgaagactggtgtcaataggcc

SEQ ID NO: 310097 - DNA, 30 bp, Artificial Sequence
  Synthetic oligonucleotide
tggcgtttaggtttgtgatcacgataggcc

SEQ ID NO: 310098 - DNA, 30 bp, Artificial Sequence
  Synthetic oligonucleotide
agtagcttattcaagctcgatctataggcc

SEQ ID NO: 310099 - DNA, 30 bp, Artificial Sequence
  Synthetic oligonucleotide
aggactgagagtattatatagtagtaggcc

SEQ ID NO: 310100 - DNA, 30 bp, Artificial Sequence
  Synthetic oligonucleotide
ggaagcaggtgtgtggtccgctgttaggcc

SEQ ID NO: 310101 - DNA, 30 bp, Artificial Sequence
  Synthetic oligonucleotide
gccaggaaacatatagggcaaatttaggcc

SEQ ID NO: 310102 - DNA, 30 bp, Artificial Sequence
  Synthetic oligonucleotide
cggcagtgggtgtaccaaaggcaaacggcc

SEQ ID NO: 310103 - DNA, 30 bp, Artificial Sequence
  Synthetic oligonucleotide
gaattctccgattaagactaggcaacggcc

SEQ ID NO: 310104 - DNA, 30 bp, Artificial Sequence
  Synthetic oligonucleotide
acctgagtcacgtccacacggtgcacggcc

SEQ ID NO: 310105 - DNA, 30 bp, Artificial Sequence
  Synthetic oligonucleotide
gaagctcccgcaaggggaaaagagacggcc

SEQ ID NO: 310106 - DNA, 30 bp, Artificial Sequence
  Synthetic oligonucleotide
cccgtcccgtgatatagaaactcgacggcc

SEQ ID NO: 310107 - DNA, 30 bp, Artificial Sequence
  Synthetic oligonucleotide
gtccgtattgagataaattcaggtacggcc

SEQ ID NO: 310108 - DNA, 30 bp, Artificial Sequence
  Synthetic oligonucleotide
gtatatggcgtgctcataatataaccggcc

SEQ ID NO: 310109 - DNA, 30 bp, Artificial Sequence
  Synthetic oligonucleotide
gatccctgggttgcaattgggttcccggcc

SEQ ID NO: 310110 - DNA, 30 bp, Artificial Sequence
  Synthetic oligonucleotide
gctgggccattctatcgaagactgccggcc

SEQ ID NO: 310111 - DNA, 30 bp, Artificial Sequence
  Synthetic oligonucleotide
cctacaatcctcttgagaggtttgccggcc

SEQ ID NO: 310112 - DNA, 30 bp, Artificial Sequence
  Synthetic oligonucleotide
ttctcggacatacacccgctccatccggcc

SEQ ID NO: 310113 - DNA, 30 bp, Artificial Sequence
  Synthetic oligonucleotide
tgcatgttattttcggattcaaaggcggcc

SEQ ID NO: 310114 - DNA, 30 bp, Artificial Sequence
  Synthetic oligonucleotide
ccagtatgcatatccgacagcggatcggcc

SEQ ID NO: 310115 - DNA, 30 bp, Artificial Sequence
  Synthetic oligonucleotide
taagagggcagtcggttgattgcctcggcc

SEQ ID NO: 310116 - DNA, 30 bp, Artificial Sequence
  Synthetic oligonucleotide
ttacttattaaataagtgtgtagctcggcc

SEQ ID NO: 310117 - DNA, 30 bp, Artificial Sequence
  Synthetic oligonucleotide
gcctgcctgagagagacagggcgctcggcc

SEQ ID NO: 310118 - DNA, 30 bp, Artificial Sequence
  Synthetic oligonucleotide
tgagcgcatgatgcgtgagttcgctcggcc

SEQ ID NO: 310119 - DNA, 30 bp, Artificial Sequence
  Synthetic oligonucleotide
tagatcgcgccgtgcgactgtcggtcggcc

SEQ ID NO: 310120 - DNA, 30 bp, Artificial Sequence
  Synthetic oligonucleotide
cgcgatggatcttcaagcgcgtcttcggcc

SEQ ID NO: 310121 - DNA, 30 bp, Artificial Sequence
  Synthetic oligonucleotide
aacccgcgccagcgccgccacgtttcggcc

SEQ ID NO: 310122 - DNA, 30 bp, Artificial Sequence
  Synthetic oligonucleotide
aggtgcggatgggggggtcggttaagggcc

SEQ ID NO: 310123 - DNA, 30 bp, Artificial Sequence
  Synthetic oligonucleotide
gctcgctagatcgaccgcactgacagggcc

SEQ ID NO: 310124 - DNA, 30 bp, Artificial Sequence
  Synthetic oligonucleotide
gaaggaagcggcgtaacccgcgccagggcc

SEQ ID NO: 310125 - DNA, 30 bp, Artificial Sequence
  Synthetic oligonucleotide
gacggtaacgtcagcgtcgcaagtagggcc

SEQ ID NO: 310126 - DNA, 30 bp, Artificial Sequence
  Synthetic oligonucleotide
aaagccgtctcaaggctccggcaacgggcc

SEQ ID NO: 310127 - DNA, 30 bp, Artificial Sequence
  Synthetic oligonucleotide
tcctgtgcgcctctggcaccgtcccgggcc

SEQ ID NO: 310128 - DNA, 30 bp, Artificial Sequence
  Synthetic oligonucleotide
taggcctccttctatatcatcatccgggcc

SEQ ID NO: 310129 - DNA, 30 bp, Artificial Sequence
  Synthetic oligonucleotide
taggatcccaaatcgcagggggtgcgggcc

SEQ ID NO: 310130 - DNA, 30 bp, Artificial Sequence
  Synthetic oligonucleotide
ttacgatctctgtgtcgactgagcggggcc

SEQ ID NO: 310131 - DNA, 30 bp, Artificial Sequence
  Synthetic oligonucleotide
ctgcgaccttcgtattagtccgagggggcc

SEQ ID NO: 310132 - DNA, 30 bp, Artificial Sequence
  Synthetic oligonucleotide
cgagaatatatatagggggcttagggggcc

SEQ ID NO: 310133 - DNA, 30 bp, Artificial Sequence
  Synthetic oligonucleotide
gtcgttagacttggtgtgcgaatgggggcc

SEQ ID NO: 310134 - DNA, 30 bp, Artificial Sequence
  Synthetic oligonucleotide
tccaaacgcacttcaacaatcccctgggcc

SEQ ID NO: 310135 - DNA, 30 bp, Artificial Sequence
  Synthetic oligonucleotide
caagatatgtaagcctacaaaacttgggcc

SEQ ID NO: 310136 - DNA, 30 bp, Artificial Sequence
  Synthetic oligonucleotide
ctctggcaaacaagagatggattttgggcc

SEQ ID NO: 310137 - DNA, 30 bp, Artificial Sequence
  Synthetic oligonucleotide
gggcggcattgatgggtccgataaatggcc

SEQ ID NO: 310138 - DNA, 29 bp, Artificial Sequence
  Synthetic oligonucleotide
gagtgtccgttccgaatcgaaagatggcc

SEQ ID NO: 310139 - DNA, 30 bp, Artificial Sequence
  Synthetic oligonucleotide
tgcctctgagcctctagtacatggatggcc

SEQ ID NO: 310140 - DNA, 30 bp, Artificial Sequence
  Synthetic oligonucleotide
cggcgttttagtgttatgctatatatggcc

SEQ ID NO: 310141 - DNA, 30 bp, Artificial Sequence
  Synthetic oligonucleotide
gagtacctgtgacgtccatcgtgtatggcc

SEQ ID NO: 310142 - DNA, 30 bp, Artificial Sequence
  Synthetic oligonucleotide
tacaaggcgaggaaggctacgctactggcc

SEQ ID NO: 310143 - DNA, 30 bp, Artificial Sequence
  Synthetic oligonucleotide
agcaacttggtccgtctgtcggtcctggcc

SEQ ID NO: 310144 - DNA, 30 bp, Artificial Sequence
  Synthetic oligonucleotide
accggcatggcttgcaattggccgctggcc

SEQ ID NO: 310145 - DNA, 30 bp, Artificial Sequence
  Synthetic oligonucleotide
agaaaaactgtgctagaatgatcgctggcc

SEQ ID NO: 310146 - DNA, 30 bp, Artificial Sequence
  Synthetic oligonucleotide
agtgaacaccccgcactctggaggctggcc

SEQ ID NO: 310147 - DNA, 30 bp, Artificial Sequence
  Synthetic oligonucleotide
ttgttcatgctacgtaactggaaagtggcc

SEQ ID NO: 310148 - DNA, 30 bp, Artificial Sequence
  Synthetic oligonucleotide
agaaccgcttctgaagacgccgtagtggcc

SEQ ID NO: 310149 - DNA, 30 bp, Artificial Sequence
  Synthetic oligonucleotide
tgatttcgtttcttagattcccacgtggcc

SEQ ID NO: 310150 - DNA, 30 bp, Artificial Sequence
  Synthetic oligonucleotide
accaattcatacgggatgaggcacgtggcc

SEQ ID NO: 310151 - DNA, 30 bp, Artificial Sequence
  Synthetic oligonucleotide
tacattgcgagaggccaggttttcgtggcc

SEQ ID NO: 310152 - DNA, 30 bp, Artificial Sequence
  Synthetic oligonucleotide
ttgagcaaggttgtacgtcttctattggcc

SEQ ID NO: 310153 - DNA, 30 bp, Artificial Sequence
  Synthetic oligonucleotide
tatctggccgatcaacgattggacttggcc

SEQ ID NO: 310154 - DNA, 30 bp, Artificial Sequence
  Synthetic oligonucleotide
ttaattaagagtgcatgcgagaccttggcc

SEQ ID NO: 310155 - DNA, 30 bp, Artificial Sequence
  Synthetic oligonucleotide
gaatgttatctaaaagaactaaggttggcc

SEQ ID NO: 310156 - DNA, 30 bp, Artificial Sequence
  Synthetic oligonucleotide
agcgggcggaccatgctgagtattttggcc

SEQ ID NO: 310157 - DNA, 30 bp, Artificial Sequence
  Synthetic oligonucleotide
ttgtaccggacagtgttgaccgccaatgcc

SEQ ID NO: 310158 - DNA, 30 bp, Artificial Sequence
  Synthetic oligonucleotide
gcgagcaggagattgttcggctagaatgcc

SEQ ID NO: 310159 - DNA, 30 bp, Artificial Sequence
  Synthetic oligonucleotide
atgtagcggattttacaattcggacatgcc

SEQ ID NO: 310160 - DNA, 30 bp, Artificial Sequence
  Synthetic oligonucleotide
ggagctacaattgcgtctggcgaccatgcc

SEQ ID NO: 310161 - DNA, 30 bp, Artificial Sequence
  Synthetic oligonucleotide
ggagttgcataacccgcattacaagatgcc

SEQ ID NO: 310162 - DNA, 30 bp, Artificial Sequence
  Synthetic oligonucleotide
tggcgggattagtttaggaagtaagatgcc

SEQ ID NO: 310163 - DNA, 30 bp, Artificial Sequence
  Synthetic oligonucleotide
ttagatggtgttcaaatattaatagatgcc

SEQ ID NO: 310164 - DNA, 31 bp, Artificial Sequence
  Synthetic oligonucleotide
gaggcaaataatattcctattcgcggatgcc

SEQ ID NO: 310165 - DNA, 30 bp, Artificial Sequence
  Synthetic oligonucleotide
ttgcctctccaacgacgttgggaatatgcc

SEQ ID NO: 310166 - DNA, 30 bp, Artificial Sequence
  Synthetic oligonucleotide
tctggggtgggttgctagtgatactatgcc

SEQ ID NO: 310167 - DNA, 30 bp, Artificial Sequence
  Synthetic oligonucleotide
atattcggaggaccggaggtaatgtatgcc

SEQ ID NO: 310168 - DNA, 30 bp, Artificial Sequence
  Synthetic oligonucleotide
cggattagcgaacacgggggcctgtatgcc

SEQ ID NO: 310169 - DNA, 30 bp, Artificial Sequence
  Synthetic oligonucleotide
actgtctgatgtcacagtctcggttatgcc

SEQ ID NO: 310170 - DNA, 30 bp, Artificial Sequence
  Synthetic oligonucleotide
attcccggggctagctatgcgggttatgcc

SEQ ID NO: 310171 - DNA, 30 bp, Artificial Sequence
  Synthetic oligonucleotide
ggctcctgtttaaggcatagatgttatgcc

SEQ ID NO: 310172 - DNA, 30 bp, Artificial Sequence
  Synthetic oligonucleotide
gacttctgagagtacaagtccgaaactgcc

SEQ ID NO: 310173 - DNA, 30 bp, Artificial Sequence
  Synthetic oligonucleotide
gtttgtggccgaattccgcttaggactgcc

SEQ ID NO: 310174 - DNA, 30 bp, Artificial Sequence
  Synthetic oligonucleotide
atgcatgaaagcctcggggtaaatactgcc

SEQ ID NO: 310175 - DNA, 30 bp, Artificial Sequence
  Synthetic oligonucleotide
acgcgcccattaaacgtcgaggaacctgcc

SEQ ID NO: 310176 - DNA, 30 bp, Artificial Sequence
  Synthetic oligonucleotide
tgcctcgcaatgggcttcagcgtacctgcc

SEQ ID NO: 310177 - DNA, 30 bp, Artificial Sequence
  Synthetic oligonucleotide
caataataaaccccagcagggcagcctgcc

SEQ ID NO: 310178 - DNA, 30 bp, Artificial Sequence
  Synthetic oligonucleotide
tcgatcccctctctcgggaattttcctgcc

SEQ ID NO: 310179 - DNA, 30 bp, Artificial Sequence
  Synthetic oligonucleotide
ggccaaaaactggatacctgttttcctgcc

SEQ ID NO: 310180 - DNA, 30 bp, Artificial Sequence
  Synthetic oligonucleotide
acgttcatgaaaagccgatgggtatctgcc

SEQ ID NO: 310181 - DNA, 34 bp, Artificial Sequence
  Synthetic oligonucleotide
caagtcatagtacgtgtgaaccacacgctctgcc

SEQ ID NO: 310182 - DNA, 30 bp, Artificial Sequence
  Synthetic oligonucleotide
caaggcggaggcatttcgcgagagtctgcc

SEQ ID NO: 310183 - DNA, 30 bp, Artificial Sequence
  Synthetic oligonucleotide
ggacaaatagtgtttatcgaatcttctgcc

SEQ ID NO: 310184 - DNA, 30 bp, Artificial Sequence
  Synthetic oligonucleotide
ttctgaaggtcggataactgatcaagtgcc

SEQ ID NO: 310185 - DNA, 30 bp, Artificial Sequence
  Synthetic oligonucleotide
gtaatagaccggcattatctctaacgtgcc

SEQ ID NO: 310186 - DNA, 30 bp, Artificial Sequence
  Synthetic oligonucleotide
cttcacgggtcaagaggttaatcccgtgcc

SEQ ID NO: 310187 - DNA, 30 bp, Artificial Sequence
  Synthetic oligonucleotide
taggatggagctctttcgtcattccgtgcc

SEQ ID NO: 310188 - DNA, 30 bp, Artificial Sequence
  Synthetic oligonucleotide
gtaagttccccctaagcgatgcgtcgtgcc

SEQ ID NO: 310189 - DNA, 30 bp, Artificial Sequence
  Synthetic oligonucleotide
gctcgattgcgggctgaagcctgtcgtgcc

SEQ ID NO: 310190 - DNA, 30 bp, Artificial Sequence
  Synthetic oligonucleotide
ccgtctgcacttggacgcgtttccggtgcc

SEQ ID NO: 310191 - DNA, 30 bp, Artificial Sequence
  Synthetic oligonucleotide
gagcaacctccgcggtacgggtttggtgcc

SEQ ID NO: 310192 - DNA, 30 bp, Artificial Sequence
  Synthetic oligonucleotide
aaaaatacaaatgtggccatcgaatgtgcc

SEQ ID NO: 310193 - DNA, 30 bp, Artificial Sequence
  Synthetic oligonucleotide
ctgagactcaactttttaaggacaattgcc

SEQ ID NO: 310194 - DNA, 30 bp, Artificial Sequence
  Synthetic oligonucleotide
tagctgggccggagtccaatcctaattgcc

SEQ ID NO: 310195 - DNA, 30 bp, Artificial Sequence
  Synthetic oligonucleotide
aggtcgacattgtctgggaatctaattgcc

SEQ ID NO: 310196 - DNA, 30 bp, Artificial Sequence
  Synthetic oligonucleotide
tgatagttgcttagggacggcaccattgcc

SEQ ID NO: 310197 - DNA, 30 bp, Artificial Sequence
  Synthetic oligonucleotide
agaggttttctgcattgtcaaccgattgcc

SEQ ID NO: 310198 - DNA, 30 bp, Artificial Sequence
  Synthetic oligonucleotide
agatggtaaggcctcagtacgtcgattgcc

SEQ ID NO: 310199 - DNA, 30 bp, Artificial Sequence
  Synthetic oligonucleotide
atcgataattcaattgtccacgatattgcc

SEQ ID NO: 310200 - DNA, 30 bp, Artificial Sequence
  Synthetic oligonucleotide
cctcctaaaatttttggatcagtccttgcc

SEQ ID NO: 310201 - DNA, 30 bp, Artificial Sequence
  Synthetic oligonucleotide
atgcggacgtttcaaatgtctaagcttgcc

SEQ ID NO: 310202 - DNA, 30 bp, Artificial Sequence
  Synthetic oligonucleotide
agcaagtcctttctgtgcagttagcttgcc

SEQ ID NO: 310203 - DNA, 30 bp, Artificial Sequence
  Synthetic oligonucleotide
cccccaagaaaagcatctgcaatgcttgcc

SEQ ID NO: 310204 - DNA, 30 bp, Artificial Sequence
  Synthetic oligonucleotide
gggccactgatccgccggatccctcttgcc

SEQ ID NO: 310205 - DNA, 30 bp, Artificial Sequence
  Synthetic oligonucleotide
gacaagagttacgctcgccttacagttgcc

SEQ ID NO: 310206 - DNA, 30 bp, Artificial Sequence
  Synthetic oligonucleotide
tgagcttattcgtcatactctatagttgcc

SEQ ID NO: 310207 - DNA, 30 bp, Artificial Sequence
  Synthetic oligonucleotide
atcattagtgaagcaagctgaagggttgcc

SEQ ID NO: 310208 - DNA, 30 bp, Artificial Sequence
  Synthetic oligonucleotide
agggagaccgcgcggggctcacgggttgcc

SEQ ID NO: 310209 - DNA, 30 bp, Artificial Sequence
  Synthetic oligonucleotide
tgccaatgttggggtctaatgttggttgcc

SEQ ID NO: 310210 - DNA, 30 bp, Artificial Sequence
  Synthetic oligonucleotide
ggcgcgtggccctcttgcataaatgttgcc

SEQ ID NO: 310211 - DNA, 30 bp, Artificial Sequence
  Synthetic oligonucleotide
gactcgttcgtcatggccgggcatgttgcc

SEQ ID NO: 310212 - DNA, 30 bp, Artificial Sequence
  Synthetic oligonucleotide
gcaggccgtctaagtgcaatttaatttgcc

SEQ ID NO: 310213 - DNA, 30 bp, Artificial Sequence
  Synthetic oligonucleotide
cggcaaccgttatgtcacgacatatttgcc

SEQ ID NO: 310214 - DNA, 30 bp, Artificial Sequence
  Synthetic oligonucleotide
aagagcacgatcactgcgcataagtttgcc

SEQ ID NO: 310215 - DNA, 30 bp, Artificial Sequence
  Synthetic oligonucleotide
ggtggggctaggacatcgaaattgtttgcc

SEQ ID NO: 310216 - DNA, 30 bp, Artificial Sequence
  Synthetic oligonucleotide
tgattaaaaaaatagggaccaaattttgcc

SEQ ID NO: 310217 - DNA, 30 bp, Artificial Sequence
  Synthetic oligonucleotide
agaccctccaacatctaaagaagttttgcc

SEQ ID NO: 310218 - DNA, 30 bp, Artificial Sequence
  Synthetic oligonucleotide
atgtcggtataaaagtcggtgctttttgcc

SEQ ID NO: 310219 - DNA, 30 bp, Artificial Sequence
  Synthetic oligonucleotide
aacatggagttctttagaaacgtaaaatcc

SEQ ID NO: 310220 - DNA, 30 bp, Artificial Sequence
  Synthetic oligonucleotide
cataaggctcaggaagagagtttcaaatcc

SEQ ID NO: 310221 - DNA, 30 bp, Artificial Sequence
  Synthetic oligonucleotide
acttaaaagagacaatggttgtagaaatcc

SEQ ID NO: 310222 - DNA, 30 bp, Artificial Sequence
  Synthetic oligonucleotide
atccgttcggagttctacaccgcgaaatcc

SEQ ID NO: 310223 - DNA, 30 bp, Artificial Sequence
  Synthetic oligonucleotide
ctgaaactcatactcctgcaatcgaaatcc

SEQ ID NO: 310224 - DNA, 30 bp, Artificial Sequence
  Synthetic oligonucleotide
cactacaaggtgttcgttgtgtggaaatcc

SEQ ID NO: 310225 - DNA, 30 bp, Artificial Sequence
  Synthetic oligonucleotide
tacatcagatacacaccaggcttgaaatcc

SEQ ID NO: 310226 - DNA, 30 bp, Artificial Sequence
  Synthetic oligonucleotide
ggaaccagtacaatagcgcatttacaatcc

SEQ ID NO: 310227 - DNA, 30 bp, Artificial Sequence
  Synthetic oligonucleotide
ggccctaagttgggtcccagatagcaatcc

SEQ ID NO: 310228 - DNA, 30 bp, Artificial Sequence
  Synthetic oligonucleotide
ctaaccgtgtttcatctcataccgcaatcc

SEQ ID NO: 310229 - DNA, 30 bp, Artificial Sequence
  Synthetic oligonucleotide
tcttaatggaacgctgcgaagaatcaatcc

SEQ ID NO: 310230 - DNA, 30 bp, Artificial Sequence
  Synthetic oligonucleotide
actggcacattgaccagataccatcaatcc

SEQ ID NO: 310231 - DNA, 30 bp, Artificial Sequence
  Synthetic oligonucleotide
gatggtcagatggacgcgtattttcaatcc

SEQ ID NO: 310232 - DNA, 30 bp, Artificial Sequence
  Synthetic oligonucleotide
aagtcatgaggcgggcatttgacagaatcc

SEQ ID NO: 310233 - DNA, 30 bp, Artificial Sequence
  Synthetic oligonucleotide
aataatagatgcgccatgaaatgagaatcc

SEQ ID NO: 310234 - DNA, 30 bp, Artificial Sequence
  Synthetic oligonucleotide
cccaaaactaaggtggaatatatagaatcc

SEQ ID NO: 310235 - DNA, 30 bp, Artificial Sequence
  Synthetic oligonucleotide
ttatataagcgcacgccgtagggcgaatcc

SEQ ID NO: 310236 - DNA, 30 bp, Artificial Sequence
  Synthetic oligonucleotide
gggtcgcttatttctcaaaggtaggaatcc

SEQ ID NO: 310237 - DNA, 30 bp, Artificial Sequence
  Synthetic oligonucleotide
aaagatccccagggcgtggtcatggaatcc

SEQ ID NO: 310238 - DNA, 30 bp, Artificial Sequence
  Synthetic oligonucleotide
cagagtttaataaaattgtcgcctgaatcc

SEQ ID NO: 310239 - DNA, 30 bp, Artificial Sequence
  Synthetic oligonucleotide
agcccggcatgaggcccggttgttgaatcc

SEQ ID NO: 310240 - DNA, 30 bp, Artificial Sequence
  Synthetic oligonucleotide
tacgtagtgtcccacccgtccatataatcc

SEQ ID NO: 310241 - DNA, 30 bp, Artificial Sequence
  Synthetic oligonucleotide
aatttacgctggtagtatcaagcgacatcc

SEQ ID NO: 310242 - DNA, 30 bp, Artificial Sequence
  Synthetic oligonucleotide
ctaccctggccgtgtggtcctgaaccatcc

SEQ ID NO: 310243 - DNA, 30 bp, Artificial Sequence
  Synthetic oligonucleotide
tgtcccggggagtctggcattgacccatcc

SEQ ID NO: 310244 - DNA, 30 bp, Artificial Sequence
  Synthetic oligonucleotide
aaacgggtacgagtggcgttgcccccatcc

SEQ ID NO: 310245 - DNA, 30 bp, Artificial Sequence
  Synthetic oligonucleotide
gaaggtgctgggcagtgtacggcgccatcc

SEQ ID NO: 310246 - DNA, 30 bp, Artificial Sequence
  Synthetic oligonucleotide
ataagcgactatccggataagggtccatcc

SEQ ID NO: 310247 - DNA, 30 bp, Artificial Sequence
  Synthetic oligonucleotide
atataatattccaacgaggctaaagcatcc

SEQ ID NO: 310248 - DNA, 30 bp, Artificial Sequence
  Synthetic oligonucleotide
caagcataaggcaccggttatgccgcatcc

SEQ ID NO: 310249 - DNA, 30 bp, Artificial Sequence
  Synthetic oligonucleotide
ggtgcgacgaagctaaactgaggcgcatcc

SEQ ID NO: 310250 - DNA, 30 bp, Artificial Sequence
  Synthetic oligonucleotide
gactgtatgaagatggatcaagtcgcatcc

SEQ ID NO: 310251 - DNA, 30 bp, Artificial Sequence
  Synthetic oligonucleotide
ttaaagtaatatctattcattccggcatcc

SEQ ID NO: 310252 - DNA, 30 bp, Artificial Sequence
  Synthetic oligonucleotide
cagattcgaattgtaggttagagggcatcc

SEQ ID NO: 310253 - DNA, 30 bp, Artificial Sequence
  Synthetic oligonucleotide
tggagttagtcatgcggtagctcatcatcc

SEQ ID NO: 310254 - DNA, 30 bp, Artificial Sequence
  Synthetic oligonucleotide
atgagttagggaatagcgcatggatcatcc

SEQ ID NO: 310255 - DNA, 30 bp, Artificial Sequence
  Synthetic oligonucleotide
agggtagtccgtagtaagtacctatcatcc

SEQ ID NO: 310256 - DNA, 30 bp, Artificial Sequence
  Synthetic oligonucleotide
ctacacagtccacggtacctggtatcatcc

SEQ ID NO: 310257 - DNA, 30 bp, Artificial Sequence
  Synthetic oligonucleotide
gctggtacactaattctagtagtgtcatcc

SEQ ID NO: 310258 - DNA, 30 bp, Artificial Sequence
  Synthetic oligonucleotide
ggaactttcccgcgatggaagccaagatcc

SEQ ID NO: 310259 - DNA, 30 bp, Artificial Sequence
  Synthetic oligonucleotide
gaatgaattattcgagagtgacccagatcc

SEQ ID NO: 310260 - DNA, 30 bp, Artificial Sequence
  Synthetic oligonucleotide
cataggacctaattgcatttgctcagatcc

SEQ ID NO: 310261 - DNA, 30 bp, Artificial Sequence
  Synthetic oligonucleotide
ggagtctagctgaagcgagtggggagatcc

SEQ ID NO: 310262 - DNA, 30 bp, Artificial Sequence
  Synthetic oligonucleotide
taagtcagcaggaccaattgacctagatcc

SEQ ID NO: 310263 - DNA, 30 bp, Artificial Sequence
  Synthetic oligonucleotide
cgttgccaatcgcgtttatcatgacgatcc

SEQ ID NO: 310264 - DNA, 30 bp, Artificial Sequence
  Synthetic oligonucleotide
aacaagcatcgatgcttaaagaagcgatcc

SEQ ID NO: 310265 - DNA, 30 bp, Artificial Sequence
  Synthetic oligonucleotide
gcaggtgattatgtgtgaattgttcgatcc

SEQ ID NO: 310266 - DNA, 30 bp, Artificial Sequence
  Synthetic oligonucleotide
atgccgttgtccgataatggttcaggatcc

SEQ ID NO: 310267 - DNA, 30 bp, Artificial Sequence
  Synthetic oligonucleotide
cgtcgtgtcgaccttacaaaaggcggatcc

SEQ ID NO: 310268 - DNA, 30 bp, Artificial Sequence
  Synthetic oligonucleotide
tgaactcatgaggttgacgagtcgggatcc

SEQ ID NO: 310269 - DNA, 30 bp, Artificial Sequence
  Synthetic oligonucleotide
gatacgaacactacctttatcaactgatcc

SEQ ID NO: 310270 - DNA, 30 bp, Artificial Sequence
  Synthetic oligonucleotide
gaggaatgaacgctttttccagggtgatcc

SEQ ID NO: 310271 - DNA, 30 bp, Artificial Sequence
  Synthetic oligonucleotide
gaaacagttggctacaggccgttgtgatcc

SEQ ID NO: 310272 - DNA, 30 bp, Artificial Sequence
  Synthetic oligonucleotide
gtctaatggagtaatgaatgtttgtgatcc

SEQ ID NO: 310273 - DNA, 30 bp, Artificial Sequence
  Synthetic oligonucleotide
acgttgttagttgtgcgtagagcttgatcc

SEQ ID NO: 310274 - DNA, 30 bp, Artificial Sequence
  Synthetic oligonucleotide
aagccgtcagtaatcaatggtataatatcc

SEQ ID NO: 310275 - DNA, 30 bp, Artificial Sequence
  Synthetic oligonucleotide
tggactgatctgggtctgcgtccgatatcc

SEQ ID NO: 310276 - DNA, 30 bp, Artificial Sequence
  Synthetic oligonucleotide
aaatgaggataaaatcttattccgatatcc

SEQ ID NO: 310277 - DNA, 30 bp, Artificial Sequence
  Synthetic oligonucleotide
gaacctgacactacgggcatatcgatatcc

SEQ ID NO: 310278 - DNA, 30 bp, Artificial Sequence
  Synthetic oligonucleotide
cactgttggtggagtatggacaggatatcc

SEQ ID NO: 310279 - DNA, 30 bp, Artificial Sequence
  Synthetic oligonucleotide
ttgcagagggccggagagcaccaactatcc

SEQ ID NO: 310280 - DNA, 30 bp, Artificial Sequence
  Synthetic oligonucleotide
aatgtctatcacggtcacctgtaactatcc

SEQ ID NO: 310281 - DNA, 30 bp, Artificial Sequence
  Synthetic oligonucleotide
cttcttcgcacaattacacggatactatcc

SEQ ID NO: 310282 - DNA, 30 bp, Artificial Sequence
  Synthetic oligonucleotide
gttctaagctacacgccgataaacctatcc

SEQ ID NO: 310283 - DNA, 30 bp, Artificial Sequence
  Synthetic oligonucleotide
gggggattacaaaagcgcgcacagctatcc

SEQ ID NO: 310284 - DNA, 30 bp, Artificial Sequence
  Synthetic oligonucleotide
cctatgttcccgacagaacggcggctatcc

SEQ ID NO: 310285 - DNA, 30 bp, Artificial Sequence
  Synthetic oligonucleotide
gcgaaacctgtgtttgtctaggggctatcc

SEQ ID NO: 310286 - DNA, 30 bp, Artificial Sequence
  Synthetic oligonucleotide
tagaaaccaacagtccgtgaaagtctatcc

SEQ ID NO: 310287 - DNA, 30 bp, Artificial Sequence
  Synthetic oligonucleotide
ggtgatagggagattatgagcggtctatcc

SEQ ID NO: 310288 - DNA, 30 bp, Artificial Sequence
  Synthetic oligonucleotide
cacaaaaccggaacacttaaagttctatcc

SEQ ID NO: 310289 - DNA, 30 bp, Artificial Sequence
  Synthetic oligonucleotide
cccttccagagtcacggatcatgcgtatcc

SEQ ID NO: 310290 - DNA, 30 bp, Artificial Sequence
  Synthetic oligonucleotide
gtcatggaaaaggtgacgcatggtgtatcc

SEQ ID NO: 310291 - DNA, 30 bp, Artificial Sequence
  Synthetic oligonucleotide
tgctcccaacgctgttaagcccacttatcc

SEQ ID NO: 310292 - DNA, 30 bp, Artificial Sequence
  Synthetic oligonucleotide
gatccctcggtgatcagctggatcttatcc

SEQ ID NO: 310293 - DNA, 30 bp, Artificial Sequence
  Synthetic oligonucleotide
tcataactcctcataccacttcagttatcc

SEQ ID NO: 310294 - DNA, 30 bp, Artificial Sequence
  Synthetic oligonucleotide
caaaggtctaaggttctaaagcaaaactcc

SEQ ID NO: 310295 - DNA, 30 bp, Artificial Sequence
  Synthetic oligonucleotide
caggatactatcgcaagcccgacaaactcc

SEQ ID NO: 310296 - DNA, 30 bp, Artificial Sequence
  Synthetic oligonucleotide
gtgtaaagctactgtttatagggcaactcc

SEQ ID NO: 310297 - DNA, 30 bp, Artificial Sequence
  Synthetic oligonucleotide
tgattgaacagggggatttatggcaactcc

SEQ ID NO: 310298 - DNA, 30 bp, Artificial Sequence
  Synthetic oligonucleotide
gacgctccggagggccggattttgaactcc

SEQ ID NO: 310299 - DNA, 30 bp, Artificial Sequence
  Synthetic oligonucleotide
accgtgacccgctcggaaaataataactcc

SEQ ID NO: 310300 - DNA, 30 bp, Artificial Sequence
  Synthetic oligonucleotide
ggacaacggtttttacgatagtctaactcc

SEQ ID NO: 310301 - DNA, 30 bp, Artificial Sequence
  Synthetic oligonucleotide
tggcctattatgaggaatatgctccactcc

SEQ ID NO: 310302 - DNA, 30 bp, Artificial Sequence
  Synthetic oligonucleotide
cggctcgaatgtgccgactatgtccactcc

SEQ ID NO: 310303 - DNA, 30 bp, Artificial Sequence
  Synthetic oligonucleotide
tagcgtcttgttcacttcagctagcactcc

SEQ ID NO: 310304 - DNA, 30 bp, Artificial Sequence
  Synthetic oligonucleotide
gtcttgaggtagagggcgttaccgcactcc

SEQ ID NO: 310305 - DNA, 30 bp, Artificial Sequence
  Synthetic oligonucleotide
ctatgatagttgttggttaggaggcactcc

SEQ ID NO: 310306 - DNA, 30 bp, Artificial Sequence
  Synthetic oligonucleotide
cgcgatggactcttcgacaactatcactcc

SEQ ID NO: 310307 - DNA, 30 bp, Artificial Sequence
  Synthetic oligonucleotide
taggcagcttgtaccaaccttattcactcc

SEQ ID NO: 310308 - DNA, 30 bp, Artificial Sequence
  Synthetic oligonucleotide
gctgctggtgtgagcggaatagttcactcc

SEQ ID NO: 310309 - DNA, 30 bp, Artificial Sequence
  Synthetic oligonucleotide
gtactggcgccaagggcaccttacgactcc

SEQ ID NO: 310310 - DNA, 30 bp, Artificial Sequence
  Synthetic oligonucleotide
cggggctctcgtcttacggtgtcggactcc

SEQ ID NO: 310311 - DNA, 30 bp, Artificial Sequence
  Synthetic oligonucleotide
gtggcgatccctcactccgttcaatactcc

SEQ ID NO: 310312 - DNA, 30 bp, Artificial Sequence
  Synthetic oligonucleotide
atcgtacccatccccgtgcgaggatactcc

SEQ ID NO: 310313 - DNA, 30 bp, Artificial Sequence
  Synthetic oligonucleotide
gcggtagctacatacactatgaagtactcc

SEQ ID NO: 310314 - DNA, 30 bp, Artificial Sequence
  Synthetic oligonucleotide
gtgtcgatttggattccgcaatcgtactcc

SEQ ID NO: 310315 - DNA, 30 bp, Artificial Sequence
  Synthetic oligonucleotide
ctggaagggtagaggtaccccaggtactcc

SEQ ID NO: 310316 - DNA, 30 bp, Artificial Sequence
  Synthetic oligonucleotide
gtactccacaaagtcaaatgcgggtactcc

SEQ ID NO: 310317 - DNA, 30 bp, Artificial Sequence
  Synthetic oligonucleotide
aagtgtgcgggggtgattagctattactcc

SEQ ID NO: 310318 - DNA, 30 bp, Artificial Sequence
  Synthetic oligonucleotide
agggtacgtggccatggctcctgcacctcc

SEQ ID NO: 310319 - DNA, 30 bp, Artificial Sequence
  Synthetic oligonucleotide
caaaagagcctttctgcagatgggacctcc

SEQ ID NO: 310320 - DNA, 30 bp, Artificial Sequence
  Synthetic oligonucleotide
ggtgtagactgtagggtcacgcatacctcc

SEQ ID NO: 310321 - DNA, 30 bp, Artificial Sequence
  Synthetic oligonucleotide
gtgagggtcaagtctcaggtgcaaccctcc

SEQ ID NO: 310322 - DNA, 30 bp, Artificial Sequence
  Synthetic oligonucleotide
tacgaaacttggatatacaagggaccctcc

SEQ ID NO: 310323 - DNA, 30 bp, Artificial Sequence
  Synthetic oligonucleotide
gcatataatccttcagggcgactaccctcc

SEQ ID NO: 310324 - DNA, 30 bp, Artificial Sequence
  Synthetic oligonucleotide
ttgatcttctaatgtttatcatcgccctcc

SEQ ID NO: 310325 - DNA, 30 bp, Artificial Sequence
  Synthetic oligonucleotide
gaccaccaggcgaaactctggcggccctcc

SEQ ID NO: 310326 - DNA, 30 bp, Artificial Sequence
  Synthetic oligonucleotide
agttacaagcgacacgttttcgcagcctcc

SEQ ID NO: 310327 - DNA, 30 bp, Artificial Sequence
  Synthetic oligonucleotide
agataaagggtcaagggtatgtcagcctcc

SEQ ID NO: 310328 - DNA, 30 bp, Artificial Sequence
  Synthetic oligonucleotide
cggttaacgtggtccgccggacgagcctcc

SEQ ID NO: 310329 - DNA, 30 bp, Artificial Sequence
  Synthetic oligonucleotide
tgtttagaccctacaccgggtctagcctcc

SEQ ID NO: 310330 - DNA, 30 bp, Artificial Sequence
  Synthetic oligonucleotide
agacagttttttattcgggagttagcctcc

SEQ ID NO: 310331 - DNA, 30 bp, Artificial Sequence
  Synthetic oligonucleotide
aatcggggcacagaaagctattacgcctcc

SEQ ID NO: 310332 - DNA, 30 bp, Artificial Sequence
  Synthetic oligonucleotide
ctcgtcactactcgaaagttacccgcctcc

SEQ ID NO: 310333 - DNA, 30 bp, Artificial Sequence
  Synthetic oligonucleotide
cctatacctgcccataccataatcgcctcc

SEQ ID NO: 310334 - DNA, 30 bp, Artificial Sequence
  Synthetic oligonucleotide
cgtaccgttccttaaggattggaggcctcc

SEQ ID NO: 310335 - DNA, 30 bp, Artificial Sequence
  Synthetic oligonucleotide
gcttcaggaatgttaatgtatggtgcctcc

SEQ ID NO: 310336 - DNA, 30 bp, Artificial Sequence
  Synthetic oligonucleotide
gatcatagatattggaaggccgagtcctcc

SEQ ID NO: 310337 - DNA, 30 bp, Artificial Sequence
  Synthetic oligonucleotide
agacacgctagaagatctgtacggtcctcc

SEQ ID NO: 310338 - DNA, 30 bp, Artificial Sequence
  Synthetic oligonucleotide
gcaagggatttaatttgactgtggtcctcc

SEQ ID NO: 310339 - DNA, 30 bp, Artificial Sequence
  Synthetic oligonucleotide
tactcgtgtacgaggcatttgctgtcctcc

SEQ ID NO: 310340 - DNA, 30 bp, Artificial Sequence
  Synthetic oligonucleotide
ctggttgcgcccgccgctcatcaaagctcc

SEQ ID NO: 310341 - DNA, 30 bp, Artificial Sequence
  Synthetic oligonucleotide
accatttagacattaactgctagcagctcc

SEQ ID NO: 310342 - DNA, 30 bp, Artificial Sequence
  Synthetic oligonucleotide
ggtggcggaacaagagctgccggcagctcc

SEQ ID NO: 310343 - DNA, 30 bp, Artificial Sequence
  Synthetic oligonucleotide
tccgcgctacagattctacgcttcagctcc

SEQ ID NO: 310344 - DNA, 30 bp, Artificial Sequence
  Synthetic oligonucleotide
tttgagatcccggaacagatgtgccgctcc

SEQ ID NO: 310345 - DNA, 30 bp, Artificial Sequence
  Synthetic oligonucleotide
aaaatatcaggttggccggaagatcgctcc

SEQ ID NO: 310346 - DNA, 30 bp, Artificial Sequence
  Synthetic oligonucleotide
gttaaccgggctcaggtcagtacaggctcc

SEQ ID NO: 310347 - DNA, 30 bp, Artificial Sequence
  Synthetic oligonucleotide
gctggacccgcgaatcaatacttaggctcc

SEQ ID NO: 310348 - DNA, 30 bp, Artificial Sequence
  Synthetic oligonucleotide
taatcagttggatcaacaattgggggctcc

SEQ ID NO: 310349 - DNA, 30 bp, Artificial Sequence
  Synthetic oligonucleotide
cacgtacctcggaacaaagcggtgggctcc

SEQ ID NO: 310350 - DNA, 30 bp, Artificial Sequence
  Synthetic oligonucleotide
taggagcttcgggacaggtcgagatgctcc

SEQ ID NO: 310351 - DNA, 30 bp, Artificial Sequence
  Synthetic oligonucleotide
agaagcccacgagtacgggtttcctgctcc

SEQ ID NO: 310352 - DNA, 29 bp, Artificial Sequence
  Synthetic oligonucleotide
atttgttaagggtaggttatgcgtgctcc

SEQ ID NO: 310353 - DNA, 30 bp, Artificial Sequence
  Synthetic oligonucleotide
gactcacacgacactccgggacgttgctcc

SEQ ID NO: 310354 - DNA, 30 bp, Artificial Sequence
  Synthetic oligonucleotide
atggcgctactttacttctctttaatctcc

SEQ ID NO: 310355 - DNA, 30 bp, Artificial Sequence
  Synthetic oligonucleotide
caatggggtataaattacctacacatctcc

SEQ ID NO: 310356 - DNA, 30 bp, Artificial Sequence
  Synthetic oligonucleotide
gatattcggggttcgtttgaaaagatctcc

SEQ ID NO: 310357 - DNA, 30 bp, Artificial Sequence
  Synthetic oligonucleotide
tgagttccaccgaccagcgcggagatctcc

SEQ ID NO: 310358 - DNA, 30 bp, Artificial Sequence
  Synthetic oligonucleotide
agaaccatgggatgtcgcttctagatctcc

SEQ ID NO: 310359 - DNA, 30 bp, Artificial Sequence
  Synthetic oligonucleotide
acatcaatacgttttcaagtaggtctctcc

SEQ ID NO: 310360 - DNA, 30 bp, Artificial Sequence
  Synthetic oligonucleotide
gggtgtcggacagggatctcgccagtctcc

SEQ ID NO: 310361 - DNA, 30 bp, Artificial Sequence
  Synthetic oligonucleotide
aggaatatttacatggcatttagggtctcc

SEQ ID NO: 310362 - DNA, 30 bp, Artificial Sequence
  Synthetic oligonucleotide
gaagatccacagtaaggattcctggtctcc

SEQ ID NO: 310363 - DNA, 30 bp, Artificial Sequence
  Synthetic oligonucleotide
ttggttttgaaaccgtcatccgatgtctcc

SEQ ID NO: 310364 - DNA, 30 bp, Artificial Sequence
  Synthetic oligonucleotide
ggtaggtccggcacgcaatcgtctgtctcc

SEQ ID NO: 310365 - DNA, 30 bp, Artificial Sequence
  Synthetic oligonucleotide
gcgttttacaaaagccatcatcgattctcc

SEQ ID NO: 310366 - DNA, 30 bp, Artificial Sequence
  Synthetic oligonucleotide
gacacaagtctatcccgatgaatattctcc

SEQ ID NO: 310367 - DNA, 30 bp, Artificial Sequence
  Synthetic oligonucleotide
ttaaagatgtgaccgcgaaaaaacttctcc

SEQ ID NO: 310368 - DNA, 30 bp, Artificial Sequence
  Synthetic oligonucleotide
gtaaccggtatcgatgaagtatacttctcc

SEQ ID NO: 310369 - DNA, 30 bp, Artificial Sequence
  Synthetic oligonucleotide
ttgcgtattgtgaggagtcttaagttctcc

SEQ ID NO: 310370 - DNA, 30 bp, Artificial Sequence
  Synthetic oligonucleotide
caagtcccgtagaatacctgagagttctcc

SEQ ID NO: 310371 - DNA, 30 bp, Artificial Sequence
  Synthetic oligonucleotide
tgccacggaggggactcagatcgaaagtcc

SEQ ID NO: 310372 - DNA, 30 bp, Artificial Sequence
  Synthetic oligonucleotide
agtagggtaggatgcggtgagggaaagtcc

SEQ ID NO: 310373 - DNA, 30 bp, Artificial Sequence
  Synthetic oligonucleotide
aggaaatctatcctgataaaaactaagtcc

SEQ ID NO: 310374 - DNA, 30 bp, Artificial Sequence
  Synthetic oligonucleotide
ctcagtctatgaactttttgtgctaagtcc

SEQ ID NO: 310375 - DNA, 30 bp, Artificial Sequence
  Synthetic oligonucleotide
aatacagtccaggcccccatatctaagtcc

SEQ ID NO: 310376 - DNA, 30 bp, Artificial Sequence
  Synthetic oligonucleotide
agaaatcctcaagcgcgtaggcgtaagtcc

SEQ ID NO: 310377 - DNA, 30 bp, Artificial Sequence
  Synthetic oligonucleotide
aatcgacagatggtcatgggagttaagtcc

SEQ ID NO: 310378 - DNA, 30 bp, Artificial Sequence
  Synthetic oligonucleotide
caccgttgcccgcaagggtgcgaacagtcc

SEQ ID NO: 310379 - DNA, 30 bp, Artificial Sequence
  Synthetic oligonucleotide
cctccggtaccacgattgtggagacagtcc

SEQ ID NO: 310380 - DNA, 30 bp, Artificial Sequence
  Synthetic oligonucleotide
ggcgtcaccggaaattagtcagtccagtcc

SEQ ID NO: 310381 - DNA, 30 bp, Artificial Sequence
  Synthetic oligonucleotide
gcaggtcatccgaggaccgatgagcagtcc

SEQ ID NO: 310382 - DNA, 30 bp, Artificial Sequence
  Synthetic oligonucleotide
accagcagccccagaaactagacgcagtcc

SEQ ID NO: 310383 - DNA, 30 bp, Artificial Sequence
  Synthetic oligonucleotide
tatgcgtgatcgggaccagggttgcagtcc

SEQ ID NO: 310384 - DNA, 30 bp, Artificial Sequence
  Synthetic oligonucleotide
cttcgtaatactaagaaaggccacgagtcc

SEQ ID NO: 310385 - DNA, 31 bp, Artificial Sequence
  Synthetic oligonucleotide
agggccgagaggagttaggaatcccgagtcc

SEQ ID NO: 310386 - DNA, 30 bp, Artificial Sequence
  Synthetic oligonucleotide
ggaagagagagctccggtacccaggagtcc

SEQ ID NO: 310387 - DNA, 30 bp, Artificial Sequence
  Synthetic oligonucleotide
gcaatgtatcgctcagaagttggggagtcc

SEQ ID NO: 310388 - DNA, 30 bp, Artificial Sequence
  Synthetic oligonucleotide
gccgaaatatgcgtcgggcgttgggagtcc

SEQ ID NO: 310389 - DNA, 30 bp, Artificial Sequence
  Synthetic oligonucleotide
ccctgtacattggtaactttttctgagtcc

SEQ ID NO: 310390 - DNA, 30 bp, Artificial Sequence
  Synthetic oligonucleotide
tgaaattacttacgatactcatactagtcc

SEQ ID NO: 310391 - DNA, 30 bp, Artificial Sequence
  Synthetic oligonucleotide
cttcttatggagtgattgttgccgtagtcc

SEQ ID NO: 310392 - DNA, 30 bp, Artificial Sequence
  Synthetic oligonucleotide
cttcatagggcggtccgcctgtggtagtcc

SEQ ID NO: 310393 - DNA, 30 bp, Artificial Sequence
  Synthetic oligonucleotide
ttacctatctgtagttccggctattagtcc

SEQ ID NO: 310394 - DNA, 30 bp, Artificial Sequence
  Synthetic oligonucleotide
gagtacacagaatggctgacgccaacgtcc

SEQ ID NO: 310395 - DNA, 30 bp, Artificial Sequence
  Synthetic oligonucleotide
tgcagggatggaagccagcgcagaacgtcc

SEQ ID NO: 310396 - DNA, 30 bp, Artificial Sequence
  Synthetic oligonucleotide
ggatcaaccataagccttagacgaacgtcc

SEQ ID NO: 310397 - DNA, 30 bp, Artificial Sequence
  Synthetic oligonucleotide
gaccgaagctaggacccgcattgaacgtcc

SEQ ID NO: 310398 - DNA, 30 bp, Artificial Sequence
  Synthetic oligonucleotide
gtcggggcgaggaggtctggtgacacgtcc

SEQ ID NO: 310399 - DNA, 30 bp, Artificial Sequence
  Synthetic oligonucleotide
tctcgtccacaggttactttatatacgtcc

SEQ ID NO: 310400 - DNA, 30 bp, Artificial Sequence
  Synthetic oligonucleotide
cctgtgttactgtagctttaataaccgtcc

SEQ ID NO: 310401 - DNA, 30 bp, Artificial Sequence
  Synthetic oligonucleotide
ctcgtataacgaccgggttgaacgccgtcc

SEQ ID NO: 310402 - DNA, 30 bp, Artificial Sequence
  Synthetic oligonucleotide
ccagtattggtgcagtggccgtaagcgtcc

SEQ ID NO: 310403 - DNA, 30 bp, Artificial Sequence
  Synthetic oligonucleotide
ctggaaactgtgcttcccgcaggcgcgtcc

SEQ ID NO: 310404 - DNA, 30 bp, Artificial Sequence
  Synthetic oligonucleotide
gtcaggaggtagcccggtgagccggcgtcc

SEQ ID NO: 310405 - DNA, 30 bp, Artificial Sequence
  Synthetic oligonucleotide
gttgcgcgacgtgctccccgatgggcgtcc

SEQ ID NO: 310406 - DNA, 30 bp, Artificial Sequence
  Synthetic oligonucleotide
tttttgccaaagaggattgcgtgatcgtcc

SEQ ID NO: 310407 - DNA, 30 bp, Artificial Sequence
  Synthetic oligonucleotide
cttgggtcctcatcggatacagagtcgtcc

SEQ ID NO: 310408 - DNA, 30 bp, Artificial Sequence
  Synthetic oligonucleotide
cggggttggctacttgctgttatgtcgtcc

SEQ ID NO: 310409 - DNA, 30 bp, Artificial Sequence
  Synthetic oligonucleotide
atcatgtgttactaagctgcttattcgtcc

SEQ ID NO: 310410 - DNA, 30 bp, Artificial Sequence
  Synthetic oligonucleotide
aaggtttagatgagcgccccattttcgtcc

SEQ ID NO: 310411 - DNA, 30 bp, Artificial Sequence
  Synthetic oligonucleotide
atcaaaaaccagcagcacttatcaaggtcc

SEQ ID NO: 310412 - DNA, 30 bp, Artificial Sequence
  Synthetic oligonucleotide
aatccatgcattcattctttggagaggtcc

SEQ ID NO: 310413 - DNA, 30 bp, Artificial Sequence
  Synthetic oligonucleotide
cgtgctgcccggtttggaccatgacggtcc

SEQ ID NO: 310414 - DNA, 30 bp, Artificial Sequence
  Synthetic oligonucleotide
gatcacgccatggcacaacccccccggtcc

SEQ ID NO: 310415 - DNA, 30 bp, Artificial Sequence
  Synthetic oligonucleotide
cagaaggtccagctgacacatagtcggtcc

SEQ ID NO: 310416 - DNA, 30 bp, Artificial Sequence
  Synthetic oligonucleotide
cattaacacacccaagtattcagagggtcc

SEQ ID NO: 310417 - DNA, 30 bp, Artificial Sequence
  Synthetic oligonucleotide
tgtgggtaagagcaattcaaaatagggtcc

SEQ ID NO: 310418 - DNA, 30 bp, Artificial Sequence
  Synthetic oligonucleotide
tacgagtattagtagaaggacagggggtcc

SEQ ID NO: 310419 - DNA, 30 bp, Artificial Sequence
  Synthetic oligonucleotide
tgttgataaacgcagtaccggcgggggtcc

SEQ ID NO: 310420 - DNA, 30 bp, Artificial Sequence
  Synthetic oligonucleotide
cgcccttcaaagcacgaagtgagtgggtcc

SEQ ID NO: 310421 - DNA, 30 bp, Artificial Sequence
  Synthetic oligonucleotide
tcggctcatcatgactcattcacatggtcc

SEQ ID NO: 310422 - DNA, 30 bp, Artificial Sequence
  Synthetic oligonucleotide
ttagtgcgtatagatatggcaccatggtcc

SEQ ID NO: 310423 - DNA, 30 bp, Artificial Sequence
  Synthetic oligonucleotide
tcgttgctgaagacctttacgggatggtcc

SEQ ID NO: 310424 - DNA, 30 bp, Artificial Sequence
  Synthetic oligonucleotide
gcttggctttcgcagtcatgcatatggtcc

SEQ ID NO: 310425 - DNA, 30 bp, Artificial Sequence
  Synthetic oligonucleotide
tggttagagtatacacaagtgcactggtcc

SEQ ID NO: 310426 - DNA, 30 bp, Artificial Sequence
  Synthetic oligonucleotide
gatcgaggccggggaagtgataagtggtcc

SEQ ID NO: 310427 - DNA, 30 bp, Artificial Sequence
  Synthetic oligonucleotide
tgtactccttgttgtgtacaactgtggtcc

SEQ ID NO: 310428 - DNA, 30 bp, Artificial Sequence
  Synthetic oligonucleotide
cgtttacattttcaaatatacacttggtcc

SEQ ID NO: 310429 - DNA, 30 bp, Artificial Sequence
  Synthetic oligonucleotide
gagggagtgtccaacggagaggcttggtcc

SEQ ID NO: 310430 - DNA, 30 bp, Artificial Sequence
  Synthetic oligonucleotide
cgtttgccctcgctgtatccgacaatgtcc

SEQ ID NO: 310431 - DNA, 30 bp, Artificial Sequence
  Synthetic oligonucleotide
tgagatcgcccccttttactgccaatgtcc

SEQ ID NO: 310432 - DNA, 30 bp, Artificial Sequence
  Synthetic oligonucleotide
ccgtccaacagagcgtgcacgagaatgtcc

SEQ ID NO: 310433 - DNA, 30 bp, Artificial Sequence
  Synthetic oligonucleotide
acttagaattcgatacacgaactaatgtcc

SEQ ID NO: 310434 - DNA, 30 bp, Artificial Sequence
  Synthetic oligonucleotide
cactagtgcgcggactgtgagaagatgtcc

SEQ ID NO: 310435 - DNA, 30 bp, Artificial Sequence
  Synthetic oligonucleotide
ggtaggtactttcagtcacgtgagatgtcc

SEQ ID NO: 310436 - DNA, 30 bp, Artificial Sequence
  Synthetic oligonucleotide
cttaagaaggcagtggcatccgggatgtcc

SEQ ID NO: 310437 - DNA, 30 bp, Artificial Sequence
  Synthetic oligonucleotide
gtcgcgtgctcgatttacgctcttatgtcc

SEQ ID NO: 310438 - DNA, 30 bp, Artificial Sequence
  Synthetic oligonucleotide
gtcaacagcggtcgtagtaaggaactgtcc

SEQ ID NO: 310439 - DNA, 30 bp, Artificial Sequence
  Synthetic oligonucleotide
tcgtaattgggataatcatgaaggctgtcc

SEQ ID NO: 310440 - DNA, 30 bp, Artificial Sequence
  Synthetic oligonucleotide
gttaattatacacaacagcgctatctgtcc

SEQ ID NO: 310441 - DNA, 30 bp, Artificial Sequence
  Synthetic oligonucleotide
cgggactgctcgtgctttatcattctgtcc

SEQ ID NO: 310442 - DNA, 30 bp, Artificial Sequence
  Synthetic oligonucleotide
accagactatacgctcgcggcacagtgtcc

SEQ ID NO: 310443 - DNA, 30 bp, Artificial Sequence
  Synthetic oligonucleotide
tgagtacggagtttaaggtatgcagtgtcc

SEQ ID NO: 310444 - DNA, 30 bp, Artificial Sequence
  Synthetic oligonucleotide
atgttgcgaatcgcgagcagttgagtgtcc

SEQ ID NO: 310445 - DNA, 30 bp, Artificial Sequence
  Synthetic oligonucleotide
aaagaggatacctcggagtagagtgtgtcc

SEQ ID NO: 310446 - DNA, 30 bp, Artificial Sequence
  Synthetic oligonucleotide
gtttttcctcttaaataagggcgcttgtcc

SEQ ID NO: 310447 - DNA, 30 bp, Artificial Sequence
  Synthetic oligonucleotide
taatgttttattcacagaggacggttgtcc

SEQ ID NO: 310448 - DNA, 30 bp, Artificial Sequence
  Synthetic oligonucleotide
aagcggtggatgcttttggctaatttgtcc

SEQ ID NO: 310449 - DNA, 30 bp, Artificial Sequence
  Synthetic oligonucleotide
cgggaatttttgactaggttacatttgtcc

SEQ ID NO: 310450 - DNA, 30 bp, Artificial Sequence
  Synthetic oligonucleotide
aacctactcagtgcgtcgtgtgatttgtcc

SEQ ID NO: 310451 - DNA, 30 bp, Artificial Sequence
  Synthetic oligonucleotide
cgtgatggttaggttactaatattttgtcc

SEQ ID NO: 310452 - DNA, 30 bp, Artificial Sequence
  Synthetic oligonucleotide
aggtacgagtaataatatcaaaaaaattcc

SEQ ID NO: 310453 - DNA, 30 bp, Artificial Sequence
  Synthetic oligonucleotide
ctacgcgggtccatcgctaaggaaaattcc

SEQ ID NO: 310454 - DNA, 30 bp, Artificial Sequence
  Synthetic oligonucleotide
gagcatcgtgaattggaaatcacaaattcc

SEQ ID NO: 310455 - DNA, 30 bp, Artificial Sequence
  Synthetic oligonucleotide
ggatgccagtccgttaaagtgttcaattcc

SEQ ID NO: 310456 - DNA, 30 bp, Artificial Sequence
  Synthetic oligonucleotide
atgttgggagaatgtaggcacgctaattcc

SEQ ID NO: 310457 - DNA, 30 bp, Artificial Sequence
  Synthetic oligonucleotide
cagctccacgaatcttccaatcgtaattcc

SEQ ID NO: 310458 - DNA, 29 bp, Artificial Sequence
  Synthetic oligonucleotide
agcccagtctacggggtatagttaattcc

SEQ ID NO: 310459 - DNA, 30 bp, Artificial Sequence
  Synthetic oligonucleotide
agacaataactatggtccccgtttaattcc

SEQ ID NO: 310460 - DNA, 30 bp, Artificial Sequence
  Synthetic oligonucleotide
acttgtagctaggagtcaatagtacattcc

SEQ ID NO: 310461 - DNA, 30 bp, Artificial Sequence
  Synthetic oligonucleotide
atatcaccaataccttagtgtagtcattcc

SEQ ID NO: 310462 - DNA, 30 bp, Artificial Sequence
  Synthetic oligonucleotide
acttaggtgggcgctgggtacaaagattcc

SEQ ID NO: 310463 - DNA, 30 bp, Artificial Sequence
  Synthetic oligonucleotide
atgtgcatatagattagctgtatggattcc

SEQ ID NO: 310464 - DNA, 30 bp, Artificial Sequence
  Synthetic oligonucleotide
ggccgccttcgtggtagacagatatattcc

SEQ ID NO: 310465 - DNA, 30 bp, Artificial Sequence
  Synthetic oligonucleotide
tgggcgttgggcaggtaaaagaactattcc

SEQ ID NO: 310466 - DNA, 30 bp, Artificial Sequence
  Synthetic oligonucleotide
taacccttattgcgacgataggcgtattcc

SEQ ID NO: 310467 - DNA, 30 bp, Artificial Sequence
  Synthetic oligonucleotide
aattggacaatattagaagggcggtattcc

SEQ ID NO: 310468 - DNA, 30 bp, Artificial Sequence
  Synthetic oligonucleotide
tacatgtcagtccagtggttggggtattcc

SEQ ID NO: 310469 - DNA, 30 bp, Artificial Sequence
  Synthetic oligonucleotide
gagcctttaaccatggagttcccttattcc

SEQ ID NO: 310470 - DNA, 30 bp, Artificial Sequence
  Synthetic oligonucleotide
acgtctccagcttcatagaagagttattcc

SEQ ID NO: 310471 - DNA, 30 bp, Artificial Sequence
  Synthetic oligonucleotide
gtactcatagacagtcgcttatgaacttcc

SEQ ID NO: 310472 - DNA, 30 bp, Artificial Sequence
  Synthetic oligonucleotide
gcaacctcaggttggggtaggatgacttcc

SEQ ID NO: 310473 - DNA, 30 bp, Artificial Sequence
  Synthetic oligonucleotide
cttggtgtggcaatcgacgtttgtacttcc

SEQ ID NO: 310474 - DNA, 30 bp, Artificial Sequence
  Synthetic oligonucleotide
agcaggtagaagacgagtacgtgaccttcc

SEQ ID NO: 310475 - DNA, 30 bp, Artificial Sequence
  Synthetic oligonucleotide
cgagtgaacgtgcaaatagaaagtccttcc

SEQ ID NO: 310476 - DNA, 30 bp, Artificial Sequence
  Synthetic oligonucleotide
tcagatgatcaacgaaagttgtgtccttcc

SEQ ID NO: 310477 - DNA, 30 bp, Artificial Sequence
  Synthetic oligonucleotide
atgcgtgccctacgggttagagttccttcc

SEQ ID NO: 310478 - DNA, 30 bp, Artificial Sequence
  Synthetic oligonucleotide
tataatagggttagtgtggcaagcgcttcc

SEQ ID NO: 310479 - DNA, 30 bp, Artificial Sequence
  Synthetic oligonucleotide
aggaaacggagctcacaagtccgcgcttcc

SEQ ID NO: 310480 - DNA, 30 bp, Artificial Sequence
  Synthetic oligonucleotide
acttgtgtggatggagtattattcgcttcc

SEQ ID NO: 310481 - DNA, 30 bp, Artificial Sequence
  Synthetic oligonucleotide
gtctcgcgttatgagatgacacaatcttcc

SEQ ID NO: 310482 - DNA, 30 bp, Artificial Sequence
  Synthetic oligonucleotide
ttcacgccagactatacgcggtactcttcc

SEQ ID NO: 310483 - DNA, 30 bp, Artificial Sequence
  Synthetic oligonucleotide
atgactaaacacatactccaacattcttcc

SEQ ID NO: 310484 - DNA, 30 bp, Artificial Sequence
  Synthetic oligonucleotide
catgtgactttactgatccggcattcttcc

SEQ ID NO: 310485 - DNA, 30 bp, Artificial Sequence
  Synthetic oligonucleotide
gcaattatagaagaatgagatgattcttcc

SEQ ID NO: 310486 - DNA, 30 bp, Artificial Sequence
  Synthetic oligonucleotide
tatcatagggaataatatatacgaagttcc

SEQ ID NO: 310487 - DNA, 30 bp, Artificial Sequence
  Synthetic oligonucleotide
ctgagggtcctatgtgggggggtcagttcc

SEQ ID NO: 310488 - DNA, 30 bp, Artificial Sequence
  Synthetic oligonucleotide
aggaacggcgaatgccttagtcatagttcc

SEQ ID NO: 310489 - DNA, 30 bp, Artificial Sequence
  Synthetic oligonucleotide
tgccgttaagtcgaccattcaagccgttcc

SEQ ID NO: 310490 - DNA, 30 bp, Artificial Sequence
  Synthetic oligonucleotide
catactcggttccatgcccgtaatcgttcc

SEQ ID NO: 310491 - DNA, 31 bp, Artificial Sequence
  Synthetic oligonucleotide
ttcaaacgattgacacggggcgtaaggttcc

SEQ ID NO: 310492 - DNA, 30 bp, Artificial Sequence
  Synthetic oligonucleotide
ctgggcgcttccgaggcatatcgcggttcc

SEQ ID NO: 310493 - DNA, 30 bp, Artificial Sequence
  Synthetic oligonucleotide
tttattgcaaacacccggatgcatggttcc

SEQ ID NO: 310494 - DNA, 30 bp, Artificial Sequence
  Synthetic oligonucleotide
ataacgtctattagggaccggtgtggttcc

SEQ ID NO: 310495 - DNA, 30 bp, Artificial Sequence
  Synthetic oligonucleotide
ctatgtattatcttcgattcagcatgttcc

SEQ ID NO: 310496 - DNA, 30 bp, Artificial Sequence
  Synthetic oligonucleotide
cggggaactatagtagtcggcatatgttcc

SEQ ID NO: 310497 - DNA, 30 bp, Artificial Sequence
  Synthetic oligonucleotide
gcactgtgataatagactaaagtatgttcc

SEQ ID NO: 310498 - DNA, 30 bp, Artificial Sequence
  Synthetic oligonucleotide
cacatggaagtgggacgcgaaagctgttcc

SEQ ID NO: 310499 - DNA, 30 bp, Artificial Sequence
  Synthetic oligonucleotide
taaacccttatcacgcacgtgggctgttcc

SEQ ID NO: 310500 - DNA, 30 bp, Artificial Sequence
  Synthetic oligonucleotide
accgcaccggtaaggccgccgagttgttcc

SEQ ID NO: 310501 - DNA, 30 bp, Artificial Sequence
  Synthetic oligonucleotide
tgaaggtatagttggttgcatgaaatttcc

SEQ ID NO: 310502 - DNA, 30 bp, Artificial Sequence
  Synthetic oligonucleotide
tcggaagagatcgtacggaggggaatttcc

SEQ ID NO: 310503 - DNA, 30 bp, Artificial Sequence
  Synthetic oligonucleotide
gcgatgaggccatgacgagtgctaatttcc

SEQ ID NO: 310504 - DNA, 30 bp, Artificial Sequence
  Synthetic oligonucleotide
cggttcagcttaagagctgatcacatttcc

SEQ ID NO: 310505 - DNA, 30 bp, Artificial Sequence
  Synthetic oligonucleotide
caatcgctatgacgcatctatcagatttcc

SEQ ID NO: 310506 - DNA, 30 bp, Artificial Sequence
  Synthetic oligonucleotide
agggattatatcgagcaaccggatatttcc

SEQ ID NO: 310507 - DNA, 30 bp, Artificial Sequence
  Synthetic oligonucleotide
cacctgctgttgcgtaaattaagtatttcc

SEQ ID NO: 310508 - DNA, 30 bp, Artificial Sequence
  Synthetic oligonucleotide
ccggtaaccccccccagcgtagtactttcc

SEQ ID NO: 310509 - DNA, 30 bp, Artificial Sequence
  Synthetic oligonucleotide
tcaagcgccatgacagcctcaaagctttcc

SEQ ID NO: 310510 - DNA, 30 bp, Artificial Sequence
  Synthetic oligonucleotide
actgggttagctcgggacgaggcgctttcc

SEQ ID NO: 310511 - DNA, 30 bp, Artificial Sequence
  Synthetic oligonucleotide
aataacaaagtgactgattggaatctttcc

SEQ ID NO: 310512 - DNA, 30 bp, Artificial Sequence
  Synthetic oligonucleotide
agtaacgtgtgctgcgatcattcagtttcc

SEQ ID NO: 310513 - DNA, 30 bp, Artificial Sequence
  Synthetic oligonucleotide
ttctaagggtctattgcctgtcccgtttcc

SEQ ID NO: 310514 - DNA, 30 bp, Artificial Sequence
  Synthetic oligonucleotide
gcttgtgcaggggtggccggggccgtttcc

SEQ ID NO: 310515 - DNA, 30 bp, Artificial Sequence
  Synthetic oligonucleotide
ctacggaaccgattcggatctgtcgtttcc

SEQ ID NO: 310516 - DNA, 30 bp, Artificial Sequence
  Synthetic oligonucleotide
gtggtggtcacgcaaataaggcaggtttcc

SEQ ID NO: 310517 - DNA, 30 bp, Artificial Sequence
  Synthetic oligonucleotide
gacggtgcgcccatgaaaacatcggtttcc

SEQ ID NO: 310518 - DNA, 30 bp, Artificial Sequence
  Synthetic oligonucleotide
tcagtttagagagacgaccgcggggtttcc

SEQ ID NO: 310519 - DNA, 30 bp, Artificial Sequence
  Synthetic oligonucleotide
ccgtcagctgagcacttaaggtctgtttcc

SEQ ID NO: 310520 - DNA, 30 bp, Artificial Sequence
  Synthetic oligonucleotide
ctccaggccgcctgaggtgattctgtttcc

SEQ ID NO: 310521 - DNA, 30 bp, Artificial Sequence
  Synthetic oligonucleotide
tcacgtgtaagcggtagtctccgattttcc

SEQ ID NO: 310522 - DNA, 30 bp, Artificial Sequence
  Synthetic oligonucleotide
caaaccgtcacctgggcatgaaacttttcc

SEQ ID NO: 310523 - DNA, 30 bp, Artificial Sequence
  Synthetic oligonucleotide
ataggactgaaaacaaaggtcctcttttcc

SEQ ID NO: 310524 - DNA, 30 bp, Artificial Sequence
  Synthetic oligonucleotide
cgctaagagcagttagatacaaagttttcc

SEQ ID NO: 310525 - DNA, 30 bp, Artificial Sequence
  Synthetic oligonucleotide
cgggcgacgcacaattctccactgttttcc

SEQ ID NO: 310526 - DNA, 30 bp, Artificial Sequence
  Synthetic oligonucleotide
tagagtttgacgtctaagacctgaaaaagc

SEQ ID NO: 310527 - DNA, 30 bp, Artificial Sequence
  Synthetic oligonucleotide
ccaggcttttattagcatcatttaaaaagc

SEQ ID NO: 310528 - DNA, 30 bp, Artificial Sequence
  Synthetic oligonucleotide
gttgtgcgcgaccactctggccgcaaaagc

SEQ ID NO: 310529 - DNA, 30 bp, Artificial Sequence
  Synthetic oligonucleotide
ttatagagcgcgcctggggcgggcaaaagc

SEQ ID NO: 310530 - DNA, 30 bp, Artificial Sequence
  Synthetic oligonucleotide
aattgtgagtgataaccggcggtgaaaagc

SEQ ID NO: 310531 - DNA, 30 bp, Artificial Sequence
  Synthetic oligonucleotide
cggagtgctacctcagtccaacataaaagc

SEQ ID NO: 310532 - DNA, 30 bp, Artificial Sequence
  Synthetic oligonucleotide
gtgaatcaatggaaacatcgggataaaagc

SEQ ID NO: 310533 - DNA, 30 bp, Artificial Sequence
  Synthetic oligonucleotide
ggctacacaaacccctttcacactaaaagc

SEQ ID NO: 310534 - DNA, 30 bp, Artificial Sequence
  Synthetic oligonucleotide
gaaatgtaggagaccatgggaaaacaaagc

SEQ ID NO: 310535 - DNA, 30 bp, Artificial Sequence
  Synthetic oligonucleotide
acatgtgtcgacggtgtcttgtaccaaagc

SEQ ID NO: 310536 - DNA, 30 bp, Artificial Sequence
  Synthetic oligonucleotide
gaagaggaacataatctgacgccgcaaagc

SEQ ID NO: 310537 - DNA, 30 bp, Artificial Sequence
  Synthetic oligonucleotide
gagcctaggttgcacttgcatccgcaaagc

SEQ ID NO: 310538 - DNA, 30 bp, Artificial Sequence
  Synthetic oligonucleotide
cgacacagcacttggaacgtcgtgcaaagc

SEQ ID NO: 310539 - DNA, 30 bp, Artificial Sequence
  Synthetic oligonucleotide
agttgggtgtctaccacccactgtcaaagc

SEQ ID NO: 310540 - DNA, 30 bp, Artificial Sequence
  Synthetic oligonucleotide
tcgtgggtgacttgtatgagacaagaaagc

SEQ ID NO: 310541 - DNA, 30 bp, Artificial Sequence
  Synthetic oligonucleotide
cgccttccagaccggattaagtaagaaagc

SEQ ID NO: 310542 - DNA, 30 bp, Artificial Sequence
  Synthetic oligonucleotide
tgaattcattctgtcaaacctagagaaagc

SEQ ID NO: 310543 - DNA, 30 bp, Artificial Sequence
  Synthetic oligonucleotide
gcagtagattgcgataacctgtacgaaagc

SEQ ID NO: 310544 - DNA, 29 bp, Artificial Sequence
  Synthetic oligonucleotide
aaaaagctgctatacatcgccccgaaagc

SEQ ID NO: 310545 - DNA, 30 bp, Artificial Sequence
  Synthetic oligonucleotide
aagcaggctcccgtccagattgaggaaagc

SEQ ID NO: 310546 - DNA, 30 bp, Artificial Sequence
  Synthetic oligonucleotide
ggactatgaatctcggcagtccatgaaagc

SEQ ID NO: 310547 - DNA, 30 bp, Artificial Sequence
  Synthetic oligonucleotide
gtaggtcggggcataggtagtggataaagc

SEQ ID NO: 310548 - DNA, 30 bp, Artificial Sequence
  Synthetic oligonucleotide
atcccgtgaagtctgaaatctatataaagc

SEQ ID NO: 310549 - DNA, 30 bp, Artificial Sequence
  Synthetic oligonucleotide
gcggcgaggttcaaggaccaggggtaaagc

SEQ ID NO: 310550 - DNA, 30 bp, Artificial Sequence
  Synthetic oligonucleotide
gtgctgacatgtcccgacagaagttaaagc

SEQ ID NO: 310551 - DNA, 30 bp, Artificial Sequence
  Synthetic oligonucleotide
taagcatatgtaatcgatatatgttaaagc

SEQ ID NO: 310552 - DNA, 30 bp, Artificial Sequence
  Synthetic oligonucleotide
cggtaaagacacccgccggagccgacaagc

SEQ ID NO: 310553 - DNA, 30 bp, Artificial Sequence
  Synthetic oligonucleotide
gcgatgacgccaacgggaattgaaccaagc

SEQ ID NO: 310554 - DNA, 30 bp, Artificial Sequence
  Synthetic oligonucleotide
ccgttcttgcgttcttttatcagaccaagc

SEQ ID NO: 310555 - DNA, 30 bp, Artificial Sequence
  Synthetic oligonucleotide
atccataacccgatgggcaagagaccaagc

SEQ ID NO: 310556 - DNA, 30 bp, Artificial Sequence
  Synthetic oligonucleotide
tgtaaacgatcagcctgcacagggccaagc

SEQ ID NO: 310557 - DNA, 30 bp, Artificial Sequence
  Synthetic oligonucleotide
gggtataatggctatgcaattactccaagc

SEQ ID NO: 310558 - DNA, 30 bp, Artificial Sequence
  Synthetic oligonucleotide
cttatcatagcttatggtttgcttccaagc

SEQ ID NO: 310559 - DNA, 30 bp, Artificial Sequence
  Synthetic oligonucleotide
aagtgcaacaactcttgcatgtaagcaagc

SEQ ID NO: 310560 - DNA, 30 bp, Artificial Sequence
  Synthetic oligonucleotide
gatgcaagcactacattaacgcgagcaagc

SEQ ID NO: 310561 - DNA, 30 bp, Artificial Sequence
  Synthetic oligonucleotide
tgcatctatttttagcgctgagccgcaagc

SEQ ID NO: 310562 - DNA, 30 bp, Artificial Sequence
  Synthetic oligonucleotide
ctctagctcgctagtaaaagatccgcaagc

SEQ ID NO: 310563 - DNA, 30 bp, Artificial Sequence
  Synthetic oligonucleotide
ttatgaaggactgtagatggaatcgcaagc

SEQ ID NO: 310564 - DNA, 30 bp, Artificial Sequence
  Synthetic oligonucleotide
cgcaactacccgatggacatcagtgcaagc

SEQ ID NO: 310565 - DNA, 30 bp, Artificial Sequence
  Synthetic oligonucleotide
aagtggacaaggccgcagacacaatcaagc

SEQ ID NO: 310566 - DNA, 30 bp, Artificial Sequence
  Synthetic oligonucleotide
tgccataaaaataggcctaatctgtcaagc

SEQ ID NO: 310567 - DNA, 30 bp, Artificial Sequence
  Synthetic oligonucleotide
attaaatgctgagtcacgttccaaagaagc

SEQ ID NO: 310568 - DNA, 30 bp, Artificial Sequence
  Synthetic oligonucleotide
ttgatatatgggaggtcaggaataagaagc

SEQ ID NO: 310569 - DNA, 30 bp, Artificial Sequence
  Synthetic oligonucleotide
ctgagtagctgggtgccatgttccagaagc

SEQ ID NO: 310570 - DNA, 30 bp, Artificial Sequence
  Synthetic oligonucleotide
tggcccaggcggctgtcaggaaagagaagc

SEQ ID NO: 310571 - DNA, 30 bp, Artificial Sequence
  Synthetic oligonucleotide
ttgagtcgtgaggtcggttccatacgaagc

SEQ ID NO: 310572 - DNA, 30 bp, Artificial Sequence
  Synthetic oligonucleotide
accgacgatgggatcttgtggatacgaagc

SEQ ID NO: 310573 - DNA, 30 bp, Artificial Sequence
  Synthetic oligonucleotide
catggtactgtcctgatgcttagccgaagc

SEQ ID NO: 310574 - DNA, 30 bp, Artificial Sequence
  Synthetic oligonucleotide
aatcaattagacagatagtgatagcgaagc

SEQ ID NO: 310575 - DNA, 30 bp, Artificial Sequence
  Synthetic oligonucleotide
gatactactccagagactgaggtgcgaagc

SEQ ID NO: 310576 - DNA, 30 bp, Artificial Sequence
  Synthetic oligonucleotide
ccggtcggtttgtttacaatctgtcgaagc

SEQ ID NO: 310577 - DNA, 30 bp, Artificial Sequence
  Synthetic oligonucleotide
tttactagagttcggatctaaaaaggaagc

SEQ ID NO: 310578 - DNA, 30 bp, Artificial Sequence
  Synthetic oligonucleotide
gtgatattagtgcggattgtcttaggaagc

SEQ ID NO: 310579 - DNA, 30 bp, Artificial Sequence
  Synthetic oligonucleotide
agttagtaatgtcagcgtagatccggaagc

SEQ ID NO: 310580 - DNA, 30 bp, Artificial Sequence
  Synthetic oligonucleotide
tggagaaaaacgatctcgtctagcggaagc

SEQ ID NO: 310581 - DNA, 30 bp, Artificial Sequence
  Synthetic oligonucleotide
ttgcccatggactaaagggatgatggaagc

SEQ ID NO: 310582 - DNA, 30 bp, Artificial Sequence
  Synthetic oligonucleotide
tgtggacatcactatgccggtcaatgaagc

SEQ ID NO: 310583 - DNA, 30 bp, Artificial Sequence
  Synthetic oligonucleotide
tgcaagtaggatcagccacttttatgaagc

SEQ ID NO: 310584 - DNA, 30 bp, Artificial Sequence
  Synthetic oligonucleotide
attcgatctgttgggcagaggtcctgaagc

SEQ ID NO: 310585 - DNA, 30 bp, Artificial Sequence
  Synthetic oligonucleotide
caatctagaatgtcgctttgaacgtgaagc

SEQ ID NO: 310586 - DNA, 30 bp, Artificial Sequence
  Synthetic oligonucleotide
ctaggcagccttgcctgtacgtcgtgaagc

SEQ ID NO: 310587 - DNA, 30 bp, Artificial Sequence
  Synthetic oligonucleotide
cggtgtgcattagccagcgctgaaataagc

SEQ ID NO: 310588 - DNA, 30 bp, Artificial Sequence
  Synthetic oligonucleotide
accctattggtacgggacccggccataagc

SEQ ID NO: 310589 - DNA, 30 bp, Artificial Sequence
  Synthetic oligonucleotide
cgccaagacccgcatccccagcagataagc

SEQ ID NO: 310590 - DNA, 30 bp, Artificial Sequence
  Synthetic oligonucleotide
gatataccctgcgtgtgctcgcagataagc

SEQ ID NO: 310591 - DNA, 30 bp, Artificial Sequence
  Synthetic oligonucleotide
gtgtatacatggcccatcaatccgataagc

SEQ ID NO: 310592 - DNA, 30 bp, Artificial Sequence
  Synthetic oligonucleotide
atgcctattttctctggatagttgataagc

SEQ ID NO: 310593 - DNA, 30 bp, Artificial Sequence
  Synthetic oligonucleotide
acaacgagtaatcgtttcacctgactaagc

SEQ ID NO: 310594 - DNA, 30 bp, Artificial Sequence
  Synthetic oligonucleotide
cacggtctggcctatttgcgcggcctaagc

SEQ ID NO: 310595 - DNA, 30 bp, Artificial Sequence
  Synthetic oligonucleotide
aacaaacggtcgacggaatttttcctaagc

SEQ ID NO: 310596 - DNA, 30 bp, Artificial Sequence
  Synthetic oligonucleotide
ttgcagcttggcgaaaaacacgagctaagc

SEQ ID NO: 310597 - DNA, 30 bp, Artificial Sequence
  Synthetic oligonucleotide
aatcaattcccggtcgccgaaggagtaagc

SEQ ID NO: 310598 - DNA, 30 bp, Artificial Sequence
  Synthetic oligonucleotide
caggtctctacattgcggtgggtagtaagc

SEQ ID NO: 310599 - DNA, 30 bp, Artificial Sequence
  Synthetic oligonucleotide
ttaccatgtcagacgactcaggccgtaagc

SEQ ID NO: 310600 - DNA, 30 bp, Artificial Sequence
  Synthetic oligonucleotide
gagatggtcaccaatatcggtagcgtaagc

SEQ ID NO: 310601 - DNA, 30 bp, Artificial Sequence
  Synthetic oligonucleotide
tatcaaagagtcctgtggcatgcattaagc

SEQ ID NO: 310602 - DNA, 30 bp, Artificial Sequence
  Synthetic oligonucleotide
cttagaacaatacgaacgcagagattaagc

SEQ ID NO: 310603 - DNA, 30 bp, Artificial Sequence
  Synthetic oligonucleotide
gcaacgtctggagctgcgctaaacttaagc

SEQ ID NO: 310604 - DNA, 30 bp, Artificial Sequence
  Synthetic oligonucleotide
gaaacagttacgtgcgatcacgtcttaagc

SEQ ID NO: 310605 - DNA, 30 bp, Artificial Sequence
  Synthetic oligonucleotide
tccagtatagcaggaattagatggttaagc

SEQ ID NO: 310606 - DNA, 30 bp, Artificial Sequence
  Synthetic oligonucleotide
cagtgtaaattggtgaactgcattttaagc

SEQ ID NO: 310607 - DNA, 30 bp, Artificial Sequence
  Synthetic oligonucleotide
ctcggatgggaccgttccatagacaacagc

SEQ ID NO: 310608 - DNA, 30 bp, Artificial Sequence
  Synthetic oligonucleotide
ctaggtagccccaggtaaatgtcgaacagc

SEQ ID NO: 310609 - DNA, 30 bp, Artificial Sequence
  Synthetic oligonucleotide
gaacgtagcagagaatagggtcgacacagc

SEQ ID NO: 310610 - DNA, 30 bp, Artificial Sequence
  Synthetic oligonucleotide
cccataattccaagaatcagcggacacagc

SEQ ID NO: 310611 - DNA, 30 bp, Artificial Sequence
  Synthetic oligonucleotide
ggggtgaatcttctgccaggcttccacagc

SEQ ID NO: 310612 - DNA, 30 bp, Artificial Sequence
  Synthetic oligonucleotide
tcacctgcctcgagtgtacacgctcacagc

SEQ ID NO: 310613 - DNA, 30 bp, Artificial Sequence
  Synthetic oligonucleotide
ggcccttatatcttccattaaaacgacagc

SEQ ID NO: 310614 - DNA, 30 bp, Artificial Sequence
  Synthetic oligonucleotide
aaaatccgtctgacgtatgcgggggacagc

SEQ ID NO: 310615 - DNA, 30 bp, Artificial Sequence
  Synthetic oligonucleotide
gaaagtgtctctagggtatgcgactacagc

SEQ ID NO: 310616 - DNA, 30 bp, Artificial Sequence
  Synthetic oligonucleotide
gaggagtcatgccagatactttactacagc

SEQ ID NO: 310617 - DNA, 30 bp, Artificial Sequence
  Synthetic oligonucleotide
tgtacaatgagccccagttttgcgtacagc

SEQ ID NO: 310618 - DNA, 30 bp, Artificial Sequence
  Synthetic oligonucleotide
ctgctatcttccacaatgttcaaaaccagc

SEQ ID NO: 310619 - DNA, 30 bp, Artificial Sequence
  Synthetic oligonucleotide
aagtaagtttgttacagtgcttagaccagc

SEQ ID NO: 310620 - DNA, 30 bp, Artificial Sequence
  Synthetic oligonucleotide
ttataattgcactaaccacccgataccagc

SEQ ID NO: 310621 - DNA, 30 bp, Artificial Sequence
  Synthetic oligonucleotide
tgtctaaattgtgaaggagattgtaccagc

SEQ ID NO: 310622 - DNA, 30 bp, Artificial Sequence
  Synthetic oligonucleotide
tagtaacacagcttttacatcgaacccagc

SEQ ID NO: 310623 - DNA, 30 bp, Artificial Sequence
  Synthetic oligonucleotide
gaattccaaggaaaaagtcagagtcccagc

SEQ ID NO: 310624 - DNA, 30 bp, Artificial Sequence
  Synthetic oligonucleotide
cccgaggtcgcctccagcggtaaagccagc

SEQ ID NO: 310625 - DNA, 30 bp, Artificial Sequence
  Synthetic oligonucleotide
agaactggcggtattctgatgatagccagc

SEQ ID NO: 310626 - DNA, 30 bp, Artificial Sequence
  Synthetic oligonucleotide
agtccttaacacttccgctaaatggccagc

SEQ ID NO: 310627 - DNA, 30 bp, Artificial Sequence
  Synthetic oligonucleotide
gcaatttacatctaaactcgtaatgccagc

SEQ ID NO: 310628 - DNA, 30 bp, Artificial Sequence
  Synthetic oligonucleotide
cgcgcaataaaattttgagaggctgccagc

SEQ ID NO: 310629 - DNA, 30 bp, Artificial Sequence
  Synthetic oligonucleotide
gaagtccgtgtaggggtgaagccctccagc

SEQ ID NO: 310630 - DNA, 30 bp, Artificial Sequence
  Synthetic oligonucleotide
cttctattccttcgtttctacaggtccagc

SEQ ID NO: 310631 - DNA, 31 bp, Artificial Sequence
  Synthetic oligonucleotide
tcatgtagacgagccatgggtcatgtccagc

SEQ ID NO: 310632 - DNA, 30 bp, Artificial Sequence
  Synthetic oligonucleotide
acctatcctgatcttgaccctcattccagc

SEQ ID NO: 310633 - DNA, 30 bp, Artificial Sequence
  Synthetic oligonucleotide
taatcaacaattttgatccccccttccagc

SEQ ID NO: 310634 - DNA, 30 bp, Artificial Sequence
  Synthetic oligonucleotide
acgttgtcttgagtctttcaactaagcagc

SEQ ID NO: 310635 - DNA, 30 bp, Artificial Sequence
  Synthetic oligonucleotide
gagtattgaggtccagacggccagagcagc

SEQ ID NO: 310636 - DNA, 30 bp, Artificial Sequence
  Synthetic oligonucleotide
atacccggggatggggtcacaccacgcagc

SEQ ID NO: 310637 - DNA, 29 bp, Artificial Sequence
  Synthetic oligonucleotide
ccttaggaacctgcccgggcgcacgcagc

SEQ ID NO: 310638 - DNA, 30 bp, Artificial Sequence
  Synthetic oligonucleotide
agttccgtaggccacaaagttgcacgcagc

SEQ ID NO: 310639 - DNA, 30 bp, Artificial Sequence
  Synthetic oligonucleotide
tcgtccttttagagaagaatacggcgcagc

SEQ ID NO: 310640 - DNA, 30 bp, Artificial Sequence
  Synthetic oligonucleotide
cgtggacaagcatggtcgcaggatcgcagc

SEQ ID NO: 310641 - DNA, 30 bp, Artificial Sequence
  Synthetic oligonucleotide
ggctctcgctgaagttaaccttatcgcagc

SEQ ID NO: 310642 - DNA, 30 bp, Artificial Sequence
  Synthetic oligonucleotide
tccattcagtgatatgtatatcgtcgcagc

SEQ ID NO: 310643 - DNA, 30 bp, Artificial Sequence
  Synthetic oligonucleotide
gggattaagtggagtgcaatgccaggcagc

SEQ ID NO: 310644 - DNA, 30 bp, Artificial Sequence
  Synthetic oligonucleotide
ttactttcgatagatcagggaatcggcagc

SEQ ID NO: 310645 - DNA, 30 bp, Artificial Sequence
  Synthetic oligonucleotide
agggtgggcggtaaggtgaaacggggcagc

SEQ ID NO: 310646 - DNA, 30 bp, Artificial Sequence
  Synthetic oligonucleotide
tgacaacatgcaaaaaatacactgggcagc

SEQ ID NO: 310647 - DNA, 30 bp, Artificial Sequence
  Synthetic oligonucleotide
gcttgaccgcgatggtcatctgatggcagc

SEQ ID NO: 310648 - DNA, 30 bp, Artificial Sequence
  Synthetic oligonucleotide
atcattctcttggaaatccatcttggcagc

SEQ ID NO: 310649 - DNA, 30 bp, Artificial Sequence
  Synthetic oligonucleotide
ccctcctgtgctctggcacccgttggcagc

SEQ ID NO: 310650 - DNA, 30 bp, Artificial Sequence
  Synthetic oligonucleotide
atggatcatatttgatgcgtccgatgcagc

SEQ ID NO: 310651 - DNA, 30 bp, Artificial Sequence
  Synthetic oligonucleotide
gtcgtgccagattgatcctggcactgcagc

SEQ ID NO: 310652 - DNA, 30 bp, Artificial Sequence
  Synthetic oligonucleotide
caaccttgtggtggaagacatccctgcagc

SEQ ID NO: 310653 - DNA, 30 bp, Artificial Sequence
  Synthetic oligonucleotide
ataagcaggagtttctatgtgctctgcagc

SEQ ID NO: 310654 - DNA, 29 bp, Artificial Sequence
  Synthetic oligonucleotide
tgcttccccgtaagccacaggattgcagc

SEQ ID NO: 310655 - DNA, 30 bp, Artificial Sequence
  Synthetic oligonucleotide
aaaacggagcaggaaagcggaccttgcagc

SEQ ID NO: 310656 - DNA, 30 bp, Artificial Sequence
  Synthetic oligonucleotide
cgcgaagaaagtagcagacatctttgcagc

SEQ ID NO: 310657 - DNA, 30 bp, Artificial Sequence
  Synthetic oligonucleotide
aagaccatactcgatgggtttaaaatcagc

SEQ ID NO: 310658 - DNA, 30 bp, Artificial Sequence
  Synthetic oligonucleotide
gaggttagcgcttttgaaaaatcaatcagc

SEQ ID NO: 310659 - DNA, 30 bp, Artificial Sequence
  Synthetic oligonucleotide
taagtctttaatttccaggggggaatcagc

SEQ ID NO: 310660 - DNA, 30 bp, Artificial Sequence
  Synthetic oligonucleotide
gacagggaatgaacggccggggtcatcagc

SEQ ID NO: 310661 - DNA, 30 bp, Artificial Sequence
  Synthetic oligonucleotide
gaccttcacgtggcgaagggcttgatcagc

SEQ ID NO: 310662 - DNA, 30 bp, Artificial Sequence
  Synthetic oligonucleotide
gtactagacaaacacggtgccaatatcagc

SEQ ID NO: 310663 - DNA, 30 bp, Artificial Sequence
  Synthetic oligonucleotide
ttggagtgacagtgatcgatttaactcagc

SEQ ID NO: 310664 - DNA, 30 bp, Artificial Sequence
  Synthetic oligonucleotide
gtgtttgtcttagggtcagcggcactcagc

SEQ ID NO: 310665 - DNA, 30 bp, Artificial Sequence
  Synthetic oligonucleotide
ctataagcaccttgggcttgaatactcagc

SEQ ID NO: 310666 - DNA, 30 bp, Artificial Sequence
  Synthetic oligonucleotide
tacaagtggcctagacccgggcgcctcagc

SEQ ID NO: 310667 - DNA, 30 bp, Artificial Sequence
  Synthetic oligonucleotide
agacgaaacgtgaggcgctacgctctcagc

SEQ ID NO: 310668 - DNA, 30 bp, Artificial Sequence
  Synthetic oligonucleotide
caacagctgcgaatacggagccaagtcagc

SEQ ID NO: 310669 - DNA, 30 bp, Artificial Sequence
  Synthetic oligonucleotide
cggataatttctagcgagttcagagtcagc

SEQ ID NO: 310670 - DNA, 30 bp, Artificial Sequence
  Synthetic oligonucleotide
gttacagcaagtaaggtttgccccgtcagc

SEQ ID NO: 310671 - DNA, 30 bp, Artificial Sequence
  Synthetic oligonucleotide
tggtaggctgacctttgttctaaattcagc

SEQ ID NO: 310672 - DNA, 30 bp, Artificial Sequence
  Synthetic oligonucleotide
taaggtatgttactttcaaccctattcagc

SEQ ID NO: 310673 - DNA, 30 bp, Artificial Sequence
  Synthetic oligonucleotide
tttaacacgagcgagcagtgagggttcagc

SEQ ID NO: 310674 - DNA, 30 bp, Artificial Sequence
  Synthetic oligonucleotide
ccaaattgcagtcttccaagaaatttcagc

SEQ ID NO: 310675 - DNA, 30 bp, Artificial Sequence
  Synthetic oligonucleotide
ctcgacggatttcaccagggtcctttcagc

SEQ ID NO: 310676 - DNA, 30 bp, Artificial Sequence
  Synthetic oligonucleotide
gtctttagtgagctaacagtagttttcagc

SEQ ID NO: 310677 - DNA, 30 bp, Artificial Sequence
  Synthetic oligonucleotide
tgtcggcttaaaacgtagttggaaaagagc

SEQ ID NO: 310678 - DNA, 30 bp, Artificial Sequence
  Synthetic oligonucleotide
acactttagtggatacggagtagaaagagc

SEQ ID NO: 310679 - DNA, 30 bp, Artificial Sequence
  Synthetic oligonucleotide
acacattgagaaattcctctctgaaagagc

SEQ ID NO: 310680 - DNA, 30 bp, Artificial Sequence
  Synthetic oligonucleotide
ggcatcaagcaaactcttcgtgcgaagagc

SEQ ID NO: 310681 - DNA, 30 bp, Artificial Sequence
  Synthetic oligonucleotide
atattaagcctatcgcatactctgaagagc

SEQ ID NO: 310682 - DNA, 30 bp, Artificial Sequence
  Synthetic oligonucleotide
atagaggagtaatgagccgcccacgagagc

SEQ ID NO: 310683 - DNA, 30 bp, Artificial Sequence
  Synthetic oligonucleotide
gagagaattgattggcgtgctagcgagagc

SEQ ID NO: 310684 - DNA, 30 bp, Artificial Sequence
  Synthetic oligonucleotide
gataattggaaagttggaaccaatgagagc

SEQ ID NO: 310685 - DNA, 30 bp, Artificial Sequence
  Synthetic oligonucleotide
ggtgttgagcatcaactccgtcctgagagc

SEQ ID NO: 310686 - DNA, 30 bp, Artificial Sequence
  Synthetic oligonucleotide
gagacggtggacggaactcctagtgagagc

SEQ ID NO: 310687 - DNA, 30 bp, Artificial Sequence
  Synthetic oligonucleotide
caccgggttgactgaactcattgatagagc

SEQ ID NO: 310688 - DNA, 30 bp, Artificial Sequence
  Synthetic oligonucleotide
cccactgggagttaggagcaagattagagc

SEQ ID NO: 310689 - DNA, 30 bp, Artificial Sequence
  Synthetic oligonucleotide
ataaagatgcggcatgtatagcaaacgagc

SEQ ID NO: 310690 - DNA, 30 bp, Artificial Sequence
  Synthetic oligonucleotide
ttgtcggcgtcagcataggacgaaacgagc

SEQ ID NO: 310691 - DNA, 30 bp, Artificial Sequence
  Synthetic oligonucleotide
atagttgtttatcaacaatgagcaacgagc

SEQ ID NO: 310692 - DNA, 30 bp, Artificial Sequence
  Synthetic oligonucleotide
taaaggaagtttttagcgacgggaacgagc

SEQ ID NO: 310693 - DNA, 30 bp, Artificial Sequence
  Synthetic oligonucleotide
acagctcggcagggatgagcgctaacgagc

SEQ ID NO: 310694 - DNA, 30 bp, Artificial Sequence
  Synthetic oligonucleotide
atgaaggtagtcctccgcgaagacacgagc

SEQ ID NO: 310695 - DNA, 30 bp, Artificial Sequence
  Synthetic oligonucleotide
gagtactccgtgctggaacgacaaccgagc

SEQ ID NO: 310696 - DNA, 30 bp, Artificial Sequence
  Synthetic oligonucleotide
taaagtacgaaaaagctttttcctccgagc

SEQ ID NO: 310697 - DNA, 30 bp, Artificial Sequence
  Synthetic oligonucleotide
tgccgtccataactgatgaccgctccgagc

SEQ ID NO: 310698 - DNA, 30 bp, Artificial Sequence
  Synthetic oligonucleotide
cttatcccaaactacataatttcagcgagc

SEQ ID NO: 310699 - DNA, 30 bp, Artificial Sequence
  Synthetic oligonucleotide
gccctagagcggctagcttaagtagcgagc

SEQ ID NO: 310700 - DNA, 30 bp, Artificial Sequence
  Synthetic oligonucleotide
gcggcataggtcgggatggttttagcgagc

SEQ ID NO: 310701 - DNA, 30 bp, Artificial Sequence
  Synthetic oligonucleotide
atgattagatatatttgtctttccgcgagc

SEQ ID NO: 310702 - DNA, 30 bp, Artificial Sequence
  Synthetic oligonucleotide
gtacagttggaataatgaccggtcgcgagc

SEQ ID NO: 310703 - DNA, 30 bp, Artificial Sequence
  Synthetic oligonucleotide
ggatagcatgtggacttacgcaatgcgagc

SEQ ID NO: 310704 - DNA, 30 bp, Artificial Sequence
  Synthetic oligonucleotide
gtacagcgctctgatacaaattaatcgagc

SEQ ID NO: 310705 - DNA, 30 bp, Artificial Sequence
  Synthetic oligonucleotide
ggtagctgcgttactttaaaaatatcgagc

SEQ ID NO: 310706 - DNA, 30 bp, Artificial Sequence
  Synthetic oligonucleotide
acggctacgtttgggtgatccggttcgagc

SEQ ID NO: 310707 - DNA, 30 bp, Artificial Sequence
  Synthetic oligonucleotide
tagtggcggagttttccaagtctttcgagc

SEQ ID NO: 310708 - DNA, 30 bp, Artificial Sequence
  Synthetic oligonucleotide
agtgtgagggcccttctcctccacaggagc

SEQ ID NO: 310709 - DNA, 30 bp, Artificial Sequence
  Synthetic oligonucleotide
atgttcggtgccgcatcaaatgtacggagc

SEQ ID NO: 310710 - DNA, 30 bp, Artificial Sequence
  Synthetic oligonucleotide
ctatcattgataaccgagcagtatcggagc

SEQ ID NO: 310711 - DNA, 30 bp, Artificial Sequence
  Synthetic oligonucleotide
taacgtgctcgtagctagtcgatagggagc

SEQ ID NO: 310712 - DNA, 30 bp, Artificial Sequence
  Synthetic oligonucleotide
ctcctggctggtagaccggatactgggagc

SEQ ID NO: 310713 - DNA, 30 bp, Artificial Sequence
  Synthetic oligonucleotide
ttggcgatttagcaggaggcccgtgggagc

SEQ ID NO: 310714 - DNA, 30 bp, Artificial Sequence
  Synthetic oligonucleotide
gtttgacaagagccaaatgcaagatggagc

SEQ ID NO: 310715 - DNA, 30 bp, Artificial Sequence
  Synthetic oligonucleotide
acttggttaatcgatgtcgcgctatggagc

SEQ ID NO: 310716 - DNA, 30 bp, Artificial Sequence
  Synthetic oligonucleotide
tggcgccgggtcgcgacggtccactggagc

SEQ ID NO: 310717 - DNA, 30 bp, Artificial Sequence
  Synthetic oligonucleotide
cgctactacctttctctggggagctggagc

SEQ ID NO: 310718 - DNA, 30 bp, Artificial Sequence
  Synthetic oligonucleotide
gcttccaccgtgtactggctcccgtggagc

SEQ ID NO: 310719 - DNA, 30 bp, Artificial Sequence
  Synthetic oligonucleotide
tacgagctggtctggttggttgcgtggagc

SEQ ID NO: 310720 - DNA, 30 bp, Artificial Sequence
  Synthetic oligonucleotide
aacggacaacagtttgcgtataggtggagc

SEQ ID NO: 310721 - DNA, 30 bp, Artificial Sequence
  Synthetic oligonucleotide
cgctgattccttgtctagtactgactgagc

SEQ ID NO: 310722 - DNA, 30 bp, Artificial Sequence
  Synthetic oligonucleotide
acattaacatcaccagcagttatgctgagc

SEQ ID NO: 310723 - DNA, 30 bp, Artificial Sequence
  Synthetic oligonucleotide
acaaatttacggtacgatgcgaatctgagc

SEQ ID NO: 310724 - DNA, 30 bp, Artificial Sequence
  Synthetic oligonucleotide
gcacagtcggccttgttatccgctctgagc

SEQ ID NO: 310725 - DNA, 30 bp, Artificial Sequence
  Synthetic oligonucleotide
acggaaaatcaatgggatttttaagtgagc

SEQ ID NO: 310726 - DNA, 30 bp, Artificial Sequence
  Synthetic oligonucleotide
gcgcgcacccacgacaggtaagcagtgagc

SEQ ID NO: 310727 - DNA, 30 bp, Artificial Sequence
  Synthetic oligonucleotide
catgtaagatcgcgctcgcgttgcgtgagc

SEQ ID NO: 310728 - DNA, 30 bp, Artificial Sequence
  Synthetic oligonucleotide
gttcagagttggtcatttattctcgtgagc

SEQ ID NO: 310729 - DNA, 30 bp, Artificial Sequence
  Synthetic oligonucleotide
cccatgcttctttaggagcgcttcgtgagc

SEQ ID NO: 310730 - DNA, 30 bp, Artificial Sequence
  Synthetic oligonucleotide
gttggttctattgtagggtagcttgtgagc

SEQ ID NO: 310731 - DNA, 30 bp, Artificial Sequence
  Synthetic oligonucleotide
catagcatggcgatattataaccattgagc

SEQ ID NO: 310732 - DNA, 30 bp, Artificial Sequence
  Synthetic oligonucleotide
ttgcacccttagaaaggttatctattgagc

SEQ ID NO: 310733 - DNA, 30 bp, Artificial Sequence
  Synthetic oligonucleotide
gggctctagcagaggtgctattatttgagc

SEQ ID NO: 310734 - DNA, 30 bp, Artificial Sequence
  Synthetic oligonucleotide
gcccggaattcctgaccgcgtgacaatagc

SEQ ID NO: 310735 - DNA, 30 bp, Artificial Sequence
  Synthetic oligonucleotide
agatattatgagagcagggcgtgcaatagc

SEQ ID NO: 310736 - DNA, 30 bp, Artificial Sequence
  Synthetic oligonucleotide
atgtataggaccgacgcgatgtagaatagc

SEQ ID NO: 310737 - DNA, 30 bp, Artificial Sequence
  Synthetic oligonucleotide
gcgacttgtttgcactaatgcattaatagc

SEQ ID NO: 310738 - DNA, 30 bp, Artificial Sequence
  Synthetic oligonucleotide
cagtaaactacataatagagagaacatagc

SEQ ID NO: 310739 - DNA, 30 bp, Artificial Sequence
  Synthetic oligonucleotide
acctttaggcgtaacccaacctaacatagc

SEQ ID NO: 310740 - DNA, 30 bp, Artificial Sequence
  Synthetic oligonucleotide
catgattacacgtcgacgaagttacatagc

SEQ ID NO: 310741 - DNA, 30 bp, Artificial Sequence
  Synthetic oligonucleotide
tgattacaagagcctgcaggagcccatagc

SEQ ID NO: 310742 - DNA, 30 bp, Artificial Sequence
  Synthetic oligonucleotide
gagggctcggagtgcccttgactccatagc

SEQ ID NO: 310743 - DNA, 30 bp, Artificial Sequence
  Synthetic oligonucleotide
ggaattcccagtacaatagtcaagcatagc

SEQ ID NO: 310744 - DNA, 30 bp, Artificial Sequence
  Synthetic oligonucleotide
tgttcggaagtttggagccatcagcatagc

SEQ ID NO: 310745 - DNA, 30 bp, Artificial Sequence
  Synthetic oligonucleotide
ggaactgggtgggctgtggaaattcatagc

SEQ ID NO: 310746 - DNA, 30 bp, Artificial Sequence
  Synthetic oligonucleotide
accagggtggtcactcttaaaatagatagc

SEQ ID NO: 310747 - DNA, 30 bp, Artificial Sequence
  Synthetic oligonucleotide
gccattcgcaaataagttggtatagatagc

SEQ ID NO: 310748 - DNA, 30 bp, Artificial Sequence
  Synthetic oligonucleotide
cacatcttcagactttgcagtgaatatagc

SEQ ID NO: 310749 - DNA, 30 bp, Artificial Sequence
  Synthetic oligonucleotide
gtattcccggttaacttgtgataatatagc

SEQ ID NO: 310750 - DNA, 30 bp, Artificial Sequence
  Synthetic oligonucleotide
cgtcaacttttaccgtcacatttatatagc

SEQ ID NO: 310751 - DNA, 30 bp, Artificial Sequence
  Synthetic oligonucleotide
gaaacggcctgtataatgaaacactatagc

SEQ ID NO: 310752 - DNA, 30 bp, Artificial Sequence
  Synthetic oligonucleotide
gcgtactcttagggtgagggcccctatagc

SEQ ID NO: 310753 - DNA, 30 bp, Artificial Sequence
  Synthetic oligonucleotide
tcacggtgccgtatattagcaccgtatagc

SEQ ID NO: 310754 - DNA, 30 bp, Artificial Sequence
  Synthetic oligonucleotide
tagttggggcgtggaaatgaacggtatagc

SEQ ID NO: 310755 - DNA, 30 bp, Artificial Sequence
  Synthetic oligonucleotide
agagctttttttgaacccttaatgtatagc

SEQ ID NO: 310756 - DNA, 30 bp, Artificial Sequence
  Synthetic oligonucleotide
gcttgcgtgcattccagagcatccactagc

SEQ ID NO: 310757 - DNA, 30 bp, Artificial Sequence
  Synthetic oligonucleotide
cgcggttcagcgagtcgatcgaagactagc

SEQ ID NO: 310758 - DNA, 30 bp, Artificial Sequence
  Synthetic oligonucleotide
acgccttgtctacgggcggtttcgactagc

SEQ ID NO: 310759 - DNA, 30 bp, Artificial Sequence
  Synthetic oligonucleotide
taacttacgtcaggtttgagtctgactagc

SEQ ID NO: 310760 - DNA, 30 bp, Artificial Sequence
  Synthetic oligonucleotide
cagatcagttgcccggaccaggagcctagc

SEQ ID NO: 310761 - DNA, 30 bp, Artificial Sequence
  Synthetic oligonucleotide
cttatggtcatgtaacggtgggaagctagc

SEQ ID NO: 310762 - DNA, 30 bp, Artificial Sequence
  Synthetic oligonucleotide
aagggggtgacgccgtatgatttagctagc

SEQ ID NO: 310763 - DNA, 30 bp, Artificial Sequence
  Synthetic oligonucleotide
aatagtgaatagctcataatagacgctagc

SEQ ID NO: 310764 - DNA, 30 bp, Artificial Sequence
  Synthetic oligonucleotide
tgtcttttggcgacgataactcatgctagc

SEQ ID NO: 310765 - DNA, 30 bp, Artificial Sequence
  Synthetic oligonucleotide
ggagcatagcgtgttcaaatctctgctagc

SEQ ID NO: 310766 - DNA, 30 bp, Artificial Sequence
  Synthetic oligonucleotide
atcatggattgtgctacggttacctctagc

SEQ ID NO: 310767 - DNA, 30 bp, Artificial Sequence
  Synthetic oligonucleotide
ataagtacacgggatagaactggctctagc

SEQ ID NO: 310768 - DNA, 30 bp, Artificial Sequence
  Synthetic oligonucleotide
acgatcttcagacctagactctagtctagc

SEQ ID NO: 310769 - DNA, 30 bp, Artificial Sequence
  Synthetic oligonucleotide
caaaggattataaagttaaagtggtctagc

SEQ ID NO: 310770 - DNA, 30 bp, Artificial Sequence
  Synthetic oligonucleotide
tttcgcctgtctattagaccactttctagc

SEQ ID NO: 310771 - DNA, 30 bp, Artificial Sequence
  Synthetic oligonucleotide
gggtatccgcggacgttagcgaaaagtagc

SEQ ID NO: 310772 - DNA, 30 bp, Artificial Sequence
  Synthetic oligonucleotide
tacccataataaagctgcatcaacagtagc

SEQ ID NO: 310773 - DNA, 30 bp, Artificial Sequence
  Synthetic oligonucleotide
cctatagcgctttggctgctgaagagtagc

SEQ ID NO: 310774 - DNA, 30 bp, Artificial Sequence
  Synthetic oligonucleotide
gcgtcatttctgtagtatatggatagtagc

SEQ ID NO: 310775 - DNA, 30 bp, Artificial Sequence
  Synthetic oligonucleotide
gcctcggtatgttcggaagtggttagtagc

SEQ ID NO: 310776 - DNA, 30 bp, Artificial Sequence
  Synthetic oligonucleotide
atacggcgtccgggtttatgtacacgtagc

SEQ ID NO: 310777 - DNA, 30 bp, Artificial Sequence
  Synthetic oligonucleotide
cagtacgttagcaactcgcggtaccgtagc

SEQ ID NO: 310778 - DNA, 30 bp, Artificial Sequence
  Synthetic oligonucleotide
gccgcggggcacggggggcaggcccgtagc

SEQ ID NO: 310779 - DNA, 30 bp, Artificial Sequence
  Synthetic oligonucleotide
tcttaatatgaagattcatgtctccgtagc

SEQ ID NO: 310780 - DNA, 30 bp, Artificial Sequence
  Synthetic oligonucleotide
acctggatgatgcatttccgcaatcgtagc

SEQ ID NO: 310781 - DNA, 30 bp, Artificial Sequence
  Synthetic oligonucleotide
tgggaattaagacccatcacgtgcggtagc

SEQ ID NO: 310782 - DNA, 30 bp, Artificial Sequence
  Synthetic oligonucleotide
tgtaggagattcagtgggatcaagggtagc

SEQ ID NO: 310783 - DNA, 30 bp, Artificial Sequence
  Synthetic oligonucleotide
cgcgaagaacaggtacagtactatggtagc

SEQ ID NO: 310784 - DNA, 30 bp, Artificial Sequence
  Synthetic oligonucleotide
gaggagttgtaaatttacgagattggtagc

SEQ ID NO: 310785 - DNA, 30 bp, Artificial Sequence
  Synthetic oligonucleotide
aatgtcctgaatcgaaaactacttggtagc

SEQ ID NO: 310786 - DNA, 30 bp, Artificial Sequence
  Synthetic oligonucleotide
caaagaccgtcagctgcgtgtacatgtagc

SEQ ID NO: 310787 - DNA, 30 bp, Artificial Sequence
  Synthetic oligonucleotide
ggacgatggactggcgcccagggatgtagc

SEQ ID NO: 310788 - DNA, 30 bp, Artificial Sequence
  Synthetic oligonucleotide
cccacttcccccgcccatggctgatgtagc

SEQ ID NO: 310789 - DNA, 30 bp, Artificial Sequence
  Synthetic oligonucleotide
ggatgcaacttcgctatgacgtactgtagc

SEQ ID NO: 310790 - DNA, 30 bp, Artificial Sequence
  Synthetic oligonucleotide
ttagggggattgtctggttactcctgtagc

SEQ ID NO: 310791 - DNA, 30 bp, Artificial Sequence
  Synthetic oligonucleotide
tgctatgaattgggtaccgatcagtgtagc

SEQ ID NO: 310792 - DNA, 30 bp, Artificial Sequence
  Synthetic oligonucleotide
tggcctcccccattcggctgcaggtgtagc

SEQ ID NO: 310793 - DNA, 30 bp, Artificial Sequence
  Synthetic oligonucleotide
cttcaagaactagggccgtgaccttgtagc

SEQ ID NO: 310794 - DNA, 30 bp, Artificial Sequence
  Synthetic oligonucleotide
gaaagatgaatttctaaccaagcttgtagc

SEQ ID NO: 310795 - DNA, 30 bp, Artificial Sequence
  Synthetic oligonucleotide
tcggactttgtatgctatgtagtttgtagc

SEQ ID NO: 310796 - DNA, 30 bp, Artificial Sequence
  Synthetic oligonucleotide
acctatattatctggagttcttaaattagc

SEQ ID NO: 310797 - DNA, 30 bp, Artificial Sequence
  Synthetic oligonucleotide
tcctgaggcactatcataccgaccattagc

SEQ ID NO: 310798 - DNA, 30 bp, Artificial Sequence
  Synthetic oligonucleotide
tcgtgcgtatagcttgtgacgagcattagc

SEQ ID NO: 310799 - DNA, 30 bp, Artificial Sequence
  Synthetic oligonucleotide
tgccgctgtccgttgtaaacatcgattagc

SEQ ID NO: 310800 - DNA, 30 bp, Artificial Sequence
  Synthetic oligonucleotide
tgtatttcacgaatccgatagtcgattagc

SEQ ID NO: 310801 - DNA, 30 bp, Artificial Sequence
  Synthetic oligonucleotide
agttccccgcaggctcggttagggattagc

SEQ ID NO: 310802 - DNA, 30 bp, Artificial Sequence
  Synthetic oligonucleotide
aataataatcgtacggggagtgggattagc

SEQ ID NO: 310803 - DNA, 30 bp, Artificial Sequence
  Synthetic oligonucleotide
cttgcacatcctgttgaatttgaacttagc

SEQ ID NO: 310804 - DNA, 30 bp, Artificial Sequence
  Synthetic oligonucleotide
ctccagccctaacctgtatgtagacttagc

SEQ ID NO: 310805 - DNA, 30 bp, Artificial Sequence
  Synthetic oligonucleotide
actttgatgcagggggagcggggccttagc

SEQ ID NO: 310806 - DNA, 30 bp, Artificial Sequence
  Synthetic oligonucleotide
gattcctataagtaatcatgtacgcttagc

SEQ ID NO: 310807 - DNA, 30 bp, Artificial Sequence
  Synthetic oligonucleotide
tctctgcctaacgaatctcacaggcttagc

SEQ ID NO: 310808 - DNA, 30 bp, Artificial Sequence
  Synthetic oligonucleotide
aagcaccttcgtcatgaatggtatcttagc

SEQ ID NO: 310809 - DNA, 30 bp, Artificial Sequence
  Synthetic oligonucleotide
aaggccagacactcactacgaggtcttagc

SEQ ID NO: 310810 - DNA, 30 bp, Artificial Sequence
  Synthetic oligonucleotide
ttctttgttagctcacctggaattcttagc

SEQ ID NO: 310811 - DNA, 30 bp, Artificial Sequence
  Synthetic oligonucleotide
tgatgcaacgatcgaacattataagttagc

SEQ ID NO: 310812 - DNA, 30 bp, Artificial Sequence
  Synthetic oligonucleotide
ttaacgttaggtactgactcaggagttagc

SEQ ID NO: 310813 - DNA, 30 bp, Artificial Sequence
  Synthetic oligonucleotide
atatgagaaagaatttccttttgagttagc

SEQ ID NO: 310814 - DNA, 30 bp, Artificial Sequence
  Synthetic oligonucleotide
ctgcgcgtaagtggcggctacaccgttagc

SEQ ID NO: 310815 - DNA, 30 bp, Artificial Sequence
  Synthetic oligonucleotide
ctgatgtcgaatttccgtcgcagggttagc

SEQ ID NO: 310816 - DNA, 30 bp, Artificial Sequence
  Synthetic oligonucleotide
ttatacgggtacggtggtggaaatgttagc

SEQ ID NO: 310817 - DNA, 30 bp, Artificial Sequence
  Synthetic oligonucleotide
actcgtggaggggctctttgcaatgttagc

SEQ ID NO: 310818 - DNA, 30 bp, Artificial Sequence
  Synthetic oligonucleotide
tagatttgtatgataccgatgtatgttagc

SEQ ID NO: 310819 - DNA, 30 bp, Artificial Sequence
  Synthetic oligonucleotide
aaagctacatttacacggtagccatttagc

SEQ ID NO: 310820 - DNA, 30 bp, Artificial Sequence
  Synthetic oligonucleotide
ccgaactggtttgatatacgcggatttagc

SEQ ID NO: 310821 - DNA, 30 bp, Artificial Sequence
  Synthetic oligonucleotide
tggaaggacgcattaggagcttgatttagc

SEQ ID NO: 310822 - DNA, 30 bp, Artificial Sequence
  Synthetic oligonucleotide
tgtgtgggagtcttaatcactatatttagc

SEQ ID NO: 310823 - DNA, 30 bp, Artificial Sequence
  Synthetic oligonucleotide
gcgagtatatccggtcctagcggctttagc

SEQ ID NO: 310824 - DNA, 30 bp, Artificial Sequence
  Synthetic oligonucleotide
tcgcaccacccatgtaataccacttttagc

SEQ ID NO: 310825 - DNA, 30 bp, Artificial Sequence
  Synthetic oligonucleotide
gggcgcacgcacaatgactttccttttagc

SEQ ID NO: 310826 - DNA, 30 bp, Artificial Sequence
  Synthetic oligonucleotide
tagctattacgcgtggtacctttttttagc

SEQ ID NO: 310827 - DNA, 30 bp, Artificial Sequence
  Synthetic oligonucleotide
gatcttacgggaatttccaataaaaaacgc

SEQ ID NO: 310828 - DNA, 30 bp, Artificial Sequence
  Synthetic oligonucleotide
agagagccctacgggaaacgtcaaaaacgc

SEQ ID NO: 310829 - DNA, 30 bp, Artificial Sequence
  Synthetic oligonucleotide
ggtgtgagctgaccacagctggcaaaacgc

SEQ ID NO: 310830 - DNA, 30 bp, Artificial Sequence
  Synthetic oligonucleotide
gggtaaggtcggctatccacccgaaaacgc

SEQ ID NO: 310831 - DNA, 30 bp, Artificial Sequence
  Synthetic oligonucleotide
acagcaaggcctttgaattacataaaacgc

SEQ ID NO: 310832 - DNA, 30 bp, Artificial Sequence
  Synthetic oligonucleotide
atcaacgccacgagccatgtgataaaacgc

SEQ ID NO: 310833 - DNA, 30 bp, Artificial Sequence
  Synthetic oligonucleotide
tgggtggccaatactgcctaaaacaaacgc

SEQ ID NO: 310834 - DNA, 30 bp, Artificial Sequence
  Synthetic oligonucleotide
ttggtagcatccgctagtaaccgcaaacgc

SEQ ID NO: 310835 - DNA, 30 bp, Artificial Sequence
  Synthetic oligonucleotide
gtgagtagacaacgtcacttcgataaacgc

SEQ ID NO: 310836 - DNA, 30 bp, Artificial Sequence
  Synthetic oligonucleotide
tgccctctcttatggtcgctgtataaacgc

SEQ ID NO: 310837 - DNA, 30 bp, Artificial Sequence
  Synthetic oligonucleotide
tggatcgcgtgctatggtacttctaaacgc

SEQ ID NO: 310838 - DNA, 30 bp, Artificial Sequence
  Synthetic oligonucleotide
agactcagggctagtactaacagtaaacgc

SEQ ID NO: 310839 - DNA, 30 bp, Artificial Sequence
  Synthetic oligonucleotide
actttgcagatcaagggatatgaacaacgc

SEQ ID NO: 310840 - DNA, 30 bp, Artificial Sequence
  Synthetic oligonucleotide
ggtgcatcagtgcattaacatgcccaacgc

SEQ ID NO: 310841 - DNA, 30 bp, Artificial Sequence
  Synthetic oligonucleotide
atgaaataagctattcccgagttccaacgc

SEQ ID NO: 310842 - DNA, 30 bp, Artificial Sequence
  Synthetic oligonucleotide
cggagcatcgcttaggggcaaaagcaacgc

SEQ ID NO: 310843 - DNA, 30 bp, Artificial Sequence
  Synthetic oligonucleotide
acgtctacaccaacacaggtgactcaacgc

SEQ ID NO: 310844 - DNA, 30 bp, Artificial Sequence
  Synthetic oligonucleotide
ggcccgggggctggtcataagtgtcaacgc

SEQ ID NO: 310845 - DNA, 30 bp, Artificial Sequence
  Synthetic oligonucleotide
ccagggaaggatcgtgttctccaagaacgc

SEQ ID NO: 310846 - DNA, 30 bp, Artificial Sequence
  Synthetic oligonucleotide
agcattggtcaaaattcgtaacgagaacgc

SEQ ID NO: 310847 - DNA, 30 bp, Artificial Sequence
  Synthetic oligonucleotide
gaatgtcaaacacgtcaccttatagaacgc

SEQ ID NO: 310848 - DNA, 30 bp, Artificial Sequence
  Synthetic oligonucleotide
actcttaacgtcgtggatgagctagaacgc

SEQ ID NO: 310849 - DNA, 30 bp, Artificial Sequence
  Synthetic oligonucleotide
aagaggctggatcaaggcagcgccgaacgc

SEQ ID NO: 310850 - DNA, 29 bp, Artificial Sequence
  Synthetic oligonucleotide
ccatataccctagcctggtcggcgaacgc

SEQ ID NO: 310851 - DNA, 30 bp, Artificial Sequence
  Synthetic oligonucleotide
aatctacggacctaccgcgagttggaacgc

SEQ ID NO: 310852 - DNA, 30 bp, Artificial Sequence
  Synthetic oligonucleotide
gctgggcttttccttgacacgagtgaacgc

SEQ ID NO: 310853 - DNA, 29 bp, Artificial Sequence
  Synthetic oligonucleotide
cctgagaggtgcagtatttaacataacgc

SEQ ID NO: 310854 - DNA, 30 bp, Artificial Sequence
  Synthetic oligonucleotide
agtgggcgtaaggttgcgaaagcataacgc

SEQ ID NO: 310855 - DNA, 30 bp, Artificial Sequence
  Synthetic oligonucleotide
tgcggataataatagctccccgattaacgc

SEQ ID NO: 310856 - DNA, 30 bp, Artificial Sequence
  Synthetic oligonucleotide
gtggttaagtgaagagatttaagttaacgc

SEQ ID NO: 310857 - DNA, 30 bp, Artificial Sequence
  Synthetic oligonucleotide
atcatcacgaatacgtgggaaggcacacgc

SEQ ID NO: 310858 - DNA, 30 bp, Artificial Sequence
  Synthetic oligonucleotide
taggtctgttacgtgtcttatgatacacgc

SEQ ID NO: 310859 - DNA, 30 bp, Artificial Sequence
  Synthetic oligonucleotide
ccgtgtcctatataagtcttaacaccacgc

SEQ ID NO: 310860 - DNA, 30 bp, Artificial Sequence
  Synthetic oligonucleotide
ttgaggcgggctataaaatttgacccacgc

SEQ ID NO: 310861 - DNA, 30 bp, Artificial Sequence
  Synthetic oligonucleotide
ccctcgtgaaggatgtcacgagtcccacgc

SEQ ID NO: 310862 - DNA, 30 bp, Artificial Sequence
  Synthetic oligonucleotide
aatgtgccattcgtaagcggagggccacgc

SEQ ID NO: 310863 - DNA, 30 bp, Artificial Sequence
  Synthetic oligonucleotide
tgcgtagcaggtatcttgacggtagcacgc

SEQ ID NO: 310864 - DNA, 30 bp, Artificial Sequence
  Synthetic oligonucleotide
cggcgacaaaacattactaatgtggcacgc

SEQ ID NO: 310865 - DNA, 30 bp, Artificial Sequence
  Synthetic oligonucleotide
caaagctatgcaggtgtgattagtgcacgc

SEQ ID NO: 310866 - DNA, 30 bp, Artificial Sequence
  Synthetic oligonucleotide
ccggtgctcctaggagtaccgttatcacgc

SEQ ID NO: 310867 - DNA, 30 bp, Artificial Sequence
  Synthetic oligonucleotide
ttataggtaagggtcttaacatcctcacgc

SEQ ID NO: 310868 - DNA, 30 bp, Artificial Sequence
  Synthetic oligonucleotide
caaagatcaacgggatttttgctctcacgc

SEQ ID NO: 310869 - DNA, 30 bp, Artificial Sequence
  Synthetic oligonucleotide
ttatggtgaccggattggatgctttcacgc

SEQ ID NO: 310870 - DNA, 30 bp, Artificial Sequence
  Synthetic oligonucleotide
gtatcatcgatgccatgccgcacaagacgc

SEQ ID NO: 310871 - DNA, 30 bp, Artificial Sequence
  Synthetic oligonucleotide
gcggggcctgtccgaagcgaaaccagacgc

SEQ ID NO: 310872 - DNA, 30 bp, Artificial Sequence
  Synthetic oligonucleotide
acggggcctaacaaaaggacccccagacgc

SEQ ID NO: 310873 - DNA, 30 bp, Artificial Sequence
  Synthetic oligonucleotide
aaggcaaggcattcaagggttctcagacgc

SEQ ID NO: 310874 - DNA, 30 bp, Artificial Sequence
  Synthetic oligonucleotide
cgatgcataaaagatctaaacactagacgc

SEQ ID NO: 310875 - DNA, 30 bp, Artificial Sequence
  Synthetic oligonucleotide
cctgagggataaatgaaagttcgccgacgc

SEQ ID NO: 310876 - DNA, 30 bp, Artificial Sequence
  Synthetic oligonucleotide
gttccagagccgactaggttaaagcgacgc

SEQ ID NO: 310877 - DNA, 30 bp, Artificial Sequence
  Synthetic oligonucleotide
caggactaacacggttatttctcaggacgc

SEQ ID NO: 310878 - DNA, 30 bp, Artificial Sequence
  Synthetic oligonucleotide
ttggcaaacatggatgagaacacgggacgc

SEQ ID NO: 310879 - DNA, 30 bp, Artificial Sequence
  Synthetic oligonucleotide
caactatcaactatgtcaaaggcgggacgc

SEQ ID NO: 310880 - DNA, 30 bp, Artificial Sequence
  Synthetic oligonucleotide
tcccacgtgatgtatgttccggatggacgc

SEQ ID NO: 310881 - DNA, 30 bp, Artificial Sequence
  Synthetic oligonucleotide
ggccttgtttcgggggcaaggagtggacgc

SEQ ID NO: 310882 - DNA, 30 bp, Artificial Sequence
  Synthetic oligonucleotide
tcgtcatcttggttggccagaatatgacgc

SEQ ID NO: 310883 - DNA, 30 bp, Artificial Sequence
  Synthetic oligonucleotide
tggtcgcagtgactattgagccgaatacgc

SEQ ID NO: 310884 - DNA, 30 bp, Artificial Sequence
  Synthetic oligonucleotide
aagagtgtgaaggattgtttttgaatacgc

SEQ ID NO: 310885 - DNA, 30 bp, Artificial Sequence
  Synthetic oligonucleotide
attatcggtgcacgcataaataacatacgc

SEQ ID NO: 310886 - DNA, 30 bp, Artificial Sequence
  Synthetic oligonucleotide
atatcgttccttaactaggagcgcatacgc

SEQ ID NO: 310887 - DNA, 30 bp, Artificial Sequence
  Synthetic oligonucleotide
ggaaaggttttattcacggctcagatacgc

SEQ ID NO: 310888 - DNA, 30 bp, Artificial Sequence
  Synthetic oligonucleotide
aggggtcgagtaagaacacgcctgatacgc

SEQ ID NO: 310889 - DNA, 30 bp, Artificial Sequence
  Synthetic oligonucleotide
tggcaacttcctcggagtaactctatacgc

SEQ ID NO: 310890 - DNA, 30 bp, Artificial Sequence
  Synthetic oligonucleotide
ccctcctcagaggcaaggaagtgtatacgc

SEQ ID NO: 310891 - DNA, 30 bp, Artificial Sequence
  Synthetic oligonucleotide
cttagacctgaaataggttgagtcctacgc

SEQ ID NO: 310892 - DNA, 30 bp, Artificial Sequence
  Synthetic oligonucleotide
cctattaaagttgtgtactccgtcctacgc

SEQ ID NO: 310893 - DNA, 30 bp, Artificial Sequence
  Synthetic oligonucleotide
gaccttcaccgtgacataactgagctacgc

SEQ ID NO: 310894 - DNA, 30 bp, Artificial Sequence
  Synthetic oligonucleotide
ctctacgagggctggctgcgcgatctacgc

SEQ ID NO: 310895 - DNA, 30 bp, Artificial Sequence
  Synthetic oligonucleotide
cgggttcgaaggagagatgtatctctacgc

SEQ ID NO: 310896 - DNA, 30 bp, Artificial Sequence
  Synthetic oligonucleotide
gcgtaaaaaacggcggacgtccttctacgc

SEQ ID NO: 310897 - DNA, 30 bp, Artificial Sequence
  Synthetic oligonucleotide
tataggtgggattccggtgaagacgtacgc

SEQ ID NO: 310898 - DNA, 30 bp, Artificial Sequence
  Synthetic oligonucleotide
catctgatcatacgcgggcgtccggtacgc

SEQ ID NO: 310899 - DNA, 30 bp, Artificial Sequence
  Synthetic oligonucleotide
cacacgcggtttagctgaaccactgtacgc

SEQ ID NO: 310900 - DNA, 30 bp, Artificial Sequence
  Synthetic oligonucleotide
aagtataagtcggctgaaagctctgtacgc

SEQ ID NO: 310901 - DNA, 30 bp, Artificial Sequence
  Synthetic oligonucleotide
actggtcgccactaacgagggcttgtacgc

SEQ ID NO: 310902 - DNA, 30 bp, Artificial Sequence
  Synthetic oligonucleotide
cggctcccttggatgtatgctcttgtacgc

SEQ ID NO: 310903 - DNA, 30 bp, Artificial Sequence
  Synthetic oligonucleotide
cagcgcaatccagatttgattacattacgc

SEQ ID NO: 310904 - DNA, 30 bp, Artificial Sequence
  Synthetic oligonucleotide
ggaaatactcgatatgagtaagtcttacgc

SEQ ID NO: 310905 - DNA, 30 bp, Artificial Sequence
  Synthetic oligonucleotide
gcaagggaagtatgggagcaacctttacgc

SEQ ID NO: 310906 - DNA, 30 bp, Artificial Sequence
  Synthetic oligonucleotide
tatacaagtaaggatcgtggtaacaaccgc

SEQ ID NO: 310907 - DNA, 30 bp, Artificial Sequence
  Synthetic oligonucleotide
tcgtttagtttagctgtaccctctaaccgc

SEQ ID NO: 310908 - DNA, 30 bp, Artificial Sequence
  Synthetic oligonucleotide
tctgtgtggagggttaacgcttgtaaccgc

SEQ ID NO: 310909 - DNA, 30 bp, Artificial Sequence
  Synthetic oligonucleotide
acactggtaaggcaccccgcataccaccgc

SEQ ID NO: 310910 - DNA, 30 bp, Artificial Sequence
  Synthetic oligonucleotide
tctacgtgctaatcatctaaccagcaccgc

SEQ ID NO: 310911 - DNA, 30 bp, Artificial Sequence
  Synthetic oligonucleotide
agaggcttggttcatagcacgcggcaccgc

SEQ ID NO: 310912 - DNA, 30 bp, Artificial Sequence
  Synthetic oligonucleotide
ccagaagattactctggcgttcgagaccgc

SEQ ID NO: 310913 - DNA, 30 bp, Artificial Sequence
  Synthetic oligonucleotide
cttccacgcccatgattgtcaatagaccgc

SEQ ID NO: 310914 - DNA, 30 bp, Artificial Sequence
  Synthetic oligonucleotide
ctatacgagcgttaaagacacagcgaccgc

SEQ ID NO: 310915 - DNA, 30 bp, Artificial Sequence
  Synthetic oligonucleotide
tgcatagataacatcatcttcttggaccgc

SEQ ID NO: 310916 - DNA, 30 bp, Artificial Sequence
  Synthetic oligonucleotide
tctatagatgttgatttcgccgaataccgc

SEQ ID NO: 310917 - DNA, 30 bp, Artificial Sequence
  Synthetic oligonucleotide
agtccacgaaatgcgattgcttgataccgc

SEQ ID NO: 310918 - DNA, 30 bp, Artificial Sequence
  Synthetic oligonucleotide
gacgtgcgtctccggcagggccactaccgc

SEQ ID NO: 310919 - DNA, 30 bp, Artificial Sequence
  Synthetic oligonucleotide
ccgacttatggcaccaggaacctgtaccgc

SEQ ID NO: 310920 - DNA, 30 bp, Artificial Sequence
  Synthetic oligonucleotide
gatcaccaggtttttggcgccctgtaccgc

SEQ ID NO: 310921 - DNA, 30 bp, Artificial Sequence
  Synthetic oligonucleotide
gcgcggccgcgcataactgtggattaccgc

SEQ ID NO: 310922 - DNA, 30 bp, Artificial Sequence
  Synthetic oligonucleotide
ctgtatggggactaccgtagttcaacccgc

SEQ ID NO: 310923 - DNA, 30 bp, Artificial Sequence
  Synthetic oligonucleotide
gctcagctcattctgtaggtcctaacccgc

SEQ ID NO: 310924 - DNA, 30 bp, Artificial Sequence
  Synthetic oligonucleotide
cctatgaacaaaggagcacttcgcacccgc

SEQ ID NO: 310925 - DNA, 30 bp, Artificial Sequence
  Synthetic oligonucleotide
ttggtccgagaaaggctgagctgtacccgc

SEQ ID NO: 310926 - DNA, 30 bp, Artificial Sequence
  Synthetic oligonucleotide
caaatcgtgcttcgaaatatgcacccccgc

SEQ ID NO: 310927 - DNA, 30 bp, Artificial Sequence
  Synthetic oligonucleotide
cgtgtctaagcacagacatggctgccccgc

SEQ ID NO: 310928 - DNA, 30 bp, Artificial Sequence
  Synthetic oligonucleotide
agttgtgaagacgggaggtatcctccccgc

SEQ ID NO: 310929 - DNA, 30 bp, Artificial Sequence
  Synthetic oligonucleotide
gatatccgactatgtacgtgcgcagcccgc

SEQ ID NO: 310930 - DNA, 30 bp, Artificial Sequence
  Synthetic oligonucleotide
tttgatgtactctatgtacacaacgcccgc

SEQ ID NO: 310931 - DNA, 30 bp, Artificial Sequence
  Synthetic oligonucleotide
tgcggctcagttatggtgcccatggcccgc

SEQ ID NO: 310932 - DNA, 30 bp, Artificial Sequence
  Synthetic oligonucleotide
cataggcattgaccaggtgggggtgcccgc

SEQ ID NO: 310933 - DNA, 30 bp, Artificial Sequence
  Synthetic oligonucleotide
tatcatcctttcgcgaaaagtgtatcccgc

SEQ ID NO: 310934 - DNA, 30 bp, Artificial Sequence
  Synthetic oligonucleotide
gaggttgatgtccattatcaagtgtcccgc

SEQ ID NO: 310935 - DNA, 30 bp, Artificial Sequence
  Synthetic oligonucleotide
gagtacctaaatagacgtacaggttcccgc

SEQ ID NO: 310936 - DNA, 30 bp, Artificial Sequence
  Synthetic oligonucleotide
ttagggataatgtagaatacgcagagccgc

SEQ ID NO: 310937 - DNA, 30 bp, Artificial Sequence
  Synthetic oligonucleotide
aacaacgtgctacggggaccaacgagccgc

SEQ ID NO: 310938 - DNA, 30 bp, Artificial Sequence
  Synthetic oligonucleotide
attggtataatacgttacggcctgagccgc

SEQ ID NO: 310939 - DNA, 30 bp, Artificial Sequence
  Synthetic oligonucleotide
tatcgggcaagctcacatgaacctagccgc

SEQ ID NO: 310940 - DNA, 30 bp, Artificial Sequence
  Synthetic oligonucleotide
acagttttccccgataacgagtaacgccgc

SEQ ID NO: 310941 - DNA, 30 bp, Artificial Sequence
  Synthetic oligonucleotide
gcgagacacggttggataatgccacgccgc

SEQ ID NO: 310942 - DNA, 30 bp, Artificial Sequence
  Synthetic oligonucleotide
gattgcggagaactagaagctaaccgccgc

SEQ ID NO: 310943 - DNA, 30 bp, Artificial Sequence
  Synthetic oligonucleotide
tcccgcacgggtagattcaaagaccgccgc

SEQ ID NO: 310944 - DNA, 30 bp, Artificial Sequence
  Synthetic oligonucleotide
caagactacaagctatataatgtgcgccgc

SEQ ID NO: 310945 - DNA, 30 bp, Artificial Sequence
  Synthetic oligonucleotide
ttgtgcaaatcctgtaaaacgactcgccgc

SEQ ID NO: 310946 - DNA, 30 bp, Artificial Sequence
  Synthetic oligonucleotide
aaaactatttggattcaaaccataggccgc

SEQ ID NO: 310947 - DNA, 30 bp, Artificial Sequence
  Synthetic oligonucleotide
acccaaaattgtgtctaatagctaggccgc

SEQ ID NO: 310948 - DNA, 30 bp, Artificial Sequence
  Synthetic oligonucleotide
caagccttcagctcagggcaattcggccgc

SEQ ID NO: 310949 - DNA, 30 bp, Artificial Sequence
  Synthetic oligonucleotide
cgggataacgagtcagctaaacagggccgc

SEQ ID NO: 310950 - DNA, 30 bp, Artificial Sequence
  Synthetic oligonucleotide
taatcgcgggtactttgccgttggggccgc

SEQ ID NO: 310951 - DNA, 30 bp, Artificial Sequence
  Synthetic oligonucleotide
caccaggcgcactgggtctatttgggccgc

SEQ ID NO: 310952 - DNA, 30 bp, Artificial Sequence
  Synthetic oligonucleotide
taggtacaaggatccgtgcttaatggccgc

SEQ ID NO: 310953 - DNA, 30 bp, Artificial Sequence
  Synthetic oligonucleotide
cctcgggtttaaccagtctagtgtggccgc

SEQ ID NO: 310954 - DNA, 30 bp, Artificial Sequence
  Synthetic oligonucleotide
caaacaattaaaaaagttgttatatgccgc

SEQ ID NO: 310955 - DNA, 30 bp, Artificial Sequence
  Synthetic oligonucleotide
ccgagtggctgttattcatactactgccgc

SEQ ID NO: 310956 - DNA, 30 bp, Artificial Sequence
  Synthetic oligonucleotide
gctctcctggcacgcgccatggcctgccgc

SEQ ID NO: 310957 - DNA, 30 bp, Artificial Sequence
  Synthetic oligonucleotide
agtttgggcccgcacggcaagagctgccgc

SEQ ID NO: 310958 - DNA, 30 bp, Artificial Sequence
  Synthetic oligonucleotide
aggacccctactgaattactggcgtgccgc

SEQ ID NO: 310959 - DNA, 30 bp, Artificial Sequence
  Synthetic oligonucleotide
gatcctttatgatctcttgatgcgtgccgc

SEQ ID NO: 310960 - DNA, 30 bp, Artificial Sequence
  Synthetic oligonucleotide
aggagttgaggggggaatcaggggtgccgc

SEQ ID NO: 310961 - DNA, 30 bp, Artificial Sequence
  Synthetic oligonucleotide
gttgcacttgactttatacaaggaatccgc

SEQ ID NO: 310962 - DNA, 30 bp, Artificial Sequence
  Synthetic oligonucleotide
tggcacggtcattcctcgacggacatccgc

SEQ ID NO: 310963 - DNA, 30 bp, Artificial Sequence
  Synthetic oligonucleotide
gtacatctgctctctacaattgtcatccgc

SEQ ID NO: 310964 - DNA, 30 bp, Artificial Sequence
  Synthetic oligonucleotide
cgaattggaagcattggggccgatatccgc

SEQ ID NO: 310965 - DNA, 30 bp, Artificial Sequence
  Synthetic oligonucleotide
gcccggaaagttgcaaagaaccttatccgc

SEQ ID NO: 310966 - DNA, 30 bp, Artificial Sequence
  Synthetic oligonucleotide
ccggcacctacctcctgctatacactccgc

SEQ ID NO: 310967 - DNA, 30 bp, Artificial Sequence
  Synthetic oligonucleotide
cagcccatttttgcccgaaggaacctccgc

SEQ ID NO: 310968 - DNA, 30 bp, Artificial Sequence
  Synthetic oligonucleotide
gcggctctagtcggcgaagtgtacctccgc

SEQ ID NO: 310969 - DNA, 30 bp, Artificial Sequence
  Synthetic oligonucleotide
ctgcttcgaggcccatccgaaggcgtccgc

SEQ ID NO: 310970 - DNA, 30 bp, Artificial Sequence
  Synthetic oligonucleotide
caccgtacttggttaggattcggtgtccgc

SEQ ID NO: 310971 - DNA, 30 bp, Artificial Sequence
  Synthetic oligonucleotide
gctaccctgcccttaagcaaaagaaagcgc

SEQ ID NO: 310972 - DNA, 30 bp, Artificial Sequence
  Synthetic oligonucleotide
cgttagccgttgtaggcactgcgaaagcgc

SEQ ID NO: 310973 - DNA, 30 bp, Artificial Sequence
  Synthetic oligonucleotide
ctgtgtccggcaagtttacgcaacaagcgc

SEQ ID NO: 310974 - DNA, 30 bp, Artificial Sequence
  Synthetic oligonucleotide
ccgcggtgggaggcatccagagacaagcgc

SEQ ID NO: 310975 - DNA, 30 bp, Artificial Sequence
  Synthetic oligonucleotide
tggtgataccgcaaggtcggcaccaagcgc

SEQ ID NO: 310976 - DNA, 30 bp, Artificial Sequence
  Synthetic oligonucleotide
tgtactcagtgacatgtaactgccaagcgc

SEQ ID NO: 310977 - DNA, 30 bp, Artificial Sequence
  Synthetic oligonucleotide
taagaggtttcagttagccttaggaagcgc

SEQ ID NO: 310978 - DNA, 30 bp, Artificial Sequence
  Synthetic oligonucleotide
agggaccagacatcagtgtactttaagcgc

SEQ ID NO: 310979 - DNA, 30 bp, Artificial Sequence
  Synthetic oligonucleotide
agcatgtcttctggcaggtacgaacagcgc

SEQ ID NO: 310980 - DNA, 30 bp, Artificial Sequence
  Synthetic oligonucleotide
tacaacggcgttactggcgagatccagcgc

SEQ ID NO: 310981 - DNA, 30 bp, Artificial Sequence
  Synthetic oligonucleotide
actggcagttactcaccaaagctgcagcgc

SEQ ID NO: 310982 - DNA, 30 bp, Artificial Sequence
  Synthetic oligonucleotide
caaacgagggtctccccgaaaaatcagcgc

SEQ ID NO: 310983 - DNA, 30 bp, Artificial Sequence
  Synthetic oligonucleotide
tgcgatcgattacggagcgtacatcagcgc

SEQ ID NO: 310984 - DNA, 30 bp, Artificial Sequence
  Synthetic oligonucleotide
ctgttatgggatttaccgtgcctcgagcgc

SEQ ID NO: 310985 - DNA, 30 bp, Artificial Sequence
  Synthetic oligonucleotide
gggttcatggtagcggcgaacgctgagcgc

SEQ ID NO: 310986 - DNA, 30 bp, Artificial Sequence
  Synthetic oligonucleotide
gtcgcggtgaataacccactcgcgtagcgc

SEQ ID NO: 310987 - DNA, 30 bp, Artificial Sequence
  Synthetic oligonucleotide
atctattttagctatgcctaacattagcgc

SEQ ID NO: 310988 - DNA, 30 bp, Artificial Sequence
  Synthetic oligonucleotide
gaatactgggaaagcgatgcagattagcgc

SEQ ID NO: 310989 - DNA, 30 bp, Artificial Sequence
  Synthetic oligonucleotide
ggccgatgaaagcaacgctattcttagcgc

SEQ ID NO: 310990 - DNA, 30 bp, Artificial Sequence
  Synthetic oligonucleotide
acatgttaggtttatatcttgtgaacgcgc

SEQ ID NO: 310991 - DNA, 30 bp, Artificial Sequence
  Synthetic oligonucleotide
gtcatatacatgttgtgattgctcacgcgc

SEQ ID NO: 310992 - DNA, 30 bp, Artificial Sequence
  Synthetic oligonucleotide
gaagaactccgaggtgagaaaacgacgcgc

SEQ ID NO: 310993 - DNA, 30 bp, Artificial Sequence
  Synthetic oligonucleotide
gcattcgtgatgtttattatgagtacgcgc

SEQ ID NO: 310994 - DNA, 30 bp, Artificial Sequence
  Synthetic oligonucleotide
taagtctgcaagattcttcaggtcccgcgc

SEQ ID NO: 310995 - DNA, 30 bp, Artificial Sequence
  Synthetic oligonucleotide
accagaagacagcgtgcagaatctccgcgc

SEQ ID NO: 310996 - DNA, 30 bp, Artificial Sequence
  Synthetic oligonucleotide
cgttgaggcattagtgttggagccgcgcgc

SEQ ID NO: 310997 - DNA, 30 bp, Artificial Sequence
  Synthetic oligonucleotide
ttgattgtgcggaatcgggagtgcgcgcgc

SEQ ID NO: 310998 - DNA, 30 bp, Artificial Sequence
  Synthetic oligonucleotide
aaatgagatcgatgggcctataaggcgcgc

SEQ ID NO: 310999 - DNA, 30 bp, Artificial Sequence
  Synthetic oligonucleotide
tccgttctcaaatcattcaaaggggcgcgc

SEQ ID NO: 311000 - DNA, 30 bp, Artificial Sequence
  Synthetic oligonucleotide
aaactttgggtgagacgtggtcgtgcgcgc

SEQ ID NO: 311001 - DNA, 30 bp, Artificial Sequence
  Synthetic oligonucleotide
cttcatgggtataccagtcagacatcgcgc

SEQ ID NO: 311002 - DNA, 30 bp, Artificial Sequence
  Synthetic oligonucleotide
gatcatgtgaattgggacggaggatcgcgc

SEQ ID NO: 311003 - DNA, 30 bp, Artificial Sequence
  Synthetic oligonucleotide
tcccaatttctctctggcctactctcgcgc

SEQ ID NO: 311004 - DNA, 30 bp, Artificial Sequence
  Synthetic oligonucleotide
aggtgaattcgaccgtacctactgtcgcgc

SEQ ID NO: 311005 - DNA, 30 bp, Artificial Sequence
  Synthetic oligonucleotide
cttaaacttttgggcgtatttgattcgcgc

SEQ ID NO: 311006 - DNA, 30 bp, Artificial Sequence
  Synthetic oligonucleotide
acgcccgtaataaccgccctctgaaggcgc

SEQ ID NO: 311007 - DNA, 30 bp, Artificial Sequence
  Synthetic oligonucleotide
cacaaggataatagtaaacatgtaaggcgc

SEQ ID NO: 311008 - DNA, 30 bp, Artificial Sequence
  Synthetic oligonucleotide
gaaaagagaagcagccttcatttaaggcgc

SEQ ID NO: 311009 - DNA, 30 bp, Artificial Sequence
  Synthetic oligonucleotide
ccgaaattataacggggtggcctcaggcgc

SEQ ID NO: 311010 - DNA, 30 bp, Artificial Sequence
  Synthetic oligonucleotide
tagaggtattatataagtcttgagaggcgc

SEQ ID NO: 311011 - DNA, 30 bp, Artificial Sequence
  Synthetic oligonucleotide
cccaatcttctatgagttgcgcggaggcgc

SEQ ID NO: 311012 - DNA, 30 bp, Artificial Sequence
  Synthetic oligonucleotide
gtacctaaaagattgtgtacggcccggcgc

SEQ ID NO: 311013 - DNA, 30 bp, Artificial Sequence
  Synthetic oligonucleotide
cttggaacttgaccctagttcgcgcggcgc

SEQ ID NO: 311014 - DNA, 30 bp, Artificial Sequence
  Synthetic oligonucleotide
taaatgcgaagcttgcggttcattcggcgc

SEQ ID NO: 311015 - DNA, 30 bp, Artificial Sequence
  Synthetic oligonucleotide
ggtatctgataagtggctggtcccgggcgc

SEQ ID NO: 311016 - DNA, 30 bp, Artificial Sequence
  Synthetic oligonucleotide
cgatgttggcgtgatagattgaaggggcgc

SEQ ID NO: 311017 - DNA, 30 bp, Artificial Sequence
  Synthetic oligonucleotide
tcacggcaaccatatacgtcgacggggcgc

SEQ ID NO: 311018 - DNA, 30 bp, Artificial Sequence
  Synthetic oligonucleotide
taccgccaggttggctctggaggatggcgc

SEQ ID NO: 311019 - DNA, 30 bp, Artificial Sequence
  Synthetic oligonucleotide
tattccgaactgccgtaggtaggatggcgc

SEQ ID NO: 311020 - DNA, 30 bp, Artificial Sequence
  Synthetic oligonucleotide
acgataagccaccacacgttggactggcgc

SEQ ID NO: 311021 - DNA, 30 bp, Artificial Sequence
  Synthetic oligonucleotide
caagatttggaaaagtcaggagcctggcgc

SEQ ID NO: 311022 - DNA, 30 bp, Artificial Sequence
  Synthetic oligonucleotide
acttctatgtgggttagttgactgtggcgc

SEQ ID NO: 311023 - DNA, 30 bp, Artificial Sequence
  Synthetic oligonucleotide
cggtcgtccgcctaattgcacggttggcgc

SEQ ID NO: 311024 - DNA, 30 bp, Artificial Sequence
  Synthetic oligonucleotide
gctgtcacggacgagacagctaaaatgcgc

SEQ ID NO: 311025 - DNA, 30 bp, Artificial Sequence
  Synthetic oligonucleotide
ttatgagtagttgtgcaaggtccaatgcgc

SEQ ID NO: 311026 - DNA, 30 bp, Artificial Sequence
  Synthetic oligonucleotide
taacaagttgctgttgcttccagaatgcgc

SEQ ID NO: 311027 - DNA, 30 bp, Artificial Sequence
  Synthetic oligonucleotide
tactagcacgcgtgaaagagggcgatgcgc

SEQ ID NO: 311028 - DNA, 30 bp, Artificial Sequence
  Synthetic oligonucleotide
ccctggaactatcatgaattgtcactgcgc

SEQ ID NO: 311029 - DNA, 30 bp, Artificial Sequence
  Synthetic oligonucleotide
gatatgccgtttagtatgtgaagactgcgc

SEQ ID NO: 311030 - DNA, 30 bp, Artificial Sequence
  Synthetic oligonucleotide
gtggtatggtatattatgtggagactgcgc

SEQ ID NO: 311031 - DNA, 30 bp, Artificial Sequence
  Synthetic oligonucleotide
cgcaaatatgtgcatggggaacgcctgcgc

SEQ ID NO: 311032 - DNA, 30 bp, Artificial Sequence
  Synthetic oligonucleotide
ttggtacttaagcctctggccctcctgcgc

SEQ ID NO: 311033 - DNA, 30 bp, Artificial Sequence
  Synthetic oligonucleotide
tatcagggtcaatgtctacaagcgctgcgc

SEQ ID NO: 311034 - DNA, 30 bp, Artificial Sequence
  Synthetic oligonucleotide
gtcttagttgctgtgcggggccatctgcgc

SEQ ID NO: 311035 - DNA, 30 bp, Artificial Sequence
  Synthetic oligonucleotide
gcaccttaatatatatgtcgacatgtgcgc

SEQ ID NO: 311036 - DNA, 30 bp, Artificial Sequence
  Synthetic oligonucleotide
ctacctgcgacacagagtcacgatgtgcgc

SEQ ID NO: 311037 - DNA, 30 bp, Artificial Sequence
  Synthetic oligonucleotide
ggtttaggggaggctagtggtcgattgcgc

SEQ ID NO: 311038 - DNA, 30 bp, Artificial Sequence
  Synthetic oligonucleotide
aatgtaactgcggtcttaatactattgcgc

SEQ ID NO: 311039 - DNA, 31 bp, Artificial Sequence
  Synthetic oligonucleotide
ctcaaccgcagatcctcaggagtccttgcgc

SEQ ID NO: 311040 - DNA, 30 bp, Artificial Sequence
  Synthetic oligonucleotide
tacaggaaacgtataccctgcagcaatcgc

SEQ ID NO: 311041 - DNA, 30 bp, Artificial Sequence
  Synthetic oligonucleotide
attcgcattgacaccgaagattggaatcgc

SEQ ID NO: 311042 - DNA, 30 bp, Artificial Sequence
  Synthetic oligonucleotide
gccgagggacggactgagtttagtaatcgc

SEQ ID NO: 311043 - DNA, 30 bp, Artificial Sequence
  Synthetic oligonucleotide
agacaaacgtgtccttgagatgaacatcgc

SEQ ID NO: 311044 - DNA, 30 bp, Artificial Sequence
  Synthetic oligonucleotide
gttcgagatctcacagcctcgaaccatcgc

SEQ ID NO: 311045 - DNA, 30 bp, Artificial Sequence
  Synthetic oligonucleotide
tttcataggaaattaaatatcgaccatcgc

SEQ ID NO: 311046 - DNA, 30 bp, Artificial Sequence
  Synthetic oligonucleotide
cgtactaacggtccagcggtatcccatcgc

SEQ ID NO: 311047 - DNA, 30 bp, Artificial Sequence
  Synthetic oligonucleotide
actaacgaacgcacaacatacccgcatcgc

SEQ ID NO: 311048 - DNA, 30 bp, Artificial Sequence
  Synthetic oligonucleotide
tcagcataccagcttacgattctgcatcgc

SEQ ID NO: 311049 - DNA, 30 bp, Artificial Sequence
  Synthetic oligonucleotide
gtcacgactggaatcctcttccatcatcgc

SEQ ID NO: 311050 - DNA, 30 bp, Artificial Sequence
  Synthetic oligonucleotide
tctgaccattgaaaggctcggagtcatcgc

SEQ ID NO: 311051 - DNA, 30 bp, Artificial Sequence
  Synthetic oligonucleotide
gagacagttttgtatactagcggtcatcgc

SEQ ID NO: 311052 - DNA, 30 bp, Artificial Sequence
  Synthetic oligonucleotide
tccaagtcatccctgatgccggcagatcgc

SEQ ID NO: 311053 - DNA, 30 bp, Artificial Sequence
  Synthetic oligonucleotide
ctagcgacagttccctacagcttcgatcgc

SEQ ID NO: 311054 - DNA, 30 bp, Artificial Sequence
  Synthetic oligonucleotide
ttaggataaagcattacttcttgtgatcgc

SEQ ID NO: 311055 - DNA, 30 bp, Artificial Sequence
  Synthetic oligonucleotide
gcacatttcagcaatttcgaaagatatcgc

SEQ ID NO: 311056 - DNA, 30 bp, Artificial Sequence
  Synthetic oligonucleotide
taaggggtcaaatgatcatgcggatatcgc

SEQ ID NO: 311057 - DNA, 30 bp, Artificial Sequence
  Synthetic oligonucleotide
gctacatatcagtgctgtcataccactcgc

SEQ ID NO: 311058 - DNA, 30 bp, Artificial Sequence
  Synthetic oligonucleotide
actacggacacgtgcgatcggagcactcgc

SEQ ID NO: 311059 - DNA, 30 bp, Artificial Sequence
  Synthetic oligonucleotide
tagacacaacctggcgcagtaggcactcgc

SEQ ID NO: 311060 - DNA, 30 bp, Artificial Sequence
  Synthetic oligonucleotide
gccattggagttgcctaacactgcactcgc

SEQ ID NO: 311061 - DNA, 30 bp, Artificial Sequence
  Synthetic oligonucleotide
cattgagagtagtaagcgggttgtactcgc

SEQ ID NO: 311062 - DNA, 30 bp, Artificial Sequence
  Synthetic oligonucleotide
tagtttctccgtgtaatcgggccacctcgc

SEQ ID NO: 311063 - DNA, 30 bp, Artificial Sequence
  Synthetic oligonucleotide
aggctaacaggcatgatgtcgatacctcgc

SEQ ID NO: 311064 - DNA, 30 bp, Artificial Sequence
  Synthetic oligonucleotide
agcttggccattcaagaataggcccctcgc

SEQ ID NO: 311065 - DNA, 30 bp, Artificial Sequence
  Synthetic oligonucleotide
tattacagcccaccgttttcctcccctcgc

SEQ ID NO: 311066 - DNA, 30 bp, Artificial Sequence
  Synthetic oligonucleotide
tctaatttattgttgctcttaatcgctcgc

SEQ ID NO: 311067 - DNA, 30 bp, Artificial Sequence
  Synthetic oligonucleotide
acgcacggatgggatgaatccgaggctcgc

SEQ ID NO: 311068 - DNA, 30 bp, Artificial Sequence
  Synthetic oligonucleotide
atccggcgccgatacactccaagggctcgc

SEQ ID NO: 311069 - DNA, 31 bp, Artificial Sequence
  Synthetic oligonucleotide
aaaccacgagtggacgtactcctttgctcgc

SEQ ID NO: 311070 - DNA, 30 bp, Artificial Sequence
  Synthetic oligonucleotide
tttggagacagctccaacgagggatctcgc

SEQ ID NO: 311071 - DNA, 30 bp, Artificial Sequence
  Synthetic oligonucleotide
aatagcactaagcactacatttggtctcgc

SEQ ID NO: 311072 - DNA, 30 bp, Artificial Sequence
  Synthetic oligonucleotide
agcaattgcatttcgagcgcaccaagtcgc

SEQ ID NO: 311073 - DNA, 30 bp, Artificial Sequence
  Synthetic oligonucleotide
tgtcatagactgtctggtccatcaagtcgc

SEQ ID NO: 311074 - DNA, 30 bp, Artificial Sequence
  Synthetic oligonucleotide
caatccgctcatcggctgctgaccagtcgc

SEQ ID NO: 311075 - DNA, 30 bp, Artificial Sequence
  Synthetic oligonucleotide
catacgtgggttgacattgcctgcagtcgc

SEQ ID NO: 311076 - DNA, 30 bp, Artificial Sequence
  Synthetic oligonucleotide
gaagatagccccacgggataattcagtcgc

SEQ ID NO: 311077 - DNA, 30 bp, Artificial Sequence
  Synthetic oligonucleotide
gtatcatccccacgacactacttcagtcgc

SEQ ID NO: 311078 - DNA, 30 bp, Artificial Sequence
  Synthetic oligonucleotide
ccaacgttcgccttaaagtctaatagtcgc

SEQ ID NO: 311079 - DNA, 30 bp, Artificial Sequence
  Synthetic oligonucleotide
aaccgtaaggccgatgtttgcactagtcgc

SEQ ID NO: 311080 - DNA, 30 bp, Artificial Sequence
  Synthetic oligonucleotide
ttcgattaacgatcactaattactagtcgc

SEQ ID NO: 311081 - DNA, 30 bp, Artificial Sequence
  Synthetic oligonucleotide
gttctgatgagtattgtcgatgtacgtcgc

SEQ ID NO: 311082 - DNA, 30 bp, Artificial Sequence
  Synthetic oligonucleotide
tgctttcggcaaattcgcattacccgtcgc

SEQ ID NO: 311083 - DNA, 30 bp, Artificial Sequence
  Synthetic oligonucleotide
aggcacacggtgattgtacatgttcgtcgc

SEQ ID NO: 311084 - DNA, 30 bp, Artificial Sequence
  Synthetic oligonucleotide
ggccgggagttggcactgagatttcgtcgc

SEQ ID NO: 311085 - DNA, 30 bp, Artificial Sequence
  Synthetic oligonucleotide
gcataatatatctcgcacgaaaccggtcgc

SEQ ID NO: 311086 - DNA, 31 bp, Artificial Sequence
  Synthetic oligonucleotide
tgtcctatactcgaatggggcgcccggtcgc

SEQ ID NO: 311087 - DNA, 30 bp, Artificial Sequence
  Synthetic oligonucleotide
ctaacatcgctgagttcttgggccggtcgc

SEQ ID NO: 311088 - DNA, 30 bp, Artificial Sequence
  Synthetic oligonucleotide
aatagtctcgcggcctgagcaatcggtcgc

SEQ ID NO: 311089 - DNA, 30 bp, Artificial Sequence
  Synthetic oligonucleotide
atcagccaaccaatagacgggcagggtcgc

SEQ ID NO: 311090 - DNA, 30 bp, Artificial Sequence
  Synthetic oligonucleotide
gttctgctaagctcgaatgtatcctgtcgc

SEQ ID NO: 311091 - DNA, 30 bp, Artificial Sequence
  Synthetic oligonucleotide
cgttgcgtagggtgtaggcgcgtctgtcgc

SEQ ID NO: 311092 - DNA, 30 bp, Artificial Sequence
  Synthetic oligonucleotide
atggccgcgcgccactttataaggtgtcgc

SEQ ID NO: 311093 - DNA, 30 bp, Artificial Sequence
  Synthetic oligonucleotide
ccttctcctatacgtcggtgtcattgtcgc

SEQ ID NO: 311094 - DNA, 30 bp, Artificial Sequence
  Synthetic oligonucleotide
tatcgtctaatgatcctcaagacttgtcgc

SEQ ID NO: 311095 - DNA, 30 bp, Artificial Sequence
  Synthetic oligonucleotide
agatgagggaggtcccgcgaccccattcgc

SEQ ID NO: 311096 - DNA, 30 bp, Artificial Sequence
  Synthetic oligonucleotide
attaggtcaagggtagaaatgcttattcgc

SEQ ID NO: 311097 - DNA, 30 bp, Artificial Sequence
  Synthetic oligonucleotide
tagattatctctcgtacacaagtacttcgc

SEQ ID NO: 311098 - DNA, 30 bp, Artificial Sequence
  Synthetic oligonucleotide
tccatgaagaagactgagatagaccttcgc

SEQ ID NO: 311099 - DNA, 30 bp, Artificial Sequence
  Synthetic oligonucleotide
gtatcgttcagaggaggggatagtcttcgc

SEQ ID NO: 311100 - DNA, 30 bp, Artificial Sequence
  Synthetic oligonucleotide
cgcgtcgggctttatcttatgcgagttcgc

SEQ ID NO: 311101 - DNA, 30 bp, Artificial Sequence
  Synthetic oligonucleotide
cgcctccctctattaactctgtttgttcgc

SEQ ID NO: 311102 - DNA, 30 bp, Artificial Sequence
  Synthetic oligonucleotide
cgaaaagcggttgtatggactaaatttcgc

SEQ ID NO: 311103 - DNA, 30 bp, Artificial Sequence
  Synthetic oligonucleotide
gcttattgcctaaattcacccgaatttcgc

SEQ ID NO: 311104 - DNA, 30 bp, Artificial Sequence
  Synthetic oligonucleotide
tatgacaatctgggtacgccagtatttcgc

SEQ ID NO: 311105 - DNA, 30 bp, Artificial Sequence
  Synthetic oligonucleotide
acttgtcaggaagcaagtatcaactttcgc

SEQ ID NO: 311106 - DNA, 30 bp, Artificial Sequence
  Synthetic oligonucleotide
taaaacacatggtgtgagatacactttcgc

SEQ ID NO: 311107 - DNA, 30 bp, Artificial Sequence
  Synthetic oligonucleotide
tagggctgaaacacataattaagctttcgc

SEQ ID NO: 311108 - DNA, 30 bp, Artificial Sequence
  Synthetic oligonucleotide
aagaaattgtacgtgattaactggtttcgc

SEQ ID NO: 311109 - DNA, 30 bp, Artificial Sequence
  Synthetic oligonucleotide
gtctaaagccgtcgctacctcatgtttcgc

SEQ ID NO: 311110 - DNA, 30 bp, Artificial Sequence
  Synthetic oligonucleotide
catcttgaggactcatttgtaccttttcgc

SEQ ID NO: 311111 - DNA, 30 bp, Artificial Sequence
  Synthetic oligonucleotide
ggacagcaggagaagttggcgcgttttcgc

SEQ ID NO: 311112 - DNA, 30 bp, Artificial Sequence
  Synthetic oligonucleotide
ctaagtatggcttattcgggtgtttttcgc

SEQ ID NO: 311113 - DNA, 30 bp, Artificial Sequence
  Synthetic oligonucleotide
ggatcacagaaatgtggccaatcaaaaggc

SEQ ID NO: 311114 - DNA, 30 bp, Artificial Sequence
  Synthetic oligonucleotide
aatggttcgtcatataatctatccaaaggc

SEQ ID NO: 311115 - DNA, 30 bp, Artificial Sequence
  Synthetic oligonucleotide
ttcttccaggagagcacgattatcaaaggc

SEQ ID NO: 311116 - DNA, 30 bp, Artificial Sequence
  Synthetic oligonucleotide
tggcctaccacgtttctggggacgaaaggc

SEQ ID NO: 311117 - DNA, 30 bp, Artificial Sequence
  Synthetic oligonucleotide
gcacttggctattcgaagtgattgaaaggc

SEQ ID NO: 311118 - DNA, 30 bp, Artificial Sequence
  Synthetic oligonucleotide
ctaaaccggctcggaatctcctagcaaggc

SEQ ID NO: 311119 - DNA, 30 bp, Artificial Sequence
  Synthetic oligonucleotide
gtcatttcggtccaatgctaggatcaaggc

SEQ ID NO: 311120 - DNA, 30 bp, Artificial Sequence
  Synthetic oligonucleotide
gataactacgatatttgcctatatcaaggc

SEQ ID NO: 311121 - DNA, 30 bp, Artificial Sequence
  Synthetic oligonucleotide
tcatagcatcagcgttgcgcacaagaaggc

SEQ ID NO: 311122 - DNA, 30 bp, Artificial Sequence
  Synthetic oligonucleotide
ataagtgtaaaatgggtacaaatagaaggc

SEQ ID NO: 311123 - DNA, 30 bp, Artificial Sequence
  Synthetic oligonucleotide
ctgaaaaagagatgtatgaagctcgaaggc

SEQ ID NO: 311124 - DNA, 30 bp, Artificial Sequence
  Synthetic oligonucleotide
gccagatcacctttcgctttctcggaaggc

SEQ ID NO: 311125 - DNA, 30 bp, Artificial Sequence
  Synthetic oligonucleotide
taccgtgagctatgtcttcagacataaggc

SEQ ID NO: 311126 - DNA, 30 bp, Artificial Sequence
  Synthetic oligonucleotide
agaaatatactcctctactggagataaggc

SEQ ID NO: 311127 - DNA, 30 bp, Artificial Sequence
  Synthetic oligonucleotide
gacgtccacataatggccgacaactaaggc

SEQ ID NO: 311128 - DNA, 30 bp, Artificial Sequence
  Synthetic oligonucleotide
tgcaattgctctgcatatcgttagtaaggc

SEQ ID NO: 311129 - DNA, 30 bp, Artificial Sequence
  Synthetic oligonucleotide
cggatcacgcggctccgaacacggtaaggc

SEQ ID NO: 311130 - DNA, 30 bp, Artificial Sequence
  Synthetic oligonucleotide
ttaaattattctgaaccaaatgggtaaggc

SEQ ID NO: 311131 - DNA, 30 bp, Artificial Sequence
  Synthetic oligonucleotide
cagcggggccttgattggatcagaacaggc

SEQ ID NO: 311132 - DNA, 30 bp, Artificial Sequence
  Synthetic oligonucleotide
ttagcggctgaagagaattgattaacaggc

SEQ ID NO: 311133 - DNA, 30 bp, Artificial Sequence
  Synthetic oligonucleotide
tagaatacaaaacatgactcgcacacaggc

SEQ ID NO: 311134 - DNA, 30 bp, Artificial Sequence
  Synthetic oligonucleotide
tggggactacactgagatatgttcacaggc

SEQ ID NO: 311135 - DNA, 30 bp, Artificial Sequence
  Synthetic oligonucleotide
ggcgccatcgatataggaggcacgacaggc

SEQ ID NO: 311136 - DNA, 30 bp, Artificial Sequence
  Synthetic oligonucleotide
cccgtagtcggatgtttagcctggacaggc

SEQ ID NO: 311137 - DNA, 30 bp, Artificial Sequence
  Synthetic oligonucleotide
cccttaccagggacaaggcatagtacaggc

SEQ ID NO: 311138 - DNA, 30 bp, Artificial Sequence
  Synthetic oligonucleotide
ggcgactgtttgctatcctgtcgtacaggc

SEQ ID NO: 311139 - DNA, 30 bp, Artificial Sequence
  Synthetic oligonucleotide
atctcatgttatgaagcctaggttacaggc

SEQ ID NO: 311140 - DNA, 30 bp, Artificial Sequence
  Synthetic oligonucleotide
tgtcagcgattcaacacggcaggaccaggc

SEQ ID NO: 311141 - DNA, 30 bp, Artificial Sequence
  Synthetic oligonucleotide
agtgtttatacttgcgcaggtcgcccaggc

SEQ ID NO: 311142 - DNA, 30 bp, Artificial Sequence
  Synthetic oligonucleotide
aggtcacggaaccgcgccaagcggccaggc

SEQ ID NO: 311143 - DNA, 30 bp, Artificial Sequence
  Synthetic oligonucleotide
ctagggacaggtagcgacagccatccaggc

SEQ ID NO: 311144 - DNA, 30 bp, Artificial Sequence
  Synthetic oligonucleotide
taaatgtttggttgcgagtacggtccaggc

SEQ ID NO: 311145 - DNA, 30 bp, Artificial Sequence
  Synthetic oligonucleotide
tgccggaaaaaaactaacgcttacgcaggc

SEQ ID NO: 311146 - DNA, 30 bp, Artificial Sequence
  Synthetic oligonucleotide
tcacgcgaagctctcctgtcaatggcaggc

SEQ ID NO: 311147 - DNA, 30 bp, Artificial Sequence
  Synthetic oligonucleotide
cggaggcccaaataaggtatagtggcaggc

SEQ ID NO: 311148 - DNA, 30 bp, Artificial Sequence
  Synthetic oligonucleotide
attataatgtgcctaccactgactgcaggc

SEQ ID NO: 311149 - DNA, 30 bp, Artificial Sequence
  Synthetic oligonucleotide
catcaaggtcggtcacgaaaagtatcaggc

SEQ ID NO: 311150 - DNA, 30 bp, Artificial Sequence
  Synthetic oligonucleotide
tactgacaagcgcccgtgagtcactcaggc

SEQ ID NO: 311151 - DNA, 30 bp, Artificial Sequence
  Synthetic oligonucleotide
tggaaagattacagcgttcaatcctcaggc

SEQ ID NO: 311152 - DNA, 30 bp, Artificial Sequence
  Synthetic oligonucleotide
cgttccaacttcattcgtaaaaattcaggc

SEQ ID NO: 311153 - DNA, 30 bp, Artificial Sequence
  Synthetic oligonucleotide
ctgatgcaaaacacgaaccggaattcaggc

SEQ ID NO: 311154 - DNA, 30 bp, Artificial Sequence
  Synthetic oligonucleotide
tggcgtgtagttgccgatatctattcaggc

SEQ ID NO: 311155 - DNA, 30 bp, Artificial Sequence
  Synthetic oligonucleotide
ctcaaatagtcgactttatgttcttcaggc

SEQ ID NO: 311156 - DNA, 30 bp, Artificial Sequence
  Synthetic oligonucleotide
cgcagtaatgaaggcgcccaaggaagaggc

SEQ ID NO: 311157 - DNA, 30 bp, Artificial Sequence
  Synthetic oligonucleotide
ttgtcgcgttgtctatttcaaaacagaggc

SEQ ID NO: 311158 - DNA, 30 bp, Artificial Sequence
  Synthetic oligonucleotide
ggtggattgcaggtcaagtgtggcagaggc

SEQ ID NO: 311159 - DNA, 30 bp, Artificial Sequence
  Synthetic oligonucleotide
ctttgttaagtatgctgatctgagagaggc

SEQ ID NO: 311160 - DNA, 30 bp, Artificial Sequence
  Synthetic oligonucleotide
ttgtttaacttcaattctaatgcgagaggc

SEQ ID NO: 311161 - DNA, 30 bp, Artificial Sequence
  Synthetic oligonucleotide
gtacggttcgttcacattcttgggagaggc

SEQ ID NO: 311162 - DNA, 30 bp, Artificial Sequence
  Synthetic oligonucleotide
cactctctagggaggtagggtcctagaggc

SEQ ID NO: 311163 - DNA, 30 bp, Artificial Sequence
  Synthetic oligonucleotide
gtatcgcgatcttatacgcgctctagaggc

SEQ ID NO: 311164 - DNA, 30 bp, Artificial Sequence
  Synthetic oligonucleotide
accgttctcccccgatagcctctacgaggc

SEQ ID NO: 311165 - DNA, 30 bp, Artificial Sequence
  Synthetic oligonucleotide
aatacgctctcttcatggctggtacgaggc

SEQ ID NO: 311166 - DNA, 30 bp, Artificial Sequence
  Synthetic oligonucleotide
cgttcgcttccttcaacggggtagcgaggc

SEQ ID NO: 311167 - DNA, 30 bp, Artificial Sequence
  Synthetic oligonucleotide
ggtggtggtgactacacaggggggcgaggc

SEQ ID NO: 311168 - DNA, 30 bp, Artificial Sequence
  Synthetic oligonucleotide
gcattaggatgaagtttcgtagcaggaggc

SEQ ID NO: 311169 - DNA, 30 bp, Artificial Sequence
  Synthetic oligonucleotide
ataggagcagattacctagtggcaggaggc

SEQ ID NO: 311170 - DNA, 30 bp, Artificial Sequence
  Synthetic oligonucleotide
tcgcgggccaaactatgacctagaggaggc

SEQ ID NO: 311171 - DNA, 30 bp, Artificial Sequence
  Synthetic oligonucleotide
acaccacgaccaagtggcggaactggaggc

SEQ ID NO: 311172 - DNA, 30 bp, Artificial Sequence
  Synthetic oligonucleotide
ggcgaaagacatttatcatggcttggaggc

SEQ ID NO: 311173 - DNA, 30 bp, Artificial Sequence
  Synthetic oligonucleotide
aactatatggccagtttgttaagatgaggc

SEQ ID NO: 311174 - DNA, 30 bp, Artificial Sequence
  Synthetic oligonucleotide
gagtgaagttctgagaacaagtgctgaggc

SEQ ID NO: 311175 - DNA, 30 bp, Artificial Sequence
  Synthetic oligonucleotide
atagattactcgcgcgtgacaatgtgaggc

SEQ ID NO: 311176 - DNA, 30 bp, Artificial Sequence
  Synthetic oligonucleotide
atcgcgagggacaggccttcattttgaggc

SEQ ID NO: 311177 - DNA, 31 bp, Artificial Sequence
  Synthetic oligonucleotide
tcaccgggagatcgagcttgtggtaataggc

SEQ ID NO: 311178 - DNA, 30 bp, Artificial Sequence
  Synthetic oligonucleotide
gggaaatagccttcgctcagcttaataggc

SEQ ID NO: 311179 - DNA, 30 bp, Artificial Sequence
  Synthetic oligonucleotide
ggagtggaataaacgcagtcgcacataggc

SEQ ID NO: 311180 - DNA, 30 bp, Artificial Sequence
  Synthetic oligonucleotide
tatcaggtccacctcgtcaaatccataggc

SEQ ID NO: 311181 - DNA, 30 bp, Artificial Sequence
  Synthetic oligonucleotide
atagacggcattcgaggtggcggcataggc

SEQ ID NO: 311182 - DNA, 30 bp, Artificial Sequence
  Synthetic oligonucleotide
ctggctttactgccgaagcggggcataggc

SEQ ID NO: 311183 - DNA, 30 bp, Artificial Sequence
  Synthetic oligonucleotide
tgcttaacacctgccccatccgggataggc

SEQ ID NO: 311184 - DNA, 30 bp, Artificial Sequence
  Synthetic oligonucleotide
gtgtcgtctatgttccgtcatcctataggc

SEQ ID NO: 311185 - DNA, 30 bp, Artificial Sequence
  Synthetic oligonucleotide
atagtctcttatgttgggaacgttataggc

SEQ ID NO: 311186 - DNA, 30 bp, Artificial Sequence
  Synthetic oligonucleotide
ataaagatatggtaggtgtaagacctaggc

SEQ ID NO: 311187 - DNA, 30 bp, Artificial Sequence
  Synthetic oligonucleotide
gccaacgtatatggtacgagagacctaggc

SEQ ID NO: 311188 - DNA, 30 bp, Artificial Sequence
  Synthetic oligonucleotide
tcaataaacttacagccaaactacctaggc

SEQ ID NO: 311189 - DNA, 30 bp, Artificial Sequence
  Synthetic oligonucleotide
ttcaggaagtcggtgaacggatgcctaggc

SEQ ID NO: 311190 - DNA, 30 bp, Artificial Sequence
  Synthetic oligonucleotide
caggcttgagcgtgtttaaaagcgctaggc

SEQ ID NO: 311191 - DNA, 30 bp, Artificial Sequence
  Synthetic oligonucleotide
tgcgtctgcgaaagcacggagcctctaggc

SEQ ID NO: 311192 - DNA, 30 bp, Artificial Sequence
  Synthetic oligonucleotide
tacggaagtgagtagaggttgggtctaggc

SEQ ID NO: 311193 - DNA, 30 bp, Artificial Sequence
  Synthetic oligonucleotide
tgtattcacggcgtgtatggatttctaggc

SEQ ID NO: 311194 - DNA, 30 bp, Artificial Sequence
  Synthetic oligonucleotide
acttgtcacccatcaactggcacagtaggc

SEQ ID NO: 311195 - DNA, 30 bp, Artificial Sequence
  Synthetic oligonucleotide
gtaaggctagctcgtgttaatcgagtaggc

SEQ ID NO: 311196 - DNA, 30 bp, Artificial Sequence
  Synthetic oligonucleotide
tatctggttgggggcgcggtgctcgtaggc

SEQ ID NO: 311197 - DNA, 30 bp, Artificial Sequence
  Synthetic oligonucleotide
atggttactagcaaccaaatgaaggtaggc

SEQ ID NO: 311198 - DNA, 30 bp, Artificial Sequence
  Synthetic oligonucleotide
aactaatacattaacgaacccctggtaggc

SEQ ID NO: 311199 - DNA, 30 bp, Artificial Sequence
  Synthetic oligonucleotide
gccacggaagtcctggaagtgcgtgtaggc

SEQ ID NO: 311200 - DNA, 30 bp, Artificial Sequence
  Synthetic oligonucleotide
gccaattcaagtatagaatacaacttaggc

SEQ ID NO: 311201 - DNA, 30 bp, Artificial Sequence
  Synthetic oligonucleotide
aatgaacgtgcccgactggtggacttaggc

SEQ ID NO: 311202 - DNA, 30 bp, Artificial Sequence
  Synthetic oligonucleotide
agtcatttcagaacaccctcggggttaggc

SEQ ID NO: 311203 - DNA, 30 bp, Artificial Sequence
  Synthetic oligonucleotide
gtaaaaatgagcagcgggcggcctttaggc

SEQ ID NO: 311204 - DNA, 30 bp, Artificial Sequence
  Synthetic oligonucleotide
caccagctaagcttaagagtataaaacggc

SEQ ID NO: 311205 - DNA, 30 bp, Artificial Sequence
  Synthetic oligonucleotide
gaactccacccaatgcatttcgtaaacggc

SEQ ID NO: 311206 - DNA, 30 bp, Artificial Sequence
  Synthetic oligonucleotide
gggtgtctccgaccatgggccctcaacggc

SEQ ID NO: 311207 - DNA, 30 bp, Artificial Sequence
  Synthetic oligonucleotide
agcacaattatgcgaaactttagacacggc

SEQ ID NO: 311208 - DNA, 30 bp, Artificial Sequence
  Synthetic oligonucleotide
gcagagaactcccacggaggtcgacacggc

SEQ ID NO: 311209 - DNA, 30 bp, Artificial Sequence
  Synthetic oligonucleotide
gtttgggttaacattaaatagtcccacggc

SEQ ID NO: 311210 - DNA, 30 bp, Artificial Sequence
  Synthetic oligonucleotide
ggaaagcgccccatcggagatggccacggc

SEQ ID NO: 311211 - DNA, 30 bp, Artificial Sequence
  Synthetic oligonucleotide
tcaggagctctacgcaaataacgagacggc

SEQ ID NO: 311212 - DNA, 30 bp, Artificial Sequence
  Synthetic oligonucleotide
tcagtgtttgtcacagtgatattagacggc

SEQ ID NO: 311213 - DNA, 30 bp, Artificial Sequence
  Synthetic oligonucleotide
caaggacgaagagattcacgtcaggacggc

SEQ ID NO: 311214 - DNA, 30 bp, Artificial Sequence
  Synthetic oligonucleotide
catgtttcaaggacggttgtcggggacggc

SEQ ID NO: 311215 - DNA, 30 bp, Artificial Sequence
  Synthetic oligonucleotide
ccttcctgggacaaggtatatctggacggc

SEQ ID NO: 311216 - DNA, 30 bp, Artificial Sequence
  Synthetic oligonucleotide
aatgcgggtaaagaggagtttggtgacggc

SEQ ID NO: 311217 - DNA, 30 bp, Artificial Sequence
  Synthetic oligonucleotide
tatccccccagactgggtgaaagatacggc

SEQ ID NO: 311218 - DNA, 30 bp, Artificial Sequence
  Synthetic oligonucleotide
taaacttcgctctataggatacactacggc

SEQ ID NO: 311219 - DNA, 30 bp, Artificial Sequence
  Synthetic oligonucleotide
gtctcactgcccagtagagtctgctacggc

SEQ ID NO: 311220 - DNA, 30 bp, Artificial Sequence
  Synthetic oligonucleotide
ctactgagatagccaaggagctcgtacggc

SEQ ID NO: 311221 - DNA, 30 bp, Artificial Sequence
  Synthetic oligonucleotide
tccaattacttgtatgtttaacggtacggc

SEQ ID NO: 311222 - DNA, 30 bp, Artificial Sequence
  Synthetic oligonucleotide
ccggacacgacagtgaggttttggtacggc

SEQ ID NO: 311223 - DNA, 30 bp, Artificial Sequence
  Synthetic oligonucleotide
gttgtatacgaacgtgcatcgacttacggc

SEQ ID NO: 311224 - DNA, 30 bp, Artificial Sequence
  Synthetic oligonucleotide
cagacttctaatcaaagtaatgtttacggc

SEQ ID NO: 311225 - DNA, 30 bp, Artificial Sequence
  Synthetic oligonucleotide
cctgacgcgcgtgcgcaaatatagaccggc

SEQ ID NO: 311226 - DNA, 30 bp, Artificial Sequence
  Synthetic oligonucleotide
tcgccttacgggtttgtcaagtataccggc

SEQ ID NO: 311227 - DNA, 30 bp, Artificial Sequence
  Synthetic oligonucleotide
tgggggtcctgatatcctagaggtaccggc

SEQ ID NO: 311228 - DNA, 30 bp, Artificial Sequence
  Synthetic oligonucleotide
ccttggataatagggagcaaggtgcccggc

SEQ ID NO: 311229 - DNA, 30 bp, Artificial Sequence
  Synthetic oligonucleotide
cccttggggccaaggtaccggagagccggc

SEQ ID NO: 311230 - DNA, 30 bp, Artificial Sequence
  Synthetic oligonucleotide
ttgactagcgaaattccaactaaggccggc

SEQ ID NO: 311231 - DNA, 30 bp, Artificial Sequence
  Synthetic oligonucleotide
tcgcggtcgctgagccagcaacaggccggc

SEQ ID NO: 311232 - DNA, 30 bp, Artificial Sequence
  Synthetic oligonucleotide
acttggtggatgtccctggccgaggccggc

SEQ ID NO: 311233 - DNA, 30 bp, Artificial Sequence
  Synthetic oligonucleotide
tccagcttaatgcgtcacaaagcatccggc

SEQ ID NO: 311234 - DNA, 30 bp, Artificial Sequence
  Synthetic oligonucleotide
tttcgaattcgcattggttactcatccggc

SEQ ID NO: 311235 - DNA, 30 bp, Artificial Sequence
  Synthetic oligonucleotide
ttgtcaggtcatcgtaagttgcactccggc

SEQ ID NO: 311236 - DNA, 30 bp, Artificial Sequence
  Synthetic oligonucleotide
gaccgatggtccgtttattgaacctccggc

SEQ ID NO: 311237 - DNA, 31 bp, Artificial Sequence
  Synthetic oligonucleotide
taggggacagggcaccgcagacaggtccggc

SEQ ID NO: 311238 - DNA, 31 bp, Artificial Sequence
  Synthetic oligonucleotide
cttgctgtggaaggttgtaagtaagagcggc

SEQ ID NO: 311239 - DNA, 30 bp, Artificial Sequence
  Synthetic oligonucleotide
tgactacctgcgagcgggatcgatagcggc

SEQ ID NO: 311240 - DNA, 30 bp, Artificial Sequence
  Synthetic oligonucleotide
ggacgccgcataaaaacagtaagtagcggc

SEQ ID NO: 311241 - DNA, 30 bp, Artificial Sequence
  Synthetic oligonucleotide
tcaatagccatctgtgtagtagttagcggc

SEQ ID NO: 311242 - DNA, 30 bp, Artificial Sequence
  Synthetic oligonucleotide
tgactatcacccccggataaaccccgcggc

SEQ ID NO: 311243 - DNA, 30 bp, Artificial Sequence
  Synthetic oligonucleotide
aaggcctggggatgtagaataggccgcggc

SEQ ID NO: 311244 - DNA, 30 bp, Artificial Sequence
  Synthetic oligonucleotide
tagcgggtctatctgcaagcatcgcgcggc

SEQ ID NO: 311245 - DNA, 30 bp, Artificial Sequence
  Synthetic oligonucleotide
ccctgtggagttttaatcaggctgcgcggc

SEQ ID NO: 311246 - DNA, 30 bp, Artificial Sequence
  Synthetic oligonucleotide
aatcataagagataatcctgcgcaggcggc

SEQ ID NO: 311247 - DNA, 30 bp, Artificial Sequence
  Synthetic oligonucleotide
tgttaaatatcctatttcaattacggcggc

SEQ ID NO: 311248 - DNA, 30 bp, Artificial Sequence
  Synthetic oligonucleotide
tgtataatgattgtagatatgcagggcggc

SEQ ID NO: 311249 - DNA, 30 bp, Artificial Sequence
  Synthetic oligonucleotide
aaagactgtaagattacggggtcgggcggc

SEQ ID NO: 311250 - DNA, 30 bp, Artificial Sequence
  Synthetic oligonucleotide
gcagaccccataacccgagctactggcggc

SEQ ID NO: 311251 - DNA, 30 bp, Artificial Sequence
  Synthetic oligonucleotide
ggtcattattgtatgttcgttattggcggc

SEQ ID NO: 311252 - DNA, 30 bp, Artificial Sequence
  Synthetic oligonucleotide
aaatgagccgagagatgaattttatgcggc

SEQ ID NO: 311253 - DNA, 30 bp, Artificial Sequence
  Synthetic oligonucleotide
ctaagctcggatcgattggatacaatcggc

SEQ ID NO: 311254 - DNA, 30 bp, Artificial Sequence
  Synthetic oligonucleotide
tcagccttaacgcaatgggggtgaatcggc

SEQ ID NO: 311255 - DNA, 30 bp, Artificial Sequence
  Synthetic oligonucleotide
ggtgaggcctgttgaaggagggagatcggc

SEQ ID NO: 311256 - DNA, 30 bp, Artificial Sequence
  Synthetic oligonucleotide
cacctatccagtctctcctaaggtatcggc

SEQ ID NO: 311257 - DNA, 30 bp, Artificial Sequence
  Synthetic oligonucleotide
gaactttaggcgggattcacagttatcggc

SEQ ID NO: 311258 - DNA, 31 bp, Artificial Sequence
  Synthetic oligonucleotide
tatctaatagaccgtattagaggaactcggc

SEQ ID NO: 311259 - DNA, 30 bp, Artificial Sequence
  Synthetic oligonucleotide
gccgaagtcatgaaacagactgtactcggc

SEQ ID NO: 311260 - DNA, 30 bp, Artificial Sequence
  Synthetic oligonucleotide
ggatggaggtgggggaggcacttgctcggc

SEQ ID NO: 311261 - DNA, 31 bp, Artificial Sequence
  Synthetic oligonucleotide
tttacaattgtggagagtgcattttctcggc

SEQ ID NO: 311262 - DNA, 30 bp, Artificial Sequence
  Synthetic oligonucleotide
cactctcaggtacctgacttcgaagtcggc

SEQ ID NO: 311263 - DNA, 30 bp, Artificial Sequence
  Synthetic oligonucleotide
ttgactccggtcagttggacgagcgtcggc

SEQ ID NO: 311264 - DNA, 30 bp, Artificial Sequence
  Synthetic oligonucleotide
atacatagagtctttacggcgcgggtcggc

SEQ ID NO: 311265 - DNA, 30 bp, Artificial Sequence
  Synthetic oligonucleotide
ctcctagctcaaccggtatggcatgtcggc

SEQ ID NO: 311266 - DNA, 30 bp, Artificial Sequence
  Synthetic oligonucleotide
gtctacaaccaccgcaatgatcttgtcggc

SEQ ID NO: 311267 - DNA, 30 bp, Artificial Sequence
  Synthetic oligonucleotide
ttgtacttcggatagcgtaaagaattcggc

SEQ ID NO: 311268 - DNA, 30 bp, Artificial Sequence
  Synthetic oligonucleotide
ggtcatgtagcatgtggaggcagattcggc

SEQ ID NO: 311269 - DNA, 30 bp, Artificial Sequence
  Synthetic oligonucleotide
ggcatatcgataaactgggtccctttcggc

SEQ ID NO: 311270 - DNA, 30 bp, Artificial Sequence
  Synthetic oligonucleotide
tgcgcctcgaggacactagtcaataagggc

SEQ ID NO: 311271 - DNA, 30 bp, Artificial Sequence
  Synthetic oligonucleotide
cgcagggagcggacccgcacagataagggc

SEQ ID NO: 311272 - DNA, 30 bp, Artificial Sequence
  Synthetic oligonucleotide
gaccgtattgaagcgttagactgtaagggc

SEQ ID NO: 311273 - DNA, 30 bp, Artificial Sequence
  Synthetic oligonucleotide
cttgtaaaaatcgggttaggctgtaagggc

SEQ ID NO: 311274 - DNA, 30 bp, Artificial Sequence
  Synthetic oligonucleotide
aatgctagcatgctaacaacgtgtaagggc

SEQ ID NO: 311275 - DNA, 30 bp, Artificial Sequence
  Synthetic oligonucleotide
ggtagtgcgcgaggcggctaatttaagggc

SEQ ID NO: 311276 - DNA, 30 bp, Artificial Sequence
  Synthetic oligonucleotide
accagactcgttcagttttcataacagggc

SEQ ID NO: 311277 - DNA, 30 bp, Artificial Sequence
  Synthetic oligonucleotide
gattgagtagcaagcttgcgcgatcagggc

SEQ ID NO: 311278 - DNA, 30 bp, Artificial Sequence
  Synthetic oligonucleotide
tcgggcatgcatccctaagtttaagagggc

SEQ ID NO: 311279 - DNA, 30 bp, Artificial Sequence
  Synthetic oligonucleotide
ggggggcgagcatgtcaacctcatgagggc

SEQ ID NO: 311280 - DNA, 30 bp, Artificial Sequence
  Synthetic oligonucleotide
gtccgacacttcgattttcttaaatagggc

SEQ ID NO: 311281 - DNA, 31 bp, Artificial Sequence
  Synthetic oligonucleotide
gcgtcagtcgggacacggaaccgaatagggc

SEQ ID NO: 311282 - DNA, 30 bp, Artificial Sequence
  Synthetic oligonucleotide
attggttcttgcactgcgctgggttagggc

SEQ ID NO: 311283 - DNA, 30 bp, Artificial Sequence
  Synthetic oligonucleotide
ctgagatacgggcgggttcaggtcacgggc

SEQ ID NO: 311284 - DNA, 30 bp, Artificial Sequence
  Synthetic oligonucleotide
tggtaatacgactcttcggggccgacgggc

SEQ ID NO: 311285 - DNA, 30 bp, Artificial Sequence
  Synthetic oligonucleotide
gtaagtcctgttactgcgttacggacgggc

SEQ ID NO: 311286 - DNA, 30 bp, Artificial Sequence
  Synthetic oligonucleotide
agaaggtcgaggatatatggggacccgggc

SEQ ID NO: 311287 - DNA, 30 bp, Artificial Sequence
  Synthetic oligonucleotide
ggatttgatcccagtgctcatagcccgggc

SEQ ID NO: 311288 - DNA, 30 bp, Artificial Sequence
  Synthetic oligonucleotide
tagcgagatgggtgacgcttaacgccgggc

SEQ ID NO: 311289 - DNA, 30 bp, Artificial Sequence
  Synthetic oligonucleotide
gagcgtagaagcggcgcgtacgtgccgggc

SEQ ID NO: 311290 - DNA, 30 bp, Artificial Sequence
  Synthetic oligonucleotide
ttgtataggggggtgtaatctactccgggc

SEQ ID NO: 311291 - DNA, 30 bp, Artificial Sequence
  Synthetic oligonucleotide
acagaccgatcccacatgatcagtccgggc

SEQ ID NO: 311292 - DNA, 30 bp, Artificial Sequence
  Synthetic oligonucleotide
ccgatgtagtataagataatacgtccgggc

SEQ ID NO: 311293 - DNA, 30 bp, Artificial Sequence
  Synthetic oligonucleotide
ctgtttgaaacgataagtttaattccgggc

SEQ ID NO: 311294 - DNA, 30 bp, Artificial Sequence
  Synthetic oligonucleotide
aagagagcttcgcacgttagctttccgggc

SEQ ID NO: 311295 - DNA, 30 bp, Artificial Sequence
  Synthetic oligonucleotide
agcggccacacgcggacagttcgtgcgggc

SEQ ID NO: 311296 - DNA, 30 bp, Artificial Sequence
  Synthetic oligonucleotide
ctaaggccaccattaatgcaatgtgcgggc

SEQ ID NO: 311297 - DNA, 30 bp, Artificial Sequence
  Synthetic oligonucleotide
gtaccacggcacgtgggcgccacatcgggc

SEQ ID NO: 311298 - DNA, 30 bp, Artificial Sequence
  Synthetic oligonucleotide
gtaggctgcagtgagctcacaatctcgggc

SEQ ID NO: 311299 - DNA, 30 bp, Artificial Sequence
  Synthetic oligonucleotide
cttacgctggcaaactaagcggtctcgggc

SEQ ID NO: 311300 - DNA, 30 bp, Artificial Sequence
  Synthetic oligonucleotide
agaacatccggcaacgcgctcgagtcgggc

SEQ ID NO: 311301 - DNA, 30 bp, Artificial Sequence
  Synthetic oligonucleotide
ttgctggcggatgagccatgcaacaggggc

SEQ ID NO: 311302 - DNA, 30 bp, Artificial Sequence
  Synthetic oligonucleotide
tggtgtcttcggcctcaaaggggcaggggc

SEQ ID NO: 311303 - DNA, 30 bp, Artificial Sequence
  Synthetic oligonucleotide
aggcgtaggggacttgcatggctcaggggc

SEQ ID NO: 311304 - DNA, 30 bp, Artificial Sequence
  Synthetic oligonucleotide
cggaataacatattgtgtctcttgaggggc

SEQ ID NO: 311305 - DNA, 30 bp, Artificial Sequence
  Synthetic oligonucleotide
gacatgaacgattgtgcggtgaataggggc

SEQ ID NO: 311306 - DNA, 30 bp, Artificial Sequence
  Synthetic oligonucleotide
tgtctatgtaaacgttgtaaggtacggggc

SEQ ID NO: 311307 - DNA, 30 bp, Artificial Sequence
  Synthetic oligonucleotide
gtgactggtttacatttctagggccggggc

SEQ ID NO: 311308 - DNA, 30 bp, Artificial Sequence
  Synthetic oligonucleotide
gattaaacggggtcagcacttcctcggggc

SEQ ID NO: 311309 - DNA, 30 bp, Artificial Sequence
  Synthetic oligonucleotide
gtggagtgcactttcaactccggtcggggc

SEQ ID NO: 311310 - DNA, 30 bp, Artificial Sequence
  Synthetic oligonucleotide
ttaaatccagcacacctctcttgtcggggc

SEQ ID NO: 311311 - DNA, 30 bp, Artificial Sequence
  Synthetic oligonucleotide
atgtagcatcagcattgatacgttcggggc

SEQ ID NO: 311312 - DNA, 30 bp, Artificial Sequence
  Synthetic oligonucleotide
aacaagaatgggcgctggttcgttcggggc

SEQ ID NO: 311313 - DNA, 30 bp, Artificial Sequence
  Synthetic oligonucleotide
cacggagctttcacacacttgaacgggggc

SEQ ID NO: 311314 - DNA, 30 bp, Artificial Sequence
  Synthetic oligonucleotide
gaacggaaacgacgggtggccgaggggggc

SEQ ID NO: 311315 - DNA, 30 bp, Artificial Sequence
  Synthetic oligonucleotide
agggggtcggtcaccgaagggaatgggggc

SEQ ID NO: 311316 - DNA, 30 bp, Artificial Sequence
  Synthetic oligonucleotide
ttaggatatgtattgagggcgcatgggggc

SEQ ID NO: 311317 - DNA, 29 bp, Artificial Sequence
  Synthetic oligonucleotide
gctctacgcggttggacggacttgggggc

SEQ ID NO: 311318 - DNA, 30 bp, Artificial Sequence
  Synthetic oligonucleotide
agcgttatccagacaaggataaattggggc

SEQ ID NO: 311319 - DNA, 30 bp, Artificial Sequence
  Synthetic oligonucleotide
ttgttacaataagacactggatacatgggc

SEQ ID NO: 311320 - DNA, 30 bp, Artificial Sequence
  Synthetic oligonucleotide
agagttcgaaagtgccctttaatcatgggc

SEQ ID NO: 311321 - DNA, 30 bp, Artificial Sequence
  Synthetic oligonucleotide
tttggggccaagtgacgattgctcatgggc

SEQ ID NO: 311322 - DNA, 30 bp, Artificial Sequence
  Synthetic oligonucleotide
gcaacctaagcggacgtaatattcatgggc

SEQ ID NO: 311323 - DNA, 30 bp, Artificial Sequence
  Synthetic oligonucleotide
gatcgccagtggagtccaccgaagatgggc

SEQ ID NO: 311324 - DNA, 30 bp, Artificial Sequence
  Synthetic oligonucleotide
gtgttaccaaaaatattttattagatgggc

SEQ ID NO: 311325 - DNA, 30 bp, Artificial Sequence
  Synthetic oligonucleotide
gtgaaggacatcttacaaaaattgatgggc

SEQ ID NO: 311326 - DNA, 30 bp, Artificial Sequence
  Synthetic oligonucleotide
tgttacatcatagtttgatagagtatgggc

SEQ ID NO: 311327 - DNA, 30 bp, Artificial Sequence
  Synthetic oligonucleotide
ctatagagatggagtaccagggttatgggc

SEQ ID NO: 311328 - DNA, 30 bp, Artificial Sequence
  Synthetic oligonucleotide
gatgacccgtaacctgttagcaaactgggc

SEQ ID NO: 311329 - DNA, 30 bp, Artificial Sequence
  Synthetic oligonucleotide
attaaccgatgtggctgggatgtcctgggc

SEQ ID NO: 311330 - DNA, 30 bp, Artificial Sequence
  Synthetic oligonucleotide
ttgttcggtcgccttcaggaaaatctgggc

SEQ ID NO: 311331 - DNA, 30 bp, Artificial Sequence
  Synthetic oligonucleotide
agcgccttgtacagatattgggttctgggc

SEQ ID NO: 311332 - DNA, 30 bp, Artificial Sequence
  Synthetic oligonucleotide
cgtgagaacatcatacgtttgaaagtgggc

SEQ ID NO: 311333 - DNA, 30 bp, Artificial Sequence
  Synthetic oligonucleotide
aaactgtgggaccgtaagtccgaagtgggc

SEQ ID NO: 311334 - DNA, 30 bp, Artificial Sequence
  Synthetic oligonucleotide
tccaaggtagacatacagaataacgtgggc

SEQ ID NO: 311335 - DNA, 30 bp, Artificial Sequence
  Synthetic oligonucleotide
taacaaggacacaggacgggaggggtgggc

SEQ ID NO: 311336 - DNA, 30 bp, Artificial Sequence
  Synthetic oligonucleotide
aatacgcgatgacgtccagggctggtgggc

SEQ ID NO: 311337 - DNA, 30 bp, Artificial Sequence
  Synthetic oligonucleotide
cgtcacaacgctcagaaaggtcctgtgggc

SEQ ID NO: 311338 - DNA, 30 bp, Artificial Sequence
  Synthetic oligonucleotide
ttttaacagagtccgcgtacatctgtgggc

SEQ ID NO: 311339 - DNA, 30 bp, Artificial Sequence
  Synthetic oligonucleotide
tggggtaccagtattcggggcagattgggc

SEQ ID NO: 311340 - DNA, 30 bp, Artificial Sequence
  Synthetic oligonucleotide
tgtccacaccatgagtaactgctattgggc

SEQ ID NO: 311341 - DNA, 30 bp, Artificial Sequence
  Synthetic oligonucleotide
ggagcctctctctcttaaacggagttgggc

SEQ ID NO: 311342 - DNA, 30 bp, Artificial Sequence
  Synthetic oligonucleotide
gagtactcggattatgagaggtcgttgggc

SEQ ID NO: 311343 - DNA, 30 bp, Artificial Sequence
  Synthetic oligonucleotide
taggcagaaattctatgaattctgttgggc

SEQ ID NO: 311344 - DNA, 30 bp, Artificial Sequence
  Synthetic oligonucleotide
agtacaacatgctaaagtctcgtgttgggc

SEQ ID NO: 311345 - DNA, 30 bp, Artificial Sequence
  Synthetic oligonucleotide
tgagctcattgagtattgaacgagaatggc

SEQ ID NO: 311346 - DNA, 30 bp, Artificial Sequence
  Synthetic oligonucleotide
tagaaccaggaggtttcttcttggaatggc

SEQ ID NO: 311347 - DNA, 30 bp, Artificial Sequence
  Synthetic oligonucleotide
ataatcatgactgagtctaggggccatggc

SEQ ID NO: 311348 - DNA, 30 bp, Artificial Sequence
  Synthetic oligonucleotide
tcccaacggagacggcggcaacttcatggc

SEQ ID NO: 311349 - DNA, 30 bp, Artificial Sequence
  Synthetic oligonucleotide
gttcaagtatgaccgataactgaagatggc

SEQ ID NO: 311350 - DNA, 30 bp, Artificial Sequence
  Synthetic oligonucleotide
tgatgtatgtcgggcgagatcacagatggc

SEQ ID NO: 311351 - DNA, 30 bp, Artificial Sequence
  Synthetic oligonucleotide
ggctccgctgtgcggccgccagcagatggc

SEQ ID NO: 311352 - DNA, 30 bp, Artificial Sequence
  Synthetic oligonucleotide
tcttggagaccgctgagtccgtgagatggc

SEQ ID NO: 311353 - DNA, 30 bp, Artificial Sequence
  Synthetic oligonucleotide
gagttgatggacacctgggagttagatggc

SEQ ID NO: 311354 - DNA, 30 bp, Artificial Sequence
  Synthetic oligonucleotide
cccagacggctactgtgccagacggatggc

SEQ ID NO: 311355 - DNA, 30 bp, Artificial Sequence
  Synthetic oligonucleotide
taagggttggtgtctgtaaccttggatggc

SEQ ID NO: 311356 - DNA, 30 bp, Artificial Sequence
  Synthetic oligonucleotide
gtgtgtaacaatctaaagttaggtgatggc

SEQ ID NO: 311357 - DNA, 30 bp, Artificial Sequence
  Synthetic oligonucleotide
cgggcttacgcctaacgcgacgaatatggc

SEQ ID NO: 311358 - DNA, 30 bp, Artificial Sequence
  Synthetic oligonucleotide
tgaaggcactggttcttgaggcactatggc

SEQ ID NO: 311359 - DNA, 30 bp, Artificial Sequence
  Synthetic oligonucleotide
ggtttggggcctggtatatcagtgtatggc

SEQ ID NO: 311360 - DNA, 30 bp, Artificial Sequence
  Synthetic oligonucleotide
tgcttatcattatcatccgacccaactggc

SEQ ID NO: 311361 - DNA, 30 bp, Artificial Sequence
  Synthetic oligonucleotide
tactctaggtaacaccgaaagaacactggc

SEQ ID NO: 311362 - DNA, 30 bp, Artificial Sequence
  Synthetic oligonucleotide
ttggagactcgcgtgtgtaacaccactggc

SEQ ID NO: 311363 - DNA, 30 bp, Artificial Sequence
  Synthetic oligonucleotide
agcaaaaatcaatggtggtcgaccactggc

SEQ ID NO: 311364 - DNA, 30 bp, Artificial Sequence
  Synthetic oligonucleotide
tcgtgaggagccaatacctgtctcactggc

SEQ ID NO: 311365 - DNA, 30 bp, Artificial Sequence
  Synthetic oligonucleotide
cctcggacacctatatagggtttcactggc

SEQ ID NO: 311366 - DNA, 30 bp, Artificial Sequence
  Synthetic oligonucleotide
gatcacttatacgtgaagctacgtactggc

SEQ ID NO: 311367 - DNA, 30 bp, Artificial Sequence
  Synthetic oligonucleotide
taattccgtggctggccggatcaacctggc

SEQ ID NO: 311368 - DNA, 30 bp, Artificial Sequence
  Synthetic oligonucleotide
aaatctggggttagagaccattaacctggc

SEQ ID NO: 311369 - DNA, 30 bp, Artificial Sequence
  Synthetic oligonucleotide
aaggtcccaacattggtaagagaccctggc

SEQ ID NO: 311370 - DNA, 30 bp, Artificial Sequence
  Synthetic oligonucleotide
acagccgttcttcaatgaattgaccctggc

SEQ ID NO: 311371 - DNA, 30 bp, Artificial Sequence
  Synthetic oligonucleotide
atctagttccagtatttaatgtctcctggc

SEQ ID NO: 311372 - DNA, 30 bp, Artificial Sequence
  Synthetic oligonucleotide
atacttaactgtgacctatagtctgctggc

SEQ ID NO: 311373 - DNA, 30 bp, Artificial Sequence
  Synthetic oligonucleotide
accacatgtccccgctcaaatagctctggc

SEQ ID NO: 311374 - DNA, 30 bp, Artificial Sequence
  Synthetic oligonucleotide
ggggccatgtatgtaatatacatttctggc

SEQ ID NO: 311375 - DNA, 30 bp, Artificial Sequence
  Synthetic oligonucleotide
ggggtaacccatctctctttgtaaagtggc

SEQ ID NO: 311376 - DNA, 30 bp, Artificial Sequence
  Synthetic oligonucleotide
tagccttagcgaaaaacaggcgtaagtggc

SEQ ID NO: 311377 - DNA, 30 bp, Artificial Sequence
  Synthetic oligonucleotide
tggattcaagaacaggtgaactccagtggc

SEQ ID NO: 311378 - DNA, 30 bp, Artificial Sequence
  Synthetic oligonucleotide
ggcaaatttcatcgcatggttatcagtggc

SEQ ID NO: 311379 - DNA, 30 bp, Artificial Sequence
  Synthetic oligonucleotide
caaagttggttaccgaaagcgccgagtggc

SEQ ID NO: 311380 - DNA, 30 bp, Artificial Sequence
  Synthetic oligonucleotide
caacctttaaggcggctaagcaatagtggc

SEQ ID NO: 311381 - DNA, 30 bp, Artificial Sequence
  Synthetic oligonucleotide
gactgtggccctgggttcgaagctagtggc

SEQ ID NO: 311382 - DNA, 30 bp, Artificial Sequence
  Synthetic oligonucleotide
ttgttgcgggcacacggatatagtagtggc

SEQ ID NO: 311383 - DNA, 30 bp, Artificial Sequence
  Synthetic oligonucleotide
accgccaggttctatcaggaccgtagtggc

SEQ ID NO: 311384 - DNA, 30 bp, Artificial Sequence
  Synthetic oligonucleotide
gggacatacaatgagattagggcacgtggc

SEQ ID NO: 311385 - DNA, 30 bp, Artificial Sequence
  Synthetic oligonucleotide
aggttctttagattgcgttcaatacgtggc

SEQ ID NO: 311386 - DNA, 28 bp, Artificial Sequence
  Synthetic oligonucleotide
gggatgcggggcttggcgtgaccgtggc

SEQ ID NO: 311387 - DNA, 30 bp, Artificial Sequence
  Synthetic oligonucleotide
acctattgtcaacatatttatgtccgtggc

SEQ ID NO: 311388 - DNA, 30 bp, Artificial Sequence
  Synthetic oligonucleotide
ccggcagggatctccttgaccacgcgtggc

SEQ ID NO: 311389 - DNA, 30 bp, Artificial Sequence
  Synthetic oligonucleotide
atgtcatggccagcggctaggttgcgtggc

SEQ ID NO: 311390 - DNA, 30 bp, Artificial Sequence
  Synthetic oligonucleotide
gaacagtacattttcagacattctcgtggc

SEQ ID NO: 311391 - DNA, 30 bp, Artificial Sequence
  Synthetic oligonucleotide
ggatagggtgcatacacgatggttcgtggc

SEQ ID NO: 311392 - DNA, 30 bp, Artificial Sequence
  Synthetic oligonucleotide
tacaggcgaacgtcacttccaaaaggtggc

SEQ ID NO: 311393 - DNA, 30 bp, Artificial Sequence
  Synthetic oligonucleotide
caggtgtgcatgagcttctaataaggtggc

SEQ ID NO: 311394 - DNA, 30 bp, Artificial Sequence
  Synthetic oligonucleotide
caatcatcatattcggtcaaatcaggtggc

SEQ ID NO: 311395 - DNA, 30 bp, Artificial Sequence
  Synthetic oligonucleotide
gtatttagaaaatgtagagtttgaggtggc

SEQ ID NO: 311396 - DNA, 30 bp, Artificial Sequence
  Synthetic oligonucleotide
ctcgtggaacgcccctgttcagccggtggc

SEQ ID NO: 311397 - DNA, 30 bp, Artificial Sequence
  Synthetic oligonucleotide
gagtttgagtgcaaggaggaggagggtggc

SEQ ID NO: 311398 - DNA, 30 bp, Artificial Sequence
  Synthetic oligonucleotide
tccgggtttaaaagcatcgagaggggtggc

SEQ ID NO: 311399 - DNA, 30 bp, Artificial Sequence
  Synthetic oligonucleotide
catagggataatggatgttagaggggtggc

SEQ ID NO: 311400 - DNA, 30 bp, Artificial Sequence
  Synthetic oligonucleotide
attcacacgggtttacgcactgggggtggc

SEQ ID NO: 311401 - DNA, 30 bp, Artificial Sequence
  Synthetic oligonucleotide
gaatgcggcgtaaaccatataagatgtggc

SEQ ID NO: 311402 - DNA, 30 bp, Artificial Sequence
  Synthetic oligonucleotide
attcggaatgtacaacgaggagtatgtggc

SEQ ID NO: 311403 - DNA, 30 bp, Artificial Sequence
  Synthetic oligonucleotide
ctgttcggacgtaattaaattaactgtggc

SEQ ID NO: 311404 - DNA, 30 bp, Artificial Sequence
  Synthetic oligonucleotide
atttgctcgaaggacttccaggcctgtggc

SEQ ID NO: 311405 - DNA, 30 bp, Artificial Sequence
  Synthetic oligonucleotide
cagcagacataattgtaatgcaagtgtggc

SEQ ID NO: 311406 - DNA, 30 bp, Artificial Sequence
  Synthetic oligonucleotide
cactaaggttcgaaaaccggcacgtgtggc

SEQ ID NO: 311407 - DNA, 30 bp, Artificial Sequence
  Synthetic oligonucleotide
cgttggatcgaattctataggatttgtggc

SEQ ID NO: 311408 - DNA, 30 bp, Artificial Sequence
  Synthetic oligonucleotide
tttcttagctcgtgctcgggggtaattggc

SEQ ID NO: 311409 - DNA, 30 bp, Artificial Sequence
  Synthetic oligonucleotide
gcaacaacggtgttccttggatacattggc

SEQ ID NO: 311410 - DNA, 30 bp, Artificial Sequence
  Synthetic oligonucleotide
tgtacggacgctcgcgaggacaccattggc

SEQ ID NO: 311411 - DNA, 30 bp, Artificial Sequence
  Synthetic oligonucleotide
ttggtaagcgtggcgtacatcatcattggc

SEQ ID NO: 311412 - DNA, 30 bp, Artificial Sequence
  Synthetic oligonucleotide
atggaatagtagggtcttccgtggattggc

SEQ ID NO: 311413 - DNA, 30 bp, Artificial Sequence
  Synthetic oligonucleotide
gagattctggactagcagggtcctattggc

SEQ ID NO: 311414 - DNA, 30 bp, Artificial Sequence
  Synthetic oligonucleotide
ccgttgaaagcggcaagacctagtattggc

SEQ ID NO: 311415 - DNA, 30 bp, Artificial Sequence
  Synthetic oligonucleotide
cgagtctggaaaccaggggttagtattggc

SEQ ID NO: 311416 - DNA, 30 bp, Artificial Sequence
  Synthetic oligonucleotide
ggcatatctttagggtgtgatacacttggc

SEQ ID NO: 311417 - DNA, 30 bp, Artificial Sequence
  Synthetic oligonucleotide
tccaacgttaagcgcgatacatgacttggc

SEQ ID NO: 311418 - DNA, 30 bp, Artificial Sequence
  Synthetic oligonucleotide
tagacacaggtggtaggtcagcgccttggc

SEQ ID NO: 311419 - DNA, 30 bp, Artificial Sequence
  Synthetic oligonucleotide
attggtcaaggtatgcatagaggccttggc

SEQ ID NO: 311420 - DNA, 30 bp, Artificial Sequence
  Synthetic oligonucleotide
aacacggatagccaccgttgattccttggc

SEQ ID NO: 311421 - DNA, 30 bp, Artificial Sequence
  Synthetic oligonucleotide
cgtctaagagtcatagcaatatatcttggc

SEQ ID NO: 311422 - DNA, 30 bp, Artificial Sequence
  Synthetic oligonucleotide
ggattactgatgtcggccttgattcttggc

SEQ ID NO: 311423 - DNA, 30 bp, Artificial Sequence
  Synthetic oligonucleotide
taaaatctgtcatctgcgtgggcagttggc

SEQ ID NO: 311424 - DNA, 30 bp, Artificial Sequence
  Synthetic oligonucleotide
aagcttctcgaaactttaccatgcgttggc

SEQ ID NO: 311425 - DNA, 30 bp, Artificial Sequence
  Synthetic oligonucleotide
tgtaaactgttaatgacgctcaaatttggc

SEQ ID NO: 311426 - DNA, 30 bp, Artificial Sequence
  Synthetic oligonucleotide
aaacaggatgtttagtatgcgaaatttggc

SEQ ID NO: 311427 - DNA, 30 bp, Artificial Sequence
  Synthetic oligonucleotide
tgtcgattgttgataagtgcttcatttggc

SEQ ID NO: 311428 - DNA, 30 bp, Artificial Sequence
  Synthetic oligonucleotide
ggtggacataccaatgtatgtggctttggc

SEQ ID NO: 311429 - DNA, 30 bp, Artificial Sequence
  Synthetic oligonucleotide
atttagtaaaacatgaaatactagtttggc

SEQ ID NO: 311430 - DNA, 30 bp, Artificial Sequence
  Synthetic oligonucleotide
cacgtacgtcaaatgaacacgtcgtttggc

SEQ ID NO: 311431 - DNA, 30 bp, Artificial Sequence
  Synthetic oligonucleotide
attgatccgggcgaccatggtgattttggc

SEQ ID NO: 311432 - DNA, 30 bp, Artificial Sequence
  Synthetic oligonucleotide
agtttggagagtacggatgcctattttggc

SEQ ID NO: 311433 - DNA, 30 bp, Artificial Sequence
  Synthetic oligonucleotide
tcgccaggtgtgcgggctccttaaaaatgc

SEQ ID NO: 311434 - DNA, 30 bp, Artificial Sequence
  Synthetic oligonucleotide
tacctttgggcaccatcaatctcaaaatgc

SEQ ID NO: 311435 - DNA, 30 bp, Artificial Sequence
  Synthetic oligonucleotide
atacgcgaaatgggtgaaatactaaaatgc

SEQ ID NO: 311436 - DNA, 30 bp, Artificial Sequence
  Synthetic oligonucleotide
tttggtgcaaatctgacatgccccaaatgc

SEQ ID NO: 311437 - DNA, 30 bp, Artificial Sequence
  Synthetic oligonucleotide
aaggcagtagcggagaacatccggaaatgc

SEQ ID NO: 311438 - DNA, 30 bp, Artificial Sequence
  Synthetic oligonucleotide
catcgataagaaggacttcagactaaatgc

SEQ ID NO: 311439 - DNA, 30 bp, Artificial Sequence
  Synthetic oligonucleotide
gcagagagcccgacaggctaggttaaatgc

SEQ ID NO: 311440 - DNA, 30 bp, Artificial Sequence
  Synthetic oligonucleotide
tagggcttgtaatggatttgcagacaatgc

SEQ ID NO: 311441 - DNA, 30 bp, Artificial Sequence
  Synthetic oligonucleotide
tgatttactgccgagagaggaggccaatgc

SEQ ID NO: 311442 - DNA, 30 bp, Artificial Sequence
  Synthetic oligonucleotide
aaggatagttcctaccggagcgtgcaatgc

SEQ ID NO: 311443 - DNA, 30 bp, Artificial Sequence
  Synthetic oligonucleotide
gtaataggcttcatatactggactcaatgc

SEQ ID NO: 311444 - DNA, 30 bp, Artificial Sequence
  Synthetic oligonucleotide
tctcctactgtctataaaacgcctcaatgc

SEQ ID NO: 311445 - DNA, 30 bp, Artificial Sequence
  Synthetic oligonucleotide
tacctgtgtgtggacgccgcgcgtcaatgc

SEQ ID NO: 311446 - DNA, 30 bp, Artificial Sequence
  Synthetic oligonucleotide
ggtgtattctcggttccacgccaagaatgc

SEQ ID NO: 311447 - DNA, 30 bp, Artificial Sequence
  Synthetic oligonucleotide
ggtcagttaaacagacttgtgcgtgaatgc

SEQ ID NO: 311448 - DNA, 30 bp, Artificial Sequence
  Synthetic oligonucleotide
aagaatacacgcctattttttcaataatgc

SEQ ID NO: 311449 - DNA, 30 bp, Artificial Sequence
  Synthetic oligonucleotide
cccgacacgcgtacaacgttacgataatgc

SEQ ID NO: 311450 - DNA, 30 bp, Artificial Sequence
  Synthetic oligonucleotide
agcactaaccgttgtgtaacagtgtaatgc

SEQ ID NO: 311451 - DNA, 30 bp, Artificial Sequence
  Synthetic oligonucleotide
cccgggctttaaagtcgaagatgttaatgc

SEQ ID NO: 311452 - DNA, 30 bp, Artificial Sequence
  Synthetic oligonucleotide
gcttttgggagcgggccggctcaaacatgc

SEQ ID NO: 311453 - DNA, 30 bp, Artificial Sequence
  Synthetic oligonucleotide
gtagcattccgacagacctgtgcaacatgc

SEQ ID NO: 311454 - DNA, 30 bp, Artificial Sequence
  Synthetic oligonucleotide
ggtgcagtgaaggctcgcacttgcacatgc

SEQ ID NO: 311455 - DNA, 30 bp, Artificial Sequence
  Synthetic oligonucleotide
aggaagtctcggcgctggacggtcacatgc

SEQ ID NO: 311456 - DNA, 30 bp, Artificial Sequence
  Synthetic oligonucleotide
gccgggctttgatcagtactcattacatgc

SEQ ID NO: 311457 - DNA, 30 bp, Artificial Sequence
  Synthetic oligonucleotide
ctgtcatctcatacaaatgcgcacccatgc

SEQ ID NO: 311458 - DNA, 30 bp, Artificial Sequence
  Synthetic oligonucleotide
cttgccggacccgcttcgacggacccatgc

SEQ ID NO: 311459 - DNA, 30 bp, Artificial Sequence
  Synthetic oligonucleotide
tcgagtgtatctaacagttgtactccatgc

SEQ ID NO: 311460 - DNA, 30 bp, Artificial Sequence
  Synthetic oligonucleotide
gggtatatggtccaattgtaagctccatgc

SEQ ID NO: 311461 - DNA, 30 bp, Artificial Sequence
  Synthetic oligonucleotide
gttcgagtggatctttaggaatttccatgc

SEQ ID NO: 311462 - DNA, 30 bp, Artificial Sequence
  Synthetic oligonucleotide
ccaattcacttaatttggattaccgcatgc

SEQ ID NO: 311463 - DNA, 30 bp, Artificial Sequence
  Synthetic oligonucleotide
gctagttcatatgaccgaaccagggcatgc

SEQ ID NO: 311464 - DNA, 30 bp, Artificial Sequence
  Synthetic oligonucleotide
cttgctactgagatttggtgctgtgcatgc

SEQ ID NO: 311465 - DNA, 30 bp, Artificial Sequence
  Synthetic oligonucleotide
ggcaatggatggagcggtgggagatcatgc

SEQ ID NO: 311466 - DNA, 30 bp, Artificial Sequence
  Synthetic oligonucleotide
tatactgcaatccgataagacgcttcatgc

SEQ ID NO: 311467 - DNA, 30 bp, Artificial Sequence
  Synthetic oligonucleotide
tcaatgtactaggttgacctagcaagatgc

SEQ ID NO: 311468 - DNA, 30 bp, Artificial Sequence
  Synthetic oligonucleotide
tccccgctctactcgggagcttgaagatgc

SEQ ID NO: 311469 - DNA, 30 bp, Artificial Sequence
  Synthetic oligonucleotide
cgctcgcccagatggtccgctacgagatgc

SEQ ID NO: 311470 - DNA, 30 bp, Artificial Sequence
  Synthetic oligonucleotide
tctctgtggaagccgccaccggcgagatgc

SEQ ID NO: 311471 - DNA, 30 bp, Artificial Sequence
  Synthetic oligonucleotide
tccgtatcagcgagcaaaaagcatagatgc

SEQ ID NO: 311472 - DNA, 30 bp, Artificial Sequence
  Synthetic oligonucleotide
gcctgggaattggttggaaggcgtagatgc

SEQ ID NO: 311473 - DNA, 30 bp, Artificial Sequence
  Synthetic oligonucleotide
gcagcccacaggactgctaattaacgatgc

SEQ ID NO: 311474 - DNA, 30 bp, Artificial Sequence
  Synthetic oligonucleotide
gggttagaagaggtagatatcacgcgatgc

SEQ ID NO: 311475 - DNA, 30 bp, Artificial Sequence
  Synthetic oligonucleotide
gcgctcatgcagagaatattattgcgatgc

SEQ ID NO: 311476 - DNA, 30 bp, Artificial Sequence
  Synthetic oligonucleotide
aaagtcacgtataacgaaccgtatcgatgc

SEQ ID NO: 311477 - DNA, 30 bp, Artificial Sequence
  Synthetic oligonucleotide
tcattggcgtaagtactggtaacaggatgc

SEQ ID NO: 311478 - DNA, 30 bp, Artificial Sequence
  Synthetic oligonucleotide
agtgaggaccatgactcgaatttaggatgc

SEQ ID NO: 311479 - DNA, 31 bp, Artificial Sequence
  Synthetic oligonucleotide
gccagggctgtaaatggatcgtattggatgc

SEQ ID NO: 311480 - DNA, 30 bp, Artificial Sequence
  Synthetic oligonucleotide
gcaggtcgaattagctggctgaaatgatgc

SEQ ID NO: 311481 - DNA, 30 bp, Artificial Sequence
  Synthetic oligonucleotide
tcccatgttagatataatggcgcatgatgc

SEQ ID NO: 311482 - DNA, 30 bp, Artificial Sequence
  Synthetic oligonucleotide
agagcatagggagttacatttctatgatgc

SEQ ID NO: 311483 - DNA, 30 bp, Artificial Sequence
  Synthetic oligonucleotide
ggcacattcggcagcacaggccagtgatgc

SEQ ID NO: 311484 - DNA, 30 bp, Artificial Sequence
  Synthetic oligonucleotide
agccattcagtaaaaatagaagagtgatgc

SEQ ID NO: 311485 - DNA, 30 bp, Artificial Sequence
  Synthetic oligonucleotide
attcgtcatggaggttatttcacgtgatgc

SEQ ID NO: 311486 - DNA, 30 bp, Artificial Sequence
  Synthetic oligonucleotide
tcgggacagtcaacagatatcacaatatgc

SEQ ID NO: 311487 - DNA, 30 bp, Artificial Sequence
  Synthetic oligonucleotide
aacgtccacttagttcttaagtcaatatgc

SEQ ID NO: 311488 - DNA, 30 bp, Artificial Sequence
  Synthetic oligonucleotide
ttcctgacgtggaaaggtgttcacatatgc

SEQ ID NO: 311489 - DNA, 30 bp, Artificial Sequence
  Synthetic oligonucleotide
agtcccacgcaataggggggctacatatgc

SEQ ID NO: 311490 - DNA, 30 bp, Artificial Sequence
  Synthetic oligonucleotide
aaccggggatttatcatacttcgcatatgc

SEQ ID NO: 311491 - DNA, 30 bp, Artificial Sequence
  Synthetic oligonucleotide
catacccatatagccgtaaaaaggatatgc

SEQ ID NO: 311492 - DNA, 30 bp, Artificial Sequence
  Synthetic oligonucleotide
ctgctcatcacaaacaaagggatgatatgc

SEQ ID NO: 311493 - DNA, 30 bp, Artificial Sequence
  Synthetic oligonucleotide
tctgcactatcagagggaggagatatatgc

SEQ ID NO: 311494 - DNA, 30 bp, Artificial Sequence
  Synthetic oligonucleotide
ataggcgtaacgcagggtaagggtatatgc

SEQ ID NO: 311495 - DNA, 30 bp, Artificial Sequence
  Synthetic oligonucleotide
ggggaccagttcatcacgcaccttatatgc

SEQ ID NO: 311496 - DNA, 30 bp, Artificial Sequence
  Synthetic oligonucleotide
tagactagcccggatgataactaactatgc

SEQ ID NO: 311497 - DNA, 30 bp, Artificial Sequence
  Synthetic oligonucleotide
gtaaggtgttctggatagaaggcactatgc

SEQ ID NO: 311498 - DNA, 30 bp, Artificial Sequence
  Synthetic oligonucleotide
agtgtagtccccggtccagccatcctatgc

SEQ ID NO: 311499 - DNA, 30 bp, Artificial Sequence
  Synthetic oligonucleotide
aagatctaaccactagggcgggtcctatgc

SEQ ID NO: 311500 - DNA, 30 bp, Artificial Sequence
  Synthetic oligonucleotide
gctgttctccaaggaccgaatgcgctatgc

SEQ ID NO: 311501 - DNA, 30 bp, Artificial Sequence
  Synthetic oligonucleotide
agtcttccaagttctgattcctcgctatgc

SEQ ID NO: 311502 - DNA, 30 bp, Artificial Sequence
  Synthetic oligonucleotide
gtgctgacggactttacggcttatctatgc

SEQ ID NO: 311503 - DNA, 29 bp, Artificial Sequence
  Synthetic oligonucleotide
taggcattggcaccaccgtaagcgtatgc

SEQ ID NO: 311504 - DNA, 30 bp, Artificial Sequence
  Synthetic oligonucleotide
tggagaaccttttaacctaccagcgtatgc

SEQ ID NO: 311505 - DNA, 30 bp, Artificial Sequence
  Synthetic oligonucleotide
agttgatggattaggctaaaatatgtatgc

SEQ ID NO: 311506 - DNA, 30 bp, Artificial Sequence
  Synthetic oligonucleotide
ctccagacagtagggctgttttatgtatgc

SEQ ID NO: 311507 - DNA, 30 bp, Artificial Sequence
  Synthetic oligonucleotide
gctgcaacgtagcggttagtacctgtatgc

SEQ ID NO: 311508 - DNA, 30 bp, Artificial Sequence
  Synthetic oligonucleotide
tactctggtaattaggcataaacattatgc

SEQ ID NO: 311509 - DNA, 30 bp, Artificial Sequence
  Synthetic oligonucleotide
gccttaaggatacggagaacgcgcttatgc

SEQ ID NO: 311510 - DNA, 30 bp, Artificial Sequence
  Synthetic oligonucleotide
tgtcgtccagggcgagtcagcgggttatgc

SEQ ID NO: 311511 - DNA, 31 bp, Artificial Sequence
  Synthetic oligonucleotide
ctcatgaaccctaggcaacatgtatttatgc

SEQ ID NO: 311512 - DNA, 30 bp, Artificial Sequence
  Synthetic oligonucleotide
ttgtgaatcagtcaatgagtagttttatgc

SEQ ID NO: 311513 - DNA, 30 bp, Artificial Sequence
  Synthetic oligonucleotide
aatcccttgatggatgcggtccaaaactgc

SEQ ID NO: 311514 - DNA, 30 bp, Artificial Sequence
  Synthetic oligonucleotide
ggttaattaacattaaacaaataaaactgc

SEQ ID NO: 311515 - DNA, 30 bp, Artificial Sequence
  Synthetic oligonucleotide
atgagtcgggggtttggcctgggaaactgc

SEQ ID NO: 311516 - DNA, 30 bp, Artificial Sequence
  Synthetic oligonucleotide
aaagtacgaacaattacctgctgaaactgc

SEQ ID NO: 311517 - DNA, 30 bp, Artificial Sequence
  Synthetic oligonucleotide
ccaaagattaaaggttaacgggacaactgc

SEQ ID NO: 311518 - DNA, 30 bp, Artificial Sequence
  Synthetic oligonucleotide
cagttgtgataacaaaataagtccaactgc

SEQ ID NO: 311519 - DNA, 30 bp, Artificial Sequence
  Synthetic oligonucleotide
taaaaaacagcgagatcatccgtgaactgc

SEQ ID NO: 311520 - DNA, 30 bp, Artificial Sequence
  Synthetic oligonucleotide
aagtcttctggggtgtgttttaataactgc

SEQ ID NO: 311521 - DNA, 30 bp, Artificial Sequence
  Synthetic oligonucleotide
gacttaagcaaatatactggctataactgc

SEQ ID NO: 311522 - DNA, 31 bp, Artificial Sequence
  Synthetic oligonucleotide
tgatattcgagaacgttccccctaacactgc

SEQ ID NO: 311523 - DNA, 30 bp, Artificial Sequence
  Synthetic oligonucleotide
gtctgcgagcaggatgggtttatacactgc

SEQ ID NO: 311524 - DNA, 30 bp, Artificial Sequence
  Synthetic oligonucleotide
atgcttaacagatcacgttttctacactgc

SEQ ID NO: 311525 - DNA, 30 bp, Artificial Sequence
  Synthetic oligonucleotide
agtacgctggccaaatgagggcaccactgc

SEQ ID NO: 311526 - DNA, 30 bp, Artificial Sequence
  Synthetic oligonucleotide
ttcagagaacggacgagggtttcccactgc

SEQ ID NO: 311527 - DNA, 30 bp, Artificial Sequence
  Synthetic oligonucleotide
gatttgaggaaggctgcataccgccactgc

SEQ ID NO: 311528 - DNA, 30 bp, Artificial Sequence
  Synthetic oligonucleotide
tgtgaacgggtggcacgtcagtacgactgc

SEQ ID NO: 311529 - DNA, 30 bp, Artificial Sequence
  Synthetic oligonucleotide
tcgggatagttgcgtatttaatgcgactgc

SEQ ID NO: 311530 - DNA, 30 bp, Artificial Sequence
  Synthetic oligonucleotide
ataggttacttggattccgcttactactgc

SEQ ID NO: 311531 - DNA, 30 bp, Artificial Sequence
  Synthetic oligonucleotide
cggacgctaaaagggatcaacttctactgc

SEQ ID NO: 311532 - DNA, 30 bp, Artificial Sequence
  Synthetic oligonucleotide
tttatgtgtactgttaattctaagtactgc

SEQ ID NO: 311533 - DNA, 30 bp, Artificial Sequence
  Synthetic oligonucleotide
gtattgccatctttaaagtcaaggtactgc

SEQ ID NO: 311534 - DNA, 30 bp, Artificial Sequence
  Synthetic oligonucleotide
tgatgcatcagaagacaagtggcttactgc

SEQ ID NO: 311535 - DNA, 30 bp, Artificial Sequence
  Synthetic oligonucleotide
acacgcgcgccgaagatgcccccaacctgc

SEQ ID NO: 311536 - DNA, 30 bp, Artificial Sequence
  Synthetic oligonucleotide
ttggtttgcgtctctactgctgcaacctgc

SEQ ID NO: 311537 - DNA, 30 bp, Artificial Sequence
  Synthetic oligonucleotide
atacggaaaatcacaaaattactaacctgc

SEQ ID NO: 311538 - DNA, 30 bp, Artificial Sequence
  Synthetic oligonucleotide
aggaatttcacggaccctaaaaacacctgc

SEQ ID NO: 311539 - DNA, 30 bp, Artificial Sequence
  Synthetic oligonucleotide
aaggcctgtccgccgcacctatgcacctgc

SEQ ID NO: 311540 - DNA, 30 bp, Artificial Sequence
  Synthetic oligonucleotide
tattgggtacattttttacagctcacctgc

SEQ ID NO: 311541 - DNA, 30 bp, Artificial Sequence
  Synthetic oligonucleotide
acatgcaagtaaaaagggacgcttacctgc

SEQ ID NO: 311542 - DNA, 30 bp, Artificial Sequence
  Synthetic oligonucleotide
ggcacgatcattgggtaatggccgccctgc

SEQ ID NO: 311543 - DNA, 30 bp, Artificial Sequence
  Synthetic oligonucleotide
ggaaatgtcatatactcactcggagcctgc

SEQ ID NO: 311544 - DNA, 30 bp, Artificial Sequence
  Synthetic oligonucleotide
caaattaagttgatgcctaaggacgcctgc

SEQ ID NO: 311545 - DNA, 30 bp, Artificial Sequence
  Synthetic oligonucleotide
acggtgccccaaaattggtttgcggcctgc

SEQ ID NO: 311546 - DNA, 30 bp, Artificial Sequence
  Synthetic oligonucleotide
ctccgctctgtacacctgatttcggcctgc

SEQ ID NO: 311547 - DNA, 30 bp, Artificial Sequence
  Synthetic oligonucleotide
actgttcagatactgccccaacgggcctgc

SEQ ID NO: 311548 - DNA, 30 bp, Artificial Sequence
  Synthetic oligonucleotide
gggctggaatcgatagatttaaatgcctgc

SEQ ID NO: 311549 - DNA, 30 bp, Artificial Sequence
  Synthetic oligonucleotide
tcgttagacgagataattgcaggctcctgc

SEQ ID NO: 311550 - DNA, 30 bp, Artificial Sequence
  Synthetic oligonucleotide
tccggtttgggttttagtgcgaagtcctgc

SEQ ID NO: 311551 - DNA, 30 bp, Artificial Sequence
  Synthetic oligonucleotide
gggtttgtccggtgtatcaaatcttcctgc

SEQ ID NO: 311552 - DNA, 30 bp, Artificial Sequence
  Synthetic oligonucleotide
cggccaagatgagatatatttccaagctgc

SEQ ID NO: 311553 - DNA, 30 bp, Artificial Sequence
  Synthetic oligonucleotide
acgtgctaatggagttaacttaacagctgc

SEQ ID NO: 311554 - DNA, 30 bp, Artificial Sequence
  Synthetic oligonucleotide
ggaaacctgaatgtgggcccaggcagctgc

SEQ ID NO: 311555 - DNA, 30 bp, Artificial Sequence
  Synthetic oligonucleotide
tctaactggtcacccgggtcataacgctgc

SEQ ID NO: 311556 - DNA, 30 bp, Artificial Sequence
  Synthetic oligonucleotide
gtgtagctgcagtttcctgcattacgctgc

SEQ ID NO: 311557 - DNA, 30 bp, Artificial Sequence
  Synthetic oligonucleotide
tagtcatgcccttaatgtaacacgggctgc

SEQ ID NO: 311558 - DNA, 30 bp, Artificial Sequence
  Synthetic oligonucleotide
cagcgaagcttatcgccacaggggggctgc

SEQ ID NO: 311559 - DNA, 30 bp, Artificial Sequence
  Synthetic oligonucleotide
atgttttctatgactggaaacactggctgc

SEQ ID NO: 311560 - DNA, 30 bp, Artificial Sequence
  Synthetic oligonucleotide
gtcaatgattcggcggaaacacctggctgc

SEQ ID NO: 311561 - DNA, 30 bp, Artificial Sequence
  Synthetic oligonucleotide
accccacataggttgaaacctccctgctgc

SEQ ID NO: 311562 - DNA, 30 bp, Artificial Sequence
  Synthetic oligonucleotide
gtaaaaccttttcaacaggaggcctgctgc

SEQ ID NO: 311563 - DNA, 30 bp, Artificial Sequence
  Synthetic oligonucleotide
tataggcgccaatcgggatgtatctgctgc

SEQ ID NO: 311564 - DNA, 30 bp, Artificial Sequence
  Synthetic oligonucleotide
agatccgcgaatgctttgaatccgtgctgc

SEQ ID NO: 311565 - DNA, 30 bp, Artificial Sequence
  Synthetic oligonucleotide
ctctcgtttaatttttgcgaactttgctgc

SEQ ID NO: 311566 - DNA, 30 bp, Artificial Sequence
  Synthetic oligonucleotide
tagagagggtattctcaatgtctttgctgc

SEQ ID NO: 311567 - DNA, 30 bp, Artificial Sequence
  Synthetic oligonucleotide
ctgagcagtgcagttcgggttctttgctgc

SEQ ID NO: 311568 - DNA, 30 bp, Artificial Sequence
  Synthetic oligonucleotide
aatctagtgacttccggtaaggcaatctgc

SEQ ID NO: 311569 - DNA, 30 bp, Artificial Sequence
  Synthetic oligonucleotide
ttaggcaatttgcatcagtgtaacatctgc

SEQ ID NO: 311570 - DNA, 30 bp, Artificial Sequence
  Synthetic oligonucleotide
tgtatgcttcacggtaatacaaccatctgc

SEQ ID NO: 311571 - DNA, 30 bp, Artificial Sequence
  Synthetic oligonucleotide
atctacctgctgaagagcggtccgatctgc

SEQ ID NO: 311572 - DNA, 30 bp, Artificial Sequence
  Synthetic oligonucleotide
gtagttatcaggaggaatttatggatctgc

SEQ ID NO: 311573 - DNA, 30 bp, Artificial Sequence
  Synthetic oligonucleotide
aagacagttgctcagggttgtactatctgc

SEQ ID NO: 311574 - DNA, 30 bp, Artificial Sequence
  Synthetic oligonucleotide
tgaagttgggatgtaacggggattatctgc

SEQ ID NO: 311575 - DNA, 30 bp, Artificial Sequence
  Synthetic oligonucleotide
gtagcatcaacgcgcgcgtgctaactctgc

SEQ ID NO: 311576 - DNA, 30 bp, Artificial Sequence
  Synthetic oligonucleotide
cgtatgaggccaactgtcgccagactctgc

SEQ ID NO: 311577 - DNA, 31 bp, Artificial Sequence
  Synthetic oligonucleotide
gaggtgttttatctgttgcggaggactctgc

SEQ ID NO: 311578 - DNA, 30 bp, Artificial Sequence
  Synthetic oligonucleotide
aggcatacgtatagatcggggatactctgc

SEQ ID NO: 311579 - DNA, 30 bp, Artificial Sequence
  Synthetic oligonucleotide
cgttgcagttacggaatcccccccctctgc

SEQ ID NO: 311580 - DNA, 31 bp, Artificial Sequence
  Synthetic oligonucleotide
ctcacgctagattgcacaccgtccgctctgc

SEQ ID NO: 311581 - DNA, 30 bp, Artificial Sequence
  Synthetic oligonucleotide
agcccccgcggaaagcattgggtgctctgc

SEQ ID NO: 311582 - DNA, 30 bp, Artificial Sequence
  Synthetic oligonucleotide
ccgaagtaatgacggactggtgtgctctgc

SEQ ID NO: 311583 - DNA, 30 bp, Artificial Sequence
  Synthetic oligonucleotide
ctcgtccgtcccggcaccaataaagtctgc

SEQ ID NO: 311584 - DNA, 30 bp, Artificial Sequence
  Synthetic oligonucleotide
gtgtttggtattcgcctggttgcagtctgc

SEQ ID NO: 311585 - DNA, 30 bp, Artificial Sequence
  Synthetic oligonucleotide
atcccactataagttggtaaaaatgtctgc

SEQ ID NO: 311586 - DNA, 30 bp, Artificial Sequence
  Synthetic oligonucleotide
ccgcccggttgatagggatactctgtctgc

SEQ ID NO: 311587 - DNA, 30 bp, Artificial Sequence
  Synthetic oligonucleotide
tgggaaacttaacttaacaattaattctgc

SEQ ID NO: 311588 - DNA, 30 bp, Artificial Sequence
  Synthetic oligonucleotide
tccacgggaactggggttgtggggttctgc

SEQ ID NO: 311589 - DNA, 30 bp, Artificial Sequence
  Synthetic oligonucleotide
cgggaaaagtttgcagagggtcgtttctgc

SEQ ID NO: 311590 - DNA, 30 bp, Artificial Sequence
  Synthetic oligonucleotide
ggtagacgtgcatggggctgcggtttctgc

SEQ ID NO: 311591 - DNA, 30 bp, Artificial Sequence
  Synthetic oligonucleotide
gtcgatactagcaagaaacttagcaagtgc

SEQ ID NO: 311592 - DNA, 30 bp, Artificial Sequence
  Synthetic oligonucleotide
gaagcgtcccgcgctcattctcagaagtgc

SEQ ID NO: 311593 - DNA, 30 bp, Artificial Sequence
  Synthetic oligonucleotide
cagattaaaggagtagtgcgttcgaagtgc

SEQ ID NO: 311594 - DNA, 30 bp, Artificial Sequence
  Synthetic oligonucleotide
gcttcttgaaagctgggttaacaacagtgc

SEQ ID NO: 311595 - DNA, 30 bp, Artificial Sequence
  Synthetic oligonucleotide
cacatactgcatcggtcattaacacagtgc

SEQ ID NO: 311596 - DNA, 30 bp, Artificial Sequence
  Synthetic oligonucleotide
cgtgttcaagtgggatgtgatccacagtgc

SEQ ID NO: 311597 - DNA, 30 bp, Artificial Sequence
  Synthetic oligonucleotide
tatatttcgctcgcaatatgatgacagtgc

SEQ ID NO: 311598 - DNA, 30 bp, Artificial Sequence
  Synthetic oligonucleotide
cgcgcccgcaggagcgggtacctacagtgc

SEQ ID NO: 311599 - DNA, 30 bp, Artificial Sequence
  Synthetic oligonucleotide
ctccaaaacacgtataggaatgaccagtgc

SEQ ID NO: 311600 - DNA, 30 bp, Artificial Sequence
  Synthetic oligonucleotide
atggcgcaggctccgcaaggttcccagtgc

SEQ ID NO: 311601 - DNA, 30 bp, Artificial Sequence
  Synthetic oligonucleotide
tggtataatgagtggctttggtagcagtgc

SEQ ID NO: 311602 - DNA, 30 bp, Artificial Sequence
  Synthetic oligonucleotide
tcaatttagtagtggtttgtgtacgagtgc

SEQ ID NO: 311603 - DNA, 30 bp, Artificial Sequence
  Synthetic oligonucleotide
tgcgcagacaatcgggagaaattggagtgc

SEQ ID NO: 311604 - DNA, 30 bp, Artificial Sequence
  Synthetic oligonucleotide
ccacatcattaaagtgctaggcttgagtgc

SEQ ID NO: 311605 - DNA, 30 bp, Artificial Sequence
  Synthetic oligonucleotide
tagtaagagatagtgattctagcatagtgc

SEQ ID NO: 311606 - DNA, 30 bp, Artificial Sequence
  Synthetic oligonucleotide
ggtccggaagccccatttcaggtatagtgc

SEQ ID NO: 311607 - DNA, 30 bp, Artificial Sequence
  Synthetic oligonucleotide
accctgagaatagatgagtgcacctagtgc

SEQ ID NO: 311608 - DNA, 30 bp, Artificial Sequence
  Synthetic oligonucleotide
gtagtctacgagtttttatacgtctagtgc

SEQ ID NO: 311609 - DNA, 30 bp, Artificial Sequence
  Synthetic oligonucleotide
actacagggtcagggggtcctttctagtgc

SEQ ID NO: 311610 - DNA, 30 bp, Artificial Sequence
  Synthetic oligonucleotide
gggtggcagattacaacatattgttagtgc

SEQ ID NO: 311611 - DNA, 30 bp, Artificial Sequence
  Synthetic oligonucleotide
ttataggacgtgttaatagcgcaaacgtgc

SEQ ID NO: 311612 - DNA, 30 bp, Artificial Sequence
  Synthetic oligonucleotide
ctaggcttcattgaaagtgcccgcacgtgc

SEQ ID NO: 311613 - DNA, 30 bp, Artificial Sequence
  Synthetic oligonucleotide
gcctttatggaacgtggtactgtcacgtgc

SEQ ID NO: 311614 - DNA, 30 bp, Artificial Sequence
  Synthetic oligonucleotide
tgattagggaattgacgaaacctgacgtgc

SEQ ID NO: 311615 - DNA, 30 bp, Artificial Sequence
  Synthetic oligonucleotide
acactagaacggcgtctgccgattacgtgc

SEQ ID NO: 311616 - DNA, 30 bp, Artificial Sequence
  Synthetic oligonucleotide
ggctatgactagcactacatacaagcgtgc

SEQ ID NO: 311617 - DNA, 30 bp, Artificial Sequence
  Synthetic oligonucleotide
cttatgcacacgttgacgcataacgcgtgc

SEQ ID NO: 311618 - DNA, 30 bp, Artificial Sequence
  Synthetic oligonucleotide
tttgggtaaatctatgaaaaagccgcgtgc

SEQ ID NO: 311619 - DNA, 30 bp, Artificial Sequence
  Synthetic oligonucleotide
agactttacagcccctactttaatgcgtgc

SEQ ID NO: 311620 - DNA, 30 bp, Artificial Sequence
  Synthetic oligonucleotide
tagcacggccttatcgaagtaagtgcgtgc

SEQ ID NO: 311621 - DNA, 30 bp, Artificial Sequence
  Synthetic oligonucleotide
gcatgcaacacgatctttagcagtgcgtgc

SEQ ID NO: 311622 - DNA, 30 bp, Artificial Sequence
  Synthetic oligonucleotide
taacggaaattgcttggcggaggctcgtgc

SEQ ID NO: 311623 - DNA, 30 bp, Artificial Sequence
  Synthetic oligonucleotide
ctatattacatatgaattgttgattcgtgc

SEQ ID NO: 311624 - DNA, 30 bp, Artificial Sequence
  Synthetic oligonucleotide
gaacacctgtgaattactgccctaaggtgc

SEQ ID NO: 311625 - DNA, 30 bp, Artificial Sequence
  Synthetic oligonucleotide
gtcgatgtgaccaagtgataggcacggtgc

SEQ ID NO: 311626 - DNA, 30 bp, Artificial Sequence
  Synthetic oligonucleotide
gcacgtaaccatgctgggggccgacggtgc

SEQ ID NO: 311627 - DNA, 30 bp, Artificial Sequence
  Synthetic oligonucleotide
gcgcagttctggaatgctccgggccggtgc

SEQ ID NO: 311628 - DNA, 30 bp, Artificial Sequence
  Synthetic oligonucleotide
ataaggatctataatcaaaactagcggtgc

SEQ ID NO: 311629 - DNA, 30 bp, Artificial Sequence
  Synthetic oligonucleotide
aaatggataatgggattactgactcggtgc

SEQ ID NO: 311630 - DNA, 30 bp, Artificial Sequence
  Synthetic oligonucleotide
gattgatagaagacgaaggtccttcggtgc

SEQ ID NO: 311631 - DNA, 29 bp, Artificial Sequence
  Synthetic oligonucleotide
ctcctaataacgtagacttctttcggtgc

SEQ ID NO: 311632 - DNA, 30 bp, Artificial Sequence
  Synthetic oligonucleotide
tgcaaccctatttaagtgcgtagagggtgc

SEQ ID NO: 311633 - DNA, 30 bp, Artificial Sequence
  Synthetic oligonucleotide
gtcttggaccggggaatgtaatatgggtgc

SEQ ID NO: 311634 - DNA, 30 bp, Artificial Sequence
  Synthetic oligonucleotide
atgtgcgtatgcccgcattggaaatggtgc

SEQ ID NO: 311635 - DNA, 30 bp, Artificial Sequence
  Synthetic oligonucleotide
acatactcgctgcaacaggcagcatggtgc

SEQ ID NO: 311636 - DNA, 30 bp, Artificial Sequence
  Synthetic oligonucleotide
gtgtcaggcgactgctgctacctatggtgc

SEQ ID NO: 311637 - DNA, 30 bp, Artificial Sequence
  Synthetic oligonucleotide
ttaaagtataatagagcatactggtggtgc

SEQ ID NO: 311638 - DNA, 30 bp, Artificial Sequence
  Synthetic oligonucleotide
atccaatgtgctcggggcgtaggttggtgc

SEQ ID NO: 311639 - DNA, 30 bp, Artificial Sequence
  Synthetic oligonucleotide
cgagatgcggcctatcctgagatttggtgc

SEQ ID NO: 311640 - DNA, 30 bp, Artificial Sequence
  Synthetic oligonucleotide
acgccaattatcgacatacaatgaatgtgc

SEQ ID NO: 311641 - DNA, 30 bp, Artificial Sequence
  Synthetic oligonucleotide
gcaaattaaaggggtccacttataatgtgc

SEQ ID NO: 311642 - DNA, 30 bp, Artificial Sequence
  Synthetic oligonucleotide
tgtaagtaattaagactagtatacatgtgc

SEQ ID NO: 311643 - DNA, 30 bp, Artificial Sequence
  Synthetic oligonucleotide
tgtaatgaaaactatcgccactacatgtgc

SEQ ID NO: 311644 - DNA, 30 bp, Artificial Sequence
  Synthetic oligonucleotide
gaccgcatggaaccactcaatgtcatgtgc

SEQ ID NO: 311645 - DNA, 30 bp, Artificial Sequence
  Synthetic oligonucleotide
cgccaggatatctactaggggcagatgtgc

SEQ ID NO: 311646 - DNA, 29 bp, Artificial Sequence
  Synthetic oligonucleotide
ccactagatattcgaactcgcggatgtgc

SEQ ID NO: 311647 - DNA, 30 bp, Artificial Sequence
  Synthetic oligonucleotide
gcgcggacgaggtcacgaaaagtgctgtgc

SEQ ID NO: 311648 - DNA, 30 bp, Artificial Sequence
  Synthetic oligonucleotide
tgtggcccagttctgtgaacacctctgtgc

SEQ ID NO: 311649 - DNA, 30 bp, Artificial Sequence
  Synthetic oligonucleotide
atttaaccggtggagtccaatagagtgtgc

SEQ ID NO: 311650 - DNA, 30 bp, Artificial Sequence
  Synthetic oligonucleotide
gagtaccaagtcagtacttgtaacgtgtgc

SEQ ID NO: 311651 - DNA, 30 bp, Artificial Sequence
  Synthetic oligonucleotide
ccagattgcaagtggcggcacctggtgtgc

SEQ ID NO: 311652 - DNA, 30 bp, Artificial Sequence
  Synthetic oligonucleotide
atgtttcggtaatgacctcgcaacttgtgc

SEQ ID NO: 311653 - DNA, 30 bp, Artificial Sequence
  Synthetic oligonucleotide
ttccggatctctggcaggagttgcttgtgc

SEQ ID NO: 311654 - DNA, 30 bp, Artificial Sequence
  Synthetic oligonucleotide
cttgtgggcgggtaaaagggcctgttgtgc

SEQ ID NO: 311655 - DNA, 30 bp, Artificial Sequence
  Synthetic oligonucleotide
ggcccggagactcttgtgggagtgttgtgc

SEQ ID NO: 311656 - DNA, 30 bp, Artificial Sequence
  Synthetic oligonucleotide
ttcggacctcactgcgcaatccatttgtgc

SEQ ID NO: 311657 - DNA, 30 bp, Artificial Sequence
  Synthetic oligonucleotide
gctaaagagaggtgctaaatctttttgtgc

SEQ ID NO: 311658 - DNA, 30 bp, Artificial Sequence
  Synthetic oligonucleotide
tagatgcgtaccctacaatggcaaaattgc

SEQ ID NO: 311659 - DNA, 30 bp, Artificial Sequence
  Synthetic oligonucleotide
atcaacgacaatatcgcactttaaaattgc

SEQ ID NO: 311660 - DNA, 30 bp, Artificial Sequence
  Synthetic oligonucleotide
aaagttgcaggataaatgcatgtaaattgc

SEQ ID NO: 311661 - DNA, 30 bp, Artificial Sequence
  Synthetic oligonucleotide
caattatcagagcgcgactggggcaattgc

SEQ ID NO: 311662 - DNA, 30 bp, Artificial Sequence
  Synthetic oligonucleotide
ttagcgtccatgggtgactttgataattgc

SEQ ID NO: 311663 - DNA, 30 bp, Artificial Sequence
  Synthetic oligonucleotide
cggggttatgggcacagggtgcgtaattgc

SEQ ID NO: 311664 - DNA, 30 bp, Artificial Sequence
  Synthetic oligonucleotide
tcagctggggtcccagttggtgaacattgc

SEQ ID NO: 311665 - DNA, 30 bp, Artificial Sequence
  Synthetic oligonucleotide
tggtcgggatacacgttggaacgacattgc

SEQ ID NO: 311666 - DNA, 30 bp, Artificial Sequence
  Synthetic oligonucleotide
attaaaagcatggagtccatagtacattgc

SEQ ID NO: 311667 - DNA, 30 bp, Artificial Sequence
  Synthetic oligonucleotide
gtgttcgaccataacatgtggagccattgc

SEQ ID NO: 311668 - DNA, 31 bp, Artificial Sequence
  Synthetic oligonucleotide
atggtccggttacaccctatgaaaagattgc

SEQ ID NO: 311669 - DNA, 30 bp, Artificial Sequence
  Synthetic oligonucleotide
ggccattagaaataacagccggccgattgc

SEQ ID NO: 311670 - DNA, 30 bp, Artificial Sequence
  Synthetic oligonucleotide
ctaacgagaagggattcagttagggattgc

SEQ ID NO: 311671 - DNA, 30 bp, Artificial Sequence
  Synthetic oligonucleotide
agacacgataatccctccgggcatgattgc

SEQ ID NO: 311672 - DNA, 30 bp, Artificial Sequence
  Synthetic oligonucleotide
cggctcggggtaaacggaaggcgtgattgc

SEQ ID NO: 311673 - DNA, 30 bp, Artificial Sequence
  Synthetic oligonucleotide
cagcgtgcaacagacttggaaattgattgc

SEQ ID NO: 311674 - DNA, 30 bp, Artificial Sequence
  Synthetic oligonucleotide
gtaagaagggcatctctcttatggtattgc

SEQ ID NO: 311675 - DNA, 30 bp, Artificial Sequence
  Synthetic oligonucleotide
acgaacggcttcaagggtacaacttattgc

SEQ ID NO: 311676 - DNA, 30 bp, Artificial Sequence
  Synthetic oligonucleotide
aagggacaccatcgatgtttcagttattgc

SEQ ID NO: 311677 - DNA, 30 bp, Artificial Sequence
  Synthetic oligonucleotide
ggaggcggcaatgttgactgtagaacttgc

SEQ ID NO: 311678 - DNA, 30 bp, Artificial Sequence
  Synthetic oligonucleotide
taaagtcggtcactaggttagtgaacttgc

SEQ ID NO: 311679 - DNA, 30 bp, Artificial Sequence
  Synthetic oligonucleotide
ctctggggctcccaaatcataagcacttgc

SEQ ID NO: 311680 - DNA, 30 bp, Artificial Sequence
  Synthetic oligonucleotide
gtcagctagtttccagattacggtacttgc

SEQ ID NO: 311681 - DNA, 30 bp, Artificial Sequence
  Synthetic oligonucleotide
actctgtgagaatcaaattaaccaccttgc

SEQ ID NO: 311682 - DNA, 30 bp, Artificial Sequence
  Synthetic oligonucleotide
gtaaacatgccaatcaagcccagaccttgc

SEQ ID NO: 311683 - DNA, 30 bp, Artificial Sequence
  Synthetic oligonucleotide
tcagaggcggcatgagctgaattaccttgc

SEQ ID NO: 311684 - DNA, 30 bp, Artificial Sequence
  Synthetic oligonucleotide
atatggcccagggagggctacagcccttgc

SEQ ID NO: 311685 - DNA, 30 bp, Artificial Sequence
  Synthetic oligonucleotide
tggtggcaaaaccgtgcgatttggccttgc

SEQ ID NO: 311686 - DNA, 30 bp, Artificial Sequence
  Synthetic oligonucleotide
tgcctatcggaccagcaagtacaagcttgc

SEQ ID NO: 311687 - DNA, 30 bp, Artificial Sequence
  Synthetic oligonucleotide
tcagagagacgtacacgcagagcggcttgc

SEQ ID NO: 311688 - DNA, 30 bp, Artificial Sequence
  Synthetic oligonucleotide
tatccaagtccacgacctattcaatcttgc

SEQ ID NO: 311689 - DNA, 30 bp, Artificial Sequence
  Synthetic oligonucleotide
ttgatggctaagaccgatgagccctcttgc

SEQ ID NO: 311690 - DNA, 30 bp, Artificial Sequence
  Synthetic oligonucleotide
atcccgaacaagttccagcaaatctcttgc

SEQ ID NO: 311691 - DNA, 30 bp, Artificial Sequence
  Synthetic oligonucleotide
agttaaggagtaacgttccagaaaagttgc

SEQ ID NO: 311692 - DNA, 30 bp, Artificial Sequence
  Synthetic oligonucleotide
gaccattttaactcctgaccattaagttgc

SEQ ID NO: 311693 - DNA, 30 bp, Artificial Sequence
  Synthetic oligonucleotide
aatgttgtcggaccgttcataaagagttgc

SEQ ID NO: 311694 - DNA, 30 bp, Artificial Sequence
  Synthetic oligonucleotide
ggtatcctttccgccaaaagccaccgttgc

SEQ ID NO: 311695 - DNA, 30 bp, Artificial Sequence
  Synthetic oligonucleotide
aaagtaacagtgtacaccgtataccgttgc

SEQ ID NO: 311696 - DNA, 30 bp, Artificial Sequence
  Synthetic oligonucleotide
ttcacgggattaacatcgattgtgcgttgc

SEQ ID NO: 311697 - DNA, 30 bp, Artificial Sequence
  Synthetic oligonucleotide
tagacgcgctgtttttactgtaacggttgc

SEQ ID NO: 311698 - DNA, 30 bp, Artificial Sequence
  Synthetic oligonucleotide
ccctggggtcatggaagagaagacggttgc

SEQ ID NO: 311699 - DNA, 30 bp, Artificial Sequence
  Synthetic oligonucleotide
cggcccaaaaagcggcagcttaagggttgc

SEQ ID NO: 311700 - DNA, 30 bp, Artificial Sequence
  Synthetic oligonucleotide
ggactgcatacctaacagttgccgggttgc

SEQ ID NO: 311701 - DNA, 30 bp, Artificial Sequence
  Synthetic oligonucleotide
ccaagggactaggtgtccgagaggggttgc

SEQ ID NO: 311702 - DNA, 30 bp, Artificial Sequence
  Synthetic oligonucleotide
gacttagtgcccttccacaccgggggttgc

SEQ ID NO: 311703 - DNA, 30 bp, Artificial Sequence
  Synthetic oligonucleotide
ggcccttaccaggagcaggatatgggttgc

SEQ ID NO: 311704 - DNA, 30 bp, Artificial Sequence
  Synthetic oligonucleotide
gctacaacagaagcgtcacggtgtggttgc

SEQ ID NO: 311705 - DNA, 30 bp, Artificial Sequence
  Synthetic oligonucleotide
cacgggcggtgccgccctcccgttggttgc

SEQ ID NO: 311706 - DNA, 30 bp, Artificial Sequence
  Synthetic oligonucleotide
cccacgacgtgctgcgtacatccatgttgc

SEQ ID NO: 311707 - DNA, 30 bp, Artificial Sequence
  Synthetic oligonucleotide
cgttagggggttcggtcgtctaactgttgc

SEQ ID NO: 311708 - DNA, 30 bp, Artificial Sequence
  Synthetic oligonucleotide
ggataagcgcgggggcctgtggtgtgttgc

SEQ ID NO: 311709 - DNA, 30 bp, Artificial Sequence
  Synthetic oligonucleotide
ctcgtgaccctgtatcttgggttgtgttgc

SEQ ID NO: 311710 - DNA, 30 bp, Artificial Sequence
  Synthetic oligonucleotide
actgcttgaagtaactattacaaaatttgc

SEQ ID NO: 311711 - DNA, 30 bp, Artificial Sequence
  Synthetic oligonucleotide
caagtacggatagcaacataaataatttgc

SEQ ID NO: 311712 - DNA, 30 bp, Artificial Sequence
  Synthetic oligonucleotide
gcttataagccgcgcaaagcctccatttgc

SEQ ID NO: 311713 - DNA, 30 bp, Artificial Sequence
  Synthetic oligonucleotide
cgaatccgactggttaaatttcagatttgc

SEQ ID NO: 311714 - DNA, 30 bp, Artificial Sequence
  Synthetic oligonucleotide
ttgactgataatgtaaagaaccgtatttgc

SEQ ID NO: 311715 - DNA, 30 bp, Artificial Sequence
  Synthetic oligonucleotide
agttccggtcactcccccgtaggtatttgc

SEQ ID NO: 311716 - DNA, 30 bp, Artificial Sequence
  Synthetic oligonucleotide
ccttaaggtcctaatcaagctggtatttgc

SEQ ID NO: 311717 - DNA, 30 bp, Artificial Sequence
  Synthetic oligonucleotide
tcggccctttggtgtaacggaattatttgc

SEQ ID NO: 311718 - DNA, 30 bp, Artificial Sequence
  Synthetic oligonucleotide
gtgtttttccgtagctgtattcaactttgc

SEQ ID NO: 311719 - DNA, 30 bp, Artificial Sequence
  Synthetic oligonucleotide
acatcttagggggtcattagcgcactttgc

SEQ ID NO: 311720 - DNA, 30 bp, Artificial Sequence
  Synthetic oligonucleotide
taacggccgtcagtagggttatcactttgc

SEQ ID NO: 311721 - DNA, 30 bp, Artificial Sequence
  Synthetic oligonucleotide
tcgtaatcttgccgcgaaacaggactttgc

SEQ ID NO: 311722 - DNA, 30 bp, Artificial Sequence
  Synthetic oligonucleotide
cacagacaagctggaagggtagagctttgc

SEQ ID NO: 311723 - DNA, 30 bp, Artificial Sequence
  Synthetic oligonucleotide
gttgcgagcggcgggcataatttggtttgc

SEQ ID NO: 311724 - DNA, 30 bp, Artificial Sequence
  Synthetic oligonucleotide
tgcaggaacctgttctgtgaacctgtttgc

SEQ ID NO: 311725 - DNA, 30 bp, Artificial Sequence
  Synthetic oligonucleotide
aaagcaagaaccgcgatggatagtgtttgc

SEQ ID NO: 311726 - DNA, 30 bp, Artificial Sequence
  Synthetic oligonucleotide
ccaggcgggctagagaccggtcgtgtttgc

SEQ ID NO: 311727 - DNA, 30 bp, Artificial Sequence
  Synthetic oligonucleotide
acagtgtgccggtaaagttatgaattttgc

SEQ ID NO: 311728 - DNA, 30 bp, Artificial Sequence
  Synthetic oligonucleotide
atcattgcgcgttaattggcttacttttgc

SEQ ID NO: 311729 - DNA, 30 bp, Artificial Sequence
  Synthetic oligonucleotide
tcttcccgggatgaccagcctgtcttttgc

SEQ ID NO: 311730 - DNA, 30 bp, Artificial Sequence
  Synthetic oligonucleotide
taggcccccagcggctacgggtggttttgc

SEQ ID NO: 311731 - DNA, 30 bp, Artificial Sequence
  Synthetic oligonucleotide
agggcgatgccctgccatagaaaaaaaatc

SEQ ID NO: 311732 - DNA, 30 bp, Artificial Sequence
  Synthetic oligonucleotide
gatctcacagggctaccaacatcaaaaatc

SEQ ID NO: 311733 - DNA, 30 bp, Artificial Sequence
  Synthetic oligonucleotide
gtcctcatagatggtctccccagaaaaatc

SEQ ID NO: 311734 - DNA, 30 bp, Artificial Sequence
  Synthetic oligonucleotide
acgattaccctaccgtgccaatacaaaatc

SEQ ID NO: 311735 - DNA, 30 bp, Artificial Sequence
  Synthetic oligonucleotide
aaatgcgtcctactacctgcctataaaatc

SEQ ID NO: 311736 - DNA, 30 bp, Artificial Sequence
  Synthetic oligonucleotide
ctcgcttatgatgggagatgaggtaaaatc

SEQ ID NO: 311737 - DNA, 30 bp, Artificial Sequence
  Synthetic oligonucleotide
aagaaatcgtaacgctactctaaacaaatc

SEQ ID NO: 311738 - DNA, 30 bp, Artificial Sequence
  Synthetic oligonucleotide
ggtctgctcccgtacgagttcaaccaaatc

SEQ ID NO: 311739 - DNA, 30 bp, Artificial Sequence
  Synthetic oligonucleotide
gaatatatcgtggcatgccgatggcaaatc

SEQ ID NO: 311740 - DNA, 30 bp, Artificial Sequence
  Synthetic oligonucleotide
agagaaaaattacaagggggtcgtcaaatc

SEQ ID NO: 311741 - DNA, 30 bp, Artificial Sequence
  Synthetic oligonucleotide
ccacgtgaaaataaggttacatttcaaatc

SEQ ID NO: 311742 - DNA, 30 bp, Artificial Sequence
  Synthetic oligonucleotide
atgtgggtgtgtattgatatgaaagaaatc

SEQ ID NO: 311743 - DNA, 30 bp, Artificial Sequence
  Synthetic oligonucleotide
agtctgcaactgtatgggtcgtaagaaatc

SEQ ID NO: 311744 - DNA, 30 bp, Artificial Sequence
  Synthetic oligonucleotide
attgcacgaaattcggaggtggcagaaatc

SEQ ID NO: 311745 - DNA, 30 bp, Artificial Sequence
  Synthetic oligonucleotide
tcctcaaacgggctcccgcagatcgaaatc

SEQ ID NO: 311746 - DNA, 30 bp, Artificial Sequence
  Synthetic oligonucleotide
cgaagaattgtgtaaatctttttcgaaatc

SEQ ID NO: 311747 - DNA, 30 bp, Artificial Sequence
  Synthetic oligonucleotide
ctttcgatcggttagaaataaatggaaatc

SEQ ID NO: 311748 - DNA, 30 bp, Artificial Sequence
  Synthetic oligonucleotide
accggattacagtgctggatacatgaaatc

SEQ ID NO: 311749 - DNA, 30 bp, Artificial Sequence
  Synthetic oligonucleotide
gaagtttgtttatccgcactcaaataaatc

SEQ ID NO: 311750 - DNA, 30 bp, Artificial Sequence
  Synthetic oligonucleotide
aatacgagttgcagcgcgcaaggataaatc

SEQ ID NO: 311751 - DNA, 30 bp, Artificial Sequence
  Synthetic oligonucleotide
agacgctacgacagtgggaaccgctaaatc

SEQ ID NO: 311752 - DNA, 30 bp, Artificial Sequence
  Synthetic oligonucleotide
gacaagttgacgtgatcgtagcggtaaatc

SEQ ID NO: 311753 - DNA, 30 bp, Artificial Sequence
  Synthetic oligonucleotide
aagggagccatcagactttcaatgtaaatc

SEQ ID NO: 311754 - DNA, 30 bp, Artificial Sequence
  Synthetic oligonucleotide
gaaggcaccgaagacagcgctttgtaaatc

SEQ ID NO: 311755 - DNA, 30 bp, Artificial Sequence
  Synthetic oligonucleotide
aaaggccctcctagaagtgaagcaacaatc

SEQ ID NO: 311756 - DNA, 30 bp, Artificial Sequence
  Synthetic oligonucleotide
tttagtaaagggtaaaagctccacacaatc

SEQ ID NO: 311757 - DNA, 30 bp, Artificial Sequence
  Synthetic oligonucleotide
tgtcgtgcagcgggtgcatgaatcacaatc

SEQ ID NO: 311758 - DNA, 30 bp, Artificial Sequence
  Synthetic oligonucleotide
cccacagcggttcggcgcgtccggacaatc

SEQ ID NO: 311759 - DNA, 30 bp, Artificial Sequence
  Synthetic oligonucleotide
aaatttggaatgttctgttgtcatacaatc

SEQ ID NO: 311760 - DNA, 30 bp, Artificial Sequence
  Synthetic oligonucleotide
atagtggctgaggtagggggtgctacaatc

SEQ ID NO: 311761 - DNA, 30 bp, Artificial Sequence
  Synthetic oligonucleotide
attgcaagccaaactatgctctaaccaatc

SEQ ID NO: 311762 - DNA, 30 bp, Artificial Sequence
  Synthetic oligonucleotide
actcaccgtattcaaccacacctaccaatc

SEQ ID NO: 311763 - DNA, 30 bp, Artificial Sequence
  Synthetic oligonucleotide
agaagtcaggtcccatcattgtacccaatc

SEQ ID NO: 311764 - DNA, 30 bp, Artificial Sequence
  Synthetic oligonucleotide
acggaatgacggcggcgctctaccccaatc

SEQ ID NO: 311765 - DNA, 30 bp, Artificial Sequence
  Synthetic oligonucleotide
agaacaacacttaatagtaactcgccaatc

SEQ ID NO: 311766 - DNA, 30 bp, Artificial Sequence
  Synthetic oligonucleotide
tctagaccgaaggcatgattgcggccaatc

SEQ ID NO: 311767 - DNA, 30 bp, Artificial Sequence
  Synthetic oligonucleotide
aagtcaaccgccttacctctgtctccaatc

SEQ ID NO: 311768 - DNA, 30 bp, Artificial Sequence
  Synthetic oligonucleotide
gagattaaccaacgatttggttcagcaatc

SEQ ID NO: 311769 - DNA, 30 bp, Artificial Sequence
  Synthetic oligonucleotide
tgagctcgtgacgtgtgatgacgagcaatc

SEQ ID NO: 311770 - DNA, 30 bp, Artificial Sequence
  Synthetic oligonucleotide
cataaaatctacatacacccccgggcaatc

SEQ ID NO: 311771 - DNA, 30 bp, Artificial Sequence
  Synthetic oligonucleotide
ggtacgaaggatgattcacaccctgcaatc

SEQ ID NO: 311772 - DNA, 30 bp, Artificial Sequence
  Synthetic oligonucleotide
ctttgtagagtggctgtttgatttgcaatc

SEQ ID NO: 311773 - DNA, 30 bp, Artificial Sequence
  Synthetic oligonucleotide
gagctctacttacatggctgctcatcaatc

SEQ ID NO: 311774 - DNA, 30 bp, Artificial Sequence
  Synthetic oligonucleotide
ttaccttgggatgcacccaccgactcaatc

SEQ ID NO: 311775 - DNA, 30 bp, Artificial Sequence
  Synthetic oligonucleotide
gatccggccaacgtggctgatagctcaatc

SEQ ID NO: 311776 - DNA, 30 bp, Artificial Sequence
  Synthetic oligonucleotide
aaaggtctgcgtacctttattctctcaatc

SEQ ID NO: 311777 - DNA, 30 bp, Artificial Sequence
  Synthetic oligonucleotide
aaagggtcttaacgtgtacgttcgtcaatc

SEQ ID NO: 311778 - DNA, 30 bp, Artificial Sequence
  Synthetic oligonucleotide
cattctggaattatatcttatagaagaatc

SEQ ID NO: 311779 - DNA, 30 bp, Artificial Sequence
  Synthetic oligonucleotide
tatcaagtcgacgaatgtgacgccagaatc

SEQ ID NO: 311780 - DNA, 30 bp, Artificial Sequence
  Synthetic oligonucleotide
tcccgtcaccagtgtttctatgagagaatc

SEQ ID NO: 311781 - DNA, 30 bp, Artificial Sequence
  Synthetic oligonucleotide
acgatagttctacacgctatatagagaatc

SEQ ID NO: 311782 - DNA, 30 bp, Artificial Sequence
  Synthetic oligonucleotide
gaggcccgggacatgtacaaagggagaatc

SEQ ID NO: 311783 - DNA, 30 bp, Artificial Sequence
  Synthetic oligonucleotide
tttggagacataagagcactcacgcgaatc

SEQ ID NO: 311784 - DNA, 30 bp, Artificial Sequence
  Synthetic oligonucleotide
ggagagccagcaactacggtctggcgaatc

SEQ ID NO: 311785 - DNA, 30 bp, Artificial Sequence
  Synthetic oligonucleotide
aaaccacaacgggaagatagccacggaatc

SEQ ID NO: 311786 - DNA, 30 bp, Artificial Sequence
  Synthetic oligonucleotide
tagtcgagcaatcatttaggaattggaatc

SEQ ID NO: 311787 - DNA, 30 bp, Artificial Sequence
  Synthetic oligonucleotide
acaagaagttccttgggatctattggaatc

SEQ ID NO: 311788 - DNA, 30 bp, Artificial Sequence
  Synthetic oligonucleotide
tataaacaaaggctatacgacctctgaatc

SEQ ID NO: 311789 - DNA, 30 bp, Artificial Sequence
  Synthetic oligonucleotide
tatcatgaagtctaattttttctctgaatc

SEQ ID NO: 311790 - DNA, 30 bp, Artificial Sequence
  Synthetic oligonucleotide
acctagtacacgtgcggaagattctgaatc

SEQ ID NO: 311791 - DNA, 30 bp, Artificial Sequence
  Synthetic oligonucleotide
tctgggcaggattcctaacatatgtgaatc

SEQ ID NO: 311792 - DNA, 30 bp, Artificial Sequence
  Synthetic oligonucleotide
tcaactttgagcatgctaacgttgtgaatc

SEQ ID NO: 311793 - DNA, 30 bp, Artificial Sequence
  Synthetic oligonucleotide
atatgctccgagcgacgagttttgtgaatc

SEQ ID NO: 311794 - DNA, 30 bp, Artificial Sequence
  Synthetic oligonucleotide
ataggcgcgtcccagtgcggaaattgaatc

SEQ ID NO: 311795 - DNA, 30 bp, Artificial Sequence
  Synthetic oligonucleotide
atcttgtgcccaattaccttctcttgaatc

SEQ ID NO: 311796 - DNA, 30 bp, Artificial Sequence
  Synthetic oligonucleotide
acgttctctcagttcactagtggcataatc

SEQ ID NO: 311797 - DNA, 30 bp, Artificial Sequence
  Synthetic oligonucleotide
gccacggcctggataaggggcattataatc

SEQ ID NO: 311798 - DNA, 30 bp, Artificial Sequence
  Synthetic oligonucleotide
gcaacgcggatacgcgtagtccaactaatc

SEQ ID NO: 311799 - DNA, 30 bp, Artificial Sequence
  Synthetic oligonucleotide
tatatgggtatatatgagtaagcactaatc

SEQ ID NO: 311800 - DNA, 30 bp, Artificial Sequence
  Synthetic oligonucleotide
gttataatggaattcagtagagcactaatc

SEQ ID NO: 311801 - DNA, 30 bp, Artificial Sequence
  Synthetic oligonucleotide
tgaaaatacttttagagctaatcactaatc

SEQ ID NO: 311802 - DNA, 30 bp, Artificial Sequence
  Synthetic oligonucleotide
gttgaggtgtggtaatgattttcactaatc

SEQ ID NO: 311803 - DNA, 30 bp, Artificial Sequence
  Synthetic oligonucleotide
ggtcccacgttccggaatccgcacctaatc

SEQ ID NO: 311804 - DNA, 30 bp, Artificial Sequence
  Synthetic oligonucleotide
gggagattttgactaccatctgccctaatc

SEQ ID NO: 311805 - DNA, 30 bp, Artificial Sequence
  Synthetic oligonucleotide
cttccgaacggggcagaggatcggctaatc

SEQ ID NO: 311806 - DNA, 30 bp, Artificial Sequence
  Synthetic oligonucleotide
atgtcatgccttcggggtagtcggctaatc

SEQ ID NO: 311807 - DNA, 30 bp, Artificial Sequence
  Synthetic oligonucleotide
gccaggcttacagattaatccgaagtaatc

SEQ ID NO: 311808 - DNA, 30 bp, Artificial Sequence
  Synthetic oligonucleotide
aagcaattgcgaatttcagattaagtaatc

SEQ ID NO: 311809 - DNA, 30 bp, Artificial Sequence
  Synthetic oligonucleotide
ttgcattgagccatgactgattacgtaatc

SEQ ID NO: 311810 - DNA, 30 bp, Artificial Sequence
  Synthetic oligonucleotide
attcgtgtagggtcaccggcactcgtaatc

SEQ ID NO: 311811 - DNA, 30 bp, Artificial Sequence
  Synthetic oligonucleotide
attaagatgattacgaacatcggggtaatc

SEQ ID NO: 311812 - DNA, 30 bp, Artificial Sequence
  Synthetic oligonucleotide
cgtgaagatgatcaagactttcttgtaatc

SEQ ID NO: 311813 - DNA, 30 bp, Artificial Sequence
  Synthetic oligonucleotide
accctagtaagcgtctaggagcccttaatc

SEQ ID NO: 311814 - DNA, 30 bp, Artificial Sequence
  Synthetic oligonucleotide
ggtgtaacaagtttgccgtaaaggttaatc

SEQ ID NO: 311815 - DNA, 30 bp, Artificial Sequence
  Synthetic oligonucleotide
ttgaacggaccgccgtcaaaagggttaatc

SEQ ID NO: 311816 - DNA, 30 bp, Artificial Sequence
  Synthetic oligonucleotide
agtgatccggattgctttccgtgtttaatc

SEQ ID NO: 311817 - DNA, 30 bp, Artificial Sequence
  Synthetic oligonucleotide
cgcaacgtgtactccgtaagcgttttaatc

SEQ ID NO: 311818 - DNA, 30 bp, Artificial Sequence
  Synthetic oligonucleotide
cttgtaatatggcgggtattacgaaacatc

SEQ ID NO: 311819 - DNA, 30 bp, Artificial Sequence
  Synthetic oligonucleotide
ttcgggtaacagctcacatccctaaacatc

SEQ ID NO: 311820 - DNA, 30 bp, Artificial Sequence
  Synthetic oligonucleotide
taagtctgttcattatactcgctcaacatc

SEQ ID NO: 311821 - DNA, 30 bp, Artificial Sequence
  Synthetic oligonucleotide
tggttgttgggactacatagtcggaacatc

SEQ ID NO: 311822 - DNA, 30 bp, Artificial Sequence
  Synthetic oligonucleotide
ttgcgggcagcgaaccgccagatgaacatc

SEQ ID NO: 311823 - DNA, 30 bp, Artificial Sequence
  Synthetic oligonucleotide
cgaagtaccttggttatcaagcataacatc

SEQ ID NO: 311824 - DNA, 30 bp, Artificial Sequence
  Synthetic oligonucleotide
aggtggacttgctccaggataagtaacatc

SEQ ID NO: 311825 - DNA, 30 bp, Artificial Sequence
  Synthetic oligonucleotide
cggggtcgggtgccttgaccctgtaacatc

SEQ ID NO: 311826 - DNA, 30 bp, Artificial Sequence
  Synthetic oligonucleotide
acaggagtcagttcgtcttttctacacatc

SEQ ID NO: 311827 - DNA, 30 bp, Artificial Sequence
  Synthetic oligonucleotide
ggccttacttaagggccagtagtacacatc

SEQ ID NO: 311828 - DNA, 30 bp, Artificial Sequence
  Synthetic oligonucleotide
acatctatggcgacgtattaccgccacatc

SEQ ID NO: 311829 - DNA, 30 bp, Artificial Sequence
  Synthetic oligonucleotide
gtgacacccattggtgatcaagagcacatc

SEQ ID NO: 311830 - DNA, 30 bp, Artificial Sequence
  Synthetic oligonucleotide
aatatagtattctcaggcaattagcacatc

SEQ ID NO: 311831 - DNA, 30 bp, Artificial Sequence
  Synthetic oligonucleotide
ttgccccaatcacccggtagtgggcacatc

SEQ ID NO: 311832 - DNA, 30 bp, Artificial Sequence
  Synthetic oligonucleotide
actaaggcattcgttacagttgggcacatc

SEQ ID NO: 311833 - DNA, 30 bp, Artificial Sequence
  Synthetic oligonucleotide
ttcgatgtaggttttgacaccatggacatc

SEQ ID NO: 311834 - DNA, 30 bp, Artificial Sequence
  Synthetic oligonucleotide
tagtgtgatagtataaggatgaatgacatc

SEQ ID NO: 311835 - DNA, 30 bp, Artificial Sequence
  Synthetic oligonucleotide
ttcgggtgcaaatccaaaggccgtgacatc

SEQ ID NO: 311836 - DNA, 30 bp, Artificial Sequence
  Synthetic oligonucleotide
agagtactatcatgaatcatccaatacatc

SEQ ID NO: 311837 - DNA, 30 bp, Artificial Sequence
  Synthetic oligonucleotide
tctcatgacgagccgaacaatacgtacatc

SEQ ID NO: 311838 - DNA, 30 bp, Artificial Sequence
  Synthetic oligonucleotide
caaaattggaagtccagacgacattacatc

SEQ ID NO: 311839 - DNA, 30 bp, Artificial Sequence
  Synthetic oligonucleotide
cacctctcctaactgatagatccttacatc

SEQ ID NO: 311840 - DNA, 30 bp, Artificial Sequence
  Synthetic oligonucleotide
ttccagaaacccagcggcgtcaaaaccatc

SEQ ID NO: 311841 - DNA, 30 bp, Artificial Sequence
  Synthetic oligonucleotide
gattcgggatcatatgataatgaaaccatc

SEQ ID NO: 311842 - DNA, 30 bp, Artificial Sequence
  Synthetic oligonucleotide
tcgggccgtgaaggtcggcaatgcaccatc

SEQ ID NO: 311843 - DNA, 30 bp, Artificial Sequence
  Synthetic oligonucleotide
ccggcgttcttgtgggagtaaaagaccatc

SEQ ID NO: 311844 - DNA, 30 bp, Artificial Sequence
  Synthetic oligonucleotide
agtcgaggtagtaaattggatagtaccatc

SEQ ID NO: 311845 - DNA, 30 bp, Artificial Sequence
  Synthetic oligonucleotide
ttatggtaggcggctaaacgttgtaccatc

SEQ ID NO: 311846 - DNA, 30 bp, Artificial Sequence
  Synthetic oligonucleotide
agttagctatccggtgctagcatacccatc

SEQ ID NO: 311847 - DNA, 30 bp, Artificial Sequence
  Synthetic oligonucleotide
aggttccttaaccagactaaaatccccatc

SEQ ID NO: 311848 - DNA, 30 bp, Artificial Sequence
  Synthetic oligonucleotide
aaatagaagtggggcgatagactccccatc

SEQ ID NO: 311849 - DNA, 30 bp, Artificial Sequence
  Synthetic oligonucleotide
gacaatttccgcaagtgtaatactcccatc

SEQ ID NO: 311850 - DNA, 31 bp, Artificial Sequence
  Synthetic oligonucleotide
ccaggttgtgcagcactatattgttcccatc

SEQ ID NO: 311851 - DNA, 30 bp, Artificial Sequence
  Synthetic oligonucleotide
gacgggcttggatatcatacatcagccatc

SEQ ID NO: 311852 - DNA, 30 bp, Artificial Sequence
  Synthetic oligonucleotide
cgcacggctcttctaacaaacggcgccatc

SEQ ID NO: 311853 - DNA, 30 bp, Artificial Sequence
  Synthetic oligonucleotide
ttagggccttgtctgtttctgtttgccatc

SEQ ID NO: 311854 - DNA, 30 bp, Artificial Sequence
  Synthetic oligonucleotide
caaatggggatttgagtatcggcatccatc

SEQ ID NO: 311855 - DNA, 30 bp, Artificial Sequence
  Synthetic oligonucleotide
tcgcgggcagatacgattcgttactccatc

SEQ ID NO: 311856 - DNA, 30 bp, Artificial Sequence
  Synthetic oligonucleotide
ctgatgaaaatctgacattgcagctccatc

SEQ ID NO: 311857 - DNA, 30 bp, Artificial Sequence
  Synthetic oligonucleotide
gagacctcaatcaaaactttcacgtccatc

SEQ ID NO: 311858 - DNA, 30 bp, Artificial Sequence
  Synthetic oligonucleotide
ttattaccagatgtacttcgcgtttccatc

SEQ ID NO: 311859 - DNA, 30 bp, Artificial Sequence
  Synthetic oligonucleotide
ggcggaataggggtttaatttagaagcatc

SEQ ID NO: 311860 - DNA, 30 bp, Artificial Sequence
  Synthetic oligonucleotide
tctagttgtaccatgataattcacagcatc

SEQ ID NO: 311861 - DNA, 30 bp, Artificial Sequence
  Synthetic oligonucleotide
atccatctgggcttgaaaccacccagcatc

SEQ ID NO: 311862 - DNA, 31 bp, Artificial Sequence
  Synthetic oligonucleotide
tttatttaacgagatcgtcagttgcagcatc

SEQ ID NO: 311863 - DNA, 30 bp, Artificial Sequence
  Synthetic oligonucleotide
ccatcctcagaattgggggctcgtagcatc

SEQ ID NO: 311864 - DNA, 30 bp, Artificial Sequence
  Synthetic oligonucleotide
aaactatacttcggtcggggacaacgcatc

SEQ ID NO: 311865 - DNA, 30 bp, Artificial Sequence
  Synthetic oligonucleotide
ccgtacttattacaccacgtctaacgcatc

SEQ ID NO: 311866 - DNA, 30 bp, Artificial Sequence
  Synthetic oligonucleotide
ctggtgctctgggggacttaggcacgcatc

SEQ ID NO: 311867 - DNA, 30 bp, Artificial Sequence
  Synthetic oligonucleotide
gaataaaaccaaaggtagcttcgacgcatc

SEQ ID NO: 311868 - DNA, 30 bp, Artificial Sequence
  Synthetic oligonucleotide
atgttcgtctctagggggttcgaccgcatc

SEQ ID NO: 311869 - DNA, 30 bp, Artificial Sequence
  Synthetic oligonucleotide
catggagggtgcggattattttaccgcatc

SEQ ID NO: 311870 - DNA, 30 bp, Artificial Sequence
  Synthetic oligonucleotide
tgttttaaggaaggtgagcgcgcgcgcatc

SEQ ID NO: 311871 - DNA, 30 bp, Artificial Sequence
  Synthetic oligonucleotide
gcggtctatcctaacaggagcatgcgcatc

SEQ ID NO: 311872 - DNA, 30 bp, Artificial Sequence
  Synthetic oligonucleotide
aaactccgagggacgagtaatttgcgcatc

SEQ ID NO: 311873 - DNA, 30 bp, Artificial Sequence
  Synthetic oligonucleotide
attaaggaattagtgagcatatcaggcatc

SEQ ID NO: 311874 - DNA, 30 bp, Artificial Sequence
  Synthetic oligonucleotide
tatggatgggagcagttgagtggaggcatc

SEQ ID NO: 311875 - DNA, 30 bp, Artificial Sequence
  Synthetic oligonucleotide
agtggacacgtatgagacgggttcggcatc

SEQ ID NO: 311876 - DNA, 30 bp, Artificial Sequence
  Synthetic oligonucleotide
agtggcattagttcatggttgaagggcatc

SEQ ID NO: 311877 - DNA, 30 bp, Artificial Sequence
  Synthetic oligonucleotide
caggttgattacatctattcatagggcatc

SEQ ID NO: 311878 - DNA, 30 bp, Artificial Sequence
  Synthetic oligonucleotide
cgaattctctgtgtatggtggtatggcatc

SEQ ID NO: 311879 - DNA, 30 bp, Artificial Sequence
  Synthetic oligonucleotide
caaggtctaccggggccttagcgtggcatc

SEQ ID NO: 311880 - DNA, 30 bp, Artificial Sequence
  Synthetic oligonucleotide
ttcgtctcgtagacaccctcaggctgcatc

SEQ ID NO: 311881 - DNA, 30 bp, Artificial Sequence
  Synthetic oligonucleotide
acgagggttagcggtgacacgatgtgcatc

SEQ ID NO: 311882 - DNA, 30 bp, Artificial Sequence
  Synthetic oligonucleotide
ttcgctgcgaatggctctacgtattgcatc

SEQ ID NO: 311883 - DNA, 30 bp, Artificial Sequence
  Synthetic oligonucleotide
aatatcgcccacgaacggaagccttgcatc

SEQ ID NO: 311884 - DNA, 30 bp, Artificial Sequence
  Synthetic oligonucleotide
cagcactagtccgaacaacgtgtttgcatc

SEQ ID NO: 311885 - DNA, 30 bp, Artificial Sequence
  Synthetic oligonucleotide
acttgaaggatgcagttaaacgaaatcatc

SEQ ID NO: 311886 - DNA, 30 bp, Artificial Sequence
  Synthetic oligonucleotide
aatggccttcgactagtctgaagaatcatc

SEQ ID NO: 311887 - DNA, 30 bp, Artificial Sequence
  Synthetic oligonucleotide
actcgaaaggtccggtacggcctaatcatc

SEQ ID NO: 311888 - DNA, 30 bp, Artificial Sequence
  Synthetic oligonucleotide
gagggttaaagcggagattcacccatcatc

SEQ ID NO: 311889 - DNA, 30 bp, Artificial Sequence
  Synthetic oligonucleotide
catgtattacggagaacaggggccatcatc

SEQ ID NO: 311890 - DNA, 30 bp, Artificial Sequence
  Synthetic oligonucleotide
tcaccgtggattccacctcagatgatcatc

SEQ ID NO: 311891 - DNA, 30 bp, Artificial Sequence
  Synthetic oligonucleotide
tcccacgtgtaaattattcctctgatcatc

SEQ ID NO: 311892 - DNA, 30 bp, Artificial Sequence
  Synthetic oligonucleotide
gagtccccattggctcattgacacctcatc

SEQ ID NO: 311893 - DNA, 30 bp, Artificial Sequence
  Synthetic oligonucleotide
attccgactcggagtctagctttcctcatc

SEQ ID NO: 311894 - DNA, 30 bp, Artificial Sequence
  Synthetic oligonucleotide
cgtcgaagtggcttgaccggcacgctcatc

SEQ ID NO: 311895 - DNA, 30 bp, Artificial Sequence
  Synthetic oligonucleotide
acaatatatgcagtcagaccacatctcatc

SEQ ID NO: 311896 - DNA, 30 bp, Artificial Sequence
  Synthetic oligonucleotide
cctattcaattttctttaccacgcgtcatc

SEQ ID NO: 311897 - DNA, 30 bp, Artificial Sequence
  Synthetic oligonucleotide
atagtaagcgcttcgctgtgtcaggtcatc

SEQ ID NO: 311898 - DNA, 30 bp, Artificial Sequence
  Synthetic oligonucleotide
attaattattgaattacgtctggggtcatc

SEQ ID NO: 311899 - DNA, 30 bp, Artificial Sequence
  Synthetic oligonucleotide
gcttcaaaaaaagtggtgcatactgtcatc

SEQ ID NO: 311900 - DNA, 30 bp, Artificial Sequence
  Synthetic oligonucleotide
actcggcccaggccagagagctgtgtcatc

SEQ ID NO: 311901 - DNA, 30 bp, Artificial Sequence
  Synthetic oligonucleotide
aaaaccacggatgtaactagctgtgtcatc

SEQ ID NO: 311902 - DNA, 30 bp, Artificial Sequence
  Synthetic oligonucleotide
ctaaaggtccgccaacggtgggttgtcatc

SEQ ID NO: 311903 - DNA, 30 bp, Artificial Sequence
  Synthetic oligonucleotide
ttatttgaccgtctggcgcgagagttcatc

SEQ ID NO: 311904 - DNA, 30 bp, Artificial Sequence
  Synthetic oligonucleotide
aggtaccgttctctggaatccagtttcatc

SEQ ID NO: 311905 - DNA, 30 bp, Artificial Sequence
  Synthetic oligonucleotide
gtgaaagttatcggttacctcggcaagatc

SEQ ID NO: 311906 - DNA, 30 bp, Artificial Sequence
  Synthetic oligonucleotide
tcggttggggtgtacaattgtgtgaagatc

SEQ ID NO: 311907 - DNA, 30 bp, Artificial Sequence
  Synthetic oligonucleotide
cgctgatgtcaatatatagaggataagatc

SEQ ID NO: 311908 - DNA, 30 bp, Artificial Sequence
  Synthetic oligonucleotide
ttgatggcgagaggtgcgctaaaacagatc

SEQ ID NO: 311909 - DNA, 30 bp, Artificial Sequence
  Synthetic oligonucleotide
ggcgtgatttgttctacgcgcccacagatc

SEQ ID NO: 311910 - DNA, 30 bp, Artificial Sequence
  Synthetic oligonucleotide
atgatatgtagccacgaccttccacagatc

SEQ ID NO: 311911 - DNA, 30 bp, Artificial Sequence
  Synthetic oligonucleotide
ggtgccactcggctcgggttcttacagatc

SEQ ID NO: 311912 - DNA, 30 bp, Artificial Sequence
  Synthetic oligonucleotide
cttccaagcgctcgtccctcggcccagatc

SEQ ID NO: 311913 - DNA, 30 bp, Artificial Sequence
  Synthetic oligonucleotide
aggtactccaaagcgaccggtaggcagatc

SEQ ID NO: 311914 - DNA, 30 bp, Artificial Sequence
  Synthetic oligonucleotide
tcgtagtgggtctctgcccttatgcagatc

SEQ ID NO: 311915 - DNA, 30 bp, Artificial Sequence
  Synthetic oligonucleotide
ccccgtccccccggcatggacaatcagatc

SEQ ID NO: 311916 - DNA, 30 bp, Artificial Sequence
  Synthetic oligonucleotide
gcctttgttgcgaggtgtcgccttcagatc

SEQ ID NO: 311917 - DNA, 30 bp, Artificial Sequence
  Synthetic oligonucleotide
ttggaagttcggggaatcacttgagagatc

SEQ ID NO: 311918 - DNA, 30 bp, Artificial Sequence
  Synthetic oligonucleotide
agagcgaaatggtaaggagaatacgagatc

SEQ ID NO: 311919 - DNA, 30 bp, Artificial Sequence
  Synthetic oligonucleotide
gaaatgtgactgctatacgcgcccgagatc

SEQ ID NO: 311920 - DNA, 30 bp, Artificial Sequence
  Synthetic oligonucleotide
ctgcaacgacggaggggtgaagtggagatc

SEQ ID NO: 311921 - DNA, 30 bp, Artificial Sequence
  Synthetic oligonucleotide
catataatgatcccgtaacgccatgagatc

SEQ ID NO: 311922 - DNA, 30 bp, Artificial Sequence
  Synthetic oligonucleotide
tacaaacgggcaaaaacccgtcatgagatc

SEQ ID NO: 311923 - DNA, 30 bp, Artificial Sequence
  Synthetic oligonucleotide
atgatcacgtttccatatatggctgagatc

SEQ ID NO: 311924 - DNA, 30 bp, Artificial Sequence
  Synthetic oligonucleotide
ggtcttatcaggggtgggtggattgagatc

SEQ ID NO: 311925 - DNA, 30 bp, Artificial Sequence
  Synthetic oligonucleotide
aacgcgcaagcgtgcagatggaaatagatc

SEQ ID NO: 311926 - DNA, 30 bp, Artificial Sequence
  Synthetic oligonucleotide
atccaggaatcaggccaagtcggatagatc

SEQ ID NO: 311927 - DNA, 30 bp, Artificial Sequence
  Synthetic oligonucleotide
cagagggtcggattaagttcttgatagatc

SEQ ID NO: 311928 - DNA, 30 bp, Artificial Sequence
  Synthetic oligonucleotide
taaatgtcaggataaactcaaccctagatc

SEQ ID NO: 311929 - DNA, 30 bp, Artificial Sequence
  Synthetic oligonucleotide
agaaattggaattctaccaaaatctagatc

SEQ ID NO: 311930 - DNA, 30 bp, Artificial Sequence
  Synthetic oligonucleotide
ttgaaggcaatatgatacagtttctagatc

SEQ ID NO: 311931 - DNA, 30 bp, Artificial Sequence
  Synthetic oligonucleotide
ttttagtatacagcctaaacgcagtagatc

SEQ ID NO: 311932 - DNA, 30 bp, Artificial Sequence
  Synthetic oligonucleotide
agacgtacgttgcatgcattgtagtagatc

SEQ ID NO: 311933 - DNA, 30 bp, Artificial Sequence
  Synthetic oligonucleotide
ctatgcccttaagatgggacaaattagatc

SEQ ID NO: 311934 - DNA, 30 bp, Artificial Sequence
  Synthetic oligonucleotide
gctgcgggcggcggtcgcaactcttagatc

SEQ ID NO: 311935 - DNA, 30 bp, Artificial Sequence
  Synthetic oligonucleotide
cctggtttcaggactttatcgctttagatc

SEQ ID NO: 311936 - DNA, 30 bp, Artificial Sequence
  Synthetic oligonucleotide
gtccactaagggcaatcaattcaaacgatc

SEQ ID NO: 311937 - DNA, 30 bp, Artificial Sequence
  Synthetic oligonucleotide
aggaacgcgccagcgtggagttaaacgatc

SEQ ID NO: 311938 - DNA, 30 bp, Artificial Sequence
  Synthetic oligonucleotide
gatgttgggcgtcgactgtatagaacgatc

SEQ ID NO: 311939 - DNA, 30 bp, Artificial Sequence
  Synthetic oligonucleotide
tgccacctataagtctcggagtgaacgatc

SEQ ID NO: 311940 - DNA, 30 bp, Artificial Sequence
  Synthetic oligonucleotide
tggagagcgggagctctcaccgccacgatc

SEQ ID NO: 311941 - DNA, 30 bp, Artificial Sequence
  Synthetic oligonucleotide
cacacatgaactggccagaatcgcacgatc

SEQ ID NO: 311942 - DNA, 30 bp, Artificial Sequence
  Synthetic oligonucleotide
ctcctgatatagaagaagttgtggccgatc

SEQ ID NO: 311943 - DNA, 30 bp, Artificial Sequence
  Synthetic oligonucleotide
ctttatggtcgaacttatagaatgccgatc

SEQ ID NO: 311944 - DNA, 30 bp, Artificial Sequence
  Synthetic oligonucleotide
cgggtcggatttgatttagggattccgatc

SEQ ID NO: 311945 - DNA, 30 bp, Artificial Sequence
  Synthetic oligonucleotide
agactggggctttaaagatgtgcagcgatc

SEQ ID NO: 311946 - DNA, 30 bp, Artificial Sequence
  Synthetic oligonucleotide
aataggctatctcgtaataatctagcgatc

SEQ ID NO: 311947 - DNA, 30 bp, Artificial Sequence
  Synthetic oligonucleotide
atgcaaggtcagagtgtgctattagcgatc

SEQ ID NO: 311948 - DNA, 30 bp, Artificial Sequence
  Synthetic oligonucleotide
ggttaaaccttgcattatataagcgcgatc

SEQ ID NO: 311949 - DNA, 30 bp, Artificial Sequence
  Synthetic oligonucleotide
ccgaaggtttgcgttccctgctgcgcgatc

SEQ ID NO: 311950 - DNA, 30 bp, Artificial Sequence
  Synthetic oligonucleotide
gcaggagagaatcgagtgccctcggcgatc

SEQ ID NO: 311951 - DNA, 30 bp, Artificial Sequence
  Synthetic oligonucleotide
gaaagggcagccagaacatgcggggcgatc

SEQ ID NO: 311952 - DNA, 30 bp, Artificial Sequence
  Synthetic oligonucleotide
gtgtgcgcattggagcgctagtatgcgatc

SEQ ID NO: 311953 - DNA, 30 bp, Artificial Sequence
  Synthetic oligonucleotide
tcagtggcaaacggtggttcctcctcgatc

SEQ ID NO: 311954 - DNA, 30 bp, Artificial Sequence
  Synthetic oligonucleotide
ggctgagaacgcttgccacccaggtcgatc

SEQ ID NO: 311955 - DNA, 30 bp, Artificial Sequence
  Synthetic oligonucleotide
tctagattcgtaccctcagaattgtcgatc

SEQ ID NO: 311956 - DNA, 30 bp, Artificial Sequence
  Synthetic oligonucleotide
tgtcagcagcacaatcgaaagtaaaggatc

SEQ ID NO: 311957 - DNA, 30 bp, Artificial Sequence
  Synthetic oligonucleotide
tgcactgagatgcagtgaatcataaggatc

SEQ ID NO: 311958 - DNA, 30 bp, Artificial Sequence
  Synthetic oligonucleotide
gatataaaaacacaatgcacttagaggatc

SEQ ID NO: 311959 - DNA, 30 bp, Artificial Sequence
  Synthetic oligonucleotide
ggtgtccatcaccaatcatggcttaggatc

SEQ ID NO: 311960 - DNA, 30 bp, Artificial Sequence
  Synthetic oligonucleotide
ttgtgtgtacgaagggggttgcaacggatc

SEQ ID NO: 311961 - DNA, 30 bp, Artificial Sequence
  Synthetic oligonucleotide
gcgctcagcatgtggatccgcaaccggatc

SEQ ID NO: 311962 - DNA, 30 bp, Artificial Sequence
  Synthetic oligonucleotide
tttagccacttcgggaatattatgcggatc

SEQ ID NO: 311963 - DNA, 30 bp, Artificial Sequence
  Synthetic oligonucleotide
tctttgcggagtggtttccggcatcggatc

SEQ ID NO: 311964 - DNA, 30 bp, Artificial Sequence
  Synthetic oligonucleotide
gtagaccttgtggggtggaacagtcggatc

SEQ ID NO: 311965 - DNA, 30 bp, Artificial Sequence
  Synthetic oligonucleotide
taggatttagtgggtgcatgagcagggatc

SEQ ID NO: 311966 - DNA, 30 bp, Artificial Sequence
  Synthetic oligonucleotide
aacttgcagtcatttagtcttgcagggatc

SEQ ID NO: 311967 - DNA, 30 bp, Artificial Sequence
  Synthetic oligonucleotide
acactcgaatcatatacatcgtgagggatc

SEQ ID NO: 311968 - DNA, 30 bp, Artificial Sequence
  Synthetic oligonucleotide
ggtcgtgcacatcgaacagctttagggatc

SEQ ID NO: 311969 - DNA, 30 bp, Artificial Sequence
  Synthetic oligonucleotide
ggaggggatcatctctgtaatgtcgggatc

SEQ ID NO: 311970 - DNA, 30 bp, Artificial Sequence
  Synthetic oligonucleotide
aatcgttaaaggctaaaccaatatgggatc

SEQ ID NO: 311971 - DNA, 30 bp, Artificial Sequence
  Synthetic oligonucleotide
gtatttacgggtgttacagagggctggatc

SEQ ID NO: 311972 - DNA, 30 bp, Artificial Sequence
  Synthetic oligonucleotide
agcgaaaagaggctccgggttgcgtggatc

SEQ ID NO: 311973 - DNA, 30 bp, Artificial Sequence
  Synthetic oligonucleotide
attggctgtaagtggcgttgtacttggatc

SEQ ID NO: 311974 - DNA, 30 bp, Artificial Sequence
  Synthetic oligonucleotide
ggcatgataacatacgcgaccaaaatgatc

SEQ ID NO: 311975 - DNA, 30 bp, Artificial Sequence
  Synthetic oligonucleotide
ggtctgggcaatttcacccgcaccatgatc

SEQ ID NO: 311976 - DNA, 30 bp, Artificial Sequence
  Synthetic oligonucleotide
aaggtaacggattgtaaaataatcatgatc

SEQ ID NO: 311977 - DNA, 30 bp, Artificial Sequence
  Synthetic oligonucleotide
tcttaatcctaaatgacagtctcgatgatc

SEQ ID NO: 311978 - DNA, 30 bp, Artificial Sequence
  Synthetic oligonucleotide
cgagtggctattgcaaagaggtggatgatc

SEQ ID NO: 311979 - DNA, 30 bp, Artificial Sequence
  Synthetic oligonucleotide
cctggtctatcgccagcgaaagtgatgatc

SEQ ID NO: 311980 - DNA, 30 bp, Artificial Sequence
  Synthetic oligonucleotide
actgtccgggcttcgccggtgcaactgatc

SEQ ID NO: 311981 - DNA, 30 bp, Artificial Sequence
  Synthetic oligonucleotide
caatgtcgcccactgaacggcttactgatc

SEQ ID NO: 311982 - DNA, 30 bp, Artificial Sequence
  Synthetic oligonucleotide
ggaaatcgaggcccgaaccatttactgatc

SEQ ID NO: 311983 - DNA, 30 bp, Artificial Sequence
  Synthetic oligonucleotide
gcaccagcgcctagatttctcggcctgatc

SEQ ID NO: 311984 - DNA, 30 bp, Artificial Sequence
  Synthetic oligonucleotide
gaattaggcaattttggatggggcctgatc

SEQ ID NO: 311985 - DNA, 30 bp, Artificial Sequence
  Synthetic oligonucleotide
gtgggacaagaaaagaactgtttcctgatc

SEQ ID NO: 311986 - DNA, 30 bp, Artificial Sequence
  Synthetic oligonucleotide
ccagctcattacgggcctccgtagctgatc

SEQ ID NO: 311987 - DNA, 30 bp, Artificial Sequence
  Synthetic oligonucleotide
tgactagtcagtgggtgcaaagggctgatc

SEQ ID NO: 311988 - DNA, 30 bp, Artificial Sequence
  Synthetic oligonucleotide
gggtgtgtcgggaccagggcgcctctgatc

SEQ ID NO: 311989 - DNA, 30 bp, Artificial Sequence
  Synthetic oligonucleotide
tcatggccaagtaacagtttcattctgatc

SEQ ID NO: 311990 - DNA, 30 bp, Artificial Sequence
  Synthetic oligonucleotide
acacgccgctggaaggcagtcgttctgatc

SEQ ID NO: 311991 - DNA, 30 bp, Artificial Sequence
  Synthetic oligonucleotide
tacgggatctggctgtcacgtaccgtgatc

SEQ ID NO: 311992 - DNA, 30 bp, Artificial Sequence
  Synthetic oligonucleotide
gttgctacctcaggtgaagttgcggtgatc

SEQ ID NO: 311993 - DNA, 30 bp, Artificial Sequence
  Synthetic oligonucleotide
agcctcgaatatgtacggcgatgggtgatc

SEQ ID NO: 311994 - DNA, 30 bp, Artificial Sequence
  Synthetic oligonucleotide
ggtcaaatttacacatcgagcaatgtgatc

SEQ ID NO: 311995 - DNA, 30 bp, Artificial Sequence
  Synthetic oligonucleotide
atttaggactcgttagtagggtctgtgatc

SEQ ID NO: 311996 - DNA, 30 bp, Artificial Sequence
  Synthetic oligonucleotide
gaccggggtttgaccagaaatatattgatc

SEQ ID NO: 311997 - DNA, 30 bp, Artificial Sequence
  Synthetic oligonucleotide
tgagactcccttcgaagtttacccttgatc

SEQ ID NO: 311998 - DNA, 30 bp, Artificial Sequence
  Synthetic oligonucleotide
ggggcagtagaaagcaaataggtcttgatc

SEQ ID NO: 311999 - DNA, 30 bp, Artificial Sequence
  Synthetic oligonucleotide
agaaggtaaacggtgctcaggaagttgatc

SEQ ID NO: 312000 - DNA, 30 bp, Artificial Sequence
  Synthetic oligonucleotide
ccggcggaccgcgcggtacgagcgttgatc

SEQ ID NO: 312001 - DNA, 30 bp, Artificial Sequence
  Synthetic oligonucleotide
ataacaacatgtggtacgtagaggttgatc

SEQ ID NO: 312002 - DNA, 30 bp, Artificial Sequence
  Synthetic oligonucleotide
atcctctggtatattagttgaactttgatc

SEQ ID NO: 312003 - DNA, 30 bp, Artificial Sequence
  Synthetic oligonucleotide
ggcaaatcaaatactagcggggttttgatc

SEQ ID NO: 312004 - DNA, 30 bp, Artificial Sequence
  Synthetic oligonucleotide
tagggaggccgtgaaatatccaaaaatatc

SEQ ID NO: 312005 - DNA, 30 bp, Artificial Sequence
  Synthetic oligonucleotide
cgatgtttgatgctgttagaatcaaatatc

SEQ ID NO: 312006 - DNA, 30 bp, Artificial Sequence
  Synthetic oligonucleotide
aggtgatctcaatttatgctatcaaatatc

SEQ ID NO: 312007 - DNA, 30 bp, Artificial Sequence
  Synthetic oligonucleotide
cacgggtaaaaattactacagagcaatatc

SEQ ID NO: 312008 - DNA, 30 bp, Artificial Sequence
  Synthetic oligonucleotide
acaaagtgaagtggacaatctcagaatatc

SEQ ID NO: 312009 - DNA, 30 bp, Artificial Sequence
  Synthetic oligonucleotide
ctggtcgtctctggggcggtttagaatatc

SEQ ID NO: 312010 - DNA, 30 bp, Artificial Sequence
  Synthetic oligonucleotide
tgctttgcagtcccaatcagttcgaatatc

SEQ ID NO: 312011 - DNA, 30 bp, Artificial Sequence
  Synthetic oligonucleotide
cgatgaagaccaaatatccgggtgaatatc

SEQ ID NO: 312012 - DNA, 30 bp, Artificial Sequence
  Synthetic oligonucleotide
ccgagcctacaatacgtcaagtataatatc

SEQ ID NO: 312013 - DNA, 30 bp, Artificial Sequence
  Synthetic oligonucleotide
gtcgatactgacgttaaggtggcacatatc

SEQ ID NO: 312014 - DNA, 30 bp, Artificial Sequence
  Synthetic oligonucleotide
tattgacttcaattagctagctaccatatc

SEQ ID NO: 312015 - DNA, 30 bp, Artificial Sequence
  Synthetic oligonucleotide
tagacatgactaagatggcatcgccatatc

SEQ ID NO: 312016 - DNA, 30 bp, Artificial Sequence
  Synthetic oligonucleotide
tattcgtcgtcgccatactgtggccatatc

SEQ ID NO: 312017 - DNA, 30 bp, Artificial Sequence
  Synthetic oligonucleotide
taggcctggtggcgattatttgcgcatatc

SEQ ID NO: 312018 - DNA, 30 bp, Artificial Sequence
  Synthetic oligonucleotide
ctatgcataggcttacgtgaagggcatatc

SEQ ID NO: 312019 - DNA, 30 bp, Artificial Sequence
  Synthetic oligonucleotide
ttatgggtggatcggattgactggcatatc

SEQ ID NO: 312020 - DNA, 30 bp, Artificial Sequence
  Synthetic oligonucleotide
gtattcctagtgctctaggtacatcatatc

SEQ ID NO: 312021 - DNA, 30 bp, Artificial Sequence
  Synthetic oligonucleotide
aacatctcgcccggtgtactctctcatatc

SEQ ID NO: 312022 - DNA, 30 bp, Artificial Sequence
  Synthetic oligonucleotide
cattagttccgttcgtcaggaaaagatatc

SEQ ID NO: 312023 - DNA, 30 bp, Artificial Sequence
  Synthetic oligonucleotide
ttaaatgatgtcttgcatatcggagatatc

SEQ ID NO: 312024 - DNA, 30 bp, Artificial Sequence
  Synthetic oligonucleotide
ggtttgaagcgtatcgggtcgcacgatatc

SEQ ID NO: 312025 - DNA, 29 bp, Artificial Sequence
  Synthetic oligonucleotide
ggcttgagcaggcacgcgttgcggatatc

SEQ ID NO: 312026 - DNA, 30 bp, Artificial Sequence
  Synthetic oligonucleotide
gctgcctaggcgatgaatcacatggatatc

SEQ ID NO: 312027 - DNA, 30 bp, Artificial Sequence
  Synthetic oligonucleotide
agtactctagtaccccgttgcatggatatc

SEQ ID NO: 312028 - DNA, 30 bp, Artificial Sequence
  Synthetic oligonucleotide
atggtaatgggccattatggtactgatatc

SEQ ID NO: 312029 - DNA, 30 bp, Artificial Sequence
  Synthetic oligonucleotide
tagccgcaactgcgggccgatcaatatatc

SEQ ID NO: 312030 - DNA, 30 bp, Artificial Sequence
  Synthetic oligonucleotide
gatgaacaatccttggcggctaactatatc

SEQ ID NO: 312031 - DNA, 30 bp, Artificial Sequence
  Synthetic oligonucleotide
gaagagatcgtgtaacctagatcctatatc

SEQ ID NO: 312032 - DNA, 30 bp, Artificial Sequence
  Synthetic oligonucleotide
tgagcggggcacatacggggacagtatatc

SEQ ID NO: 312033 - DNA, 30 bp, Artificial Sequence
  Synthetic oligonucleotide
atgttgagaaacttcgaatgaacttatatc

SEQ ID NO: 312034 - DNA, 30 bp, Artificial Sequence
  Synthetic oligonucleotide
gcaggataggttgcctgtcggatttatatc

SEQ ID NO: 312035 - DNA, 30 bp, Artificial Sequence
  Synthetic oligonucleotide
actcgagtaagggtagacagattttatatc

SEQ ID NO: 312036 - DNA, 30 bp, Artificial Sequence
  Synthetic oligonucleotide
gcaaccgcgtgaagggtagttttttatatc

SEQ ID NO: 312037 - DNA, 30 bp, Artificial Sequence
  Synthetic oligonucleotide
agagacttgtccgctatctgaagaactatc

SEQ ID NO: 312038 - DNA, 30 bp, Artificial Sequence
  Synthetic oligonucleotide
ctgtgcctctaacgatcaagtgtaactatc

SEQ ID NO: 312039 - DNA, 30 bp, Artificial Sequence
  Synthetic oligonucleotide
catagtcgtccgggtcctcttgagactatc

SEQ ID NO: 312040 - DNA, 30 bp, Artificial Sequence
  Synthetic oligonucleotide
catggaacagcgaaacgcagctagactatc

SEQ ID NO: 312041 - DNA, 30 bp, Artificial Sequence
  Synthetic oligonucleotide
ttcaagcacactcatcaggtcaggactatc

SEQ ID NO: 312042 - DNA, 30 bp, Artificial Sequence
  Synthetic oligonucleotide
aactccccgtaagtccgttcgttgactatc

SEQ ID NO: 312043 - DNA, 29 bp, Artificial Sequence
  Synthetic oligonucleotide
attctgtgtgagtcactgaccgtactatc

SEQ ID NO: 312044 - DNA, 30 bp, Artificial Sequence
  Synthetic oligonucleotide
ccctacaggcgatgtaacctttaccctatc

SEQ ID NO: 312045 - DNA, 30 bp, Artificial Sequence
  Synthetic oligonucleotide
aggtacctttatgtagtcgctttccctatc

SEQ ID NO: 312046 - DNA, 30 bp, Artificial Sequence
  Synthetic oligonucleotide
cctagggagtgcctcctcgagaatcctatc

SEQ ID NO: 312047 - DNA, 30 bp, Artificial Sequence
  Synthetic oligonucleotide
gtgcggactggccgcgcgagacctcctatc

SEQ ID NO: 312048 - DNA, 30 bp, Artificial Sequence
  Synthetic oligonucleotide
acacactgtagttgttgaggatgtcctatc

SEQ ID NO: 312049 - DNA, 30 bp, Artificial Sequence
  Synthetic oligonucleotide
gctatggcttgctaagtgatggccgctatc

SEQ ID NO: 312050 - DNA, 30 bp, Artificial Sequence
  Synthetic oligonucleotide
tgtacctttccggggcctaggggggctatc

SEQ ID NO: 312051 - DNA, 30 bp, Artificial Sequence
  Synthetic oligonucleotide
aagaagtcggcgacagtgcacgatgctatc

SEQ ID NO: 312052 - DNA, 30 bp, Artificial Sequence
  Synthetic oligonucleotide
tggtcaatacttggacttacaagatctatc

SEQ ID NO: 312053 - DNA, 30 bp, Artificial Sequence
  Synthetic oligonucleotide
ttaacggccggcatccctgggagatctatc

SEQ ID NO: 312054 - DNA, 30 bp, Artificial Sequence
  Synthetic oligonucleotide
gacgctgtctcacggtcgcatcactctatc

SEQ ID NO: 312055 - DNA, 30 bp, Artificial Sequence
  Synthetic oligonucleotide
gcatcccgaggtgggccttgcctctctatc

SEQ ID NO: 312056 - DNA, 30 bp, Artificial Sequence
  Synthetic oligonucleotide
gtgccttccttcagatccgggcaaagtatc

SEQ ID NO: 312057 - DNA, 30 bp, Artificial Sequence
  Synthetic oligonucleotide
tttgcagtaggtgtgggttaggtaagtatc

SEQ ID NO: 312058 - DNA, 30 bp, Artificial Sequence
  Synthetic oligonucleotide
gcgctagcttatcccccactgttaagtatc

SEQ ID NO: 312059 - DNA, 30 bp, Artificial Sequence
  Synthetic oligonucleotide
tgtcgcatgcgggaagattgcaccagtatc

SEQ ID NO: 312060 - DNA, 30 bp, Artificial Sequence
  Synthetic oligonucleotide
tagacaccggcagctctcgttaccagtatc

SEQ ID NO: 312061 - DNA, 30 bp, Artificial Sequence
  Synthetic oligonucleotide
atcaccgaattctgtccgttagccagtatc

SEQ ID NO: 312062 - DNA, 30 bp, Artificial Sequence
  Synthetic oligonucleotide
cgaatgcagtgatcacgcctttccagtatc

SEQ ID NO: 312063 - DNA, 30 bp, Artificial Sequence
  Synthetic oligonucleotide
tgcgaaagccggtttaatgccctcagtatc

SEQ ID NO: 312064 - DNA, 30 bp, Artificial Sequence
  Synthetic oligonucleotide
gttttaaagctcatgttaactttcagtatc

SEQ ID NO: 312065 - DNA, 30 bp, Artificial Sequence
  Synthetic oligonucleotide
gatggcaatttctgcaaaacgtggagtatc

SEQ ID NO: 312066 - DNA, 30 bp, Artificial Sequence
  Synthetic oligonucleotide
cagagcgcaaaggaacctcccctgagtatc

SEQ ID NO: 312067 - DNA, 30 bp, Artificial Sequence
  Synthetic oligonucleotide
ttcttgagcctagagcggaccgatagtatc

SEQ ID NO: 312068 - DNA, 30 bp, Artificial Sequence
  Synthetic oligonucleotide
ataagtgtgaactatcggggatatagtatc

SEQ ID NO: 312069 - DNA, 30 bp, Artificial Sequence
  Synthetic oligonucleotide
cagatttggcagtgtcggttttgtagtatc

SEQ ID NO: 312070 - DNA, 30 bp, Artificial Sequence
  Synthetic oligonucleotide
aaaggtcagggcaggctagggcttagtatc

SEQ ID NO: 312071 - DNA, 30 bp, Artificial Sequence
  Synthetic oligonucleotide
cggacacagcttcccagcggatgacgtatc

SEQ ID NO: 312072 - DNA, 30 bp, Artificial Sequence
  Synthetic oligonucleotide
gggtccagtgactctggagctaaccgtatc

SEQ ID NO: 312073 - DNA, 30 bp, Artificial Sequence
  Synthetic oligonucleotide
aacggaattatcatcatcacggtccgtatc

SEQ ID NO: 312074 - DNA, 30 bp, Artificial Sequence
  Synthetic oligonucleotide
cgccaaaaacgtaggggacagttccgtatc

SEQ ID NO: 312075 - DNA, 30 bp, Artificial Sequence
  Synthetic oligonucleotide
gcgccattaatgtgcccttagcctcgtatc

SEQ ID NO: 312076 - DNA, 30 bp, Artificial Sequence
  Synthetic oligonucleotide
gtgtagcgcgtttgtcttaggtctcgtatc

SEQ ID NO: 312077 - DNA, 30 bp, Artificial Sequence
  Synthetic oligonucleotide
actggagtgaacctgttggacaagggtatc

SEQ ID NO: 312078 - DNA, 30 bp, Artificial Sequence
  Synthetic oligonucleotide
tactgtaccgtcgacagtgatgagggtatc

SEQ ID NO: 312079 - DNA, 30 bp, Artificial Sequence
  Synthetic oligonucleotide
ccgaaataccgccggagaacgccgggtatc

SEQ ID NO: 312080 - DNA, 30 bp, Artificial Sequence
  Synthetic oligonucleotide
acatcggctggagataaattaaatggtatc

SEQ ID NO: 312081 - DNA, 30 bp, Artificial Sequence
  Synthetic oligonucleotide
gaccgtcgtgtttgaataggacatggtatc

SEQ ID NO: 312082 - DNA, 30 bp, Artificial Sequence
  Synthetic oligonucleotide
ggacatccttaaacttggtgacatggtatc

SEQ ID NO: 312083 - DNA, 30 bp, Artificial Sequence
  Synthetic oligonucleotide
gtggcctgtaactgggtaacttctggtatc

SEQ ID NO: 312084 - DNA, 30 bp, Artificial Sequence
  Synthetic oligonucleotide
aagatcattcaagcccttatgggatgtatc

SEQ ID NO: 312085 - DNA, 30 bp, Artificial Sequence
  Synthetic oligonucleotide
gaaactcggagtggtgcttcttattgtatc

SEQ ID NO: 312086 - DNA, 32 bp, Artificial Sequence
  Synthetic oligonucleotide
acaaaaatttttctaagagcgggtgaattatc

SEQ ID NO: 312087 - DNA, 30 bp, Artificial Sequence
  Synthetic oligonucleotide
ctctaagggtgcaacgctggagccattatc

SEQ ID NO: 312088 - DNA, 30 bp, Artificial Sequence
  Synthetic oligonucleotide
gcttaggccagaatatagttgtgcattatc

SEQ ID NO: 312089 - DNA, 30 bp, Artificial Sequence
  Synthetic oligonucleotide
acagggtttcggcgcctccatgagattatc

SEQ ID NO: 312090 - DNA, 30 bp, Artificial Sequence
  Synthetic oligonucleotide
tctatcgttagatctatccagtagattatc

SEQ ID NO: 312091 - DNA, 30 bp, Artificial Sequence
  Synthetic oligonucleotide
atgggtatgatgcaagaactttcgattatc

SEQ ID NO: 312092 - DNA, 30 bp, Artificial Sequence
  Synthetic oligonucleotide
ttggggatcggggcaaggtataggattatc

SEQ ID NO: 312093 - DNA, 30 bp, Artificial Sequence
  Synthetic oligonucleotide
cgttaccgttctatgtcaagacatattatc

SEQ ID NO: 312094 - DNA, 30 bp, Artificial Sequence
  Synthetic oligonucleotide
cggtaagacttatgatattcaagtattatc

SEQ ID NO: 312095 - DNA, 30 bp, Artificial Sequence
  Synthetic oligonucleotide
tgggtatccctatgggtggagattattatc

SEQ ID NO: 312096 - DNA, 30 bp, Artificial Sequence
  Synthetic oligonucleotide
aaagcacctctgcgacccgagcttattatc

SEQ ID NO: 312097 - DNA, 30 bp, Artificial Sequence
  Synthetic oligonucleotide
acgggttgtactccattcactgttattatc

SEQ ID NO: 312098 - DNA, 30 bp, Artificial Sequence
  Synthetic oligonucleotide
aacaagttgagcaccatgggcaagcttatc

SEQ ID NO: 312099 - DNA, 30 bp, Artificial Sequence
  Synthetic oligonucleotide
atgagtattctgggtcgaaaaatgcttatc

SEQ ID NO: 312100 - DNA, 30 bp, Artificial Sequence
  Synthetic oligonucleotide
cagaccggccggcgattacattgtcttatc

SEQ ID NO: 312101 - DNA, 30 bp, Artificial Sequence
  Synthetic oligonucleotide
acccgaccacgggtgaattgcccagttatc

SEQ ID NO: 312102 - DNA, 30 bp, Artificial Sequence
  Synthetic oligonucleotide
agtgtgaaaccgttgataaatttagttatc

SEQ ID NO: 312103 - DNA, 30 bp, Artificial Sequence
  Synthetic oligonucleotide
gtgttgtcatctcgaataacaaccgttatc

SEQ ID NO: 312104 - DNA, 30 bp, Artificial Sequence
  Synthetic oligonucleotide
agggacgctacgaagtccggcttcgttatc

SEQ ID NO: 312105 - DNA, 30 bp, Artificial Sequence
  Synthetic oligonucleotide
tagaaaatgtggtcacaaccccaggttatc

SEQ ID NO: 312106 - DNA, 30 bp, Artificial Sequence
  Synthetic oligonucleotide
agagtcgagcatagatcactacttgttatc

SEQ ID NO: 312107 - DNA, 30 bp, Artificial Sequence
  Synthetic oligonucleotide
cgcagttcagggtaccatgtagaatttatc

SEQ ID NO: 312108 - DNA, 30 bp, Artificial Sequence
  Synthetic oligonucleotide
agggctgtacttcgtaataacgggtttatc

SEQ ID NO: 312109 - DNA, 30 bp, Artificial Sequence
  Synthetic oligonucleotide
agaaggctggagtttttgtcaaaaaaactc

SEQ ID NO: 312110 - DNA, 30 bp, Artificial Sequence
  Synthetic oligonucleotide
gataactttccccgccctacggaaaaactc

SEQ ID NO: 312111 - DNA, 30 bp, Artificial Sequence
  Synthetic oligonucleotide
ggtcggcttttagccagccagctaaaactc

SEQ ID NO: 312112 - DNA, 30 bp, Artificial Sequence
  Synthetic oligonucleotide
gctgatattgacccggacgccgtaaaactc

SEQ ID NO: 312113 - DNA, 30 bp, Artificial Sequence
  Synthetic oligonucleotide
gtgttaccaaataaacgatgttgcaaactc

SEQ ID NO: 312114 - DNA, 30 bp, Artificial Sequence
  Synthetic oligonucleotide
tacatcttgctctccatttgtccgaaactc

SEQ ID NO: 312115 - DNA, 30 bp, Artificial Sequence
  Synthetic oligonucleotide
ctctgtacgtgtgccaataaggcgaaactc

SEQ ID NO: 312116 - DNA, 30 bp, Artificial Sequence
  Synthetic oligonucleotide
ccccacggctttacgaccctccttaaactc

SEQ ID NO: 312117 - DNA, 30 bp, Artificial Sequence
  Synthetic oligonucleotide
attcggttgcaggcaactggatctcaactc

SEQ ID NO: 312118 - DNA, 30 bp, Artificial Sequence
  Synthetic oligonucleotide
aacaacacagatcacggtacgagagaactc

SEQ ID NO: 312119 - DNA, 30 bp, Artificial Sequence
  Synthetic oligonucleotide
agaattgcaggtagctatgattgagaactc

SEQ ID NO: 312120 - DNA, 30 bp, Artificial Sequence
  Synthetic oligonucleotide
atcatgcccgtaacattttcggtagaactc

SEQ ID NO: 312121 - DNA, 30 bp, Artificial Sequence
  Synthetic oligonucleotide
agggaatagcgccgactaattcatgaactc

SEQ ID NO: 312122 - DNA, 30 bp, Artificial Sequence
  Synthetic oligonucleotide
ggaggtcatctgtttcagaagatctaactc

SEQ ID NO: 312123 - DNA, 30 bp, Artificial Sequence
  Synthetic oligonucleotide
acatattctcgtctgcatgcgctctaactc

SEQ ID NO: 312124 - DNA, 30 bp, Artificial Sequence
  Synthetic oligonucleotide
tctagtgacagtttccgctcggagtaactc

SEQ ID NO: 312125 - DNA, 30 bp, Artificial Sequence
  Synthetic oligonucleotide
aacaactagttgtaatcacgaacgtaactc

SEQ ID NO: 312126 - DNA, 30 bp, Artificial Sequence
  Synthetic oligonucleotide
aacacacgttcaacgaggcttgcgtaactc

SEQ ID NO: 312127 - DNA, 30 bp, Artificial Sequence
  Synthetic oligonucleotide
tgcgtaggctatttggaggactggtaactc

SEQ ID NO: 312128 - DNA, 30 bp, Artificial Sequence
  Synthetic oligonucleotide
ttaactcgatgttagtgatctatgtaactc

SEQ ID NO: 312129 - DNA, 30 bp, Artificial Sequence
  Synthetic oligonucleotide
tgcctgcttgatggacatagtaattaactc

SEQ ID NO: 312130 - DNA, 30 bp, Artificial Sequence
  Synthetic oligonucleotide
agccaaacgaaatctatgttccattaactc

SEQ ID NO: 312131 - DNA, 30 bp, Artificial Sequence
  Synthetic oligonucleotide
agtcagacaatatctgatatatgttaactc

SEQ ID NO: 312132 - DNA, 30 bp, Artificial Sequence
  Synthetic oligonucleotide
gtacggctgttaacgtccaagttgacactc

SEQ ID NO: 312133 - DNA, 31 bp, Artificial Sequence
  Synthetic oligonucleotide
ataatatcaaagtgcacgcccttgtacactc

SEQ ID NO: 312134 - DNA, 30 bp, Artificial Sequence
  Synthetic oligonucleotide
cccgtaatgtataaaattctcattacactc

SEQ ID NO: 312135 - DNA, 30 bp, Artificial Sequence
  Synthetic oligonucleotide
aatgaggcaggtagattatgatgaccactc

SEQ ID NO: 312136 - DNA, 30 bp, Artificial Sequence
  Synthetic oligonucleotide
taagctccgattctaacaaccctaccactc

SEQ ID NO: 312137 - DNA, 30 bp, Artificial Sequence
  Synthetic oligonucleotide
ctagtgttaaattattggttctacccactc

SEQ ID NO: 312138 - DNA, 30 bp, Artificial Sequence
  Synthetic oligonucleotide
ccaccttttactctggaaggctgcccactc

SEQ ID NO: 312139 - DNA, 30 bp, Artificial Sequence
  Synthetic oligonucleotide
gggtgaatctctgtgtcgagcagtccactc

SEQ ID NO: 312140 - DNA, 30 bp, Artificial Sequence
  Synthetic oligonucleotide
agatcgtcgtcgccactttcgacagcactc

SEQ ID NO: 312141 - DNA, 30 bp, Artificial Sequence
  Synthetic oligonucleotide
tgccactgcatcacgggaaaaggagcactc

SEQ ID NO: 312142 - DNA, 30 bp, Artificial Sequence
  Synthetic oligonucleotide
agtataatttgagccagtcccagggcactc

SEQ ID NO: 312143 - DNA, 30 bp, Artificial Sequence
  Synthetic oligonucleotide
caacgaaaatcccatgcgacaggggcactc

SEQ ID NO: 312144 - DNA, 30 bp, Artificial Sequence
  Synthetic oligonucleotide
tgttatgagctggttaatcattatgcactc

SEQ ID NO: 312145 - DNA, 30 bp, Artificial Sequence
  Synthetic oligonucleotide
taggttcaagacaccatagatacatcactc

SEQ ID NO: 312146 - DNA, 30 bp, Artificial Sequence
  Synthetic oligonucleotide
tgacgccaaatcgaagtaagtatctcactc

SEQ ID NO: 312147 - DNA, 30 bp, Artificial Sequence
  Synthetic oligonucleotide
tcgcatcgacgatccaaaccccgcagactc

SEQ ID NO: 312148 - DNA, 30 bp, Artificial Sequence
  Synthetic oligonucleotide
tcattcaagtcgggagattgcaagagactc

SEQ ID NO: 312149 - DNA, 30 bp, Artificial Sequence
  Synthetic oligonucleotide
tcaactacgtggtctaggagcacgagactc

SEQ ID NO: 312150 - DNA, 30 bp, Artificial Sequence
  Synthetic oligonucleotide
tggaggtgaacataattacatcggagactc

SEQ ID NO: 312151 - DNA, 30 bp, Artificial Sequence
  Synthetic oligonucleotide
cgaaatcgtccacagtgaccctatagactc

SEQ ID NO: 312152 - DNA, 30 bp, Artificial Sequence
  Synthetic oligonucleotide
ggagcaacgcgggatacttgtggtagactc

SEQ ID NO: 312153 - DNA, 30 bp, Artificial Sequence
  Synthetic oligonucleotide
tgcgaagaactttcttaagtccaacgactc

SEQ ID NO: 312154 - DNA, 30 bp, Artificial Sequence
  Synthetic oligonucleotide
tgtaatgctatatttttagcaccacgactc

SEQ ID NO: 312155 - DNA, 30 bp, Artificial Sequence
  Synthetic oligonucleotide
ttgtcacaacagtatttggggggacgactc

SEQ ID NO: 312156 - DNA, 30 bp, Artificial Sequence
  Synthetic oligonucleotide
atcacgatcatttagttcattggccgactc

SEQ ID NO: 312157 - DNA, 30 bp, Artificial Sequence
  Synthetic oligonucleotide
tcaaggcgtctcggtttcacgaggcgactc

SEQ ID NO: 312158 - DNA, 30 bp, Artificial Sequence
  Synthetic oligonucleotide
agattcggaacaccataatcaagaggactc

SEQ ID NO: 312159 - DNA, 30 bp, Artificial Sequence
  Synthetic oligonucleotide
attcgggaatttagctggaaatacggactc

SEQ ID NO: 312160 - DNA, 30 bp, Artificial Sequence
  Synthetic oligonucleotide
atgcgcttgcagtcaggaactgccggactc

SEQ ID NO: 312161 - DNA, 30 bp, Artificial Sequence
  Synthetic oligonucleotide
gtctttgacctggtcagtgaggtcggactc

SEQ ID NO: 312162 - DNA, 30 bp, Artificial Sequence
  Synthetic oligonucleotide
taagtgccatggaaataggcgacgggactc

SEQ ID NO: 312163 - DNA, 30 bp, Artificial Sequence
  Synthetic oligonucleotide
gtccaactttcgactgtcgaatcgggactc

SEQ ID NO: 312164 - DNA, 30 bp, Artificial Sequence
  Synthetic oligonucleotide
cttaatatatggagccgccgtcggggactc

SEQ ID NO: 312165 - DNA, 30 bp, Artificial Sequence
  Synthetic oligonucleotide
ggatgtcagacagtaccaagcttgggactc

SEQ ID NO: 312166 - DNA, 30 bp, Artificial Sequence
  Synthetic oligonucleotide
ggcttcgccaaacgatgtattcgtggactc

SEQ ID NO: 312167 - DNA, 30 bp, Artificial Sequence
  Synthetic oligonucleotide
attaaatccctaccttgcccctcatgactc

SEQ ID NO: 312168 - DNA, 30 bp, Artificial Sequence
  Synthetic oligonucleotide
gaccttggtcttccaggtataggatgactc

SEQ ID NO: 312169 - DNA, 30 bp, Artificial Sequence
  Synthetic oligonucleotide
gcaggattggccgcggaatcgacctgactc

SEQ ID NO: 312170 - DNA, 30 bp, Artificial Sequence
  Synthetic oligonucleotide
atatgtcggtccgggaagtaggcctgactc

SEQ ID NO: 312171 - DNA, 30 bp, Artificial Sequence
  Synthetic oligonucleotide
ttatgataggggtattgtagggtgtgactc

SEQ ID NO: 312172 - DNA, 30 bp, Artificial Sequence
  Synthetic oligonucleotide
ctcgcatacgttccttgatgtgattgactc

SEQ ID NO: 312173 - DNA, 30 bp, Artificial Sequence
  Synthetic oligonucleotide
tggtttaagggtaagctaatcagaatactc

SEQ ID NO: 312174 - DNA, 30 bp, Artificial Sequence
  Synthetic oligonucleotide
aacacgtcgtcaggctatgatgacatactc

SEQ ID NO: 312175 - DNA, 30 bp, Artificial Sequence
  Synthetic oligonucleotide
ccaatacgacatccgtccgcaagtatactc

SEQ ID NO: 312176 - DNA, 30 bp, Artificial Sequence
  Synthetic oligonucleotide
atggaagtaatagcctgaaaacttatactc

SEQ ID NO: 312177 - DNA, 30 bp, Artificial Sequence
  Synthetic oligonucleotide
gtgcagagtcagtcgaaagtataactactc

SEQ ID NO: 312178 - DNA, 30 bp, Artificial Sequence
  Synthetic oligonucleotide
ttgggcacaactaggttgcaagcgctactc

SEQ ID NO: 312179 - DNA, 30 bp, Artificial Sequence
  Synthetic oligonucleotide
ttccatatgttatgaaataccaatctactc

SEQ ID NO: 312180 - DNA, 31 bp, Artificial Sequence
  Synthetic oligonucleotide
ggcagaatggcttggtggagagcatctactc

SEQ ID NO: 312181 - DNA, 30 bp, Artificial Sequence
  Synthetic oligonucleotide
agagggggccagagctgctggcatctactc

SEQ ID NO: 312182 - DNA, 30 bp, Artificial Sequence
  Synthetic oligonucleotide
gcttttcacgtaaagccgaagtgtctactc

SEQ ID NO: 312183 - DNA, 30 bp, Artificial Sequence
  Synthetic oligonucleotide
catatccccgttctcatctctagagtactc

SEQ ID NO: 312184 - DNA, 30 bp, Artificial Sequence
  Synthetic oligonucleotide
tcacatttcggcgcctgtcttagagtactc

SEQ ID NO: 312185 - DNA, 30 bp, Artificial Sequence
  Synthetic oligonucleotide
ttcagacagcgtacggacttgcgagtactc

SEQ ID NO: 312186 - DNA, 30 bp, Artificial Sequence
  Synthetic oligonucleotide
gtaatcggtgtccgtcggatttacgtactc

SEQ ID NO: 312187 - DNA, 30 bp, Artificial Sequence
  Synthetic oligonucleotide
cgcttatctgttaggcttaggtaattactc

SEQ ID NO: 312188 - DNA, 30 bp, Artificial Sequence
  Synthetic oligonucleotide
cccaggctaaaggggtatcataccttactc

SEQ ID NO: 312189 - DNA, 30 bp, Artificial Sequence
  Synthetic oligonucleotide
cgtcagctcgcataaacatgcgccttactc

SEQ ID NO: 312190 - DNA, 30 bp, Artificial Sequence
  Synthetic oligonucleotide
agctagagtgtcacacgtattaagttactc

SEQ ID NO: 312191 - DNA, 31 bp, Artificial Sequence
  Synthetic oligonucleotide
ggtgtgtctgtgcgcctgagatacgttactc

SEQ ID NO: 312192 - DNA, 30 bp, Artificial Sequence
  Synthetic oligonucleotide
gatttcagtcgtgaagaacttcgaaacctc

SEQ ID NO: 312193 - DNA, 30 bp, Artificial Sequence
  Synthetic oligonucleotide
cttcgctaaaggaaggaccgttccaacctc

SEQ ID NO: 312194 - DNA, 30 bp, Artificial Sequence
  Synthetic oligonucleotide
actagctggaatttgagcagcagcaacctc

SEQ ID NO: 312195 - DNA, 30 bp, Artificial Sequence
  Synthetic oligonucleotide
caaagtaggtgtccaggtatccagaacctc

SEQ ID NO: 312196 - DNA, 30 bp, Artificial Sequence
  Synthetic oligonucleotide
tcttgagtgcgctgtacttcgcgtaacctc

SEQ ID NO: 312197 - DNA, 30 bp, Artificial Sequence
  Synthetic oligonucleotide
atccaagttcggtcgtgcacagggcacctc

SEQ ID NO: 312198 - DNA, 30 bp, Artificial Sequence
  Synthetic oligonucleotide
agaaatatataagttgttcacaaagacctc

SEQ ID NO: 312199 - DNA, 30 bp, Artificial Sequence
  Synthetic oligonucleotide
ggatgatcaactcttcgtcacatagacctc

SEQ ID NO: 312200 - DNA, 30 bp, Artificial Sequence
  Synthetic oligonucleotide
aatatcgccacctttacggaggccgacctc

SEQ ID NO: 312201 - DNA, 30 bp, Artificial Sequence
  Synthetic oligonucleotide
gtagaataacgcatacctcttcaggacctc

SEQ ID NO: 312202 - DNA, 30 bp, Artificial Sequence
  Synthetic oligonucleotide
atacgttatcctgagcccgaagcggacctc

SEQ ID NO: 312203 - DNA, 30 bp, Artificial Sequence
  Synthetic oligonucleotide
aacgatcactggggatgagctgcatacctc

SEQ ID NO: 312204 - DNA, 30 bp, Artificial Sequence
  Synthetic oligonucleotide
tatcggggcaggggtggtgcgcgatacctc

SEQ ID NO: 312205 - DNA, 30 bp, Artificial Sequence
  Synthetic oligonucleotide
aatatctggggactaggtatgtgctacctc

SEQ ID NO: 312206 - DNA, 30 bp, Artificial Sequence
  Synthetic oligonucleotide
taagacaggacttcccatggatagtacctc

SEQ ID NO: 312207 - DNA, 30 bp, Artificial Sequence
  Synthetic oligonucleotide
atgtctattcgaggtcgatattgttacctc

SEQ ID NO: 312208 - DNA, 30 bp, Artificial Sequence
  Synthetic oligonucleotide
tggtccgtcaagaaagttgcctcaaccctc

SEQ ID NO: 312209 - DNA, 30 bp, Artificial Sequence
  Synthetic oligonucleotide
ctccgagtttgactatagcttacgaccctc

SEQ ID NO: 312210 - DNA, 30 bp, Artificial Sequence
  Synthetic oligonucleotide
gcacacgcagttagtaagtgcatgaccctc

SEQ ID NO: 312211 - DNA, 30 bp, Artificial Sequence
  Synthetic oligonucleotide
ctcaagcaataggaatcaaatcttcccctc

SEQ ID NO: 312212 - DNA, 30 bp, Artificial Sequence
  Synthetic oligonucleotide
taaggggaaacccgtatcgatggggccctc

SEQ ID NO: 312213 - DNA, 30 bp, Artificial Sequence
  Synthetic oligonucleotide
tggtaagacgtacaacaatttttggccctc

SEQ ID NO: 312214 - DNA, 30 bp, Artificial Sequence
  Synthetic oligonucleotide
ttagtacgaacaataacaatgttctccctc

SEQ ID NO: 312215 - DNA, 30 bp, Artificial Sequence
  Synthetic oligonucleotide
cgaatcctgtggtgataagtcctgtccctc

SEQ ID NO: 312216 - DNA, 30 bp, Artificial Sequence
  Synthetic oligonucleotide
agcatccattacgcgaacatttcaagcctc

SEQ ID NO: 312217 - DNA, 30 bp, Artificial Sequence
  Synthetic oligonucleotide
ttccggttgcttctttcatgcgccagcctc

SEQ ID NO: 312218 - DNA, 30 bp, Artificial Sequence
  Synthetic oligonucleotide
cttcgttgtggatttcaggggttcagcctc

SEQ ID NO: 312219 - DNA, 29 bp, Artificial Sequence
  Synthetic oligonucleotide
ggagtggcttatacgaactggctagcctc

SEQ ID NO: 312220 - DNA, 30 bp, Artificial Sequence
  Synthetic oligonucleotide
ttcgtgcctgcacacctggacccacgcctc

SEQ ID NO: 312221 - DNA, 30 bp, Artificial Sequence
  Synthetic oligonucleotide
ggacgaattactctttagtcattacgcctc

SEQ ID NO: 312222 - DNA, 30 bp, Artificial Sequence
  Synthetic oligonucleotide
ttatctccttgctatcgtgctgtccgcctc

SEQ ID NO: 312223 - DNA, 30 bp, Artificial Sequence
  Synthetic oligonucleotide
acttggttgaccagtaagatcacgcgcctc

SEQ ID NO: 312224 - DNA, 30 bp, Artificial Sequence
  Synthetic oligonucleotide
aaaacgtccaaaagtcatttgccgcgcctc

SEQ ID NO: 312225 - DNA, 30 bp, Artificial Sequence
  Synthetic oligonucleotide
tagagtgagtctgcgaatgaatcgcgcctc

SEQ ID NO: 312226 - DNA, 31 bp, Artificial Sequence
  Synthetic oligonucleotide
ttagcccaaaaatctggaaatgaggcgcctc

SEQ ID NO: 312227 - DNA, 30 bp, Artificial Sequence
  Synthetic oligonucleotide
attggttatttcgaagtgtgaatgcgcctc

SEQ ID NO: 312228 - DNA, 30 bp, Artificial Sequence
  Synthetic oligonucleotide
agccatggtcaattcatcggagtgcgcctc

SEQ ID NO: 312229 - DNA, 30 bp, Artificial Sequence
  Synthetic oligonucleotide
gtcgagtgcttcgtctgcttattgcgcctc

SEQ ID NO: 312230 - DNA, 30 bp, Artificial Sequence
  Synthetic oligonucleotide
tcctgtttaatgcgggccgtatgtcgcctc

SEQ ID NO: 312231 - DNA, 30 bp, Artificial Sequence
  Synthetic oligonucleotide
caaaagccgatagattcatttccaggcctc

SEQ ID NO: 312232 - DNA, 30 bp, Artificial Sequence
  Synthetic oligonucleotide
gggtcatgaccaagggctcaacttggcctc

SEQ ID NO: 312233 - DNA, 30 bp, Artificial Sequence
  Synthetic oligonucleotide
gggagcgtaatatggcatgataaatgcctc

SEQ ID NO: 312234 - DNA, 30 bp, Artificial Sequence
  Synthetic oligonucleotide
gcgttattagccggtgagactatatgcctc

SEQ ID NO: 312235 - DNA, 30 bp, Artificial Sequence
  Synthetic oligonucleotide
acggtgcgcaagtgcgtgaccatctgcctc

SEQ ID NO: 312236 - DNA, 30 bp, Artificial Sequence
  Synthetic oligonucleotide
tccggtcgcatagttcgtcccgaaatcctc

SEQ ID NO: 312237 - DNA, 30 bp, Artificial Sequence
  Synthetic oligonucleotide
tatgcagatgagtcgatccgatctatcctc

SEQ ID NO: 312238 - DNA, 30 bp, Artificial Sequence
  Synthetic oligonucleotide
atacgcaaaatatcctatggttacctcctc

SEQ ID NO: 312239 - DNA, 30 bp, Artificial Sequence
  Synthetic oligonucleotide
cgggctcgcagagcataccaatgagtcctc

SEQ ID NO: 312240 - DNA, 30 bp, Artificial Sequence
  Synthetic oligonucleotide
tagacgggtggtagaagtcccgccgtcctc

SEQ ID NO: 312241 - DNA, 30 bp, Artificial Sequence
  Synthetic oligonucleotide
ggcatagaccgacgctactcgaaggtcctc

SEQ ID NO: 312242 - DNA, 30 bp, Artificial Sequence
  Synthetic oligonucleotide
tttggctaaaaaaggatatgagcggtcctc

SEQ ID NO: 312243 - DNA, 30 bp, Artificial Sequence
  Synthetic oligonucleotide
ggcttctggccaccgcatatcactgtcctc

SEQ ID NO: 312244 - DNA, 30 bp, Artificial Sequence
  Synthetic oligonucleotide
agaataatcatgctgcatagaagtgtcctc

SEQ ID NO: 312245 - DNA, 30 bp, Artificial Sequence
  Synthetic oligonucleotide
gcccattgtttgcccgaaacactattcctc

SEQ ID NO: 312246 - DNA, 30 bp, Artificial Sequence
  Synthetic oligonucleotide
acccagatctttcgattaacgaacttcctc

SEQ ID NO: 312247 - DNA, 30 bp, Artificial Sequence
  Synthetic oligonucleotide
gtcggcatttccaagtctctgatcttcctc

SEQ ID NO: 312248 - DNA, 30 bp, Artificial Sequence
  Synthetic oligonucleotide
aggacacccgatcggtacgtcggtttcctc

SEQ ID NO: 312249 - DNA, 30 bp, Artificial Sequence
  Synthetic oligonucleotide
tgtgacaaactagacggctgtgttttcctc

SEQ ID NO: 312250 - DNA, 30 bp, Artificial Sequence
  Synthetic oligonucleotide
tacatataaatagaatcccgtacaaagctc

SEQ ID NO: 312251 - DNA, 30 bp, Artificial Sequence
  Synthetic oligonucleotide
ttgtagtccgtgaaagggggtagaaagctc

SEQ ID NO: 312252 - DNA, 30 bp, Artificial Sequence
  Synthetic oligonucleotide
taaagggttacacacgtcaaatagaagctc

SEQ ID NO: 312253 - DNA, 30 bp, Artificial Sequence
  Synthetic oligonucleotide
cgtagagaccccttttcatgggaccagctc

SEQ ID NO: 312254 - DNA, 30 bp, Artificial Sequence
  Synthetic oligonucleotide
tcctgatatcgccgtgtcgctcagcagctc

SEQ ID NO: 312255 - DNA, 30 bp, Artificial Sequence
  Synthetic oligonucleotide
ggcaccgaaggtacatgccaccggcagctc

SEQ ID NO: 312256 - DNA, 30 bp, Artificial Sequence
  Synthetic oligonucleotide
tgtcaccggtcagccatcggccaggagctc

SEQ ID NO: 312257 - DNA, 30 bp, Artificial Sequence
  Synthetic oligonucleotide
ttccgtgatttgcctaagccctcggagctc

SEQ ID NO: 312258 - DNA, 30 bp, Artificial Sequence
  Synthetic oligonucleotide
tgattgcacctttgttagttatctgagctc

SEQ ID NO: 312259 - DNA, 30 bp, Artificial Sequence
  Synthetic oligonucleotide
cctgttcaaaaccgacactggtctgagctc

SEQ ID NO: 312260 - DNA, 30 bp, Artificial Sequence
  Synthetic oligonucleotide
ttccggtgcaagatatgcgaataatagctc

SEQ ID NO: 312261 - DNA, 30 bp, Artificial Sequence
  Synthetic oligonucleotide
gaagtcttaatcagaccgtaacgctagctc

SEQ ID NO: 312262 - DNA, 30 bp, Artificial Sequence
  Synthetic oligonucleotide
aaaggcgtacgatacgggttacgctagctc

SEQ ID NO: 312263 - DNA, 30 bp, Artificial Sequence
  Synthetic oligonucleotide
cgggggaaaagaaaccccatagcgtagctc

SEQ ID NO: 312264 - DNA, 30 bp, Artificial Sequence
  Synthetic oligonucleotide
catgtttgtctttatccagcaccaacgctc

SEQ ID NO: 312265 - DNA, 30 bp, Artificial Sequence
  Synthetic oligonucleotide
agcagaactccaatcaacgcaagaacgctc

SEQ ID NO: 312266 - DNA, 30 bp, Artificial Sequence
  Synthetic oligonucleotide
taacgactaggctccacccgaagaacgctc

SEQ ID NO: 312267 - DNA, 30 bp, Artificial Sequence
  Synthetic oligonucleotide
ttgaattggtccagaaatcagaatacgctc

SEQ ID NO: 312268 - DNA, 30 bp, Artificial Sequence
  Synthetic oligonucleotide
gcgttgacacggaacggtcctgatacgctc

SEQ ID NO: 312269 - DNA, 30 bp, Artificial Sequence
  Synthetic oligonucleotide
gaattgtcgacgtcccgtggtataccgctc

SEQ ID NO: 312270 - DNA, 30 bp, Artificial Sequence
  Synthetic oligonucleotide
gagccacgcgaaccggacgtatgcccgctc

SEQ ID NO: 312271 - DNA, 30 bp, Artificial Sequence
  Synthetic oligonucleotide
ggtcacgcgtttctagtagtgctcccgctc

SEQ ID NO: 312272 - DNA, 30 bp, Artificial Sequence
  Synthetic oligonucleotide
gggagtagcctccatgtactgcctccgctc

SEQ ID NO: 312273 - DNA, 30 bp, Artificial Sequence
  Synthetic oligonucleotide
atcgatgtagtgttattaatctctccgctc

SEQ ID NO: 312274 - DNA, 30 bp, Artificial Sequence
  Synthetic oligonucleotide
gcatacttggattgaaccaaggttccgctc

SEQ ID NO: 312275 - DNA, 30 bp, Artificial Sequence
  Synthetic oligonucleotide
aacctttgcctgtcaagctcaaattcgctc

SEQ ID NO: 312276 - DNA, 30 bp, Artificial Sequence
  Synthetic oligonucleotide
gttccatcgtcagtaacgcgtccaaggctc

SEQ ID NO: 312277 - DNA, 30 bp, Artificial Sequence
  Synthetic oligonucleotide
agaacgagggtatacgcctatggcaggctc

SEQ ID NO: 312278 - DNA, 30 bp, Artificial Sequence
  Synthetic oligonucleotide
gtactctaatcgcagtgtcattaacggctc

SEQ ID NO: 312279 - DNA, 30 bp, Artificial Sequence
  Synthetic oligonucleotide
ccttaagccaaggcatttgacgcccggctc

SEQ ID NO: 312280 - DNA, 30 bp, Artificial Sequence
  Synthetic oligonucleotide
aaataagctgcggggaggctgtcgcggctc

SEQ ID NO: 312281 - DNA, 30 bp, Artificial Sequence
  Synthetic oligonucleotide
gactgattgaattttagatagcaagggctc

SEQ ID NO: 312282 - DNA, 30 bp, Artificial Sequence
  Synthetic oligonucleotide
agtggagatttttgttacaagtaagggctc

SEQ ID NO: 312283 - DNA, 30 bp, Artificial Sequence
  Synthetic oligonucleotide
tccggatagaccatcccggggtgagggctc

SEQ ID NO: 312284 - DNA, 30 bp, Artificial Sequence
  Synthetic oligonucleotide
gcgtaggatatggttagcaattacgggctc

SEQ ID NO: 312285 - DNA, 30 bp, Artificial Sequence
  Synthetic oligonucleotide
agcttgaacctaaacctaagcggggggctc

SEQ ID NO: 312286 - DNA, 30 bp, Artificial Sequence
  Synthetic oligonucleotide
caagaactcggcgggttaccaagtgggctc

SEQ ID NO: 312287 - DNA, 30 bp, Artificial Sequence
  Synthetic oligonucleotide
tcgcaattggcatgacaaccgcttgggctc

SEQ ID NO: 312288 - DNA, 30 bp, Artificial Sequence
  Synthetic oligonucleotide
ggaccggggtgttctatacattaatggctc

SEQ ID NO: 312289 - DNA, 30 bp, Artificial Sequence
  Synthetic oligonucleotide
tatcaacgtgccgttagccactcatggctc

SEQ ID NO: 312290 - DNA, 30 bp, Artificial Sequence
  Synthetic oligonucleotide
acagcgtataagtcacgaccaaactggctc

SEQ ID NO: 312291 - DNA, 30 bp, Artificial Sequence
  Synthetic oligonucleotide
agaactgggtagttattctcaaagtggctc

SEQ ID NO: 312292 - DNA, 30 bp, Artificial Sequence
  Synthetic oligonucleotide
aataacagccgttatttatgacgttggctc

SEQ ID NO: 312293 - DNA, 30 bp, Artificial Sequence
  Synthetic oligonucleotide
attcgagtgaagatagaactgcgttggctc

SEQ ID NO: 312294 - DNA, 30 bp, Artificial Sequence
  Synthetic oligonucleotide
acaattcgaattggcgagtagggttggctc

SEQ ID NO: 312295 - DNA, 30 bp, Artificial Sequence
  Synthetic oligonucleotide
tcggcgtaaagaaggcatccggtttggctc

SEQ ID NO: 312296 - DNA, 30 bp, Artificial Sequence
  Synthetic oligonucleotide
cagcagcaacctattagctgcatcatgctc

SEQ ID NO: 312297 - DNA, 30 bp, Artificial Sequence
  Synthetic oligonucleotide
gtcatgtgcaatagaggcgtattcatgctc

SEQ ID NO: 312298 - DNA, 30 bp, Artificial Sequence
  Synthetic oligonucleotide
ggtatcccgtatatcaatagtttcatgctc

SEQ ID NO: 312299 - DNA, 30 bp, Artificial Sequence
  Synthetic oligonucleotide
ccctggaaactaccttacgccgagatgctc

SEQ ID NO: 312300 - DNA, 30 bp, Artificial Sequence
  Synthetic oligonucleotide
ctcaacaaaaacgcgccggagacgatgctc

SEQ ID NO: 312301 - DNA, 30 bp, Artificial Sequence
  Synthetic oligonucleotide
atcgggatgaaaaaaccttagccgatgctc

SEQ ID NO: 312302 - DNA, 30 bp, Artificial Sequence
  Synthetic oligonucleotide
tcacacaccggtagcacttcagtgatgctc

SEQ ID NO: 312303 - DNA, 30 bp, Artificial Sequence
  Synthetic oligonucleotide
taggaatgcctaatttaagataatatgctc

SEQ ID NO: 312304 - DNA, 30 bp, Artificial Sequence
  Synthetic oligonucleotide
cgattaggggttaatcggaggcatatgctc

SEQ ID NO: 312305 - DNA, 30 bp, Artificial Sequence
  Synthetic oligonucleotide
ctgacatagattataaggtgaattatgctc

SEQ ID NO: 312306 - DNA, 30 bp, Artificial Sequence
  Synthetic oligonucleotide
tacccatatgcatttgtgaagctactgctc

SEQ ID NO: 312307 - DNA, 30 bp, Artificial Sequence
  Synthetic oligonucleotide
cgcacaaccaagcataagtgtggtctgctc

SEQ ID NO: 312308 - DNA, 30 bp, Artificial Sequence
  Synthetic oligonucleotide
gttcaagaagtccacgtaatggttctgctc

SEQ ID NO: 312309 - DNA, 30 bp, Artificial Sequence
  Synthetic oligonucleotide
aagtacctgaaccatttgtcactcgtgctc

SEQ ID NO: 312310 - DNA, 30 bp, Artificial Sequence
  Synthetic oligonucleotide
gatgggacggatcgatccacgccggtgctc

SEQ ID NO: 312311 - DNA, 30 bp, Artificial Sequence
  Synthetic oligonucleotide
ttcgtaagtcagaacagtttatcggtgctc

SEQ ID NO: 312312 - DNA, 30 bp, Artificial Sequence
  Synthetic oligonucleotide
agatgacgagattggcgagccatattgctc

SEQ ID NO: 312313 - DNA, 30 bp, Artificial Sequence
  Synthetic oligonucleotide
aaaggaatgccgtagaagcctcagttgctc

SEQ ID NO: 312314 - DNA, 30 bp, Artificial Sequence
  Synthetic oligonucleotide
gtggtagagtaaagcgtcgtgtagttgctc

SEQ ID NO: 312315 - DNA, 30 bp, Artificial Sequence
  Synthetic oligonucleotide
ataatacgccacaaatcttaatctttgctc

SEQ ID NO: 312316 - DNA, 30 bp, Artificial Sequence
  Synthetic oligonucleotide
gactttcaccaaacattaattggtttgctc

SEQ ID NO: 312317 - DNA, 30 bp, Artificial Sequence
  Synthetic oligonucleotide
atctaggggctagcggataagttaaatctc

SEQ ID NO: 312318 - DNA, 30 bp, Artificial Sequence
  Synthetic oligonucleotide
tcagaacctagcattgacactttaaatctc

SEQ ID NO: 312319 - DNA, 30 bp, Artificial Sequence
  Synthetic oligonucleotide
agacgacgattaggtagcgactataatctc

SEQ ID NO: 312320 - DNA, 30 bp, Artificial Sequence
  Synthetic oligonucleotide
ccgccaatagtagcgggatcgtgtaatctc

SEQ ID NO: 312321 - DNA, 30 bp, Artificial Sequence
  Synthetic oligonucleotide
tctgtgctcacatcgccggcccttaatctc

SEQ ID NO: 312322 - DNA, 30 bp, Artificial Sequence
  Synthetic oligonucleotide
agatgtggtatagatgaaagatgacatctc

SEQ ID NO: 312323 - DNA, 30 bp, Artificial Sequence
  Synthetic oligonucleotide
tagtcgcgttttaaaagctgaggccatctc

SEQ ID NO: 312324 - DNA, 30 bp, Artificial Sequence
  Synthetic oligonucleotide
cgccccgagcgacagtcaaatggccatctc

SEQ ID NO: 312325 - DNA, 30 bp, Artificial Sequence
  Synthetic oligonucleotide
aacaatcagggtggactcgtttggcatctc

SEQ ID NO: 312326 - DNA, 30 bp, Artificial Sequence
  Synthetic oligonucleotide
ggtcgacccgaattcggtaacctgcatctc

SEQ ID NO: 312327 - DNA, 30 bp, Artificial Sequence
  Synthetic oligonucleotide
atgtagccccaaattaggcaatttcatctc

SEQ ID NO: 312328 - DNA, 30 bp, Artificial Sequence
  Synthetic oligonucleotide
aagatttaccgtcgagcaagtgaagatctc

SEQ ID NO: 312329 - DNA, 30 bp, Artificial Sequence
  Synthetic oligonucleotide
acaaacgtgtgttcggccagatcagatctc

SEQ ID NO: 312330 - DNA, 30 bp, Artificial Sequence
  Synthetic oligonucleotide
gatagaacctcaccggtctacgaggatctc

SEQ ID NO: 312331 - DNA, 30 bp, Artificial Sequence
  Synthetic oligonucleotide
tgatcaattataggaatcgtttcatatctc

SEQ ID NO: 312332 - DNA, 30 bp, Artificial Sequence
  Synthetic oligonucleotide
aggcagaattataatgcgcaagtatatctc

SEQ ID NO: 312333 - DNA, 30 bp, Artificial Sequence
  Synthetic oligonucleotide
ccattatagtccgttaaacctacgtatctc

SEQ ID NO: 312334 - DNA, 30 bp, Artificial Sequence
  Synthetic oligonucleotide
cctccttatagcagtttgattcaaactctc

SEQ ID NO: 312335 - DNA, 30 bp, Artificial Sequence
  Synthetic oligonucleotide
ttggtttgccgatattaatactacactctc

SEQ ID NO: 312336 - DNA, 26 bp, Artificial Sequence
  Synthetic oligonucleotide
agcagacttactacaacctcactctc

SEQ ID NO: 312337 - DNA, 30 bp, Artificial Sequence
  Synthetic oligonucleotide
ggaagcgactgcattaggctccagactctc

SEQ ID NO: 312338 - DNA, 30 bp, Artificial Sequence
  Synthetic oligonucleotide
accgtaggaacggcttatctcctgactctc

SEQ ID NO: 312339 - DNA, 30 bp, Artificial Sequence
  Synthetic oligonucleotide
gcgtaggagcagagttggaatggtactctc

SEQ ID NO: 312340 - DNA, 30 bp, Artificial Sequence
  Synthetic oligonucleotide
ttggcgggtagccatttgggagcacctctc

SEQ ID NO: 312341 - DNA, 30 bp, Artificial Sequence
  Synthetic oligonucleotide
gctgtaatagcacgcgcgggctaccctctc

SEQ ID NO: 312342 - DNA, 30 bp, Artificial Sequence
  Synthetic oligonucleotide
agacagacgatcgttagaactggccctctc

SEQ ID NO: 312343 - DNA, 30 bp, Artificial Sequence
  Synthetic oligonucleotide
tcagtccgagttaatcagcaaaagcctctc

SEQ ID NO: 312344 - DNA, 30 bp, Artificial Sequence
  Synthetic oligonucleotide
atccacacatgtctcaatcgtgtagctctc

SEQ ID NO: 312345 - DNA, 30 bp, Artificial Sequence
  Synthetic oligonucleotide
tcctattatccacgtgtacatcactctctc

SEQ ID NO: 312346 - DNA, 30 bp, Artificial Sequence
  Synthetic oligonucleotide
ggaacgaatgaccgccgtcgcgactctctc

SEQ ID NO: 312347 - DNA, 30 bp, Artificial Sequence
  Synthetic oligonucleotide
aacaaataaaagcgcccctccagcagtctc

SEQ ID NO: 312348 - DNA, 30 bp, Artificial Sequence
  Synthetic oligonucleotide
ccagggcacggaaccccgaccaggagtctc

SEQ ID NO: 312349 - DNA, 30 bp, Artificial Sequence
  Synthetic oligonucleotide
cacagtgcgggacggagtcgtctgagtctc

SEQ ID NO: 312350 - DNA, 30 bp, Artificial Sequence
  Synthetic oligonucleotide
atgcgtaaagttgcatcctacgatagtctc

SEQ ID NO: 312351 - DNA, 30 bp, Artificial Sequence
  Synthetic oligonucleotide
gagccactacatgagaactctggtagtctc

SEQ ID NO: 312352 - DNA, 30 bp, Artificial Sequence
  Synthetic oligonucleotide
ggcgtgttacgtagccaaagggttagtctc

SEQ ID NO: 312353 - DNA, 30 bp, Artificial Sequence
  Synthetic oligonucleotide
tgtgaaatatgagcggcactattacgtctc

SEQ ID NO: 312354 - DNA, 30 bp, Artificial Sequence
  Synthetic oligonucleotide
tttgatactagaaaattaattgcccgtctc

SEQ ID NO: 312355 - DNA, 30 bp, Artificial Sequence
  Synthetic oligonucleotide
atgcctttgtaactctttatccagcgtctc

SEQ ID NO: 312356 - DNA, 30 bp, Artificial Sequence
  Synthetic oligonucleotide
ctctcgatatgcaggccgcatgctcgtctc

SEQ ID NO: 312357 - DNA, 30 bp, Artificial Sequence
  Synthetic oligonucleotide
gcggaagaatagagtactcacggtcgtctc

SEQ ID NO: 312358 - DNA, 30 bp, Artificial Sequence
  Synthetic oligonucleotide
acaagttaattgtcagagagctgtcgtctc

SEQ ID NO: 312359 - DNA, 30 bp, Artificial Sequence
  Synthetic oligonucleotide
aacggtcacgacagcatacacagaggtctc

SEQ ID NO: 312360 - DNA, 30 bp, Artificial Sequence
  Synthetic oligonucleotide
gatctacgatggtggcgccaccgaggtctc

SEQ ID NO: 312361 - DNA, 30 bp, Artificial Sequence
  Synthetic oligonucleotide
tcctcgtgccggtggttaaatggaggtctc

SEQ ID NO: 312362 - DNA, 30 bp, Artificial Sequence
  Synthetic oligonucleotide
cacggtaccggagtaaacgccatgggtctc

SEQ ID NO: 312363 - DNA, 30 bp, Artificial Sequence
  Synthetic oligonucleotide
ctctagaacaggactcgcggaattggtctc

SEQ ID NO: 312364 - DNA, 30 bp, Artificial Sequence
  Synthetic oligonucleotide
tcccaaatttcggaccgaccgacatgtctc

SEQ ID NO: 312365 - DNA, 30 bp, Artificial Sequence
  Synthetic oligonucleotide
ctacttcagactccggctaggcactgtctc

SEQ ID NO: 312366 - DNA, 30 bp, Artificial Sequence
  Synthetic oligonucleotide
ggagatatgcaagggatttcggtgtgtctc

SEQ ID NO: 312367 - DNA, 30 bp, Artificial Sequence
  Synthetic oligonucleotide
cgagtttggattggaaaagctaattgtctc

SEQ ID NO: 312368 - DNA, 30 bp, Artificial Sequence
  Synthetic oligonucleotide
gggggacccggatcgaattctgattgtctc

SEQ ID NO: 312369 - DNA, 31 bp, Artificial Sequence
  Synthetic oligonucleotide
tcgcgatctgttctagacattcaaaattctc

SEQ ID NO: 312370 - DNA, 30 bp, Artificial Sequence
  Synthetic oligonucleotide
taaccgccatatgcccgtaaacgaattctc

SEQ ID NO: 312371 - DNA, 30 bp, Artificial Sequence
  Synthetic oligonucleotide
tccgagcgcgggtcacatggtatgattctc

SEQ ID NO: 312372 - DNA, 30 bp, Artificial Sequence
  Synthetic oligonucleotide
caagacgccaggggcgcccaaattattctc

SEQ ID NO: 312373 - DNA, 30 bp, Artificial Sequence
  Synthetic oligonucleotide
aatgctgtccatcgtgccttacaacttctc

SEQ ID NO: 312374 - DNA, 30 bp, Artificial Sequence
  Synthetic oligonucleotide
gctgagttggaaatgccctctggacttctc

SEQ ID NO: 312375 - DNA, 30 bp, Artificial Sequence
  Synthetic oligonucleotide
ctgtagcgaataagaggctggatacttctc

SEQ ID NO: 312376 - DNA, 30 bp, Artificial Sequence
  Synthetic oligonucleotide
atgagttgtccgtggttcgggctccttctc

SEQ ID NO: 312377 - DNA, 30 bp, Artificial Sequence
  Synthetic oligonucleotide
tagccgaggctccgattaactagtcttctc

SEQ ID NO: 312378 - DNA, 30 bp, Artificial Sequence
  Synthetic oligonucleotide
cgtataacttacggtgccactatagttctc

SEQ ID NO: 312379 - DNA, 30 bp, Artificial Sequence
  Synthetic oligonucleotide
acagtaagcaaactgatggggaccgttctc

SEQ ID NO: 312380 - DNA, 30 bp, Artificial Sequence
  Synthetic oligonucleotide
tcgacacatgcgttttagattcgggttctc

SEQ ID NO: 312381 - DNA, 30 bp, Artificial Sequence
  Synthetic oligonucleotide
ggaggaggttgacgacagacgaatgttctc

SEQ ID NO: 312382 - DNA, 30 bp, Artificial Sequence
  Synthetic oligonucleotide
aaaccggttggattagttgataaaaaagtc

SEQ ID NO: 312383 - DNA, 30 bp, Artificial Sequence
  Synthetic oligonucleotide
aaagtcactcagcttgcggggtaaaaagtc

SEQ ID NO: 312384 - DNA, 30 bp, Artificial Sequence
  Synthetic oligonucleotide
cttcactaggagtatcgattcaggaaagtc

SEQ ID NO: 312385 - DNA, 30 bp, Artificial Sequence
  Synthetic oligonucleotide
gctgtgtaatgattcactctccggaaagtc

SEQ ID NO: 312386 - DNA, 30 bp, Artificial Sequence
  Synthetic oligonucleotide
tggttgtggacagacgcggagcaacaagtc

SEQ ID NO: 312387 - DNA, 30 bp, Artificial Sequence
  Synthetic oligonucleotide
aagtaggcacctggtgtggtgggacaagtc

SEQ ID NO: 312388 - DNA, 30 bp, Artificial Sequence
  Synthetic oligonucleotide
cactgtaccaatcacaattgctgacaagtc

SEQ ID NO: 312389 - DNA, 31 bp, Artificial Sequence
  Synthetic oligonucleotide
catgaggcaaaaagacttagggttacaagtc

SEQ ID NO: 312390 - DNA, 30 bp, Artificial Sequence
  Synthetic oligonucleotide
tgcttctccctgggggagtttggccaagtc

SEQ ID NO: 312391 - DNA, 30 bp, Artificial Sequence
  Synthetic oligonucleotide
ttagtcatcgcaactttgaaatagcaagtc

SEQ ID NO: 312392 - DNA, 30 bp, Artificial Sequence
  Synthetic oligonucleotide
tggtatacaccacggaacagcaacgaagtc

SEQ ID NO: 312393 - DNA, 30 bp, Artificial Sequence
  Synthetic oligonucleotide
agtacgtccgtggcaaataaaatggaagtc

SEQ ID NO: 312394 - DNA, 30 bp, Artificial Sequence
  Synthetic oligonucleotide
gcagatgctagagccctccgagcgtaagtc

SEQ ID NO: 312395 - DNA, 30 bp, Artificial Sequence
  Synthetic oligonucleotide
gcggttagactgcaatataagaggtaagtc

SEQ ID NO: 312396 - DNA, 30 bp, Artificial Sequence
  Synthetic oligonucleotide
cacgaataaaacaccggtagctcttaagtc

SEQ ID NO: 312397 - DNA, 30 bp, Artificial Sequence
  Synthetic oligonucleotide
caattagcgtatatgtgggggtcttaagtc

SEQ ID NO: 312398 - DNA, 30 bp, Artificial Sequence
  Synthetic oligonucleotide
agtctatgttgactacaggaattttaagtc

SEQ ID NO: 312399 - DNA, 30 bp, Artificial Sequence
  Synthetic oligonucleotide
atggcattaccgcccggaatcttttaagtc

SEQ ID NO: 312400 - DNA, 30 bp, Artificial Sequence
  Synthetic oligonucleotide
aacgccgcggagtgaagacaagtcacagtc

SEQ ID NO: 312401 - DNA, 30 bp, Artificial Sequence
  Synthetic oligonucleotide
aagtacctatactttacctctcatacagtc

SEQ ID NO: 312402 - DNA, 30 bp, Artificial Sequence
  Synthetic oligonucleotide
ttagagcccatggaccagcggcgcccagtc

SEQ ID NO: 312403 - DNA, 30 bp, Artificial Sequence
  Synthetic oligonucleotide
aaagaccccattgacacgggtcgcccagtc

SEQ ID NO: 312404 - DNA, 30 bp, Artificial Sequence
  Synthetic oligonucleotide
gggtcgacaggaccctggttcaatccagtc

SEQ ID NO: 312405 - DNA, 30 bp, Artificial Sequence
  Synthetic oligonucleotide
gggacggggttacaaaagaggggtccagtc

SEQ ID NO: 312406 - DNA, 30 bp, Artificial Sequence
  Synthetic oligonucleotide
cgagttgtagccttaacttaaattccagtc

SEQ ID NO: 312407 - DNA, 30 bp, Artificial Sequence
  Synthetic oligonucleotide
aatagcaattaaagcgtcttccaagcagtc

SEQ ID NO: 312408 - DNA, 30 bp, Artificial Sequence
  Synthetic oligonucleotide
ttcatcttgaattagctctctgcggcagtc

SEQ ID NO: 312409 - DNA, 30 bp, Artificial Sequence
  Synthetic oligonucleotide
agacggcattaaactgtgctcggggcagtc

SEQ ID NO: 312410 - DNA, 30 bp, Artificial Sequence
  Synthetic oligonucleotide
agtcgctcgagtagtgatcagctatcagtc

SEQ ID NO: 312411 - DNA, 30 bp, Artificial Sequence
  Synthetic oligonucleotide
tagttaagatattagctgggattatcagtc

SEQ ID NO: 312412 - DNA, 30 bp, Artificial Sequence
  Synthetic oligonucleotide
attctttcaacaagggaataacgctcagtc

SEQ ID NO: 312413 - DNA, 30 bp, Artificial Sequence
  Synthetic oligonucleotide
actatatgaacctagggctcgccttcagtc

SEQ ID NO: 312414 - DNA, 30 bp, Artificial Sequence
  Synthetic oligonucleotide
gatgtatatactgagtttcgagaaagagtc

SEQ ID NO: 312415 - DNA, 30 bp, Artificial Sequence
  Synthetic oligonucleotide
cttgtgcacgggcgtactctaggaagagtc

SEQ ID NO: 312416 - DNA, 30 bp, Artificial Sequence
  Synthetic oligonucleotide
ggcgcggactcaagtcgtcacggaagagtc

SEQ ID NO: 312417 - DNA, 30 bp, Artificial Sequence
  Synthetic oligonucleotide
gtatagaactgtattcaggtagtaagagtc

SEQ ID NO: 312418 - DNA, 30 bp, Artificial Sequence
  Synthetic oligonucleotide
ttggaaaaacatacggggccagatagagtc

SEQ ID NO: 312419 - DNA, 30 bp, Artificial Sequence
  Synthetic oligonucleotide
agccaatttatcaacagacatggtagagtc

SEQ ID NO: 312420 - DNA, 30 bp, Artificial Sequence
  Synthetic oligonucleotide
gtcaggtctaaccgggcgggtgttagagtc

SEQ ID NO: 312421 - DNA, 30 bp, Artificial Sequence
  Synthetic oligonucleotide
gaaagtcaatgattggctgtcaaccgagtc

SEQ ID NO: 312422 - DNA, 30 bp, Artificial Sequence
  Synthetic oligonucleotide
gacgattgtttgcgtttcctagaccgagtc

SEQ ID NO: 312423 - DNA, 30 bp, Artificial Sequence
  Synthetic oligonucleotide
gaatcgtgcactttatgcagcccccgagtc

SEQ ID NO: 312424 - DNA, 30 bp, Artificial Sequence
  Synthetic oligonucleotide
tttaggcgtagattattggcctcccgagtc

SEQ ID NO: 312425 - DNA, 30 bp, Artificial Sequence
  Synthetic oligonucleotide
gtgcattattaataagcattagcgcgagtc

SEQ ID NO: 312426 - DNA, 30 bp, Artificial Sequence
  Synthetic oligonucleotide
aagcgctccagattagtgttcacaggagtc

SEQ ID NO: 312427 - DNA, 30 bp, Artificial Sequence
  Synthetic oligonucleotide
gacattaggcggcatcactgatccggagtc

SEQ ID NO: 312428 - DNA, 30 bp, Artificial Sequence
  Synthetic oligonucleotide
attcgagatacttcaagtacccgcggagtc

SEQ ID NO: 312429 - DNA, 30 bp, Artificial Sequence
  Synthetic oligonucleotide
ttgttactaatcgctatctgtgatggagtc

SEQ ID NO: 312430 - DNA, 30 bp, Artificial Sequence
  Synthetic oligonucleotide
ggtactactaatgactggtgatatggagtc

SEQ ID NO: 312431 - DNA, 30 bp, Artificial Sequence
  Synthetic oligonucleotide
tctctgataatcttggaaggatgtggagtc

SEQ ID NO: 312432 - DNA, 30 bp, Artificial Sequence
  Synthetic oligonucleotide
taagaccccggcgtgagcggtaaatgagtc

SEQ ID NO: 312433 - DNA, 30 bp, Artificial Sequence
  Synthetic oligonucleotide
gacgacgacgaaggctcatttggatgagtc

SEQ ID NO: 312434 - DNA, 30 bp, Artificial Sequence
  Synthetic oligonucleotide
gtagtccaatagttgctggcgagctgagtc

SEQ ID NO: 312435 - DNA, 30 bp, Artificial Sequence
  Synthetic oligonucleotide
caatcagttcgaccttatttattctgagtc

SEQ ID NO: 312436 - DNA, 30 bp, Artificial Sequence
  Synthetic oligonucleotide
acccccttgaatttcaatgaccagtgagtc

SEQ ID NO: 312437 - DNA, 30 bp, Artificial Sequence
  Synthetic oligonucleotide
agggaggtggagtgtctccacttttgagtc

SEQ ID NO: 312438 - DNA, 30 bp, Artificial Sequence
  Synthetic oligonucleotide
tacggatccgcgattagaaggtacatagtc

SEQ ID NO: 312439 - DNA, 30 bp, Artificial Sequence
  Synthetic oligonucleotide
attgagctaaaagtgccgaagccgatagtc

SEQ ID NO: 312440 - DNA, 30 bp, Artificial Sequence
  Synthetic oligonucleotide
aacctgggtgtcccggttacggatatagtc

SEQ ID NO: 312441 - DNA, 30 bp, Artificial Sequence
  Synthetic oligonucleotide
ggatcaataggattgttgcatgctatagtc

SEQ ID NO: 312442 - DNA, 30 bp, Artificial Sequence
  Synthetic oligonucleotide
aagtaacaaaatcttccagaacttatagtc

SEQ ID NO: 312443 - DNA, 30 bp, Artificial Sequence
  Synthetic oligonucleotide
ggtgctttatgtgctcaacgaccactagtc

SEQ ID NO: 312444 - DNA, 30 bp, Artificial Sequence
  Synthetic oligonucleotide
gaacggacgacaggcaccgttttactagtc

SEQ ID NO: 312445 - DNA, 30 bp, Artificial Sequence
  Synthetic oligonucleotide
attggaggccattgcggttagcgcctagtc

SEQ ID NO: 312446 - DNA, 30 bp, Artificial Sequence
  Synthetic oligonucleotide
attcgacgtgcgtgaaaaagcatcctagtc

SEQ ID NO: 312447 - DNA, 30 bp, Artificial Sequence
  Synthetic oligonucleotide
caattgtacgagatctatttatatctagtc

SEQ ID NO: 312448 - DNA, 30 bp, Artificial Sequence
  Synthetic oligonucleotide
ggcaaacttcttcaattctctcgtctagtc

SEQ ID NO: 312449 - DNA, 30 bp, Artificial Sequence
  Synthetic oligonucleotide
tgggtggtgcttagaatacacattctagtc

SEQ ID NO: 312450 - DNA, 30 bp, Artificial Sequence
  Synthetic oligonucleotide
tatctcagaccgaagagcgcagaagtagtc

SEQ ID NO: 312451 - DNA, 30 bp, Artificial Sequence
  Synthetic oligonucleotide
gactttacgcgagaggggctgcccgtagtc

SEQ ID NO: 312452 - DNA, 30 bp, Artificial Sequence
  Synthetic oligonucleotide
aatacataggtgccaagcgcagtcgtagtc

SEQ ID NO: 312453 - DNA, 30 bp, Artificial Sequence
  Synthetic oligonucleotide
ctttatatacgctcgtgtaatcttgtagtc

SEQ ID NO: 312454 - DNA, 30 bp, Artificial Sequence
  Synthetic oligonucleotide
aaacaaggatgtcgatgtccccaattagtc

SEQ ID NO: 312455 - DNA, 30 bp, Artificial Sequence
  Synthetic oligonucleotide
gatcggacatttcataaggtaccattagtc

SEQ ID NO: 312456 - DNA, 30 bp, Artificial Sequence
  Synthetic oligonucleotide
gtgaacgcaaaagccatgtaattcttagtc

SEQ ID NO: 312457 - DNA, 30 bp, Artificial Sequence
  Synthetic oligonucleotide
gggaactaaactcaggcgctgtagttagtc

SEQ ID NO: 312458 - DNA, 30 bp, Artificial Sequence
  Synthetic oligonucleotide
tgtccaatgaaagtaataagtatgttagtc

SEQ ID NO: 312459 - DNA, 31 bp, Artificial Sequence
  Synthetic oligonucleotide
tctatactctttgcatctttgcctgttagtc

SEQ ID NO: 312460 - DNA, 30 bp, Artificial Sequence
  Synthetic oligonucleotide
cctggcggcgcttcgagtgcgcctttagtc

SEQ ID NO: 312461 - DNA, 30 bp, Artificial Sequence
  Synthetic oligonucleotide
gttgatgacgtagtctcaccgcgtttagtc

SEQ ID NO: 312462 - DNA, 30 bp, Artificial Sequence
  Synthetic oligonucleotide
ggagacccgacctgatctggcattttagtc

SEQ ID NO: 312463 - DNA, 30 bp, Artificial Sequence
  Synthetic oligonucleotide
atgtaagagcccatgaggcatagaaacgtc

SEQ ID NO: 312464 - DNA, 30 bp, Artificial Sequence
  Synthetic oligonucleotide
aggcctttgaggtcacacatcgcacacgtc

SEQ ID NO: 312465 - DNA, 30 bp, Artificial Sequence
  Synthetic oligonucleotide
tgagatcgtgagaccccatgggcccacgtc

SEQ ID NO: 312466 - DNA, 30 bp, Artificial Sequence
  Synthetic oligonucleotide
tatgacatgggtactgtcctgggccacgtc

SEQ ID NO: 312467 - DNA, 30 bp, Artificial Sequence
  Synthetic oligonucleotide
cgggtcaatccggctacaatgtcagacgtc

SEQ ID NO: 312468 - DNA, 30 bp, Artificial Sequence
  Synthetic oligonucleotide
ctcatggttttcttgaattcggacgacgtc

SEQ ID NO: 312469 - DNA, 30 bp, Artificial Sequence
  Synthetic oligonucleotide
tcgtatgtagcaccggggctacgtgacgtc

SEQ ID NO: 312470 - DNA, 30 bp, Artificial Sequence
  Synthetic oligonucleotide
tgtccgtatgcagtggtatcgggtgacgtc

SEQ ID NO: 312471 - DNA, 30 bp, Artificial Sequence
  Synthetic oligonucleotide
ggttggggtactttacgatctagatacgtc

SEQ ID NO: 312472 - DNA, 30 bp, Artificial Sequence
  Synthetic oligonucleotide
cggttgaaattctccaaattatgatacgtc

SEQ ID NO: 312473 - DNA, 30 bp, Artificial Sequence
  Synthetic oligonucleotide
cagaattattgttcgtaagtggtatacgtc

SEQ ID NO: 312474 - DNA, 30 bp, Artificial Sequence
  Synthetic oligonucleotide
attaagttgaatatcctgactgactacgtc

SEQ ID NO: 312475 - DNA, 30 bp, Artificial Sequence
  Synthetic oligonucleotide
tataacttactaggggctaattcctacgtc

SEQ ID NO: 312476 - DNA, 30 bp, Artificial Sequence
  Synthetic oligonucleotide
cggccattgacctattgctattcctacgtc

SEQ ID NO: 312477 - DNA, 30 bp, Artificial Sequence
  Synthetic oligonucleotide
ttgtggtaccgctcacctataccgtacgtc

SEQ ID NO: 312478 - DNA, 30 bp, Artificial Sequence
  Synthetic oligonucleotide
taaaggcccattggttggacctattacgtc

SEQ ID NO: 312479 - DNA, 30 bp, Artificial Sequence
  Synthetic oligonucleotide
ctctagagccagtattaatagcggaccgtc

SEQ ID NO: 312480 - DNA, 30 bp, Artificial Sequence
  Synthetic oligonucleotide
acatcgaagcggaacgaggaaagtaccgtc

SEQ ID NO: 312481 - DNA, 30 bp, Artificial Sequence
  Synthetic oligonucleotide
cccctaggcgcgtccgttccacgccccgtc

SEQ ID NO: 312482 - DNA, 30 bp, Artificial Sequence
  Synthetic oligonucleotide
gagaaagtgtagacttcgagttcgcccgtc

SEQ ID NO: 312483 - DNA, 30 bp, Artificial Sequence
  Synthetic oligonucleotide
ggagaaggccgtggaaacacatggcccgtc

SEQ ID NO: 312484 - DNA, 30 bp, Artificial Sequence
  Synthetic oligonucleotide
ttcaccggtctgattgcaggttgagccgtc

SEQ ID NO: 312485 - DNA, 30 bp, Artificial Sequence
  Synthetic oligonucleotide
cttcggaggtgcaatgtcatattggccgtc

SEQ ID NO: 312486 - DNA, 30 bp, Artificial Sequence
  Synthetic oligonucleotide
gctcagacagaggggtggaatcctgccgtc

SEQ ID NO: 312487 - DNA, 30 bp, Artificial Sequence
  Synthetic oligonucleotide
tgtacgacggaggcctcgccatgtgccgtc

SEQ ID NO: 312488 - DNA, 30 bp, Artificial Sequence
  Synthetic oligonucleotide
gtatggcagtactatacacacaactccgtc

SEQ ID NO: 312489 - DNA, 30 bp, Artificial Sequence
  Synthetic oligonucleotide
cggtggggctcgtgcgggtctcagtccgtc

SEQ ID NO: 312490 - DNA, 30 bp, Artificial Sequence
  Synthetic oligonucleotide
ctctgcaccagtgcgtcagtaatgtccgtc

SEQ ID NO: 312491 - DNA, 30 bp, Artificial Sequence
  Synthetic oligonucleotide
ttacctgttttaaaaccgtggataagcgtc

SEQ ID NO: 312492 - DNA, 30 bp, Artificial Sequence
  Synthetic oligonucleotide
acacaatcgaaggccttgccgggcagcgtc

SEQ ID NO: 312493 - DNA, 30 bp, Artificial Sequence
  Synthetic oligonucleotide
aaaggaagttgtgtgcgccaccggagcgtc

SEQ ID NO: 312494 - DNA, 30 bp, Artificial Sequence
  Synthetic oligonucleotide
tacccagaaagggccaacaatcatagcgtc

SEQ ID NO: 312495 - DNA, 30 bp, Artificial Sequence
  Synthetic oligonucleotide
gccaagtcgtaagaaaatttccttagcgtc

SEQ ID NO: 312496 - DNA, 30 bp, Artificial Sequence
  Synthetic oligonucleotide
atgcgttcagatcgccccatctttagcgtc

SEQ ID NO: 312497 - DNA, 30 bp, Artificial Sequence
  Synthetic oligonucleotide
gtggtaagccggtcgacacggtcccgcgtc

SEQ ID NO: 312498 - DNA, 30 bp, Artificial Sequence
  Synthetic oligonucleotide
cggaaggcaggctaggggacgaggcgcgtc

SEQ ID NO: 312499 - DNA, 30 bp, Artificial Sequence
  Synthetic oligonucleotide
acctggaaatgcgtcagatgccggcgcgtc

SEQ ID NO: 312500 - DNA, 30 bp, Artificial Sequence
  Synthetic oligonucleotide
actactcatcgcacgcctacatatcgcgtc

SEQ ID NO: 312501 - DNA, 30 bp, Artificial Sequence
  Synthetic oligonucleotide
taataaactgcgctgatccacgctcgcgtc

SEQ ID NO: 312502 - DNA, 30 bp, Artificial Sequence
  Synthetic oligonucleotide
aacaatgtatttgcaacaaaacgtcgcgtc

SEQ ID NO: 312503 - DNA, 30 bp, Artificial Sequence
  Synthetic oligonucleotide
acagggctcgcccggtcctaacaaggcgtc

SEQ ID NO: 312504 - DNA, 30 bp, Artificial Sequence
  Synthetic oligonucleotide
atgcaggcatgatgattctggccaggcgtc

SEQ ID NO: 312505 - DNA, 30 bp, Artificial Sequence
  Synthetic oligonucleotide
gttttaagtcacgctcatggtcagggcgtc

SEQ ID NO: 312506 - DNA, 30 bp, Artificial Sequence
  Synthetic oligonucleotide
gcgccagtaagacgacggcttattggcgtc

SEQ ID NO: 312507 - DNA, 30 bp, Artificial Sequence
  Synthetic oligonucleotide
atgtaacgatatagacgaatgtttggcgtc

SEQ ID NO: 312508 - DNA, 30 bp, Artificial Sequence
  Synthetic oligonucleotide
aagagtctggtcgtaagacgaaaatgcgtc

SEQ ID NO: 312509 - DNA, 30 bp, Artificial Sequence
  Synthetic oligonucleotide
cttgtcatgactcgatcaagcaagtgcgtc

SEQ ID NO: 312510 - DNA, 30 bp, Artificial Sequence
  Synthetic oligonucleotide
gattccacacagtcagtagcctattgcgtc

SEQ ID NO: 312511 - DNA, 30 bp, Artificial Sequence
  Synthetic oligonucleotide
taaaacattgttgtaatattctattgcgtc

SEQ ID NO: 312512 - DNA, 30 bp, Artificial Sequence
  Synthetic oligonucleotide
cgagacacgggtcacgcaaacacttgcgtc

SEQ ID NO: 312513 - DNA, 30 bp, Artificial Sequence
  Synthetic oligonucleotide
gatccgattaaagagagcaaatcttgcgtc

SEQ ID NO: 312514 - DNA, 30 bp, Artificial Sequence
  Synthetic oligonucleotide
attcggaaagagtgcgcggttaacatcgtc

SEQ ID NO: 312515 - DNA, 30 bp, Artificial Sequence
  Synthetic oligonucleotide
accagcgatcacgcgggaagtaggatcgtc

SEQ ID NO: 312516 - DNA, 30 bp, Artificial Sequence
  Synthetic oligonucleotide
ggtcataattctaacttctcggctatcgtc

SEQ ID NO: 312517 - DNA, 30 bp, Artificial Sequence
  Synthetic oligonucleotide
caacaggaactccggtcgtttgcactcgtc

SEQ ID NO: 312518 - DNA, 30 bp, Artificial Sequence
  Synthetic oligonucleotide
caagtgagattagaataatggggcctcgtc

SEQ ID NO: 312519 - DNA, 30 bp, Artificial Sequence
  Synthetic oligonucleotide
gacagcgagttcttcctgtctagagtcgtc

SEQ ID NO: 312520 - DNA, 27 bp, Artificial Sequence
  Synthetic oligonucleotide
ataatctacaggccacggatcgtcgtc

SEQ ID NO: 312521 - DNA, 30 bp, Artificial Sequence
  Synthetic oligonucleotide
taataagtctacccggaaaggccggtcgtc

SEQ ID NO: 312522 - DNA, 30 bp, Artificial Sequence
  Synthetic oligonucleotide
cagacaacacccgataagcaggctgtcgtc

SEQ ID NO: 312523 - DNA, 30 bp, Artificial Sequence
  Synthetic oligonucleotide
ctaactatcccaggtcaggccagtgtcgtc

SEQ ID NO: 312524 - DNA, 30 bp, Artificial Sequence
  Synthetic oligonucleotide
cagactcagtctaattctacctacttcgtc

SEQ ID NO: 312525 - DNA, 30 bp, Artificial Sequence
  Synthetic oligonucleotide
gtctcgttggtcgtctaaggtggcttcgtc

SEQ ID NO: 312526 - DNA, 30 bp, Artificial Sequence
  Synthetic oligonucleotide
gttgaacaagtaagtatttatgcgttcgtc

SEQ ID NO: 312527 - DNA, 30 bp, Artificial Sequence
  Synthetic oligonucleotide
gttaggttgaacctggcgttgtgtttcgtc

SEQ ID NO: 312528 - DNA, 30 bp, Artificial Sequence
  Synthetic oligonucleotide
acccctatagctccctgtcggaaaaaggtc

SEQ ID NO: 312529 - DNA, 30 bp, Artificial Sequence
  Synthetic oligonucleotide
aacttagacctaagacactcgaacaaggtc

SEQ ID NO: 312530 - DNA, 30 bp, Artificial Sequence
  Synthetic oligonucleotide
gttaggagctcgttcgataaacgcaaggtc

SEQ ID NO: 312531 - DNA, 30 bp, Artificial Sequence
  Synthetic oligonucleotide
agatgctcgtatattcctagcacgaaggtc

SEQ ID NO: 312532 - DNA, 30 bp, Artificial Sequence
  Synthetic oligonucleotide
ttagccgaccctggcaaagatacgaaggtc

SEQ ID NO: 312533 - DNA, 30 bp, Artificial Sequence
  Synthetic oligonucleotide
tacgctgataggaattccacagggaaggtc

SEQ ID NO: 312534 - DNA, 30 bp, Artificial Sequence
  Synthetic oligonucleotide
ctaagcgatgctactatttctgtgaaggtc

SEQ ID NO: 312535 - DNA, 30 bp, Artificial Sequence
  Synthetic oligonucleotide
cagtgtcattccttgcgagggacacaggtc

SEQ ID NO: 312536 - DNA, 30 bp, Artificial Sequence
  Synthetic oligonucleotide
aggagatgtctctaaccctgccatcaggtc

SEQ ID NO: 312537 - DNA, 30 bp, Artificial Sequence
  Synthetic oligonucleotide
cttaagactgaattgttcgcgcgtcaggtc

SEQ ID NO: 312538 - DNA, 29 bp, Artificial Sequence
  Synthetic oligonucleotide
actaagctgcatcttcgagaggtcaggtc

SEQ ID NO: 312539 - DNA, 30 bp, Artificial Sequence
  Synthetic oligonucleotide
ggatagtttcggcatagagaggaagaggtc

SEQ ID NO: 312540 - DNA, 30 bp, Artificial Sequence
  Synthetic oligonucleotide
gcgagcgctctgggtttaaccagcgaggtc

SEQ ID NO: 312541 - DNA, 30 bp, Artificial Sequence
  Synthetic oligonucleotide
tgaatgtttcgttcaacggttacggaggtc

SEQ ID NO: 312542 - DNA, 30 bp, Artificial Sequence
  Synthetic oligonucleotide
gaattgactaggccgaacttcctggaggtc

SEQ ID NO: 312543 - DNA, 30 bp, Artificial Sequence
  Synthetic oligonucleotide
agatgaccggccaccttactaggctaggtc

SEQ ID NO: 312544 - DNA, 30 bp, Artificial Sequence
  Synthetic oligonucleotide
cgggagccctctcagtcagctatctaggtc

SEQ ID NO: 312545 - DNA, 30 bp, Artificial Sequence
  Synthetic oligonucleotide
ctgtgcattaaatgatttcgtatctaggtc

SEQ ID NO: 312546 - DNA, 30 bp, Artificial Sequence
  Synthetic oligonucleotide
taaggagttcgttagcctcggttgtaggtc

SEQ ID NO: 312547 - DNA, 30 bp, Artificial Sequence
  Synthetic oligonucleotide
cagctattctgttcccagtatgtttaggtc

SEQ ID NO: 312548 - DNA, 30 bp, Artificial Sequence
  Synthetic oligonucleotide
ttggcaagtccggtaggtagcagaacggtc

SEQ ID NO: 312549 - DNA, 30 bp, Artificial Sequence
  Synthetic oligonucleotide
caatacattacgttagctccagtcacggtc

SEQ ID NO: 312550 - DNA, 30 bp, Artificial Sequence
  Synthetic oligonucleotide
actgccggtccgttgaatagcttgacggtc

SEQ ID NO: 312551 - DNA, 30 bp, Artificial Sequence
  Synthetic oligonucleotide
cgctttaaaggggcccgcgaatatacggtc

SEQ ID NO: 312552 - DNA, 30 bp, Artificial Sequence
  Synthetic oligonucleotide
ttgacgcgtctaggccaagactatacggtc

SEQ ID NO: 312553 - DNA, 30 bp, Artificial Sequence
  Synthetic oligonucleotide
aacccaactcgctcaatagaccgtacggtc

SEQ ID NO: 312554 - DNA, 30 bp, Artificial Sequence
  Synthetic oligonucleotide
gtatcaacacatgtgtatctgcgtacggtc

SEQ ID NO: 312555 - DNA, 30 bp, Artificial Sequence
  Synthetic oligonucleotide
aaaagtaaagaagctctttgtagaccggtc

SEQ ID NO: 312556 - DNA, 30 bp, Artificial Sequence
  Synthetic oligonucleotide
ctgtagtgtataattcaccacataccggtc

SEQ ID NO: 312557 - DNA, 30 bp, Artificial Sequence
  Synthetic oligonucleotide
ttccatcattgggtgagccccataccggtc

SEQ ID NO: 312558 - DNA, 30 bp, Artificial Sequence
  Synthetic oligonucleotide
ttgccagtgaaggcgctcgatataccggtc

SEQ ID NO: 312559 - DNA, 30 bp, Artificial Sequence
  Synthetic oligonucleotide
cacctacgtgatagaggtagggcgccggtc

SEQ ID NO: 312560 - DNA, 30 bp, Artificial Sequence
  Synthetic oligonucleotide
aaaaatacgagtcaagtcaacgggccggtc

SEQ ID NO: 312561 - DNA, 30 bp, Artificial Sequence
  Synthetic oligonucleotide
caccaagtgcctctcccactattgccggtc

SEQ ID NO: 312562 - DNA, 30 bp, Artificial Sequence
  Synthetic oligonucleotide
ggacaccttagcgtggcttctgatccggtc

SEQ ID NO: 312563 - DNA, 30 bp, Artificial Sequence
  Synthetic oligonucleotide
gggcttggacggaccgtagtctaggcggtc

SEQ ID NO: 312564 - DNA, 30 bp, Artificial Sequence
  Synthetic oligonucleotide
gttcagcgctaaatccttcacatggcggtc

SEQ ID NO: 312565 - DNA, 30 bp, Artificial Sequence
  Synthetic oligonucleotide
cgcagagtatcactcccgttggtggcggtc

SEQ ID NO: 312566 - DNA, 30 bp, Artificial Sequence
  Synthetic oligonucleotide
actagggaatattggggcgtcgatgcggtc

SEQ ID NO: 312567 - DNA, 30 bp, Artificial Sequence
  Synthetic oligonucleotide
acgctggagatcggtcgatccagtgcggtc

SEQ ID NO: 312568 - DNA, 30 bp, Artificial Sequence
  Synthetic oligonucleotide
cggcggattaacttgtggaccgaatcggtc

SEQ ID NO: 312569 - DNA, 30 bp, Artificial Sequence
  Synthetic oligonucleotide
gagttgggtacagtattcgcgacatcggtc

SEQ ID NO: 312570 - DNA, 30 bp, Artificial Sequence
  Synthetic oligonucleotide
actgaagcgcgtcggggcgcggggtcggtc

SEQ ID NO: 312571 - DNA, 30 bp, Artificial Sequence
  Synthetic oligonucleotide
tgggcttcgttatacactatggattcggtc

SEQ ID NO: 312572 - DNA, 30 bp, Artificial Sequence
  Synthetic oligonucleotide
gcggctggaagcgatccactgtacagggtc

SEQ ID NO: 312573 - DNA, 30 bp, Artificial Sequence
  Synthetic oligonucleotide
agtggtaagattacatgtcgtcccagggtc

SEQ ID NO: 312574 - DNA, 30 bp, Artificial Sequence
  Synthetic oligonucleotide
ttgttgcgaatttcttgtagaacgagggtc

SEQ ID NO: 312575 - DNA, 30 bp, Artificial Sequence
  Synthetic oligonucleotide
tcggcggaactcattttaatagcacgggtc

SEQ ID NO: 312576 - DNA, 30 bp, Artificial Sequence
  Synthetic oligonucleotide
agaggtatggtctatccggcagcgcgggtc

SEQ ID NO: 312577 - DNA, 30 bp, Artificial Sequence
  Synthetic oligonucleotide
ctcaggtaagtaatacaaattctgcgggtc

SEQ ID NO: 312578 - DNA, 30 bp, Artificial Sequence
  Synthetic oligonucleotide
ttgagataagactccgcagaagatcgggtc

SEQ ID NO: 312579 - DNA, 30 bp, Artificial Sequence
  Synthetic oligonucleotide
ggcattcgccattggagactagctcgggtc

SEQ ID NO: 312580 - DNA, 30 bp, Artificial Sequence
  Synthetic oligonucleotide
ggggtagccctagcattccgcggtcgggtc

SEQ ID NO: 312581 - DNA, 30 bp, Artificial Sequence
  Synthetic oligonucleotide
ggtggcagcaaacccgtagcttaaggggtc

SEQ ID NO: 312582 - DNA, 30 bp, Artificial Sequence
  Synthetic oligonucleotide
caatggctgtgggtgctttgcgctggggtc

SEQ ID NO: 312583 - DNA, 30 bp, Artificial Sequence
  Synthetic oligonucleotide
acaggacccgacgagcgtggtatctgggtc

SEQ ID NO: 312584 - DNA, 30 bp, Artificial Sequence
  Synthetic oligonucleotide
ctgctcgttctttcaggggctagaatggtc

SEQ ID NO: 312585 - DNA, 30 bp, Artificial Sequence
  Synthetic oligonucleotide
tctggtaagcgtccaattggtttaatggtc

SEQ ID NO: 312586 - DNA, 30 bp, Artificial Sequence
  Synthetic oligonucleotide
atgttatgcacttaaaatttggccatggtc

SEQ ID NO: 312587 - DNA, 30 bp, Artificial Sequence
  Synthetic oligonucleotide
taactatgggtatggtaggcgatcatggtc

SEQ ID NO: 312588 - DNA, 30 bp, Artificial Sequence
  Synthetic oligonucleotide
ggctatgccccgaatactaggctactggtc

SEQ ID NO: 312589 - DNA, 30 bp, Artificial Sequence
  Synthetic oligonucleotide
aataatagcgagttcgttcgcgtactggtc

SEQ ID NO: 312590 - DNA, 30 bp, Artificial Sequence
  Synthetic oligonucleotide
tcccgcactgtctaaaaaagcgtcctggtc

SEQ ID NO: 312591 - DNA, 30 bp, Artificial Sequence
  Synthetic oligonucleotide
attctgaataggtaaagttacacgctggtc

SEQ ID NO: 312592 - DNA, 30 bp, Artificial Sequence
  Synthetic oligonucleotide
ggggacgaccgggtttgataggccgtggtc

SEQ ID NO: 312593 - DNA, 29 bp, Artificial Sequence
  Synthetic oligonucleotide
gcaacgaaataaacagcccttccgtggtc

SEQ ID NO: 312594 - DNA, 30 bp, Artificial Sequence
  Synthetic oligonucleotide
cgtggccattgagtgactgctgaattggtc

SEQ ID NO: 312595 - DNA, 30 bp, Artificial Sequence
  Synthetic oligonucleotide
tactaaccttgcatccagggatgattggtc

SEQ ID NO: 312596 - DNA, 30 bp, Artificial Sequence
  Synthetic oligonucleotide
ggttgaacgggaatctagctaggcttggtc

SEQ ID NO: 312597 - DNA, 30 bp, Artificial Sequence
  Synthetic oligonucleotide
agtccttcgagactccggaactcgttggtc

SEQ ID NO: 312598 - DNA, 30 bp, Artificial Sequence
  Synthetic oligonucleotide
ggagaatgtagacagttagccgatttggtc

SEQ ID NO: 312599 - DNA, 30 bp, Artificial Sequence
  Synthetic oligonucleotide
aaggctccggaggcgcaagcggatttggtc

SEQ ID NO: 312600 - DNA, 30 bp, Artificial Sequence
  Synthetic oligonucleotide
taaaactgatgggcaaatcaatatttggtc

SEQ ID NO: 312601 - DNA, 30 bp, Artificial Sequence
  Synthetic oligonucleotide
atcgctgcactgctgcacatttatttggtc

SEQ ID NO: 312602 - DNA, 30 bp, Artificial Sequence
  Synthetic oligonucleotide
gtacgcatttcgaccaaggataaaaatgtc

SEQ ID NO: 312603 - DNA, 30 bp, Artificial Sequence
  Synthetic oligonucleotide
gtggtaggtaacgccccccggggaaatgtc

SEQ ID NO: 312604 - DNA, 30 bp, Artificial Sequence
  Synthetic oligonucleotide
aacgcgtgtttcacgattaaatcgaatgtc

SEQ ID NO: 312605 - DNA, 30 bp, Artificial Sequence
  Synthetic oligonucleotide
tcgctttaccatttgcagcacgaccatgtc

SEQ ID NO: 312606 - DNA, 30 bp, Artificial Sequence
  Synthetic oligonucleotide
ataacaagggccataacttaagcccatgtc

SEQ ID NO: 312607 - DNA, 30 bp, Artificial Sequence
  Synthetic oligonucleotide
gtcaatgaaactttgacgagactccatgtc

SEQ ID NO: 312608 - DNA, 30 bp, Artificial Sequence
  Synthetic oligonucleotide
aaagttaccatttttagtcttaagcatgtc

SEQ ID NO: 312609 - DNA, 30 bp, Artificial Sequence
  Synthetic oligonucleotide
tgccttattggggctagtgacgatcatgtc

SEQ ID NO: 312610 - DNA, 30 bp, Artificial Sequence
  Synthetic oligonucleotide
tcaacgattattaagactccttatcatgtc

SEQ ID NO: 312611 - DNA, 30 bp, Artificial Sequence
  Synthetic oligonucleotide
gcacgacattgagatgcccgtactcatgtc

SEQ ID NO: 312612 - DNA, 30 bp, Artificial Sequence
  Synthetic oligonucleotide
gtaattaggattcggcgtaaatgtcatgtc

SEQ ID NO: 312613 - DNA, 30 bp, Artificial Sequence
  Synthetic oligonucleotide
cgcaacatctgtatcatagaaggagatgtc

SEQ ID NO: 312614 - DNA, 30 bp, Artificial Sequence
  Synthetic oligonucleotide
ctaagatgagtcaagctggcgtgagatgtc

SEQ ID NO: 312615 - DNA, 30 bp, Artificial Sequence
  Synthetic oligonucleotide
tcagccacagcagaaaaggtattagatgtc

SEQ ID NO: 312616 - DNA, 30 bp, Artificial Sequence
  Synthetic oligonucleotide
tctgcgttatacaggggtatattcgatgtc

SEQ ID NO: 312617 - DNA, 30 bp, Artificial Sequence
  Synthetic oligonucleotide
acggtcataagctgcgcaagctatgatgtc

SEQ ID NO: 312618 - DNA, 32 bp, Artificial Sequence
  Synthetic oligonucleotide
gaagtggaggggcatttaaacgaggtgatgtc

SEQ ID NO: 312619 - DNA, 30 bp, Artificial Sequence
  Synthetic oligonucleotide
ctacccggcagagtgcgtcatctatatgtc

SEQ ID NO: 312620 - DNA, 30 bp, Artificial Sequence
  Synthetic oligonucleotide
ccagtgcaccgtaatagaccacagtatgtc

SEQ ID NO: 312621 - DNA, 30 bp, Artificial Sequence
  Synthetic oligonucleotide
ccccggcaacgggggcatcagacttatgtc

SEQ ID NO: 312622 - DNA, 30 bp, Artificial Sequence
  Synthetic oligonucleotide
aatcctccgctaaccgctgaccacactgtc

SEQ ID NO: 312623 - DNA, 30 bp, Artificial Sequence
  Synthetic oligonucleotide
acgcttttggccgtacaagtgcgtactgtc

SEQ ID NO: 312624 - DNA, 30 bp, Artificial Sequence
  Synthetic oligonucleotide
tgtgttagaagggttcgtaggccacctgtc

SEQ ID NO: 312625 - DNA, 30 bp, Artificial Sequence
  Synthetic oligonucleotide
agcgtctaacgagttgtactcccccctgtc

SEQ ID NO: 312626 - DNA, 30 bp, Artificial Sequence
  Synthetic oligonucleotide
atcctggtgccatcacgcgttaagcctgtc

SEQ ID NO: 312627 - DNA, 30 bp, Artificial Sequence
  Synthetic oligonucleotide
ttctcgtatagcaaatgatttccgcctgtc

SEQ ID NO: 312628 - DNA, 30 bp, Artificial Sequence
  Synthetic oligonucleotide
ataattgatgtgtattcttccgatcctgtc

SEQ ID NO: 312629 - DNA, 30 bp, Artificial Sequence
  Synthetic oligonucleotide
gaaagtgaccccatagttcaactagctgtc

SEQ ID NO: 312630 - DNA, 30 bp, Artificial Sequence
  Synthetic oligonucleotide
gttgttagctctgcatggtacattgctgtc

SEQ ID NO: 312631 - DNA, 30 bp, Artificial Sequence
  Synthetic oligonucleotide
gcctcgaacgggttcctcatacttgctgtc

SEQ ID NO: 312632 - DNA, 30 bp, Artificial Sequence
  Synthetic oligonucleotide
ttagatcactcggattgaaaggaatctgtc

SEQ ID NO: 312633 - DNA, 30 bp, Artificial Sequence
  Synthetic oligonucleotide
atacggtaccgccctctagtcgactctgtc

SEQ ID NO: 312634 - DNA, 30 bp, Artificial Sequence
  Synthetic oligonucleotide
tgtagagtaagggtctcggaaccgtctgtc

SEQ ID NO: 312635 - DNA, 30 bp, Artificial Sequence
  Synthetic oligonucleotide
gcagatgaattttcgatgtgtgtgtctgtc

SEQ ID NO: 312636 - DNA, 30 bp, Artificial Sequence
  Synthetic oligonucleotide
agaataggtgttcaaagactagattctgtc

SEQ ID NO: 312637 - DNA, 30 bp, Artificial Sequence
  Synthetic oligonucleotide
ttaaaacagtaagtaagcggagtttctgtc

SEQ ID NO: 312638 - DNA, 30 bp, Artificial Sequence
  Synthetic oligonucleotide
agagattgcccttacatgtttagaagtgtc

SEQ ID NO: 312639 - DNA, 30 bp, Artificial Sequence
  Synthetic oligonucleotide
gaggtacatcaccggggattaatcagtgtc

SEQ ID NO: 312640 - DNA, 30 bp, Artificial Sequence
  Synthetic oligonucleotide
ggtgcgagcattttcgcatgatgtagtgtc

SEQ ID NO: 312641 - DNA, 30 bp, Artificial Sequence
  Synthetic oligonucleotide
aatccgatatcacactgtggggcgcgtgtc

SEQ ID NO: 312642 - DNA, 30 bp, Artificial Sequence
  Synthetic oligonucleotide
gggcgcatcgtacgcccgtcaaggcgtgtc

SEQ ID NO: 312643 - DNA, 30 bp, Artificial Sequence
  Synthetic oligonucleotide
gcgacatcgtctgagcgcccgatgcgtgtc

SEQ ID NO: 312644 - DNA, 30 bp, Artificial Sequence
  Synthetic oligonucleotide
atctgcacccgcataaatgaccatcgtgtc

SEQ ID NO: 312645 - DNA, 30 bp, Artificial Sequence
  Synthetic oligonucleotide
tgcgatcccgcggggtttctgcctcgtgtc

SEQ ID NO: 312646 - DNA, 30 bp, Artificial Sequence
  Synthetic oligonucleotide
ggggcagatcccggtgacggcggaggtgtc

SEQ ID NO: 312647 - DNA, 30 bp, Artificial Sequence
  Synthetic oligonucleotide
accaacagaacatgccttccaaggggtgtc

SEQ ID NO: 312648 - DNA, 30 bp, Artificial Sequence
  Synthetic oligonucleotide
actgcgattatcgctttgtggtcctgtgtc

SEQ ID NO: 312649 - DNA, 30 bp, Artificial Sequence
  Synthetic oligonucleotide
caactgtcgggcttgcagttgtggtgtgtc

SEQ ID NO: 312650 - DNA, 30 bp, Artificial Sequence
  Synthetic oligonucleotide
aatcaacgtctgtccctcgggatttgtgtc

SEQ ID NO: 312651 - DNA, 30 bp, Artificial Sequence
  Synthetic oligonucleotide
ctcgacttatttagcggaagaaacattgtc

SEQ ID NO: 312652 - DNA, 30 bp, Artificial Sequence
  Synthetic oligonucleotide
ctgcgactggctttacaactacccattgtc

SEQ ID NO: 312653 - DNA, 30 bp, Artificial Sequence
  Synthetic oligonucleotide
ctgcgcgggttggcgccacgattcattgtc

SEQ ID NO: 312654 - DNA, 30 bp, Artificial Sequence
  Synthetic oligonucleotide
atgtatactattatcgcgtctaatattgtc

SEQ ID NO: 312655 - DNA, 30 bp, Artificial Sequence
  Synthetic oligonucleotide
ataaccgccccagtaggtcacggtattgtc

SEQ ID NO: 312656 - DNA, 30 bp, Artificial Sequence
  Synthetic oligonucleotide
ggggatcactggctgccctaatgtattgtc

SEQ ID NO: 312657 - DNA, 30 bp, Artificial Sequence
  Synthetic oligonucleotide
aagacgaatcatctcgttcaggaagttgtc

SEQ ID NO: 312658 - DNA, 30 bp, Artificial Sequence
  Synthetic oligonucleotide
tttgcgtgattcggagcggtgatcgttgtc

SEQ ID NO: 312659 - DNA, 30 bp, Artificial Sequence
  Synthetic oligonucleotide
acgcgccctagtcaaacatacgaggttgtc

SEQ ID NO: 312660 - DNA, 30 bp, Artificial Sequence
  Synthetic oligonucleotide
acaagtgtcccataattaaggacggttgtc

SEQ ID NO: 312661 - DNA, 30 bp, Artificial Sequence
  Synthetic oligonucleotide
gattgtaattgtcgattaatacctgttgtc

SEQ ID NO: 312662 - DNA, 30 bp, Artificial Sequence
  Synthetic oligonucleotide
tgaataaatctattgtcgcgatctgttgtc

SEQ ID NO: 312663 - DNA, 30 bp, Artificial Sequence
  Synthetic oligonucleotide
gcgcccttacgtcccgcggttgttgttgtc

SEQ ID NO: 312664 - DNA, 30 bp, Artificial Sequence
  Synthetic oligonucleotide
tccacggagagcgctcagactgcctttgtc

SEQ ID NO: 312665 - DNA, 30 bp, Artificial Sequence
  Synthetic oligonucleotide
ttattcgtcaaaggtctgttatcctttgtc

SEQ ID NO: 312666 - DNA, 30 bp, Artificial Sequence
  Synthetic oligonucleotide
aaagttggacgcggtacagaatagtttgtc

SEQ ID NO: 312667 - DNA, 30 bp, Artificial Sequence
  Synthetic oligonucleotide
aggtacctagcctgattggtcgtgtttgtc

SEQ ID NO: 312668 - DNA, 30 bp, Artificial Sequence
  Synthetic oligonucleotide
gcccaatatacgagaaactctggttttgtc

SEQ ID NO: 312669 - DNA, 30 bp, Artificial Sequence
  Synthetic oligonucleotide
tgaagatcgttggtaggtgagcacaaattc

SEQ ID NO: 312670 - DNA, 30 bp, Artificial Sequence
  Synthetic oligonucleotide
tggatcgtctttcaaggagaacggaaattc

SEQ ID NO: 312671 - DNA, 30 bp, Artificial Sequence
  Synthetic oligonucleotide
tagtaatggccttgtaactccgataaattc

SEQ ID NO: 312672 - DNA, 30 bp, Artificial Sequence
  Synthetic oligonucleotide
gcgaaagcaccatactattggggtaaattc

SEQ ID NO: 312673 - DNA, 30 bp, Artificial Sequence
  Synthetic oligonucleotide
gccggcttcatctcgagaaagattaaattc

SEQ ID NO: 312674 - DNA, 30 bp, Artificial Sequence
  Synthetic oligonucleotide
gcagaattcggcgaaagcagagcacaattc

SEQ ID NO: 312675 - DNA, 30 bp, Artificial Sequence
  Synthetic oligonucleotide
ctcttcagagcaataaactaggtacaattc

SEQ ID NO: 312676 - DNA, 30 bp, Artificial Sequence
  Synthetic oligonucleotide
cagttagttaaaaggaatagtcaccaattc

SEQ ID NO: 312677 - DNA, 30 bp, Artificial Sequence
  Synthetic oligonucleotide
actgggaacaccaggaacgctggccaattc

SEQ ID NO: 312678 - DNA, 30 bp, Artificial Sequence
  Synthetic oligonucleotide
gttaacgagtacgacactaatgtgcaattc

SEQ ID NO: 312679 - DNA, 30 bp, Artificial Sequence
  Synthetic oligonucleotide
ttcaggtccgtatcaaaacttcatcaattc

SEQ ID NO: 312680 - DNA, 30 bp, Artificial Sequence
  Synthetic oligonucleotide
tcacttattgtgtgtgggaattgtcaattc

SEQ ID NO: 312681 - DNA, 30 bp, Artificial Sequence
  Synthetic oligonucleotide
tctcgattaggttgggcggatggagaattc

SEQ ID NO: 312682 - DNA, 30 bp, Artificial Sequence
  Synthetic oligonucleotide
aagattatacgtaggctgggttgagaattc

SEQ ID NO: 312683 - DNA, 30 bp, Artificial Sequence
  Synthetic oligonucleotide
ggcccgtaatagtcaagttggatagaattc

SEQ ID NO: 312684 - DNA, 30 bp, Artificial Sequence
  Synthetic oligonucleotide
ctataggttctgtcggaatcactagaattc

SEQ ID NO: 312685 - DNA, 30 bp, Artificial Sequence
  Synthetic oligonucleotide
ctagggccaatacttagccgcggcgaattc

SEQ ID NO: 312686 - DNA, 30 bp, Artificial Sequence
  Synthetic oligonucleotide
ttacgcaagagtactgaataaaaggaattc

SEQ ID NO: 312687 - DNA, 30 bp, Artificial Sequence
  Synthetic oligonucleotide
aggaaccggtccttttcaccataataattc

SEQ ID NO: 312688 - DNA, 30 bp, Artificial Sequence
  Synthetic oligonucleotide
gcgttagggccgcgatcgaaagtataattc

SEQ ID NO: 312689 - DNA, 30 bp, Artificial Sequence
  Synthetic oligonucleotide
tgttagtcccccaggggtagagactaattc

SEQ ID NO: 312690 - DNA, 30 bp, Artificial Sequence
  Synthetic oligonucleotide
actggatggatccccatggcctagtaattc

SEQ ID NO: 312691 - DNA, 30 bp, Artificial Sequence
  Synthetic oligonucleotide
caatggtcgcgagatgaaccaaggtaattc

SEQ ID NO: 312692 - DNA, 30 bp, Artificial Sequence
  Synthetic oligonucleotide
atatggctcgatctttttccacattaattc

SEQ ID NO: 312693 - DNA, 30 bp, Artificial Sequence
  Synthetic oligonucleotide
tgagattgtacaatcgttgagcattaattc

SEQ ID NO: 312694 - DNA, 30 bp, Artificial Sequence
  Synthetic oligonucleotide
ggggggatcacgcgtgtaggttcttaattc

SEQ ID NO: 312695 - DNA, 30 bp, Artificial Sequence
  Synthetic oligonucleotide
tgaaagggccgcgcgagaagcatttaattc

SEQ ID NO: 312696 - DNA, 30 bp, Artificial Sequence
  Synthetic oligonucleotide
tagagaatatacaccttttgcggcacattc

SEQ ID NO: 312697 - DNA, 30 bp, Artificial Sequence
  Synthetic oligonucleotide
actgagatcccttactatgacgagacattc

SEQ ID NO: 312698 - DNA, 30 bp, Artificial Sequence
  Synthetic oligonucleotide
gtctgggaaatagcacggcttgctacattc

SEQ ID NO: 312699 - DNA, 30 bp, Artificial Sequence
  Synthetic oligonucleotide
ggtggtgatgatctcaccgccaacccattc

SEQ ID NO: 312700 - DNA, 30 bp, Artificial Sequence
  Synthetic oligonucleotide
ggctcaatagtctgagcacagccgccattc

SEQ ID NO: 312701 - DNA, 30 bp, Artificial Sequence
  Synthetic oligonucleotide
gtatcctatgggtggggaaggccgccattc

SEQ ID NO: 312702 - DNA, 30 bp, Artificial Sequence
  Synthetic oligonucleotide
tagtcgaagtgctcgattgataaggcattc

SEQ ID NO: 312703 - DNA, 30 bp, Artificial Sequence
  Synthetic oligonucleotide
tatgtccattactacgttcggactgcattc

SEQ ID NO: 312704 - DNA, 30 bp, Artificial Sequence
  Synthetic oligonucleotide
cccaccacttaggaagagagttctgcattc

SEQ ID NO: 312705 - DNA, 30 bp, Artificial Sequence
  Synthetic oligonucleotide
aggaatcgggcattcacggcgatctcattc

SEQ ID NO: 312706 - DNA, 30 bp, Artificial Sequence
  Synthetic oligonucleotide
tggtagtcagtctgaagagctgcttcattc

SEQ ID NO: 312707 - DNA, 30 bp, Artificial Sequence
  Synthetic oligonucleotide
gcaaggatgacggttatgagccgttcattc

SEQ ID NO: 312708 - DNA, 30 bp, Artificial Sequence
  Synthetic oligonucleotide
atctggaactgctacaaataagtttcattc

SEQ ID NO: 312709 - DNA, 30 bp, Artificial Sequence
  Synthetic oligonucleotide
tatgacactcttcttgattccgaaagattc

SEQ ID NO: 312710 - DNA, 30 bp, Artificial Sequence
  Synthetic oligonucleotide
gggctagccctctgcactcgcgcaagattc

SEQ ID NO: 312711 - DNA, 30 bp, Artificial Sequence
  Synthetic oligonucleotide
tcatgtacaaacgaacaaatgtgaagattc

SEQ ID NO: 312712 - DNA, 30 bp, Artificial Sequence
  Synthetic oligonucleotide
tgatttgctggtcagtcgatcataagattc

SEQ ID NO: 312713 - DNA, 30 bp, Artificial Sequence
  Synthetic oligonucleotide
ctacctgagctccatcttgaaatcagattc

SEQ ID NO: 312714 - DNA, 30 bp, Artificial Sequence
  Synthetic oligonucleotide
tacacagggcctacgacgcgcgagagattc

SEQ ID NO: 312715 - DNA, 30 bp, Artificial Sequence
  Synthetic oligonucleotide
tcgcccgctcacgggatcccaccgagattc

SEQ ID NO: 312716 - DNA, 30 bp, Artificial Sequence
  Synthetic oligonucleotide
cctacacaggcgtgcgttctgcttagattc

SEQ ID NO: 312717 - DNA, 35 bp, Artificial Sequence
  Synthetic oligonucleotide
aatgaatattttgcgccggtacgggggtgcgattc

SEQ ID NO: 312718 - DNA, 30 bp, Artificial Sequence
  Synthetic oligonucleotide
tgcttcaacttgccatagtagcaaggattc

SEQ ID NO: 312719 - DNA, 30 bp, Artificial Sequence
  Synthetic oligonucleotide
agttcacgaacgtaatccacctgaggattc

SEQ ID NO: 312720 - DNA, 30 bp, Artificial Sequence
  Synthetic oligonucleotide
tgatgcgggactggggtgcttataggattc

SEQ ID NO: 312721 - DNA, 30 bp, Artificial Sequence
  Synthetic oligonucleotide
acttcgcacggcatgacgacactcggattc

SEQ ID NO: 312722 - DNA, 30 bp, Artificial Sequence
  Synthetic oligonucleotide
tgtcataaggtcaggcggtgctcgggattc

SEQ ID NO: 312723 - DNA, 30 bp, Artificial Sequence
  Synthetic oligonucleotide
ctcattttatgtgatcgtctcgatggattc

SEQ ID NO: 312724 - DNA, 30 bp, Artificial Sequence
  Synthetic oligonucleotide
caagccagggggcccagtggtcgtggattc

SEQ ID NO: 312725 - DNA, 30 bp, Artificial Sequence
  Synthetic oligonucleotide
cttcttagaacctatttcggaggtggattc

SEQ ID NO: 312726 - DNA, 30 bp, Artificial Sequence
  Synthetic oligonucleotide
ctttctgaattacaacttggtcttggattc

SEQ ID NO: 312727 - DNA, 31 bp, Artificial Sequence
  Synthetic oligonucleotide
cgcgctagcgcctggacgaagcaaatgattc

SEQ ID NO: 312728 - DNA, 30 bp, Artificial Sequence
  Synthetic oligonucleotide
attacgatcttaagactcatataatgattc

SEQ ID NO: 312729 - DNA, 30 bp, Artificial Sequence
  Synthetic oligonucleotide
aattagctagggcataccagaacgtgattc

SEQ ID NO: 312730 - DNA, 30 bp, Artificial Sequence
  Synthetic oligonucleotide
tgggcgtgcatgcatgattatacgtgattc

SEQ ID NO: 312731 - DNA, 30 bp, Artificial Sequence
  Synthetic oligonucleotide
tgttgtcataggtgtatttagcggtgattc

SEQ ID NO: 312732 - DNA, 30 bp, Artificial Sequence
  Synthetic oligonucleotide
aatcagtaaagttgcaacctggtgtgattc

SEQ ID NO: 312733 - DNA, 30 bp, Artificial Sequence
  Synthetic oligonucleotide
ttgatcaaacggtgcgttgtggacatattc

SEQ ID NO: 312734 - DNA, 30 bp, Artificial Sequence
  Synthetic oligonucleotide
ggatgtccgtaagatgcttcgtacatattc

SEQ ID NO: 312735 - DNA, 30 bp, Artificial Sequence
  Synthetic oligonucleotide
taacatccttattataacctagtcatattc

SEQ ID NO: 312736 - DNA, 30 bp, Artificial Sequence
  Synthetic oligonucleotide
caaatggagagctcggtgttcttcatattc

SEQ ID NO: 312737 - DNA, 30 bp, Artificial Sequence
  Synthetic oligonucleotide
gacctccctgccattaaggacacgatattc

SEQ ID NO: 312738 - DNA, 30 bp, Artificial Sequence
  Synthetic oligonucleotide
tgacaccacggacctgtcggacggatattc

SEQ ID NO: 312739 - DNA, 30 bp, Artificial Sequence
  Synthetic oligonucleotide
gtatcctgttatggatcaaatcggatattc

SEQ ID NO: 312740 - DNA, 30 bp, Artificial Sequence
  Synthetic oligonucleotide
agattgcgtgcgcactttatttgtatattc

SEQ ID NO: 312741 - DNA, 30 bp, Artificial Sequence
  Synthetic oligonucleotide
gacccgttgaaggcgataattaaactattc

SEQ ID NO: 312742 - DNA, 30 bp, Artificial Sequence
  Synthetic oligonucleotide
atcgagctccacaagttaattgcactattc

SEQ ID NO: 312743 - DNA, 30 bp, Artificial Sequence
  Synthetic oligonucleotide
tcttaaaagccgattagagttggactattc

SEQ ID NO: 312744 - DNA, 30 bp, Artificial Sequence
  Synthetic oligonucleotide
gttattattatatgactcatactcctattc

SEQ ID NO: 312745 - DNA, 30 bp, Artificial Sequence
  Synthetic oligonucleotide
atagaagcaaagagccacttgcagctattc

SEQ ID NO: 312746 - DNA, 30 bp, Artificial Sequence
  Synthetic oligonucleotide
gtgataaacatagcctatcggtggctattc

SEQ ID NO: 312747 - DNA, 30 bp, Artificial Sequence
  Synthetic oligonucleotide
ttgggaggcgtgcgagcacgctatctattc

SEQ ID NO: 312748 - DNA, 30 bp, Artificial Sequence
  Synthetic oligonucleotide
agactggtggatggataccgacctctattc

SEQ ID NO: 312749 - DNA, 30 bp, Artificial Sequence
  Synthetic oligonucleotide
tcagaataagtcgttcctggggctctattc

SEQ ID NO: 312750 - DNA, 30 bp, Artificial Sequence
  Synthetic oligonucleotide
attcaagaccgatggcgaagctgtctattc

SEQ ID NO: 312751 - DNA, 30 bp, Artificial Sequence
  Synthetic oligonucleotide
agtatagttagagagcgtattacagtattc

SEQ ID NO: 312752 - DNA, 30 bp, Artificial Sequence
  Synthetic oligonucleotide
tcggggatcttagattgtgtctcagtattc

SEQ ID NO: 312753 - DNA, 30 bp, Artificial Sequence
  Synthetic oligonucleotide
agaagcttcgggtttcaacccttcgtattc

SEQ ID NO: 312754 - DNA, 30 bp, Artificial Sequence
  Synthetic oligonucleotide
tgaccagaacaggaccaaaataaattattc

SEQ ID NO: 312755 - DNA, 30 bp, Artificial Sequence
  Synthetic oligonucleotide
cagactggcacaccagggaaccaattattc

SEQ ID NO: 312756 - DNA, 30 bp, Artificial Sequence
  Synthetic oligonucleotide
cacaaagggaacgcgttctacttattattc

SEQ ID NO: 312757 - DNA, 30 bp, Artificial Sequence
  Synthetic oligonucleotide
gcgggccgtcggggataatttttattattc

SEQ ID NO: 312758 - DNA, 30 bp, Artificial Sequence
  Synthetic oligonucleotide
accctttgacactttaaagtacccttattc

SEQ ID NO: 312759 - DNA, 30 bp, Artificial Sequence
  Synthetic oligonucleotide
tgaaatggctgatactaagctctcttattc

SEQ ID NO: 312760 - DNA, 30 bp, Artificial Sequence
  Synthetic oligonucleotide
ttaagtcatgggcatacataggcgttattc

SEQ ID NO: 312761 - DNA, 30 bp, Artificial Sequence
  Synthetic oligonucleotide
cagacgttattgtttatcactgttttattc

SEQ ID NO: 312762 - DNA, 30 bp, Artificial Sequence
  Synthetic oligonucleotide
acaagatggctgctggcgtgcctaaacttc

SEQ ID NO: 312763 - DNA, 30 bp, Artificial Sequence
  Synthetic oligonucleotide
cttatccgccactccggtggtaagaacttc

SEQ ID NO: 312764 - DNA, 30 bp, Artificial Sequence
  Synthetic oligonucleotide
taggagagtccactgttgtagcataacttc

SEQ ID NO: 312765 - DNA, 30 bp, Artificial Sequence
  Synthetic oligonucleotide
cggtcgctcggaaggtaaacgacacacttc

SEQ ID NO: 312766 - DNA, 30 bp, Artificial Sequence
  Synthetic oligonucleotide
ccggaggaactgttaaaatgctgacacttc

SEQ ID NO: 312767 - DNA, 30 bp, Artificial Sequence
  Synthetic oligonucleotide
cccgacgggggactgtgatacgcccacttc

SEQ ID NO: 312768 - DNA, 30 bp, Artificial Sequence
  Synthetic oligonucleotide
gctctagcgtatccggtaagtcagcacttc

SEQ ID NO: 312769 - DNA, 30 bp, Artificial Sequence
  Synthetic oligonucleotide
ggacagcagaaataagtacgccgagacttc

SEQ ID NO: 312770 - DNA, 30 bp, Artificial Sequence
  Synthetic oligonucleotide
cgttttcaatccgcaacttgtatagacttc

SEQ ID NO: 312771 - DNA, 30 bp, Artificial Sequence
  Synthetic oligonucleotide
actatgggccacatcgacatggtagacttc

SEQ ID NO: 312772 - DNA, 30 bp, Artificial Sequence
  Synthetic oligonucleotide
tggtttatgggctatttcatgcccgacttc

SEQ ID NO: 312773 - DNA, 30 bp, Artificial Sequence
  Synthetic oligonucleotide
cgatttaagggttcagctaatcttgacttc

SEQ ID NO: 312774 - DNA, 30 bp, Artificial Sequence
  Synthetic oligonucleotide
gccgcacgtcgaaaatcgttcggatacttc

SEQ ID NO: 312775 - DNA, 30 bp, Artificial Sequence
  Synthetic oligonucleotide
gccaattaccgtactgactcggtgtacttc

SEQ ID NO: 312776 - DNA, 30 bp, Artificial Sequence
  Synthetic oligonucleotide
tagaacggttagggtcggacataaaccttc

SEQ ID NO: 312777 - DNA, 30 bp, Artificial Sequence
  Synthetic oligonucleotide
gatttgaaagaagaggagggcctaaccttc

SEQ ID NO: 312778 - DNA, 30 bp, Artificial Sequence
  Synthetic oligonucleotide
ggtaagatcgcacggtcttaaaagaccttc

SEQ ID NO: 312779 - DNA, 30 bp, Artificial Sequence
  Synthetic oligonucleotide
agcctagccgccggccagttgtagaccttc

SEQ ID NO: 312780 - DNA, 30 bp, Artificial Sequence
  Synthetic oligonucleotide
ggtcttggaaatctccttaacaataccttc

SEQ ID NO: 312781 - DNA, 30 bp, Artificial Sequence
  Synthetic oligonucleotide
accgtacgcataactactcttcataccttc

SEQ ID NO: 312782 - DNA, 30 bp, Artificial Sequence
  Synthetic oligonucleotide
cacacgacatagagaggcgggacgcccttc

SEQ ID NO: 312783 - DNA, 30 bp, Artificial Sequence
  Synthetic oligonucleotide
ggattgctgatcggtccgcgtgctcccttc

SEQ ID NO: 312784 - DNA, 30 bp, Artificial Sequence
  Synthetic oligonucleotide
cccctagggtaaataaaagctctagccttc

SEQ ID NO: 312785 - DNA, 30 bp, Artificial Sequence
  Synthetic oligonucleotide
gtgtccaggacgggatctctcgccgccttc

SEQ ID NO: 312786 - DNA, 30 bp, Artificial Sequence
  Synthetic oligonucleotide
cgtgacaaaggctttcactagagcgccttc

SEQ ID NO: 312787 - DNA, 30 bp, Artificial Sequence
  Synthetic oligonucleotide
cttttctcttcgtgcgctccgttggccttc

SEQ ID NO: 312788 - DNA, 30 bp, Artificial Sequence
  Synthetic oligonucleotide
catggtgtacggacgaccccgttgtccttc

SEQ ID NO: 312789 - DNA, 30 bp, Artificial Sequence
  Synthetic oligonucleotide
ctcgaatcctaatataaccgtccttccttc

SEQ ID NO: 312790 - DNA, 30 bp, Artificial Sequence
  Synthetic oligonucleotide
ttagtctggcataaaactgttgaaagcttc

SEQ ID NO: 312791 - DNA, 30 bp, Artificial Sequence
  Synthetic oligonucleotide
atcgcatacgcagataaaaaggcaagcttc

SEQ ID NO: 312792 - DNA, 30 bp, Artificial Sequence
  Synthetic oligonucleotide
tgggtttctccctcgtatgctataagcttc

SEQ ID NO: 312793 - DNA, 30 bp, Artificial Sequence
  Synthetic oligonucleotide
acagggcttgattgctgctcttccagcttc

SEQ ID NO: 312794 - DNA, 30 bp, Artificial Sequence
  Synthetic oligonucleotide
gatcgtgacaccaaagaaggttgcagcttc

SEQ ID NO: 312795 - DNA, 30 bp, Artificial Sequence
  Synthetic oligonucleotide
actgcgaaaaactggctgcacctcagcttc

SEQ ID NO: 312796 - DNA, 30 bp, Artificial Sequence
  Synthetic oligonucleotide
agggttcatttcaggaattgggagagcttc

SEQ ID NO: 312797 - DNA, 30 bp, Artificial Sequence
  Synthetic oligonucleotide
cccggttcggagtattcatcgtcgagcttc

SEQ ID NO: 312798 - DNA, 30 bp, Artificial Sequence
  Synthetic oligonucleotide
ggacgccttgccggaagagcgtggagcttc

SEQ ID NO: 312799 - DNA, 30 bp, Artificial Sequence
  Synthetic oligonucleotide
ctttgaccatccgcttattgcacacgcttc

SEQ ID NO: 312800 - DNA, 30 bp, Artificial Sequence
  Synthetic oligonucleotide
atcttaggggaaaaatgtggcccacgcttc

SEQ ID NO: 312801 - DNA, 30 bp, Artificial Sequence
  Synthetic oligonucleotide
ggcagaaagtagggaccgtggaaaggcttc

SEQ ID NO: 312802 - DNA, 30 bp, Artificial Sequence
  Synthetic oligonucleotide
attgccccctcaatggttcaaagaggcttc

SEQ ID NO: 312803 - DNA, 30 bp, Artificial Sequence
  Synthetic oligonucleotide
cggcgccgggtgtcaatcacaggaggcttc

SEQ ID NO: 312804 - DNA, 30 bp, Artificial Sequence
  Synthetic oligonucleotide
tgagagtgtagaaggttgcctgagggcttc

SEQ ID NO: 312805 - DNA, 30 bp, Artificial Sequence
  Synthetic oligonucleotide
ctaataatccaatcctcgataaggggcttc

SEQ ID NO: 312806 - DNA, 30 bp, Artificial Sequence
  Synthetic oligonucleotide
cctggttttatcgagggcgacaatggcttc

SEQ ID NO: 312807 - DNA, 30 bp, Artificial Sequence
  Synthetic oligonucleotide
tcctcattattgcgaatccagaaatgcttc

SEQ ID NO: 312808 - DNA, 30 bp, Artificial Sequence
  Synthetic oligonucleotide
aggtaagtttggttccctcaataatgcttc

SEQ ID NO: 312809 - DNA, 30 bp, Artificial Sequence
  Synthetic oligonucleotide
atgcaaaaagttgatagctagatatgcttc

SEQ ID NO: 312810 - DNA, 30 bp, Artificial Sequence
  Synthetic oligonucleotide
actggtcacggcccattaccccattgcttc

SEQ ID NO: 312811 - DNA, 30 bp, Artificial Sequence
  Synthetic oligonucleotide
aatacagaaaataaggggagtggttgcttc

SEQ ID NO: 312812 - DNA, 30 bp, Artificial Sequence
  Synthetic oligonucleotide
cctacaagagaaagggactgtcaaatcttc

SEQ ID NO: 312813 - DNA, 30 bp, Artificial Sequence
  Synthetic oligonucleotide
aaactggacgcgtccataaatccaatcttc

SEQ ID NO: 312814 - DNA, 31 bp, Artificial Sequence
  Synthetic oligonucleotide
tatacgttgcccacctgaaactcgcatcttc

SEQ ID NO: 312815 - DNA, 30 bp, Artificial Sequence
  Synthetic oligonucleotide
agatttggaagggaacagactctcatcttc

SEQ ID NO: 312816 - DNA, 30 bp, Artificial Sequence
  Synthetic oligonucleotide
aaagcgtaagcgttacgttgtgggatcttc

SEQ ID NO: 312817 - DNA, 30 bp, Artificial Sequence
  Synthetic oligonucleotide
gctgttgttacgggacggcgtctgatcttc

SEQ ID NO: 312818 - DNA, 30 bp, Artificial Sequence
  Synthetic oligonucleotide
gagcggttgatatattgtgagttgatcttc

SEQ ID NO: 312819 - DNA, 30 bp, Artificial Sequence
  Synthetic oligonucleotide
ccaagataatcactagaaattgcactcttc

SEQ ID NO: 312820 - DNA, 30 bp, Artificial Sequence
  Synthetic oligonucleotide
tgaggcatcagtttgcacctggacctcttc

SEQ ID NO: 312821 - DNA, 30 bp, Artificial Sequence
  Synthetic oligonucleotide
ggtcacctgtgtgatggatctgatctcttc

SEQ ID NO: 312822 - DNA, 30 bp, Artificial Sequence
  Synthetic oligonucleotide
ggacaaacgtcgaaaacggaccgcgtcttc

SEQ ID NO: 312823 - DNA, 30 bp, Artificial Sequence
  Synthetic oligonucleotide
gttactataaactcgcccactaaggtcttc

SEQ ID NO: 312824 - DNA, 30 bp, Artificial Sequence
  Synthetic oligonucleotide
gggacataccgcgtccgcttcgtattcttc

SEQ ID NO: 312825 - DNA, 30 bp, Artificial Sequence
  Synthetic oligonucleotide
gactagtgtcgtacagtttatcacttcttc

SEQ ID NO: 312826 - DNA, 30 bp, Artificial Sequence
  Synthetic oligonucleotide
ttataaatcaagtaaaatattaggttcttc

SEQ ID NO: 312827 - DNA, 30 bp, Artificial Sequence
  Synthetic oligonucleotide
ccaggatacgaacaggtgggttttttcttc

SEQ ID NO: 312828 - DNA, 30 bp, Artificial Sequence
  Synthetic oligonucleotide
ggggctcagcaacaactggacttaaagttc

SEQ ID NO: 312829 - DNA, 30 bp, Artificial Sequence
  Synthetic oligonucleotide
ccatccgcctcagggaatcctttcaagttc

SEQ ID NO: 312830 - DNA, 30 bp, Artificial Sequence
  Synthetic oligonucleotide
tatgggtcacggcgcgtaccggggaagttc

SEQ ID NO: 312831 - DNA, 30 bp, Artificial Sequence
  Synthetic oligonucleotide
aggcctcatcccagcaagccctctaagttc

SEQ ID NO: 312832 - DNA, 30 bp, Artificial Sequence
  Synthetic oligonucleotide
gtccgcacctcaaccaagaactgacagttc

SEQ ID NO: 312833 - DNA, 30 bp, Artificial Sequence
  Synthetic oligonucleotide
aatgaataatatttgagactagtacagttc

SEQ ID NO: 312834 - DNA, 30 bp, Artificial Sequence
  Synthetic oligonucleotide
tgaatggagcttcgataggcggtacagttc

SEQ ID NO: 312835 - DNA, 30 bp, Artificial Sequence
  Synthetic oligonucleotide
aaatcatagtactgagagcagaagcagttc

SEQ ID NO: 312836 - DNA, 30 bp, Artificial Sequence
  Synthetic oligonucleotide
tctcgcgttactcttttaaaattgcagttc

SEQ ID NO: 312837 - DNA, 30 bp, Artificial Sequence
  Synthetic oligonucleotide
attggtgaatatcaacatgacggtcagttc

SEQ ID NO: 312838 - DNA, 30 bp, Artificial Sequence
  Synthetic oligonucleotide
cggatttttctagagagccctggtcagttc

SEQ ID NO: 312839 - DNA, 30 bp, Artificial Sequence
  Synthetic oligonucleotide
gtaggcctaaggagtgtggttattcagttc

SEQ ID NO: 312840 - DNA, 31 bp, Artificial Sequence
  Synthetic oligonucleotide
agtaagctgatttctaggagtttcagagttc

SEQ ID NO: 312841 - DNA, 30 bp, Artificial Sequence
  Synthetic oligonucleotide
gcaacgcaggtacggatgtattccgagttc

SEQ ID NO: 312842 - DNA, 30 bp, Artificial Sequence
  Synthetic oligonucleotide
caaacgagggtaacgaagtggctggagttc

SEQ ID NO: 312843 - DNA, 30 bp, Artificial Sequence
  Synthetic oligonucleotide
gtagtggcagccgtatgcagtgtggagttc

SEQ ID NO: 312844 - DNA, 30 bp, Artificial Sequence
  Synthetic oligonucleotide
ttgtgtggggtcctgattagtagtgagttc

SEQ ID NO: 312845 - DNA, 30 bp, Artificial Sequence
  Synthetic oligonucleotide
tgcgaaggacacggatgagtggtatagttc

SEQ ID NO: 312846 - DNA, 30 bp, Artificial Sequence
  Synthetic oligonucleotide
agttaaaaatgggtttgcgtctactagttc

SEQ ID NO: 312847 - DNA, 30 bp, Artificial Sequence
  Synthetic oligonucleotide
ccattaacggagtagaatgcagtctagttc

SEQ ID NO: 312848 - DNA, 30 bp, Artificial Sequence
  Synthetic oligonucleotide
atgtcgaccgacacgtccgacttctagttc

SEQ ID NO: 312849 - DNA, 30 bp, Artificial Sequence
  Synthetic oligonucleotide
atgtaaagttcatatactatactttagttc

SEQ ID NO: 312850 - DNA, 26 bp, Artificial Sequence
  Synthetic oligonucleotide
cagagataaggaacatgtacacgttc

SEQ ID NO: 312851 - DNA, 30 bp, Artificial Sequence
  Synthetic oligonucleotide
tatgatgcttgcgcctcgtgacctacgttc

SEQ ID NO: 312852 - DNA, 30 bp, Artificial Sequence
  Synthetic oligonucleotide
gacgacctctaggtcccgagtcgtacgttc

SEQ ID NO: 312853 - DNA, 30 bp, Artificial Sequence
  Synthetic oligonucleotide
catgggatctgctgcacattgttaccgttc

SEQ ID NO: 312854 - DNA, 30 bp, Artificial Sequence
  Synthetic oligonucleotide
aactagccgaaagtactctgttccccgttc

SEQ ID NO: 312855 - DNA, 30 bp, Artificial Sequence
  Synthetic oligonucleotide
tctcgtccgcaaaccatcttagggccgttc

SEQ ID NO: 312856 - DNA, 30 bp, Artificial Sequence
  Synthetic oligonucleotide
agtaatctaaagtatgccctagacgcgttc

SEQ ID NO: 312857 - DNA, 30 bp, Artificial Sequence
  Synthetic oligonucleotide
atatggaatgcattggtagatagcgcgttc

SEQ ID NO: 312858 - DNA, 30 bp, Artificial Sequence
  Synthetic oligonucleotide
ggggacgcccgtgtgaataaagtggcgttc

SEQ ID NO: 312859 - DNA, 30 bp, Artificial Sequence
  Synthetic oligonucleotide
gggtaaggggaacggcaagggaatgcgttc

SEQ ID NO: 312860 - DNA, 30 bp, Artificial Sequence
  Synthetic oligonucleotide
acggtgggaaatgggggcctacctgcgttc

SEQ ID NO: 312861 - DNA, 30 bp, Artificial Sequence
  Synthetic oligonucleotide
tgcgattgggccggacggtctgctgcgttc

SEQ ID NO: 312862 - DNA, 30 bp, Artificial Sequence
  Synthetic oligonucleotide
aggcagtaagaggtggaacgacaatcgttc

SEQ ID NO: 312863 - DNA, 30 bp, Artificial Sequence
  Synthetic oligonucleotide
cattagtggatggaagcttcaaattcgttc

SEQ ID NO: 312864 - DNA, 30 bp, Artificial Sequence
  Synthetic oligonucleotide
gctgcagtcatctttcgattgtattcgttc

SEQ ID NO: 312865 - DNA, 30 bp, Artificial Sequence
  Synthetic oligonucleotide
cgtttgtggcgcgggtagttgtaaaggttc

SEQ ID NO: 312866 - DNA, 31 bp, Artificial Sequence
  Synthetic oligonucleotide
acccatatatatacagtagttgagcaggttc

SEQ ID NO: 312867 - DNA, 30 bp, Artificial Sequence
  Synthetic oligonucleotide
ctggctgtcttggtgtaaaaatataggttc

SEQ ID NO: 312868 - DNA, 30 bp, Artificial Sequence
  Synthetic oligonucleotide
ccagatgtctgactcgcttgacgtaggttc

SEQ ID NO: 312869 - DNA, 30 bp, Artificial Sequence
  Synthetic oligonucleotide
ctctgcttacaggcagccgcggtacggttc

SEQ ID NO: 312870 - DNA, 30 bp, Artificial Sequence
  Synthetic oligonucleotide
tgaaacagtgtgcttgcgcgacagcggttc

SEQ ID NO: 312871 - DNA, 30 bp, Artificial Sequence
  Synthetic oligonucleotide
gaagcgagtattgaattgccagttcggttc

SEQ ID NO: 312872 - DNA, 30 bp, Artificial Sequence
  Synthetic oligonucleotide
gaggagcagacaacatgaccggaagggttc

SEQ ID NO: 312873 - DNA, 30 bp, Artificial Sequence
  Synthetic oligonucleotide
aaggctgaacttcgaaaacggttcgggttc

SEQ ID NO: 312874 - DNA, 30 bp, Artificial Sequence
  Synthetic oligonucleotide
ttacgttatataacaatgttgtcggggttc

SEQ ID NO: 312875 - DNA, 30 bp, Artificial Sequence
  Synthetic oligonucleotide
acctagttcactaggttccaagatgggttc

SEQ ID NO: 312876 - DNA, 29 bp, Artificial Sequence
  Synthetic oligonucleotide
atccggataggaatggaacgcctgggttc

SEQ ID NO: 312877 - DNA, 30 bp, Artificial Sequence
  Synthetic oligonucleotide
tcacaatgtactatattaaccattgggttc

SEQ ID NO: 312878 - DNA, 30 bp, Artificial Sequence
  Synthetic oligonucleotide
cccttttcatgtccatgtccaccatggttc

SEQ ID NO: 312879 - DNA, 30 bp, Artificial Sequence
  Synthetic oligonucleotide
tatcaccgaggcggaagactgtgatggttc

SEQ ID NO: 312880 - DNA, 30 bp, Artificial Sequence
  Synthetic oligonucleotide
tgtacttccagtacgagtctcaactggttc

SEQ ID NO: 312881 - DNA, 30 bp, Artificial Sequence
  Synthetic oligonucleotide
agtagggaattaaagttggtggactggttc

SEQ ID NO: 312882 - DNA, 30 bp, Artificial Sequence
  Synthetic oligonucleotide
agggctacaggtgcctcctgacagtggttc

SEQ ID NO: 312883 - DNA, 30 bp, Artificial Sequence
  Synthetic oligonucleotide
cggaaactggggccggctaatatgtggttc

SEQ ID NO: 312884 - DNA, 30 bp, Artificial Sequence
  Synthetic oligonucleotide
taagtagcacgaacgcgtaactattggttc

SEQ ID NO: 312885 - DNA, 30 bp, Artificial Sequence
  Synthetic oligonucleotide
attgtggtctagcgaatgagcacaatgttc

SEQ ID NO: 312886 - DNA, 30 bp, Artificial Sequence
  Synthetic oligonucleotide
cagaggactatctccaataggataatgttc

SEQ ID NO: 312887 - DNA, 30 bp, Artificial Sequence
  Synthetic oligonucleotide
gtatggaccaaatgcttcgcatacatgttc

SEQ ID NO: 312888 - DNA, 30 bp, Artificial Sequence
  Synthetic oligonucleotide
cagtccgtttcctgagttctgtagatgttc

SEQ ID NO: 312889 - DNA, 30 bp, Artificial Sequence
  Synthetic oligonucleotide
aaaaggagaccagaatacttttcgatgttc

SEQ ID NO: 312890 - DNA, 30 bp, Artificial Sequence
  Synthetic oligonucleotide
cgcgacagctctaccaggatacctatgttc

SEQ ID NO: 312891 - DNA, 30 bp, Artificial Sequence
  Synthetic oligonucleotide
actcgatcagtcgatttctcacgtatgttc

SEQ ID NO: 312892 - DNA, 30 bp, Artificial Sequence
  Synthetic oligonucleotide
gttatgtgttatttgtcactgcaactgttc

SEQ ID NO: 312893 - DNA, 30 bp, Artificial Sequence
  Synthetic oligonucleotide
ctcgcttttagcctggagaagagactgttc

SEQ ID NO: 312894 - DNA, 30 bp, Artificial Sequence
  Synthetic oligonucleotide
acactgatcatccattgaaggggactgttc

SEQ ID NO: 312895 - DNA, 30 bp, Artificial Sequence
  Synthetic oligonucleotide
ctagtcgcaggtgactattgtatactgttc

SEQ ID NO: 312896 - DNA, 31 bp, Artificial Sequence
  Synthetic oligonucleotide
acaagaggtcttgcaaatcctcccgctgttc

SEQ ID NO: 312897 - DNA, 30 bp, Artificial Sequence
  Synthetic oligonucleotide
atgaatagttgttagataagcgcgctgttc

SEQ ID NO: 312898 - DNA, 30 bp, Artificial Sequence
  Synthetic oligonucleotide
tatcacaatgattaatgaatgggtctgttc

SEQ ID NO: 312899 - DNA, 30 bp, Artificial Sequence
  Synthetic oligonucleotide
ttgtccgtttagagtgtcgctctagtgttc

SEQ ID NO: 312900 - DNA, 30 bp, Artificial Sequence
  Synthetic oligonucleotide
agcaatcggggatgtttacatagcgtgttc

SEQ ID NO: 312901 - DNA, 30 bp, Artificial Sequence
  Synthetic oligonucleotide
tgtattgtgcgttatcccttctgcgtgttc

SEQ ID NO: 312902 - DNA, 30 bp, Artificial Sequence
  Synthetic oligonucleotide
cggctgtatcatagaaacgttgcggtgttc

SEQ ID NO: 312903 - DNA, 30 bp, Artificial Sequence
  Synthetic oligonucleotide
gctcgggctcaggcatgataaagattgttc

SEQ ID NO: 312904 - DNA, 30 bp, Artificial Sequence
  Synthetic oligonucleotide
tataggatcaacccatgcttttgattgttc

SEQ ID NO: 312905 - DNA, 30 bp, Artificial Sequence
  Synthetic oligonucleotide
catgcagggaatattctcgctttattgttc

SEQ ID NO: 312906 - DNA, 30 bp, Artificial Sequence
  Synthetic oligonucleotide
ttatatgaaggacgacgtagtaccttgttc

SEQ ID NO: 312907 - DNA, 30 bp, Artificial Sequence
  Synthetic oligonucleotide
aatggtactgtggcaagataagggttgttc

SEQ ID NO: 312908 - DNA, 30 bp, Artificial Sequence
  Synthetic oligonucleotide
tgtcctccttgtgtctattccgtgttgttc

SEQ ID NO: 312909 - DNA, 30 bp, Artificial Sequence
  Synthetic oligonucleotide
aatcatgacacgtatccaacgtcaaatttc

SEQ ID NO: 312910 - DNA, 30 bp, Artificial Sequence
  Synthetic oligonucleotide
acctcaacccagtggagtcccataaatttc

SEQ ID NO: 312911 - DNA, 30 bp, Artificial Sequence
  Synthetic oligonucleotide
cgtaactggtaatctcaggtcgtaaatttc

SEQ ID NO: 312912 - DNA, 30 bp, Artificial Sequence
  Synthetic oligonucleotide
cgtggaaggtgccccttacttaacaatttc

SEQ ID NO: 312913 - DNA, 30 bp, Artificial Sequence
  Synthetic oligonucleotide
gtaccgccgcctgtgttcgagggcaatttc

SEQ ID NO: 312914 - DNA, 30 bp, Artificial Sequence
  Synthetic oligonucleotide
ctccgggcatccaggttatagggcaatttc

SEQ ID NO: 312915 - DNA, 30 bp, Artificial Sequence
  Synthetic oligonucleotide
ttcctcagaagcctctgaggtccgaatttc

SEQ ID NO: 312916 - DNA, 30 bp, Artificial Sequence
  Synthetic oligonucleotide
tgtacggaacacaggattatggcgaatttc

SEQ ID NO: 312917 - DNA, 30 bp, Artificial Sequence
  Synthetic oligonucleotide
aggttcatatgagtgagtgtagataatttc

SEQ ID NO: 312918 - DNA, 30 bp, Artificial Sequence
  Synthetic oligonucleotide
ggatggactgataacgggaatactaatttc

SEQ ID NO: 312919 - DNA, 30 bp, Artificial Sequence
  Synthetic oligonucleotide
tacttaatatataagttccgacgtaatttc

SEQ ID NO: 312920 - DNA, 30 bp, Artificial Sequence
  Synthetic oligonucleotide
gtattggcatgcatggtaatgcttaatttc

SEQ ID NO: 312921 - DNA, 30 bp, Artificial Sequence
  Synthetic oligonucleotide
gagtggtatactgatatacacaaacatttc

SEQ ID NO: 312922 - DNA, 30 bp, Artificial Sequence
  Synthetic oligonucleotide
acagaggcggaacttttaggtaaacatttc

SEQ ID NO: 312923 - DNA, 30 bp, Artificial Sequence
  Synthetic oligonucleotide
gttgtaccgcaaaataagtcaggccatttc

SEQ ID NO: 312924 - DNA, 30 bp, Artificial Sequence
  Synthetic oligonucleotide
attgggcattaaccgctatggatccatttc

SEQ ID NO: 312925 - DNA, 30 bp, Artificial Sequence
  Synthetic oligonucleotide
tgtttactcgcaaagcataccccgcatttc

SEQ ID NO: 312926 - DNA, 30 bp, Artificial Sequence
  Synthetic oligonucleotide
cccaatagcggaggattcagggcgcatttc

SEQ ID NO: 312927 - DNA, 30 bp, Artificial Sequence
  Synthetic oligonucleotide
cgcgtccggaaaacacacggatcgcatttc

SEQ ID NO: 312928 - DNA, 30 bp, Artificial Sequence
  Synthetic oligonucleotide
tgcacgtcagttgaaagggggtcgcatttc

SEQ ID NO: 312929 - DNA, 30 bp, Artificial Sequence
  Synthetic oligonucleotide
caacgaaatgcgatcaggaattggcatttc

SEQ ID NO: 312930 - DNA, 30 bp, Artificial Sequence
  Synthetic oligonucleotide
ggaaaacggctttatagcgtgcgtcatttc

SEQ ID NO: 312931 - DNA, 30 bp, Artificial Sequence
  Synthetic oligonucleotide
gataccggacgatgacgaaggattcatttc

SEQ ID NO: 312932 - DNA, 30 bp, Artificial Sequence
  Synthetic oligonucleotide
cttctctacgatacgaaaatggacgatttc

SEQ ID NO: 312933 - DNA, 30 bp, Artificial Sequence
  Synthetic oligonucleotide
attgcacagacatgatgtgattacgatttc

SEQ ID NO: 312934 - DNA, 30 bp, Artificial Sequence
  Synthetic oligonucleotide
aaccccccagactaagaatttagcgatttc

SEQ ID NO: 312935 - DNA, 30 bp, Artificial Sequence
  Synthetic oligonucleotide
ggggcttgaggagattttagcaaggatttc

SEQ ID NO: 312936 - DNA, 30 bp, Artificial Sequence
  Synthetic oligonucleotide
ggaaagtaaatgtacagaggtagggatttc

SEQ ID NO: 312937 - DNA, 30 bp, Artificial Sequence
  Synthetic oligonucleotide
cttagagcaacctctccattaggggatttc

SEQ ID NO: 312938 - DNA, 30 bp, Artificial Sequence
  Synthetic oligonucleotide
aactaatccatatgaggaaacttggatttc

SEQ ID NO: 312939 - DNA, 30 bp, Artificial Sequence
  Synthetic oligonucleotide
acggtccaacctgttacagatcttgatttc

SEQ ID NO: 312940 - DNA, 30 bp, Artificial Sequence
  Synthetic oligonucleotide
ggtaactagtcactaatgaaacactatttc

SEQ ID NO: 312941 - DNA, 30 bp, Artificial Sequence
  Synthetic oligonucleotide
agtgcggttagtggccttcggagctatttc

SEQ ID NO: 312942 - DNA, 30 bp, Artificial Sequence
  Synthetic oligonucleotide
atgcgtcttgcggcttcagctgagtatttc

SEQ ID NO: 312943 - DNA, 30 bp, Artificial Sequence
  Synthetic oligonucleotide
aactaggcttgaccataagtgctgtatttc

SEQ ID NO: 312944 - DNA, 30 bp, Artificial Sequence
  Synthetic oligonucleotide
ttaacaaagccttgttaggaagcttatttc

SEQ ID NO: 312945 - DNA, 30 bp, Artificial Sequence
  Synthetic oligonucleotide
agagcggatgggacactgagggacactttc

SEQ ID NO: 312946 - DNA, 30 bp, Artificial Sequence
  Synthetic oligonucleotide
caagaatactgttgggtccttggcactttc

SEQ ID NO: 312947 - DNA, 30 bp, Artificial Sequence
  Synthetic oligonucleotide
gtccaataacatagctgcagtaagactttc

SEQ ID NO: 312948 - DNA, 30 bp, Artificial Sequence
  Synthetic oligonucleotide
aatgggggcttataaaggcaaatgactttc

SEQ ID NO: 312949 - DNA, 30 bp, Artificial Sequence
  Synthetic oligonucleotide
tgtctcggtgtaggcgatgaggatactttc

SEQ ID NO: 312950 - DNA, 30 bp, Artificial Sequence
  Synthetic oligonucleotide
acgtggtccgattccggcagccttactttc

SEQ ID NO: 312951 - DNA, 30 bp, Artificial Sequence
  Synthetic oligonucleotide
gtcgaggactggggcgactaagttactttc

SEQ ID NO: 312952 - DNA, 30 bp, Artificial Sequence
  Synthetic oligonucleotide
gtaagaagtctgatggagtttagacctttc

SEQ ID NO: 312953 - DNA, 30 bp, Artificial Sequence
  Synthetic oligonucleotide
ctgtaggtggttgcattgtatatgcctttc

SEQ ID NO: 312954 - DNA, 30 bp, Artificial Sequence
  Synthetic oligonucleotide
tgtgaccggtgattgtgatgatctcctttc

SEQ ID NO: 312955 - DNA, 30 bp, Artificial Sequence
  Synthetic oligonucleotide
cggtagatgtttacgcttattgcagctttc

SEQ ID NO: 312956 - DNA, 30 bp, Artificial Sequence
  Synthetic oligonucleotide
ggtcatcactcatcgaacgtggtagctttc

SEQ ID NO: 312957 - DNA, 30 bp, Artificial Sequence
  Synthetic oligonucleotide
tctcggaagacaattatagaaggcgctttc

SEQ ID NO: 312958 - DNA, 30 bp, Artificial Sequence
  Synthetic oligonucleotide
ggcatgccataacgtttgtgaacttctttc

SEQ ID NO: 312959 - DNA, 30 bp, Artificial Sequence
  Synthetic oligonucleotide
gtttgctggtgccgacactttggcagtttc

SEQ ID NO: 312960 - DNA, 30 bp, Artificial Sequence
  Synthetic oligonucleotide
aagagccatgcctcctcagagccgagtttc

SEQ ID NO: 312961 - DNA, 30 bp, Artificial Sequence
  Synthetic oligonucleotide
tactttttatgcacgtcaaacctgagtttc

SEQ ID NO: 312962 - DNA, 29 bp, Artificial Sequence
  Synthetic oligonucleotide
aaggtagttgtctgggcgtgttgagtttc

SEQ ID NO: 312963 - DNA, 30 bp, Artificial Sequence
  Synthetic oligonucleotide
ctacaatgttatgaacggtagcgtagtttc

SEQ ID NO: 312964 - DNA, 30 bp, Artificial Sequence
  Synthetic oligonucleotide
ccgaaaagtatcaatggggatgttagtttc

SEQ ID NO: 312965 - DNA, 30 bp, Artificial Sequence
  Synthetic oligonucleotide
gacatagtaagttgatcctcgaaacgtttc

SEQ ID NO: 312966 - DNA, 30 bp, Artificial Sequence
  Synthetic oligonucleotide
tcctaatactaaggtaagggtacacgtttc

SEQ ID NO: 312967 - DNA, 30 bp, Artificial Sequence
  Synthetic oligonucleotide
gataacatgtccttcaacacagcccgtttc

SEQ ID NO: 312968 - DNA, 30 bp, Artificial Sequence
  Synthetic oligonucleotide
gatgattaacccttgctcgctctgcgtttc

SEQ ID NO: 312969 - DNA, 30 bp, Artificial Sequence
  Synthetic oligonucleotide
acttaagaggcattcgcgttgactcgtttc

SEQ ID NO: 312970 - DNA, 30 bp, Artificial Sequence
  Synthetic oligonucleotide
gttctgaggacaggtgagagagcaggtttc

SEQ ID NO: 312971 - DNA, 30 bp, Artificial Sequence
  Synthetic oligonucleotide
atcgaccaagataaaaagaattagggtttc

SEQ ID NO: 312972 - DNA, 30 bp, Artificial Sequence
  Synthetic oligonucleotide
agatgtcatgagaagttaacaacgggtttc

SEQ ID NO: 312973 - DNA, 30 bp, Artificial Sequence
  Synthetic oligonucleotide
actcccgaggcgggtaccaggtcgggtttc

SEQ ID NO: 312974 - DNA, 30 bp, Artificial Sequence
  Synthetic oligonucleotide
tcaccaggaagaaattgtttgaatggtttc

SEQ ID NO: 312975 - DNA, 30 bp, Artificial Sequence
  Synthetic oligonucleotide
gaaccgcggcaagaacactcctaatgtttc

SEQ ID NO: 312976 - DNA, 30 bp, Artificial Sequence
  Synthetic oligonucleotide
taaagctgttcagcgatgttagactgtttc

SEQ ID NO: 312977 - DNA, 30 bp, Artificial Sequence
  Synthetic oligonucleotide
gccttcagcgaatagtaacgaccctgtttc

SEQ ID NO: 312978 - DNA, 30 bp, Artificial Sequence
  Synthetic oligonucleotide
ttgcgaaggcttcagcgcatcccgtgtttc

SEQ ID NO: 312979 - DNA, 30 bp, Artificial Sequence
  Synthetic oligonucleotide
ttgcactaaatccttgcatcgaggtgtttc

SEQ ID NO: 312980 - DNA, 30 bp, Artificial Sequence
  Synthetic oligonucleotide
gtggactgccaaaggcccaacgtgtgtttc

SEQ ID NO: 312981 - DNA, 30 bp, Artificial Sequence
  Synthetic oligonucleotide
aggtagttaagtgtgagtcagttgtgtttc

SEQ ID NO: 312982 - DNA, 30 bp, Artificial Sequence
  Synthetic oligonucleotide
ggggaataacgcccagtcatacgaattttc

SEQ ID NO: 312983 - DNA, 30 bp, Artificial Sequence
  Synthetic oligonucleotide
tagtacaaaaaaggactgaaaagcattttc

SEQ ID NO: 312984 - DNA, 30 bp, Artificial Sequence
  Synthetic oligonucleotide
gatacgtcgtcgaatgataatggcattttc

SEQ ID NO: 312985 - DNA, 30 bp, Artificial Sequence
  Synthetic oligonucleotide
ggaatcactggttaaacgcatttcattttc

SEQ ID NO: 312986 - DNA, 30 bp, Artificial Sequence
  Synthetic oligonucleotide
cgggcttaaagtttctaccagcctattttc

SEQ ID NO: 312987 - DNA, 30 bp, Artificial Sequence
  Synthetic oligonucleotide
gtaatacagtgtgtggttttataacttttc

SEQ ID NO: 312988 - DNA, 30 bp, Artificial Sequence
  Synthetic oligonucleotide
aacatcatggttagactggtctaacttttc

SEQ ID NO: 312989 - DNA, 30 bp, Artificial Sequence
  Synthetic oligonucleotide
caccgccaaggaaatctgggtggacttttc

SEQ ID NO: 312990 - DNA, 30 bp, Artificial Sequence
  Synthetic oligonucleotide
ttgagttgcccaaattaagcctcccttttc

SEQ ID NO: 312991 - DNA, 30 bp, Artificial Sequence
  Synthetic oligonucleotide
ctacaaagtgggggaccgaagagccttttc

SEQ ID NO: 312992 - DNA, 30 bp, Artificial Sequence
  Synthetic oligonucleotide
gttgcacgtccggaagacactctgcttttc

SEQ ID NO: 312993 - DNA, 30 bp, Artificial Sequence
  Synthetic oligonucleotide
tccaaacctgcccatacgagatgtcttttc

SEQ ID NO: 312994 - DNA, 30 bp, Artificial Sequence
  Synthetic oligonucleotide
cctaacacgcggcaacgggcgattcttttc

SEQ ID NO: 312995 - DNA, 30 bp, Artificial Sequence
  Synthetic oligonucleotide
gttatcaacgacaggattagtagagttttc

SEQ ID NO: 312996 - DNA, 30 bp, Artificial Sequence
  Synthetic oligonucleotide
cgagggtctggaattcgtctgttagttttc

SEQ ID NO: 312997 - DNA, 30 bp, Artificial Sequence
  Synthetic oligonucleotide
ttcagattattcagtggggtcgaggttttc

SEQ ID NO: 312998 - DNA, 30 bp, Artificial Sequence
  Synthetic oligonucleotide
agcctccatgcgcacagcgtttgggttttc

SEQ ID NO: 312999 - DNA, 30 bp, Artificial Sequence
  Synthetic oligonucleotide
cagtaccgttgcatcccaagacaatttttc

SEQ ID NO: 313000 - DNA, 30 bp, Artificial Sequence
  Synthetic oligonucleotide
cacagaggtgagttacattcgtaatttttc

SEQ ID NO: 313001 - DNA, 30 bp, Artificial Sequence
  Synthetic oligonucleotide
atacaggcggaatggcactggccctttttc

SEQ ID NO: 313002 - DNA, 30 bp, Artificial Sequence
  Synthetic oligonucleotide
tctataggaatcgacgcgattacgtttttc

SEQ ID NO: 313003 - DNA, 30 bp, Artificial Sequence
  Synthetic oligonucleotide
ttctgtacaagattcagatcgctgtttttc

SEQ ID NO: 313004 - DNA, 30 bp, Artificial Sequence
  Synthetic oligonucleotide
gctaaacactagtaaatcttacattttttc

SEQ ID NO: 313005 - DNA, 30 bp, Artificial Sequence
  Synthetic oligonucleotide
ctgggggacatccagtaacatacaaaaaag

SEQ ID NO: 313006 - DNA, 30 bp, Artificial Sequence
  Synthetic oligonucleotide
atttagtgcccgaggcttcacccaaaaaag

SEQ ID NO: 313007 - DNA, 30 bp, Artificial Sequence
  Synthetic oligonucleotide
ggcacggggttcgggttggtattaaaaaag

SEQ ID NO: 313008 - DNA, 30 bp, Artificial Sequence
  Synthetic oligonucleotide
gtgtcaacgggtcacaaagagttaaaaaag

SEQ ID NO: 313009 - DNA, 31 bp, Artificial Sequence
  Synthetic oligonucleotide
atcccagtgcttgataatacataacaaaaag

SEQ ID NO: 313010 - DNA, 30 bp, Artificial Sequence
  Synthetic oligonucleotide
cgctgcaatcgtcgacgagttaacaaaaag

SEQ ID NO: 313011 - DNA, 30 bp, Artificial Sequence
  Synthetic oligonucleotide
taaagcccacggatgggttataggaaaaag

SEQ ID NO: 313012 - DNA, 30 bp, Artificial Sequence
  Synthetic oligonucleotide
gaatcgaagccgtgtaacgtcgtgaaaaag

SEQ ID NO: 313013 - DNA, 30 bp, Artificial Sequence
  Synthetic oligonucleotide
agtaataacagtcttgaatggaaccaaaag

SEQ ID NO: 313014 - DNA, 30 bp, Artificial Sequence
  Synthetic oligonucleotide
ggcaaactagtcaatcttacagaccaaaag

SEQ ID NO: 313015 - DNA, 30 bp, Artificial Sequence
  Synthetic oligonucleotide
gaaccctagcgacgcataagctgccaaaag

SEQ ID NO: 313016 - DNA, 30 bp, Artificial Sequence
  Synthetic oligonucleotide
tgataaaatgtgtaaagctccttccaaaag

SEQ ID NO: 313017 - DNA, 30 bp, Artificial Sequence
  Synthetic oligonucleotide
gcttttcgtataattaaattctcgcaaaag

SEQ ID NO: 313018 - DNA, 30 bp, Artificial Sequence
  Synthetic oligonucleotide
aattatcgctgttcatgaaatatgcaaaag

SEQ ID NO: 313019 - DNA, 30 bp, Artificial Sequence
  Synthetic oligonucleotide
agatgagtgttatatgacctcatagaaaag

SEQ ID NO: 313020 - DNA, 30 bp, Artificial Sequence
  Synthetic oligonucleotide
gtcgctctgagatcgcagacggccgaaaag

SEQ ID NO: 313021 - DNA, 30 bp, Artificial Sequence
  Synthetic oligonucleotide
gccctgtgcgtacattgtaaaatggaaaag

SEQ ID NO: 313022 - DNA, 30 bp, Artificial Sequence
  Synthetic oligonucleotide
cggtctgggtgcgcatgtcaaatggaaaag

SEQ ID NO: 313023 - DNA, 30 bp, Artificial Sequence
  Synthetic oligonucleotide
acgaggcgtcgctgtttatttggtgaaaag

SEQ ID NO: 313024 - DNA, 30 bp, Artificial Sequence
  Synthetic oligonucleotide
gaacactcaatcctcgcatccacataaaag

SEQ ID NO: 313025 - DNA, 30 bp, Artificial Sequence
  Synthetic oligonucleotide
ttagaaggtgccggctctgcaatataaaag

SEQ ID NO: 313026 - DNA, 30 bp, Artificial Sequence
  Synthetic oligonucleotide
gttccaagggcctcccaccgcatctaaaag

SEQ ID NO: 313027 - DNA, 30 bp, Artificial Sequence
  Synthetic oligonucleotide
tcactctgaaaactccgcatcatctaaaag

SEQ ID NO: 313028 - DNA, 30 bp, Artificial Sequence
  Synthetic oligonucleotide
ggcgcaactgcctattacccccggtaaaag

SEQ ID NO: 313029 - DNA, 30 bp, Artificial Sequence
  Synthetic oligonucleotide
ggttggaacttgagggttgtgcggtaaaag

SEQ ID NO: 313030 - DNA, 30 bp, Artificial Sequence
  Synthetic oligonucleotide
ctacggctgcaagcagcgcttgattaaaag

SEQ ID NO: 313031 - DNA, 30 bp, Artificial Sequence
  Synthetic oligonucleotide
taacttctggcccagtctgttacttaaaag

SEQ ID NO: 313032 - DNA, 30 bp, Artificial Sequence
  Synthetic oligonucleotide
gccctagtaaccgggtccggttcttaaaag

SEQ ID NO: 313033 - DNA, 30 bp, Artificial Sequence
  Synthetic oligonucleotide
gaaaagctaagattacacgcgtgttaaaag

SEQ ID NO: 313034 - DNA, 30 bp, Artificial Sequence
  Synthetic oligonucleotide
tagtctagcagatcacgtcgtatttaaaag

SEQ ID NO: 313035 - DNA, 30 bp, Artificial Sequence
  Synthetic oligonucleotide
cgtcctcggggaacttcggaggtttaaaag

SEQ ID NO: 313036 - DNA, 30 bp, Artificial Sequence
  Synthetic oligonucleotide
gcaaatatggataattgccgaggaacaaag

SEQ ID NO: 313037 - DNA, 30 bp, Artificial Sequence
  Synthetic oligonucleotide
cttcagggccaccttccttgagccacaaag

SEQ ID NO: 313038 - DNA, 30 bp, Artificial Sequence
  Synthetic oligonucleotide
tcaactcctggattagctcaagagacaaag

SEQ ID NO: 313039 - DNA, 30 bp, Artificial Sequence
  Synthetic oligonucleotide
ttacgcattaaggatttgcctatgacaaag

SEQ ID NO: 313040 - DNA, 30 bp, Artificial Sequence
  Synthetic oligonucleotide
caacacccaatcaccattagaaatacaaag

SEQ ID NO: 313041 - DNA, 30 bp, Artificial Sequence
  Synthetic oligonucleotide
tagagttccccactctcaggttgtacaaag

SEQ ID NO: 313042 - DNA, 30 bp, Artificial Sequence
  Synthetic oligonucleotide
gcaccattaacaaatctacgcgagccaaag

SEQ ID NO: 313043 - DNA, 30 bp, Artificial Sequence
  Synthetic oligonucleotide
ctcagtctggcgcatgccactaggccaaag

SEQ ID NO: 313044 - DNA, 30 bp, Artificial Sequence
  Synthetic oligonucleotide
tgttacgcggtacctgtggcatctccaaag

SEQ ID NO: 313045 - DNA, 30 bp, Artificial Sequence
  Synthetic oligonucleotide
gcgtattgacatctaattgaggttccaaag

SEQ ID NO: 313046 - DNA, 30 bp, Artificial Sequence
  Synthetic oligonucleotide
gggaggccccaatgtcggttagcagcaaag

SEQ ID NO: 313047 - DNA, 30 bp, Artificial Sequence
  Synthetic oligonucleotide
agttgcagattaggggagagtgcagcaaag

SEQ ID NO: 313048 - DNA, 30 bp, Artificial Sequence
  Synthetic oligonucleotide
cgtacatatgattagatcggacgagcaaag

SEQ ID NO: 313049 - DNA, 30 bp, Artificial Sequence
  Synthetic oligonucleotide
ggagggctcggacaactgttggacgcaaag

SEQ ID NO: 313050 - DNA, 30 bp, Artificial Sequence
  Synthetic oligonucleotide
gtacttacgccttgtacacagggcgcaaag

SEQ ID NO: 313051 - DNA, 30 bp, Artificial Sequence
  Synthetic oligonucleotide
gcactaatcctgtaaggatctggcgcaaag

SEQ ID NO: 313052 - DNA, 30 bp, Artificial Sequence
  Synthetic oligonucleotide
aatgggcagcacgatccgagtgtcgcaaag

SEQ ID NO: 313053 - DNA, 30 bp, Artificial Sequence
  Synthetic oligonucleotide
gctccaataacaatcgttatcggggcaaag

SEQ ID NO: 313054 - DNA, 30 bp, Artificial Sequence
  Synthetic oligonucleotide
tcggcaagacgtccacgtatgtgggcaaag

SEQ ID NO: 313055 - DNA, 30 bp, Artificial Sequence
  Synthetic oligonucleotide
acaaccggtgggtcattagtggtggcaaag

SEQ ID NO: 313056 - DNA, 30 bp, Artificial Sequence
  Synthetic oligonucleotide
tcttaatggccatctacgactgatgcaaag

SEQ ID NO: 313057 - DNA, 30 bp, Artificial Sequence
  Synthetic oligonucleotide
agccagtaatacaggttctcctttgcaaag

SEQ ID NO: 313058 - DNA, 30 bp, Artificial Sequence
  Synthetic oligonucleotide
ttacgaccgtacaattcagttgcatcaaag

SEQ ID NO: 313059 - DNA, 30 bp, Artificial Sequence
  Synthetic oligonucleotide
gccgttgttaatcggttcttaccctcaaag

SEQ ID NO: 313060 - DNA, 30 bp, Artificial Sequence
  Synthetic oligonucleotide
gggacactatgagatctgcttttctcaaag

SEQ ID NO: 313061 - DNA, 30 bp, Artificial Sequence
  Synthetic oligonucleotide
gctatatttttgctgctcaaacggtcaaag

SEQ ID NO: 313062 - DNA, 30 bp, Artificial Sequence
  Synthetic oligonucleotide
gtccattgataaggtgtggggttgtcaaag

SEQ ID NO: 313063 - DNA, 30 bp, Artificial Sequence
  Synthetic oligonucleotide
tggcgatatcaaatgttcgggaattcaaag

SEQ ID NO: 313064 - DNA, 30 bp, Artificial Sequence
  Synthetic oligonucleotide
ctagttcacattaactcgatgcattcaaag

SEQ ID NO: 313065 - DNA, 30 bp, Artificial Sequence
  Synthetic oligonucleotide
aaagtcagtagtttaattctggattcaaag

SEQ ID NO: 313066 - DNA, 30 bp, Artificial Sequence
  Synthetic oligonucleotide
ctaactcaccagtcataggtatcttcaaag

SEQ ID NO: 313067 - DNA, 30 bp, Artificial Sequence
  Synthetic oligonucleotide
acggtaatagagccgccggggcgttcaaag

SEQ ID NO: 313068 - DNA, 30 bp, Artificial Sequence
  Synthetic oligonucleotide
acggtcggggtatgagggaagggttcaaag

SEQ ID NO: 313069 - DNA, 30 bp, Artificial Sequence
  Synthetic oligonucleotide
gcctctctggcaggagaaacaatttcaaag

SEQ ID NO: 313070 - DNA, 30 bp, Artificial Sequence
  Synthetic oligonucleotide
gccaaagagtcaaacgatgtgttttcaaag

SEQ ID NO: 313071 - DNA, 30 bp, Artificial Sequence
  Synthetic oligonucleotide
tgttagcgccacctctctagaataagaaag

SEQ ID NO: 313072 - DNA, 30 bp, Artificial Sequence
  Synthetic oligonucleotide
ggaaaaggcaccgcacggggattaagaaag

SEQ ID NO: 313073 - DNA, 30 bp, Artificial Sequence
  Synthetic oligonucleotide
accacctaccgtccctatgctttaagaaag

SEQ ID NO: 313074 - DNA, 30 bp, Artificial Sequence
  Synthetic oligonucleotide
tcggccaacggaaacgtgtttaccagaaag

SEQ ID NO: 313075 - DNA, 30 bp, Artificial Sequence
  Synthetic oligonucleotide
tcccggccacctctcacatcctccagaaag

SEQ ID NO: 313076 - DNA, 30 bp, Artificial Sequence
  Synthetic oligonucleotide
aacttatcttgtcgtctaacagcgagaaag

SEQ ID NO: 313077 - DNA, 30 bp, Artificial Sequence
  Synthetic oligonucleotide
tcaaatgcaagtgcgcacttccggagaaag

SEQ ID NO: 313078 - DNA, 30 bp, Artificial Sequence
  Synthetic oligonucleotide
gtagagttttgtgacaggaatcctagaaag

SEQ ID NO: 313079 - DNA, 30 bp, Artificial Sequence
  Synthetic oligonucleotide
ttatttcttctcccgtcaagccaacgaaag

SEQ ID NO: 313080 - DNA, 30 bp, Artificial Sequence
  Synthetic oligonucleotide
agtatccgggatagcgaatgaagccgaaag

SEQ ID NO: 313081 - DNA, 30 bp, Artificial Sequence
  Synthetic oligonucleotide
taatgtagcgaaggctggacgcgccgaaag

SEQ ID NO: 313082 - DNA, 30 bp, Artificial Sequence
  Synthetic oligonucleotide
taaaggaggtcatgtattaggcggcgaaag

SEQ ID NO: 313083 - DNA, 30 bp, Artificial Sequence
  Synthetic oligonucleotide
ttcaacaggagcagctaacttgggcgaaag

SEQ ID NO: 313084 - DNA, 30 bp, Artificial Sequence
  Synthetic oligonucleotide
cttataaattctagtggagaagctcgaaag

SEQ ID NO: 313085 - DNA, 30 bp, Artificial Sequence
  Synthetic oligonucleotide
tatccagtacggatcacgggctaaggaaag

SEQ ID NO: 313086 - DNA, 30 bp, Artificial Sequence
  Synthetic oligonucleotide
ttgtaggttggggttcaacacaacggaaag

SEQ ID NO: 313087 - DNA, 30 bp, Artificial Sequence
  Synthetic oligonucleotide
ggactcatcggttggcctcggcacggaaag

SEQ ID NO: 313088 - DNA, 30 bp, Artificial Sequence
  Synthetic oligonucleotide
atgcctattcgagcaggcttgcacggaaag

SEQ ID NO: 313089 - DNA, 30 bp, Artificial Sequence
  Synthetic oligonucleotide
aacatggaagctactctagatgacggaaag

SEQ ID NO: 313090 - DNA, 30 bp, Artificial Sequence
  Synthetic oligonucleotide
aaagtattcccgccgcgcggaggcggaaag

SEQ ID NO: 313091 - DNA, 30 bp, Artificial Sequence
  Synthetic oligonucleotide
gtgccagtctggaccgcgccttagggaaag

SEQ ID NO: 313092 - DNA, 30 bp, Artificial Sequence
  Synthetic oligonucleotide
gtccagaagaaccggtaaacatctggaaag

SEQ ID NO: 313093 - DNA, 30 bp, Artificial Sequence
  Synthetic oligonucleotide
gtccggtaaaactcgttactgagtggaaag

SEQ ID NO: 313094 - DNA, 30 bp, Artificial Sequence
  Synthetic oligonucleotide
caccctttcgcgtggatcccgtgtggaaag

SEQ ID NO: 313095 - DNA, 30 bp, Artificial Sequence
  Synthetic oligonucleotide
ggctaacgcacatcaatcatcgcatgaaag

SEQ ID NO: 313096 - DNA, 30 bp, Artificial Sequence
  Synthetic oligonucleotide
aagagaagccctgcggacccattatgaaag

SEQ ID NO: 313097 - DNA, 30 bp, Artificial Sequence
  Synthetic oligonucleotide
agagtggtgcatgtactaaccctctgaaag

SEQ ID NO: 313098 - DNA, 30 bp, Artificial Sequence
  Synthetic oligonucleotide
ccctgcaatcctaaccgcttcttgtgaaag

SEQ ID NO: 313099 - DNA, 30 bp, Artificial Sequence
  Synthetic oligonucleotide
cactctagggggctaatggggaaaataaag

SEQ ID NO: 313100 - DNA, 30 bp, Artificial Sequence
  Synthetic oligonucleotide
agcccggatagtccaactcatttcataaag

SEQ ID NO: 313101 - DNA, 30 bp, Artificial Sequence
  Synthetic oligonucleotide
tcaatctagtgaatgacgctacagataaag

SEQ ID NO: 313102 - DNA, 30 bp, Artificial Sequence
  Synthetic oligonucleotide
taagcggagttgagatattatacactaaag

SEQ ID NO: 313103 - DNA, 30 bp, Artificial Sequence
  Synthetic oligonucleotide
ccgggattaacccggagggggcgactaaag

SEQ ID NO: 313104 - DNA, 30 bp, Artificial Sequence
  Synthetic oligonucleotide
ttctaaggtaagcggctaaggagcctaaag

SEQ ID NO: 313105 - DNA, 30 bp, Artificial Sequence
  Synthetic oligonucleotide
ttagtgccagcctaaatacgaaagctaaag

SEQ ID NO: 313106 - DNA, 30 bp, Artificial Sequence
  Synthetic oligonucleotide
tgcccgcgtgcgacgcaagaaatgctaaag

SEQ ID NO: 313107 - DNA, 30 bp, Artificial Sequence
  Synthetic oligonucleotide
atcccgcgatcgaaaattccgttgctaaag

SEQ ID NO: 313108 - DNA, 30 bp, Artificial Sequence
  Synthetic oligonucleotide
ggtctcagagtgatacaccgtcatctaaag

SEQ ID NO: 313109 - DNA, 30 bp, Artificial Sequence
  Synthetic oligonucleotide
ccatgtagcagaccctgtagcgatctaaag

SEQ ID NO: 313110 - DNA, 30 bp, Artificial Sequence
  Synthetic oligonucleotide
ttaaaacccggcaggtcgccctatctaaag

SEQ ID NO: 313111 - DNA, 30 bp, Artificial Sequence
  Synthetic oligonucleotide
ggtaaagccgttcaaaacttaaaagtaaag

SEQ ID NO: 313112 - DNA, 30 bp, Artificial Sequence
  Synthetic oligonucleotide
tagataatggttaccctggaatcagtaaag

SEQ ID NO: 313113 - DNA, 30 bp, Artificial Sequence
  Synthetic oligonucleotide
gatataatttagagaaccccagacgtaaag

SEQ ID NO: 313114 - DNA, 30 bp, Artificial Sequence
  Synthetic oligonucleotide
ccaggaacgaatgcctgaatcggcgtaaag

SEQ ID NO: 313115 - DNA, 30 bp, Artificial Sequence
  Synthetic oligonucleotide
gaggctggaagtctggcgactacggtaaag

SEQ ID NO: 313116 - DNA, 30 bp, Artificial Sequence
  Synthetic oligonucleotide
cggtaagcagcatttttttcttgggtaaag

SEQ ID NO: 313117 - DNA, 30 bp, Artificial Sequence
  Synthetic oligonucleotide
ctctggaaggggtgctggagttgtgtaaag

SEQ ID NO: 313118 - DNA, 30 bp, Artificial Sequence
  Synthetic oligonucleotide
ttctctgtgtgctaaaatcaggttgtaaag

SEQ ID NO: 313119 - DNA, 30 bp, Artificial Sequence
  Synthetic oligonucleotide
ttcgtttggtgataaaagttgtttgtaaag

SEQ ID NO: 313120 - DNA, 30 bp, Artificial Sequence
  Synthetic oligonucleotide
cgataatcgggtcgtttgcatgaattaaag

SEQ ID NO: 313121 - DNA, 30 bp, Artificial Sequence
  Synthetic oligonucleotide
gaccgtggcttggctggccagaccttaaag

SEQ ID NO: 313122 - DNA, 30 bp, Artificial Sequence
  Synthetic oligonucleotide
agttgaatcattgaccggtagtccttaaag

SEQ ID NO: 313123 - DNA, 30 bp, Artificial Sequence
  Synthetic oligonucleotide
attatgtatgcgcgggttacgatcttaaag

SEQ ID NO: 313124 - DNA, 30 bp, Artificial Sequence
  Synthetic oligonucleotide
gggcagaggacggccacgcatatcttaaag

SEQ ID NO: 313125 - DNA, 30 bp, Artificial Sequence
  Synthetic oligonucleotide
atgctatgtaatggacgtcgccggttaaag

SEQ ID NO: 313126 - DNA, 30 bp, Artificial Sequence
  Synthetic oligonucleotide
gttgccgcgaattacgaatggactttaaag

SEQ ID NO: 313127 - DNA, 30 bp, Artificial Sequence
  Synthetic oligonucleotide
cgctgggcgctatgttctccatcaaacaag

SEQ ID NO: 313128 - DNA, 29 bp, Artificial Sequence
  Synthetic oligonucleotide
acccttagcatccaatacgacgcaacaag

SEQ ID NO: 313129 - DNA, 31 bp, Artificial Sequence
  Synthetic oligonucleotide
catagctacggtggttaagcttcgcaacaag

SEQ ID NO: 313130 - DNA, 30 bp, Artificial Sequence
  Synthetic oligonucleotide
taatgcactgctatcgtgccatgcaacaag

SEQ ID NO: 313131 - DNA, 30 bp, Artificial Sequence
  Synthetic oligonucleotide
aatgaggccaagcagttaattaggaacaag

SEQ ID NO: 313132 - DNA, 30 bp, Artificial Sequence
  Synthetic oligonucleotide
tttctgtaaggactggtggaaattaacaag

SEQ ID NO: 313133 - DNA, 30 bp, Artificial Sequence
  Synthetic oligonucleotide
gatcgcgacgtaacatattgtgtacacaag

SEQ ID NO: 313134 - DNA, 30 bp, Artificial Sequence
  Synthetic oligonucleotide
gctcatgttaaaagcagcccggtccacaag

SEQ ID NO: 313135 - DNA, 30 bp, Artificial Sequence
  Synthetic oligonucleotide
caatgggatactctatacgaccagcacaag

SEQ ID NO: 313136 - DNA, 30 bp, Artificial Sequence
  Synthetic oligonucleotide
tcgctggcgattataatagtctctcacaag

SEQ ID NO: 313137 - DNA, 30 bp, Artificial Sequence
  Synthetic oligonucleotide
gtttagactaattattacgcccgtcacaag

SEQ ID NO: 313138 - DNA, 30 bp, Artificial Sequence
  Synthetic oligonucleotide
ataagctggcaaccgtcccaacgtgacaag

SEQ ID NO: 313139 - DNA, 30 bp, Artificial Sequence
  Synthetic oligonucleotide
ctggggctcagctacactccgcttgacaag

SEQ ID NO: 313140 - DNA, 30 bp, Artificial Sequence
  Synthetic oligonucleotide
gggtaccactaattgatggcacactacaag

SEQ ID NO: 313141 - DNA, 30 bp, Artificial Sequence
  Synthetic oligonucleotide
tggacgttcgctacaaattgtaagtacaag

SEQ ID NO: 313142 - DNA, 30 bp, Artificial Sequence
  Synthetic oligonucleotide
aatagaccggacgggtcgcggtagtacaag

SEQ ID NO: 313143 - DNA, 30 bp, Artificial Sequence
  Synthetic oligonucleotide
cgactacttgcaatgtaagatcattacaag

SEQ ID NO: 313144 - DNA, 30 bp, Artificial Sequence
  Synthetic oligonucleotide
caatgtgttttaaacatcccgaacaccaag

SEQ ID NO: 313145 - DNA, 30 bp, Artificial Sequence
  Synthetic oligonucleotide
tgtggatagaatcttccacaggggaccaag

SEQ ID NO: 313146 - DNA, 30 bp, Artificial Sequence
  Synthetic oligonucleotide
gagagggcccctacgcatatctggaccaag

SEQ ID NO: 313147 - DNA, 30 bp, Artificial Sequence
  Synthetic oligonucleotide
ccgtcgcataacattgttgatattaccaag

SEQ ID NO: 313148 - DNA, 30 bp, Artificial Sequence
  Synthetic oligonucleotide
aaggttgggcgccttcgtttctcacccaag

SEQ ID NO: 313149 - DNA, 30 bp, Artificial Sequence
  Synthetic oligonucleotide
tgcggagaggaagctgtgacacggcccaag

SEQ ID NO: 313150 - DNA, 30 bp, Artificial Sequence
  Synthetic oligonucleotide
gcaatggtgccagtacgactgggagccaag

SEQ ID NO: 313151 - DNA, 30 bp, Artificial Sequence
  Synthetic oligonucleotide
tgcttgctgtttagccgcggccccgccaag

SEQ ID NO: 313152 - DNA, 30 bp, Artificial Sequence
  Synthetic oligonucleotide
tacatgcgatcgtcccactggtcatccaag

SEQ ID NO: 313153 - DNA, 30 bp, Artificial Sequence
  Synthetic oligonucleotide
gtcttggcaaaacgtcgtggtaagtccaag

SEQ ID NO: 313154 - DNA, 30 bp, Artificial Sequence
  Synthetic oligonucleotide
gtactcgtctcggcaaggcagagttccaag

SEQ ID NO: 313155 - DNA, 30 bp, Artificial Sequence
  Synthetic oligonucleotide
gggggccaacagacactagtcacaagcaag

SEQ ID NO: 313156 - DNA, 30 bp, Artificial Sequence
  Synthetic oligonucleotide
cccatgacttgccactgaatcgagagcaag

SEQ ID NO: 313157 - DNA, 30 bp, Artificial Sequence
  Synthetic oligonucleotide
ggataccgctgaacaggtcaggagcgcaag

SEQ ID NO: 313158 - DNA, 30 bp, Artificial Sequence
  Synthetic oligonucleotide
caatgtgagctgcggtgtggggatcgcaag

SEQ ID NO: 313159 - DNA, 30 bp, Artificial Sequence
  Synthetic oligonucleotide
tggtgtcaaaactcacttggctatcgcaag

SEQ ID NO: 313160 - DNA, 30 bp, Artificial Sequence
  Synthetic oligonucleotide
ttctaagttaagagacagtttgctcgcaag

SEQ ID NO: 313161 - DNA, 30 bp, Artificial Sequence
  Synthetic oligonucleotide
gggccatgctgaggtgtggtaggaggcaag

SEQ ID NO: 313162 - DNA, 30 bp, Artificial Sequence
  Synthetic oligonucleotide
aaagggctctcagtgctttgtacgggcaag

SEQ ID NO: 313163 - DNA, 30 bp, Artificial Sequence
  Synthetic oligonucleotide
gagctggaccagtcaacttcgcatggcaag

SEQ ID NO: 313164 - DNA, 30 bp, Artificial Sequence
  Synthetic oligonucleotide
gccaccaccactggcgaggcccagtgcaag

SEQ ID NO: 313165 - DNA, 30 bp, Artificial Sequence
  Synthetic oligonucleotide
gatatacacctctaaactctcctgtgcaag

SEQ ID NO: 313166 - DNA, 30 bp, Artificial Sequence
  Synthetic oligonucleotide
gacagtgcaaaactaggatggatttgcaag

SEQ ID NO: 313167 - DNA, 30 bp, Artificial Sequence
  Synthetic oligonucleotide
tggattgtgctacacatagacaaaatcaag

SEQ ID NO: 313168 - DNA, 30 bp, Artificial Sequence
  Synthetic oligonucleotide
ggggcattataacgagatctgacaatcaag

SEQ ID NO: 313169 - DNA, 30 bp, Artificial Sequence
  Synthetic oligonucleotide
taatcggctctgagcctgtactacatcaag

SEQ ID NO: 313170 - DNA, 30 bp, Artificial Sequence
  Synthetic oligonucleotide
ctgggggaacaggttatctctagcatcaag

SEQ ID NO: 313171 - DNA, 30 bp, Artificial Sequence
  Synthetic oligonucleotide
acgggcgatgtagccttgttgccactcaag

SEQ ID NO: 313172 - DNA, 30 bp, Artificial Sequence
  Synthetic oligonucleotide
gcctgtttagcagaatgggagaacctcaag

SEQ ID NO: 313173 - DNA, 30 bp, Artificial Sequence
  Synthetic oligonucleotide
tcggcggccaatggcaccatatcgctcaag

SEQ ID NO: 313174 - DNA, 30 bp, Artificial Sequence
  Synthetic oligonucleotide
cggtgttgtggttgatgtgaactgctcaag

SEQ ID NO: 313175 - DNA, 30 bp, Artificial Sequence
  Synthetic oligonucleotide
aagtctagctctagacctcgggtgctcaag

SEQ ID NO: 313176 - DNA, 30 bp, Artificial Sequence
  Synthetic oligonucleotide
gataggaactacagcccctagaatctcaag

SEQ ID NO: 313177 - DNA, 30 bp, Artificial Sequence
  Synthetic oligonucleotide
ttgaatctgcttgactcggcctcagtcaag

SEQ ID NO: 313178 - DNA, 30 bp, Artificial Sequence
  Synthetic oligonucleotide
gatcaaatagaatcaggacgtttggtcaag

SEQ ID NO: 313179 - DNA, 30 bp, Artificial Sequence
  Synthetic oligonucleotide
aaagggaaggtggctcagtatgtattcaag

SEQ ID NO: 313180 - DNA, 30 bp, Artificial Sequence
  Synthetic oligonucleotide
ttcggtactcaaagttacaccctcttcaag

SEQ ID NO: 313181 - DNA, 30 bp, Artificial Sequence
  Synthetic oligonucleotide
attattgcttacttatcggtaagtttcaag

SEQ ID NO: 313182 - DNA, 30 bp, Artificial Sequence
  Synthetic oligonucleotide
acaagtttaacaaactaagagtttttcaag

SEQ ID NO: 313183 - DNA, 30 bp, Artificial Sequence
  Synthetic oligonucleotide
attcaacgggaataaaatccttttttcaag

SEQ ID NO: 313184 - DNA, 30 bp, Artificial Sequence
  Synthetic oligonucleotide
cagccagttgattccgttttgccaaagaag

SEQ ID NO: 313185 - DNA, 30 bp, Artificial Sequence
  Synthetic oligonucleotide
agttttatcgatatagcaatcctaaagaag

SEQ ID NO: 313186 - DNA, 30 bp, Artificial Sequence
  Synthetic oligonucleotide
ctactagcctgtctaggggaggtaaagaag

SEQ ID NO: 313187 - DNA, 30 bp, Artificial Sequence
  Synthetic oligonucleotide
tgcttgctctcttctgaccggttcaagaag

SEQ ID NO: 313188 - DNA, 30 bp, Artificial Sequence
  Synthetic oligonucleotide
gtcatggggttatagcgaaacctgaagaag

SEQ ID NO: 313189 - DNA, 30 bp, Artificial Sequence
  Synthetic oligonucleotide
tttccttagaggtaatctggttgtaagaag

SEQ ID NO: 313190 - DNA, 30 bp, Artificial Sequence
  Synthetic oligonucleotide
aatcttgattttataaccgagaggcagaag

SEQ ID NO: 313191 - DNA, 30 bp, Artificial Sequence
  Synthetic oligonucleotide
gaaggggttctttctgatccgaggcagaag

SEQ ID NO: 313192 - DNA, 30 bp, Artificial Sequence
  Synthetic oligonucleotide
gtctgccctcttagaaaatgtaggcagaag

SEQ ID NO: 313193 - DNA, 30 bp, Artificial Sequence
  Synthetic oligonucleotide
ataaagcgcgggtgggtcctgattcagaag

SEQ ID NO: 313194 - DNA, 30 bp, Artificial Sequence
  Synthetic oligonucleotide
ttcgattaacttctatgcgtgtaagagaag

SEQ ID NO: 313195 - DNA, 30 bp, Artificial Sequence
  Synthetic oligonucleotide
ccccagtcggttcggcatagattagagaag

SEQ ID NO: 313196 - DNA, 30 bp, Artificial Sequence
  Synthetic oligonucleotide
tcttttaccccatcgtgagggggggagaag

SEQ ID NO: 313197 - DNA, 30 bp, Artificial Sequence
  Synthetic oligonucleotide
tgagttacacgaatatggtggtatgagaag

SEQ ID NO: 313198 - DNA, 30 bp, Artificial Sequence
  Synthetic oligonucleotide
aatctttgaccgtcacaggcaagtgagaag

SEQ ID NO: 313199 - DNA, 30 bp, Artificial Sequence
  Synthetic oligonucleotide
cgcagtactaacatttaatttagtgagaag

SEQ ID NO: 313200 - DNA, 30 bp, Artificial Sequence
  Synthetic oligonucleotide
gtccccagaggcagtacgctcgttgagaag

SEQ ID NO: 313201 - DNA, 30 bp, Artificial Sequence
  Synthetic oligonucleotide
ttgtatgcagagatgatcaaggtatagaag

SEQ ID NO: 313202 - DNA, 30 bp, Artificial Sequence
  Synthetic oligonucleotide
gtaattaggcagagtgattggttatagaag

SEQ ID NO: 313203 - DNA, 30 bp, Artificial Sequence
  Synthetic oligonucleotide
tacagtccgagttcggactcaaacacgaag

SEQ ID NO: 313204 - DNA, 30 bp, Artificial Sequence
  Synthetic oligonucleotide
ttccccaactaaactattgtaaggacgaag

SEQ ID NO: 313205 - DNA, 30 bp, Artificial Sequence
  Synthetic oligonucleotide
tctccgatgctatcttgagcaaatacgaag

SEQ ID NO: 313206 - DNA, 30 bp, Artificial Sequence
  Synthetic oligonucleotide
gcgccagtgtggtggtcgcacactacgaag

SEQ ID NO: 313207 - DNA, 30 bp, Artificial Sequence
  Synthetic oligonucleotide
atctaaagaacgttggttcctcgtacgaag

SEQ ID NO: 313208 - DNA, 30 bp, Artificial Sequence
  Synthetic oligonucleotide
acctgcccggcggttattcaatcaccgaag

SEQ ID NO: 313209 - DNA, 30 bp, Artificial Sequence
  Synthetic oligonucleotide
ggcagcctctctgccggagaccccccgaag

SEQ ID NO: 313210 - DNA, 30 bp, Artificial Sequence
  Synthetic oligonucleotide
aggcatattcttattactcttgccccgaag

SEQ ID NO: 313211 - DNA, 30 bp, Artificial Sequence
  Synthetic oligonucleotide
tacatactcgttgcaagagctatgccgaag

SEQ ID NO: 313212 - DNA, 30 bp, Artificial Sequence
  Synthetic oligonucleotide
gagtgtagtggcgaatcttagtgagcgaag

SEQ ID NO: 313213 - DNA, 30 bp, Artificial Sequence
  Synthetic oligonucleotide
aaaaaccaataaatggtctgtcccgcgaag

SEQ ID NO: 313214 - DNA, 30 bp, Artificial Sequence
  Synthetic oligonucleotide
ctccgaaaggcgccgcgcgcacaggcgaag

SEQ ID NO: 313215 - DNA, 30 bp, Artificial Sequence
  Synthetic oligonucleotide
tatagcatcttccagtgtaactaggcgaag

SEQ ID NO: 313216 - DNA, 30 bp, Artificial Sequence
  Synthetic oligonucleotide
atcccggggcacctgctacatttggcgaag

SEQ ID NO: 313217 - DNA, 30 bp, Artificial Sequence
  Synthetic oligonucleotide
aagtaacttgtaggagcacgaaaatcgaag

SEQ ID NO: 313218 - DNA, 30 bp, Artificial Sequence
  Synthetic oligonucleotide
gtgctcgctgagcaacgtcgtaaatcgaag

SEQ ID NO: 313219 - DNA, 30 bp, Artificial Sequence
  Synthetic oligonucleotide
cctatgcttgtgaagtctgaaagatcgaag

SEQ ID NO: 313220 - DNA, 30 bp, Artificial Sequence
  Synthetic oligonucleotide
ggggatcatggtaggtcggttagatcgaag

SEQ ID NO: 313221 - DNA, 30 bp, Artificial Sequence
  Synthetic oligonucleotide
accacaattctcgttgtttgactatcgaag

SEQ ID NO: 313222 - DNA, 30 bp, Artificial Sequence
  Synthetic oligonucleotide
agagtcttgtgatccgtgcatgtatcgaag

SEQ ID NO: 313223 - DNA, 30 bp, Artificial Sequence
  Synthetic oligonucleotide
gctagtcaatcaagaatatttatgtcgaag

SEQ ID NO: 313224 - DNA, 30 bp, Artificial Sequence
  Synthetic oligonucleotide
cccatgtgcaatgggcccttagtgtcgaag

SEQ ID NO: 313225 - DNA, 30 bp, Artificial Sequence
  Synthetic oligonucleotide
attgtatggattactggcttcaattcgaag

SEQ ID NO: 313226 - DNA, 30 bp, Artificial Sequence
  Synthetic oligonucleotide
aaagccgctaaattacaggcacattcgaag

SEQ ID NO: 313227 - DNA, 30 bp, Artificial Sequence
  Synthetic oligonucleotide
gcacagccgtcgaatgcgcggctaaggaag

SEQ ID NO: 313228 - DNA, 30 bp, Artificial Sequence
  Synthetic oligonucleotide
cttaggtcattcctccagatgtacaggaag

SEQ ID NO: 313229 - DNA, 30 bp, Artificial Sequence
  Synthetic oligonucleotide
cttaaccgtctcgtttagtaaaccaggaag

SEQ ID NO: 313230 - DNA, 30 bp, Artificial Sequence
  Synthetic oligonucleotide
cagaagtgcatagtggctcgatgcaggaag

SEQ ID NO: 313231 - DNA, 30 bp, Artificial Sequence
  Synthetic oligonucleotide
taactataggttagagaacttctcaggaag

SEQ ID NO: 313232 - DNA, 30 bp, Artificial Sequence
  Synthetic oligonucleotide
cgtggtacggacggcttcatttagaggaag

SEQ ID NO: 313233 - DNA, 30 bp, Artificial Sequence
  Synthetic oligonucleotide
gggtactagacgtgccacaggtggaggaag

SEQ ID NO: 313234 - DNA, 30 bp, Artificial Sequence
  Synthetic oligonucleotide
tttctccgaaccatggcgtgtgtgaggaag

SEQ ID NO: 313235 - DNA, 30 bp, Artificial Sequence
  Synthetic oligonucleotide
cgggcccgcgaaggttttatacataggaag

SEQ ID NO: 313236 - DNA, 30 bp, Artificial Sequence
  Synthetic oligonucleotide
agttcactatattcaacagggtataggaag

SEQ ID NO: 313237 - DNA, 29 bp, Artificial Sequence
  Synthetic oligonucleotide
acccccgcctcagtgtgtagcctaggaag

SEQ ID NO: 313238 - DNA, 30 bp, Artificial Sequence
  Synthetic oligonucleotide
aatcattctaaggtttagccggttcggaag

SEQ ID NO: 313239 - DNA, 30 bp, Artificial Sequence
  Synthetic oligonucleotide
caggcgcgggcctctgtgcgtcaagggaag

SEQ ID NO: 313240 - DNA, 30 bp, Artificial Sequence
  Synthetic oligonucleotide
gtattaggtacaaacccgagtacagggaag

SEQ ID NO: 313241 - DNA, 30 bp, Artificial Sequence
  Synthetic oligonucleotide
aaagtcaagcggtagagtcatttagggaag

SEQ ID NO: 313242 - DNA, 30 bp, Artificial Sequence
  Synthetic oligonucleotide
gtcgtgcagcaatgctcggtaaaggggaag

SEQ ID NO: 313243 - DNA, 30 bp, Artificial Sequence
  Synthetic oligonucleotide
atgcgagctctgtttgggccggcggggaag

SEQ ID NO: 313244 - DNA, 30 bp, Artificial Sequence
  Synthetic oligonucleotide
gggccgcctggttcaagtcgttgggggaag

SEQ ID NO: 313245 - DNA, 30 bp, Artificial Sequence
  Synthetic oligonucleotide
ttttcatatctaagaagtaacgatgggaag

SEQ ID NO: 313246 - DNA, 30 bp, Artificial Sequence
  Synthetic oligonucleotide
tgattcttgatttcttcctacggatggaag

SEQ ID NO: 313247 - DNA, 30 bp, Artificial Sequence
  Synthetic oligonucleotide
agtcccgcgcgaaaaacgcaacagtggaag

SEQ ID NO: 313248 - DNA, 30 bp, Artificial Sequence
  Synthetic oligonucleotide
ccgacgctgccaatggaacttgtgtggaag

SEQ ID NO: 313249 - DNA, 30 bp, Artificial Sequence
  Synthetic oligonucleotide
cctcaacgcctatctagaagaaattggaag

SEQ ID NO: 313250 - DNA, 30 bp, Artificial Sequence
  Synthetic oligonucleotide
acggttatatgtcctgaggcgtaaatgaag

SEQ ID NO: 313251 - DNA, 30 bp, Artificial Sequence
  Synthetic oligonucleotide
atgtcatatttccacatgagcctaatgaag

SEQ ID NO: 313252 - DNA, 30 bp, Artificial Sequence
  Synthetic oligonucleotide
atcgacgtgcgcctatggtaagacatgaag

SEQ ID NO: 313253 - DNA, 30 bp, Artificial Sequence
  Synthetic oligonucleotide
tcagtatttctagacaatgtttcgatgaag

SEQ ID NO: 313254 - DNA, 30 bp, Artificial Sequence
  Synthetic oligonucleotide
gaattggattgaccggtactaattatgaag

SEQ ID NO: 313255 - DNA, 30 bp, Artificial Sequence
  Synthetic oligonucleotide
ttcgcgatctttgagatccttattatgaag

SEQ ID NO: 313256 - DNA, 30 bp, Artificial Sequence
  Synthetic oligonucleotide
gttgcgtcaatgaagcggccccacctgaag

SEQ ID NO: 313257 - DNA, 30 bp, Artificial Sequence
  Synthetic oligonucleotide
ttaattcgtttaaggatagagcacctgaag

SEQ ID NO: 313258 - DNA, 30 bp, Artificial Sequence
  Synthetic oligonucleotide
taaaagggacaccatggcaactacctgaag

SEQ ID NO: 313259 - DNA, 30 bp, Artificial Sequence
  Synthetic oligonucleotide
tgaaggtacattaaaatgtgacgcctgaag

SEQ ID NO: 313260 - DNA, 30 bp, Artificial Sequence
  Synthetic oligonucleotide
gtttatcgagtattgcgaccacggctgaag

SEQ ID NO: 313261 - DNA, 30 bp, Artificial Sequence
  Synthetic oligonucleotide
ggcgacttaaacaactgtcgagatctgaag

SEQ ID NO: 313262 - DNA, 30 bp, Artificial Sequence
  Synthetic oligonucleotide
gaattcgcaaaagagcgatggtatctgaag

SEQ ID NO: 313263 - DNA, 30 bp, Artificial Sequence
  Synthetic oligonucleotide
gttaaatcacatccaagttagagtctgaag

SEQ ID NO: 313264 - DNA, 30 bp, Artificial Sequence
  Synthetic oligonucleotide
ggcatcctgagggtgtcctgtcccgtgaag

SEQ ID NO: 313265 - DNA, 30 bp, Artificial Sequence
  Synthetic oligonucleotide
tctcggggtcagtgctcggtctccgtgaag

SEQ ID NO: 313266 - DNA, 30 bp, Artificial Sequence
  Synthetic oligonucleotide
tacccggtgggggcagtagaaatcgtgaag

SEQ ID NO: 313267 - DNA, 30 bp, Artificial Sequence
  Synthetic oligonucleotide
tgtactctaatcatgtacattgtcgtgaag

SEQ ID NO: 313268 - DNA, 26 bp, Artificial Sequence
  Synthetic oligonucleotide
tacacacctactccagggaattgaag

SEQ ID NO: 313269 - DNA, 30 bp, Artificial Sequence
  Synthetic oligonucleotide
accctacatacagcccatggacccttgaag

SEQ ID NO: 313270 - DNA, 30 bp, Artificial Sequence
  Synthetic oligonucleotide
agaagcacttacggagacgagtgcttgaag

SEQ ID NO: 313271 - DNA, 30 bp, Artificial Sequence
  Synthetic oligonucleotide
tggtaaccatagtcgtgacgaacgttgaag

SEQ ID NO: 313272 - DNA, 30 bp, Artificial Sequence
  Synthetic oligonucleotide
gtaaaaaggcaccagaatgaatgtttgaag

SEQ ID NO: 313273 - DNA, 30 bp, Artificial Sequence
  Synthetic oligonucleotide
gatctctcggaatgcataccccttttgaag

SEQ ID NO: 313274 - DNA, 30 bp, Artificial Sequence
  Synthetic oligonucleotide
gtatgtgggacctatcgctttacaaataag

SEQ ID NO: 313275 - DNA, 30 bp, Artificial Sequence
  Synthetic oligonucleotide
tccctgctagcgtaagttcctgacaataag

SEQ ID NO: 313276 - DNA, 30 bp, Artificial Sequence
  Synthetic oligonucleotide
aaggggcgccctaagggtctctccaataag

SEQ ID NO: 313277 - DNA, 30 bp, Artificial Sequence
  Synthetic oligonucleotide
aataggattatagctagactcaagaataag

SEQ ID NO: 313278 - DNA, 30 bp, Artificial Sequence
  Synthetic oligonucleotide
ccatccgccatttggggttaggagaataag

SEQ ID NO: 313279 - DNA, 29 bp, Artificial Sequence
  Synthetic oligonucleotide
atgttgggtaactatgcataccgaataag

SEQ ID NO: 313280 - DNA, 30 bp, Artificial Sequence
  Synthetic oligonucleotide
gcgatttataagaatgcttcgtgtaataag

SEQ ID NO: 313281 - DNA, 30 bp, Artificial Sequence
  Synthetic oligonucleotide
gagccggcacaggccgtcgcttgtaataag

SEQ ID NO: 313282 - DNA, 30 bp, Artificial Sequence
  Synthetic oligonucleotide
tatcgtgcacgtgtactgactagccataag

SEQ ID NO: 313283 - DNA, 30 bp, Artificial Sequence
  Synthetic oligonucleotide
ggaatctgaggtcggcgtctatcagataag

SEQ ID NO: 313284 - DNA, 30 bp, Artificial Sequence
  Synthetic oligonucleotide
aagtcacgtgtatattgccggtgagataag

SEQ ID NO: 313285 - DNA, 30 bp, Artificial Sequence
  Synthetic oligonucleotide
agcatcgcagatctcatctcagtagataag

SEQ ID NO: 313286 - DNA, 30 bp, Artificial Sequence
  Synthetic oligonucleotide
attgaacgttcatgcaagatttacgataag

SEQ ID NO: 313287 - DNA, 30 bp, Artificial Sequence
  Synthetic oligonucleotide
ggatcctgtaaaaagtatcttggggataag

SEQ ID NO: 313288 - DNA, 30 bp, Artificial Sequence
  Synthetic oligonucleotide
accggtgatctacaagaagctccatataag

SEQ ID NO: 313289 - DNA, 30 bp, Artificial Sequence
  Synthetic oligonucleotide
atgatactgtcttacttagccgcatataag

SEQ ID NO: 313290 - DNA, 30 bp, Artificial Sequence
  Synthetic oligonucleotide
ctgggtccggacccgatgcattgatataag

SEQ ID NO: 313291 - DNA, 30 bp, Artificial Sequence
  Synthetic oligonucleotide
cacctgcttcggtacacccctgtatataag

SEQ ID NO: 313292 - DNA, 30 bp, Artificial Sequence
  Synthetic oligonucleotide
aaacataccccagctcaagcgacgtataag

SEQ ID NO: 313293 - DNA, 30 bp, Artificial Sequence
  Synthetic oligonucleotide
tgatgtatctcctccaagattgggtataag

SEQ ID NO: 313294 - DNA, 30 bp, Artificial Sequence
  Synthetic oligonucleotide
accattgatggatgacttatctggtataag

SEQ ID NO: 313295 - DNA, 30 bp, Artificial Sequence
  Synthetic oligonucleotide
ccagtacgcgattagaatatacgttataag

SEQ ID NO: 313296 - DNA, 30 bp, Artificial Sequence
  Synthetic oligonucleotide
gtcttggcgcggttaaaaaccaaaactaag

SEQ ID NO: 313297 - DNA, 30 bp, Artificial Sequence
  Synthetic oligonucleotide
atccatcgggatgcgaacgatcaaactaag

SEQ ID NO: 313298 - DNA, 30 bp, Artificial Sequence
  Synthetic oligonucleotide
gctctagagacgaaggctgctcaaactaag

SEQ ID NO: 313299 - DNA, 30 bp, Artificial Sequence
  Synthetic oligonucleotide
caaaactataacgtgactgttgccactaag

SEQ ID NO: 313300 - DNA, 30 bp, Artificial Sequence
  Synthetic oligonucleotide
tcctctggtcataactgaggaagcactaag

SEQ ID NO: 313301 - DNA, 30 bp, Artificial Sequence
  Synthetic oligonucleotide
taatatgttgggctacgaataacgactaag

SEQ ID NO: 313302 - DNA, 30 bp, Artificial Sequence
  Synthetic oligonucleotide
ttatatgcacaccgtatcgtagtgactaag

SEQ ID NO: 313303 - DNA, 30 bp, Artificial Sequence
  Synthetic oligonucleotide
ctccttaacgtaaaatagtgcaatactaag

SEQ ID NO: 313304 - DNA, 30 bp, Artificial Sequence
  Synthetic oligonucleotide
gaagtttggcactctaggcacactactaag

SEQ ID NO: 313305 - DNA, 30 bp, Artificial Sequence
  Synthetic oligonucleotide
caggtagcctacaacgtagctcctactaag

SEQ ID NO: 313306 - DNA, 30 bp, Artificial Sequence
  Synthetic oligonucleotide
ggagcggcatcactactttgcattactaag

SEQ ID NO: 313307 - DNA, 31 bp, Artificial Sequence
  Synthetic oligonucleotide
ttaggaggcatttgatggacgccaacctaag

SEQ ID NO: 313308 - DNA, 30 bp, Artificial Sequence
  Synthetic oligonucleotide
gagttgaatagactttccaaagggcctaag

SEQ ID NO: 313309 - DNA, 30 bp, Artificial Sequence
  Synthetic oligonucleotide
aaattgtggcagcgaccgacgacagctaag

SEQ ID NO: 313310 - DNA, 30 bp, Artificial Sequence
  Synthetic oligonucleotide
ttcgactcgatctcgctagtcggcgctaag

SEQ ID NO: 313311 - DNA, 30 bp, Artificial Sequence
  Synthetic oligonucleotide
aaatggatgtacacgcaacttatcgctaag

SEQ ID NO: 313312 - DNA, 30 bp, Artificial Sequence
  Synthetic oligonucleotide
gccagtatatgaaggaggatattcgctaag

SEQ ID NO: 313313 - DNA, 30 bp, Artificial Sequence
  Synthetic oligonucleotide
cactacctggaatattacaggcctgctaag

SEQ ID NO: 313314 - DNA, 30 bp, Artificial Sequence
  Synthetic oligonucleotide
tatgttagcgccttcaagggtggatctaag

SEQ ID NO: 313315 - DNA, 30 bp, Artificial Sequence
  Synthetic oligonucleotide
tgacgagcgccccctccctataactctaag

SEQ ID NO: 313316 - DNA, 30 bp, Artificial Sequence
  Synthetic oligonucleotide
acgaagcattaacactgtagtttctctaag

SEQ ID NO: 313317 - DNA, 30 bp, Artificial Sequence
  Synthetic oligonucleotide
gaaaaagagatctggattcaggggtctaag

SEQ ID NO: 313318 - DNA, 30 bp, Artificial Sequence
  Synthetic oligonucleotide
attgtatactaaggcatgaatatgtctaag

SEQ ID NO: 313319 - DNA, 30 bp, Artificial Sequence
  Synthetic oligonucleotide
cgatgcgcacgcatattatgattgtctaag

SEQ ID NO: 313320 - DNA, 30 bp, Artificial Sequence
  Synthetic oligonucleotide
cacttgatgttcggtgctcgcttgtctaag

SEQ ID NO: 313321 - DNA, 30 bp, Artificial Sequence
  Synthetic oligonucleotide
agctagggtgtcacatcgatctcttctaag

SEQ ID NO: 313322 - DNA, 30 bp, Artificial Sequence
  Synthetic oligonucleotide
aagcgggagtagtcgttaggtcgttctaag

SEQ ID NO: 313323 - DNA, 30 bp, Artificial Sequence
  Synthetic oligonucleotide
gtaatccatcgtaacttagggttttctaag

SEQ ID NO: 313324 - DNA, 30 bp, Artificial Sequence
  Synthetic oligonucleotide
tagcgtgtatgcgtcatctatttaagtaag

SEQ ID NO: 313325 - DNA, 30 bp, Artificial Sequence
  Synthetic oligonucleotide
cctgcttgtttggtgataattcctagtaag

SEQ ID NO: 313326 - DNA, 30 bp, Artificial Sequence
  Synthetic oligonucleotide
attattagtcaacactggcctagtagtaag

SEQ ID NO: 313327 - DNA, 30 bp, Artificial Sequence
  Synthetic oligonucleotide
gagagggacactagtcccggaaaacgtaag

SEQ ID NO: 313328 - DNA, 30 bp, Artificial Sequence
  Synthetic oligonucleotide
tatagtaagaataaacctcgtaaacgtaag

SEQ ID NO: 313329 - DNA, 30 bp, Artificial Sequence
  Synthetic oligonucleotide
gacactgcgtcccatattgcgttacgtaag

SEQ ID NO: 313330 - DNA, 30 bp, Artificial Sequence
  Synthetic oligonucleotide
tgatggagactatgacaagaaccccgtaag

SEQ ID NO: 313331 - DNA, 30 bp, Artificial Sequence
  Synthetic oligonucleotide
ttgtgttcacatttgcttgaaaatcgtaag

SEQ ID NO: 313332 - DNA, 30 bp, Artificial Sequence
  Synthetic oligonucleotide
agcgtatgttcttagttcgtaccaggtaag

SEQ ID NO: 313333 - DNA, 30 bp, Artificial Sequence
  Synthetic oligonucleotide
ctttatggccaaaaagaagctgcaggtaag

SEQ ID NO: 313334 - DNA, 30 bp, Artificial Sequence
  Synthetic oligonucleotide
aaacttcgactaacgggattctcaggtaag

SEQ ID NO: 313335 - DNA, 30 bp, Artificial Sequence
  Synthetic oligonucleotide
agaggatatccgtgatcactcatcggtaag

SEQ ID NO: 313336 - DNA, 30 bp, Artificial Sequence
  Synthetic oligonucleotide
attgagctgtgagtggcagttctcggtaag

SEQ ID NO: 313337 - DNA, 30 bp, Artificial Sequence
  Synthetic oligonucleotide
ctcctggtaaagcagatacgacggggtaag

SEQ ID NO: 313338 - DNA, 30 bp, Artificial Sequence
  Synthetic oligonucleotide
acagatgacgtatgacgggcatctggtaag

SEQ ID NO: 313339 - DNA, 30 bp, Artificial Sequence
  Synthetic oligonucleotide
aacttaaagtattcgaacagtggtggtaag

SEQ ID NO: 313340 - DNA, 30 bp, Artificial Sequence
  Synthetic oligonucleotide
aacgagtatttcggagccgttccatgtaag

SEQ ID NO: 313341 - DNA, 30 bp, Artificial Sequence
  Synthetic oligonucleotide
ggctgcctctctaatccgagtatatgtaag

SEQ ID NO: 313342 - DNA, 30 bp, Artificial Sequence
  Synthetic oligonucleotide
atgtacgtgacctactgggtagtgtgtaag

SEQ ID NO: 313343 - DNA, 30 bp, Artificial Sequence
  Synthetic oligonucleotide
actctgtggcaacacccatactaaattaag

SEQ ID NO: 313344 - DNA, 30 bp, Artificial Sequence
  Synthetic oligonucleotide
ccgctcatacactacttacggtacattaag

SEQ ID NO: 313345 - DNA, 30 bp, Artificial Sequence
  Synthetic oligonucleotide
gcaaccgagatttatacggggtccattaag

SEQ ID NO: 313346 - DNA, 30 bp, Artificial Sequence
  Synthetic oligonucleotide
tatgaaacccccgaacagggccatattaag

SEQ ID NO: 313347 - DNA, 30 bp, Artificial Sequence
  Synthetic oligonucleotide
gacctgattggaaaccgacgtcaccttaag

SEQ ID NO: 313348 - DNA, 30 bp, Artificial Sequence
  Synthetic oligonucleotide
gacatcgtactgggatgcatagcccttaag

SEQ ID NO: 313349 - DNA, 30 bp, Artificial Sequence
  Synthetic oligonucleotide
cagtgcccttctcgtgctcgacgccttaag

SEQ ID NO: 313350 - DNA, 30 bp, Artificial Sequence
  Synthetic oligonucleotide
tagcttagtgggggttgctaccgccttaag

SEQ ID NO: 313351 - DNA, 30 bp, Artificial Sequence
  Synthetic oligonucleotide
taccattcattggtaccaaggcagcttaag

SEQ ID NO: 313352 - DNA, 30 bp, Artificial Sequence
  Synthetic oligonucleotide
atagaaaacacgaggttgtaatggcttaag

SEQ ID NO: 313353 - DNA, 30 bp, Artificial Sequence
  Synthetic oligonucleotide
tggtcatgtcgagccttcgtaagtcttaag

SEQ ID NO: 313354 - DNA, 30 bp, Artificial Sequence
  Synthetic oligonucleotide
cgcgcccggggaccataccgcgttcttaag

SEQ ID NO: 313355 - DNA, 30 bp, Artificial Sequence
  Synthetic oligonucleotide
ataccagtcagttgccttagagaagttaag

SEQ ID NO: 313356 - DNA, 30 bp, Artificial Sequence
  Synthetic oligonucleotide
gtgaggtcccttgaggggagataagttaag

SEQ ID NO: 313357 - DNA, 30 bp, Artificial Sequence
  Synthetic oligonucleotide
aacatatatgtccgtccacgtagagttaag

SEQ ID NO: 313358 - DNA, 30 bp, Artificial Sequence
  Synthetic oligonucleotide
aatataagttgtggcgttaggtgagttaag

SEQ ID NO: 313359 - DNA, 30 bp, Artificial Sequence
  Synthetic oligonucleotide
ccgggcgttatttatttcagctccgttaag

SEQ ID NO: 313360 - DNA, 30 bp, Artificial Sequence
  Synthetic oligonucleotide
ctagggggactataaacaaatagcgttaag

SEQ ID NO: 313361 - DNA, 30 bp, Artificial Sequence
  Synthetic oligonucleotide
aaccaagggagataccgcgaccgcgttaag

SEQ ID NO: 313362 - DNA, 30 bp, Artificial Sequence
  Synthetic oligonucleotide
tgatcaatcgcttatctacgagtcgttaag

SEQ ID NO: 313363 - DNA, 30 bp, Artificial Sequence
  Synthetic oligonucleotide
ttgggttcaatgtcttaggtccaggttaag

SEQ ID NO: 313364 - DNA, 30 bp, Artificial Sequence
  Synthetic oligonucleotide
agatttagaagtaggatcacgtcggttaag

SEQ ID NO: 313365 - DNA, 30 bp, Artificial Sequence
  Synthetic oligonucleotide
acacaagccccatgtaatggatgtgttaag

SEQ ID NO: 313366 - DNA, 30 bp, Artificial Sequence
  Synthetic oligonucleotide
agtggccgcatacatgcggtcagatttaag

SEQ ID NO: 313367 - DNA, 30 bp, Artificial Sequence
  Synthetic oligonucleotide
ggctccactttttggttagtacgatttaag

SEQ ID NO: 313368 - DNA, 30 bp, Artificial Sequence
  Synthetic oligonucleotide
aatgcttaaataagtgtttgtatatttaag

SEQ ID NO: 313369 - DNA, 30 bp, Artificial Sequence
  Synthetic oligonucleotide
tacactgcagctaaatagacgacctttaag

SEQ ID NO: 313370 - DNA, 30 bp, Artificial Sequence
  Synthetic oligonucleotide
gtccaaaaaatgcggtgggcagcctttaag

SEQ ID NO: 313371 - DNA, 30 bp, Artificial Sequence
  Synthetic oligonucleotide
tcctggagccttttgtgcggctggtttaag

SEQ ID NO: 313372 - DNA, 30 bp, Artificial Sequence
  Synthetic oligonucleotide
ctgtgttaggtgaggagcgcgcattttaag

SEQ ID NO: 313373 - DNA, 30 bp, Artificial Sequence
  Synthetic oligonucleotide
cccacaagtcgtctgggttctccttttaag

SEQ ID NO: 313374 - DNA, 34 bp, Artificial Sequence
  Synthetic oligonucleotide
tccaaaaaaggttacagcttgcatgatttttaag

SEQ ID NO: 313375 - DNA, 30 bp, Artificial Sequence
  Synthetic oligonucleotide
cacaaaagtcgctcggggacggacaaacag

SEQ ID NO: 313376 - DNA, 30 bp, Artificial Sequence
  Synthetic oligonucleotide
tatatcgcgcgcggaatttaacctaaacag

SEQ ID NO: 313377 - DNA, 30 bp, Artificial Sequence
  Synthetic oligonucleotide
taaaagtaataacgcctggagagtaaacag

SEQ ID NO: 313378 - DNA, 30 bp, Artificial Sequence
  Synthetic oligonucleotide
tttaatttgttcaatcagtgtgagcaacag

SEQ ID NO: 313379 - DNA, 30 bp, Artificial Sequence
  Synthetic oligonucleotide
ctcgccatcccagggatgagttagcaacag

SEQ ID NO: 313380 - DNA, 30 bp, Artificial Sequence
  Synthetic oligonucleotide
aggtattccgtgatatgacagttgcaacag

SEQ ID NO: 313381 - DNA, 30 bp, Artificial Sequence
  Synthetic oligonucleotide
ctttaactattgtcaaagagaattcaacag

SEQ ID NO: 313382 - DNA, 30 bp, Artificial Sequence
  Synthetic oligonucleotide
aactgtccaacagcacttatatttcaacag

SEQ ID NO: 313383 - DNA, 30 bp, Artificial Sequence
  Synthetic oligonucleotide
ggcctatcggaaccgcagtagctcgaacag

SEQ ID NO: 313384 - DNA, 30 bp, Artificial Sequence
  Synthetic oligonucleotide
tgcgatccgtattagcacgcgttcgaacag

SEQ ID NO: 313385 - DNA, 30 bp, Artificial Sequence
  Synthetic oligonucleotide
ggtactcactggctcaatgcgaaggaacag

SEQ ID NO: 313386 - DNA, 30 bp, Artificial Sequence
  Synthetic oligonucleotide
agttcttaaagagatagtggttcggaacag

SEQ ID NO: 313387 - DNA, 30 bp, Artificial Sequence
  Synthetic oligonucleotide
ccccggttagtgggcatggtgggggaacag

SEQ ID NO: 313388 - DNA, 30 bp, Artificial Sequence
  Synthetic oligonucleotide
atacatgagctagactggacacgtgaacag

SEQ ID NO: 313389 - DNA, 30 bp, Artificial Sequence
  Synthetic oligonucleotide
catttaaacggtggcgtgcaaacataacag

SEQ ID NO: 313390 - DNA, 30 bp, Artificial Sequence
  Synthetic oligonucleotide
cgcgttctgtatatcgacttcttataacag

SEQ ID NO: 313391 - DNA, 30 bp, Artificial Sequence
  Synthetic oligonucleotide
ggacgtaccggcatggatgtgctgtaacag

SEQ ID NO: 313392 - DNA, 30 bp, Artificial Sequence
  Synthetic oligonucleotide
gcacatgggtgcctgtaccggacttaacag

SEQ ID NO: 313393 - DNA, 30 bp, Artificial Sequence
  Synthetic oligonucleotide
acgcctgctgtacacttggtgcaaacacag

SEQ ID NO: 313394 - DNA, 30 bp, Artificial Sequence
  Synthetic oligonucleotide
acgcccagcttgggagattgtgtaacacag

SEQ ID NO: 313395 - DNA, 30 bp, Artificial Sequence
  Synthetic oligonucleotide
tgctctaatgacggtgggcacttaacacag

SEQ ID NO: 313396 - DNA, 30 bp, Artificial Sequence
  Synthetic oligonucleotide
agcagaattcgtactttaaatcacacacag

SEQ ID NO: 313397 - DNA, 30 bp, Artificial Sequence
  Synthetic oligonucleotide
tttggcaactcgcatatgtaactcacacag

SEQ ID NO: 313398 - DNA, 30 bp, Artificial Sequence
  Synthetic oligonucleotide
ctgccttggaagacacttggagggacacag

SEQ ID NO: 313399 - DNA, 30 bp, Artificial Sequence
  Synthetic oligonucleotide
cattagaaagacaagcgcactctgacacag

SEQ ID NO: 313400 - DNA, 30 bp, Artificial Sequence
  Synthetic oligonucleotide
gatgtgtagtaattggtattcttgacacag

SEQ ID NO: 313401 - DNA, 30 bp, Artificial Sequence
  Synthetic oligonucleotide
tttgcaacctgtagggggcataatacacag

SEQ ID NO: 313402 - DNA, 30 bp, Artificial Sequence
  Synthetic oligonucleotide
aaagttcccgcggagccaattagtacacag

SEQ ID NO: 313403 - DNA, 30 bp, Artificial Sequence
  Synthetic oligonucleotide
ttgactggactcgatgacagcgttacacag

SEQ ID NO: 313404 - DNA, 30 bp, Artificial Sequence
  Synthetic oligonucleotide
gatacgtcggacatagtagctgaaccacag

SEQ ID NO: 313405 - DNA, 30 bp, Artificial Sequence
  Synthetic oligonucleotide
gtccagacaagcactaagagccacccacag

SEQ ID NO: 313406 - DNA, 30 bp, Artificial Sequence
  Synthetic oligonucleotide
ggccactgccaccccgcggggtccccacag

SEQ ID NO: 313407 - DNA, 30 bp, Artificial Sequence
  Synthetic oligonucleotide
atagaggggtagctgagttcgttcccacag

SEQ ID NO: 313408 - DNA, 30 bp, Artificial Sequence
  Synthetic oligonucleotide
cggtatggccctctcaggcgtcagccacag

SEQ ID NO: 313409 - DNA, 30 bp, Artificial Sequence
  Synthetic oligonucleotide
catgggcatcctttctagagggagccacag

SEQ ID NO: 313410 - DNA, 30 bp, Artificial Sequence
  Synthetic oligonucleotide
ggacaaggcacacgagccaacctgccacag

SEQ ID NO: 313411 - DNA, 30 bp, Artificial Sequence
  Synthetic oligonucleotide
ggctggacacaggcgagttgtctagcacag

SEQ ID NO: 313412 - DNA, 30 bp, Artificial Sequence
  Synthetic oligonucleotide
tagtgttgggccttgaaaggaaacgcacag

SEQ ID NO: 313413 - DNA, 30 bp, Artificial Sequence
  Synthetic oligonucleotide
gacgacaggtgtcaacgtgccagcgcacag

SEQ ID NO: 313414 - DNA, 30 bp, Artificial Sequence
  Synthetic oligonucleotide
cccacactttgagtgctcgtaagggcacag

SEQ ID NO: 313415 - DNA, 30 bp, Artificial Sequence
  Synthetic oligonucleotide
cgtcttagtttcctttgagacaatgcacag

SEQ ID NO: 313416 - DNA, 30 bp, Artificial Sequence
  Synthetic oligonucleotide
caataaaatctttaaacttatactgcacag

SEQ ID NO: 313417 - DNA, 30 bp, Artificial Sequence
  Synthetic oligonucleotide
tattaaacagttggcagcaggggctcacag

SEQ ID NO: 313418 - DNA, 30 bp, Artificial Sequence
  Synthetic oligonucleotide
tctcgttcttgtaagggataccattcacag

SEQ ID NO: 313419 - DNA, 30 bp, Artificial Sequence
  Synthetic oligonucleotide
ccacaccgatcgcgactaacgtgttcacag

SEQ ID NO: 313420 - DNA, 30 bp, Artificial Sequence
  Synthetic oligonucleotide
cctccgaacccttcatgaacacgaagacag

SEQ ID NO: 313421 - DNA, 30 bp, Artificial Sequence
  Synthetic oligonucleotide
gtccggggtcacggtcgcaccctaagacag

SEQ ID NO: 313422 - DNA, 30 bp, Artificial Sequence
  Synthetic oligonucleotide
gaactacagctaaggcaggaggctagacag

SEQ ID NO: 313423 - DNA, 30 bp, Artificial Sequence
  Synthetic oligonucleotide
cacctcgcaactgtagcgattggtagacag

SEQ ID NO: 313424 - DNA, 30 bp, Artificial Sequence
  Synthetic oligonucleotide
gggaggatctccgccggatggcttagacag

SEQ ID NO: 313425 - DNA, 30 bp, Artificial Sequence
  Synthetic oligonucleotide
attcaaggtgtccgcctactctttagacag

SEQ ID NO: 313426 - DNA, 30 bp, Artificial Sequence
  Synthetic oligonucleotide
atctgaagaagtctgtgttggcaacgacag

SEQ ID NO: 313427 - DNA, 30 bp, Artificial Sequence
  Synthetic oligonucleotide
tataattcatctcaagtaatcgcacgacag

SEQ ID NO: 313428 - DNA, 30 bp, Artificial Sequence
  Synthetic oligonucleotide
tggtaaaggatcaatgatgagtgacgacag

SEQ ID NO: 313429 - DNA, 30 bp, Artificial Sequence
  Synthetic oligonucleotide
agctagtctttgattatatgcccccgacag

SEQ ID NO: 313430 - DNA, 30 bp, Artificial Sequence
  Synthetic oligonucleotide
gttcctatgggtaacgtaaacgtccgacag

SEQ ID NO: 313431 - DNA, 30 bp, Artificial Sequence
  Synthetic oligonucleotide
gtagacaaggtcttaaactggtcgcgacag

SEQ ID NO: 313432 - DNA, 30 bp, Artificial Sequence
  Synthetic oligonucleotide
gttgataataaaagggactattcgcgacag

SEQ ID NO: 313433 - DNA, 30 bp, Artificial Sequence
  Synthetic oligonucleotide
aaaactctgggcgactgacgttctcgacag

SEQ ID NO: 313434 - DNA, 30 bp, Artificial Sequence
  Synthetic oligonucleotide
ccaacagaaccggctaactggacaggacag

SEQ ID NO: 313435 - DNA, 30 bp, Artificial Sequence
  Synthetic oligonucleotide
ttcattgtagaaagtcgcctatacggacag

SEQ ID NO: 313436 - DNA, 30 bp, Artificial Sequence
  Synthetic oligonucleotide
ggagactaagcgtttgtcttgtccggacag

SEQ ID NO: 313437 - DNA, 30 bp, Artificial Sequence
  Synthetic oligonucleotide
aacgatgcagattagctctggcctggacag

SEQ ID NO: 313438 - DNA, 30 bp, Artificial Sequence
  Synthetic oligonucleotide
ggatgagcgctatgtacgaaatttggacag

SEQ ID NO: 313439 - DNA, 30 bp, Artificial Sequence
  Synthetic oligonucleotide
ttcccggtaactatgtcaaccaaatgacag

SEQ ID NO: 313440 - DNA, 30 bp, Artificial Sequence
  Synthetic oligonucleotide
tatgtcggtcctgagctaactaggtgacag

SEQ ID NO: 313441 - DNA, 30 bp, Artificial Sequence
  Synthetic oligonucleotide
tcgtcaataggcttgcacccctattgacag

SEQ ID NO: 313442 - DNA, 30 bp, Artificial Sequence
  Synthetic oligonucleotide
cataagatattatttttgccagaaatacag

SEQ ID NO: 313443 - DNA, 30 bp, Artificial Sequence
  Synthetic oligonucleotide
gggtcaatgcttaatgaagctgcaatacag

SEQ ID NO: 313444 - DNA, 30 bp, Artificial Sequence
  Synthetic oligonucleotide
gcacagatatgctttctccaccgaatacag

SEQ ID NO: 313445 - DNA, 30 bp, Artificial Sequence
  Synthetic oligonucleotide
atatatcgcgccacttttagatgaatacag

SEQ ID NO: 313446 - DNA, 30 bp, Artificial Sequence
  Synthetic oligonucleotide
atatttataaagttgaacacgcgtatacag

SEQ ID NO: 313447 - DNA, 30 bp, Artificial Sequence
  Synthetic oligonucleotide
aacggtacgaattaaagacatcttatacag

SEQ ID NO: 313448 - DNA, 30 bp, Artificial Sequence
  Synthetic oligonucleotide
gtcccccccgacctctcagtgccactacag

SEQ ID NO: 313449 - DNA, 30 bp, Artificial Sequence
  Synthetic oligonucleotide
ttggggatccctggcgggccactactacag

SEQ ID NO: 313450 - DNA, 30 bp, Artificial Sequence
  Synthetic oligonucleotide
gacccggatcagagcattttgatcctacag

SEQ ID NO: 313451 - DNA, 30 bp, Artificial Sequence
  Synthetic oligonucleotide
ttcagagttggggttcctctcaagctacag

SEQ ID NO: 313452 - DNA, 30 bp, Artificial Sequence
  Synthetic oligonucleotide
ggcgacgtcttagtttacacctagctacag

SEQ ID NO: 313453 - DNA, 30 bp, Artificial Sequence
  Synthetic oligonucleotide
gactggtatggagttctcgcgaggctacag

SEQ ID NO: 313454 - DNA, 30 bp, Artificial Sequence
  Synthetic oligonucleotide
aacaatacaagtttggcgctgagtctacag

SEQ ID NO: 313455 - DNA, 30 bp, Artificial Sequence
  Synthetic oligonucleotide
actggctttgaggctctggatcaagtacag

SEQ ID NO: 313456 - DNA, 30 bp, Artificial Sequence
  Synthetic oligonucleotide
ttttatcaggtaacggtccaaatagtacag

SEQ ID NO: 313457 - DNA, 30 bp, Artificial Sequence
  Synthetic oligonucleotide
gcatacttacggtttccgctgggcgtacag

SEQ ID NO: 313458 - DNA, 30 bp, Artificial Sequence
  Synthetic oligonucleotide
aactaattggtaaaggggcgagcggtacag

SEQ ID NO: 313459 - DNA, 30 bp, Artificial Sequence
  Synthetic oligonucleotide
gtgaaacggtccccagcgcccgtggtacag

SEQ ID NO: 313460 - DNA, 30 bp, Artificial Sequence
  Synthetic oligonucleotide
cttgcagtaacagcctattgccttgtacag

SEQ ID NO: 313461 - DNA, 30 bp, Artificial Sequence
  Synthetic oligonucleotide
tcctgcagaaatcgcctttatatattacag

SEQ ID NO: 313462 - DNA, 30 bp, Artificial Sequence
  Synthetic oligonucleotide
atttcccttggtgacacccatttattacag

SEQ ID NO: 313463 - DNA, 30 bp, Artificial Sequence
  Synthetic oligonucleotide
tgcccgaagtcgatcccccgtttattacag

SEQ ID NO: 313464 - DNA, 30 bp, Artificial Sequence
  Synthetic oligonucleotide
cttcgccctttctagatgacccagttacag

SEQ ID NO: 313465 - DNA, 30 bp, Artificial Sequence
  Synthetic oligonucleotide
gctgctagtaccatgtcactagtgttacag

SEQ ID NO: 313466 - DNA, 30 bp, Artificial Sequence
  Synthetic oligonucleotide
acctattataccattaacatattgttacag

SEQ ID NO: 313467 - DNA, 30 bp, Artificial Sequence
  Synthetic oligonucleotide
accagttagaaccggtgccctactttacag

SEQ ID NO: 313468 - DNA, 30 bp, Artificial Sequence
  Synthetic oligonucleotide
actttactagtagacgtggaccgtttacag

SEQ ID NO: 313469 - DNA, 30 bp, Artificial Sequence
  Synthetic oligonucleotide
agaggtctatctttttatggcaaaaaccag

SEQ ID NO: 313470 - DNA, 30 bp, Artificial Sequence
  Synthetic oligonucleotide
ctatcgtatccgcacgggactgaaaaccag

SEQ ID NO: 313471 - DNA, 30 bp, Artificial Sequence
  Synthetic oligonucleotide
cagccatagcgtgcctgatggacgaaccag

SEQ ID NO: 313472 - DNA, 30 bp, Artificial Sequence
  Synthetic oligonucleotide
tctgatcaaacgaaaaggctataacaccag

SEQ ID NO: 313473 - DNA, 30 bp, Artificial Sequence
  Synthetic oligonucleotide
gcaaataacttagtacgatagtgccaccag

SEQ ID NO: 313474 - DNA, 30 bp, Artificial Sequence
  Synthetic oligonucleotide
gagtcaggatcacctagtcaatatcaccag

SEQ ID NO: 313475 - DNA, 30 bp, Artificial Sequence
  Synthetic oligonucleotide
gacgtacacagctcgttttgaggtcaccag

SEQ ID NO: 313476 - DNA, 30 bp, Artificial Sequence
  Synthetic oligonucleotide
tcgaatgcatggtttccgcagattcaccag

SEQ ID NO: 313477 - DNA, 30 bp, Artificial Sequence
  Synthetic oligonucleotide
gtaatggctgtatgtagtgagtacgaccag

SEQ ID NO: 313478 - DNA, 30 bp, Artificial Sequence
  Synthetic oligonucleotide
gggggactggtacggaaccgcggtgaccag

SEQ ID NO: 313479 - DNA, 30 bp, Artificial Sequence
  Synthetic oligonucleotide
aatttaacgcctgaggccgaggcataccag

SEQ ID NO: 313480 - DNA, 30 bp, Artificial Sequence
  Synthetic oligonucleotide
ggtcatttcagggtcgtggtttgataccag

SEQ ID NO: 313481 - DNA, 30 bp, Artificial Sequence
  Synthetic oligonucleotide
tgatttttcactgtaatgaaattataccag

SEQ ID NO: 313482 - DNA, 30 bp, Artificial Sequence
  Synthetic oligonucleotide
tatcccatggtcaccattcggcgttaccag

SEQ ID NO: 313483 - DNA, 30 bp, Artificial Sequence
  Synthetic oligonucleotide
gcccagcattctgcaaggcgtccaacccag

SEQ ID NO: 313484 - DNA, 30 bp, Artificial Sequence
  Synthetic oligonucleotide
aagtagaccgtaccgactggcggaacccag

SEQ ID NO: 313485 - DNA, 30 bp, Artificial Sequence
  Synthetic oligonucleotide
agcggacacttgacgctgactttaacccag

SEQ ID NO: 313486 - DNA, 30 bp, Artificial Sequence
  Synthetic oligonucleotide
aggagatccaccggctcatggcttacccag

SEQ ID NO: 313487 - DNA, 30 bp, Artificial Sequence
  Synthetic oligonucleotide
tggaataagaagagattgggcgttacccag

SEQ ID NO: 313488 - DNA, 30 bp, Artificial Sequence
  Synthetic oligonucleotide
ggggctacacgacacgcgatgtgcccccag

SEQ ID NO: 313489 - DNA, 30 bp, Artificial Sequence
  Synthetic oligonucleotide
ccccgcgtcatctccatcggcacgccccag

SEQ ID NO: 313490 - DNA, 30 bp, Artificial Sequence
  Synthetic oligonucleotide
cgggcctggcgattatattcccgcgcccag

SEQ ID NO: 313491 - DNA, 30 bp, Artificial Sequence
  Synthetic oligonucleotide
gaaacaagccttaaatgtagggtggcccag

SEQ ID NO: 313492 - DNA, 30 bp, Artificial Sequence
  Synthetic oligonucleotide
gactctcggagcgcgggcattcagtcccag

SEQ ID NO: 313493 - DNA, 30 bp, Artificial Sequence
  Synthetic oligonucleotide
gaagttcccagggaacgggctatgtcccag

SEQ ID NO: 313494 - DNA, 30 bp, Artificial Sequence
  Synthetic oligonucleotide
attctcatcgaagataggggaacttcccag

SEQ ID NO: 313495 - DNA, 30 bp, Artificial Sequence
  Synthetic oligonucleotide
ggcgcgtccacctgcagatggctttcccag

SEQ ID NO: 313496 - DNA, 31 bp, Artificial Sequence
  Synthetic oligonucleotide
caaggatttataccgccgtggtataagccag

SEQ ID NO: 313497 - DNA, 30 bp, Artificial Sequence
  Synthetic oligonucleotide
ttcacagatcagccgtaacgttacagccag

SEQ ID NO: 313498 - DNA, 30 bp, Artificial Sequence
  Synthetic oligonucleotide
tcttcatttcagaagagagggacgagccag

SEQ ID NO: 313499 - DNA, 30 bp, Artificial Sequence
  Synthetic oligonucleotide
cctaaacgggagtccatcgactgacgccag

SEQ ID NO: 313500 - DNA, 30 bp, Artificial Sequence
  Synthetic oligonucleotide
gtactgagtagatacaagggtctacgccag

SEQ ID NO: 313501 - DNA, 30 bp, Artificial Sequence
  Synthetic oligonucleotide
ggtcctgcgtaggaatacgtcttacgccag

SEQ ID NO: 313502 - DNA, 30 bp, Artificial Sequence
  Synthetic oligonucleotide
agtggtttccattattacactcaccgccag

SEQ ID NO: 313503 - DNA, 30 bp, Artificial Sequence
  Synthetic oligonucleotide
gcttctctgggactggattctagccgccag

SEQ ID NO: 313504 - DNA, 30 bp, Artificial Sequence
  Synthetic oligonucleotide
catggtggcgcacaactggagcatcgccag

SEQ ID NO: 313505 - DNA, 30 bp, Artificial Sequence
  Synthetic oligonucleotide
tctggtcctaacgatcgtacggtcggccag

SEQ ID NO: 313506 - DNA, 30 bp, Artificial Sequence
  Synthetic oligonucleotide
cgctacagtggaccaagctgcaagggccag

SEQ ID NO: 313507 - DNA, 30 bp, Artificial Sequence
  Synthetic oligonucleotide
catgacgccgtatcatgctcacgtggccag

SEQ ID NO: 313508 - DNA, 30 bp, Artificial Sequence
  Synthetic oligonucleotide
gagtcggagttaaaatagcgaaaaatccag

SEQ ID NO: 313509 - DNA, 30 bp, Artificial Sequence
  Synthetic oligonucleotide
ccccaagtgggtaccgtcctataaatccag

SEQ ID NO: 313510 - DNA, 30 bp, Artificial Sequence
  Synthetic oligonucleotide
agggtacagtgttctactcgtgttatccag

SEQ ID NO: 313511 - DNA, 30 bp, Artificial Sequence
  Synthetic oligonucleotide
atatgagatggctaaaatttattcctccag

SEQ ID NO: 313512 - DNA, 30 bp, Artificial Sequence
  Synthetic oligonucleotide
attgtcatcgcccaccctagcagtctccag

SEQ ID NO: 313513 - DNA, 31 bp, Artificial Sequence
  Synthetic oligonucleotide
tgttcttagtccatcctcatcctcagtccag

SEQ ID NO: 313514 - DNA, 30 bp, Artificial Sequence
  Synthetic oligonucleotide
tggacgtgcatgaaaactcgcaacgtccag

SEQ ID NO: 313515 - DNA, 30 bp, Artificial Sequence
  Synthetic oligonucleotide
gtaaaggagactatcgttgatttcgtccag

SEQ ID NO: 313516 - DNA, 30 bp, Artificial Sequence
  Synthetic oligonucleotide
gggtctgtgtggctttcaagtcatgtccag

SEQ ID NO: 313517 - DNA, 30 bp, Artificial Sequence
  Synthetic oligonucleotide
agtcggctacggttgctgctgggtgtccag

SEQ ID NO: 313518 - DNA, 30 bp, Artificial Sequence
  Synthetic oligonucleotide
ttctgcctcctgactcatgactgtgtccag

SEQ ID NO: 313519 - DNA, 30 bp, Artificial Sequence
  Synthetic oligonucleotide
gattgtaagcttgcgcggatctttgtccag

SEQ ID NO: 313520 - DNA, 30 bp, Artificial Sequence
  Synthetic oligonucleotide
accccgttagtcgggcggtatcagttccag

SEQ ID NO: 313521 - DNA, 30 bp, Artificial Sequence
  Synthetic oligonucleotide
agttgcctaggtttgtacacggggttccag

SEQ ID NO: 313522 - DNA, 30 bp, Artificial Sequence
  Synthetic oligonucleotide
cgtggactgaatagaagctccgtgttccag

SEQ ID NO: 313523 - DNA, 30 bp, Artificial Sequence
  Synthetic oligonucleotide
cgttaatactagagcaagtgacatttccag

SEQ ID NO: 313524 - DNA, 30 bp, Artificial Sequence
  Synthetic oligonucleotide
agattacaatagtcattgtgggctttccag

SEQ ID NO: 313525 - DNA, 30 bp, Artificial Sequence
  Synthetic oligonucleotide
aagagaatatatatgagattttctttccag

SEQ ID NO: 313526 - DNA, 30 bp, Artificial Sequence
  Synthetic oligonucleotide
acgtcggatgagacgagcacgcgtttccag

SEQ ID NO: 313527 - DNA, 30 bp, Artificial Sequence
  Synthetic oligonucleotide
gtacaaggagcaccgtcgcaggtaaagcag

SEQ ID NO: 313528 - DNA, 30 bp, Artificial Sequence
  Synthetic oligonucleotide
catattgtgtaagtgacgtttaacaagcag

SEQ ID NO: 313529 - DNA, 30 bp, Artificial Sequence
  Synthetic oligonucleotide
aaaggcatcttgttcttcatagacaagcag

SEQ ID NO: 313530 - DNA, 30 bp, Artificial Sequence
  Synthetic oligonucleotide
gcacacaaagcgccagtttcgaagaagcag

SEQ ID NO: 313531 - DNA, 30 bp, Artificial Sequence
  Synthetic oligonucleotide
agccatgtggtaggccccggcccgaagcag

SEQ ID NO: 313532 - DNA, 30 bp, Artificial Sequence
  Synthetic oligonucleotide
ccaaaatccgttccgatttcccggaagcag

SEQ ID NO: 313533 - DNA, 30 bp, Artificial Sequence
  Synthetic oligonucleotide
ttcaaagtccgcagatcgcgcgggaagcag

SEQ ID NO: 313534 - DNA, 30 bp, Artificial Sequence
  Synthetic oligonucleotide
ctgtgcctcctgtgggcgattcgtaagcag

SEQ ID NO: 313535 - DNA, 30 bp, Artificial Sequence
  Synthetic oligonucleotide
gaactctgaaccagcctcccaggtaagcag

SEQ ID NO: 313536 - DNA, 30 bp, Artificial Sequence
  Synthetic oligonucleotide
cagttaactggattagtcgataagcagcag

SEQ ID NO: 313537 - DNA, 30 bp, Artificial Sequence
  Synthetic oligonucleotide
tgtctgtggaaataaacggaggcagagcag

SEQ ID NO: 313538 - DNA, 30 bp, Artificial Sequence
  Synthetic oligonucleotide
tagtggtattattggaacttacgagagcag

SEQ ID NO: 313539 - DNA, 30 bp, Artificial Sequence
  Synthetic oligonucleotide
aaatataggcccatgtgaagattggagcag

SEQ ID NO: 313540 - DNA, 30 bp, Artificial Sequence
  Synthetic oligonucleotide
ctggcctgacatttgaatcgcgcatagcag

SEQ ID NO: 313541 - DNA, 30 bp, Artificial Sequence
  Synthetic oligonucleotide
actctgctggaacagggcacggtatagcag

SEQ ID NO: 313542 - DNA, 30 bp, Artificial Sequence
  Synthetic oligonucleotide
gccatccactgaaacggttttttctagcag

SEQ ID NO: 313543 - DNA, 30 bp, Artificial Sequence
  Synthetic oligonucleotide
gaatcagacattatgcaccaagggtagcag

SEQ ID NO: 313544 - DNA, 30 bp, Artificial Sequence
  Synthetic oligonucleotide
cgttcgggacacaactttaccccaacgcag

SEQ ID NO: 313545 - DNA, 30 bp, Artificial Sequence
  Synthetic oligonucleotide
aatggtgggacggaaagcaccaatacgcag

SEQ ID NO: 313546 - DNA, 30 bp, Artificial Sequence
  Synthetic oligonucleotide
gttgtgtagtatgtcttatagcatacgcag

SEQ ID NO: 313547 - DNA, 30 bp, Artificial Sequence
  Synthetic oligonucleotide
gcatgttcgaccccacacacagacccgcag

SEQ ID NO: 313548 - DNA, 30 bp, Artificial Sequence
  Synthetic oligonucleotide
tggtcagtccacttagtctcttgtccgcag

SEQ ID NO: 313549 - DNA, 30 bp, Artificial Sequence
  Synthetic oligonucleotide
cggtataaatttttgcgcaacattccgcag

SEQ ID NO: 313550 - DNA, 30 bp, Artificial Sequence
  Synthetic oligonucleotide
aaacatcgggagcgttcgcaacttccgcag

SEQ ID NO: 313551 - DNA, 30 bp, Artificial Sequence
  Synthetic oligonucleotide
tgataatcgtttgtttgtagcaaagcgcag

SEQ ID NO: 313552 - DNA, 30 bp, Artificial Sequence
  Synthetic oligonucleotide
atccttaaggtggatacagccccagcgcag

SEQ ID NO: 313553 - DNA, 30 bp, Artificial Sequence
  Synthetic oligonucleotide
agtggttgccgcgtgatcctcttcgcgcag

SEQ ID NO: 313554 - DNA, 30 bp, Artificial Sequence
  Synthetic oligonucleotide
tgtgtcgtagttctagagtccgatgcgcag

SEQ ID NO: 313555 - DNA, 30 bp, Artificial Sequence
  Synthetic oligonucleotide
tattgggacatttacatgtggcgtgcgcag

SEQ ID NO: 313556 - DNA, 30 bp, Artificial Sequence
  Synthetic oligonucleotide
tgactttaggtatagacagacagctcgcag

SEQ ID NO: 313557 - DNA, 30 bp, Artificial Sequence
  Synthetic oligonucleotide
gggcagcaaccgactcggtcggtgtcgcag

SEQ ID NO: 313558 - DNA, 30 bp, Artificial Sequence
  Synthetic oligonucleotide
agtcagttaattaggccacaattttcgcag

SEQ ID NO: 313559 - DNA, 30 bp, Artificial Sequence
  Synthetic oligonucleotide
gcaagcatggctttatcctgtttttcgcag

SEQ ID NO: 313560 - DNA, 30 bp, Artificial Sequence
  Synthetic oligonucleotide
cccagttagtaggcggaaagcttaaggcag

SEQ ID NO: 313561 - DNA, 30 bp, Artificial Sequence
  Synthetic oligonucleotide
atggtacgtgggcgcacaatggagaggcag

SEQ ID NO: 313562 - DNA, 30 bp, Artificial Sequence
  Synthetic oligonucleotide
caacctgaaccccccccgatgtagaggcag

SEQ ID NO: 313563 - DNA, 30 bp, Artificial Sequence
  Synthetic oligonucleotide
gcattttaatcaactctaacttataggcag

SEQ ID NO: 313564 - DNA, 30 bp, Artificial Sequence
  Synthetic oligonucleotide
tgggggactaatggtgccctatctaggcag

SEQ ID NO: 313565 - DNA, 30 bp, Artificial Sequence
  Synthetic oligonucleotide
gcacgactatagcatccaggatgccggcag

SEQ ID NO: 313566 - DNA, 30 bp, Artificial Sequence
  Synthetic oligonucleotide
attaatcggcagtttcaaggggagcggcag

SEQ ID NO: 313567 - DNA, 30 bp, Artificial Sequence
  Synthetic oligonucleotide
tctaagggacgcgagtgtgaacgtcggcag

SEQ ID NO: 313568 - DNA, 30 bp, Artificial Sequence
  Synthetic oligonucleotide
caaaggtctcctttgtcgttttcagggcag

SEQ ID NO: 313569 - DNA, 30 bp, Artificial Sequence
  Synthetic oligonucleotide
gagttcgtcattacatcggccatagggcag

SEQ ID NO: 313570 - DNA, 30 bp, Artificial Sequence
  Synthetic oligonucleotide
caggcccccacttttgcgtggggcgggcag

SEQ ID NO: 313571 - DNA, 30 bp, Artificial Sequence
  Synthetic oligonucleotide
gacccagtttggtcagaggattgggggcag

SEQ ID NO: 313572 - DNA, 30 bp, Artificial Sequence
  Synthetic oligonucleotide
cagtcacctgcttatgtggattgtgggcag

SEQ ID NO: 313573 - DNA, 30 bp, Artificial Sequence
  Synthetic oligonucleotide
tagtcagttttattggacactcttgggcag

SEQ ID NO: 313574 - DNA, 30 bp, Artificial Sequence
  Synthetic oligonucleotide
ttagggtaatttctagaaaagaaatggcag

SEQ ID NO: 313575 - DNA, 30 bp, Artificial Sequence
  Synthetic oligonucleotide
acgaaaaaaggatacatttctccatggcag

SEQ ID NO: 313576 - DNA, 30 bp, Artificial Sequence
  Synthetic oligonucleotide
tgcactattatgacccccttgtcatggcag

SEQ ID NO: 313577 - DNA, 30 bp, Artificial Sequence
  Synthetic oligonucleotide
ggtacgaactatgtgaggcgcttatggcag

SEQ ID NO: 313578 - DNA, 30 bp, Artificial Sequence
  Synthetic oligonucleotide
ccagttagggggccctcacaggactggcag

SEQ ID NO: 313579 - DNA, 30 bp, Artificial Sequence
  Synthetic oligonucleotide
atgcggatcacaactgtgagaaagtggcag

SEQ ID NO: 313580 - DNA, 30 bp, Artificial Sequence
  Synthetic oligonucleotide
ctgtataccgatgcatagcaccggtggcag

SEQ ID NO: 313581 - DNA, 30 bp, Artificial Sequence
  Synthetic oligonucleotide
ccacaacttagttagtgaaatacttggcag

SEQ ID NO: 313582 - DNA, 30 bp, Artificial Sequence
  Synthetic oligonucleotide
gagtgtgaagttgagctgaggatttggcag

SEQ ID NO: 313583 - DNA, 30 bp, Artificial Sequence
  Synthetic oligonucleotide
ttactgcagtctatacaacagttaatgcag

SEQ ID NO: 313584 - DNA, 30 bp, Artificial Sequence
  Synthetic oligonucleotide
tcttgacaaagcggcaggtagggcatgcag

SEQ ID NO: 313585 - DNA, 30 bp, Artificial Sequence
  Synthetic oligonucleotide
ggttccgtaatgccagttcactagatgcag

SEQ ID NO: 313586 - DNA, 30 bp, Artificial Sequence
  Synthetic oligonucleotide
gcgactatcgtactgggtatgcatatgcag

SEQ ID NO: 313587 - DNA, 30 bp, Artificial Sequence
  Synthetic oligonucleotide
ctataattactacagcccgtcagtatgcag

SEQ ID NO: 313588 - DNA, 30 bp, Artificial Sequence
  Synthetic oligonucleotide
ggatcggtcagaagaccggtgtaactgcag

SEQ ID NO: 313589 - DNA, 30 bp, Artificial Sequence
  Synthetic oligonucleotide
tggccagtccgcaccgatcagacactgcag

SEQ ID NO: 313590 - DNA, 30 bp, Artificial Sequence
  Synthetic oligonucleotide
tcaaagaaaccctcgcggggaaccctgcag

SEQ ID NO: 313591 - DNA, 30 bp, Artificial Sequence
  Synthetic oligonucleotide
cttgtagtgaacactagggggagcctgcag

SEQ ID NO: 313592 - DNA, 30 bp, Artificial Sequence
  Synthetic oligonucleotide
caccgctgggcaggcaaaacactcctgcag

SEQ ID NO: 313593 - DNA, 30 bp, Artificial Sequence
  Synthetic oligonucleotide
gcgtgaagagcacctccaaattagctgcag

SEQ ID NO: 313594 - DNA, 30 bp, Artificial Sequence
  Synthetic oligonucleotide
aagtgtgactcccagctgatattgctgcag

SEQ ID NO: 313595 - DNA, 30 bp, Artificial Sequence
  Synthetic oligonucleotide
ccgctagagcataacttatgaatagtgcag

SEQ ID NO: 313596 - DNA, 30 bp, Artificial Sequence
  Synthetic oligonucleotide
tgagagagactatcgcgtagcagcgtgcag

SEQ ID NO: 313597 - DNA, 30 bp, Artificial Sequence
  Synthetic oligonucleotide
taattcatccggggctgtttcattgtgcag

SEQ ID NO: 313598 - DNA, 30 bp, Artificial Sequence
  Synthetic oligonucleotide
cgggaaataggtcgtcagcggcgattgcag

SEQ ID NO: 313599 - DNA, 30 bp, Artificial Sequence
  Synthetic oligonucleotide
ctgccgggacctatctcacggaagttgcag

SEQ ID NO: 313600 - DNA, 30 bp, Artificial Sequence
  Synthetic oligonucleotide
tggtagaggatagctcatcatgggttgcag

SEQ ID NO: 313601 - DNA, 30 bp, Artificial Sequence
  Synthetic oligonucleotide
taaatcgtgtatccagtcactccaaatcag

SEQ ID NO: 313602 - DNA, 30 bp, Artificial Sequence
  Synthetic oligonucleotide
gagcctgtgcactagcgagtactaaatcag

SEQ ID NO: 313603 - DNA, 30 bp, Artificial Sequence
  Synthetic oligonucleotide
cgggacaggatttggtcttgaaccaatcag

SEQ ID NO: 313604 - DNA, 30 bp, Artificial Sequence
  Synthetic oligonucleotide
aaaaggcttgctcgaacacttaagaatcag

SEQ ID NO: 313605 - DNA, 30 bp, Artificial Sequence
  Synthetic oligonucleotide
gtagttccgaaatgtggtattaggaatcag

SEQ ID NO: 313606 - DNA, 30 bp, Artificial Sequence
  Synthetic oligonucleotide
attagtacaaagcatgtgcagtggaatcag

SEQ ID NO: 313607 - DNA, 30 bp, Artificial Sequence
  Synthetic oligonucleotide
ttattacaggtaagttactacgctaatcag

SEQ ID NO: 313608 - DNA, 30 bp, Artificial Sequence
  Synthetic oligonucleotide
ctgactgcgtactctgcacaataacatcag

SEQ ID NO: 313609 - DNA, 30 bp, Artificial Sequence
  Synthetic oligonucleotide
cactttcgtgcgtatcaagtactacatcag

SEQ ID NO: 313610 - DNA, 30 bp, Artificial Sequence
  Synthetic oligonucleotide
cttacatgtatcggtgtttttgtccatcag

SEQ ID NO: 313611 - DNA, 30 bp, Artificial Sequence
  Synthetic oligonucleotide
gatataacactatcatatacaaagcatcag

SEQ ID NO: 313612 - DNA, 30 bp, Artificial Sequence
  Synthetic oligonucleotide
agcatccatatgtggactgtactgcatcag

SEQ ID NO: 313613 - DNA, 30 bp, Artificial Sequence
  Synthetic oligonucleotide
tttatgtggccaccagttgcagtgcatcag

SEQ ID NO: 313614 - DNA, 30 bp, Artificial Sequence
  Synthetic oligonucleotide
aaagagtatcggttcctaggaagagatcag

SEQ ID NO: 313615 - DNA, 30 bp, Artificial Sequence
  Synthetic oligonucleotide
ggcaaaaaggcttaagtacccggcgatcag

SEQ ID NO: 313616 - DNA, 30 bp, Artificial Sequence
  Synthetic oligonucleotide
ttgcagaatgatcggatgttcgaggatcag

SEQ ID NO: 313617 - DNA, 30 bp, Artificial Sequence
  Synthetic oligonucleotide
cagacgcatggttccccggtgggggatcag

SEQ ID NO: 313618 - DNA, 30 bp, Artificial Sequence
  Synthetic oligonucleotide
actgatctggtacgtttcaccatggatcag

SEQ ID NO: 313619 - DNA, 31 bp, Artificial Sequence
  Synthetic oligonucleotide
ataacgaatcgctcatgtggttccatatcag

SEQ ID NO: 313620 - DNA, 30 bp, Artificial Sequence
  Synthetic oligonucleotide
gatgttgtgaaacgataggatcagtatcag

SEQ ID NO: 313621 - DNA, 29 bp, Artificial Sequence
  Synthetic oligonucleotide
gaaggctgggcattggcttttcgtatcag

SEQ ID NO: 313622 - DNA, 30 bp, Artificial Sequence
  Synthetic oligonucleotide
ccgtaccgataacacgtaaagtattatcag

SEQ ID NO: 313623 - DNA, 30 bp, Artificial Sequence
  Synthetic oligonucleotide
agcttctgatcgctaatgctttcttatcag

SEQ ID NO: 313624 - DNA, 30 bp, Artificial Sequence
  Synthetic oligonucleotide
ggttccggccacgcgcgggacatttatcag

SEQ ID NO: 313625 - DNA, 31 bp, Artificial Sequence
  Synthetic oligonucleotide
tgtgcaaataaattatgaactcatttatcag

SEQ ID NO: 313626 - DNA, 30 bp, Artificial Sequence
  Synthetic oligonucleotide
gcaccgaaatggtcagaaagtctttatcag

SEQ ID NO: 313627 - DNA, 30 bp, Artificial Sequence
  Synthetic oligonucleotide
aagaaaagctgttatggtgttcaaactcag

SEQ ID NO: 313628 - DNA, 30 bp, Artificial Sequence
  Synthetic oligonucleotide
tcatccagacccaatggatgggtcactcag

SEQ ID NO: 313629 - DNA, 30 bp, Artificial Sequence
  Synthetic oligonucleotide
ctcaatgggaatcgagtctttgggactcag

SEQ ID NO: 313630 - DNA, 30 bp, Artificial Sequence
  Synthetic oligonucleotide
ggactaattgtaggtccagctattactcag

SEQ ID NO: 313631 - DNA, 30 bp, Artificial Sequence
  Synthetic oligonucleotide
gactggtcgcatggggactgggcacctcag

SEQ ID NO: 313632 - DNA, 30 bp, Artificial Sequence
  Synthetic oligonucleotide
aggtccttagttaaaggtggctgacctcag

SEQ ID NO: 313633 - DNA, 30 bp, Artificial Sequence
  Synthetic oligonucleotide
ctaaggcatctcgccggcaaacggcctcag

SEQ ID NO: 313634 - DNA, 30 bp, Artificial Sequence
  Synthetic oligonucleotide
atcgcccctgaccaaggctgtggagctcag

SEQ ID NO: 313635 - DNA, 30 bp, Artificial Sequence
  Synthetic oligonucleotide
ggctcattaaggttttcttcggtcgctcag

SEQ ID NO: 313636 - DNA, 30 bp, Artificial Sequence
  Synthetic oligonucleotide
ctgggcgaggaggcgccggaggcatctcag

SEQ ID NO: 313637 - DNA, 30 bp, Artificial Sequence
  Synthetic oligonucleotide
ggttctgttacacaaatgtgctactctcag

SEQ ID NO: 313638 - DNA, 29 bp, Artificial Sequence
  Synthetic oligonucleotide
ggaccgtacaccggttatacggctctcag

SEQ ID NO: 313639 - DNA, 30 bp, Artificial Sequence
  Synthetic oligonucleotide
ttcgaaccttccacaggaccagggtctcag

SEQ ID NO: 313640 - DNA, 30 bp, Artificial Sequence
  Synthetic oligonucleotide
taacacgcctacgcgcgagatcgttctcag

SEQ ID NO: 313641 - DNA, 30 bp, Artificial Sequence
  Synthetic oligonucleotide
gacgatacaacatgtcctgcgtccagtcag

SEQ ID NO: 313642 - DNA, 30 bp, Artificial Sequence
  Synthetic oligonucleotide
aacaaatgtatttaggcaacattcagtcag

SEQ ID NO: 313643 - DNA, 30 bp, Artificial Sequence
  Synthetic oligonucleotide
gtcggggcccttcacggcaaggggagtcag

SEQ ID NO: 313644 - DNA, 30 bp, Artificial Sequence
  Synthetic oligonucleotide
acagttcagcgatccgatcagggtagtcag

SEQ ID NO: 313645 - DNA, 30 bp, Artificial Sequence
  Synthetic oligonucleotide
actcgacgtggacctctgatgaaacgtcag

SEQ ID NO: 313646 - DNA, 30 bp, Artificial Sequence
  Synthetic oligonucleotide
acagtggggtaaaaaatttcaatacgtcag

SEQ ID NO: 313647 - DNA, 30 bp, Artificial Sequence
  Synthetic oligonucleotide
tatcgtgaattgcgttttggccaccgtcag

SEQ ID NO: 313648 - DNA, 30 bp, Artificial Sequence
  Synthetic oligonucleotide
ggtttcgttccgaaagcgaattacggtcag

SEQ ID NO: 313649 - DNA, 30 bp, Artificial Sequence
  Synthetic oligonucleotide
atttcacggcagtagtatttggccggtcag

SEQ ID NO: 313650 - DNA, 30 bp, Artificial Sequence
  Synthetic oligonucleotide
tattctgccggggtcccaggacggggtcag

SEQ ID NO: 313651 - DNA, 30 bp, Artificial Sequence
  Synthetic oligonucleotide
ttgaatgcgcttgtaccacagacatgtcag

SEQ ID NO: 313652 - DNA, 30 bp, Artificial Sequence
  Synthetic oligonucleotide
tgtgaccagattgttcttcattcatgtcag

SEQ ID NO: 313653 - DNA, 30 bp, Artificial Sequence
  Synthetic oligonucleotide
tgactttactactattgattcgtatgtcag

SEQ ID NO: 313654 - DNA, 30 bp, Artificial Sequence
  Synthetic oligonucleotide
ggcactgatgcgacgtaccactagtgtcag

SEQ ID NO: 313655 - DNA, 30 bp, Artificial Sequence
  Synthetic oligonucleotide
tatgcagaccgctctttgttgtagtgtcag

SEQ ID NO: 313656 - DNA, 30 bp, Artificial Sequence
  Synthetic oligonucleotide
gtgcgttgattgatcacaactcggtgtcag

SEQ ID NO: 313657 - DNA, 30 bp, Artificial Sequence
  Synthetic oligonucleotide
gtctgatagagtgtagtatcttattgtcag

SEQ ID NO: 313658 - DNA, 30 bp, Artificial Sequence
  Synthetic oligonucleotide
ggaccctagtaatttctgcctttttgtcag

SEQ ID NO: 313659 - DNA, 30 bp, Artificial Sequence
  Synthetic oligonucleotide
ctccgatatgcaagcaaaccagaaattcag

SEQ ID NO: 313660 - DNA, 30 bp, Artificial Sequence
  Synthetic oligonucleotide
gctccatatttggtgtctcagccaattcag

SEQ ID NO: 313661 - DNA, 30 bp, Artificial Sequence
  Synthetic oligonucleotide
cttgcagtttgggcgcgtgtcggaattcag

SEQ ID NO: 313662 - DNA, 30 bp, Artificial Sequence
  Synthetic oligonucleotide
cacttttgagaatatatgtggatcattcag

SEQ ID NO: 313663 - DNA, 30 bp, Artificial Sequence
  Synthetic oligonucleotide
gccgctcatctaagagataagctcattcag

SEQ ID NO: 313664 - DNA, 31 bp, Artificial Sequence
  Synthetic oligonucleotide
gcactagctcttgtatcagaacgtcattcag

SEQ ID NO: 313665 - DNA, 30 bp, Artificial Sequence
  Synthetic oligonucleotide
cctggtgtgccaaccccaaaggtgattcag

SEQ ID NO: 313666 - DNA, 29 bp, Artificial Sequence
  Synthetic oligonucleotide
cgtttaattggcggttatcgaatattcag

SEQ ID NO: 313667 - DNA, 30 bp, Artificial Sequence
  Synthetic oligonucleotide
tattgacaaaggaaggcctagcgtattcag

SEQ ID NO: 313668 - DNA, 30 bp, Artificial Sequence
  Synthetic oligonucleotide
actcttagtaaccaaaatttcatacttcag

SEQ ID NO: 313669 - DNA, 30 bp, Artificial Sequence
  Synthetic oligonucleotide
gtagtttcagaaccatacgcctaccttcag

SEQ ID NO: 313670 - DNA, 30 bp, Artificial Sequence
  Synthetic oligonucleotide
ggcaagtccacgctcggttagcgccttcag

SEQ ID NO: 313671 - DNA, 30 bp, Artificial Sequence
  Synthetic oligonucleotide
cagatctacggggtgctgtaccaagttcag

SEQ ID NO: 313672 - DNA, 30 bp, Artificial Sequence
  Synthetic oligonucleotide
gtacgtaagattttcctggatccagttcag

SEQ ID NO: 313673 - DNA, 30 bp, Artificial Sequence
  Synthetic oligonucleotide
agttcagacgttatgtaaagctgagttcag

SEQ ID NO: 313674 - DNA, 31 bp, Artificial Sequence
  Synthetic oligonucleotide
aagtactaggctgtgctgatagtatgttcag

SEQ ID NO: 313675 - DNA, 30 bp, Artificial Sequence
  Synthetic oligonucleotide
cgggttgtataaacgtaattgccatttcag

SEQ ID NO: 313676 - DNA, 30 bp, Artificial Sequence
  Synthetic oligonucleotide
tgtatgggaatatcgtgagaatcatttcag

SEQ ID NO: 313677 - DNA, 30 bp, Artificial Sequence
  Synthetic oligonucleotide
ggtgagggcactaagacttccaagtttcag

SEQ ID NO: 313678 - DNA, 30 bp, Artificial Sequence
  Synthetic oligonucleotide
gaagtagtgtcattggggtgtgcgtttcag

SEQ ID NO: 313679 - DNA, 30 bp, Artificial Sequence
  Synthetic oligonucleotide
aaatcgtgtgattcgcgtgttccttttcag

SEQ ID NO: 313680 - DNA, 30 bp, Artificial Sequence
  Synthetic oligonucleotide
taatgatagggggcgcatgctgcttttcag

SEQ ID NO: 313681 - DNA, 30 bp, Artificial Sequence
  Synthetic oligonucleotide
atatgctcccactgaacaaaacgttttcag

SEQ ID NO: 313682 - DNA, 30 bp, Artificial Sequence
  Synthetic oligonucleotide
ttgaagggcgtgggggaggcaggttttcag

SEQ ID NO: 313683 - DNA, 30 bp, Artificial Sequence
  Synthetic oligonucleotide
cactcagcaggcaggtatcgctgttttcag

SEQ ID NO: 313684 - DNA, 30 bp, Artificial Sequence
  Synthetic oligonucleotide
cttgtaatattttgatagaggaacaaagag

SEQ ID NO: 313685 - DNA, 30 bp, Artificial Sequence
  Synthetic oligonucleotide
caggaccgtgcacgagacccccgcaaagag

SEQ ID NO: 313686 - DNA, 30 bp, Artificial Sequence
  Synthetic oligonucleotide
atgtgttaacaggcggacaaggtgaaagag

SEQ ID NO: 313687 - DNA, 30 bp, Artificial Sequence
  Synthetic oligonucleotide
cacatgcgggggggtggaatgaataaagag

SEQ ID NO: 313688 - DNA, 30 bp, Artificial Sequence
  Synthetic oligonucleotide
tttgagccagacctggggcaagataaagag

SEQ ID NO: 313689 - DNA, 30 bp, Artificial Sequence
  Synthetic oligonucleotide
aaacctcgatgtgggacccgcgctaaagag

SEQ ID NO: 313690 - DNA, 30 bp, Artificial Sequence
  Synthetic oligonucleotide
agttccaggaaccaaatgggtggtaaagag

SEQ ID NO: 313691 - DNA, 30 bp, Artificial Sequence
  Synthetic oligonucleotide
agtccgtataggacgagcaccgaacaagag

SEQ ID NO: 313692 - DNA, 30 bp, Artificial Sequence
  Synthetic oligonucleotide
tttacaccgtccacaggtataacacaagag

SEQ ID NO: 313693 - DNA, 30 bp, Artificial Sequence
  Synthetic oligonucleotide
accgacttagagattatcctcagacaagag

SEQ ID NO: 313694 - DNA, 30 bp, Artificial Sequence
  Synthetic oligonucleotide
taaatagggtacaggctctccggacaagag

SEQ ID NO: 313695 - DNA, 30 bp, Artificial Sequence
  Synthetic oligonucleotide
attagaacttgagcctagctttgacaagag

SEQ ID NO: 313696 - DNA, 30 bp, Artificial Sequence
  Synthetic oligonucleotide
tttcccaccgaggctaccagtacccaagag

SEQ ID NO: 313697 - DNA, 30 bp, Artificial Sequence
  Synthetic oligonucleotide
acttcggcgttagtccggctatgccaagag

SEQ ID NO: 313698 - DNA, 30 bp, Artificial Sequence
  Synthetic oligonucleotide
agtcatccgtcgcgtacaggaaagcaagag

SEQ ID NO: 313699 - DNA, 30 bp, Artificial Sequence
  Synthetic oligonucleotide
cacgtaaatccccgtcctcgttcgcaagag

SEQ ID NO: 313700 - DNA, 30 bp, Artificial Sequence
  Synthetic oligonucleotide
gtaatcttgtaatggtgacaactgcaagag

SEQ ID NO: 313701 - DNA, 30 bp, Artificial Sequence
  Synthetic oligonucleotide
catagttctttttcggaaatcaatcaagag

SEQ ID NO: 313702 - DNA, 30 bp, Artificial Sequence
  Synthetic oligonucleotide
tcataggtatgaaactgtccccctcaagag

SEQ ID NO: 313703 - DNA, 30 bp, Artificial Sequence
  Synthetic oligonucleotide
agcgatcattgaacattcaactttcaagag

SEQ ID NO: 313704 - DNA, 30 bp, Artificial Sequence
  Synthetic oligonucleotide
gtccactctggtatcttatgagaagaagag

SEQ ID NO: 313705 - DNA, 30 bp, Artificial Sequence
  Synthetic oligonucleotide
tatcggtctcggtgggtcgcggacgaagag

SEQ ID NO: 313706 - DNA, 30 bp, Artificial Sequence
  Synthetic oligonucleotide
tagacactactcccctgggtccccgaagag

SEQ ID NO: 313707 - DNA, 30 bp, Artificial Sequence
  Synthetic oligonucleotide
gtggctatttgcacgattgacgtcgaagag

SEQ ID NO: 313708 - DNA, 30 bp, Artificial Sequence
  Synthetic oligonucleotide
tcccagggatagggcaaaaacttggaagag

SEQ ID NO: 313709 - DNA, 30 bp, Artificial Sequence
  Synthetic oligonucleotide
gccgaccgcggggcagaggataaataagag

SEQ ID NO: 313710 - DNA, 30 bp, Artificial Sequence
  Synthetic oligonucleotide
ttcgatacctacttaggcttggaataagag

SEQ ID NO: 313711 - DNA, 30 bp, Artificial Sequence
  Synthetic oligonucleotide
ttttgacaagacatcggattctaataagag

SEQ ID NO: 313712 - DNA, 30 bp, Artificial Sequence
  Synthetic oligonucleotide
aacagcctcctcgtcagcacgtcataagag

SEQ ID NO: 313713 - DNA, 30 bp, Artificial Sequence
  Synthetic oligonucleotide
atgtttcgtcgataggtaggtttataagag

SEQ ID NO: 313714 - DNA, 30 bp, Artificial Sequence
  Synthetic oligonucleotide
aggaatttagattggctctactcctaagag

SEQ ID NO: 313715 - DNA, 30 bp, Artificial Sequence
  Synthetic oligonucleotide
tcaatatctcaatgtctccaccgctaagag

SEQ ID NO: 313716 - DNA, 30 bp, Artificial Sequence
  Synthetic oligonucleotide
gttccacccgaacatcataggggctaagag

SEQ ID NO: 313717 - DNA, 30 bp, Artificial Sequence
  Synthetic oligonucleotide
gtgggtcattctccggtaaaattctaagag

SEQ ID NO: 313718 - DNA, 30 bp, Artificial Sequence
  Synthetic oligonucleotide
attatcccatatagggtacagctgtaagag

SEQ ID NO: 313719 - DNA, 30 bp, Artificial Sequence
  Synthetic oligonucleotide
gggttcctggattaatgagagctgtaagag

SEQ ID NO: 313720 - DNA, 30 bp, Artificial Sequence
  Synthetic oligonucleotide
tgtttacgtcgtggttctttggaaacagag

SEQ ID NO: 313721 - DNA, 30 bp, Artificial Sequence
  Synthetic oligonucleotide
tggaaccaagcctgggagcgggccacagag

SEQ ID NO: 313722 - DNA, 30 bp, Artificial Sequence
  Synthetic oligonucleotide
agtacaatttgaacttatggctgcacagag

SEQ ID NO: 313723 - DNA, 30 bp, Artificial Sequence
  Synthetic oligonucleotide
gtacttgaacatgtgaaacggtagacagag

SEQ ID NO: 313724 - DNA, 30 bp, Artificial Sequence
  Synthetic oligonucleotide
gcgctggacttcgcgatgtagacgacagag

SEQ ID NO: 313725 - DNA, 30 bp, Artificial Sequence
  Synthetic oligonucleotide
gtgtatctcttgacccagggacatacagag

SEQ ID NO: 313726 - DNA, 30 bp, Artificial Sequence
  Synthetic oligonucleotide
tagaactttcagtggtgaacacgtacagag

SEQ ID NO: 313727 - DNA, 30 bp, Artificial Sequence
  Synthetic oligonucleotide
attaacttgtgcagtttaccagcagcagag

SEQ ID NO: 313728 - DNA, 30 bp, Artificial Sequence
  Synthetic oligonucleotide
aagctgcatacgcggtcggtaaacgcagag

SEQ ID NO: 313729 - DNA, 30 bp, Artificial Sequence
  Synthetic oligonucleotide
ggaaattcagcgtttctatattccgcagag

SEQ ID NO: 313730 - DNA, 30 bp, Artificial Sequence
  Synthetic oligonucleotide
tgacgtcctttgcggatgtcactggcagag

SEQ ID NO: 313731 - DNA, 30 bp, Artificial Sequence
  Synthetic oligonucleotide
gctagcggacctcagattgaaaatgcagag

SEQ ID NO: 313732 - DNA, 29 bp, Artificial Sequence
  Synthetic oligonucleotide
caccaggcacgtcggtattttctgcagag

SEQ ID NO: 313733 - DNA, 30 bp, Artificial Sequence
  Synthetic oligonucleotide
atgttatgtccaacaggagaattctcagag

SEQ ID NO: 313734 - DNA, 30 bp, Artificial Sequence
  Synthetic oligonucleotide
agaatttctcacggcgtccccccgtcagag

SEQ ID NO: 313735 - DNA, 30 bp, Artificial Sequence
  Synthetic oligonucleotide
aggggacaatgtcgggggcttcggtcagag

SEQ ID NO: 313736 - DNA, 30 bp, Artificial Sequence
  Synthetic oligonucleotide
cggggacatatgggccgctaaatttcagag

SEQ ID NO: 313737 - DNA, 30 bp, Artificial Sequence
  Synthetic oligonucleotide
agtaatgagtaccgttggcctatttcagag

SEQ ID NO: 313738 - DNA, 30 bp, Artificial Sequence
  Synthetic oligonucleotide
gtaagtgccgcctagctaggattaagagag

SEQ ID NO: 313739 - DNA, 30 bp, Artificial Sequence
  Synthetic oligonucleotide
ggtcatcgctcaggtcgcttcttaagagag

SEQ ID NO: 313740 - DNA, 30 bp, Artificial Sequence
  Synthetic oligonucleotide
actaagttcgaatcgtgtcactagagagag

SEQ ID NO: 313741 - DNA, 30 bp, Artificial Sequence
  Synthetic oligonucleotide
ctcgccccatgagcgagggctcggagagag

SEQ ID NO: 313742 - DNA, 30 bp, Artificial Sequence
  Synthetic oligonucleotide
atgtatcagtcgcatagcggggggagagag

SEQ ID NO: 313743 - DNA, 30 bp, Artificial Sequence
  Synthetic oligonucleotide
agtcttcgcaacccacgtggaaatagagag

SEQ ID NO: 313744 - DNA, 30 bp, Artificial Sequence
  Synthetic oligonucleotide
atgtaggcttgtcaaattgttaatagagag

SEQ ID NO: 313745 - DNA, 30 bp, Artificial Sequence
  Synthetic oligonucleotide
accgaccctaggagaaggttgtatagagag

SEQ ID NO: 313746 - DNA, 30 bp, Artificial Sequence
  Synthetic oligonucleotide
cgatacgtatcgtcaggtgcgcgtagagag

SEQ ID NO: 313747 - DNA, 30 bp, Artificial Sequence
  Synthetic oligonucleotide
tccgcgttatccgtagatactcgtagagag

SEQ ID NO: 313748 - DNA, 30 bp, Artificial Sequence
  Synthetic oligonucleotide
gtttaaagccgccgatagggcgttagagag

SEQ ID NO: 313749 - DNA, 30 bp, Artificial Sequence
  Synthetic oligonucleotide
aattgatatattgctttcaattcgcgagag

SEQ ID NO: 313750 - DNA, 30 bp, Artificial Sequence
  Synthetic oligonucleotide
cgcatattgtacggttagacacccggagag

SEQ ID NO: 313751 - DNA, 30 bp, Artificial Sequence
  Synthetic oligonucleotide
tgcaatcatgttcatggacaaggcggagag

SEQ ID NO: 313752 - DNA, 30 bp, Artificial Sequence
  Synthetic oligonucleotide
tccgagcggttctcaaatgttcgtggagag

SEQ ID NO: 313753 - DNA, 30 bp, Artificial Sequence
  Synthetic oligonucleotide
tttcagtatgagcacaagtgatgtggagag

SEQ ID NO: 313754 - DNA, 30 bp, Artificial Sequence
  Synthetic oligonucleotide
ggaaccggaccgtactgtggctcatgagag

SEQ ID NO: 313755 - DNA, 30 bp, Artificial Sequence
  Synthetic oligonucleotide
ctatacgatggagaaacattgtactgagag

SEQ ID NO: 313756 - DNA, 30 bp, Artificial Sequence
  Synthetic oligonucleotide
acgtctcctgcacttagtataaagtgagag

SEQ ID NO: 313757 - DNA, 30 bp, Artificial Sequence
  Synthetic oligonucleotide
agaaaaccaccctgcatgcctgggtgagag

SEQ ID NO: 313758 - DNA, 30 bp, Artificial Sequence
  Synthetic oligonucleotide
gaaaaccttaacgagaagccttattgagag

SEQ ID NO: 313759 - DNA, 30 bp, Artificial Sequence
  Synthetic oligonucleotide
gcaccatctctgattattggctgttgagag

SEQ ID NO: 313760 - DNA, 30 bp, Artificial Sequence
  Synthetic oligonucleotide
ggggtttggaccatactgggcagaatagag

SEQ ID NO: 313761 - DNA, 30 bp, Artificial Sequence
  Synthetic oligonucleotide
tcaagttattacgccgcttgttacatagag

SEQ ID NO: 313762 - DNA, 30 bp, Artificial Sequence
  Synthetic oligonucleotide
gattacagatcgagtggatcgatcatagag

SEQ ID NO: 313763 - DNA, 30 bp, Artificial Sequence
  Synthetic oligonucleotide
aaaccagtgaaatcgggaagtctactagag

SEQ ID NO: 313764 - DNA, 30 bp, Artificial Sequence
  Synthetic oligonucleotide
cctaatactagagggtggcaggtactagag

SEQ ID NO: 313765 - DNA, 30 bp, Artificial Sequence
  Synthetic oligonucleotide
tttggctctgggggctgcgtgtacctagag

SEQ ID NO: 313766 - DNA, 30 bp, Artificial Sequence
  Synthetic oligonucleotide
tatgtacatactgaacaggttcgcctagag

SEQ ID NO: 313767 - DNA, 30 bp, Artificial Sequence
  Synthetic oligonucleotide
ccgtaaagatgggttaaaatcttcctagag

SEQ ID NO: 313768 - DNA, 30 bp, Artificial Sequence
  Synthetic oligonucleotide
aatttacgttgtccgattcacaggctagag

SEQ ID NO: 313769 - DNA, 30 bp, Artificial Sequence
  Synthetic oligonucleotide
aagggtccggaggtccacaactctctagag

SEQ ID NO: 313770 - DNA, 30 bp, Artificial Sequence
  Synthetic oligonucleotide
ataatgggaggacctatcctgaaagtagag

SEQ ID NO: 313771 - DNA, 30 bp, Artificial Sequence
  Synthetic oligonucleotide
atgcaaagttccagcttcgtataagtagag

SEQ ID NO: 313772 - DNA, 30 bp, Artificial Sequence
  Synthetic oligonucleotide
tcccccaaatttcatgaaacccccgtagag

SEQ ID NO: 313773 - DNA, 30 bp, Artificial Sequence
  Synthetic oligonucleotide
tatcagtgaattacagcatacccattagag

SEQ ID NO: 313774 - DNA, 30 bp, Artificial Sequence
  Synthetic oligonucleotide
taggggttttgatgagaaagatgattagag

SEQ ID NO: 313775 - DNA, 30 bp, Artificial Sequence
  Synthetic oligonucleotide
caagtagttggcgcggtaatcgtattagag

SEQ ID NO: 313776 - DNA, 30 bp, Artificial Sequence
  Synthetic oligonucleotide
ccgttcacgtctgccgttggatacttagag

SEQ ID NO: 313777 - DNA, 30 bp, Artificial Sequence
  Synthetic oligonucleotide
gaggttccacagtttcataaaaccttagag

SEQ ID NO: 313778 - DNA, 30 bp, Artificial Sequence
  Synthetic oligonucleotide
gggcgcccgggctaattgatgtatttagag

SEQ ID NO: 313779 - DNA, 30 bp, Artificial Sequence
  Synthetic oligonucleotide
cctgtgaaccaaaaaggcgttattttagag

SEQ ID NO: 313780 - DNA, 30 bp, Artificial Sequence
  Synthetic oligonucleotide
cgtctttgatttgggagttaataaaacgag

SEQ ID NO: 313781 - DNA, 30 bp, Artificial Sequence
  Synthetic oligonucleotide
aggcatatcaaaaaccacagacgcaacgag

SEQ ID NO: 313782 - DNA, 30 bp, Artificial Sequence
  Synthetic oligonucleotide
acggccttacggcgtagtcaacagaacgag

SEQ ID NO: 313783 - DNA, 30 bp, Artificial Sequence
  Synthetic oligonucleotide
gaagttcacatactaggcaggcagaacgag

SEQ ID NO: 313784 - DNA, 30 bp, Artificial Sequence
  Synthetic oligonucleotide
ctcatcgcaggtaacgacgtctataacgag

SEQ ID NO: 313785 - DNA, 30 bp, Artificial Sequence
  Synthetic oligonucleotide
ataagggaaagaatggtaatttctaacgag

SEQ ID NO: 313786 - DNA, 30 bp, Artificial Sequence
  Synthetic oligonucleotide
gtggttgtaccagctactggtattaacgag

SEQ ID NO: 313787 - DNA, 30 bp, Artificial Sequence
  Synthetic oligonucleotide
ctgtcatccatttttcgcatacagcacgag

SEQ ID NO: 313788 - DNA, 30 bp, Artificial Sequence
  Synthetic oligonucleotide
gtacggacccggaaattaggcgggcacgag

SEQ ID NO: 313789 - DNA, 30 bp, Artificial Sequence
  Synthetic oligonucleotide
gctcattatagatgggcctcgttgcacgag

SEQ ID NO: 313790 - DNA, 30 bp, Artificial Sequence
  Synthetic oligonucleotide
ttaaacgcgtcatcattaatgaatgacgag

SEQ ID NO: 313791 - DNA, 30 bp, Artificial Sequence
  Synthetic oligonucleotide
aaactacgcggggttatgagccatgacgag

SEQ ID NO: 313792 - DNA, 30 bp, Artificial Sequence
  Synthetic oligonucleotide
ttctactaggggtacttcaacacatacgag

SEQ ID NO: 313793 - DNA, 30 bp, Artificial Sequence
  Synthetic oligonucleotide
atcgagtgatgtgctctcacgggctacgag

SEQ ID NO: 313794 - DNA, 30 bp, Artificial Sequence
  Synthetic oligonucleotide
ggaatactagggccccaagagtgctacgag

SEQ ID NO: 313795 - DNA, 30 bp, Artificial Sequence
  Synthetic oligonucleotide
cgttttgacaatcacggtttgctgtacgag

SEQ ID NO: 313796 - DNA, 31 bp, Artificial Sequence
  Synthetic oligonucleotide
atggtttcgattcgcattctttctgtacgag

SEQ ID NO: 313797 - DNA, 30 bp, Artificial Sequence
  Synthetic oligonucleotide
gcgctcaccaagtccccttgaacacccgag

SEQ ID NO: 313798 - DNA, 30 bp, Artificial Sequence
  Synthetic oligonucleotide
cctgtacacccgttctggaggtagcccgag

SEQ ID NO: 313799 - DNA, 30 bp, Artificial Sequence
  Synthetic oligonucleotide
gaacttggaattacaacgggggcagccgag

SEQ ID NO: 313800 - DNA, 30 bp, Artificial Sequence
  Synthetic oligonucleotide
agatattgacgggaagcacaggccgccgag

SEQ ID NO: 313801 - DNA, 30 bp, Artificial Sequence
  Synthetic oligonucleotide
cttcacctggctagttaccgcggcgccgag

SEQ ID NO: 313802 - DNA, 30 bp, Artificial Sequence
  Synthetic oligonucleotide
atccccgtcactggcattagcgatgccgag

SEQ ID NO: 313803 - DNA, 30 bp, Artificial Sequence
  Synthetic oligonucleotide
taagtagacgccgtgatactccaatccgag

SEQ ID NO: 313804 - DNA, 30 bp, Artificial Sequence
  Synthetic oligonucleotide
ggccggcattgagaacgacagtggtccgag

SEQ ID NO: 313805 - DNA, 30 bp, Artificial Sequence
  Synthetic oligonucleotide
caggaaagggttaaaaaaggtccttccgag

SEQ ID NO: 313806 - DNA, 30 bp, Artificial Sequence
  Synthetic oligonucleotide
ttggccctggaggataggactggaagcgag

SEQ ID NO: 313807 - DNA, 30 bp, Artificial Sequence
  Synthetic oligonucleotide
aaatgccacaacctattccgacccagcgag

SEQ ID NO: 313808 - DNA, 30 bp, Artificial Sequence
  Synthetic oligonucleotide
ccatttggggtttggtctggaacgagcgag

SEQ ID NO: 313809 - DNA, 30 bp, Artificial Sequence
  Synthetic oligonucleotide
ccggattcttcacggcaatttgaacgcgag

SEQ ID NO: 313810 - DNA, 31 bp, Artificial Sequence
  Synthetic oligonucleotide
gtgaacaggtgtgtcgtggcactaacgcgag

SEQ ID NO: 313811 - DNA, 30 bp, Artificial Sequence
  Synthetic oligonucleotide
gtacgcagtgttcgtagggcggtacgcgag

SEQ ID NO: 313812 - DNA, 30 bp, Artificial Sequence
  Synthetic oligonucleotide
ctttccattgccctttccgaaacccgcgag

SEQ ID NO: 313813 - DNA, 29 bp, Artificial Sequence
  Synthetic oligonucleotide
aaatgacgttacatcccccatcccgcgag

SEQ ID NO: 313814 - DNA, 30 bp, Artificial Sequence
  Synthetic oligonucleotide
gcccccgaatcccactgggcaaatcgcgag

SEQ ID NO: 313815 - DNA, 30 bp, Artificial Sequence
  Synthetic oligonucleotide
agcggaccgatcaaccttggttaaggcgag

SEQ ID NO: 313816 - DNA, 30 bp, Artificial Sequence
  Synthetic oligonucleotide
tgaaggtatgggtgaacctttcgcggcgag

SEQ ID NO: 313817 - DNA, 30 bp, Artificial Sequence
  Synthetic oligonucleotide
aagacccgatgtagagaaggtctcggcgag

SEQ ID NO: 313818 - DNA, 30 bp, Artificial Sequence
  Synthetic oligonucleotide
ttactgtaaagctgtacgcaagggggcgag

SEQ ID NO: 313819 - DNA, 30 bp, Artificial Sequence
  Synthetic oligonucleotide
tttggctcccggcgatgatgcgttggcgag

SEQ ID NO: 313820 - DNA, 30 bp, Artificial Sequence
  Synthetic oligonucleotide
agatattgcatctggtgctactttggcgag

SEQ ID NO: 313821 - DNA, 30 bp, Artificial Sequence
  Synthetic oligonucleotide
accgaacctgcgagatttatcgcatgcgag

SEQ ID NO: 313822 - DNA, 30 bp, Artificial Sequence
  Synthetic oligonucleotide
atttatcggtggccgggtttcgcatgcgag

SEQ ID NO: 313823 - DNA, 30 bp, Artificial Sequence
  Synthetic oligonucleotide
attctcgggggcagctggatgagatgcgag

SEQ ID NO: 313824 - DNA, 30 bp, Artificial Sequence
  Synthetic oligonucleotide
tgcgcagccccgtatgtgggagactgcgag

SEQ ID NO: 313825 - DNA, 30 bp, Artificial Sequence
  Synthetic oligonucleotide
tcagtacagatgagggtatataagtgcgag

SEQ ID NO: 313826 - DNA, 30 bp, Artificial Sequence
  Synthetic oligonucleotide
tcttattaattacttatcgcacggtgcgag

SEQ ID NO: 313827 - DNA, 30 bp, Artificial Sequence
  Synthetic oligonucleotide
taccgggtgtgagatgactggacttgcgag

SEQ ID NO: 313828 - DNA, 30 bp, Artificial Sequence
  Synthetic oligonucleotide
gatctttcggtgtcgatagtccgttgcgag

SEQ ID NO: 313829 - DNA, 30 bp, Artificial Sequence
  Synthetic oligonucleotide
gttgttaaattgcaagatgcttgcatcgag

SEQ ID NO: 313830 - DNA, 30 bp, Artificial Sequence
  Synthetic oligonucleotide
ataatcccgcgcacactgaatattatcgag

SEQ ID NO: 313831 - DNA, 30 bp, Artificial Sequence
  Synthetic oligonucleotide
gcagctcgtacggtacgtattattatcgag

SEQ ID NO: 313832 - DNA, 30 bp, Artificial Sequence
  Synthetic oligonucleotide
gtcgaggccaaacagaggtctgttctcgag

SEQ ID NO: 313833 - DNA, 30 bp, Artificial Sequence
  Synthetic oligonucleotide
ttgaacgaagccttaactcgctcagtcgag

SEQ ID NO: 313834 - DNA, 30 bp, Artificial Sequence
  Synthetic oligonucleotide
gcggtcggctagggggcatgtcgcgtcgag

SEQ ID NO: 313835 - DNA, 30 bp, Artificial Sequence
  Synthetic oligonucleotide
tgagatacgcgagctgtccggggcgtcgag

SEQ ID NO: 313836 - DNA, 30 bp, Artificial Sequence
  Synthetic oligonucleotide
aggcgcttgtggggattggtccaggtcgag

SEQ ID NO: 313837 - DNA, 30 bp, Artificial Sequence
  Synthetic oligonucleotide
cgtaacttgtatgtatgatgcatggtcgag

SEQ ID NO: 313838 - DNA, 30 bp, Artificial Sequence
  Synthetic oligonucleotide
tacttctatataggaggaaccgtggtcgag

SEQ ID NO: 313839 - DNA, 30 bp, Artificial Sequence
  Synthetic oligonucleotide
acaggaaatagtcttgcgtatagtgtcgag

SEQ ID NO: 313840 - DNA, 30 bp, Artificial Sequence
  Synthetic oligonucleotide
caccgtctaagtggtagtaaacttgtcgag

SEQ ID NO: 313841 - DNA, 30 bp, Artificial Sequence
  Synthetic oligonucleotide
tcggggtcaaatacatctttgaacttcgag

SEQ ID NO: 313842 - DNA, 30 bp, Artificial Sequence
  Synthetic oligonucleotide
agcttaaaaggcgtctccatgtatttcgag

SEQ ID NO: 313843 - DNA, 30 bp, Artificial Sequence
  Synthetic oligonucleotide
cggagcattcactctaagctaattttcgag

SEQ ID NO: 313844 - DNA, 30 bp, Artificial Sequence
  Synthetic oligonucleotide
gggcttgtgatgtggtcacaaataaaggag

SEQ ID NO: 313845 - DNA, 30 bp, Artificial Sequence
  Synthetic oligonucleotide
taagctggagtaaggccggtttctaaggag

SEQ ID NO: 313846 - DNA, 30 bp, Artificial Sequence
  Synthetic oligonucleotide
gcgcggctctccgagcaggaatttaaggag

SEQ ID NO: 313847 - DNA, 30 bp, Artificial Sequence
  Synthetic oligonucleotide
caataggttcttaaaattgcggtacaggag

SEQ ID NO: 313848 - DNA, 30 bp, Artificial Sequence
  Synthetic oligonucleotide
ccacctccattttaagctttattagaggag

SEQ ID NO: 313849 - DNA, 29 bp, Artificial Sequence
  Synthetic oligonucleotide
acgcaggatgctttagttcaaaataggag

SEQ ID NO: 313850 - DNA, 30 bp, Artificial Sequence
  Synthetic oligonucleotide
tgagggatgactggagtgaggcaataggag

SEQ ID NO: 313851 - DNA, 30 bp, Artificial Sequence
  Synthetic oligonucleotide
gtcagtctaacatgcatggtttcataggag

SEQ ID NO: 313852 - DNA, 30 bp, Artificial Sequence
  Synthetic oligonucleotide
cctagagtttatctagcaggacgataggag

SEQ ID NO: 313853 - DNA, 30 bp, Artificial Sequence
  Synthetic oligonucleotide
cgaagttcttttaggcttctgttataggag

SEQ ID NO: 313854 - DNA, 30 bp, Artificial Sequence
  Synthetic oligonucleotide
ccggagcttatgtatgagagtaactaggag

SEQ ID NO: 313855 - DNA, 30 bp, Artificial Sequence
  Synthetic oligonucleotide
ccagggcgcccctgtgctagtcgctaggag

SEQ ID NO: 313856 - DNA, 30 bp, Artificial Sequence
  Synthetic oligonucleotide
tatacaatactgtgcggcatctcgtaggag

SEQ ID NO: 313857 - DNA, 30 bp, Artificial Sequence
  Synthetic oligonucleotide
caattcaagacggtgcaccttaattaggag

SEQ ID NO: 313858 - DNA, 30 bp, Artificial Sequence
  Synthetic oligonucleotide
aactggtcgttaggttcagtgtaaacggag

SEQ ID NO: 313859 - DNA, 30 bp, Artificial Sequence
  Synthetic oligonucleotide
cgggcccacgggatcggcaagataacggag

SEQ ID NO: 313860 - DNA, 30 bp, Artificial Sequence
  Synthetic oligonucleotide
tctgaacacggtccttcgcatcccacggag

SEQ ID NO: 313861 - DNA, 30 bp, Artificial Sequence
  Synthetic oligonucleotide
atcaaggggggactattaagagtgccggag

SEQ ID NO: 313862 - DNA, 30 bp, Artificial Sequence
  Synthetic oligonucleotide
accggtttagagcgtgcaagaaatccggag

SEQ ID NO: 313863 - DNA, 30 bp, Artificial Sequence
  Synthetic oligonucleotide
acacacgtagtttgatacgctactccggag

SEQ ID NO: 313864 - DNA, 30 bp, Artificial Sequence
  Synthetic oligonucleotide
gtatgaaattccgatcgtggctttccggag

SEQ ID NO: 313865 - DNA, 30 bp, Artificial Sequence
  Synthetic oligonucleotide
ggagctctatctagcacatgaccagcggag

SEQ ID NO: 313866 - DNA, 30 bp, Artificial Sequence
  Synthetic oligonucleotide
taaaagttgagtcttcgttaccgggcggag

SEQ ID NO: 313867 - DNA, 30 bp, Artificial Sequence
  Synthetic oligonucleotide
caagtggaaagcggaggaccaggggcggag

SEQ ID NO: 313868 - DNA, 30 bp, Artificial Sequence
  Synthetic oligonucleotide
gtctagttgtatagggttttagatgcggag

SEQ ID NO: 313869 - DNA, 30 bp, Artificial Sequence
  Synthetic oligonucleotide
tcaataatgatagctcacggatttgcggag

SEQ ID NO: 313870 - DNA, 30 bp, Artificial Sequence
  Synthetic oligonucleotide
gtttttggattacttaccgagatatcggag

SEQ ID NO: 313871 - DNA, 30 bp, Artificial Sequence
  Synthetic oligonucleotide
gtcagtatatgggcggtggcgaggtcggag

SEQ ID NO: 313872 - DNA, 30 bp, Artificial Sequence
  Synthetic oligonucleotide
cttattccgtatgttttaacaatttcggag

SEQ ID NO: 313873 - DNA, 30 bp, Artificial Sequence
  Synthetic oligonucleotide
ataagttcttttgatcactgcgcaagggag

SEQ ID NO: 313874 - DNA, 30 bp, Artificial Sequence
  Synthetic oligonucleotide
acaagagtgacaacttctgggcgcagggag

SEQ ID NO: 313875 - DNA, 30 bp, Artificial Sequence
  Synthetic oligonucleotide
ggttaaagactcgctgtagttttcagggag

SEQ ID NO: 313876 - DNA, 30 bp, Artificial Sequence
  Synthetic oligonucleotide
cgggtcgtaaggcacggccctggacgggag

SEQ ID NO: 313877 - DNA, 30 bp, Artificial Sequence
  Synthetic oligonucleotide
ggctccgcccgtaagattggactacgggag

SEQ ID NO: 313878 - DNA, 30 bp, Artificial Sequence
  Synthetic oligonucleotide
ggctcttgcagaaaaactattgtgcgggag

SEQ ID NO: 313879 - DNA, 30 bp, Artificial Sequence
  Synthetic oligonucleotide
aaagtcctgggtggaagatacgttcgggag

SEQ ID NO: 313880 - DNA, 30 bp, Artificial Sequence
  Synthetic oligonucleotide
gaagtttaaaaggaaattagtgttcgggag

SEQ ID NO: 313881 - DNA, 30 bp, Artificial Sequence
  Synthetic oligonucleotide
gcgcgggtgtttgttcacccagcaggggag

SEQ ID NO: 313882 - DNA, 30 bp, Artificial Sequence
  Synthetic oligonucleotide
ccttatgccagagtggtaaacgagggggag

SEQ ID NO: 313883 - DNA, 30 bp, Artificial Sequence
  Synthetic oligonucleotide
attgtatcccttggctccagggtgggggag

SEQ ID NO: 313884 - DNA, 30 bp, Artificial Sequence
  Synthetic oligonucleotide
taagaaccttactctaaatcccgtggggag

SEQ ID NO: 313885 - DNA, 30 bp, Artificial Sequence
  Synthetic oligonucleotide
acagatatagtcataattttagtatgggag

SEQ ID NO: 313886 - DNA, 30 bp, Artificial Sequence
  Synthetic oligonucleotide
ccatgggcgacggtgtcagaaccctgggag

SEQ ID NO: 313887 - DNA, 30 bp, Artificial Sequence
  Synthetic oligonucleotide
tccgcctagctgatggttagagggtgggag

SEQ ID NO: 313888 - DNA, 30 bp, Artificial Sequence
  Synthetic oligonucleotide
ctttgataattttcccctagggggtgggag

SEQ ID NO: 313889 - DNA, 30 bp, Artificial Sequence
  Synthetic oligonucleotide
gtataagcgggatctaagaatgggtgggag

SEQ ID NO: 313890 - DNA, 30 bp, Artificial Sequence
  Synthetic oligonucleotide
aggagagtagcgtagtcgtttaacatggag

SEQ ID NO: 313891 - DNA, 30 bp, Artificial Sequence
  Synthetic oligonucleotide
tacacagaacgcgttccctcttacatggag

SEQ ID NO: 313892 - DNA, 30 bp, Artificial Sequence
  Synthetic oligonucleotide
atctttatgaccaccggacatttcatggag

SEQ ID NO: 313893 - DNA, 30 bp, Artificial Sequence
  Synthetic oligonucleotide
gcacggggcattcgtcgattaacgatggag

SEQ ID NO: 313894 - DNA, 30 bp, Artificial Sequence
  Synthetic oligonucleotide
tgcggccctacgctctgtgtccaactggag

SEQ ID NO: 313895 - DNA, 30 bp, Artificial Sequence
  Synthetic oligonucleotide
aacgacagtgcataaatcagggcactggag

SEQ ID NO: 313896 - DNA, 30 bp, Artificial Sequence
  Synthetic oligonucleotide
gacctgttattccgatacgcagatctggag

SEQ ID NO: 313897 - DNA, 30 bp, Artificial Sequence
  Synthetic oligonucleotide
attccgaattaatcatttaggagtctggag

SEQ ID NO: 313898 - DNA, 30 bp, Artificial Sequence
  Synthetic oligonucleotide
ctaatgtcgtgactggcagaatgtctggag

SEQ ID NO: 313899 - DNA, 30 bp, Artificial Sequence
  Synthetic oligonucleotide
taatatattcaaggtgttaacaaagtggag

SEQ ID NO: 313900 - DNA, 30 bp, Artificial Sequence
  Synthetic oligonucleotide
gaggatgcgtgggacctctagcacgtggag

SEQ ID NO: 313901 - DNA, 30 bp, Artificial Sequence
  Synthetic oligonucleotide
tagctctccttcctaggattgcaggtggag

SEQ ID NO: 313902 - DNA, 30 bp, Artificial Sequence
  Synthetic oligonucleotide
tcttatgttaatacacccgctgcggtggag

SEQ ID NO: 313903 - DNA, 30 bp, Artificial Sequence
  Synthetic oligonucleotide
tagtatcatccacgtgaaggcctggtggag

SEQ ID NO: 313904 - DNA, 30 bp, Artificial Sequence
  Synthetic oligonucleotide
ggtctgttaaagtcctgacgctatgtggag

SEQ ID NO: 313905 - DNA, 30 bp, Artificial Sequence
  Synthetic oligonucleotide
ttcatttacatgagtctaagagctgtggag

SEQ ID NO: 313906 - DNA, 30 bp, Artificial Sequence
  Synthetic oligonucleotide
aagcgcccttgctcagtttgcggtgtggag

SEQ ID NO: 313907 - DNA, 30 bp, Artificial Sequence
  Synthetic oligonucleotide
attagactaattggcaagccaggattggag

SEQ ID NO: 313908 - DNA, 30 bp, Artificial Sequence
  Synthetic oligonucleotide
aactcgaatggagtggctccgttattggag

SEQ ID NO: 313909 - DNA, 30 bp, Artificial Sequence
  Synthetic oligonucleotide
agtgcggcatcaggccgtggtaatttggag

SEQ ID NO: 313910 - DNA, 30 bp, Artificial Sequence
  Synthetic oligonucleotide
gaagcagaatcatttaccctaagaaatgag

SEQ ID NO: 313911 - DNA, 30 bp, Artificial Sequence
  Synthetic oligonucleotide
cgttagtctagaatatggtcatgaaatgag

SEQ ID NO: 313912 - DNA, 31 bp, Artificial Sequence
  Synthetic oligonucleotide
gaagtctattccccagtaggcctgaaatgag

SEQ ID NO: 313913 - DNA, 30 bp, Artificial Sequence
  Synthetic oligonucleotide
gttgctgatacccgcgggtagcacaatgag

SEQ ID NO: 313914 - DNA, 30 bp, Artificial Sequence
  Synthetic oligonucleotide
gccggctacgaggcaggatccctcaatgag

SEQ ID NO: 313915 - DNA, 30 bp, Artificial Sequence
  Synthetic oligonucleotide
tgaaacggtgtacatctacgggtgaatgag

SEQ ID NO: 313916 - DNA, 30 bp, Artificial Sequence
  Synthetic oligonucleotide
attccagcaccctggtcctttcgtaatgag

SEQ ID NO: 313917 - DNA, 30 bp, Artificial Sequence
  Synthetic oligonucleotide
ggaatggctatagaagaacgtctccatgag

SEQ ID NO: 313918 - DNA, 30 bp, Artificial Sequence
  Synthetic oligonucleotide
actacagcattagagtttgccgcgcatgag

SEQ ID NO: 313919 - DNA, 30 bp, Artificial Sequence
  Synthetic oligonucleotide
tatcatggttgccctcggatagtgcatgag

SEQ ID NO: 313920 - DNA, 30 bp, Artificial Sequence
  Synthetic oligonucleotide
ttctggtgatcctgtgagtaccgagatgag

SEQ ID NO: 313921 - DNA, 30 bp, Artificial Sequence
  Synthetic oligonucleotide
attactgataggccgcgaggctgagatgag

SEQ ID NO: 313922 - DNA, 30 bp, Artificial Sequence
  Synthetic oligonucleotide
gccagcccagacccgacgcggtcatatgag

SEQ ID NO: 313923 - DNA, 30 bp, Artificial Sequence
  Synthetic oligonucleotide
aacccaacgtcactttaactgctatatgag

SEQ ID NO: 313924 - DNA, 30 bp, Artificial Sequence
  Synthetic oligonucleotide
aaacgctaacgccggcatagggcttatgag

SEQ ID NO: 313925 - DNA, 30 bp, Artificial Sequence
  Synthetic oligonucleotide
ctacgtattcagttacgcttgctttatgag

SEQ ID NO: 313926 - DNA, 30 bp, Artificial Sequence
  Synthetic oligonucleotide
attaattaacgtggcaaacaatcaactgag

SEQ ID NO: 313927 - DNA, 30 bp, Artificial Sequence
  Synthetic oligonucleotide
agtgggtgctatcccatgattctcactgag

SEQ ID NO: 313928 - DNA, 30 bp, Artificial Sequence
  Synthetic oligonucleotide
gttggacgaatgttcggtaatcagactgag

SEQ ID NO: 313929 - DNA, 30 bp, Artificial Sequence
  Synthetic oligonucleotide
atttacctagttaggaaggagcatactgag

SEQ ID NO: 313930 - DNA, 30 bp, Artificial Sequence
  Synthetic oligonucleotide
tctctttcacagatgctcgttgctactgag

SEQ ID NO: 313931 - DNA, 30 bp, Artificial Sequence
  Synthetic oligonucleotide
attgtatgcattcatttatacagagctgag

SEQ ID NO: 313932 - DNA, 30 bp, Artificial Sequence
  Synthetic oligonucleotide
atcctataatagcaactctatgtagctgag

SEQ ID NO: 313933 - DNA, 30 bp, Artificial Sequence
  Synthetic oligonucleotide
ttgctatcaacgggtgcttcgcaggctgag

SEQ ID NO: 313934 - DNA, 30 bp, Artificial Sequence
  Synthetic oligonucleotide
ccaactatattagagcataatactgctgag

SEQ ID NO: 313935 - DNA, 30 bp, Artificial Sequence
  Synthetic oligonucleotide
ataatagaaccagagacacattcttctgag

SEQ ID NO: 313936 - DNA, 30 bp, Artificial Sequence
  Synthetic oligonucleotide
gttttacgcatagcttcctagcaaagtgag

SEQ ID NO: 313937 - DNA, 30 bp, Artificial Sequence
  Synthetic oligonucleotide
tgagatacgcctagccgaactttaagtgag

SEQ ID NO: 313938 - DNA, 30 bp, Artificial Sequence
  Synthetic oligonucleotide
gaagttaaaatacacgtatgggacagtgag

SEQ ID NO: 313939 - DNA, 30 bp, Artificial Sequence
  Synthetic oligonucleotide
actccgtgtctgaaaaagcgatgcagtgag

SEQ ID NO: 313940 - DNA, 30 bp, Artificial Sequence
  Synthetic oligonucleotide
gtatcagtcgatgtgttcaccaggagtgag

SEQ ID NO: 313941 - DNA, 30 bp, Artificial Sequence
  Synthetic oligonucleotide
gacagcatgataacgtcagaaagacgtgag

SEQ ID NO: 313942 - DNA, 30 bp, Artificial Sequence
  Synthetic oligonucleotide
tcttatattcccaagggggggggacgtgag

SEQ ID NO: 313943 - DNA, 30 bp, Artificial Sequence
  Synthetic oligonucleotide
agtgagatacgcgcacagggtcaccgtgag

SEQ ID NO: 313944 - DNA, 30 bp, Artificial Sequence
  Synthetic oligonucleotide
gccagtaagaatggctccggtaggcgtgag

SEQ ID NO: 313945 - DNA, 30 bp, Artificial Sequence
  Synthetic oligonucleotide
atccgctatcctaacgttcattacggtgag

SEQ ID NO: 313946 - DNA, 30 bp, Artificial Sequence
  Synthetic oligonucleotide
gtggcatctccccatagagatgccggtgag

SEQ ID NO: 313947 - DNA, 30 bp, Artificial Sequence
  Synthetic oligonucleotide
ctattgtgcatagttcagtaacatggtgag

SEQ ID NO: 313948 - DNA, 30 bp, Artificial Sequence
  Synthetic oligonucleotide
gttccggtgaagtatggacccgttggtgag

SEQ ID NO: 313949 - DNA, 30 bp, Artificial Sequence
  Synthetic oligonucleotide
aacgccatagaccgtgagccccactgtgag

SEQ ID NO: 313950 - DNA, 30 bp, Artificial Sequence
  Synthetic oligonucleotide
gcggcggagggcggagttcagttctgtgag

SEQ ID NO: 313951 - DNA, 30 bp, Artificial Sequence
  Synthetic oligonucleotide
ccggtatctggcttagacgtctattgtgag

SEQ ID NO: 313952 - DNA, 30 bp, Artificial Sequence
  Synthetic oligonucleotide
tgcaacactggtgacggcgcattttgtgag

SEQ ID NO: 313953 - DNA, 30 bp, Artificial Sequence
  Synthetic oligonucleotide
aagagtgccggcaaagattataacattgag

SEQ ID NO: 313954 - DNA, 30 bp, Artificial Sequence
  Synthetic oligonucleotide
tatgatctgacgatcatcgaccagattgag

SEQ ID NO: 313955 - DNA, 30 bp, Artificial Sequence
  Synthetic oligonucleotide
ggttctggacactcgactttctaacttgag

SEQ ID NO: 313956 - DNA, 30 bp, Artificial Sequence
  Synthetic oligonucleotide
attttaccgatacagaggaacacacttgag

SEQ ID NO: 313957 - DNA, 30 bp, Artificial Sequence
  Synthetic oligonucleotide
atgtatgctacttcaggtgtcagacttgag

SEQ ID NO: 313958 - DNA, 30 bp, Artificial Sequence
  Synthetic oligonucleotide
ggggtctcgagctcctccatcaagcttgag

SEQ ID NO: 313959 - DNA, 30 bp, Artificial Sequence
  Synthetic oligonucleotide
gagacctcatggtccaccggatagcttgag

SEQ ID NO: 313960 - DNA, 30 bp, Artificial Sequence
  Synthetic oligonucleotide
tattttacaaaaaatagtgactcgcttgag

SEQ ID NO: 313961 - DNA, 30 bp, Artificial Sequence
  Synthetic oligonucleotide
gttacttatagagccggttgggggcttgag

SEQ ID NO: 313962 - DNA, 30 bp, Artificial Sequence
  Synthetic oligonucleotide
aaggaattgcaaattttgcgacacgttgag

SEQ ID NO: 313963 - DNA, 30 bp, Artificial Sequence
  Synthetic oligonucleotide
ggtgatattgttgagggagcttgcgttgag

SEQ ID NO: 313964 - DNA, 30 bp, Artificial Sequence
  Synthetic oligonucleotide
tctaaagatattctcgtcccgatggttgag

SEQ ID NO: 313965 - DNA, 30 bp, Artificial Sequence
  Synthetic oligonucleotide
atctcttagcgtataaacttgttggttgag

SEQ ID NO: 313966 - DNA, 30 bp, Artificial Sequence
  Synthetic oligonucleotide
tttccagggtttgcgagttggtaatttgag

SEQ ID NO: 313967 - DNA, 30 bp, Artificial Sequence
  Synthetic oligonucleotide
tacatctaacgaagtttttgggtatttgag

SEQ ID NO: 313968 - DNA, 30 bp, Artificial Sequence
  Synthetic oligonucleotide
gaatgtgttaaaaggacggaatcctttgag

SEQ ID NO: 313969 - DNA, 30 bp, Artificial Sequence
  Synthetic oligonucleotide
gccccaatttatgatccaacttcctttgag

SEQ ID NO: 313970 - DNA, 30 bp, Artificial Sequence
  Synthetic oligonucleotide
gaactcaaagatacccttagagcgtttgag

SEQ ID NO: 313971 - DNA, 30 bp, Artificial Sequence
  Synthetic oligonucleotide
gcaaatcctacttcaactgacatgtttgag

SEQ ID NO: 313972 - DNA, 30 bp, Artificial Sequence
  Synthetic oligonucleotide
attgtagcctctgaaaggctggattttgag

SEQ ID NO: 313973 - DNA, 30 bp, Artificial Sequence
  Synthetic oligonucleotide
ctaaacaatttgaattttttgaaaaaatag

SEQ ID NO: 313974 - DNA, 30 bp, Artificial Sequence
  Synthetic oligonucleotide
ggcatggcatgtcacggggcgtaaaaatag

SEQ ID NO: 313975 - DNA, 30 bp, Artificial Sequence
  Synthetic oligonucleotide
tgttcaccgcagaatccgcgcggcaaatag

SEQ ID NO: 313976 - DNA, 30 bp, Artificial Sequence
  Synthetic oligonucleotide
tgggacccctcaattccttcgtagaaatag

SEQ ID NO: 313977 - DNA, 30 bp, Artificial Sequence
  Synthetic oligonucleotide
cctcctgcgaatgcgcttctcatgaaatag

SEQ ID NO: 313978 - DNA, 30 bp, Artificial Sequence
  Synthetic oligonucleotide
acagtttccctggttggcgaacataaatag

SEQ ID NO: 313979 - DNA, 30 bp, Artificial Sequence
  Synthetic oligonucleotide
gacacaaaatgtccgaaactccttaaatag

SEQ ID NO: 313980 - DNA, 30 bp, Artificial Sequence
  Synthetic oligonucleotide
gaaattggggcttcaaatgatcaacaatag

SEQ ID NO: 313981 - DNA, 30 bp, Artificial Sequence
  Synthetic oligonucleotide
gatgattgaaactagggtgcatgacaatag

SEQ ID NO: 313982 - DNA, 30 bp, Artificial Sequence
  Synthetic oligonucleotide
tttggacctatatacgacgccgcccaatag

SEQ ID NO: 313983 - DNA, 30 bp, Artificial Sequence
  Synthetic oligonucleotide
aatgcaatctcagaagataaatctcaatag

SEQ ID NO: 313984 - DNA, 30 bp, Artificial Sequence
  Synthetic oligonucleotide
gcatggtctactggctgtttgctagaatag

SEQ ID NO: 313985 - DNA, 30 bp, Artificial Sequence
  Synthetic oligonucleotide
gacgttaaacctccagttggtctagaatag

SEQ ID NO: 313986 - DNA, 30 bp, Artificial Sequence
  Synthetic oligonucleotide
ttttaaaaaggctcttaacatgtagaatag

SEQ ID NO: 313987 - DNA, 30 bp, Artificial Sequence
  Synthetic oligonucleotide
ttcccgagttgacaccggtgcacggaatag

SEQ ID NO: 313988 - DNA, 30 bp, Artificial Sequence
  Synthetic oligonucleotide
gacgtggaactaagactgtgggctgaatag

SEQ ID NO: 313989 - DNA, 30 bp, Artificial Sequence
  Synthetic oligonucleotide
acttcagcctcttgatttcccattgaatag

SEQ ID NO: 313990 - DNA, 30 bp, Artificial Sequence
  Synthetic oligonucleotide
tccagccagtttggtggacgaacataatag

SEQ ID NO: 313991 - DNA, 30 bp, Artificial Sequence
  Synthetic oligonucleotide
gtgtaattaggaaagaactagaagtaatag

SEQ ID NO: 313992 - DNA, 30 bp, Artificial Sequence
  Synthetic oligonucleotide
gcatgcgtttagtaagtagacgagtaatag

SEQ ID NO: 313993 - DNA, 30 bp, Artificial Sequence
  Synthetic oligonucleotide
gggacttaaggaactgcgttgcggtaatag

SEQ ID NO: 313994 - DNA, 30 bp, Artificial Sequence
  Synthetic oligonucleotide
tgcctcataggttagttagatctttaatag

SEQ ID NO: 313995 - DNA, 30 bp, Artificial Sequence
  Synthetic oligonucleotide
cgcaagcgcgatttatatattctaacatag

SEQ ID NO: 313996 - DNA, 30 bp, Artificial Sequence
  Synthetic oligonucleotide
tacacctgccttcatggtatgcccacatag

SEQ ID NO: 313997 - DNA, 30 bp, Artificial Sequence
  Synthetic oligonucleotide
tactgcatgagtcgtttcctttccacatag

SEQ ID NO: 313998 - DNA, 30 bp, Artificial Sequence
  Synthetic oligonucleotide
agagaactgcgcaatgtgtgccgcacatag

SEQ ID NO: 313999 - DNA, 30 bp, Artificial Sequence
  Synthetic oligonucleotide
ttgaggtttggattaaccgaaggcacatag

SEQ ID NO: 314000 - DNA, 30 bp, Artificial Sequence
  Synthetic oligonucleotide
agtcttaaaagttccgtacacttcacatag

SEQ ID NO: 314001 - DNA, 30 bp, Artificial Sequence
  Synthetic oligonucleotide
gtgactagctggctcggggactggacatag

SEQ ID NO: 314002 - DNA, 30 bp, Artificial Sequence
  Synthetic oligonucleotide
accaaatcccaaaagtgtaactctacatag

SEQ ID NO: 314003 - DNA, 30 bp, Artificial Sequence
  Synthetic oligonucleotide
gaagctcttggtacgcctgtttgtacatag

SEQ ID NO: 314004 - DNA, 30 bp, Artificial Sequence
  Synthetic oligonucleotide
caggccgggtatatgttggagcgcccatag

SEQ ID NO: 314005 - DNA, 30 bp, Artificial Sequence
  Synthetic oligonucleotide
tttcaacggattactacctgaaggccatag

SEQ ID NO: 314006 - DNA, 30 bp, Artificial Sequence
  Synthetic oligonucleotide
attaacggtcacgtcctattgatgccatag

SEQ ID NO: 314007 - DNA, 30 bp, Artificial Sequence
  Synthetic oligonucleotide
ctaattcttagaacggcggtgagagcatag

SEQ ID NO: 314008 - DNA, 30 bp, Artificial Sequence
  Synthetic oligonucleotide
gacttcggacgtaagacttcctgagcatag

SEQ ID NO: 314009 - DNA, 30 bp, Artificial Sequence
  Synthetic oligonucleotide
ctgtttgcacacggagataatctagcatag

SEQ ID NO: 314010 - DNA, 30 bp, Artificial Sequence
  Synthetic oligonucleotide
ttccacgaatgtgtacacgaataggcatag

SEQ ID NO: 314011 - DNA, 30 bp, Artificial Sequence
  Synthetic oligonucleotide
gcgtataaagtatgacgtaattaggcatag

SEQ ID NO: 314012 - DNA, 30 bp, Artificial Sequence
  Synthetic oligonucleotide
aacgacattaaatccattacgccggcatag

SEQ ID NO: 314013 - DNA, 30 bp, Artificial Sequence
  Synthetic oligonucleotide
atagctcttttgtactaagcattggcatag

SEQ ID NO: 314014 - DNA, 30 bp, Artificial Sequence
  Synthetic oligonucleotide
atggaaaagcatctaatacataatgcatag

SEQ ID NO: 314015 - DNA, 30 bp, Artificial Sequence
  Synthetic oligonucleotide
tcaaagttacgatctagcaagcctgcatag

SEQ ID NO: 314016 - DNA, 30 bp, Artificial Sequence
  Synthetic oligonucleotide
ctcatcacgaggcgttttacaattgcatag

SEQ ID NO: 314017 - DNA, 30 bp, Artificial Sequence
  Synthetic oligonucleotide
cttgttggggttggcatcatcattgcatag

SEQ ID NO: 314018 - DNA, 30 bp, Artificial Sequence
  Synthetic oligonucleotide
ttactactctctcttagtgtaaaatcatag

SEQ ID NO: 314019 - DNA, 30 bp, Artificial Sequence
  Synthetic oligonucleotide
gataagtcatgttaacatcagtcatcatag

SEQ ID NO: 314020 - DNA, 30 bp, Artificial Sequence
  Synthetic oligonucleotide
aaaaagttgcaagaggctcgtagatcatag

SEQ ID NO: 314021 - DNA, 30 bp, Artificial Sequence
  Synthetic oligonucleotide
acttatatgttagtaggctggctctcatag

SEQ ID NO: 314022 - DNA, 30 bp, Artificial Sequence
  Synthetic oligonucleotide
gaaaccgagacccatcgagggttctcatag

SEQ ID NO: 314023 - DNA, 30 bp, Artificial Sequence
  Synthetic oligonucleotide
ggtctattactgaacgatggcgggtcatag

SEQ ID NO: 314024 - DNA, 30 bp, Artificial Sequence
  Synthetic oligonucleotide
tggcattttaggtgttggctcttcagatag

SEQ ID NO: 314025 - DNA, 30 bp, Artificial Sequence
  Synthetic oligonucleotide
aaagcaaagatttttctatattagagatag

SEQ ID NO: 314026 - DNA, 30 bp, Artificial Sequence
  Synthetic oligonucleotide
tgtgtacttcgtttgggcttcgaccgatag

SEQ ID NO: 314027 - DNA, 30 bp, Artificial Sequence
  Synthetic oligonucleotide
ctgctctgtaagtgccgtcacacccgatag

SEQ ID NO: 314028 - DNA, 30 bp, Artificial Sequence
  Synthetic oligonucleotide
tcggagtttggaggctgaccgtcccgatag

SEQ ID NO: 314029 - DNA, 30 bp, Artificial Sequence
  Synthetic oligonucleotide
tctgtagcggtctggggcaagggccgatag

SEQ ID NO: 314030 - DNA, 30 bp, Artificial Sequence
  Synthetic oligonucleotide
ccgattaagtactttctctgaaggcgatag

SEQ ID NO: 314031 - DNA, 30 bp, Artificial Sequence
  Synthetic oligonucleotide
cattggtaggtatggtttcattggcgatag

SEQ ID NO: 314032 - DNA, 30 bp, Artificial Sequence
  Synthetic oligonucleotide
tattattcattccgtttcgtgtatcgatag

SEQ ID NO: 314033 - DNA, 30 bp, Artificial Sequence
  Synthetic oligonucleotide
acaggagtggaaataccctatagtcgatag

SEQ ID NO: 314034 - DNA, 30 bp, Artificial Sequence
  Synthetic oligonucleotide
acatgtcgggttgacgatgtgccaggatag

SEQ ID NO: 314035 - DNA, 30 bp, Artificial Sequence
  Synthetic oligonucleotide
tcctgaccgaacgaaaaacgattaggatag

SEQ ID NO: 314036 - DNA, 30 bp, Artificial Sequence
  Synthetic oligonucleotide
acgcgaaaatggcagttggacaacggatag

SEQ ID NO: 314037 - DNA, 30 bp, Artificial Sequence
  Synthetic oligonucleotide
acttgtcgttaatcgaaagggggcggatag

SEQ ID NO: 314038 - DNA, 30 bp, Artificial Sequence
  Synthetic oligonucleotide
gacgcctaattagtgacccccgagggatag

SEQ ID NO: 314039 - DNA, 30 bp, Artificial Sequence
  Synthetic oligonucleotide
cagacgcggctagtccgaactatgggatag

SEQ ID NO: 314040 - DNA, 30 bp, Artificial Sequence
  Synthetic oligonucleotide
gccaggctggaattaacgtcctatggatag

SEQ ID NO: 314041 - DNA, 30 bp, Artificial Sequence
  Synthetic oligonucleotide
gaagaagcgcacctattacgttctggatag

SEQ ID NO: 314042 - DNA, 30 bp, Artificial Sequence
  Synthetic oligonucleotide
cctgttaccttttcaggcacatcatgatag

SEQ ID NO: 314043 - DNA, 30 bp, Artificial Sequence
  Synthetic oligonucleotide
caacggaggtcatagttgttcagatgatag

SEQ ID NO: 314044 - DNA, 30 bp, Artificial Sequence
  Synthetic oligonucleotide
atagaaacccgcaacagtctcggttgatag

SEQ ID NO: 314045 - DNA, 30 bp, Artificial Sequence
  Synthetic oligonucleotide
aacgttagggctttgaggtaattttgatag

SEQ ID NO: 314046 - DNA, 30 bp, Artificial Sequence
  Synthetic oligonucleotide
atcgtaagacatcgcggtgctataatatag

SEQ ID NO: 314047 - DNA, 30 bp, Artificial Sequence
  Synthetic oligonucleotide
taagggatagatcgtcactgttacatatag

SEQ ID NO: 314048 - DNA, 30 bp, Artificial Sequence
  Synthetic oligonucleotide
caagcgcgatgttcgccaatttccatatag

SEQ ID NO: 314049 - DNA, 30 bp, Artificial Sequence
  Synthetic oligonucleotide
caaattccgctcgttctgctttgcatatag

SEQ ID NO: 314050 - DNA, 30 bp, Artificial Sequence
  Synthetic oligonucleotide
gaaactcgtaataccgcaaaaccgatatag

SEQ ID NO: 314051 - DNA, 30 bp, Artificial Sequence
  Synthetic oligonucleotide
tttgaaggacagtcaaaggagccgatatag

SEQ ID NO: 314052 - DNA, 30 bp, Artificial Sequence
  Synthetic oligonucleotide
cttcacatgcggccacttatggcgatatag

SEQ ID NO: 314053 - DNA, 30 bp, Artificial Sequence
  Synthetic oligonucleotide
gtgtagaattgtcttagctttgcgatatag

SEQ ID NO: 314054 - DNA, 30 bp, Artificial Sequence
  Synthetic oligonucleotide
aagcagccggaggcatacgttactatatag

SEQ ID NO: 314055 - DNA, 30 bp, Artificial Sequence
  Synthetic oligonucleotide
ctatagtcggcaactaatgaaattatatag

SEQ ID NO: 314056 - DNA, 30 bp, Artificial Sequence
  Synthetic oligonucleotide
ccacgtatttactacctttgtgcactatag

SEQ ID NO: 314057 - DNA, 30 bp, Artificial Sequence
  Synthetic oligonucleotide
tttttcgcgactcttagggggtgcctatag

SEQ ID NO: 314058 - DNA, 30 bp, Artificial Sequence
  Synthetic oligonucleotide
gtatgtaatgcaaagtgtgtcgtgctatag

SEQ ID NO: 314059 - DNA, 30 bp, Artificial Sequence
  Synthetic oligonucleotide
cgaggatttatctctccgtatgaagtatag

SEQ ID NO: 314060 - DNA, 30 bp, Artificial Sequence
  Synthetic oligonucleotide
tggggtaacccctcttgacaagcagtatag

SEQ ID NO: 314061 - DNA, 30 bp, Artificial Sequence
  Synthetic oligonucleotide
ctggccaattacaaccatttttgggtatag

SEQ ID NO: 314062 - DNA, 30 bp, Artificial Sequence
  Synthetic oligonucleotide
tactagggagtgcagaaattacttgtatag

SEQ ID NO: 314063 - DNA, 30 bp, Artificial Sequence
  Synthetic oligonucleotide
gtaaaccagcccgttatgtctcttgtatag

SEQ ID NO: 314064 - DNA, 30 bp, Artificial Sequence
  Synthetic oligonucleotide
tgcgacgcactaatctcccttacattatag

SEQ ID NO: 314065 - DNA, 30 bp, Artificial Sequence
  Synthetic oligonucleotide
tgtcacttgcatctcgtccaggcattatag

SEQ ID NO: 314066 - DNA, 30 bp, Artificial Sequence
  Synthetic oligonucleotide
catgggtcctggttcgttggacgcttatag

SEQ ID NO: 314067 - DNA, 30 bp, Artificial Sequence
  Synthetic oligonucleotide
gcattaaagggctgcctcatctgcttatag

SEQ ID NO: 314068 - DNA, 30 bp, Artificial Sequence
  Synthetic oligonucleotide
ccatagtcaagtagttaactgtgcttatag

SEQ ID NO: 314069 - DNA, 30 bp, Artificial Sequence
  Synthetic oligonucleotide
gttatacgtacctggagcgtgcagttatag

SEQ ID NO: 314070 - DNA, 30 bp, Artificial Sequence
  Synthetic oligonucleotide
gaagaataggaacccataaaaccgttatag

SEQ ID NO: 314071 - DNA, 30 bp, Artificial Sequence
  Synthetic oligonucleotide
gtaatcgagtataacacggacgcgttatag

SEQ ID NO: 314072 - DNA, 31 bp, Artificial Sequence
  Synthetic oligonucleotide
agagcattggctcatcggttactcgttatag

SEQ ID NO: 314073 - DNA, 30 bp, Artificial Sequence
  Synthetic oligonucleotide
tcgctgcgatacttacgcgcggggttatag

SEQ ID NO: 314074 - DNA, 30 bp, Artificial Sequence
  Synthetic oligonucleotide
gaacctacgttcgtggcgtaacgtttatag

SEQ ID NO: 314075 - DNA, 30 bp, Artificial Sequence
  Synthetic oligonucleotide
gggtgcaaaaatatggaccgcagaaactag

SEQ ID NO: 314076 - DNA, 30 bp, Artificial Sequence
  Synthetic oligonucleotide
tacgcctcgagtgtggaagccagtaactag

SEQ ID NO: 314077 - DNA, 30 bp, Artificial Sequence
  Synthetic oligonucleotide
ttactctgcgaggatttctcgaaacactag

SEQ ID NO: 314078 - DNA, 30 bp, Artificial Sequence
  Synthetic oligonucleotide
gtaatagcacccctcctgatagaccactag

SEQ ID NO: 314079 - DNA, 30 bp, Artificial Sequence
  Synthetic oligonucleotide
cggccggtggtcgggcgcaaaccccactag

SEQ ID NO: 314080 - DNA, 30 bp, Artificial Sequence
  Synthetic oligonucleotide
ggctttacatgaagatttattgcccactag

SEQ ID NO: 314081 - DNA, 30 bp, Artificial Sequence
  Synthetic oligonucleotide
atccaaatcacacccctatggtaagactag

SEQ ID NO: 314082 - DNA, 30 bp, Artificial Sequence
  Synthetic oligonucleotide
ggtagtaggcatttaacccccgtagactag

SEQ ID NO: 314083 - DNA, 31 bp, Artificial Sequence
  Synthetic oligonucleotide
cgcgcagtgaagagcaatataacgcgactag

SEQ ID NO: 314084 - DNA, 30 bp, Artificial Sequence
  Synthetic oligonucleotide
ccagcatatgcgggctttagatcggactag

SEQ ID NO: 314085 - DNA, 30 bp, Artificial Sequence
  Synthetic oligonucleotide
cagtgtaccaatcgttataatggggactag

SEQ ID NO: 314086 - DNA, 30 bp, Artificial Sequence
  Synthetic oligonucleotide
cgtggtccccatcggtactttatggactag

SEQ ID NO: 314087 - DNA, 30 bp, Artificial Sequence
  Synthetic oligonucleotide
cagcacatctagaagtatcatatctactag

SEQ ID NO: 314088 - DNA, 30 bp, Artificial Sequence
  Synthetic oligonucleotide
ggtgagattcagcgggtgccaccgtactag

SEQ ID NO: 314089 - DNA, 30 bp, Artificial Sequence
  Synthetic oligonucleotide
tcgtaaaactggtaacgcggggtaacctag

SEQ ID NO: 314090 - DNA, 30 bp, Artificial Sequence
  Synthetic oligonucleotide
gtactttttaggctttattcaagcacctag

SEQ ID NO: 314091 - DNA, 30 bp, Artificial Sequence
  Synthetic oligonucleotide
ccatgcaggctaggagttctgagtacctag

SEQ ID NO: 314092 - DNA, 30 bp, Artificial Sequence
  Synthetic oligonucleotide
acattatttagattccttaaatcaccctag

SEQ ID NO: 314093 - DNA, 30 bp, Artificial Sequence
  Synthetic oligonucleotide
tttgcccgtattcgtcataaggagccctag

SEQ ID NO: 314094 - DNA, 30 bp, Artificial Sequence
  Synthetic oligonucleotide
tactcctaacatacgaaaaaagggccctag

SEQ ID NO: 314095 - DNA, 30 bp, Artificial Sequence
  Synthetic oligonucleotide
aatccggcaactaggtggcaaccagcctag

SEQ ID NO: 314096 - DNA, 30 bp, Artificial Sequence
  Synthetic oligonucleotide
gtgaatttgacgttttaaatccacgcctag

SEQ ID NO: 314097 - DNA, 30 bp, Artificial Sequence
  Synthetic oligonucleotide
agcagtggtcataaactagctatcgcctag

SEQ ID NO: 314098 - DNA, 30 bp, Artificial Sequence
  Synthetic oligonucleotide
tcggctgaatagccggtcagccaggcctag

SEQ ID NO: 314099 - DNA, 30 bp, Artificial Sequence
  Synthetic oligonucleotide
gaattcgtcttacgcgtcggttctgcctag

SEQ ID NO: 314100 - DNA, 30 bp, Artificial Sequence
  Synthetic oligonucleotide
ctccgtggtagaacggagttaatatcctag

SEQ ID NO: 314101 - DNA, 30 bp, Artificial Sequence
  Synthetic oligonucleotide
atggcaggttttggctttgtactatcctag

SEQ ID NO: 314102 - DNA, 30 bp, Artificial Sequence
  Synthetic oligonucleotide
aaagtggctcacaattcgtacctatcctag

SEQ ID NO: 314103 - DNA, 30 bp, Artificial Sequence
  Synthetic oligonucleotide
ctaaactcgatattgcatggtgtatcctag

SEQ ID NO: 314104 - DNA, 30 bp, Artificial Sequence
  Synthetic oligonucleotide
tcataaaggcggcgcatcagatactcctag

SEQ ID NO: 314105 - DNA, 30 bp, Artificial Sequence
  Synthetic oligonucleotide
attcttaaccaccgtatacgacattcctag

SEQ ID NO: 314106 - DNA, 30 bp, Artificial Sequence
  Synthetic oligonucleotide
tagcgggggcaccagcacccaatttcctag

SEQ ID NO: 314107 - DNA, 30 bp, Artificial Sequence
  Synthetic oligonucleotide
taacacgtgttggatcggggataaagctag

SEQ ID NO: 314108 - DNA, 30 bp, Artificial Sequence
  Synthetic oligonucleotide
gcatgactaaagcggcacggcacaagctag

SEQ ID NO: 314109 - DNA, 30 bp, Artificial Sequence
  Synthetic oligonucleotide
gtcctgcgatgggggacttggaggagctag

SEQ ID NO: 314110 - DNA, 30 bp, Artificial Sequence
  Synthetic oligonucleotide
ggtaagagcaaattcagttgtgatagctag

SEQ ID NO: 314111 - DNA, 30 bp, Artificial Sequence
  Synthetic oligonucleotide
atcatgagaagggccaatatacgtagctag

SEQ ID NO: 314112 - DNA, 30 bp, Artificial Sequence
  Synthetic oligonucleotide
ttggcggaagagggccaaagctgacgctag

SEQ ID NO: 314113 - DNA, 30 bp, Artificial Sequence
  Synthetic oligonucleotide
gtacgacggatcacccgggggctacgctag

SEQ ID NO: 314114 - DNA, 30 bp, Artificial Sequence
  Synthetic oligonucleotide
tcttcagcatgaaccgcacccgggcgctag

SEQ ID NO: 314115 - DNA, 30 bp, Artificial Sequence
  Synthetic oligonucleotide
attcggacgttagggacccgcactcgctag

SEQ ID NO: 314116 - DNA, 30 bp, Artificial Sequence
  Synthetic oligonucleotide
taaacttatgtaaattgaactcttcgctag

SEQ ID NO: 314117 - DNA, 30 bp, Artificial Sequence
  Synthetic oligonucleotide
aactagacggacgaccaggagcaaggctag

SEQ ID NO: 314118 - DNA, 30 bp, Artificial Sequence
  Synthetic oligonucleotide
cccgtttgccttgcccatcgaacaggctag

SEQ ID NO: 314119 - DNA, 30 bp, Artificial Sequence
  Synthetic oligonucleotide
atatgtacgcgaacgccagcccgaggctag

SEQ ID NO: 314120 - DNA, 30 bp, Artificial Sequence
  Synthetic oligonucleotide
aagaggattcttagagatatcttaggctag

SEQ ID NO: 314121 - DNA, 30 bp, Artificial Sequence
  Synthetic oligonucleotide
gttctctagcgcgaggaattagagggctag

SEQ ID NO: 314122 - DNA, 30 bp, Artificial Sequence
  Synthetic oligonucleotide
ggcagcataaaatcgcgggtgacgggctag

SEQ ID NO: 314123 - DNA, 30 bp, Artificial Sequence
  Synthetic oligonucleotide
cgcggtagcccggtcatatcgcatggctag

SEQ ID NO: 314124 - DNA, 30 bp, Artificial Sequence
  Synthetic oligonucleotide
aaaggttaatgaaatacctaaggctgctag

SEQ ID NO: 314125 - DNA, 30 bp, Artificial Sequence
  Synthetic oligonucleotide
ggggacactctagatcagcagtagtgctag

SEQ ID NO: 314126 - DNA, 30 bp, Artificial Sequence
  Synthetic oligonucleotide
acttcaggcagctcccatcggggttgctag

SEQ ID NO: 314127 - DNA, 30 bp, Artificial Sequence
  Synthetic oligonucleotide
acaggcctcatttatgttcgaatttgctag

SEQ ID NO: 314128 - DNA, 30 bp, Artificial Sequence
  Synthetic oligonucleotide
ctgttttgaaaggattcgatctcaatctag

SEQ ID NO: 314129 - DNA, 30 bp, Artificial Sequence
  Synthetic oligonucleotide
aagtactctaaagtgacggacgacatctag

SEQ ID NO: 314130 - DNA, 30 bp, Artificial Sequence
  Synthetic oligonucleotide
cggataggttaagaggacatttctatctag

SEQ ID NO: 314131 - DNA, 30 bp, Artificial Sequence
  Synthetic oligonucleotide
cacgcagccgatacgtaacctatactctag

SEQ ID NO: 314132 - DNA, 30 bp, Artificial Sequence
  Synthetic oligonucleotide
acgctactttcagcatctcaattactctag

SEQ ID NO: 314133 - DNA, 30 bp, Artificial Sequence
  Synthetic oligonucleotide
cgcggcacggtgttcctaatccccctctag

SEQ ID NO: 314134 - DNA, 30 bp, Artificial Sequence
  Synthetic oligonucleotide
agattcttcacgcgtataatgggcctctag

SEQ ID NO: 314135 - DNA, 30 bp, Artificial Sequence
  Synthetic oligonucleotide
ccggcccttcggttcaactaggagctctag

SEQ ID NO: 314136 - DNA, 30 bp, Artificial Sequence
  Synthetic oligonucleotide
agtttgtcggacgcccttactgcagtctag

SEQ ID NO: 314137 - DNA, 30 bp, Artificial Sequence
  Synthetic oligonucleotide
gttgtctattgtggttgggttaagttctag

SEQ ID NO: 314138 - DNA, 30 bp, Artificial Sequence
  Synthetic oligonucleotide
tactgctaagcatgccaggtcccgttctag

SEQ ID NO: 314139 - DNA, 30 bp, Artificial Sequence
  Synthetic oligonucleotide
cagctcgctggttccttataggggttctag

SEQ ID NO: 314140 - DNA, 30 bp, Artificial Sequence
  Synthetic oligonucleotide
gtagaatcgcttctaccggtgactttctag

SEQ ID NO: 314141 - DNA, 30 bp, Artificial Sequence
  Synthetic oligonucleotide
tacgctaaagacctgacggcctcaaagtag

SEQ ID NO: 314142 - DNA, 30 bp, Artificial Sequence
  Synthetic oligonucleotide
agttgttcagcgtagtgccggtcaaagtag

SEQ ID NO: 314143 - DNA, 29 bp, Artificial Sequence
  Synthetic oligonucleotide
tcctaatggtgttattaaataccaagtag

SEQ ID NO: 314144 - DNA, 30 bp, Artificial Sequence
  Synthetic oligonucleotide
gggttcggcataagtctgtggttcaagtag

SEQ ID NO: 314145 - DNA, 30 bp, Artificial Sequence
  Synthetic oligonucleotide
ccgctaagctgctatcgtcagcagaagtag

SEQ ID NO: 314146 - DNA, 30 bp, Artificial Sequence
  Synthetic oligonucleotide
cccgttcgggaaaaatatagcctgaagtag

SEQ ID NO: 314147 - DNA, 30 bp, Artificial Sequence
  Synthetic oligonucleotide
aaactgacctaaggggagtatctgaagtag

SEQ ID NO: 314148 - DNA, 30 bp, Artificial Sequence
  Synthetic oligonucleotide
tagatactacaactatgggtacctaagtag

SEQ ID NO: 314149 - DNA, 30 bp, Artificial Sequence
  Synthetic oligonucleotide
gactagatcttaaggtgcacacaacagtag

SEQ ID NO: 314150 - DNA, 30 bp, Artificial Sequence
  Synthetic oligonucleotide
gaaccggcggttggctttacttaccagtag

SEQ ID NO: 314151 - DNA, 30 bp, Artificial Sequence
  Synthetic oligonucleotide
ttatttatgaaagtaaccacccagcagtag

SEQ ID NO: 314152 - DNA, 30 bp, Artificial Sequence
  Synthetic oligonucleotide
aactgaccggatgccaatgcgggtcagtag

SEQ ID NO: 314153 - DNA, 30 bp, Artificial Sequence
  Synthetic oligonucleotide
gtgaagtgcaactattgataggttcagtag

SEQ ID NO: 314154 - DNA, 30 bp, Artificial Sequence
  Synthetic oligonucleotide
agctttacactgccggtggtataagagtag

SEQ ID NO: 314155 - DNA, 30 bp, Artificial Sequence
  Synthetic oligonucleotide
ttagcagtataccaggcggcacgagagtag

SEQ ID NO: 314156 - DNA, 30 bp, Artificial Sequence
  Synthetic oligonucleotide
atccccatcatatagcgatcctgggagtag

SEQ ID NO: 314157 - DNA, 30 bp, Artificial Sequence
  Synthetic oligonucleotide
gtttccgattcaggaaacgatcgtgagtag

SEQ ID NO: 314158 - DNA, 30 bp, Artificial Sequence
  Synthetic oligonucleotide
attcaccagaagggtactccatgtgagtag

SEQ ID NO: 314159 - DNA, 30 bp, Artificial Sequence
  Synthetic oligonucleotide
gcgctacggtcgcatctacgcgttgagtag

SEQ ID NO: 314160 - DNA, 30 bp, Artificial Sequence
  Synthetic oligonucleotide
agcgcagcacaaaggaaaacggttgagtag

SEQ ID NO: 314161 - DNA, 30 bp, Artificial Sequence
  Synthetic oligonucleotide
tacactcttatcgtcccggtctaatagtag

SEQ ID NO: 314162 - DNA, 30 bp, Artificial Sequence
  Synthetic oligonucleotide
gtgaatcacaacctagctccgtgatagtag

SEQ ID NO: 314163 - DNA, 30 bp, Artificial Sequence
  Synthetic oligonucleotide
tcgcaatactaggcgttgttgaactagtag

SEQ ID NO: 314164 - DNA, 30 bp, Artificial Sequence
  Synthetic oligonucleotide
ttttagacaccaatatggtggcgctagtag

SEQ ID NO: 314165 - DNA, 30 bp, Artificial Sequence
  Synthetic oligonucleotide
tcgattacttgacgactggttatctagtag

SEQ ID NO: 314166 - DNA, 30 bp, Artificial Sequence
  Synthetic oligonucleotide
atatcgttcccctcttccaggtagtagtag

SEQ ID NO: 314167 - DNA, 30 bp, Artificial Sequence
  Synthetic oligonucleotide
taccctcatggcattgggtgcacgtagtag

SEQ ID NO: 314168 - DNA, 30 bp, Artificial Sequence
  Synthetic oligonucleotide
gcgtcacttgacctaaccatcaggtagtag

SEQ ID NO: 314169 - DNA, 30 bp, Artificial Sequence
  Synthetic oligonucleotide
tcggttgttccgcttttaacccgaacgtag

SEQ ID NO: 314170 - DNA, 30 bp, Artificial Sequence
  Synthetic oligonucleotide
acctgctgggaattatttatcggaacgtag

SEQ ID NO: 314171 - DNA, 30 bp, Artificial Sequence
  Synthetic oligonucleotide
ctgagacttgcgtggggggattgcacgtag

SEQ ID NO: 314172 - DNA, 30 bp, Artificial Sequence
  Synthetic oligonucleotide
caggactccagtacccgctttaacccgtag

SEQ ID NO: 314173 - DNA, 30 bp, Artificial Sequence
  Synthetic oligonucleotide
gaaccggttagatacatgagacacccgtag

SEQ ID NO: 314174 - DNA, 30 bp, Artificial Sequence
  Synthetic oligonucleotide
aaatattcggcctaattcacgggcccgtag

SEQ ID NO: 314175 - DNA, 30 bp, Artificial Sequence
  Synthetic oligonucleotide
caattatttgcgcgaagattatccgcgtag

SEQ ID NO: 314176 - DNA, 30 bp, Artificial Sequence
  Synthetic oligonucleotide
cgagcgctcgagccgctcaatcatgcgtag

SEQ ID NO: 314177 - DNA, 30 bp, Artificial Sequence
  Synthetic oligonucleotide
ttgccgtttcgtagaccttataaatcgtag

SEQ ID NO: 314178 - DNA, 30 bp, Artificial Sequence
  Synthetic oligonucleotide
tatagtactgattctgcagtgcgctcgtag

SEQ ID NO: 314179 - DNA, 30 bp, Artificial Sequence
  Synthetic oligonucleotide
tttacctcagtagtagagggtccgtcgtag

SEQ ID NO: 314180 - DNA, 30 bp, Artificial Sequence
  Synthetic oligonucleotide
ctattcctgctataccgtatctggtcgtag

SEQ ID NO: 314181 - DNA, 30 bp, Artificial Sequence
  Synthetic oligonucleotide
gaggagctaatccggtttgccacttcgtag

SEQ ID NO: 314182 - DNA, 30 bp, Artificial Sequence
  Synthetic oligonucleotide
tagatttaggttgaaaacactggttcgtag

SEQ ID NO: 314183 - DNA, 30 bp, Artificial Sequence
  Synthetic oligonucleotide
tgctccttcacgaagcttgagatttcgtag

SEQ ID NO: 314184 - DNA, 30 bp, Artificial Sequence
  Synthetic oligonucleotide
gataactttgtacggtacaaaaaaaggtag

SEQ ID NO: 314185 - DNA, 30 bp, Artificial Sequence
  Synthetic oligonucleotide
gccctttggaacgtaaactcgatcaggtag

SEQ ID NO: 314186 - DNA, 30 bp, Artificial Sequence
  Synthetic oligonucleotide
gtgaggtccaggcctggattactcaggtag

SEQ ID NO: 314187 - DNA, 30 bp, Artificial Sequence
  Synthetic oligonucleotide
atctatctggccctctagtaaacgaggtag

SEQ ID NO: 314188 - DNA, 30 bp, Artificial Sequence
  Synthetic oligonucleotide
cactgtttctacggtgcgggaacgaggtag

SEQ ID NO: 314189 - DNA, 30 bp, Artificial Sequence
  Synthetic oligonucleotide
gcaatttctcagggcgtatccaataggtag

SEQ ID NO: 314190 - DNA, 30 bp, Artificial Sequence
  Synthetic oligonucleotide
cggtgccgggtcgagtggctgacacggtag

SEQ ID NO: 314191 - DNA, 30 bp, Artificial Sequence
  Synthetic oligonucleotide
gtatggggcacttctgccagtcgacggtag

SEQ ID NO: 314192 - DNA, 30 bp, Artificial Sequence
  Synthetic oligonucleotide
taaaataaacggttcgagtgaatgcggtag

SEQ ID NO: 314193 - DNA, 30 bp, Artificial Sequence
  Synthetic oligonucleotide
ttaactctagatgtaggtgttctgcggtag

SEQ ID NO: 314194 - DNA, 30 bp, Artificial Sequence
  Synthetic oligonucleotide
cccaaacgcgctccaactttgaatcggtag

SEQ ID NO: 314195 - DNA, 30 bp, Artificial Sequence
  Synthetic oligonucleotide
ccgacaccttaagctggaacgtgtcggtag

SEQ ID NO: 314196 - DNA, 30 bp, Artificial Sequence
  Synthetic oligonucleotide
acattcagcctcgggcattcaaaggggtag

SEQ ID NO: 314197 - DNA, 30 bp, Artificial Sequence
  Synthetic oligonucleotide
gaactgaggccggtaaccaaaggggggtag

SEQ ID NO: 314198 - DNA, 30 bp, Artificial Sequence
  Synthetic oligonucleotide
agttcgaccacgcgtcgtgcgatggggtag

SEQ ID NO: 314199 - DNA, 30 bp, Artificial Sequence
  Synthetic oligonucleotide
ggaactagtacgccgagagcaccatggtag

SEQ ID NO: 314200 - DNA, 30 bp, Artificial Sequence
  Synthetic oligonucleotide
ctcagttaagcaggcatatgctcatggtag

SEQ ID NO: 314201 - DNA, 30 bp, Artificial Sequence
  Synthetic oligonucleotide
agcctacaatcgccaaatttaaactggtag

SEQ ID NO: 314202 - DNA, 30 bp, Artificial Sequence
  Synthetic oligonucleotide
ggtatcgcggactcccacatgaactggtag

SEQ ID NO: 314203 - DNA, 30 bp, Artificial Sequence
  Synthetic oligonucleotide
cctgggttgactgagtagaagctgtggtag

SEQ ID NO: 314204 - DNA, 30 bp, Artificial Sequence
  Synthetic oligonucleotide
atgaattagttaggtagcaaaccaatgtag

SEQ ID NO: 314205 - DNA, 30 bp, Artificial Sequence
  Synthetic oligonucleotide
atctttagcgccaaacagtcacgaatgtag

SEQ ID NO: 314206 - DNA, 30 bp, Artificial Sequence
  Synthetic oligonucleotide
tattcgactgtttctacgtgccacatgtag

SEQ ID NO: 314207 - DNA, 30 bp, Artificial Sequence
  Synthetic oligonucleotide
aagtgcgtcttgggatatagatgcatgtag

SEQ ID NO: 314208 - DNA, 30 bp, Artificial Sequence
  Synthetic oligonucleotide
aggagcggtgttcctcatgtaaaactgtag

SEQ ID NO: 314209 - DNA, 30 bp, Artificial Sequence
  Synthetic oligonucleotide
ccaatgccttaagatatggctcgactgtag

SEQ ID NO: 314210 - DNA, 30 bp, Artificial Sequence
  Synthetic oligonucleotide
attgaaatattatctagtcattcgctgtag

SEQ ID NO: 314211 - DNA, 30 bp, Artificial Sequence
  Synthetic oligonucleotide
tatcatacgacgtaactcttttcgctgtag

SEQ ID NO: 314212 - DNA, 30 bp, Artificial Sequence
  Synthetic oligonucleotide
cgatttatgtcaagtttctgttctctgtag

SEQ ID NO: 314213 - DNA, 30 bp, Artificial Sequence
  Synthetic oligonucleotide
acaaaaattcagagctttggaagtctgtag

SEQ ID NO: 314214 - DNA, 30 bp, Artificial Sequence
  Synthetic oligonucleotide
tagatcaagctcgtgcctgaccttctgtag

SEQ ID NO: 314215 - DNA, 30 bp, Artificial Sequence
  Synthetic oligonucleotide
gaaacctcgccctacgaaccaatagtgtag

SEQ ID NO: 314216 - DNA, 30 bp, Artificial Sequence
  Synthetic oligonucleotide
gtcggacacatggagcgacataacgtgtag

SEQ ID NO: 314217 - DNA, 30 bp, Artificial Sequence
  Synthetic oligonucleotide
gctgcgtatcgtatcgaatacgacgtgtag

SEQ ID NO: 314218 - DNA, 30 bp, Artificial Sequence
  Synthetic oligonucleotide
gagttcagcagagccagagtaacggtgtag

SEQ ID NO: 314219 - DNA, 30 bp, Artificial Sequence
  Synthetic oligonucleotide
tagcacctggctcaggtggtaccggtgtag

SEQ ID NO: 314220 - DNA, 30 bp, Artificial Sequence
  Synthetic oligonucleotide
catggcagagattctggggctttggtgtag

SEQ ID NO: 314221 - DNA, 30 bp, Artificial Sequence
  Synthetic oligonucleotide
tgcaaaagtcaatatttttaccatgtgtag

SEQ ID NO: 314222 - DNA, 30 bp, Artificial Sequence
  Synthetic oligonucleotide
tgtcacattataactactggagctgtgtag

SEQ ID NO: 314223 - DNA, 30 bp, Artificial Sequence
  Synthetic oligonucleotide
gaggcgggtataagcagcagtgttgtgtag

SEQ ID NO: 314224 - DNA, 30 bp, Artificial Sequence
  Synthetic oligonucleotide
aaggaggcatttcatagacctaaattgtag

SEQ ID NO: 314225 - DNA, 30 bp, Artificial Sequence
  Synthetic oligonucleotide
gtgaatattcgtgcgcaacattccttgtag

SEQ ID NO: 314226 - DNA, 29 bp, Artificial Sequence
  Synthetic oligonucleotide
gtgcgcctttttccgacagattcttgtag

SEQ ID NO: 314227 - DNA, 30 bp, Artificial Sequence
  Synthetic oligonucleotide
actcggagggcaatcagcgtagagttgtag

SEQ ID NO: 314228 - DNA, 30 bp, Artificial Sequence
  Synthetic oligonucleotide
taaaccgttgctccacagctgtagttgtag

SEQ ID NO: 314229 - DNA, 30 bp, Artificial Sequence
  Synthetic oligonucleotide
tctaatcaaaattctcttgtgacgttgtag

SEQ ID NO: 314230 - DNA, 30 bp, Artificial Sequence
  Synthetic oligonucleotide
aattcagattaaggaagctgaaaaaattag

SEQ ID NO: 314231 - DNA, 30 bp, Artificial Sequence
  Synthetic oligonucleotide
agtgttgttcaaaggagccgttgcaattag

SEQ ID NO: 314232 - DNA, 30 bp, Artificial Sequence
  Synthetic oligonucleotide
ttgtttacttagccaacatggaataattag

SEQ ID NO: 314233 - DNA, 30 bp, Artificial Sequence
  Synthetic oligonucleotide
tcaccaccgtcggccgcccgggctaattag

SEQ ID NO: 314234 - DNA, 30 bp, Artificial Sequence
  Synthetic oligonucleotide
caaattgaatcgtggttgcaatctaattag

SEQ ID NO: 314235 - DNA, 30 bp, Artificial Sequence
  Synthetic oligonucleotide
cttatgatggctttcacgtagtgtaattag

SEQ ID NO: 314236 - DNA, 30 bp, Artificial Sequence
  Synthetic oligonucleotide
cacgacaagtcgtgtttggccgcacattag

SEQ ID NO: 314237 - DNA, 30 bp, Artificial Sequence
  Synthetic oligonucleotide
acaggttgcgttcttgtctgtgtacattag

SEQ ID NO: 314238 - DNA, 30 bp, Artificial Sequence
  Synthetic oligonucleotide
actgaaccaaagttctgaggggtccattag

SEQ ID NO: 314239 - DNA, 30 bp, Artificial Sequence
  Synthetic oligonucleotide
aggacttcgggcacctaatgattccattag

SEQ ID NO: 314240 - DNA, 30 bp, Artificial Sequence
  Synthetic oligonucleotide
ctcggactatacatagtaaagcggcattag

SEQ ID NO: 314241 - DNA, 30 bp, Artificial Sequence
  Synthetic oligonucleotide
gaatcaacctctcttcaaacagttcattag

SEQ ID NO: 314242 - DNA, 30 bp, Artificial Sequence
  Synthetic oligonucleotide
gcttctagagaagggcagaacgaagattag

SEQ ID NO: 314243 - DNA, 30 bp, Artificial Sequence
  Synthetic oligonucleotide
gtaggatttagtttaatggtgagcgattag

SEQ ID NO: 314244 - DNA, 30 bp, Artificial Sequence
  Synthetic oligonucleotide
gctcggcaggcgcgatggaccggcgattag

SEQ ID NO: 314245 - DNA, 30 bp, Artificial Sequence
  Synthetic oligonucleotide
tgcgttcagcgtaaccctgtataatattag

SEQ ID NO: 314246 - DNA, 30 bp, Artificial Sequence
  Synthetic oligonucleotide
cagttgttataggtcgttttcaggtattag

SEQ ID NO: 314247 - DNA, 30 bp, Artificial Sequence
  Synthetic oligonucleotide
tgtatggtccgtgggcggggtttgtattag

SEQ ID NO: 314248 - DNA, 30 bp, Artificial Sequence
  Synthetic oligonucleotide
cttaattcaacgaagtcagtcatttattag

SEQ ID NO: 314249 - DNA, 30 bp, Artificial Sequence
  Synthetic oligonucleotide
ccaactaagcttacgacagtataaacttag

SEQ ID NO: 314250 - DNA, 30 bp, Artificial Sequence
  Synthetic oligonucleotide
tgtatatgctatagaacttagttaacttag

SEQ ID NO: 314251 - DNA, 30 bp, Artificial Sequence
  Synthetic oligonucleotide
gtgctccttaaacctgatggatacacttag

SEQ ID NO: 314252 - DNA, 30 bp, Artificial Sequence
  Synthetic oligonucleotide
cgcgctaggcgatcctccgtcgccacttag

SEQ ID NO: 314253 - DNA, 30 bp, Artificial Sequence
  Synthetic oligonucleotide
acttcaccgcagacccgtggggagacttag

SEQ ID NO: 314254 - DNA, 30 bp, Artificial Sequence
  Synthetic oligonucleotide
taacagtcttcccgctttatttcaccttag

SEQ ID NO: 314255 - DNA, 30 bp, Artificial Sequence
  Synthetic oligonucleotide
ttgtgtcactcggagtagcatgacccttag

SEQ ID NO: 314256 - DNA, 30 bp, Artificial Sequence
  Synthetic oligonucleotide
atgacaaagattattacagccagcccttag

SEQ ID NO: 314257 - DNA, 29 bp, Artificial Sequence
  Synthetic oligonucleotide
gggatcctggatatctgcttcggccttag

SEQ ID NO: 314258 - DNA, 30 bp, Artificial Sequence
  Synthetic oligonucleotide
gccggttcacatgcatgtcaagggccttag

SEQ ID NO: 314259 - DNA, 30 bp, Artificial Sequence
  Synthetic oligonucleotide
caagaaaggctcactggggttgtgccttag

SEQ ID NO: 314260 - DNA, 30 bp, Artificial Sequence
  Synthetic oligonucleotide
ttcaggcatctgggcggataaattccttag

SEQ ID NO: 314261 - DNA, 30 bp, Artificial Sequence
  Synthetic oligonucleotide
tcaacttcgaaaaatgcggacgttccttag

SEQ ID NO: 314262 - DNA, 30 bp, Artificial Sequence
  Synthetic oligonucleotide
gccgaccaagcaccctcgtgcgttccttag

SEQ ID NO: 314263 - DNA, 30 bp, Artificial Sequence
  Synthetic oligonucleotide
agtctagaaaccaagcttgagtttccttag

SEQ ID NO: 314264 - DNA, 30 bp, Artificial Sequence
  Synthetic oligonucleotide
gcgtattccaagattctagttggagcttag

SEQ ID NO: 314265 - DNA, 30 bp, Artificial Sequence
  Synthetic oligonucleotide
tgctcggagatgttaacatgtcccgcttag

SEQ ID NO: 314266 - DNA, 30 bp, Artificial Sequence
  Synthetic oligonucleotide
tggcatgtaagtgaccctgcgcgggcttag

SEQ ID NO: 314267 - DNA, 30 bp, Artificial Sequence
  Synthetic oligonucleotide
aatactgcctagggtgtaccactggcttag

SEQ ID NO: 314268 - DNA, 30 bp, Artificial Sequence
  Synthetic oligonucleotide
cctgctaggtgtggtcaagtgtctgcttag

SEQ ID NO: 314269 - DNA, 30 bp, Artificial Sequence
  Synthetic oligonucleotide
cagtcgctcataacataaagtgcatcttag

SEQ ID NO: 314270 - DNA, 30 bp, Artificial Sequence
  Synthetic oligonucleotide
taaaaaatatttttaggtaggcgatcttag

SEQ ID NO: 314271 - DNA, 30 bp, Artificial Sequence
  Synthetic oligonucleotide
agtctgccgtaatgcgtgacactatcttag

SEQ ID NO: 314272 - DNA, 30 bp, Artificial Sequence
  Synthetic oligonucleotide
ctgggtattcgattgagaaatttctcttag

SEQ ID NO: 314273 - DNA, 30 bp, Artificial Sequence
  Synthetic oligonucleotide
atccgaaaaggtagttccagcacgtcttag

SEQ ID NO: 314274 - DNA, 30 bp, Artificial Sequence
  Synthetic oligonucleotide
gtaatgtaggcggtatccggcccaagttag

SEQ ID NO: 314275 - DNA, 30 bp, Artificial Sequence
  Synthetic oligonucleotide
ccgtccagaactggatccgctcacagttag

SEQ ID NO: 314276 - DNA, 30 bp, Artificial Sequence
  Synthetic oligonucleotide
gattcgcagagcgttttaactggcagttag

SEQ ID NO: 314277 - DNA, 30 bp, Artificial Sequence
  Synthetic oligonucleotide
aattcgacggtctggtacatatagagttag

SEQ ID NO: 314278 - DNA, 30 bp, Artificial Sequence
  Synthetic oligonucleotide
catgttatgaggctcatctgcaggagttag

SEQ ID NO: 314279 - DNA, 30 bp, Artificial Sequence
  Synthetic oligonucleotide
attatcagcaaacaaagtcatattagttag

SEQ ID NO: 314280 - DNA, 30 bp, Artificial Sequence
  Synthetic oligonucleotide
taaatacgaaatggtacgaccaaacgttag

SEQ ID NO: 314281 - DNA, 30 bp, Artificial Sequence
  Synthetic oligonucleotide
caaccgacatacttgtccgtcaagcgttag

SEQ ID NO: 314282 - DNA, 30 bp, Artificial Sequence
  Synthetic oligonucleotide
gttatccttcggagttgatctgagcgttag

SEQ ID NO: 314283 - DNA, 30 bp, Artificial Sequence
  Synthetic oligonucleotide
actgtattgggagtacataattcgcgttag

SEQ ID NO: 314284 - DNA, 30 bp, Artificial Sequence
  Synthetic oligonucleotide
gaacattgcatagctagttttaggcgttag

SEQ ID NO: 314285 - DNA, 30 bp, Artificial Sequence
  Synthetic oligonucleotide
gtcccatagcgattccgtgcgtggcgttag

SEQ ID NO: 314286 - DNA, 30 bp, Artificial Sequence
  Synthetic oligonucleotide
cgtcttctggaatgccggacactgcgttag

SEQ ID NO: 314287 - DNA, 30 bp, Artificial Sequence
  Synthetic oligonucleotide
ttagcaccctcagctggatggctgcgttag

SEQ ID NO: 314288 - DNA, 30 bp, Artificial Sequence
  Synthetic oligonucleotide
cggataagttcaggcagctttagtcgttag

SEQ ID NO: 314289 - DNA, 30 bp, Artificial Sequence
  Synthetic oligonucleotide
gctataaaaaatgcggacgtactaggttag

SEQ ID NO: 314290 - DNA, 30 bp, Artificial Sequence
  Synthetic oligonucleotide
tcttgcggctaagcttagctcggcggttag

SEQ ID NO: 314291 - DNA, 30 bp, Artificial Sequence
  Synthetic oligonucleotide
atccgcaatgtgaaaaggactggcggttag

SEQ ID NO: 314292 - DNA, 30 bp, Artificial Sequence
  Synthetic oligonucleotide
gcgccgattattgtggtgactccgggttag

SEQ ID NO: 314293 - DNA, 30 bp, Artificial Sequence
  Synthetic oligonucleotide
gtgatgttgggcttcgatatagcgggttag

SEQ ID NO: 314294 - DNA, 30 bp, Artificial Sequence
  Synthetic oligonucleotide
tggacgcaaggacaagacctctgtggttag

SEQ ID NO: 314295 - DNA, 30 bp, Artificial Sequence
  Synthetic oligonucleotide
tgtattgtccgtcacggtgtgaactgttag

SEQ ID NO: 314296 - DNA, 30 bp, Artificial Sequence
  Synthetic oligonucleotide
acaccctacgggtacgctaattactgttag

SEQ ID NO: 314297 - DNA, 30 bp, Artificial Sequence
  Synthetic oligonucleotide
taggtattttacggcaatggtagctgttag

SEQ ID NO: 314298 - DNA, 30 bp, Artificial Sequence
  Synthetic oligonucleotide
caccactaagctatttctagagcttgttag

SEQ ID NO: 314299 - DNA, 30 bp, Artificial Sequence
  Synthetic oligonucleotide
aattatgaggcgcggcgggcgtaaatttag

SEQ ID NO: 314300 - DNA, 31 bp, Artificial Sequence
  Synthetic oligonucleotide
agcggatctctgtccggataacgcaatttag

SEQ ID NO: 314301 - DNA, 30 bp, Artificial Sequence
  Synthetic oligonucleotide
tggcggtagtgctcgcagaactgaatttag

SEQ ID NO: 314302 - DNA, 30 bp, Artificial Sequence
  Synthetic oligonucleotide
gataaaaaatgcacagcgagagggatttag

SEQ ID NO: 314303 - DNA, 30 bp, Artificial Sequence
  Synthetic oligonucleotide
gttctacgcgccgtgtagctttttatttag

SEQ ID NO: 314304 - DNA, 30 bp, Artificial Sequence
  Synthetic oligonucleotide
acatcctaactcgtgcgcgagcaactttag

SEQ ID NO: 314305 - DNA, 30 bp, Artificial Sequence
  Synthetic oligonucleotide
cgggaagtctttccacaatgatagctttag

SEQ ID NO: 314306 - DNA, 30 bp, Artificial Sequence
  Synthetic oligonucleotide
cacggcagcttgttaaccggactgctttag

SEQ ID NO: 314307 - DNA, 30 bp, Artificial Sequence
  Synthetic oligonucleotide
aaacgggagggcaacggcctcggcgtttag

SEQ ID NO: 314308 - DNA, 30 bp, Artificial Sequence
  Synthetic oligonucleotide
gcgcaccctaaagtgcgagtgatcgtttag

SEQ ID NO: 314309 - DNA, 30 bp, Artificial Sequence
  Synthetic oligonucleotide
ttttcagcatgtaattcaaatcaggtttag

SEQ ID NO: 314310 - DNA, 30 bp, Artificial Sequence
  Synthetic oligonucleotide
tcgggtagttcccataggttcgaggtttag

SEQ ID NO: 314311 - DNA, 30 bp, Artificial Sequence
  Synthetic oligonucleotide
tggagcggtgcaaacaagtaatcggtttag

SEQ ID NO: 314312 - DNA, 30 bp, Artificial Sequence
  Synthetic oligonucleotide
tataaccgttcacgatggttgcatgtttag

SEQ ID NO: 314313 - DNA, 30 bp, Artificial Sequence
  Synthetic oligonucleotide
gacgaaatgcgacggggagtactattttag

SEQ ID NO: 314314 - DNA, 30 bp, Artificial Sequence
  Synthetic oligonucleotide
ttctagctgaaaagccgacaaaggttttag

SEQ ID NO: 314315 - DNA, 31 bp, Artificial Sequence
  Synthetic oligonucleotide
tgatgaaagccactatacgaggctgttttag

SEQ ID NO: 314316 - DNA, 30 bp, Artificial Sequence
  Synthetic oligonucleotide
gggtgacttcagtgctgccctcttttttag

SEQ ID NO: 314317 - DNA, 30 bp, Artificial Sequence
  Synthetic oligonucleotide
ttctctaaaaggtcaaactttataaaaacg

SEQ ID NO: 314318 - DNA, 30 bp, Artificial Sequence
  Synthetic oligonucleotide
ctaatgctatatcaaagaacttccaaaacg

SEQ ID NO: 314319 - DNA, 30 bp, Artificial Sequence
  Synthetic oligonucleotide
attcagttagggcggcatatatttaaaacg

SEQ ID NO: 314320 - DNA, 30 bp, Artificial Sequence
  Synthetic oligonucleotide
gagaatcatggggtaatcgaatgacaaacg

SEQ ID NO: 314321 - DNA, 30 bp, Artificial Sequence
  Synthetic oligonucleotide
ccagaagatgtagaatgtcttctacaaacg

SEQ ID NO: 314322 - DNA, 30 bp, Artificial Sequence
  Synthetic oligonucleotide
atgtttgaagtaacggggaccgcccaaacg

SEQ ID NO: 314323 - DNA, 30 bp, Artificial Sequence
  Synthetic oligonucleotide
tccgggcacctccgtagcgcactccaaacg

SEQ ID NO: 314324 - DNA, 30 bp, Artificial Sequence
  Synthetic oligonucleotide
attagaccgttgtgtacttacttgcaaacg

SEQ ID NO: 314325 - DNA, 31 bp, Artificial Sequence
  Synthetic oligonucleotide
tattatgcaagcgccatcttgtttgcaaacg

SEQ ID NO: 314326 - DNA, 30 bp, Artificial Sequence
  Synthetic oligonucleotide
gttcaatgcgggagtaaacacgatcaaacg

SEQ ID NO: 314327 - DNA, 30 bp, Artificial Sequence
  Synthetic oligonucleotide
catccgcttgacttatcggagtcagaaacg

SEQ ID NO: 314328 - DNA, 30 bp, Artificial Sequence
  Synthetic oligonucleotide
tagcgccaccttgtcttcgtgttagaaacg

SEQ ID NO: 314329 - DNA, 30 bp, Artificial Sequence
  Synthetic oligonucleotide
agggtgctttttgtcgcacttctcgaaacg

SEQ ID NO: 314330 - DNA, 30 bp, Artificial Sequence
  Synthetic oligonucleotide
aatagtgcgcatcttacctaggaggaaacg

SEQ ID NO: 314331 - DNA, 30 bp, Artificial Sequence
  Synthetic oligonucleotide
aatggtacaagtagggagtgtttataaacg

SEQ ID NO: 314332 - DNA, 30 bp, Artificial Sequence
  Synthetic oligonucleotide
gaaataaggtacccaccaagtgtctaaacg

SEQ ID NO: 314333 - DNA, 30 bp, Artificial Sequence
  Synthetic oligonucleotide
ttgtaggccactgtgcgtcagatgtaaacg

SEQ ID NO: 314334 - DNA, 30 bp, Artificial Sequence
  Synthetic oligonucleotide
gggaaaacggtggtgttatacgcaacaacg

SEQ ID NO: 314335 - DNA, 30 bp, Artificial Sequence
  Synthetic oligonucleotide
taatagtttttggttagggagagaacaacg

SEQ ID NO: 314336 - DNA, 30 bp, Artificial Sequence
  Synthetic oligonucleotide
atctgggttaatccgggcaagcgcacaacg

SEQ ID NO: 314337 - DNA, 30 bp, Artificial Sequence
  Synthetic oligonucleotide
aagtctggacaccatgtagcagggacaacg

SEQ ID NO: 314338 - DNA, 30 bp, Artificial Sequence
  Synthetic oligonucleotide
tcatgctgaggcaaaaagttgcctacaacg

SEQ ID NO: 314339 - DNA, 30 bp, Artificial Sequence
  Synthetic oligonucleotide
atcgtgtatcgcgttcccccgcttacaacg

SEQ ID NO: 314340 - DNA, 30 bp, Artificial Sequence
  Synthetic oligonucleotide
taatgcaacaaaatcaccgtctttacaacg

SEQ ID NO: 314341 - DNA, 30 bp, Artificial Sequence
  Synthetic oligonucleotide
accttagataggggctgctaggaaccaacg

SEQ ID NO: 314342 - DNA, 30 bp, Artificial Sequence
  Synthetic oligonucleotide
gagtggtcttgaacgcgctagcgcccaacg

SEQ ID NO: 314343 - DNA, 30 bp, Artificial Sequence
  Synthetic oligonucleotide
tttccttacgtgggagaattcgcgccaacg

SEQ ID NO: 314344 - DNA, 30 bp, Artificial Sequence
  Synthetic oligonucleotide
ccgtataggcgcctggaaagggaagcaacg

SEQ ID NO: 314345 - DNA, 30 bp, Artificial Sequence
  Synthetic oligonucleotide
atcatttgccgtatgttggcatccgcaacg

SEQ ID NO: 314346 - DNA, 30 bp, Artificial Sequence
  Synthetic oligonucleotide
tatgcgccgtgcctcggacagtgggcaacg

SEQ ID NO: 314347 - DNA, 30 bp, Artificial Sequence
  Synthetic oligonucleotide
gccggggcactactttacagagtggcaacg

SEQ ID NO: 314348 - DNA, 30 bp, Artificial Sequence
  Synthetic oligonucleotide
cactatcgtcataagccggtcatatcaacg

SEQ ID NO: 314349 - DNA, 30 bp, Artificial Sequence
  Synthetic oligonucleotide
ttttttcggtagaagtaggaaaactcaacg

SEQ ID NO: 314350 - DNA, 30 bp, Artificial Sequence
  Synthetic oligonucleotide
acctagtttgatcagccggaggcctcaacg

SEQ ID NO: 314351 - DNA, 30 bp, Artificial Sequence
  Synthetic oligonucleotide
tgaattccggtttagtaacggtgctcaacg

SEQ ID NO: 314352 - DNA, 30 bp, Artificial Sequence
  Synthetic oligonucleotide
gcaacgcatgtactctggatccagtcaacg

SEQ ID NO: 314353 - DNA, 30 bp, Artificial Sequence
  Synthetic oligonucleotide
cctattagcaaaataggaagttggtcaacg

SEQ ID NO: 314354 - DNA, 30 bp, Artificial Sequence
  Synthetic oligonucleotide
ctattcgcaaaatggtgattagtttcaacg

SEQ ID NO: 314355 - DNA, 30 bp, Artificial Sequence
  Synthetic oligonucleotide
atgatcgtccagcggtcactggcaagaacg

SEQ ID NO: 314356 - DNA, 30 bp, Artificial Sequence
  Synthetic oligonucleotide
ccttactaaaggttcgtctagataagaacg

SEQ ID NO: 314357 - DNA, 31 bp, Artificial Sequence
  Synthetic oligonucleotide
tagaagatagagaggaatgtacgtaagaacg

SEQ ID NO: 314358 - DNA, 30 bp, Artificial Sequence
  Synthetic oligonucleotide
gcagtgcggaatgaacagtcagatagaacg

SEQ ID NO: 314359 - DNA, 30 bp, Artificial Sequence
  Synthetic oligonucleotide
caccctgatgattaatatgcacttagaacg

SEQ ID NO: 314360 - DNA, 30 bp, Artificial Sequence
  Synthetic oligonucleotide
gttatgcgtccgtaagctatgtcacgaacg

SEQ ID NO: 314361 - DNA, 30 bp, Artificial Sequence
  Synthetic oligonucleotide
gttacacatgcagttaaagtcaagcgaacg

SEQ ID NO: 314362 - DNA, 30 bp, Artificial Sequence
  Synthetic oligonucleotide
tatcgggctaatgtgtgtttattgcgaacg

SEQ ID NO: 314363 - DNA, 30 bp, Artificial Sequence
  Synthetic oligonucleotide
tagggatactcatctgtttgtcctcgaacg

SEQ ID NO: 314364 - DNA, 30 bp, Artificial Sequence
  Synthetic oligonucleotide
cacatacgtaaaagactgttcgttcgaacg

SEQ ID NO: 314365 - DNA, 30 bp, Artificial Sequence
  Synthetic oligonucleotide
tgagaatagcccgaacggtcgaaaggaacg

SEQ ID NO: 314366 - DNA, 30 bp, Artificial Sequence
  Synthetic oligonucleotide
atatacggtttgattgggaggtcaggaacg

SEQ ID NO: 314367 - DNA, 30 bp, Artificial Sequence
  Synthetic oligonucleotide
gtgctccagccacatgcgatttcaggaacg

SEQ ID NO: 314368 - DNA, 30 bp, Artificial Sequence
  Synthetic oligonucleotide
tacgcagttgttaaagctagtggaggaacg

SEQ ID NO: 314369 - DNA, 30 bp, Artificial Sequence
  Synthetic oligonucleotide
gctatgaccggaaccacaggtccgggaacg

SEQ ID NO: 314370 - DNA, 30 bp, Artificial Sequence
  Synthetic oligonucleotide
ccatataacgccctaaagggcggtggaacg

SEQ ID NO: 314371 - DNA, 30 bp, Artificial Sequence
  Synthetic oligonucleotide
aatcaatgtgggattaatggacaatgaacg

SEQ ID NO: 314372 - DNA, 30 bp, Artificial Sequence
  Synthetic oligonucleotide
ggagcgttgtcaccattgaggggatgaacg

SEQ ID NO: 314373 - DNA, 30 bp, Artificial Sequence
  Synthetic oligonucleotide
actaataggagtggtgggtggctatgaacg

SEQ ID NO: 314374 - DNA, 30 bp, Artificial Sequence
  Synthetic oligonucleotide
agtaggtcacggacagtggggcactgaacg

SEQ ID NO: 314375 - DNA, 30 bp, Artificial Sequence
  Synthetic oligonucleotide
cgcagcgtggtactcaatgccatctgaacg

SEQ ID NO: 314376 - DNA, 30 bp, Artificial Sequence
  Synthetic oligonucleotide
atccatgtggtagaaattaccgaaataacg

SEQ ID NO: 314377 - DNA, 30 bp, Artificial Sequence
  Synthetic oligonucleotide
ggtcgcgggagtcccggtaggacaataacg

SEQ ID NO: 314378 - DNA, 30 bp, Artificial Sequence
  Synthetic oligonucleotide
atctagatttggtggtccacatcaataacg

SEQ ID NO: 314379 - DNA, 30 bp, Artificial Sequence
  Synthetic oligonucleotide
ctgggtggacgacagacgaaaagaataacg

SEQ ID NO: 314380 - DNA, 30 bp, Artificial Sequence
  Synthetic oligonucleotide
aactgcatgttatcctaaggcttaataacg

SEQ ID NO: 314381 - DNA, 30 bp, Artificial Sequence
  Synthetic oligonucleotide
ggagaaccggatgttgaggttaggataacg

SEQ ID NO: 314382 - DNA, 30 bp, Artificial Sequence
  Synthetic oligonucleotide
aaatcgcgccaaagtttttatgggataacg

SEQ ID NO: 314383 - DNA, 30 bp, Artificial Sequence
  Synthetic oligonucleotide
cgttttaggggaacaccgggatatataacg

SEQ ID NO: 314384 - DNA, 30 bp, Artificial Sequence
  Synthetic oligonucleotide
tcaacccccgaaccaggattaactataacg

SEQ ID NO: 314385 - DNA, 30 bp, Artificial Sequence
  Synthetic oligonucleotide
aaacgccattttgagatcatccgtataacg

SEQ ID NO: 314386 - DNA, 30 bp, Artificial Sequence
  Synthetic oligonucleotide
cagtagtatctacatgtgggtcgtataacg

SEQ ID NO: 314387 - DNA, 30 bp, Artificial Sequence
  Synthetic oligonucleotide
cttggtcctcggcggggctggtgtataacg

SEQ ID NO: 314388 - DNA, 30 bp, Artificial Sequence
  Synthetic oligonucleotide
ctataaatgtttggtacatggcttataacg

SEQ ID NO: 314389 - DNA, 30 bp, Artificial Sequence
  Synthetic oligonucleotide
tcactcgcttaatagatgtattttataacg

SEQ ID NO: 314390 - DNA, 29 bp, Artificial Sequence
  Synthetic oligonucleotide
ccgctgaaaccgagctacgggcactaacg

SEQ ID NO: 314391 - DNA, 30 bp, Artificial Sequence
  Synthetic oligonucleotide
gggctaaatatttacaacgcgtcactaacg

SEQ ID NO: 314392 - DNA, 30 bp, Artificial Sequence
  Synthetic oligonucleotide
ctatacaagtaatgggtggacctactaacg

SEQ ID NO: 314393 - DNA, 30 bp, Artificial Sequence
  Synthetic oligonucleotide
ctcgatgttcgaaagaaggtcatcctaacg

SEQ ID NO: 314394 - DNA, 30 bp, Artificial Sequence
  Synthetic oligonucleotide
ttagtatctcagactagggatgtcctaacg

SEQ ID NO: 314395 - DNA, 30 bp, Artificial Sequence
  Synthetic oligonucleotide
tatcttccaacgtaccagaatacgctaacg

SEQ ID NO: 314396 - DNA, 30 bp, Artificial Sequence
  Synthetic oligonucleotide
taacagatctagggtacaaatgatctaacg

SEQ ID NO: 314397 - DNA, 30 bp, Artificial Sequence
  Synthetic oligonucleotide
aaagtctcgcgctgcgccacctaagtaacg

SEQ ID NO: 314398 - DNA, 30 bp, Artificial Sequence
  Synthetic oligonucleotide
gagtagtcaagtgcattttcacccgtaacg

SEQ ID NO: 314399 - DNA, 30 bp, Artificial Sequence
  Synthetic oligonucleotide
taccatctttgatctataatggccgtaacg

SEQ ID NO: 314400 - DNA, 30 bp, Artificial Sequence
  Synthetic oligonucleotide
gaacattttggagatatgggactcgtaacg

SEQ ID NO: 314401 - DNA, 30 bp, Artificial Sequence
  Synthetic oligonucleotide
acatatgggcgtgtatggagctaggtaacg

SEQ ID NO: 314402 - DNA, 30 bp, Artificial Sequence
  Synthetic oligonucleotide
gaaagcgcatcccccagatattcggtaacg

SEQ ID NO: 314403 - DNA, 30 bp, Artificial Sequence
  Synthetic oligonucleotide
agagccatctctagggaacttctggtaacg

SEQ ID NO: 314404 - DNA, 30 bp, Artificial Sequence
  Synthetic oligonucleotide
aggctctttttggccacagataatgtaacg

SEQ ID NO: 314405 - DNA, 30 bp, Artificial Sequence
  Synthetic oligonucleotide
ggtaaagcgctcgattaaatggatgtaacg

SEQ ID NO: 314406 - DNA, 30 bp, Artificial Sequence
  Synthetic oligonucleotide
gaaggtcctatcttataaacgctattaacg

SEQ ID NO: 314407 - DNA, 30 bp, Artificial Sequence
  Synthetic oligonucleotide
ctaaaaagtaggccaactcatcccttaacg

SEQ ID NO: 314408 - DNA, 30 bp, Artificial Sequence
  Synthetic oligonucleotide
aaatgtctcgaatcccgatcgctgttaacg

SEQ ID NO: 314409 - DNA, 30 bp, Artificial Sequence
  Synthetic oligonucleotide
ctaaactacgaagtattgttccgtttaacg

SEQ ID NO: 314410 - DNA, 30 bp, Artificial Sequence
  Synthetic oligonucleotide
acatggagctaaatcgtaaaatttttaacg

SEQ ID NO: 314411 - DNA, 30 bp, Artificial Sequence
  Synthetic oligonucleotide
gagaggctgactctcgctcacataaacacg

SEQ ID NO: 314412 - DNA, 30 bp, Artificial Sequence
  Synthetic oligonucleotide
gaggaaacgctgtaattgcgactaaacacg

SEQ ID NO: 314413 - DNA, 30 bp, Artificial Sequence
  Synthetic oligonucleotide
ggtatggtggtcatgtgtatgcacaacacg

SEQ ID NO: 314414 - DNA, 30 bp, Artificial Sequence
  Synthetic oligonucleotide
tgcagcaaatcgccaagggtatccaacacg

SEQ ID NO: 314415 - DNA, 30 bp, Artificial Sequence
  Synthetic oligonucleotide
gctcggaattgtacgcctgtcagcaacacg

SEQ ID NO: 314416 - DNA, 30 bp, Artificial Sequence
  Synthetic oligonucleotide
gaaaaaaaaacccgggaatatgtcaacacg

SEQ ID NO: 314417 - DNA, 30 bp, Artificial Sequence
  Synthetic oligonucleotide
ctagataccgaaggatgtggccttaacacg

SEQ ID NO: 314418 - DNA, 30 bp, Artificial Sequence
  Synthetic oligonucleotide
tcagcacggggccgctgtgccgttaacacg

SEQ ID NO: 314419 - DNA, 30 bp, Artificial Sequence
  Synthetic oligonucleotide
gaaccacgtctggctctgtgattacacacg

SEQ ID NO: 314420 - DNA, 30 bp, Artificial Sequence
  Synthetic oligonucleotide
aaattagcggctcgtatccacctccacacg

SEQ ID NO: 314421 - DNA, 30 bp, Artificial Sequence
  Synthetic oligonucleotide
tgagttctatccagctgaaccctccacacg

SEQ ID NO: 314422 - DNA, 30 bp, Artificial Sequence
  Synthetic oligonucleotide
ggtcgtggcaggagcgtgatattgcacacg

SEQ ID NO: 314423 - DNA, 30 bp, Artificial Sequence
  Synthetic oligonucleotide
tctgaagtgctgtccggtgacagagacacg

SEQ ID NO: 314424 - DNA, 30 bp, Artificial Sequence
  Synthetic oligonucleotide
gtcgaagactcagtcgacaggatagacacg

SEQ ID NO: 314425 - DNA, 30 bp, Artificial Sequence
  Synthetic oligonucleotide
tgaacctatcgggacggtgctgtagacacg

SEQ ID NO: 314426 - DNA, 30 bp, Artificial Sequence
  Synthetic oligonucleotide
tgtcatgcccacggtaccaggaacgacacg

SEQ ID NO: 314427 - DNA, 30 bp, Artificial Sequence
  Synthetic oligonucleotide
atgtttcacgtgcctgctatacacgacacg

SEQ ID NO: 314428 - DNA, 30 bp, Artificial Sequence
  Synthetic oligonucleotide
ggttgtgacggacgaaactcgaccgacacg

SEQ ID NO: 314429 - DNA, 30 bp, Artificial Sequence
  Synthetic oligonucleotide
tttggtgtgtagggaggagctctcgacacg

SEQ ID NO: 314430 - DNA, 30 bp, Artificial Sequence
  Synthetic oligonucleotide
cttgttctgcaagcaataattaaggacacg

SEQ ID NO: 314431 - DNA, 30 bp, Artificial Sequence
  Synthetic oligonucleotide
gcaggagggcctacgttcccgattgacacg

SEQ ID NO: 314432 - DNA, 30 bp, Artificial Sequence
  Synthetic oligonucleotide
gtggggagttaaccggcggtataatacacg

SEQ ID NO: 314433 - DNA, 30 bp, Artificial Sequence
  Synthetic oligonucleotide
gattaaggtacctcgtaaattatgtacacg

SEQ ID NO: 314434 - DNA, 30 bp, Artificial Sequence
  Synthetic oligonucleotide
tagtcttaccgaacggatgtattttacacg

SEQ ID NO: 314435 - DNA, 30 bp, Artificial Sequence
  Synthetic oligonucleotide
acggccgattcgcgcagtgcggcgaccacg

SEQ ID NO: 314436 - DNA, 30 bp, Artificial Sequence
  Synthetic oligonucleotide
atgtgcactgggaatacggaggtgaccacg

SEQ ID NO: 314437 - DNA, 30 bp, Artificial Sequence
  Synthetic oligonucleotide
aaatcacccagagtgtttgatagtaccacg

SEQ ID NO: 314438 - DNA, 30 bp, Artificial Sequence
  Synthetic oligonucleotide
gacgaggggctcggcggagttgaacccacg

SEQ ID NO: 314439 - DNA, 30 bp, Artificial Sequence
  Synthetic oligonucleotide
tctggccagtgctgtaaatggccacccacg

SEQ ID NO: 314440 - DNA, 30 bp, Artificial Sequence
  Synthetic oligonucleotide
cgggggcccttggttttctttcgccccacg

SEQ ID NO: 314441 - DNA, 30 bp, Artificial Sequence
  Synthetic oligonucleotide
catcaccccatgggatatagattgcccacg

SEQ ID NO: 314442 - DNA, 30 bp, Artificial Sequence
  Synthetic oligonucleotide
tcagtgtaagcgctgtttggcaaagccacg

SEQ ID NO: 314443 - DNA, 30 bp, Artificial Sequence
  Synthetic oligonucleotide
cggtttctgctgtcgggtcacgaagccacg

SEQ ID NO: 314444 - DNA, 30 bp, Artificial Sequence
  Synthetic oligonucleotide
caacaccttttggcgtgcgttacagccacg

SEQ ID NO: 314445 - DNA, 30 bp, Artificial Sequence
  Synthetic oligonucleotide
gcttctcgagtccacccgataagagccacg

SEQ ID NO: 314446 - DNA, 30 bp, Artificial Sequence
  Synthetic oligonucleotide
ggtgttggacttttggatccagtagccacg

SEQ ID NO: 314447 - DNA, 30 bp, Artificial Sequence
  Synthetic oligonucleotide
ttcactgttataaatcgtgaggtagccacg

SEQ ID NO: 314448 - DNA, 30 bp, Artificial Sequence
  Synthetic oligonucleotide
attgaccgttaggcctacccgttagccacg

SEQ ID NO: 314449 - DNA, 30 bp, Artificial Sequence
  Synthetic oligonucleotide
ctgatccctacggtcattaggaccgccacg

SEQ ID NO: 314450 - DNA, 30 bp, Artificial Sequence
  Synthetic oligonucleotide
tccgtgcggacgttgttatcagccgccacg

SEQ ID NO: 314451 - DNA, 30 bp, Artificial Sequence
  Synthetic oligonucleotide
attgtaggtggtaaattacagtccgccacg

SEQ ID NO: 314452 - DNA, 30 bp, Artificial Sequence
  Synthetic oligonucleotide
gacctaaaactcggtccgttctgcgccacg

SEQ ID NO: 314453 - DNA, 30 bp, Artificial Sequence
  Synthetic oligonucleotide
tagtaaaggcttgagaatgcaattgccacg

SEQ ID NO: 314454 - DNA, 30 bp, Artificial Sequence
  Synthetic oligonucleotide
caacaacgcaattgaaaaatttaatccacg

SEQ ID NO: 314455 - DNA, 30 bp, Artificial Sequence
  Synthetic oligonucleotide
tcacgttggtgatctagcctggtatccacg

SEQ ID NO: 314456 - DNA, 30 bp, Artificial Sequence
  Synthetic oligonucleotide
cacttgggttttctagccagatcctccacg

SEQ ID NO: 314457 - DNA, 30 bp, Artificial Sequence
  Synthetic oligonucleotide
catgtccctccccttactttttgctccacg

SEQ ID NO: 314458 - DNA, 30 bp, Artificial Sequence
  Synthetic oligonucleotide
agggggtcgttgagtatcttatggtccacg

SEQ ID NO: 314459 - DNA, 30 bp, Artificial Sequence
  Synthetic oligonucleotide
attccctggattaacaggcggatgtccacg

SEQ ID NO: 314460 - DNA, 30 bp, Artificial Sequence
  Synthetic oligonucleotide
ctgctaccagaggctaaccactaaagcacg

SEQ ID NO: 314461 - DNA, 30 bp, Artificial Sequence
  Synthetic oligonucleotide
atatgacattagtatcgccttgcaagcacg

SEQ ID NO: 314462 - DNA, 30 bp, Artificial Sequence
  Synthetic oligonucleotide
gttcagtcgcgcggtctcggagtaagcacg

SEQ ID NO: 314463 - DNA, 30 bp, Artificial Sequence
  Synthetic oligonucleotide
caccgcgggtgttaagtgctcaacagcacg

SEQ ID NO: 314464 - DNA, 30 bp, Artificial Sequence
  Synthetic oligonucleotide
ttctcggcggtttgtagactgaatagcacg

SEQ ID NO: 314465 - DNA, 30 bp, Artificial Sequence
  Synthetic oligonucleotide
cattaaagtactgcggtattcgaacgcacg

SEQ ID NO: 314466 - DNA, 30 bp, Artificial Sequence
  Synthetic oligonucleotide
tttgacttggaaatcatggactaacgcacg

SEQ ID NO: 314467 - DNA, 30 bp, Artificial Sequence
  Synthetic oligonucleotide
ctgggtttgttgcgaaccgtggcacgcacg

SEQ ID NO: 314468 - DNA, 30 bp, Artificial Sequence
  Synthetic oligonucleotide
gaaagctaaggttcacaacgtatacgcacg

SEQ ID NO: 314469 - DNA, 30 bp, Artificial Sequence
  Synthetic oligonucleotide
ggtgataacgtcaaacattgggtacgcacg

SEQ ID NO: 314470 - DNA, 30 bp, Artificial Sequence
  Synthetic oligonucleotide
agccatcatcgcagatggccctgccgcacg

SEQ ID NO: 314471 - DNA, 30 bp, Artificial Sequence
  Synthetic oligonucleotide
aggactctaccggatcttagcttgcgcacg

SEQ ID NO: 314472 - DNA, 30 bp, Artificial Sequence
  Synthetic oligonucleotide
aatataaaattggagtagacgattcgcacg

SEQ ID NO: 314473 - DNA, 30 bp, Artificial Sequence
  Synthetic oligonucleotide
gtgatctatccgcaactcatttacggcacg

SEQ ID NO: 314474 - DNA, 30 bp, Artificial Sequence
  Synthetic oligonucleotide
tcacgacatgccgcccggatgttcggcacg

SEQ ID NO: 314475 - DNA, 30 bp, Artificial Sequence
  Synthetic oligonucleotide
agcaatgatgcgtagccgacgcagggcacg

SEQ ID NO: 314476 - DNA, 30 bp, Artificial Sequence
  Synthetic oligonucleotide
cacctcggcgccatttcagccgggggcacg

SEQ ID NO: 314477 - DNA, 30 bp, Artificial Sequence
  Synthetic oligonucleotide
gaacatgctctcaaatgattcgggggcacg

SEQ ID NO: 314478 - DNA, 30 bp, Artificial Sequence
  Synthetic oligonucleotide
ctaccgctataagatcattgcattggcacg

SEQ ID NO: 314479 - DNA, 30 bp, Artificial Sequence
  Synthetic oligonucleotide
cgacatttacactttaggtacacatgcacg

SEQ ID NO: 314480 - DNA, 30 bp, Artificial Sequence
  Synthetic oligonucleotide
ccctatccccatgtcattcgtctatgcacg

SEQ ID NO: 314481 - DNA, 30 bp, Artificial Sequence
  Synthetic oligonucleotide
ccgtcaagcagatacgctacgtagtgcacg

SEQ ID NO: 314482 - DNA, 30 bp, Artificial Sequence
  Synthetic oligonucleotide
attgcgcgggtatgtgactgattgtgcacg

SEQ ID NO: 314483 - DNA, 30 bp, Artificial Sequence
  Synthetic oligonucleotide
ggcgttcgtatcacagtcgaagattgcacg

SEQ ID NO: 314484 - DNA, 30 bp, Artificial Sequence
  Synthetic oligonucleotide
gaagattccgaggttggggtagaaatcacg

SEQ ID NO: 314485 - DNA, 30 bp, Artificial Sequence
  Synthetic oligonucleotide
tatgaaccttggctacgctgagggatcacg

SEQ ID NO: 314486 - DNA, 30 bp, Artificial Sequence
  Synthetic oligonucleotide
gtaggtgacatctgtagacgacatatcacg

SEQ ID NO: 314487 - DNA, 30 bp, Artificial Sequence
  Synthetic oligonucleotide
gagtttggggtaacatatccgtctatcacg

SEQ ID NO: 314488 - DNA, 30 bp, Artificial Sequence
  Synthetic oligonucleotide
tggacaaaggaccgcgacgtttgtatcacg

SEQ ID NO: 314489 - DNA, 30 bp, Artificial Sequence
  Synthetic oligonucleotide
ctcagaaagtagtccagacaatgactcacg

SEQ ID NO: 314490 - DNA, 30 bp, Artificial Sequence
  Synthetic oligonucleotide
gaggtgaaatggatttaagttatactcacg

SEQ ID NO: 314491 - DNA, 30 bp, Artificial Sequence
  Synthetic oligonucleotide
ggaagaggggagagttactgaatgctcacg

SEQ ID NO: 314492 - DNA, 30 bp, Artificial Sequence
  Synthetic oligonucleotide
tgctcccccctgggacaaccgtgtctcacg

SEQ ID NO: 314493 - DNA, 30 bp, Artificial Sequence
  Synthetic oligonucleotide
catatcttagttattacttgaagagtcacg

SEQ ID NO: 314494 - DNA, 30 bp, Artificial Sequence
  Synthetic oligonucleotide
actcggagactaagagtcacattagtcacg

SEQ ID NO: 314495 - DNA, 30 bp, Artificial Sequence
  Synthetic oligonucleotide
cgatggctcctaggctcacgttacgtcacg

SEQ ID NO: 314496 - DNA, 30 bp, Artificial Sequence
  Synthetic oligonucleotide
tcttagttctgcgaaattaccaaggtcacg

SEQ ID NO: 314497 - DNA, 30 bp, Artificial Sequence
  Synthetic oligonucleotide
cgttaccgcttcggatgtcgggaggtcacg

SEQ ID NO: 314498 - DNA, 30 bp, Artificial Sequence
  Synthetic oligonucleotide
atatctacctatgcgactatacttgtcacg

SEQ ID NO: 314499 - DNA, 30 bp, Artificial Sequence
  Synthetic oligonucleotide
cgttattcgagggaaccccattgattcacg

SEQ ID NO: 314500 - DNA, 30 bp, Artificial Sequence
  Synthetic oligonucleotide
aaggtgaggggctttaaggcggcgttcacg

SEQ ID NO: 314501 - DNA, 30 bp, Artificial Sequence
  Synthetic oligonucleotide
tagctgcctcagcagagctatgctttcacg

SEQ ID NO: 314502 - DNA, 30 bp, Artificial Sequence
  Synthetic oligonucleotide
caaaagaggactggaaggacgcaaaagacg

SEQ ID NO: 314503 - DNA, 30 bp, Artificial Sequence
  Synthetic oligonucleotide
attgttgaagccacgatggtagcaaagacg

SEQ ID NO: 314504 - DNA, 30 bp, Artificial Sequence
  Synthetic oligonucleotide
agcacggattacatgaggaaggacaagacg

SEQ ID NO: 314505 - DNA, 30 bp, Artificial Sequence
  Synthetic oligonucleotide
tcgacctcacgaagaccgacatcgaagacg

SEQ ID NO: 314506 - DNA, 30 bp, Artificial Sequence
  Synthetic oligonucleotide
gaaggcggccgtggcgtcccggtgaagacg

SEQ ID NO: 314507 - DNA, 30 bp, Artificial Sequence
  Synthetic oligonucleotide
cacacacggagccacaagacccctaagacg

SEQ ID NO: 314508 - DNA, 30 bp, Artificial Sequence
  Synthetic oligonucleotide
atctcggccaaggaggttctctctaagacg

SEQ ID NO: 314509 - DNA, 30 bp, Artificial Sequence
  Synthetic oligonucleotide
cctatggctttgtagtcggggtgtcagacg

SEQ ID NO: 314510 - DNA, 30 bp, Artificial Sequence
  Synthetic oligonucleotide
cgcgcgtggcgcatcaggggccaagagacg

SEQ ID NO: 314511 - DNA, 30 bp, Artificial Sequence
  Synthetic oligonucleotide
gtatagtaattccgtgagtcatcagagacg

SEQ ID NO: 314512 - DNA, 30 bp, Artificial Sequence
  Synthetic oligonucleotide
gggcgacacgtgaaatagtgctacgagacg

SEQ ID NO: 314513 - DNA, 30 bp, Artificial Sequence
  Synthetic oligonucleotide
tttcggattattaggacagtgggcgagacg

SEQ ID NO: 314514 - DNA, 30 bp, Artificial Sequence
  Synthetic oligonucleotide
agcgtctctctccacaggccgtgcgagacg

SEQ ID NO: 314515 - DNA, 30 bp, Artificial Sequence
  Synthetic oligonucleotide
aagcgtgctctagactcatcgcgggagacg

SEQ ID NO: 314516 - DNA, 30 bp, Artificial Sequence
  Synthetic oligonucleotide
ggtatatcatagtgacataataaatagacg

SEQ ID NO: 314517 - DNA, 30 bp, Artificial Sequence
  Synthetic oligonucleotide
cgtttatgtcggcttcacatcccatagacg

SEQ ID NO: 314518 - DNA, 30 bp, Artificial Sequence
  Synthetic oligonucleotide
ggtggttagtaggtagcggtcatctagacg

SEQ ID NO: 314519 - DNA, 25 bp, Artificial Sequence
  Synthetic oligonucleotide
ttgggcctgtacgaaccgaacgacg

SEQ ID NO: 314520 - DNA, 30 bp, Artificial Sequence
  Synthetic oligonucleotide
agaaattaaaggacactgattggcacgacg

SEQ ID NO: 314521 - DNA, 30 bp, Artificial Sequence
  Synthetic oligonucleotide
ccgaactcgcttggacggtcctgcacgacg

SEQ ID NO: 314522 - DNA, 30 bp, Artificial Sequence
  Synthetic oligonucleotide
tgtcggatgcacctatactgtctcacgacg

SEQ ID NO: 314523 - DNA, 30 bp, Artificial Sequence
  Synthetic oligonucleotide
gcagacctagaggggcatacacctacgacg

SEQ ID NO: 314524 - DNA, 30 bp, Artificial Sequence
  Synthetic oligonucleotide
gaagatggtatttaaggcttacctacgacg

SEQ ID NO: 314525 - DNA, 30 bp, Artificial Sequence
  Synthetic oligonucleotide
ggattgttttaacgctgaaagcgtacgacg

SEQ ID NO: 314526 - DNA, 30 bp, Artificial Sequence
  Synthetic oligonucleotide
gaaagtaattgacgaataggcggtacgacg

SEQ ID NO: 314527 - DNA, 30 bp, Artificial Sequence
  Synthetic oligonucleotide
aatgctgcaactcctaaaatacaagcgacg

SEQ ID NO: 314528 - DNA, 30 bp, Artificial Sequence
  Synthetic oligonucleotide
acttcaaatatacgactcgcgacagcgacg

SEQ ID NO: 314529 - DNA, 30 bp, Artificial Sequence
  Synthetic oligonucleotide
cgaattagcactgctggaaacagagcgacg

SEQ ID NO: 314530 - DNA, 30 bp, Artificial Sequence
  Synthetic oligonucleotide
cgcaggaatctcatcgaaacacgagcgacg

SEQ ID NO: 314531 - DNA, 30 bp, Artificial Sequence
  Synthetic oligonucleotide
gtaggtgtcggactagcaggcatagcgacg

SEQ ID NO: 314532 - DNA, 30 bp, Artificial Sequence
  Synthetic oligonucleotide
gaaaagggaggggggccagtagaggcgacg

SEQ ID NO: 314533 - DNA, 30 bp, Artificial Sequence
  Synthetic oligonucleotide
agacgttggcgaccggatagtatggcgacg

SEQ ID NO: 314534 - DNA, 30 bp, Artificial Sequence
  Synthetic oligonucleotide
agatagtattccgaaggaccccgtgcgacg

SEQ ID NO: 314535 - DNA, 30 bp, Artificial Sequence
  Synthetic oligonucleotide
taagcaatatatcccggagacggtgcgacg

SEQ ID NO: 314536 - DNA, 30 bp, Artificial Sequence
  Synthetic oligonucleotide
gcgaggctgtcggacatctattgatcgacg

SEQ ID NO: 314537 - DNA, 30 bp, Artificial Sequence
  Synthetic oligonucleotide
tcgtgcgagcttaatcccgacgtctcgacg

SEQ ID NO: 314538 - DNA, 30 bp, Artificial Sequence
  Synthetic oligonucleotide
gggtaagacttatttcacgtaacgtcgacg

SEQ ID NO: 314539 - DNA, 30 bp, Artificial Sequence
  Synthetic oligonucleotide
gatattctaatgtccgaccgcccgtcgacg

SEQ ID NO: 314540 - DNA, 30 bp, Artificial Sequence
  Synthetic oligonucleotide
ggttccagtctgcgatatccgtggtcgacg

SEQ ID NO: 314541 - DNA, 30 bp, Artificial Sequence
  Synthetic oligonucleotide
tgaggcaatcttggggctatatcttcgacg

SEQ ID NO: 314542 - DNA, 30 bp, Artificial Sequence
  Synthetic oligonucleotide
ttaagggtaattgaaaggttacaaaggacg

SEQ ID NO: 314543 - DNA, 30 bp, Artificial Sequence
  Synthetic oligonucleotide
cttccaaaatcggaatgctcctaaaggacg

SEQ ID NO: 314544 - DNA, 30 bp, Artificial Sequence
  Synthetic oligonucleotide
gtatatttgagttatttcttgcgaaggacg

SEQ ID NO: 314545 - DNA, 30 bp, Artificial Sequence
  Synthetic oligonucleotide
aaccgctggtctcttcgacggtcgaggacg

SEQ ID NO: 314546 - DNA, 30 bp, Artificial Sequence
  Synthetic oligonucleotide
ctctgcgcaatgaaatagcctttgaggacg

SEQ ID NO: 314547 - DNA, 30 bp, Artificial Sequence
  Synthetic oligonucleotide
tctagcgggcgtggcagagattataggacg

SEQ ID NO: 314548 - DNA, 30 bp, Artificial Sequence
  Synthetic oligonucleotide
ggcgctttacgcgagtatgcgcgtaggacg

SEQ ID NO: 314549 - DNA, 30 bp, Artificial Sequence
  Synthetic oligonucleotide
gtgtggcctgggcagggtacggaccggacg

SEQ ID NO: 314550 - DNA, 31 bp, Artificial Sequence
  Synthetic oligonucleotide
tgatatggggcattagatcattaagcggacg

SEQ ID NO: 314551 - DNA, 30 bp, Artificial Sequence
  Synthetic oligonucleotide
agacggagtagttctacctcctctcggacg

SEQ ID NO: 314552 - DNA, 30 bp, Artificial Sequence
  Synthetic oligonucleotide
ggtgtacctgtaactcccaagtgtcggacg

SEQ ID NO: 314553 - DNA, 30 bp, Artificial Sequence
  Synthetic oligonucleotide
aagcgggtgttaaatagtgcatacgggacg

SEQ ID NO: 314554 - DNA, 30 bp, Artificial Sequence
  Synthetic oligonucleotide
gtcaatcgtaatccaggggcgtccgggacg

SEQ ID NO: 314555 - DNA, 30 bp, Artificial Sequence
  Synthetic oligonucleotide
gtagatccaccagctgaatgttgggggacg

SEQ ID NO: 314556 - DNA, 30 bp, Artificial Sequence
  Synthetic oligonucleotide
gggagtttttgcgggctacgaatggggacg

SEQ ID NO: 314557 - DNA, 30 bp, Artificial Sequence
  Synthetic oligonucleotide
tgcttcgacgagctcgtgtcgatggggacg

SEQ ID NO: 314558 - DNA, 30 bp, Artificial Sequence
  Synthetic oligonucleotide
attaaaggtcatgcatcaactatggggacg

SEQ ID NO: 314559 - DNA, 30 bp, Artificial Sequence
  Synthetic oligonucleotide
cagcatatctggtcttgaatacatgggacg

SEQ ID NO: 314560 - DNA, 30 bp, Artificial Sequence
  Synthetic oligonucleotide
ataaatgcaacgtatattattcaatggacg

SEQ ID NO: 314561 - DNA, 30 bp, Artificial Sequence
  Synthetic oligonucleotide
gtcgtttgtccatgtaggtctgcatggacg

SEQ ID NO: 314562 - DNA, 30 bp, Artificial Sequence
  Synthetic oligonucleotide
ctgtccggccggatggaactgtcctggacg

SEQ ID NO: 314563 - DNA, 30 bp, Artificial Sequence
  Synthetic oligonucleotide
cacttcaatttgcccgaaagtaagtggacg

SEQ ID NO: 314564 - DNA, 30 bp, Artificial Sequence
  Synthetic oligonucleotide
tacgcactgacccctgctggcacgtggacg

SEQ ID NO: 314565 - DNA, 30 bp, Artificial Sequence
  Synthetic oligonucleotide
cgtgactgcatcgttttgatgaggtggacg

SEQ ID NO: 314566 - DNA, 30 bp, Artificial Sequence
  Synthetic oligonucleotide
tccgggaggatgctctggaatcggtggacg

SEQ ID NO: 314567 - DNA, 30 bp, Artificial Sequence
  Synthetic oligonucleotide
cagttgcgggcggggtccttagggtggacg

SEQ ID NO: 314568 - DNA, 30 bp, Artificial Sequence
  Synthetic oligonucleotide
ctcttaccgtcgctcgccgattggtggacg

SEQ ID NO: 314569 - DNA, 30 bp, Artificial Sequence
  Synthetic oligonucleotide
caatcctacatacattaagttctgtggacg

SEQ ID NO: 314570 - DNA, 30 bp, Artificial Sequence
  Synthetic oligonucleotide
tgtccaattaacaagaattttgtgtggacg

SEQ ID NO: 314571 - DNA, 30 bp, Artificial Sequence
  Synthetic oligonucleotide
cggcaaggtgagcgtgacttatcttggacg

SEQ ID NO: 314572 - DNA, 30 bp, Artificial Sequence
  Synthetic oligonucleotide
aggcgacactgtccatcaggttaaatgacg

SEQ ID NO: 314573 - DNA, 30 bp, Artificial Sequence
  Synthetic oligonucleotide
agtacgcccgcgagctgaggtcgcatgacg

SEQ ID NO: 314574 - DNA, 30 bp, Artificial Sequence
  Synthetic oligonucleotide
ggacagcgaccacaagcactgtgtatgacg

SEQ ID NO: 314575 - DNA, 30 bp, Artificial Sequence
  Synthetic oligonucleotide
tgtatcgtcgattgtagggcggaactgacg

SEQ ID NO: 314576 - DNA, 30 bp, Artificial Sequence
  Synthetic oligonucleotide
ttgatactatttaggtccataccactgacg

SEQ ID NO: 314577 - DNA, 30 bp, Artificial Sequence
  Synthetic oligonucleotide
ttgacgagggtcttcctggtggtactgacg

SEQ ID NO: 314578 - DNA, 30 bp, Artificial Sequence
  Synthetic oligonucleotide
aaatcgtgttgtgcggggttgaacctgacg

SEQ ID NO: 314579 - DNA, 30 bp, Artificial Sequence
  Synthetic oligonucleotide
tgcggggaggcggttaacaattccctgacg

SEQ ID NO: 314580 - DNA, 30 bp, Artificial Sequence
  Synthetic oligonucleotide
gaacgaaacctacgctgcttagggctgacg

SEQ ID NO: 314581 - DNA, 30 bp, Artificial Sequence
  Synthetic oligonucleotide
cgtcccggcggactctgatacaaagtgacg

SEQ ID NO: 314582 - DNA, 30 bp, Artificial Sequence
  Synthetic oligonucleotide
ctggatatagtaaacgtacatatagtgacg

SEQ ID NO: 314583 - DNA, 30 bp, Artificial Sequence
  Synthetic oligonucleotide
acagggcacaagcctctggtcaatgtgacg

SEQ ID NO: 314584 - DNA, 30 bp, Artificial Sequence
  Synthetic oligonucleotide
taacgaagagtcatggggcttcttgtgacg

SEQ ID NO: 314585 - DNA, 30 bp, Artificial Sequence
  Synthetic oligonucleotide
attcccaacggtaatgcttgcgttgtgacg

SEQ ID NO: 314586 - DNA, 30 bp, Artificial Sequence
  Synthetic oligonucleotide
gaaccggcaagacgcatcagcgaattgacg

SEQ ID NO: 314587 - DNA, 30 bp, Artificial Sequence
  Synthetic oligonucleotide
actagaggtggatggattctggaattgacg

SEQ ID NO: 314588 - DNA, 30 bp, Artificial Sequence
  Synthetic oligonucleotide
tcatagatgaatccggtgcgtaacttgacg

SEQ ID NO: 314589 - DNA, 30 bp, Artificial Sequence
  Synthetic oligonucleotide
taaacctgatcccgccataggcccttgacg

SEQ ID NO: 314590 - DNA, 30 bp, Artificial Sequence
  Synthetic oligonucleotide
catggtagttacgctaatcggtcaaatacg

SEQ ID NO: 314591 - DNA, 30 bp, Artificial Sequence
  Synthetic oligonucleotide
ccaagatatgcgatttacctcctaaatacg

SEQ ID NO: 314592 - DNA, 30 bp, Artificial Sequence
  Synthetic oligonucleotide
ttactcgcgggatacttgttgtccaatacg

SEQ ID NO: 314593 - DNA, 30 bp, Artificial Sequence
  Synthetic oligonucleotide
ctccgctaggctgccagcgattataatacg

SEQ ID NO: 314594 - DNA, 30 bp, Artificial Sequence
  Synthetic oligonucleotide
cagataagcattcgaactgtctgtaatacg

SEQ ID NO: 314595 - DNA, 30 bp, Artificial Sequence
  Synthetic oligonucleotide
gtactcactatcgctccatcgaaccatacg

SEQ ID NO: 314596 - DNA, 30 bp, Artificial Sequence
  Synthetic oligonucleotide
tagcgtcaagttcttcacaggcaccatacg

SEQ ID NO: 314597 - DNA, 30 bp, Artificial Sequence
  Synthetic oligonucleotide
cagtacactcgggtgtgctttagccatacg

SEQ ID NO: 314598 - DNA, 30 bp, Artificial Sequence
  Synthetic oligonucleotide
aggtgatgccgcctaccaggggtgcatacg

SEQ ID NO: 314599 - DNA, 30 bp, Artificial Sequence
  Synthetic oligonucleotide
gttagactggtagagcctcattgtcatacg

SEQ ID NO: 314600 - DNA, 25 bp, Artificial Sequence
  Synthetic oligonucleotide
cttcagactgtcaacaatcgatacg

SEQ ID NO: 314601 - DNA, 30 bp, Artificial Sequence
  Synthetic oligonucleotide
caggagaattttggttacattgaggatacg

SEQ ID NO: 314602 - DNA, 30 bp, Artificial Sequence
  Synthetic oligonucleotide
ttagaataggtgaaagcctttgatgatacg

SEQ ID NO: 314603 - DNA, 30 bp, Artificial Sequence
  Synthetic oligonucleotide
tccgttgtaactcggggtagagctgatacg

SEQ ID NO: 314604 - DNA, 30 bp, Artificial Sequence
  Synthetic oligonucleotide
ttcgaagccaagataatcaaaagtgatacg

SEQ ID NO: 314605 - DNA, 30 bp, Artificial Sequence
  Synthetic oligonucleotide
tgaacagctataactctagctattgatacg

SEQ ID NO: 314606 - DNA, 30 bp, Artificial Sequence
  Synthetic oligonucleotide
ttacaggcttcctatagtgaccgctatacg

SEQ ID NO: 314607 - DNA, 30 bp, Artificial Sequence
  Synthetic oligonucleotide
acggcgagcacgagatatacactttatacg

SEQ ID NO: 314608 - DNA, 30 bp, Artificial Sequence
  Synthetic oligonucleotide
accacgatagcgtaaacgtcgctttatacg

SEQ ID NO: 314609 - DNA, 30 bp, Artificial Sequence
  Synthetic oligonucleotide
actatcgtggacatcggacagctaactacg

SEQ ID NO: 314610 - DNA, 30 bp, Artificial Sequence
  Synthetic oligonucleotide
tagcgttgcctttagcttaacgtaactacg

SEQ ID NO: 314611 - DNA, 30 bp, Artificial Sequence
  Synthetic oligonucleotide
aaacgttctgctcgaaattttcacactacg

SEQ ID NO: 314612 - DNA, 30 bp, Artificial Sequence
  Synthetic oligonucleotide
tgtggcaagcctagctagaaaaccactacg

SEQ ID NO: 314613 - DNA, 30 bp, Artificial Sequence
  Synthetic oligonucleotide
cggtatagtttgatgcgccgttgcactacg

SEQ ID NO: 314614 - DNA, 30 bp, Artificial Sequence
  Synthetic oligonucleotide
gagacgactgagtcagggcgtgcgactacg

SEQ ID NO: 314615 - DNA, 30 bp, Artificial Sequence
  Synthetic oligonucleotide
gagtcggagcctctgcctgaagggactacg

SEQ ID NO: 314616 - DNA, 30 bp, Artificial Sequence
  Synthetic oligonucleotide
gcctctagtctctacaagaggactactacg

SEQ ID NO: 314617 - DNA, 30 bp, Artificial Sequence
  Synthetic oligonucleotide
tagagctatcgggacttgttgttacctacg

SEQ ID NO: 314618 - DNA, 30 bp, Artificial Sequence
  Synthetic oligonucleotide
ctatgatgcggtaaagcccatttccctacg

SEQ ID NO: 314619 - DNA, 30 bp, Artificial Sequence
  Synthetic oligonucleotide
tgcccacgaggtgtaggttgctatcctacg

SEQ ID NO: 314620 - DNA, 30 bp, Artificial Sequence
  Synthetic oligonucleotide
gcgtagcgtttcctggaagcatgtgctacg

SEQ ID NO: 314621 - DNA, 30 bp, Artificial Sequence
  Synthetic oligonucleotide
aggcaagcgtacttgggtagagactctacg

SEQ ID NO: 314622 - DNA, 30 bp, Artificial Sequence
  Synthetic oligonucleotide
ttaatgcgagatttcggaaagtggtctacg

SEQ ID NO: 314623 - DNA, 30 bp, Artificial Sequence
  Synthetic oligonucleotide
ttggtgatttcacggcagtaaggttctacg

SEQ ID NO: 314624 - DNA, 30 bp, Artificial Sequence
  Synthetic oligonucleotide
attcagctaataaagaagtagccaagtacg

SEQ ID NO: 314625 - DNA, 30 bp, Artificial Sequence
  Synthetic oligonucleotide
tcaaaaactacgtaagtacctgcaagtacg

SEQ ID NO: 314626 - DNA, 30 bp, Artificial Sequence
  Synthetic oligonucleotide
taatactagagttggtgttgtagaagtacg

SEQ ID NO: 314627 - DNA, 30 bp, Artificial Sequence
  Synthetic oligonucleotide
gtgctggcgcaaattgtgggggtaagtacg

SEQ ID NO: 314628 - DNA, 30 bp, Artificial Sequence
  Synthetic oligonucleotide
ccaaatattccgcattcgaagttaagtacg

SEQ ID NO: 314629 - DNA, 30 bp, Artificial Sequence
  Synthetic oligonucleotide
gcgtgattgtaatcctttaaacacagtacg

SEQ ID NO: 314630 - DNA, 30 bp, Artificial Sequence
  Synthetic oligonucleotide
ataacttggagaggttcgggtaatagtacg

SEQ ID NO: 314631 - DNA, 30 bp, Artificial Sequence
  Synthetic oligonucleotide
gtagcgctgatgctcattgtcattagtacg

SEQ ID NO: 314632 - DNA, 30 bp, Artificial Sequence
  Synthetic oligonucleotide
atgccagtgccttgatctgtcccacgtacg

SEQ ID NO: 314633 - DNA, 30 bp, Artificial Sequence
  Synthetic oligonucleotide
tgagagccgctcaatgtatgtcgacgtacg

SEQ ID NO: 314634 - DNA, 30 bp, Artificial Sequence
  Synthetic oligonucleotide
aagaaaccgtcgagtggaaattgccgtacg

SEQ ID NO: 314635 - DNA, 30 bp, Artificial Sequence
  Synthetic oligonucleotide
tatgtgacgctatttaaaactacgcgtacg

SEQ ID NO: 314636 - DNA, 30 bp, Artificial Sequence
  Synthetic oligonucleotide
atttggaatccacgttacaaggggcgtacg

SEQ ID NO: 314637 - DNA, 30 bp, Artificial Sequence
  Synthetic oligonucleotide
gcggacatattaatcttccatttgcgtacg

SEQ ID NO: 314638 - DNA, 30 bp, Artificial Sequence
  Synthetic oligonucleotide
ctgttagtaagtcgtgtaactggtcgtacg

SEQ ID NO: 314639 - DNA, 30 bp, Artificial Sequence
  Synthetic oligonucleotide
gcaatggttgaagctcgttgtacaggtacg

SEQ ID NO: 314640 - DNA, 30 bp, Artificial Sequence
  Synthetic oligonucleotide
cgcacgagggacatgtgtgctcacggtacg

SEQ ID NO: 314641 - DNA, 30 bp, Artificial Sequence
  Synthetic oligonucleotide
gtctctgcggcctgtgaaaaaacgggtacg

SEQ ID NO: 314642 - DNA, 30 bp, Artificial Sequence
  Synthetic oligonucleotide
ccggcccgcaagccacgagcgcggggtacg

SEQ ID NO: 314643 - DNA, 30 bp, Artificial Sequence
  Synthetic oligonucleotide
aggcaagcctaaaagccataatttggtacg

SEQ ID NO: 314644 - DNA, 30 bp, Artificial Sequence
  Synthetic oligonucleotide
gttgggacttcgcacagcgatgaatgtacg

SEQ ID NO: 314645 - DNA, 30 bp, Artificial Sequence
  Synthetic oligonucleotide
ctcattggcgactgccttacaagatgtacg

SEQ ID NO: 314646 - DNA, 30 bp, Artificial Sequence
  Synthetic oligonucleotide
aagtcctttcagggaagaatcgcaattacg

SEQ ID NO: 314647 - DNA, 30 bp, Artificial Sequence
  Synthetic oligonucleotide
taaggggtgctgggctatccttagattacg

SEQ ID NO: 314648 - DNA, 30 bp, Artificial Sequence
  Synthetic oligonucleotide
ttagttaccactgtaaacggcaggattacg

SEQ ID NO: 314649 - DNA, 29 bp, Artificial Sequence
  Synthetic oligonucleotide
acctctgtgacctgtgtgagcctattacg

SEQ ID NO: 314650 - DNA, 30 bp, Artificial Sequence
  Synthetic oligonucleotide
caacacagaagtgacctccggtgtattacg

SEQ ID NO: 314651 - DNA, 30 bp, Artificial Sequence
  Synthetic oligonucleotide
cgccgacggcacttatagaatgaacttacg

SEQ ID NO: 314652 - DNA, 30 bp, Artificial Sequence
  Synthetic oligonucleotide
tacattgtcatgccaagggtaagacttacg

SEQ ID NO: 314653 - DNA, 30 bp, Artificial Sequence
  Synthetic oligonucleotide
aataactgaatgtaccatagttcccttacg

SEQ ID NO: 314654 - DNA, 30 bp, Artificial Sequence
  Synthetic oligonucleotide
tggagcagagcgcccaaaaaagcgcttacg

SEQ ID NO: 314655 - DNA, 30 bp, Artificial Sequence
  Synthetic oligonucleotide
gatggatatagcgccccgagagctcttacg

SEQ ID NO: 314656 - DNA, 30 bp, Artificial Sequence
  Synthetic oligonucleotide
tgccattcgcactgtattcgtggagttacg

SEQ ID NO: 314657 - DNA, 30 bp, Artificial Sequence
  Synthetic oligonucleotide
gccataccaggcaactaatagctagttacg

SEQ ID NO: 314658 - DNA, 30 bp, Artificial Sequence
  Synthetic oligonucleotide
gctagggctaatatcccactaagcgttacg

SEQ ID NO: 314659 - DNA, 30 bp, Artificial Sequence
  Synthetic oligonucleotide
aaggcttcatctgtaatatcaggggttacg

SEQ ID NO: 314660 - DNA, 30 bp, Artificial Sequence
  Synthetic oligonucleotide
gaatccaggtggatacctgagggggttacg

SEQ ID NO: 314661 - DNA, 30 bp, Artificial Sequence
  Synthetic oligonucleotide
ccagatggtatgaccaataagactgttacg

SEQ ID NO: 314662 - DNA, 30 bp, Artificial Sequence
  Synthetic oligonucleotide
tgctggtgtcaccggctccacattgttacg

SEQ ID NO: 314663 - DNA, 29 bp, Artificial Sequence
  Synthetic oligonucleotide
ttgggagctagttctcggagaaatttacg

SEQ ID NO: 314664 - DNA, 30 bp, Artificial Sequence
  Synthetic oligonucleotide
agtactaagacgtccggctttatgtttacg

SEQ ID NO: 314665 - DNA, 30 bp, Artificial Sequence
  Synthetic oligonucleotide
acaaccactggactaccacggcattttacg

SEQ ID NO: 314666 - DNA, 30 bp, Artificial Sequence
  Synthetic oligonucleotide
ttctcgcgagatgttgtcgaaacttttacg

SEQ ID NO: 314667 - DNA, 30 bp, Artificial Sequence
  Synthetic oligonucleotide
gcaattttgaagtcggaaccgagttttacg

SEQ ID NO: 314668 - DNA, 30 bp, Artificial Sequence
  Synthetic oligonucleotide
tgatattgttatggagagagtcgttttacg

SEQ ID NO: 314669 - DNA, 30 bp, Artificial Sequence
  Synthetic oligonucleotide
accagccgggttgtttcgtatatttttacg

SEQ ID NO: 314670 - DNA, 30 bp, Artificial Sequence
  Synthetic oligonucleotide
tatttgcatcgtaggttcttaggaaaaccg

SEQ ID NO: 314671 - DNA, 30 bp, Artificial Sequence
  Synthetic oligonucleotide
aggctcaggttaaagttgggcgacaaaccg

SEQ ID NO: 314672 - DNA, 30 bp, Artificial Sequence
  Synthetic oligonucleotide
acccaacccctggtgcgtcctcccaaaccg

SEQ ID NO: 314673 - DNA, 30 bp, Artificial Sequence
  Synthetic oligonucleotide
agcgtaacccacaagcttcggagcaaaccg

SEQ ID NO: 314674 - DNA, 30 bp, Artificial Sequence
  Synthetic oligonucleotide
cacatacgaggggcctataagtataaaccg

SEQ ID NO: 314675 - DNA, 30 bp, Artificial Sequence
  Synthetic oligonucleotide
tgtatcgcgtgtgcgggttattcacaaccg

SEQ ID NO: 314676 - DNA, 30 bp, Artificial Sequence
  Synthetic oligonucleotide
attcggagtggtgacgttcgtccccaaccg

SEQ ID NO: 314677 - DNA, 30 bp, Artificial Sequence
  Synthetic oligonucleotide
cccggcgatttggaatatgtcatccaaccg

SEQ ID NO: 314678 - DNA, 30 bp, Artificial Sequence
  Synthetic oligonucleotide
acacgcgtggccagaagttgcgcgcaaccg

SEQ ID NO: 314679 - DNA, 30 bp, Artificial Sequence
  Synthetic oligonucleotide
accatccgtgcgccagcgagcattcaaccg

SEQ ID NO: 314680 - DNA, 30 bp, Artificial Sequence
  Synthetic oligonucleotide
acaggtaatattatgttcgaataagaaccg

SEQ ID NO: 314681 - DNA, 30 bp, Artificial Sequence
  Synthetic oligonucleotide
ccacggcctctgctcctcacttaagaaccg

SEQ ID NO: 314682 - DNA, 30 bp, Artificial Sequence
  Synthetic oligonucleotide
cactggaaatatgactcgcactgagaaccg

SEQ ID NO: 314683 - DNA, 30 bp, Artificial Sequence
  Synthetic oligonucleotide
acgttttacgtcagagtgagtcctgaaccg

SEQ ID NO: 314684 - DNA, 30 bp, Artificial Sequence
  Synthetic oligonucleotide
gcccggaatgtagtgccgaattaataaccg

SEQ ID NO: 314685 - DNA, 30 bp, Artificial Sequence
  Synthetic oligonucleotide
ggttgggagcacataatggatatataaccg

SEQ ID NO: 314686 - DNA, 30 bp, Artificial Sequence
  Synthetic oligonucleotide
tgtccaaggggtgcaactgtcacttaaccg

SEQ ID NO: 314687 - DNA, 30 bp, Artificial Sequence
  Synthetic oligonucleotide
aagaatgatatatatgtcagtgtttaaccg

SEQ ID NO: 314688 - DNA, 30 bp, Artificial Sequence
  Synthetic oligonucleotide
taacaagaaatcgcacacgcggacacaccg

SEQ ID NO: 314689 - DNA, 30 bp, Artificial Sequence
  Synthetic oligonucleotide
ttgcgctcagttcagaggatggacacaccg

SEQ ID NO: 314690 - DNA, 30 bp, Artificial Sequence
  Synthetic oligonucleotide
atctgtcacactgtctgccgcacgacaccg

SEQ ID NO: 314691 - DNA, 30 bp, Artificial Sequence
  Synthetic oligonucleotide
aataagaatggtctcagggcgctgacaccg

SEQ ID NO: 314692 - DNA, 30 bp, Artificial Sequence
  Synthetic oligonucleotide
tttacgtcgcttaggacagttcttacaccg

SEQ ID NO: 314693 - DNA, 30 bp, Artificial Sequence
  Synthetic oligonucleotide
tgtttaacgctgttaacatgggtaccaccg

SEQ ID NO: 314694 - DNA, 30 bp, Artificial Sequence
  Synthetic oligonucleotide
acgctatcgtgcggggccaatagcccaccg

SEQ ID NO: 314695 - DNA, 30 bp, Artificial Sequence
  Synthetic oligonucleotide
ggactgcctcggctgcgcggcttcccaccg

SEQ ID NO: 314696 - DNA, 30 bp, Artificial Sequence
  Synthetic oligonucleotide
aacagctagcttcttcccaccactccaccg

SEQ ID NO: 314697 - DNA, 30 bp, Artificial Sequence
  Synthetic oligonucleotide
ctgacgacgtcatggatggctactccaccg

SEQ ID NO: 314698 - DNA, 30 bp, Artificial Sequence
  Synthetic oligonucleotide
tttgctagtatctgtgagcggggagcaccg

SEQ ID NO: 314699 - DNA, 30 bp, Artificial Sequence
  Synthetic oligonucleotide
cctatacttatgtccgaaacaaccgcaccg

SEQ ID NO: 314700 - DNA, 30 bp, Artificial Sequence
  Synthetic oligonucleotide
aaatgtgggagcaatactccacccgcaccg

SEQ ID NO: 314701 - DNA, 30 bp, Artificial Sequence
  Synthetic oligonucleotide
tttgtaaaggcgccagcgagcagcgcaccg

SEQ ID NO: 314702 - DNA, 30 bp, Artificial Sequence
  Synthetic oligonucleotide
agccagcaccctgatccacaacaggcaccg

SEQ ID NO: 314703 - DNA, 30 bp, Artificial Sequence
  Synthetic oligonucleotide
atagttaagcgagcccgctctaatgcaccg

SEQ ID NO: 314704 - DNA, 30 bp, Artificial Sequence
  Synthetic oligonucleotide
ctgctagagaggacaatcttctatgcaccg

SEQ ID NO: 314705 - DNA, 30 bp, Artificial Sequence
  Synthetic oligonucleotide
ctggcaccgtcttgataccactactcaccg

SEQ ID NO: 314706 - DNA, 30 bp, Artificial Sequence
  Synthetic oligonucleotide
tacaaatgcctggcattctggtgttcaccg

SEQ ID NO: 314707 - DNA, 30 bp, Artificial Sequence
  Synthetic oligonucleotide
gctgggcccctggttatttaacatagaccg

SEQ ID NO: 314708 - DNA, 30 bp, Artificial Sequence
  Synthetic oligonucleotide
tgggtagtacgatatagtatagaccgaccg

SEQ ID NO: 314709 - DNA, 30 bp, Artificial Sequence
  Synthetic oligonucleotide
agatcctagttcatagtaaggggtcgaccg

SEQ ID NO: 314710 - DNA, 30 bp, Artificial Sequence
  Synthetic oligonucleotide
tatgtggggtcgtgtagcggtcaaggaccg

SEQ ID NO: 314711 - DNA, 30 bp, Artificial Sequence
  Synthetic oligonucleotide
agcgagtatacttcgaaaatcgtaggaccg

SEQ ID NO: 314712 - DNA, 30 bp, Artificial Sequence
  Synthetic oligonucleotide
gtgcgcatccacacaggctcccccggaccg

SEQ ID NO: 314713 - DNA, 30 bp, Artificial Sequence
  Synthetic oligonucleotide
tgtgaccgatcggagcaataagggggaccg

SEQ ID NO: 314714 - DNA, 30 bp, Artificial Sequence
  Synthetic oligonucleotide
tattcttgccagggtcaaaatcgttgaccg

SEQ ID NO: 314715 - DNA, 30 bp, Artificial Sequence
  Synthetic oligonucleotide
aacgcaatacgccaactgaagctttgaccg

SEQ ID NO: 314716 - DNA, 30 bp, Artificial Sequence
  Synthetic oligonucleotide
atacaacttaaagtgcggttaaaaataccg

SEQ ID NO: 314717 - DNA, 30 bp, Artificial Sequence
  Synthetic oligonucleotide
ttttgttgaaaccgaagagtgtccataccg

SEQ ID NO: 314718 - DNA, 30 bp, Artificial Sequence
  Synthetic oligonucleotide
gatttcgagtctggtagtagccgcataccg

SEQ ID NO: 314719 - DNA, 30 bp, Artificial Sequence
  Synthetic oligonucleotide
gagccaatggtctacttatgatgcataccg

SEQ ID NO: 314720 - DNA, 30 bp, Artificial Sequence
  Synthetic oligonucleotide
cttcacgcttcagtgtctgagaagataccg

SEQ ID NO: 314721 - DNA, 30 bp, Artificial Sequence
  Synthetic oligonucleotide
gtgtagggcttttgggtaggaagtataccg

SEQ ID NO: 314722 - DNA, 30 bp, Artificial Sequence
  Synthetic oligonucleotide
agcgcggctataccggactggagtataccg

SEQ ID NO: 314723 - DNA, 30 bp, Artificial Sequence
  Synthetic oligonucleotide
gttagccccgggtggactgatgtcctaccg

SEQ ID NO: 314724 - DNA, 30 bp, Artificial Sequence
  Synthetic oligonucleotide
aattatgtgtttccccggtgggcagtaccg

SEQ ID NO: 314725 - DNA, 30 bp, Artificial Sequence
  Synthetic oligonucleotide
tcaatcgccggcgctgggtactaggtaccg

SEQ ID NO: 314726 - DNA, 30 bp, Artificial Sequence
  Synthetic oligonucleotide
agtaatttcacaaagtataaaacggtaccg

SEQ ID NO: 314727 - DNA, 30 bp, Artificial Sequence
  Synthetic oligonucleotide
cgatatagaatatgcagtccgggtgtaccg

SEQ ID NO: 314728 - DNA, 30 bp, Artificial Sequence
  Synthetic oligonucleotide
cgtctattagtcgagctttgaatattaccg

SEQ ID NO: 314729 - DNA, 30 bp, Artificial Sequence
  Synthetic oligonucleotide
gaactgcctgaccttatcaacttgttaccg

SEQ ID NO: 314730 - DNA, 30 bp, Artificial Sequence
  Synthetic oligonucleotide
taatgaggaggtcctcttatagatttaccg

SEQ ID NO: 314731 - DNA, 30 bp, Artificial Sequence
  Synthetic oligonucleotide
gaaggctcagtacggcatcccgttaacccg

SEQ ID NO: 314732 - DNA, 30 bp, Artificial Sequence
  Synthetic oligonucleotide
cgttggtcaggatctttttggatacacccg

SEQ ID NO: 314733 - DNA, 30 bp, Artificial Sequence
  Synthetic oligonucleotide
ccacaatcacacgagggcgtatgccacccg

SEQ ID NO: 314734 - DNA, 30 bp, Artificial Sequence
  Synthetic oligonucleotide
gattagagctaaaattcgcgaaagcacccg

SEQ ID NO: 314735 - DNA, 30 bp, Artificial Sequence
  Synthetic oligonucleotide
tgcacaggtacatatcaatggtagcacccg

SEQ ID NO: 314736 - DNA, 30 bp, Artificial Sequence
  Synthetic oligonucleotide
gagttaattgacatagccaccgcgcacccg

SEQ ID NO: 314737 - DNA, 30 bp, Artificial Sequence
  Synthetic oligonucleotide
ttttgacgggtacagcaagaatttcacccg

SEQ ID NO: 314738 - DNA, 30 bp, Artificial Sequence
  Synthetic oligonucleotide
cgcagggggtagtcaaataagtttcacccg

SEQ ID NO: 314739 - DNA, 30 bp, Artificial Sequence
  Synthetic oligonucleotide
tgggtcaactagctcacgttgtttcacccg

SEQ ID NO: 314740 - DNA, 30 bp, Artificial Sequence
  Synthetic oligonucleotide
gatgtctgcgagctaccggggaaatacccg

SEQ ID NO: 314741 - DNA, 30 bp, Artificial Sequence
  Synthetic oligonucleotide
atgataggcattgctaaaatcttatacccg

SEQ ID NO: 314742 - DNA, 30 bp, Artificial Sequence
  Synthetic oligonucleotide
aatgtggtcaaaatcaagtccgtgtacccg

SEQ ID NO: 314743 - DNA, 30 bp, Artificial Sequence
  Synthetic oligonucleotide
acggatccctatctccggccgctttacccg

SEQ ID NO: 314744 - DNA, 30 bp, Artificial Sequence
  Synthetic oligonucleotide
gttgctagcatgtctagggagagtaccccg

SEQ ID NO: 314745 - DNA, 30 bp, Artificial Sequence
  Synthetic oligonucleotide
tagtcgtcgttcagaacaacctttaccccg

SEQ ID NO: 314746 - DNA, 30 bp, Artificial Sequence
  Synthetic oligonucleotide
gatgctggtgcaaatcgcagtgtacccccg

SEQ ID NO: 314747 - DNA, 30 bp, Artificial Sequence
  Synthetic oligonucleotide
gcgcttaaagaggtcacaggtaagcccccg

SEQ ID NO: 314748 - DNA, 30 bp, Artificial Sequence
  Synthetic oligonucleotide
tgcaaagcccaggactctccgtggcccccg

SEQ ID NO: 314749 - DNA, 30 bp, Artificial Sequence
  Synthetic oligonucleotide
gcggtaatagcccattccaagtacgccccg

SEQ ID NO: 314750 - DNA, 30 bp, Artificial Sequence
  Synthetic oligonucleotide
atgttagtgccacatgtgtctgccgccccg

SEQ ID NO: 314751 - DNA, 30 bp, Artificial Sequence
  Synthetic oligonucleotide
gtgcctaggctaggctaaatgtccgccccg

SEQ ID NO: 314752 - DNA, 30 bp, Artificial Sequence
  Synthetic oligonucleotide
agtgaaatggtagtattgttccaatccccg

SEQ ID NO: 314753 - DNA, 30 bp, Artificial Sequence
  Synthetic oligonucleotide
agaaaaaatcaggagcttgcagcatccccg

SEQ ID NO: 314754 - DNA, 30 bp, Artificial Sequence
  Synthetic oligonucleotide
cttggtcgcggaaacggacgcgcatccccg

SEQ ID NO: 314755 - DNA, 30 bp, Artificial Sequence
  Synthetic oligonucleotide
tgtgactgtctttcctgcagctgatccccg

SEQ ID NO: 314756 - DNA, 30 bp, Artificial Sequence
  Synthetic oligonucleotide
aggagactgctgaagacgtttgattccccg

SEQ ID NO: 314757 - DNA, 30 bp, Artificial Sequence
  Synthetic oligonucleotide
agcactctcgaatccggcatcctaagcccg

SEQ ID NO: 314758 - DNA, 30 bp, Artificial Sequence
  Synthetic oligonucleotide
gccaacgacaatgtcgtgtacaacagcccg

SEQ ID NO: 314759 - DNA, 30 bp, Artificial Sequence
  Synthetic oligonucleotide
gtataaatacctacgtggtcgaccagcccg

SEQ ID NO: 314760 - DNA, 28 bp, Artificial Sequence
  Synthetic oligonucleotide
agtatgcccaaggccaacgtatagcccg

SEQ ID NO: 314761 - DNA, 30 bp, Artificial Sequence
  Synthetic oligonucleotide
agtaaggtgacttagctaatcgctagcccg

SEQ ID NO: 314762 - DNA, 30 bp, Artificial Sequence
  Synthetic oligonucleotide
gcttagttaaaggctccaggatgtagcccg

SEQ ID NO: 314763 - DNA, 30 bp, Artificial Sequence
  Synthetic oligonucleotide
acatcgaaataacaccggtggtgacgcccg

SEQ ID NO: 314764 - DNA, 30 bp, Artificial Sequence
  Synthetic oligonucleotide
caacaaaccaagcttacggaagtacgcccg

SEQ ID NO: 314765 - DNA, 30 bp, Artificial Sequence
  Synthetic oligonucleotide
ggaaggttggcataccgacgggatcgcccg

SEQ ID NO: 314766 - DNA, 30 bp, Artificial Sequence
  Synthetic oligonucleotide
caccaacacactctcaggtcagaaggcccg

SEQ ID NO: 314767 - DNA, 30 bp, Artificial Sequence
  Synthetic oligonucleotide
gtgagattccattaggctggcgtaggcccg

SEQ ID NO: 314768 - DNA, 30 bp, Artificial Sequence
  Synthetic oligonucleotide
gagcctccgacgtaggatgatgcgggcccg

SEQ ID NO: 314769 - DNA, 30 bp, Artificial Sequence
  Synthetic oligonucleotide
gattacattcccggacggaaccttggcccg

SEQ ID NO: 314770 - DNA, 30 bp, Artificial Sequence
  Synthetic oligonucleotide
agtctaaagtagcgcaacattgttggcccg

SEQ ID NO: 314771 - DNA, 30 bp, Artificial Sequence
  Synthetic oligonucleotide
cggatatacgcccggaaacagtactgcccg

SEQ ID NO: 314772 - DNA, 30 bp, Artificial Sequence
  Synthetic oligonucleotide
ggaaacaaggtttagacaacctcctgcccg

SEQ ID NO: 314773 - DNA, 30 bp, Artificial Sequence
  Synthetic oligonucleotide
ttggctttttctcgcgatcggctctgcccg

SEQ ID NO: 314774 - DNA, 30 bp, Artificial Sequence
  Synthetic oligonucleotide
cctgcagcatcttgaacccgcagttgcccg

SEQ ID NO: 314775 - DNA, 30 bp, Artificial Sequence
  Synthetic oligonucleotide
ccccaaactagttgagctcccgaaatcccg

SEQ ID NO: 314776 - DNA, 30 bp, Artificial Sequence
  Synthetic oligonucleotide
gttctggccaaagttccgtatgaaatcccg

SEQ ID NO: 314777 - DNA, 30 bp, Artificial Sequence
  Synthetic oligonucleotide
taagtagcaagggcgttaaatgcgatcccg

SEQ ID NO: 314778 - DNA, 30 bp, Artificial Sequence
  Synthetic oligonucleotide
aatgagcagtttgacatcaactggatcccg

SEQ ID NO: 314779 - DNA, 30 bp, Artificial Sequence
  Synthetic oligonucleotide
ctccgagaggtggagtgcgagaacctcccg

SEQ ID NO: 314780 - DNA, 30 bp, Artificial Sequence
  Synthetic oligonucleotide
ccacatgttagcgcggccgaacgcctcccg

SEQ ID NO: 314781 - DNA, 30 bp, Artificial Sequence
  Synthetic oligonucleotide
tatagggggtggttaggaacaatcctcccg

SEQ ID NO: 314782 - DNA, 30 bp, Artificial Sequence
  Synthetic oligonucleotide
gtctatgccatacggatctttaatctcccg

SEQ ID NO: 314783 - DNA, 30 bp, Artificial Sequence
  Synthetic oligonucleotide
ctttagggctgatcacttccgtgtctcccg

SEQ ID NO: 314784 - DNA, 30 bp, Artificial Sequence
  Synthetic oligonucleotide
tcacgtcaatgtatcggagttaaagtcccg

SEQ ID NO: 314785 - DNA, 30 bp, Artificial Sequence
  Synthetic oligonucleotide
ccctcgtgtgatcttctgtgcctggtcccg

SEQ ID NO: 314786 - DNA, 30 bp, Artificial Sequence
  Synthetic oligonucleotide
acgagcagacttgttgtattgatattcccg

SEQ ID NO: 314787 - DNA, 30 bp, Artificial Sequence
  Synthetic oligonucleotide
cgtagccttcgcactctagagtgcttcccg

SEQ ID NO: 314788 - DNA, 30 bp, Artificial Sequence
  Synthetic oligonucleotide
gaagttccatgtttcttaacttagttcccg

SEQ ID NO: 314789 - DNA, 30 bp, Artificial Sequence
  Synthetic oligonucleotide
ttagtgtcgcgcataataagagctttcccg

SEQ ID NO: 314790 - DNA, 30 bp, Artificial Sequence
  Synthetic oligonucleotide
caacactgcgttaggcattatcgtttcccg

SEQ ID NO: 314791 - DNA, 30 bp, Artificial Sequence
  Synthetic oligonucleotide
gatgtgttccaagttcgcacacttttcccg

SEQ ID NO: 314792 - DNA, 30 bp, Artificial Sequence
  Synthetic oligonucleotide
cacaaagcggagcaatttacggttttcccg

SEQ ID NO: 314793 - DNA, 30 bp, Artificial Sequence
  Synthetic oligonucleotide
aatctggagtcgcatgtgtatgtaaagccg

SEQ ID NO: 314794 - DNA, 30 bp, Artificial Sequence
  Synthetic oligonucleotide
tttcagcggccttgctgcaccttaaagccg

SEQ ID NO: 314795 - DNA, 30 bp, Artificial Sequence
  Synthetic oligonucleotide
acatgccaaacgtctgattaccggaagccg

SEQ ID NO: 314796 - DNA, 30 bp, Artificial Sequence
  Synthetic oligonucleotide
cttgcgtctgtgcaatgctgtttagagccg

SEQ ID NO: 314797 - DNA, 30 bp, Artificial Sequence
  Synthetic oligonucleotide
gtttgtcctaaaggtaaaattccatagccg

SEQ ID NO: 314798 - DNA, 30 bp, Artificial Sequence
  Synthetic oligonucleotide
atcagtccaagcgttgctacaaactagccg

SEQ ID NO: 314799 - DNA, 30 bp, Artificial Sequence
  Synthetic oligonucleotide
gccgtgagagtagtttaaacgccctagccg

SEQ ID NO: 314800 - DNA, 30 bp, Artificial Sequence
  Synthetic oligonucleotide
ccccctagatatcaatgttcgcggtagccg

SEQ ID NO: 314801 - DNA, 30 bp, Artificial Sequence
  Synthetic oligonucleotide
ccgcgacacgaatcctattgtatgtagccg

SEQ ID NO: 314802 - DNA, 30 bp, Artificial Sequence
  Synthetic oligonucleotide
tccggtcgcaagaataatacgcctacgccg

SEQ ID NO: 314803 - DNA, 30 bp, Artificial Sequence
  Synthetic oligonucleotide
ccagctaaatggcggagcagcaccccgccg

SEQ ID NO: 314804 - DNA, 30 bp, Artificial Sequence
  Synthetic oligonucleotide
gcgccattacggcaaatccctcatccgccg

SEQ ID NO: 314805 - DNA, 30 bp, Artificial Sequence
  Synthetic oligonucleotide
tcatgtatgagatcccacagggatccgccg

SEQ ID NO: 314806 - DNA, 26 bp, Artificial Sequence
  Synthetic oligonucleotide
cctctgggtgcccattatatccgccg

SEQ ID NO: 314807 - DNA, 30 bp, Artificial Sequence
  Synthetic oligonucleotide
gctgcggcgtagcccctgacgagtccgccg

SEQ ID NO: 314808 - DNA, 30 bp, Artificial Sequence
  Synthetic oligonucleotide
tggcgaggccgtaaaaagttgacagcgccg

SEQ ID NO: 314809 - DNA, 30 bp, Artificial Sequence
  Synthetic oligonucleotide
tgtcacacttgacagtcctcctaggcgccg

SEQ ID NO: 314810 - DNA, 30 bp, Artificial Sequence
  Synthetic oligonucleotide
tctcgctataaacattatcagcgggcgccg

SEQ ID NO: 314811 - DNA, 30 bp, Artificial Sequence
  Synthetic oligonucleotide
ctaagacgtaactccgatgacggatcgccg

SEQ ID NO: 314812 - DNA, 30 bp, Artificial Sequence
  Synthetic oligonucleotide
tagtcgggtccctggtacttggactcgccg

SEQ ID NO: 314813 - DNA, 30 bp, Artificial Sequence
  Synthetic oligonucleotide
ttaggaattcatggatcctccacctcgccg

SEQ ID NO: 314814 - DNA, 31 bp, Artificial Sequence
  Synthetic oligonucleotide
ctaatcagaaggggtctgcgttaattcgccg

SEQ ID NO: 314815 - DNA, 30 bp, Artificial Sequence
  Synthetic oligonucleotide
tataatgtgaaattggcaagtagttcgccg

SEQ ID NO: 314816 - DNA, 30 bp, Artificial Sequence
  Synthetic oligonucleotide
ttatctccgttaggtaaagatgacaggccg

SEQ ID NO: 314817 - DNA, 30 bp, Artificial Sequence
  Synthetic oligonucleotide
ctggtcacatgacaccgagggctcaggccg

SEQ ID NO: 314818 - DNA, 30 bp, Artificial Sequence
  Synthetic oligonucleotide
ttgaatcgcgctgaaagatcttataggccg

SEQ ID NO: 314819 - DNA, 30 bp, Artificial Sequence
  Synthetic oligonucleotide
cactcacgtactaaaaggggtactaggccg

SEQ ID NO: 314820 - DNA, 30 bp, Artificial Sequence
  Synthetic oligonucleotide
accaagtggaagacgcatttttctaggccg

SEQ ID NO: 314821 - DNA, 30 bp, Artificial Sequence
  Synthetic oligonucleotide
atggtagggcgggaacagtacgttaggccg

SEQ ID NO: 314822 - DNA, 30 bp, Artificial Sequence
  Synthetic oligonucleotide
ttactattctgggccgcgtctgttaggccg

SEQ ID NO: 314823 - DNA, 30 bp, Artificial Sequence
  Synthetic oligonucleotide
atctgttatgggcctcaataaccacggccg

SEQ ID NO: 314824 - DNA, 30 bp, Artificial Sequence
  Synthetic oligonucleotide
ggggggagtagttgacgatccacccggccg

SEQ ID NO: 314825 - DNA, 30 bp, Artificial Sequence
  Synthetic oligonucleotide
tctgaacgtgtgactttgacgtgccggccg

SEQ ID NO: 314826 - DNA, 30 bp, Artificial Sequence
  Synthetic oligonucleotide
gagataaactcatattgtaattagcggccg

SEQ ID NO: 314827 - DNA, 30 bp, Artificial Sequence
  Synthetic oligonucleotide
ctcacatccttactagtgatttggcggccg

SEQ ID NO: 314828 - DNA, 30 bp, Artificial Sequence
  Synthetic oligonucleotide
taaactgatgcgagcgtgagacaagggccg

SEQ ID NO: 314829 - DNA, 30 bp, Artificial Sequence
  Synthetic oligonucleotide
ctcggtatttggcattgctagtccgggccg

SEQ ID NO: 314830 - DNA, 30 bp, Artificial Sequence
  Synthetic oligonucleotide
ttcggaagctagtggcccactatcgggccg

SEQ ID NO: 314831 - DNA, 30 bp, Artificial Sequence
  Synthetic oligonucleotide
gagatacatcttgctgttcttatcgggccg

SEQ ID NO: 314832 - DNA, 30 bp, Artificial Sequence
  Synthetic oligonucleotide
gtcacatccatccggggatccgctgggccg

SEQ ID NO: 314833 - DNA, 30 bp, Artificial Sequence
  Synthetic oligonucleotide
ataggtgttcccggtgttagcattgggccg

SEQ ID NO: 314834 - DNA, 30 bp, Artificial Sequence
  Synthetic oligonucleotide
ttgagcaaaagcctagctcagtaatggccg

SEQ ID NO: 314835 - DNA, 30 bp, Artificial Sequence
  Synthetic oligonucleotide
atgctggccgatgtcacggatggatggccg

SEQ ID NO: 314836 - DNA, 30 bp, Artificial Sequence
  Synthetic oligonucleotide
agttcgtataatctggcgtagatatggccg

SEQ ID NO: 314837 - DNA, 30 bp, Artificial Sequence
  Synthetic oligonucleotide
aatagcacttcctatcccggggactggccg

SEQ ID NO: 314838 - DNA, 30 bp, Artificial Sequence
  Synthetic oligonucleotide
aacacgcgatcatcgcagtcgaggtggccg

SEQ ID NO: 314839 - DNA, 30 bp, Artificial Sequence
  Synthetic oligonucleotide
cgtgagtggactgggattggcagttggccg

SEQ ID NO: 314840 - DNA, 30 bp, Artificial Sequence
  Synthetic oligonucleotide
gcgaccagttcaagtagtggactttggccg

SEQ ID NO: 314841 - DNA, 30 bp, Artificial Sequence
  Synthetic oligonucleotide
gaatggtcgtggtcttgtcatccaatgccg

SEQ ID NO: 314842 - DNA, 30 bp, Artificial Sequence
  Synthetic oligonucleotide
ggcttccggtgtagtctcaaagtcatgccg

SEQ ID NO: 314843 - DNA, 30 bp, Artificial Sequence
  Synthetic oligonucleotide
aggtattgtaaatacattttcgcgatgccg

SEQ ID NO: 314844 - DNA, 30 bp, Artificial Sequence
  Synthetic oligonucleotide
tatctagtctcgattatatgggaactgccg

SEQ ID NO: 314845 - DNA, 30 bp, Artificial Sequence
  Synthetic oligonucleotide
ttcttaagagacgggttagacatactgccg

SEQ ID NO: 314846 - DNA, 29 bp, Artificial Sequence
  Synthetic oligonucleotide
caacttccgggcatgtacaccagctgccg

SEQ ID NO: 314847 - DNA, 30 bp, Artificial Sequence
  Synthetic oligonucleotide
aacttcggtgactaactgtcggtcgtgccg

SEQ ID NO: 314848 - DNA, 30 bp, Artificial Sequence
  Synthetic oligonucleotide
gtaaattagcgtaattacgtcttggtgccg

SEQ ID NO: 314849 - DNA, 30 bp, Artificial Sequence
  Synthetic oligonucleotide
aagctttgtaagtgtgcacataatgtgccg

SEQ ID NO: 314850 - DNA, 30 bp, Artificial Sequence
  Synthetic oligonucleotide
agcacaagcgcgctactttgatgtgtgccg

SEQ ID NO: 314851 - DNA, 30 bp, Artificial Sequence
  Synthetic oligonucleotide
gcgcactttacagcagttcttggattgccg

SEQ ID NO: 314852 - DNA, 30 bp, Artificial Sequence
  Synthetic oligonucleotide
ctttacgattttcagtgctacatattgccg

SEQ ID NO: 314853 - DNA, 30 bp, Artificial Sequence
  Synthetic oligonucleotide
gggacacagctaacctgagtaaccttgccg

SEQ ID NO: 314854 - DNA, 30 bp, Artificial Sequence
  Synthetic oligonucleotide
gacacgtaagacccgcgtcgaccgttgccg

SEQ ID NO: 314855 - DNA, 30 bp, Artificial Sequence
  Synthetic oligonucleotide
cgtcgccaggccaactaataagcgttgccg

SEQ ID NO: 314856 - DNA, 30 bp, Artificial Sequence
  Synthetic oligonucleotide
agaacacgcgacttcagtctactgttgccg

SEQ ID NO: 314857 - DNA, 30 bp, Artificial Sequence
  Synthetic oligonucleotide
tgcatttctagcttaaatgaggagaatccg

SEQ ID NO: 314858 - DNA, 30 bp, Artificial Sequence
  Synthetic oligonucleotide
tcagccggcaaccatctctaggggaatccg

SEQ ID NO: 314859 - DNA, 30 bp, Artificial Sequence
  Synthetic oligonucleotide
tagtgagtcgtttatgtatgcaataatccg

SEQ ID NO: 314860 - DNA, 30 bp, Artificial Sequence
  Synthetic oligonucleotide
cttgtaattttaatgctcacagctaatccg

SEQ ID NO: 314861 - DNA, 30 bp, Artificial Sequence
  Synthetic oligonucleotide
gtacaaacgcgactcccaatatttaatccg

SEQ ID NO: 314862 - DNA, 30 bp, Artificial Sequence
  Synthetic oligonucleotide
atactggtcacggagacagaacgacatccg

SEQ ID NO: 314863 - DNA, 30 bp, Artificial Sequence
  Synthetic oligonucleotide
ctaacagaactacgaaatcatggacatccg

SEQ ID NO: 314864 - DNA, 30 bp, Artificial Sequence
  Synthetic oligonucleotide
atcactcactgagtagtcccgctacatccg

SEQ ID NO: 314865 - DNA, 30 bp, Artificial Sequence
  Synthetic oligonucleotide
gggcctcgtgaagttattgtgacccatccg

SEQ ID NO: 314866 - DNA, 30 bp, Artificial Sequence
  Synthetic oligonucleotide
ttcagccagcgcgatgtacccctccatccg

SEQ ID NO: 314867 - DNA, 30 bp, Artificial Sequence
  Synthetic oligonucleotide
atacggttgacccaggggtcttcgcatccg

SEQ ID NO: 314868 - DNA, 30 bp, Artificial Sequence
  Synthetic oligonucleotide
actacgtatttttctgtgcggctgcatccg

SEQ ID NO: 314869 - DNA, 30 bp, Artificial Sequence
  Synthetic oligonucleotide
aatgtacaggctcgtggggattgtcatccg

SEQ ID NO: 314870 - DNA, 30 bp, Artificial Sequence
  Synthetic oligonucleotide
gcttcataacactccttataaagagatccg

SEQ ID NO: 314871 - DNA, 30 bp, Artificial Sequence
  Synthetic oligonucleotide
accgatcgcgtgatcctaggttgagatccg

SEQ ID NO: 314872 - DNA, 30 bp, Artificial Sequence
  Synthetic oligonucleotide
tcctggacaccatttaacgacatcgatccg

SEQ ID NO: 314873 - DNA, 30 bp, Artificial Sequence
  Synthetic oligonucleotide
gtggaatgttttaggtatggaaaggatccg

SEQ ID NO: 314874 - DNA, 30 bp, Artificial Sequence
  Synthetic oligonucleotide
gatcaagttttgggtacgtttacggatccg

SEQ ID NO: 314875 - DNA, 30 bp, Artificial Sequence
  Synthetic oligonucleotide
ccgcgcttcagattctcggagcaatatccg

SEQ ID NO: 314876 - DNA, 30 bp, Artificial Sequence
  Synthetic oligonucleotide
ccgccctactgcggtgtagagcgatatccg

SEQ ID NO: 314877 - DNA, 30 bp, Artificial Sequence
  Synthetic oligonucleotide
ttcccccacccacgaagcctacactatccg

SEQ ID NO: 314878 - DNA, 30 bp, Artificial Sequence
  Synthetic oligonucleotide
gaaatccgtggatttggtaaggactatccg

SEQ ID NO: 314879 - DNA, 30 bp, Artificial Sequence
  Synthetic oligonucleotide
actactgctgttaacctatgtgactatccg

SEQ ID NO: 314880 - DNA, 30 bp, Artificial Sequence
  Synthetic oligonucleotide
gacgcgagcatgagcttctacagctatccg

SEQ ID NO: 314881 - DNA, 30 bp, Artificial Sequence
  Synthetic oligonucleotide
catacaagtgattagacgtggaggtatccg

SEQ ID NO: 314882 - DNA, 30 bp, Artificial Sequence
  Synthetic oligonucleotide
tctgcttggcgcaccgaatatcggtatccg

SEQ ID NO: 314883 - DNA, 30 bp, Artificial Sequence
  Synthetic oligonucleotide
ggggatgagctgcccatcgaaacttatccg

SEQ ID NO: 314884 - DNA, 30 bp, Artificial Sequence
  Synthetic oligonucleotide
aaaaatgcttcgtgagcgggtaaaactccg

SEQ ID NO: 314885 - DNA, 30 bp, Artificial Sequence
  Synthetic oligonucleotide
gggatggcgtcttcagatgttttaactccg

SEQ ID NO: 314886 - DNA, 30 bp, Artificial Sequence
  Synthetic oligonucleotide
ggtgtgtctgaccgcttaccttccactccg

SEQ ID NO: 314887 - DNA, 30 bp, Artificial Sequence
  Synthetic oligonucleotide
ttgcggagtagtggaggactaaagactccg

SEQ ID NO: 314888 - DNA, 30 bp, Artificial Sequence
  Synthetic oligonucleotide
tgcacattgcatggtaaccctgggactccg

SEQ ID NO: 314889 - DNA, 30 bp, Artificial Sequence
  Synthetic oligonucleotide
gatccaacatcgcgaattacccgtactccg

SEQ ID NO: 314890 - DNA, 30 bp, Artificial Sequence
  Synthetic oligonucleotide
gtaggattggggtaaagaatattacctccg

SEQ ID NO: 314891 - DNA, 30 bp, Artificial Sequence
  Synthetic oligonucleotide
gtggaagtactgcctgtcataactcctccg

SEQ ID NO: 314892 - DNA, 30 bp, Artificial Sequence
  Synthetic oligonucleotide
gggaccagcatatgcacgcggggagctccg

SEQ ID NO: 314893 - DNA, 30 bp, Artificial Sequence
  Synthetic oligonucleotide
gtgcaccatttggatcatcgagatgctccg

SEQ ID NO: 314894 - DNA, 29 bp, Artificial Sequence
  Synthetic oligonucleotide
gttaagattcccagtaattgtgatctccg

SEQ ID NO: 314895 - DNA, 30 bp, Artificial Sequence
  Synthetic oligonucleotide
acgccgcatctttatggggcggagtctccg

SEQ ID NO: 314896 - DNA, 30 bp, Artificial Sequence
  Synthetic oligonucleotide
gtgtatggagagaatgaagaggcttctccg

SEQ ID NO: 314897 - DNA, 30 bp, Artificial Sequence
  Synthetic oligonucleotide
acattttatcgacccttcgactcaagtccg

SEQ ID NO: 314898 - DNA, 30 bp, Artificial Sequence
  Synthetic oligonucleotide
aggatgtttgcataggagaaaaacagtccg

SEQ ID NO: 314899 - DNA, 30 bp, Artificial Sequence
  Synthetic oligonucleotide
accttagattaggtcgcgatacccagtccg

SEQ ID NO: 314900 - DNA, 30 bp, Artificial Sequence
  Synthetic oligonucleotide
agtcaccgtggtaacccggatgccagtccg

SEQ ID NO: 314901 - DNA, 30 bp, Artificial Sequence
  Synthetic oligonucleotide
aaaagcgaacaagtagacacgggcagtccg

SEQ ID NO: 314902 - DNA, 30 bp, Artificial Sequence
  Synthetic oligonucleotide
gataagagggttttgcaccatgtcagtccg

SEQ ID NO: 314903 - DNA, 30 bp, Artificial Sequence
  Synthetic oligonucleotide
agatccagtgcgacctcgcggttgagtccg

SEQ ID NO: 314904 - DNA, 31 bp, Artificial Sequence
  Synthetic oligonucleotide
tccagtacatcggttaaagcgtccacgtccg

SEQ ID NO: 314905 - DNA, 30 bp, Artificial Sequence
  Synthetic oligonucleotide
gtccttgcacgaatgggttacatccgtccg

SEQ ID NO: 314906 - DNA, 30 bp, Artificial Sequence
  Synthetic oligonucleotide
agaatcactgagtataacataatgcgtccg

SEQ ID NO: 314907 - DNA, 30 bp, Artificial Sequence
  Synthetic oligonucleotide
gggcgggctagggactgtctctctcgtccg

SEQ ID NO: 314908 - DNA, 30 bp, Artificial Sequence
  Synthetic oligonucleotide
aaggatttgcagtgttgtgttacaggtccg

SEQ ID NO: 314909 - DNA, 30 bp, Artificial Sequence
  Synthetic oligonucleotide
gcagccttgtgggattttgatcgaggtccg

SEQ ID NO: 314910 - DNA, 30 bp, Artificial Sequence
  Synthetic oligonucleotide
cgacgttattgatggaaagttgcgggtccg

SEQ ID NO: 314911 - DNA, 30 bp, Artificial Sequence
  Synthetic oligonucleotide
tgggccttttgccgtgggtgattgggtccg

SEQ ID NO: 314912 - DNA, 30 bp, Artificial Sequence
  Synthetic oligonucleotide
aatgcatataaatccctaacgtgctgtccg

SEQ ID NO: 314913 - DNA, 30 bp, Artificial Sequence
  Synthetic oligonucleotide
gcggcggctcagcaaccagtatggtgtccg

SEQ ID NO: 314914 - DNA, 30 bp, Artificial Sequence
  Synthetic oligonucleotide
ctgtagtgtgcttttaaagccataattccg

SEQ ID NO: 314915 - DNA, 30 bp, Artificial Sequence
  Synthetic oligonucleotide
gtccgcgagttgcgcggtcttataattccg

SEQ ID NO: 314916 - DNA, 30 bp, Artificial Sequence
  Synthetic oligonucleotide
gcgatgggacttgcttcggtcgacattccg

SEQ ID NO: 314917 - DNA, 30 bp, Artificial Sequence
  Synthetic oligonucleotide
tccagtgtgcgattctagccccggattccg

SEQ ID NO: 314918 - DNA, 30 bp, Artificial Sequence
  Synthetic oligonucleotide
acgggatttacgtgaaagcgtcggattccg

SEQ ID NO: 314919 - DNA, 30 bp, Artificial Sequence
  Synthetic oligonucleotide
ggactataatgcgctagtaggtgacttccg

SEQ ID NO: 314920 - DNA, 30 bp, Artificial Sequence
  Synthetic oligonucleotide
gctgttactaatataatcgagccccttccg

SEQ ID NO: 314921 - DNA, 30 bp, Artificial Sequence
  Synthetic oligonucleotide
catgcagatgtgagttaacggccgcttccg

SEQ ID NO: 314922 - DNA, 30 bp, Artificial Sequence
  Synthetic oligonucleotide
gccacatggtctttccgtcgctgagttccg

SEQ ID NO: 314923 - DNA, 30 bp, Artificial Sequence
  Synthetic oligonucleotide
atgggctcgttgagtgtagctgaggttccg

SEQ ID NO: 314924 - DNA, 30 bp, Artificial Sequence
  Synthetic oligonucleotide
gtgcttcagcgagaacggctgtgggttccg

SEQ ID NO: 314925 - DNA, 30 bp, Artificial Sequence
  Synthetic oligonucleotide
tgtccaagcggaaatcaaaaggatgttccg

SEQ ID NO: 314926 - DNA, 30 bp, Artificial Sequence
  Synthetic oligonucleotide
gcacgtgttatttacgacggtgcatttccg

SEQ ID NO: 314927 - DNA, 30 bp, Artificial Sequence
  Synthetic oligonucleotide
tcggaacttttcgagagctccgagtttccg

SEQ ID NO: 314928 - DNA, 30 bp, Artificial Sequence
  Synthetic oligonucleotide
ctccagcagttactctacttttattttccg

SEQ ID NO: 314929 - DNA, 30 bp, Artificial Sequence
  Synthetic oligonucleotide
aggcggcctcggtctttccagccttttccg

SEQ ID NO: 314930 - DNA, 30 bp, Artificial Sequence
  Synthetic oligonucleotide
ttgatgtttgaaaatatttttggttttccg

SEQ ID NO: 314931 - DNA, 30 bp, Artificial Sequence
  Synthetic oligonucleotide
gagcgcattgggattcacatactaaaagcg

SEQ ID NO: 314932 - DNA, 30 bp, Artificial Sequence
  Synthetic oligonucleotide
aatcaccggagggcttctgtcttaaaagcg

SEQ ID NO: 314933 - DNA, 30 bp, Artificial Sequence
  Synthetic oligonucleotide
tcccttttaagcccccagaggtccaaagcg

SEQ ID NO: 314934 - DNA, 30 bp, Artificial Sequence
  Synthetic oligonucleotide
ttaccacaactagcggcgctctggaaagcg

SEQ ID NO: 314935 - DNA, 30 bp, Artificial Sequence
  Synthetic oligonucleotide
gatacgcacatcagaaaatgagctaaagcg

SEQ ID NO: 314936 - DNA, 30 bp, Artificial Sequence
  Synthetic oligonucleotide
gagagccattggttgagcactgctaaagcg

SEQ ID NO: 314937 - DNA, 30 bp, Artificial Sequence
  Synthetic oligonucleotide
gtccagagcactgtgccccccgtacaagcg

SEQ ID NO: 314938 - DNA, 30 bp, Artificial Sequence
  Synthetic oligonucleotide
tgcactcatgcgttcatcgtcgcccaagcg

SEQ ID NO: 314939 - DNA, 30 bp, Artificial Sequence
  Synthetic oligonucleotide
cctcgacgtgtcggtcggtgacgagaagcg

SEQ ID NO: 314940 - DNA, 30 bp, Artificial Sequence
  Synthetic oligonucleotide
tattttcgtaatacggtacccgtagaagcg

SEQ ID NO: 314941 - DNA, 30 bp, Artificial Sequence
  Synthetic oligonucleotide
gaatttgcaggtatggttgcagaggaagcg

SEQ ID NO: 314942 - DNA, 30 bp, Artificial Sequence
  Synthetic oligonucleotide
tttgtcctccaaccactagctgtggaagcg

SEQ ID NO: 314943 - DNA, 30 bp, Artificial Sequence
  Synthetic oligonucleotide
ttggggtggaggcgggtatggggtgaagcg

SEQ ID NO: 314944 - DNA, 30 bp, Artificial Sequence
  Synthetic oligonucleotide
aaacccttacgattttgaaccacctaagcg

SEQ ID NO: 314945 - DNA, 30 bp, Artificial Sequence
  Synthetic oligonucleotide
acatgatcaggctttaatcgcggctaagcg

SEQ ID NO: 314946 - DNA, 30 bp, Artificial Sequence
  Synthetic oligonucleotide
atgcctgttgggtggcaagagcggtaagcg

SEQ ID NO: 314947 - DNA, 30 bp, Artificial Sequence
  Synthetic oligonucleotide
agcgggttcccagtgaacgcggaaacagcg

SEQ ID NO: 314948 - DNA, 30 bp, Artificial Sequence
  Synthetic oligonucleotide
tggcagcaagcgtattttataccaacagcg

SEQ ID NO: 314949 - DNA, 30 bp, Artificial Sequence
  Synthetic oligonucleotide
taagttcgtctaatgttgtgaaccacagcg

SEQ ID NO: 314950 - DNA, 30 bp, Artificial Sequence
  Synthetic oligonucleotide
caggctacgtattgttccgggggtacagcg

SEQ ID NO: 314951 - DNA, 30 bp, Artificial Sequence
  Synthetic oligonucleotide
attgcgtgctgggtgagcgaaattacagcg

SEQ ID NO: 314952 - DNA, 30 bp, Artificial Sequence
  Synthetic oligonucleotide
tccagtgcttgaaggtattgtgttacagcg

SEQ ID NO: 314953 - DNA, 30 bp, Artificial Sequence
  Synthetic oligonucleotide
cctaatatttatcacttttggcagccagcg

SEQ ID NO: 314954 - DNA, 30 bp, Artificial Sequence
  Synthetic oligonucleotide
tcgttatatcctcgaatttgggtgccagcg

SEQ ID NO: 314955 - DNA, 30 bp, Artificial Sequence
  Synthetic oligonucleotide
cttgaccgagtttcagcaacacctccagcg

SEQ ID NO: 314956 - DNA, 30 bp, Artificial Sequence
  Synthetic oligonucleotide
ctatctggaaatgtaattggggctccagcg

SEQ ID NO: 314957 - DNA, 30 bp, Artificial Sequence
  Synthetic oligonucleotide
caacgcaagttgggactcccgccagcagcg

SEQ ID NO: 314958 - DNA, 30 bp, Artificial Sequence
  Synthetic oligonucleotide
ttatgtataaaccaaagtcctggagcagcg

SEQ ID NO: 314959 - DNA, 30 bp, Artificial Sequence
  Synthetic oligonucleotide
atatatttggtgagtacacataccgcagcg

SEQ ID NO: 314960 - DNA, 30 bp, Artificial Sequence
  Synthetic oligonucleotide
cgtgctgcaaaggcagcgacagtggcagcg

SEQ ID NO: 314961 - DNA, 30 bp, Artificial Sequence
  Synthetic oligonucleotide
tataaatacagggcagcgcgagaatcagcg

SEQ ID NO: 314962 - DNA, 30 bp, Artificial Sequence
  Synthetic oligonucleotide
tcccgatgagttcatccccagtactcagcg

SEQ ID NO: 314963 - DNA, 30 bp, Artificial Sequence
  Synthetic oligonucleotide
acctatatagtccgtaggtgcccctcagcg

SEQ ID NO: 314964 - DNA, 30 bp, Artificial Sequence
  Synthetic oligonucleotide
tgaaccgcaacactcgtgtacgggtcagcg

SEQ ID NO: 314965 - DNA, 30 bp, Artificial Sequence
  Synthetic oligonucleotide
gaattcaaagtgaccacgagctggtcagcg

SEQ ID NO: 314966 - DNA, 30 bp, Artificial Sequence
  Synthetic oligonucleotide
ccaagaccctgtgtggagttcgaaagagcg

SEQ ID NO: 314967 - DNA, 30 bp, Artificial Sequence
  Synthetic oligonucleotide
caaagcgagattacttagcggctcagagcg

SEQ ID NO: 314968 - DNA, 30 bp, Artificial Sequence
  Synthetic oligonucleotide
ggtatgtgctctagatcgagtcctagagcg

SEQ ID NO: 314969 - DNA, 30 bp, Artificial Sequence
  Synthetic oligonucleotide
taactgcatcgttgtctggcagtacgagcg

SEQ ID NO: 314970 - DNA, 30 bp, Artificial Sequence
  Synthetic oligonucleotide
atcactggattggtacgcttcgatcgagcg

SEQ ID NO: 314971 - DNA, 30 bp, Artificial Sequence
  Synthetic oligonucleotide
tcttatggtgttgcatgtcttgacggagcg

SEQ ID NO: 314972 - DNA, 30 bp, Artificial Sequence
  Synthetic oligonucleotide
agttggttacatccgtctagattgggagcg

SEQ ID NO: 314973 - DNA, 30 bp, Artificial Sequence
  Synthetic oligonucleotide
tggctgacattagacgtcaggactggagcg

SEQ ID NO: 314974 - DNA, 30 bp, Artificial Sequence
  Synthetic oligonucleotide
ggatgagcctgggggcgggctagtggagcg

SEQ ID NO: 314975 - DNA, 28 bp, Artificial Sequence
  Synthetic oligonucleotide
acggtcccctatctgtctaggatgagcg

SEQ ID NO: 314976 - DNA, 30 bp, Artificial Sequence
  Synthetic oligonucleotide
tgggaggccctgctatgtgtgatatgagcg

SEQ ID NO: 314977 - DNA, 30 bp, Artificial Sequence
  Synthetic oligonucleotide
tgctaggcacacgtttcatactcgtgagcg

SEQ ID NO: 314978 - DNA, 30 bp, Artificial Sequence
  Synthetic oligonucleotide
atcttacttattacagacgatgattgagcg

SEQ ID NO: 314979 - DNA, 30 bp, Artificial Sequence
  Synthetic oligonucleotide
agtccctctcggtgtgctgtttcttgagcg

SEQ ID NO: 314980 - DNA, 30 bp, Artificial Sequence
  Synthetic oligonucleotide
cgccgctctcggtggcaaatatgttgagcg

SEQ ID NO: 314981 - DNA, 30 bp, Artificial Sequence
  Synthetic oligonucleotide
agtagtcgcttagtactcagtttttgagcg

SEQ ID NO: 314982 - DNA, 30 bp, Artificial Sequence
  Synthetic oligonucleotide
gtcttattgccaattagcccaggaatagcg

SEQ ID NO: 314983 - DNA, 30 bp, Artificial Sequence
  Synthetic oligonucleotide
acccagcaatgcttctgcggggtcatagcg

SEQ ID NO: 314984 - DNA, 30 bp, Artificial Sequence
  Synthetic oligonucleotide
tggtatttcgacagggcatctttcatagcg

SEQ ID NO: 314985 - DNA, 30 bp, Artificial Sequence
  Synthetic oligonucleotide
ctccgttcgaaagttgcgagtttcatagcg

SEQ ID NO: 314986 - DNA, 30 bp, Artificial Sequence
  Synthetic oligonucleotide
acacgcagtctaggtacggcacagatagcg

SEQ ID NO: 314987 - DNA, 30 bp, Artificial Sequence
  Synthetic oligonucleotide
attaacatctcaacagccatgacactagcg

SEQ ID NO: 314988 - DNA, 30 bp, Artificial Sequence
  Synthetic oligonucleotide
aagcttgcggcgttcacctgtcccctagcg

SEQ ID NO: 314989 - DNA, 30 bp, Artificial Sequence
  Synthetic oligonucleotide
tccggcgatacggatgtgtaaatcctagcg

SEQ ID NO: 314990 - DNA, 30 bp, Artificial Sequence
  Synthetic oligonucleotide
ggcacgtactttgccggttggcctctagcg

SEQ ID NO: 314991 - DNA, 30 bp, Artificial Sequence
  Synthetic oligonucleotide
ccacgaggcattggcgtcattgaggtagcg

SEQ ID NO: 314992 - DNA, 30 bp, Artificial Sequence
  Synthetic oligonucleotide
aggctggccgggtttgtgaacagggtagcg

SEQ ID NO: 314993 - DNA, 30 bp, Artificial Sequence
  Synthetic oligonucleotide
taggatctaccgcttcatgtatttgtagcg

SEQ ID NO: 314994 - DNA, 30 bp, Artificial Sequence
  Synthetic oligonucleotide
gtaagatactttccggcttggtgcttagcg

SEQ ID NO: 314995 - DNA, 30 bp, Artificial Sequence
  Synthetic oligonucleotide
ctcccccggtctcgagtattcgcgttagcg

SEQ ID NO: 314996 - DNA, 30 bp, Artificial Sequence
  Synthetic oligonucleotide
tggaatgtagttccgccgttcggtttagcg

SEQ ID NO: 314997 - DNA, 30 bp, Artificial Sequence
  Synthetic oligonucleotide
gagtagtattaactacctacacgaaacgcg

SEQ ID NO: 314998 - DNA, 30 bp, Artificial Sequence
  Synthetic oligonucleotide
tttaggttaaccgctttattgtgaaacgcg

SEQ ID NO: 314999 - DNA, 30 bp, Artificial Sequence
  Synthetic oligonucleotide
aactatgcgctgatcattatcagcaacgcg

SEQ ID NO: 315000 - DNA, 30 bp, Artificial Sequence
  Synthetic oligonucleotide
ataataatattccagactcgaacgaacgcg

SEQ ID NO: 315001 - DNA, 30 bp, Artificial Sequence
  Synthetic oligonucleotide
gttacgcgtcgaagtgcactatctaacgcg

SEQ ID NO: 315002 - DNA, 30 bp, Artificial Sequence
  Synthetic oligonucleotide
agtctgtgagagttaaggcgacttaacgcg

SEQ ID NO: 315003 - DNA, 30 bp, Artificial Sequence
  Synthetic oligonucleotide
gagccagttgctccacgataagttaacgcg

SEQ ID NO: 315004 - DNA, 30 bp, Artificial Sequence
  Synthetic oligonucleotide
aggagtgttcgcgggtcatcgcgacacgcg

SEQ ID NO: 315005 - DNA, 30 bp, Artificial Sequence
  Synthetic oligonucleotide
ctgctagagtgactgacttcagagcacgcg

SEQ ID NO: 315006 - DNA, 30 bp, Artificial Sequence
  Synthetic oligonucleotide
gttgtatgcatctgcggacagttgcacgcg

SEQ ID NO: 315007 - DNA, 29 bp, Artificial Sequence
  Synthetic oligonucleotide
ttaaaggcgacacactagctttgcacgcg

SEQ ID NO: 315008 - DNA, 30 bp, Artificial Sequence
  Synthetic oligonucleotide
tttgatctaatgcgaaaaaagccagacgcg

SEQ ID NO: 315009 - DNA, 30 bp, Artificial Sequence
  Synthetic oligonucleotide
cagtaaatgcttgacgaattaagagacgcg

SEQ ID NO: 315010 - DNA, 30 bp, Artificial Sequence
  Synthetic oligonucleotide
acaaatcacgtatgtagtatcggagacgcg

SEQ ID NO: 315011 - DNA, 30 bp, Artificial Sequence
  Synthetic oligonucleotide
cttccacaatcccacacagagggagacgcg

SEQ ID NO: 315012 - DNA, 30 bp, Artificial Sequence
  Synthetic oligonucleotide
atagcaggtgcgccaactgagggagacgcg

SEQ ID NO: 315013 - DNA, 30 bp, Artificial Sequence
  Synthetic oligonucleotide
gttaaaaggatcagcgatcgacttgacgcg

SEQ ID NO: 315014 - DNA, 30 bp, Artificial Sequence
  Synthetic oligonucleotide
gcgcctgcctgatcgtgacagtactacgcg

SEQ ID NO: 315015 - DNA, 30 bp, Artificial Sequence
  Synthetic oligonucleotide
caaacgtatgtagggttatccggctacgcg

SEQ ID NO: 315016 - DNA, 30 bp, Artificial Sequence
  Synthetic oligonucleotide
ggtccttttgcgtagctcaggatctacgcg

SEQ ID NO: 315017 - DNA, 30 bp, Artificial Sequence
  Synthetic oligonucleotide
caagccctcgcttggctgtaactctacgcg

SEQ ID NO: 315018 - DNA, 30 bp, Artificial Sequence
  Synthetic oligonucleotide
ccgtaggtgtggatattccttgattacgcg

SEQ ID NO: 315019 - DNA, 30 bp, Artificial Sequence
  Synthetic oligonucleotide
gtaacacccaaatagaacaactattacgcg

SEQ ID NO: 315020 - DNA, 30 bp, Artificial Sequence
  Synthetic oligonucleotide
caaacgcgggaaagtcaagagatcaccgcg

SEQ ID NO: 315021 - DNA, 30 bp, Artificial Sequence
  Synthetic oligonucleotide
atccaggccaggcgagtggatcctaccgcg

SEQ ID NO: 315022 - DNA, 30 bp, Artificial Sequence
  Synthetic oligonucleotide
gtcgcattgctcgtgtggatcgctaccgcg

SEQ ID NO: 315023 - DNA, 30 bp, Artificial Sequence
  Synthetic oligonucleotide
atcaaggttatgggaccctaccgtaccgcg

SEQ ID NO: 315024 - DNA, 30 bp, Artificial Sequence
  Synthetic oligonucleotide
actgtgtctttattcataggtgcacccgcg

SEQ ID NO: 315025 - DNA, 30 bp, Artificial Sequence
  Synthetic oligonucleotide
cctttaaccctctttagatgtggacccgcg

SEQ ID NO: 315026 - DNA, 30 bp, Artificial Sequence
  Synthetic oligonucleotide
gagttaggacggtctgaggcactccccgcg

SEQ ID NO: 315027 - DNA, 30 bp, Artificial Sequence
  Synthetic oligonucleotide
gacaaggtggtacgccatgtgcagcccgcg

SEQ ID NO: 315028 - DNA, 30 bp, Artificial Sequence
  Synthetic oligonucleotide
gttctacgcatagttgagagtatgcccgcg

SEQ ID NO: 315029 - DNA, 30 bp, Artificial Sequence
  Synthetic oligonucleotide
cgccgactctgaggggggtgagttcccgcg

SEQ ID NO: 315030 - DNA, 30 bp, Artificial Sequence
  Synthetic oligonucleotide
caagtcaatccggagttgaataaagccgcg

SEQ ID NO: 315031 - DNA, 30 bp, Artificial Sequence
  Synthetic oligonucleotide
gatagatgttttcgggaaaatacagccgcg

SEQ ID NO: 315032 - DNA, 30 bp, Artificial Sequence
  Synthetic oligonucleotide
tcttggttaagatatacctacaccgccgcg

SEQ ID NO: 315033 - DNA, 30 bp, Artificial Sequence
  Synthetic oligonucleotide
aacgccaagagtatgatacagctcgccgcg

SEQ ID NO: 315034 - DNA, 30 bp, Artificial Sequence
  Synthetic oligonucleotide
atagcgagccaacaattactagtggccgcg

SEQ ID NO: 315035 - DNA, 30 bp, Artificial Sequence
  Synthetic oligonucleotide
cacgtgtcagacattttgctaaaatccgcg

SEQ ID NO: 315036 - DNA, 30 bp, Artificial Sequence
  Synthetic oligonucleotide
tcaataataggatccctgcgcatatccgcg

SEQ ID NO: 315037 - DNA, 30 bp, Artificial Sequence
  Synthetic oligonucleotide
gtgagtggtttactttttagattatccgcg

SEQ ID NO: 315038 - DNA, 30 bp, Artificial Sequence
  Synthetic oligonucleotide
ggcattcttcccgcgcagaaggactccgcg

SEQ ID NO: 315039 - DNA, 30 bp, Artificial Sequence
  Synthetic oligonucleotide
gtcgctattcgaagttctgtcaggtccgcg

SEQ ID NO: 315040 - DNA, 30 bp, Artificial Sequence
  Synthetic oligonucleotide
ctagactcggaacttcaatttgcttccgcg

SEQ ID NO: 315041 - DNA, 30 bp, Artificial Sequence
  Synthetic oligonucleotide
gtgcttgtcttaccttacgaagcaagcgcg

SEQ ID NO: 315042 - DNA, 30 bp, Artificial Sequence
  Synthetic oligonucleotide
gtgttctgggcgacgagcgaagagagcgcg

SEQ ID NO: 315043 - DNA, 30 bp, Artificial Sequence
  Synthetic oligonucleotide
atggagaacatcagtgggtagtcgagcgcg

SEQ ID NO: 315044 - DNA, 30 bp, Artificial Sequence
  Synthetic oligonucleotide
acgggaataaagtagaaaatacggagcgcg

SEQ ID NO: 315045 - DNA, 30 bp, Artificial Sequence
  Synthetic oligonucleotide
agtaccacgagatttctaagggttagcgcg

SEQ ID NO: 315046 - DNA, 30 bp, Artificial Sequence
  Synthetic oligonucleotide
tgtcgcctaattaaaagatgttgacgcgcg

SEQ ID NO: 315047 - DNA, 30 bp, Artificial Sequence
  Synthetic oligonucleotide
ccagaggggtgccacgcccgacaccgcgcg

SEQ ID NO: 315048 - DNA, 30 bp, Artificial Sequence
  Synthetic oligonucleotide
aggttagattgagggttcgctttccgcgcg

SEQ ID NO: 315049 - DNA, 30 bp, Artificial Sequence
  Synthetic oligonucleotide
acagaagctttcgcggtaaccacgcgcgcg

SEQ ID NO: 315050 - DNA, 30 bp, Artificial Sequence
  Synthetic oligonucleotide
catgacaagcggctaggactggcgcgcgcg

SEQ ID NO: 315051 - DNA, 30 bp, Artificial Sequence
  Synthetic oligonucleotide
gcgcgggaataacatggggctataggcgcg

SEQ ID NO: 315052 - DNA, 30 bp, Artificial Sequence
  Synthetic oligonucleotide
ccctgaagggtaaatactgtagctggcgcg

SEQ ID NO: 315053 - DNA, 30 bp, Artificial Sequence
  Synthetic oligonucleotide
acctgctctatatatgttggacaatgcgcg

SEQ ID NO: 315054 - DNA, 30 bp, Artificial Sequence
  Synthetic oligonucleotide
cgttaaagctgcatcacagggtcatgcgcg

SEQ ID NO: 315055 - DNA, 30 bp, Artificial Sequence
  Synthetic oligonucleotide
ccgtacatgagaggtattttcggatgcgcg

SEQ ID NO: 315056 - DNA, 30 bp, Artificial Sequence
  Synthetic oligonucleotide
ctaatagtccccgccatccatgactgcgcg

SEQ ID NO: 315057 - DNA, 30 bp, Artificial Sequence
  Synthetic oligonucleotide
tgcccattggtttctgtgtatcattgcgcg

SEQ ID NO: 315058 - DNA, 30 bp, Artificial Sequence
  Synthetic oligonucleotide
aacggatgtttttcgtctacacgttgcgcg

SEQ ID NO: 315059 - DNA, 30 bp, Artificial Sequence
  Synthetic oligonucleotide
cgcagtgagttttgctcctccctttgcgcg

SEQ ID NO: 315060 - DNA, 30 bp, Artificial Sequence
  Synthetic oligonucleotide
atgattcagatatgctgacatccaatcgcg

SEQ ID NO: 315061 - DNA, 30 bp, Artificial Sequence
  Synthetic oligonucleotide
acgcctcttcaacagaagtggtagatcgcg

SEQ ID NO: 315062 - DNA, 30 bp, Artificial Sequence
  Synthetic oligonucleotide
tatatgcgcataatttgggtgtatatcgcg

SEQ ID NO: 315063 - DNA, 30 bp, Artificial Sequence
  Synthetic oligonucleotide
tattcgcaaccgttggcactaactatcgcg

SEQ ID NO: 315064 - DNA, 30 bp, Artificial Sequence
  Synthetic oligonucleotide
tgtttaagtgcgtaatatatgaaactcgcg

SEQ ID NO: 315065 - DNA, 30 bp, Artificial Sequence
  Synthetic oligonucleotide
gcgaagccgacaacaacttttaacctcgcg

SEQ ID NO: 315066 - DNA, 30 bp, Artificial Sequence
  Synthetic oligonucleotide
ataccggagacgaccatagaatccgtcgcg

SEQ ID NO: 315067 - DNA, 30 bp, Artificial Sequence
  Synthetic oligonucleotide
gtacattgcgtagccttaatacgcgtcgcg

SEQ ID NO: 315068 - DNA, 30 bp, Artificial Sequence
  Synthetic oligonucleotide
cgtcagtcgttgcattctctgacattcgcg

SEQ ID NO: 315069 - DNA, 30 bp, Artificial Sequence
  Synthetic oligonucleotide
tgcaccattgttggcatatcccgattcgcg

SEQ ID NO: 315070 - DNA, 30 bp, Artificial Sequence
  Synthetic oligonucleotide
gacgcaactaggtttttaatcggattcgcg

SEQ ID NO: 315071 - DNA, 30 bp, Artificial Sequence
  Synthetic oligonucleotide
gtataaagtcataagccgtcgtacttcgcg

SEQ ID NO: 315072 - DNA, 30 bp, Artificial Sequence
  Synthetic oligonucleotide
cctacccagatcgaacggctgccgttcgcg

SEQ ID NO: 315073 - DNA, 30 bp, Artificial Sequence
  Synthetic oligonucleotide
cagcgaggtattccgaccgtaatgttcgcg

SEQ ID NO: 315074 - DNA, 30 bp, Artificial Sequence
  Synthetic oligonucleotide
cgttggctctgctgtccatataatttcgcg

SEQ ID NO: 315075 - DNA, 30 bp, Artificial Sequence
  Synthetic oligonucleotide
cgtggcgtgcccttcatatttcgtttcgcg

SEQ ID NO: 315076 - DNA, 30 bp, Artificial Sequence
  Synthetic oligonucleotide
ccaacctgtcttcaccgccggacgaaggcg

SEQ ID NO: 315077 - DNA, 30 bp, Artificial Sequence
  Synthetic oligonucleotide
ctgactaaatcgtgaacgctcggacaggcg

SEQ ID NO: 315078 - DNA, 30 bp, Artificial Sequence
  Synthetic oligonucleotide
ctatgcgaacattactagcgagcgcaggcg

SEQ ID NO: 315079 - DNA, 30 bp, Artificial Sequence
  Synthetic oligonucleotide
agggcctagctccaggcaattgatcaggcg

SEQ ID NO: 315080 - DNA, 30 bp, Artificial Sequence
  Synthetic oligonucleotide
ttcgttgtaaagcgtcacgtggtagaggcg

SEQ ID NO: 315081 - DNA, 30 bp, Artificial Sequence
  Synthetic oligonucleotide
tttgccgtaatttagcggctacgtgaggcg

SEQ ID NO: 315082 - DNA, 30 bp, Artificial Sequence
  Synthetic oligonucleotide
atagaacacgctgttctgccaattgaggcg

SEQ ID NO: 315083 - DNA, 30 bp, Artificial Sequence
  Synthetic oligonucleotide
taatgcggtttctttacgttgtttgaggcg

SEQ ID NO: 315084 - DNA, 30 bp, Artificial Sequence
  Synthetic oligonucleotide
aacggacgaatcggcgcctagaaataggcg

SEQ ID NO: 315085 - DNA, 30 bp, Artificial Sequence
  Synthetic oligonucleotide
agtccttttcaaaaggctgcaccataggcg

SEQ ID NO: 315086 - DNA, 30 bp, Artificial Sequence
  Synthetic oligonucleotide
actcatgtgagggaaacaatctgataggcg

SEQ ID NO: 315087 - DNA, 30 bp, Artificial Sequence
  Synthetic oligonucleotide
tatgcgaccagtaatagtttaaactaggcg

SEQ ID NO: 315088 - DNA, 30 bp, Artificial Sequence
  Synthetic oligonucleotide
ggtgctcggcttgtagaattctggtaggcg

SEQ ID NO: 315089 - DNA, 30 bp, Artificial Sequence
  Synthetic oligonucleotide
gacctaagttccgtctaggtgtggtaggcg

SEQ ID NO: 315090 - DNA, 30 bp, Artificial Sequence
  Synthetic oligonucleotide
aacctacccgagatatggttgatgtaggcg

SEQ ID NO: 315091 - DNA, 30 bp, Artificial Sequence
  Synthetic oligonucleotide
catctgctatgattgcgggtctacacggcg

SEQ ID NO: 315092 - DNA, 30 bp, Artificial Sequence
  Synthetic oligonucleotide
aaaagaaactgcctcgggccggtcacggcg

SEQ ID NO: 315093 - DNA, 30 bp, Artificial Sequence
  Synthetic oligonucleotide
tctatatgatagcatggtaaaggtacggcg

SEQ ID NO: 315094 - DNA, 30 bp, Artificial Sequence
  Synthetic oligonucleotide
ttgtgtctttaatttacatccacaccggcg

SEQ ID NO: 315095 - DNA, 30 bp, Artificial Sequence
  Synthetic oligonucleotide
taggaatagtgacggctcgggagaccggcg

SEQ ID NO: 315096 - DNA, 30 bp, Artificial Sequence
  Synthetic oligonucleotide
gccgacgtgcctgcgtaagccggaccggcg

SEQ ID NO: 315097 - DNA, 30 bp, Artificial Sequence
  Synthetic oligonucleotide
ccgttccgttactacaatgcactaccggcg

SEQ ID NO: 315098 - DNA, 30 bp, Artificial Sequence
  Synthetic oligonucleotide
acctcggacgagtctgttctatatccggcg

SEQ ID NO: 315099 - DNA, 30 bp, Artificial Sequence
  Synthetic oligonucleotide
tacgattggggccttaatctaggtccggcg

SEQ ID NO: 315100 - DNA, 30 bp, Artificial Sequence
  Synthetic oligonucleotide
tatagtcgacggaactgaatatgtccggcg

SEQ ID NO: 315101 - DNA, 30 bp, Artificial Sequence
  Synthetic oligonucleotide
gtcagagggttattgcggggtgtagcggcg

SEQ ID NO: 315102 - DNA, 30 bp, Artificial Sequence
  Synthetic oligonucleotide
ggcaactaattatccccagtcgacgcggcg

SEQ ID NO: 315103 - DNA, 30 bp, Artificial Sequence
  Synthetic oligonucleotide
tacatcgatcatgggagcaggatcgcggcg

SEQ ID NO: 315104 - DNA, 30 bp, Artificial Sequence
  Synthetic oligonucleotide
ggccctcggtgtggaggggcttttgcggcg

SEQ ID NO: 315105 - DNA, 30 bp, Artificial Sequence
  Synthetic oligonucleotide
tggtggggggtagaggggcctacatcggcg

SEQ ID NO: 315106 - DNA, 30 bp, Artificial Sequence
  Synthetic oligonucleotide
ctcataatcatgtcgggaagggactcggcg

SEQ ID NO: 315107 - DNA, 30 bp, Artificial Sequence
  Synthetic oligonucleotide
ttatgggccatagcctttataatgtcggcg

SEQ ID NO: 315108 - DNA, 30 bp, Artificial Sequence
  Synthetic oligonucleotide
tcaaccatggagagagttctccaaagggcg

SEQ ID NO: 315109 - DNA, 30 bp, Artificial Sequence
  Synthetic oligonucleotide
gatgctggcgagaacaccccgtaaagggcg

SEQ ID NO: 315110 - DNA, 30 bp, Artificial Sequence
  Synthetic oligonucleotide
ttcgaatacatgtcgcacttattcagggcg

SEQ ID NO: 315111 - DNA, 30 bp, Artificial Sequence
  Synthetic oligonucleotide
ctctatagggagaaggcgcatggtagggcg

SEQ ID NO: 315112 - DNA, 30 bp, Artificial Sequence
  Synthetic oligonucleotide
aaagttatatgggtttaagcaccacgggcg

SEQ ID NO: 315113 - DNA, 30 bp, Artificial Sequence
  Synthetic oligonucleotide
ttgtaggaaatgtaacggtcctcacgggcg

SEQ ID NO: 315114 - DNA, 30 bp, Artificial Sequence
  Synthetic oligonucleotide
atacccgacttgcgatgcgacagacgggcg

SEQ ID NO: 315115 - DNA, 30 bp, Artificial Sequence
  Synthetic oligonucleotide
aataaacgcgtctgaggctgaatacgggcg

SEQ ID NO: 315116 - DNA, 30 bp, Artificial Sequence
  Synthetic oligonucleotide
ggctggtattacgtccctgctatccgggcg

SEQ ID NO: 315117 - DNA, 30 bp, Artificial Sequence
  Synthetic oligonucleotide
gaatcatcgtcataaactaaacagcgggcg

SEQ ID NO: 315118 - DNA, 30 bp, Artificial Sequence
  Synthetic oligonucleotide
gtcatgttggcggccggagttcacggggcg

SEQ ID NO: 315119 - DNA, 30 bp, Artificial Sequence
  Synthetic oligonucleotide
gtcaccagttgttaatatgcgaccggggcg

SEQ ID NO: 315120 - DNA, 30 bp, Artificial Sequence
  Synthetic oligonucleotide
acttcgcgatggcatccagattccggggcg

SEQ ID NO: 315121 - DNA, 30 bp, Artificial Sequence
  Synthetic oligonucleotide
tcagaccaggcgaggggctcagtcggggcg

SEQ ID NO: 315122 - DNA, 30 bp, Artificial Sequence
  Synthetic oligonucleotide
ggaattgaccctatatgttccgtgggggcg

SEQ ID NO: 315123 - DNA, 30 bp, Artificial Sequence
  Synthetic oligonucleotide
tccatcttcaaggttggcgacatatgggcg

SEQ ID NO: 315124 - DNA, 30 bp, Artificial Sequence
  Synthetic oligonucleotide
acagtcaccgacttcgtaaggatatgggcg

SEQ ID NO: 315125 - DNA, 30 bp, Artificial Sequence
  Synthetic oligonucleotide
cgggtgcgtcactgcggcgcgttgtgggcg

SEQ ID NO: 315126 - DNA, 30 bp, Artificial Sequence
  Synthetic oligonucleotide
catgcaggtctagctattttgtcttgggcg

SEQ ID NO: 315127 - DNA, 30 bp, Artificial Sequence
  Synthetic oligonucleotide
tgctaataaagcgccttgctaaaaatggcg

SEQ ID NO: 315128 - DNA, 30 bp, Artificial Sequence
  Synthetic oligonucleotide
ctttagcccgtccgtattcctcaaatggcg

SEQ ID NO: 315129 - DNA, 30 bp, Artificial Sequence
  Synthetic oligonucleotide
actcactcggtccggaaagtataaatggcg

SEQ ID NO: 315130 - DNA, 30 bp, Artificial Sequence
  Synthetic oligonucleotide
agacagccggatgggagcacagggatggcg

SEQ ID NO: 315131 - DNA, 30 bp, Artificial Sequence
  Synthetic oligonucleotide
taaggcacatcttcaatctagatgatggcg

SEQ ID NO: 315132 - DNA, 30 bp, Artificial Sequence
  Synthetic oligonucleotide
caataagtgggtactagaaaaattatggcg

SEQ ID NO: 315133 - DNA, 30 bp, Artificial Sequence
  Synthetic oligonucleotide
gcacccggaaggcaggcgtttattatggcg

SEQ ID NO: 315134 - DNA, 30 bp, Artificial Sequence
  Synthetic oligonucleotide
agagacagccttgcagggtatgaactggcg

SEQ ID NO: 315135 - DNA, 30 bp, Artificial Sequence
  Synthetic oligonucleotide
ttaatacgacaattatgtagtccactggcg

SEQ ID NO: 315136 - DNA, 30 bp, Artificial Sequence
  Synthetic oligonucleotide
tctatgggtgtcaacagacggctactggcg

SEQ ID NO: 315137 - DNA, 30 bp, Artificial Sequence
  Synthetic oligonucleotide
gtagtataccgaggtctatgattactggcg

SEQ ID NO: 315138 - DNA, 30 bp, Artificial Sequence
  Synthetic oligonucleotide
tcgttaaagctctatggatgcagtctggcg

SEQ ID NO: 315139 - DNA, 30 bp, Artificial Sequence
  Synthetic oligonucleotide
gtgggataacggcccgccacccgcgtggcg

SEQ ID NO: 315140 - DNA, 30 bp, Artificial Sequence
  Synthetic oligonucleotide
accgcatgtctcggcatctcaggcttggcg

SEQ ID NO: 315141 - DNA, 30 bp, Artificial Sequence
  Synthetic oligonucleotide
ggtgttagtcgccggcgatggttgttggcg

SEQ ID NO: 315142 - DNA, 30 bp, Artificial Sequence
  Synthetic oligonucleotide
tcatatcgggtgtgggggctttctttggcg

SEQ ID NO: 315143 - DNA, 30 bp, Artificial Sequence
  Synthetic oligonucleotide
atttgcactactgtacccgcgggaaatgcg

SEQ ID NO: 315144 - DNA, 30 bp, Artificial Sequence
  Synthetic oligonucleotide
atgatgacattgatgcccccattaaatgcg

SEQ ID NO: 315145 - DNA, 30 bp, Artificial Sequence
  Synthetic oligonucleotide
ggccatgaatcaatggagcgatccaatgcg

SEQ ID NO: 315146 - DNA, 30 bp, Artificial Sequence
  Synthetic oligonucleotide
atctgtcgatacagtaatttgttgaatgcg

SEQ ID NO: 315147 - DNA, 30 bp, Artificial Sequence
  Synthetic oligonucleotide
aggcggctacttttgcgacccagtaatgcg

SEQ ID NO: 315148 - DNA, 30 bp, Artificial Sequence
  Synthetic oligonucleotide
gtgagttagtctctaaattctccacatgcg

SEQ ID NO: 315149 - DNA, 30 bp, Artificial Sequence
  Synthetic oligonucleotide
gtcgtactgtgacttcggaagggacatgcg

SEQ ID NO: 315150 - DNA, 30 bp, Artificial Sequence
  Synthetic oligonucleotide
ccacgccgggactcggaatatatacatgcg

SEQ ID NO: 315151 - DNA, 30 bp, Artificial Sequence
  Synthetic oligonucleotide
ttttagtgccaaccaactacgcaccatgcg

SEQ ID NO: 315152 - DNA, 30 bp, Artificial Sequence
  Synthetic oligonucleotide
agttcgagctgtccgttaggtacgcatgcg

SEQ ID NO: 315153 - DNA, 30 bp, Artificial Sequence
  Synthetic oligonucleotide
ggcagaaggaggagcatctcagaagatgcg

SEQ ID NO: 315154 - DNA, 30 bp, Artificial Sequence
  Synthetic oligonucleotide
atcgcgcaccaaatctaggatccagatgcg

SEQ ID NO: 315155 - DNA, 30 bp, Artificial Sequence
  Synthetic oligonucleotide
gttgtagctgatcgggtttctacggatgcg

SEQ ID NO: 315156 - DNA, 30 bp, Artificial Sequence
  Synthetic oligonucleotide
gcatcggtcggggatctgatgaatgatgcg

SEQ ID NO: 315157 - DNA, 30 bp, Artificial Sequence
  Synthetic oligonucleotide
gcttcgctggcatacactgcttctgatgcg

SEQ ID NO: 315158 - DNA, 30 bp, Artificial Sequence
  Synthetic oligonucleotide
aagagcattgcagcaatgtgttcatatgcg

SEQ ID NO: 315159 - DNA, 30 bp, Artificial Sequence
  Synthetic oligonucleotide
cactattctgtctgcttatgctactatgcg

SEQ ID NO: 315160 - DNA, 30 bp, Artificial Sequence
  Synthetic oligonucleotide
actctggatagttcagaggttctgtatgcg

SEQ ID NO: 315161 - DNA, 30 bp, Artificial Sequence
  Synthetic oligonucleotide
acttgttcagtgaacatgtgtagttatgcg

SEQ ID NO: 315162 - DNA, 30 bp, Artificial Sequence
  Synthetic oligonucleotide
gatcacgggaaagggctcgcagaaactgcg

SEQ ID NO: 315163 - DNA, 30 bp, Artificial Sequence
  Synthetic oligonucleotide
atcagcttattagcgtgccggggaactgcg

SEQ ID NO: 315164 - DNA, 30 bp, Artificial Sequence
  Synthetic oligonucleotide
gtatttggatagaagcaaggtataactgcg

SEQ ID NO: 315165 - DNA, 30 bp, Artificial Sequence
  Synthetic oligonucleotide
taggtaggctaacaatctgttttaactgcg

SEQ ID NO: 315166 - DNA, 30 bp, Artificial Sequence
  Synthetic oligonucleotide
gtcggcacacgaacagaacgggagactgcg

SEQ ID NO: 315167 - DNA, 30 bp, Artificial Sequence
  Synthetic oligonucleotide
tcaaatgaactgtggcagcgcgatactgcg

SEQ ID NO: 315168 - DNA, 30 bp, Artificial Sequence
  Synthetic oligonucleotide
aaataatgtaggtaagtgtatcttactgcg

SEQ ID NO: 315169 - DNA, 30 bp, Artificial Sequence
  Synthetic oligonucleotide
actggacaaacaggatttttacaacctgcg

SEQ ID NO: 315170 - DNA, 30 bp, Artificial Sequence
  Synthetic oligonucleotide
gagtcgctcaagaggctgcgactccctgcg

SEQ ID NO: 315171 - DNA, 30 bp, Artificial Sequence
  Synthetic oligonucleotide
cggaccttactcctggtgacgaggcctgcg

SEQ ID NO: 315172 - DNA, 30 bp, Artificial Sequence
  Synthetic oligonucleotide
gccagccgtagacgccgtgttgtgcctgcg

SEQ ID NO: 315173 - DNA, 30 bp, Artificial Sequence
  Synthetic oligonucleotide
cagcccttcaccgggtggctgagagctgcg

SEQ ID NO: 315174 - DNA, 30 bp, Artificial Sequence
  Synthetic oligonucleotide
cataggacacgacggggaaagcacgctgcg

SEQ ID NO: 315175 - DNA, 30 bp, Artificial Sequence
  Synthetic oligonucleotide
tgttagttcagcgggcgaggatacgctgcg

SEQ ID NO: 315176 - DNA, 30 bp, Artificial Sequence
  Synthetic oligonucleotide
tccatgggcctaatgctcagaaaggctgcg

SEQ ID NO: 315177 - DNA, 30 bp, Artificial Sequence
  Synthetic oligonucleotide
atttctttgaactgaatggtgcgtgctgcg

SEQ ID NO: 315178 - DNA, 30 bp, Artificial Sequence
  Synthetic oligonucleotide
gcttgcatgatcccccccgggattgctgcg

SEQ ID NO: 315179 - DNA, 30 bp, Artificial Sequence
  Synthetic oligonucleotide
gtacggggactactgtcgcaggaatctgcg

SEQ ID NO: 315180 - DNA, 30 bp, Artificial Sequence
  Synthetic oligonucleotide
ttcagtcttcctttcaccgacagatctgcg

SEQ ID NO: 315181 - DNA, 30 bp, Artificial Sequence
  Synthetic oligonucleotide
actgcaaaaacgttgatattggtatctgcg

SEQ ID NO: 315182 - DNA, 30 bp, Artificial Sequence
  Synthetic oligonucleotide
gagccgcccagtccggccctctcctctgcg

SEQ ID NO: 315183 - DNA, 30 bp, Artificial Sequence
  Synthetic oligonucleotide
atgggtcctacatgagtaaccttctctgcg

SEQ ID NO: 315184 - DNA, 30 bp, Artificial Sequence
  Synthetic oligonucleotide
gtgtccccattggcgcattactagtctgcg

SEQ ID NO: 315185 - DNA, 30 bp, Artificial Sequence
  Synthetic oligonucleotide
gggtgtttaactgcagagtttgtaagtgcg

SEQ ID NO: 315186 - DNA, 30 bp, Artificial Sequence
  Synthetic oligonucleotide
tgcgcttatacaaggaccacaagcagtgcg

SEQ ID NO: 315187 - DNA, 30 bp, Artificial Sequence
  Synthetic oligonucleotide
tgcgggtacgcccctgacaccctcagtgcg

SEQ ID NO: 315188 - DNA, 30 bp, Artificial Sequence
  Synthetic oligonucleotide
ccccgcgcttttttgatgcgaaatagtgcg

SEQ ID NO: 315189 - DNA, 30 bp, Artificial Sequence
  Synthetic oligonucleotide
atttcgtcaggaaaggggtggcatagtgcg

SEQ ID NO: 315190 - DNA, 30 bp, Artificial Sequence
  Synthetic oligonucleotide
ggcaattgtcaggacccaaggcttagtgcg

SEQ ID NO: 315191 - DNA, 30 bp, Artificial Sequence
  Synthetic oligonucleotide
atctcgtgtatgaacaatactccccgtgcg

SEQ ID NO: 315192 - DNA, 30 bp, Artificial Sequence
  Synthetic oligonucleotide
ggatgcggacggacaccaggactgcgtgcg

SEQ ID NO: 315193 - DNA, 30 bp, Artificial Sequence
  Synthetic oligonucleotide
tttcaaggaagaccagaaagccctcgtgcg

SEQ ID NO: 315194 - DNA, 30 bp, Artificial Sequence
  Synthetic oligonucleotide
aaggaatgcatcatgggaaccaaaggtgcg

SEQ ID NO: 315195 - DNA, 30 bp, Artificial Sequence
  Synthetic oligonucleotide
aatacatgaaaacgtccccgatagggtgcg

SEQ ID NO: 315196 - DNA, 30 bp, Artificial Sequence
  Synthetic oligonucleotide
aacggtcgttaaatctggcatgcgggtgcg

SEQ ID NO: 315197 - DNA, 30 bp, Artificial Sequence
  Synthetic oligonucleotide
agtggtttaggtggccggatctcgggtgcg

SEQ ID NO: 315198 - DNA, 30 bp, Artificial Sequence
  Synthetic oligonucleotide
ttttcagtgcgggcccacctgaggggtgcg

SEQ ID NO: 315199 - DNA, 30 bp, Artificial Sequence
  Synthetic oligonucleotide
gataactcaaaatacccgcctcgatgtgcg

SEQ ID NO: 315200 - DNA, 30 bp, Artificial Sequence
  Synthetic oligonucleotide
cgggctgtggcgatcgagtggtggtgtgcg

SEQ ID NO: 315201 - DNA, 30 bp, Artificial Sequence
  Synthetic oligonucleotide
atagcagccgaggcgcataagatgtgtgcg

SEQ ID NO: 315202 - DNA, 30 bp, Artificial Sequence
  Synthetic oligonucleotide
gactattggtcaaccacacacctgtgtgcg

SEQ ID NO: 315203 - DNA, 30 bp, Artificial Sequence
  Synthetic oligonucleotide
gcctggttatcagttaaactttccattgcg

SEQ ID NO: 315204 - DNA, 30 bp, Artificial Sequence
  Synthetic oligonucleotide
acggcgatgtcagcacaaagctcgattgcg

SEQ ID NO: 315205 - DNA, 30 bp, Artificial Sequence
  Synthetic oligonucleotide
ccggaccggagtagtgcgcaagaacttgcg

SEQ ID NO: 315206 - DNA, 30 bp, Artificial Sequence
  Synthetic oligonucleotide
cgcctcgcatagccacaacgactacttgcg

SEQ ID NO: 315207 - DNA, 30 bp, Artificial Sequence
  Synthetic oligonucleotide
gaactgttagtcagagccctgccccttgcg

SEQ ID NO: 315208 - DNA, 30 bp, Artificial Sequence
  Synthetic oligonucleotide
cttctaacataataaactataagccttgcg

SEQ ID NO: 315209 - DNA, 30 bp, Artificial Sequence
  Synthetic oligonucleotide
taaaagcgttacacaattgatccgcttgcg

SEQ ID NO: 315210 - DNA, 30 bp, Artificial Sequence
  Synthetic oligonucleotide
agtcccaccgttatacgtacatatcttgcg

SEQ ID NO: 315211 - DNA, 30 bp, Artificial Sequence
  Synthetic oligonucleotide
gacggataaatacgggcgtgagacgttgcg

SEQ ID NO: 315212 - DNA, 30 bp, Artificial Sequence
  Synthetic oligonucleotide
gtataggcggatgcttgcggctacgttgcg

SEQ ID NO: 315213 - DNA, 30 bp, Artificial Sequence
  Synthetic oligonucleotide
atttggcgttgataactatatctatttgcg

SEQ ID NO: 315214 - DNA, 30 bp, Artificial Sequence
  Synthetic oligonucleotide
cggaatatgagctcgagttagacgtttgcg

SEQ ID NO: 315215 - DNA, 30 bp, Artificial Sequence
  Synthetic oligonucleotide
gcttaacggcatgtgcgtcgaatttttgcg

SEQ ID NO: 315216 - DNA, 30 bp, Artificial Sequence
  Synthetic oligonucleotide
gcggcattccgctgtgaacgggtaaaatcg

SEQ ID NO: 315217 - DNA, 30 bp, Artificial Sequence
  Synthetic oligonucleotide
gcagtactagaacattctatggtaaaatcg

SEQ ID NO: 315218 - DNA, 30 bp, Artificial Sequence
  Synthetic oligonucleotide
gtaactcgaaagaacgatgtaatcaaatcg

SEQ ID NO: 315219 - DNA, 30 bp, Artificial Sequence
  Synthetic oligonucleotide
tgcgcccatcagtgggccagcgataaatcg

SEQ ID NO: 315220 - DNA, 30 bp, Artificial Sequence
  Synthetic oligonucleotide
cgtaaaaccttagtaccgctgcctaaatcg

SEQ ID NO: 315221 - DNA, 30 bp, Artificial Sequence
  Synthetic oligonucleotide
atcggcgcctttgatagtgaaggtaaatcg

SEQ ID NO: 315222 - DNA, 30 bp, Artificial Sequence
  Synthetic oligonucleotide
gtaagttgaggtttttccaaacaacaatcg

SEQ ID NO: 315223 - DNA, 30 bp, Artificial Sequence
  Synthetic oligonucleotide
cgcggcgctactaattcagattaacaatcg

SEQ ID NO: 315224 - DNA, 30 bp, Artificial Sequence
  Synthetic oligonucleotide
ggatcgctgcgaccctggccaccccaatcg

SEQ ID NO: 315225 - DNA, 30 bp, Artificial Sequence
  Synthetic oligonucleotide
gcgccttctcatgtttagtttgcgcaatcg

SEQ ID NO: 315226 - DNA, 30 bp, Artificial Sequence
  Synthetic oligonucleotide
accgcgatgctcgtcctgaagcatcaatcg

SEQ ID NO: 315227 - DNA, 30 bp, Artificial Sequence
  Synthetic oligonucleotide
gggttgtgggagagggtgtgaggtcaatcg

SEQ ID NO: 315228 - DNA, 30 bp, Artificial Sequence
  Synthetic oligonucleotide
tggaggggatgtggcgtcgttggtcaatcg

SEQ ID NO: 315229 - DNA, 30 bp, Artificial Sequence
  Synthetic oligonucleotide
tcgacaactcaattgatttgagttcaatcg

SEQ ID NO: 315230 - DNA, 29 bp, Artificial Sequence
  Synthetic oligonucleotide
ttatggttcagcggggacgagcggaatcg

SEQ ID NO: 315231 - DNA, 30 bp, Artificial Sequence
  Synthetic oligonucleotide
ttccacatggtacataagaattctgaatcg

SEQ ID NO: 315232 - DNA, 30 bp, Artificial Sequence
  Synthetic oligonucleotide
gaaatgagcatatgtgtattgcgataatcg

SEQ ID NO: 315233 - DNA, 30 bp, Artificial Sequence
  Synthetic oligonucleotide
agtagtcccaccgtcaaccccttataatcg

SEQ ID NO: 315234 - DNA, 30 bp, Artificial Sequence
  Synthetic oligonucleotide
gcaatctagtcaaggcgcacatcctaatcg

SEQ ID NO: 315235 - DNA, 30 bp, Artificial Sequence
  Synthetic oligonucleotide
gtggtctttgtaaatagagatttctaatcg

SEQ ID NO: 315236 - DNA, 30 bp, Artificial Sequence
  Synthetic oligonucleotide
tccggcgttgacggaggcctggggtaatcg

SEQ ID NO: 315237 - DNA, 30 bp, Artificial Sequence
  Synthetic oligonucleotide
cgcgcttacatgccgaggcggtattaatcg

SEQ ID NO: 315238 - DNA, 30 bp, Artificial Sequence
  Synthetic oligonucleotide
tcgatggaacgcctatctctgatttaatcg

SEQ ID NO: 315239 - DNA, 30 bp, Artificial Sequence
  Synthetic oligonucleotide
tttgtatctttctatacgggcaaaacatcg

SEQ ID NO: 315240 - DNA, 30 bp, Artificial Sequence
  Synthetic oligonucleotide
atactgaatgtggctcggatattaacatcg

SEQ ID NO: 315241 - DNA, 30 bp, Artificial Sequence
  Synthetic oligonucleotide
ccttggaatgcgcgttccaaaggcacatcg

SEQ ID NO: 315242 - DNA, 30 bp, Artificial Sequence
  Synthetic oligonucleotide
actcgaatgcagtcaggtgcagcgacatcg

SEQ ID NO: 315243 - DNA, 30 bp, Artificial Sequence
  Synthetic oligonucleotide
tatgattggtcttacgctatacatacatcg

SEQ ID NO: 315244 - DNA, 30 bp, Artificial Sequence
  Synthetic oligonucleotide
attttgctggaaagacagattgatacatcg

SEQ ID NO: 315245 - DNA, 30 bp, Artificial Sequence
  Synthetic oligonucleotide
tattgacttgggcgcggggccttaccatcg

SEQ ID NO: 315246 - DNA, 30 bp, Artificial Sequence
  Synthetic oligonucleotide
taagtagcatagcccgaacgcgggccatcg

SEQ ID NO: 315247 - DNA, 30 bp, Artificial Sequence
  Synthetic oligonucleotide
ccgttccggtttgacactagaattccatcg

SEQ ID NO: 315248 - DNA, 30 bp, Artificial Sequence
  Synthetic oligonucleotide
ccagcaacgcatatggaagagattccatcg

SEQ ID NO: 315249 - DNA, 30 bp, Artificial Sequence
  Synthetic oligonucleotide
aatggtctgcgcgggttctttgagtcatcg

SEQ ID NO: 315250 - DNA, 30 bp, Artificial Sequence
  Synthetic oligonucleotide
gcatggtttagtataggtaccaggtcatcg

SEQ ID NO: 315251 - DNA, 32 bp, Artificial Sequence
  Synthetic oligonucleotide
ttgccattgctccgaaagattatttaagatcg

SEQ ID NO: 315252 - DNA, 30 bp, Artificial Sequence
  Synthetic oligonucleotide
ccggctacgggtgccgcgtggtgcagatcg

SEQ ID NO: 315253 - DNA, 30 bp, Artificial Sequence
  Synthetic oligonucleotide
ttcttagtgtcgttcagcaacgtgagatcg

SEQ ID NO: 315254 - DNA, 30 bp, Artificial Sequence
  Synthetic oligonucleotide
gctaatgcacctctatttacggttagatcg

SEQ ID NO: 315255 - DNA, 30 bp, Artificial Sequence
  Synthetic oligonucleotide
tagcagcgctgaattggaattaaacgatcg

SEQ ID NO: 315256 - DNA, 30 bp, Artificial Sequence
  Synthetic oligonucleotide
atttcgtaatttgaaccaaaatcgcgatcg

SEQ ID NO: 315257 - DNA, 30 bp, Artificial Sequence
  Synthetic oligonucleotide
ctcatacagtcattaggggtcaggcgatcg

SEQ ID NO: 315258 - DNA, 30 bp, Artificial Sequence
  Synthetic oligonucleotide
tggttttagtgatcttatttcactcgatcg

SEQ ID NO: 315259 - DNA, 30 bp, Artificial Sequence
  Synthetic oligonucleotide
ctcggttgacagtgtgctgcaattcgatcg

SEQ ID NO: 315260 - DNA, 30 bp, Artificial Sequence
  Synthetic oligonucleotide
aggagtgataaaagttttgtgattcgatcg

SEQ ID NO: 315261 - DNA, 30 bp, Artificial Sequence
  Synthetic oligonucleotide
atgggtcccgcggcgtggcctattcgatcg

SEQ ID NO: 315262 - DNA, 30 bp, Artificial Sequence
  Synthetic oligonucleotide
atggcatgaaagccggtcgtgtcaggatcg

SEQ ID NO: 315263 - DNA, 30 bp, Artificial Sequence
  Synthetic oligonucleotide
tggcgggagtttagtaaagtcgtaggatcg

SEQ ID NO: 315264 - DNA, 30 bp, Artificial Sequence
  Synthetic oligonucleotide
ttctcataaacatgttattcagacggatcg

SEQ ID NO: 315265 - DNA, 30 bp, Artificial Sequence
  Synthetic oligonucleotide
ctaagacacagatagtgccgtttcggatcg

SEQ ID NO: 315266 - DNA, 30 bp, Artificial Sequence
  Synthetic oligonucleotide
cacgtccggtttcggagacgcacgggatcg

SEQ ID NO: 315267 - DNA, 30 bp, Artificial Sequence
  Synthetic oligonucleotide
aaacattttgcgtatcgcttcaatggatcg

SEQ ID NO: 315268 - DNA, 30 bp, Artificial Sequence
  Synthetic oligonucleotide
ctaggaaaatcaatatggccacgtggatcg

SEQ ID NO: 315269 - DNA, 30 bp, Artificial Sequence
  Synthetic oligonucleotide
atgtgctaaactttatatcactaatgatcg

SEQ ID NO: 315270 - DNA, 30 bp, Artificial Sequence
  Synthetic oligonucleotide
tggagcgcgccttcaataggtggatgatcg

SEQ ID NO: 315271 - DNA, 30 bp, Artificial Sequence
  Synthetic oligonucleotide
agtataatcagtgtcgcatagatatgatcg

SEQ ID NO: 315272 - DNA, 30 bp, Artificial Sequence
  Synthetic oligonucleotide
gacagacgcgcttcatgggctatgtgatcg

SEQ ID NO: 315273 - DNA, 30 bp, Artificial Sequence
  Synthetic oligonucleotide
gtggcgagggcgcagggggcgcaaatatcg

SEQ ID NO: 315274 - DNA, 30 bp, Artificial Sequence
  Synthetic oligonucleotide
ctgcctttcggagtaattagttcaatatcg

SEQ ID NO: 315275 - DNA, 30 bp, Artificial Sequence
  Synthetic oligonucleotide
ccctgctacaatcaagcccacgccatatcg

SEQ ID NO: 315276 - DNA, 30 bp, Artificial Sequence
  Synthetic oligonucleotide
cgtccgcatcgtagctgtcaccgcatatcg

SEQ ID NO: 315277 - DNA, 30 bp, Artificial Sequence
  Synthetic oligonucleotide
gggctttttagggatttggaacagatatcg

SEQ ID NO: 315278 - DNA, 30 bp, Artificial Sequence
  Synthetic oligonucleotide
tggggtatactcatggagatttggatatcg

SEQ ID NO: 315279 - DNA, 30 bp, Artificial Sequence
  Synthetic oligonucleotide
ggcatccagcatggacacgacatgatatcg

SEQ ID NO: 315280 - DNA, 30 bp, Artificial Sequence
  Synthetic oligonucleotide
cgtgcagcggatgtacttaagacactatcg

SEQ ID NO: 315281 - DNA, 30 bp, Artificial Sequence
  Synthetic oligonucleotide
taatgttcagcgaacttacagcgcctatcg

SEQ ID NO: 315282 - DNA, 30 bp, Artificial Sequence
  Synthetic oligonucleotide
acgaaggggttttagctggtgatcctatcg

SEQ ID NO: 315283 - DNA, 30 bp, Artificial Sequence
  Synthetic oligonucleotide
ccctggtgtacgcggtagatccagctatcg

SEQ ID NO: 315284 - DNA, 30 bp, Artificial Sequence
  Synthetic oligonucleotide
atcataaattgccatgagggatggctatcg

SEQ ID NO: 315285 - DNA, 30 bp, Artificial Sequence
  Synthetic oligonucleotide
gacgggggtaagttgacctgctttctatcg

SEQ ID NO: 315286 - DNA, 30 bp, Artificial Sequence
  Synthetic oligonucleotide
tgaatcttatctgtcgggcaatacgtatcg

SEQ ID NO: 315287 - DNA, 30 bp, Artificial Sequence
  Synthetic oligonucleotide
atcattattatttgtgttatgaccgtatcg

SEQ ID NO: 315288 - DNA, 30 bp, Artificial Sequence
  Synthetic oligonucleotide
aacaaaatcactctctctttgacggtatcg

SEQ ID NO: 315289 - DNA, 30 bp, Artificial Sequence
  Synthetic oligonucleotide
tatcacatctggtggatcccccgtgtatcg

SEQ ID NO: 315290 - DNA, 30 bp, Artificial Sequence
  Synthetic oligonucleotide
gacatagtaagattctggtctacattatcg

SEQ ID NO: 315291 - DNA, 30 bp, Artificial Sequence
  Synthetic oligonucleotide
gtgtgtgctggcggtatctcgtacttatcg

SEQ ID NO: 315292 - DNA, 30 bp, Artificial Sequence
  Synthetic oligonucleotide
agaattggtatcagattcaatccgttatcg

SEQ ID NO: 315293 - DNA, 30 bp, Artificial Sequence
  Synthetic oligonucleotide
aaggcataattttcagtaaaaatgttatcg

SEQ ID NO: 315294 - DNA, 30 bp, Artificial Sequence
  Synthetic oligonucleotide
aaggttatgcccgggcgttaagctttatcg

SEQ ID NO: 315295 - DNA, 30 bp, Artificial Sequence
  Synthetic oligonucleotide
gggattcaccgtcaggtatcttttttatcg

SEQ ID NO: 315296 - DNA, 30 bp, Artificial Sequence
  Synthetic oligonucleotide
gcaatgacacagattaattctgtaaactcg

SEQ ID NO: 315297 - DNA, 30 bp, Artificial Sequence
  Synthetic oligonucleotide
catcatctatggttttgagatttaaactcg

SEQ ID NO: 315298 - DNA, 30 bp, Artificial Sequence
  Synthetic oligonucleotide
aatgcggtatcgacatatatttacaactcg

SEQ ID NO: 315299 - DNA, 30 bp, Artificial Sequence
  Synthetic oligonucleotide
cgcggcgggataacgaaccgtgagaactcg

SEQ ID NO: 315300 - DNA, 30 bp, Artificial Sequence
  Synthetic oligonucleotide
cagtgacatgatttggggaaattgaactcg

SEQ ID NO: 315301 - DNA, 30 bp, Artificial Sequence
  Synthetic oligonucleotide
catttatgtttcatgtaagtggctaactcg

SEQ ID NO: 315302 - DNA, 30 bp, Artificial Sequence
  Synthetic oligonucleotide
gagctagctaattctcggggaatacactcg

SEQ ID NO: 315303 - DNA, 30 bp, Artificial Sequence
  Synthetic oligonucleotide
agacgcaattcggtataattctaagactcg

SEQ ID NO: 315304 - DNA, 30 bp, Artificial Sequence
  Synthetic oligonucleotide
gcgcctacccaccgtatttatcgcgactcg

SEQ ID NO: 315305 - DNA, 30 bp, Artificial Sequence
  Synthetic oligonucleotide
gcaatagaccgggcgtgatgaaaggactcg

SEQ ID NO: 315306 - DNA, 30 bp, Artificial Sequence
  Synthetic oligonucleotide
cgttacttcaatacgcacccataggactcg

SEQ ID NO: 315307 - DNA, 30 bp, Artificial Sequence
  Synthetic oligonucleotide
cgtaggccttaaaacattcgacgggactcg

SEQ ID NO: 315308 - DNA, 30 bp, Artificial Sequence
  Synthetic oligonucleotide
gacctcacaggtgactccccttctgactcg

SEQ ID NO: 315309 - DNA, 30 bp, Artificial Sequence
  Synthetic oligonucleotide
ctgtcacgcggagcggacaatggatactcg

SEQ ID NO: 315310 - DNA, 30 bp, Artificial Sequence
  Synthetic oligonucleotide
gcacaactatggtccgcaaggttctactcg

SEQ ID NO: 315311 - DNA, 30 bp, Artificial Sequence
  Synthetic oligonucleotide
atgttagtacagatgcgtctaacgtactcg

SEQ ID NO: 315312 - DNA, 30 bp, Artificial Sequence
  Synthetic oligonucleotide
ttcttgacggatcgtatcggacggtactcg

SEQ ID NO: 315313 - DNA, 30 bp, Artificial Sequence
  Synthetic oligonucleotide
cttcagacgggatccgacccttggacctcg

SEQ ID NO: 315314 - DNA, 30 bp, Artificial Sequence
  Synthetic oligonucleotide
tttcgaattaatgctgttgagactacctcg

SEQ ID NO: 315315 - DNA, 30 bp, Artificial Sequence
  Synthetic oligonucleotide
atctcgcccaccagagcacagggcgcctcg

SEQ ID NO: 315316 - DNA, 30 bp, Artificial Sequence
  Synthetic oligonucleotide
gtatacacttcgtgtcccttggtcgcctcg

SEQ ID NO: 315317 - DNA, 30 bp, Artificial Sequence
  Synthetic oligonucleotide
ggaacagcttgtattaccggattggcctcg

SEQ ID NO: 315318 - DNA, 30 bp, Artificial Sequence
  Synthetic oligonucleotide
acaaagtgacggatgagttcatactcctcg

SEQ ID NO: 315319 - DNA, 30 bp, Artificial Sequence
  Synthetic oligonucleotide
gccggttcgacgttctctaacgggtcctcg

SEQ ID NO: 315320 - DNA, 30 bp, Artificial Sequence
  Synthetic oligonucleotide
tatatcgggctaggacgacacatgtcctcg

SEQ ID NO: 315321 - DNA, 30 bp, Artificial Sequence
  Synthetic oligonucleotide
gtaaacgtgtccgtgctcaaatgaagctcg

SEQ ID NO: 315322 - DNA, 30 bp, Artificial Sequence
  Synthetic oligonucleotide
aggctcgaggctaaccacatgacgagctcg

SEQ ID NO: 315323 - DNA, 30 bp, Artificial Sequence
  Synthetic oligonucleotide
gtccattaagaaacgcttgagctgagctcg

SEQ ID NO: 315324 - DNA, 30 bp, Artificial Sequence
  Synthetic oligonucleotide
gcctgctattgggttatgccagtgcgctcg

SEQ ID NO: 315325 - DNA, 30 bp, Artificial Sequence
  Synthetic oligonucleotide
agcattcttctcgtggctctacccggctcg

SEQ ID NO: 315326 - DNA, 30 bp, Artificial Sequence
  Synthetic oligonucleotide
ttgtgatactctaagtaatatccgggctcg

SEQ ID NO: 315327 - DNA, 30 bp, Artificial Sequence
  Synthetic oligonucleotide
tgtgtatagtgaatgcgacgtgctggctcg

SEQ ID NO: 315328 - DNA, 30 bp, Artificial Sequence
  Synthetic oligonucleotide
catccgccatcagacgaaaaccactgctcg

SEQ ID NO: 315329 - DNA, 30 bp, Artificial Sequence
  Synthetic oligonucleotide
cacgagagaatctggtggcgattctgctcg

SEQ ID NO: 315330 - DNA, 30 bp, Artificial Sequence
  Synthetic oligonucleotide
aatggccacacgataacaattaagtgctcg

SEQ ID NO: 315331 - DNA, 30 bp, Artificial Sequence
  Synthetic oligonucleotide
acccgtacaagtattcacctagcgtgctcg

SEQ ID NO: 315332 - DNA, 30 bp, Artificial Sequence
  Synthetic oligonucleotide
catgattcgggtcgcaggactttgtgctcg

SEQ ID NO: 315333 - DNA, 30 bp, Artificial Sequence
  Synthetic oligonucleotide
caatgatttgtactaacaactcccatctcg

SEQ ID NO: 315334 - DNA, 30 bp, Artificial Sequence
  Synthetic oligonucleotide
cattttaagatacttagcatcgccatctcg

SEQ ID NO: 315335 - DNA, 30 bp, Artificial Sequence
  Synthetic oligonucleotide
gcgtgtgcagatcggccatcgtatatctcg

SEQ ID NO: 315336 - DNA, 30 bp, Artificial Sequence
  Synthetic oligonucleotide
tacagtaggtgttctgaggcttatatctcg

SEQ ID NO: 315337 - DNA, 30 bp, Artificial Sequence
  Synthetic oligonucleotide
ccgttacaaagcccaacaccccgactctcg

SEQ ID NO: 315338 - DNA, 30 bp, Artificial Sequence
  Synthetic oligonucleotide
agcacctatagatttatcagatacctctcg

SEQ ID NO: 315339 - DNA, 30 bp, Artificial Sequence
  Synthetic oligonucleotide
taaatagtgtgaagccaatagtcgctctcg

SEQ ID NO: 315340 - DNA, 30 bp, Artificial Sequence
  Synthetic oligonucleotide
ggattaacggcgtttgtaaagtaagtctcg

SEQ ID NO: 315341 - DNA, 30 bp, Artificial Sequence
  Synthetic oligonucleotide
agcattctcctagcacgacaaggagtctcg

SEQ ID NO: 315342 - DNA, 30 bp, Artificial Sequence
  Synthetic oligonucleotide
tgacacgcttcaatttctcagcaggtctcg

SEQ ID NO: 315343 - DNA, 30 bp, Artificial Sequence
  Synthetic oligonucleotide
gagtttattagccgtcatacccgattctcg

SEQ ID NO: 315344 - DNA, 30 bp, Artificial Sequence
  Synthetic oligonucleotide
gacatatacgactaaacctcattcttctcg

SEQ ID NO: 315345 - DNA, 30 bp, Artificial Sequence
  Synthetic oligonucleotide
agtcaactaacggccgtaatcgagttctcg

SEQ ID NO: 315346 - DNA, 30 bp, Artificial Sequence
  Synthetic oligonucleotide
ctacacaataaatgtatacggcctttctcg

SEQ ID NO: 315347 - DNA, 30 bp, Artificial Sequence
  Synthetic oligonucleotide
ctaatatcgcatgcgtcgaggtaaaagtcg

SEQ ID NO: 315348 - DNA, 30 bp, Artificial Sequence
  Synthetic oligonucleotide
tgcacttgcttttcgaatgccttaaagtcg

SEQ ID NO: 315349 - DNA, 30 bp, Artificial Sequence
  Synthetic oligonucleotide
ttaaggaaaagcgacctatcgcacaagtcg

SEQ ID NO: 315350 - DNA, 30 bp, Artificial Sequence
  Synthetic oligonucleotide
tgtgtgtcgtcagcacaccactgtaagtcg

SEQ ID NO: 315351 - DNA, 30 bp, Artificial Sequence
  Synthetic oligonucleotide
acatatattatgcaacgcaatgaacagtcg

SEQ ID NO: 315352 - DNA, 30 bp, Artificial Sequence
  Synthetic oligonucleotide
tatcgccatcctaatgtagggtgccagtcg

SEQ ID NO: 315353 - DNA, 30 bp, Artificial Sequence
  Synthetic oligonucleotide
agccatcgtttcatagttccaatgcagtcg

SEQ ID NO: 315354 - DNA, 30 bp, Artificial Sequence
  Synthetic oligonucleotide
agagatttgtttccgaactctccagagtcg

SEQ ID NO: 315355 - DNA, 30 bp, Artificial Sequence
  Synthetic oligonucleotide
ttgtcatggacgtcaagacgcatcgagtcg

SEQ ID NO: 315356 - DNA, 30 bp, Artificial Sequence
  Synthetic oligonucleotide
gcttacgtctcctacgggcgttctgagtcg

SEQ ID NO: 315357 - DNA, 30 bp, Artificial Sequence
  Synthetic oligonucleotide
caacttaccgcgcagcggattacatagtcg

SEQ ID NO: 315358 - DNA, 30 bp, Artificial Sequence
  Synthetic oligonucleotide
ttgggatatagcgttcgatgcgtatagtcg

SEQ ID NO: 315359 - DNA, 30 bp, Artificial Sequence
  Synthetic oligonucleotide
caaatatgcgtggaatggcagaactagtcg

SEQ ID NO: 315360 - DNA, 30 bp, Artificial Sequence
  Synthetic oligonucleotide
ctcatatggggtccctacgcgggctagtcg

SEQ ID NO: 315361 - DNA, 30 bp, Artificial Sequence
  Synthetic oligonucleotide
gaattgctccgtcagattaaacggtagtcg

SEQ ID NO: 315362 - DNA, 30 bp, Artificial Sequence
  Synthetic oligonucleotide
tatttatggcaactggacatcctgtagtcg

SEQ ID NO: 315363 - DNA, 30 bp, Artificial Sequence
  Synthetic oligonucleotide
cgtaggggagactctcggctgctgtagtcg

SEQ ID NO: 315364 - DNA, 30 bp, Artificial Sequence
  Synthetic oligonucleotide
aggaactgaagcgatagcttttattagtcg

SEQ ID NO: 315365 - DNA, 30 bp, Artificial Sequence
  Synthetic oligonucleotide
tgttcaatcctcttctgcatgtgaacgtcg

SEQ ID NO: 315366 - DNA, 30 bp, Artificial Sequence
  Synthetic oligonucleotide
gaatggcgcgttagtggaagtgccacgtcg

SEQ ID NO: 315367 - DNA, 30 bp, Artificial Sequence
  Synthetic oligonucleotide
gcagcatccattgggctctacctcacgtcg

SEQ ID NO: 315368 - DNA, 30 bp, Artificial Sequence
  Synthetic oligonucleotide
aatggatcgatagagagtaatctcacgtcg

SEQ ID NO: 315369 - DNA, 30 bp, Artificial Sequence
  Synthetic oligonucleotide
gatctgcggacaagggttttttggacgtcg

SEQ ID NO: 315370 - DNA, 30 bp, Artificial Sequence
  Synthetic oligonucleotide
gtaggctaagaagaactactctgtacgtcg

SEQ ID NO: 315371 - DNA, 30 bp, Artificial Sequence
  Synthetic oligonucleotide
tagatgtaaaagccatcgtttattacgtcg

SEQ ID NO: 315372 - DNA, 30 bp, Artificial Sequence
  Synthetic oligonucleotide
agccgacgtcaacagtaacgagacccgtcg

SEQ ID NO: 315373 - DNA, 30 bp, Artificial Sequence
  Synthetic oligonucleotide
cacatttattagaccggggtgggcccgtcg

SEQ ID NO: 315374 - DNA, 30 bp, Artificial Sequence
  Synthetic oligonucleotide
ctttgccgggacccaccgcttgtgccgtcg

SEQ ID NO: 315375 - DNA, 30 bp, Artificial Sequence
  Synthetic oligonucleotide
gaagagccgtatggtatatacgctccgtcg

SEQ ID NO: 315376 - DNA, 30 bp, Artificial Sequence
  Synthetic oligonucleotide
ctcgtactcttcgtccgtcccccagcgtcg

SEQ ID NO: 315377 - DNA, 29 bp, Artificial Sequence
  Synthetic oligonucleotide
tacagcgtgcctccaccgggacggcgtcg

SEQ ID NO: 315378 - DNA, 30 bp, Artificial Sequence
  Synthetic oligonucleotide
ccgcgacaacacaggtggcaatgggcgtcg

SEQ ID NO: 315379 - DNA, 30 bp, Artificial Sequence
  Synthetic oligonucleotide
agacctggcagcagcgcgaaactggcgtcg

SEQ ID NO: 315380 - DNA, 30 bp, Artificial Sequence
  Synthetic oligonucleotide
gaaccatgactatgattacccctggcgtcg

SEQ ID NO: 315381 - DNA, 30 bp, Artificial Sequence
  Synthetic oligonucleotide
cccaatttgacacccacttaaaatgcgtcg

SEQ ID NO: 315382 - DNA, 30 bp, Artificial Sequence
  Synthetic oligonucleotide
gacctgtgtctggtacaccagtctgcgtcg

SEQ ID NO: 315383 - DNA, 30 bp, Artificial Sequence
  Synthetic oligonucleotide
aaattatggtgaactgtcaacaaatcgtcg

SEQ ID NO: 315384 - DNA, 30 bp, Artificial Sequence
  Synthetic oligonucleotide
ccttgtgcaatctccctattgcaatcgtcg

SEQ ID NO: 315385 - DNA, 30 bp, Artificial Sequence
  Synthetic oligonucleotide
gtaagcatttgtaatttaagtctctcgtcg

SEQ ID NO: 315386 - DNA, 30 bp, Artificial Sequence
  Synthetic oligonucleotide
tttgtaccgatatcacaactccagtcgtcg

SEQ ID NO: 315387 - DNA, 30 bp, Artificial Sequence
  Synthetic oligonucleotide
gacggcagcttagaggataaacgttcgtcg

SEQ ID NO: 315388 - DNA, 31 bp, Artificial Sequence
  Synthetic oligonucleotide
ttaacaatctaggggtggcttcccaaggtcg

SEQ ID NO: 315389 - DNA, 30 bp, Artificial Sequence
  Synthetic oligonucleotide
tatttggcagcttttatgagtgggaggtcg

SEQ ID NO: 315390 - DNA, 30 bp, Artificial Sequence
  Synthetic oligonucleotide
gatccagttaggcgcgtgccagctaggtcg

SEQ ID NO: 315391 - DNA, 30 bp, Artificial Sequence
  Synthetic oligonucleotide
ttatgtgtggtttagactgccggacggtcg

SEQ ID NO: 315392 - DNA, 30 bp, Artificial Sequence
  Synthetic oligonucleotide
attaatgctcatatacgtgttaaccggtcg

SEQ ID NO: 315393 - DNA, 30 bp, Artificial Sequence
  Synthetic oligonucleotide
gatgacagtaatcccttctgctcccggtcg

SEQ ID NO: 315394 - DNA, 30 bp, Artificial Sequence
  Synthetic oligonucleotide
gcaccaggcacctaccgataggatcggtcg

SEQ ID NO: 315395 - DNA, 30 bp, Artificial Sequence
  Synthetic oligonucleotide
catgtcagggatggcatgtcataagggtcg

SEQ ID NO: 315396 - DNA, 30 bp, Artificial Sequence
  Synthetic oligonucleotide
tagggtcattagaaagtcttctccgggtcg

SEQ ID NO: 315397 - DNA, 30 bp, Artificial Sequence
  Synthetic oligonucleotide
attgtggccggcgctatagctagcgggtcg

SEQ ID NO: 315398 - DNA, 30 bp, Artificial Sequence
  Synthetic oligonucleotide
tgacgttttttgcgtgcgggataggggtcg

SEQ ID NO: 315399 - DNA, 30 bp, Artificial Sequence
  Synthetic oligonucleotide
tatttcgttacccggggtctgatggggtcg

SEQ ID NO: 315400 - DNA, 30 bp, Artificial Sequence
  Synthetic oligonucleotide
acaaatctcggttcagatgtacgtgggtcg

SEQ ID NO: 315401 - DNA, 30 bp, Artificial Sequence
  Synthetic oligonucleotide
tcaattatgtgtccagcagctggtgggtcg

SEQ ID NO: 315402 - DNA, 30 bp, Artificial Sequence
  Synthetic oligonucleotide
tccgcaccggcaactcatttcattgggtcg

SEQ ID NO: 315403 - DNA, 30 bp, Artificial Sequence
  Synthetic oligonucleotide
gcgaaagcggtttactcggcttgatggtcg

SEQ ID NO: 315404 - DNA, 30 bp, Artificial Sequence
  Synthetic oligonucleotide
cacccgggctggtttgaaggggggtggtcg

SEQ ID NO: 315405 - DNA, 30 bp, Artificial Sequence
  Synthetic oligonucleotide
cattgcagccgtagctttagaggttggtcg

SEQ ID NO: 315406 - DNA, 30 bp, Artificial Sequence
  Synthetic oligonucleotide
tcgagaattacccagggcagcttaatgtcg

SEQ ID NO: 315407 - DNA, 30 bp, Artificial Sequence
  Synthetic oligonucleotide
gagcttcgaaagcatcctcgtctcatgtcg

SEQ ID NO: 315408 - DNA, 30 bp, Artificial Sequence
  Synthetic oligonucleotide
cattagaaaggccgccagctgaatatgtcg

SEQ ID NO: 315409 - DNA, 30 bp, Artificial Sequence
  Synthetic oligonucleotide
ccagaatgttcgtatttttgccatatgtcg

SEQ ID NO: 315410 - DNA, 30 bp, Artificial Sequence
  Synthetic oligonucleotide
tacatcttgaactagtcagagtatatgtcg

SEQ ID NO: 315411 - DNA, 30 bp, Artificial Sequence
  Synthetic oligonucleotide
ctttacaaaaaattcgtgtcatctatgtcg

SEQ ID NO: 315412 - DNA, 28 bp, Artificial Sequence
  Synthetic oligonucleotide
aacttgtaatggtggcactagtatgtcg

SEQ ID NO: 315413 - DNA, 30 bp, Artificial Sequence
  Synthetic oligonucleotide
tagtgcgctccgcgcgtagcaccactgtcg

SEQ ID NO: 315414 - DNA, 30 bp, Artificial Sequence
  Synthetic oligonucleotide
ttgcgccgattatagtgcatccgcctgtcg

SEQ ID NO: 315415 - DNA, 30 bp, Artificial Sequence
  Synthetic oligonucleotide
gaaacaaggccgtactcatgtctggtgtcg

SEQ ID NO: 315416 - DNA, 30 bp, Artificial Sequence
  Synthetic oligonucleotide
ttcagtcgcccttacagttacttggtgtcg

SEQ ID NO: 315417 - DNA, 30 bp, Artificial Sequence
  Synthetic oligonucleotide
tggccagtttctcagctaaccttggtgtcg

SEQ ID NO: 315418 - DNA, 30 bp, Artificial Sequence
  Synthetic oligonucleotide
ataggatcaatcactccgcgcaacttgtcg

SEQ ID NO: 315419 - DNA, 30 bp, Artificial Sequence
  Synthetic oligonucleotide
gaaatcaggagcgaagtgatccggttgtcg

SEQ ID NO: 315420 - DNA, 30 bp, Artificial Sequence
  Synthetic oligonucleotide
ccgtcagcccggggtaagtatctgttgtcg

SEQ ID NO: 315421 - DNA, 30 bp, Artificial Sequence
  Synthetic oligonucleotide
gttatcagagacccgtatcgacatttgtcg

SEQ ID NO: 315422 - DNA, 30 bp, Artificial Sequence
  Synthetic oligonucleotide
gggcaatctgatgagactaaaactttgtcg

SEQ ID NO: 315423 - DNA, 30 bp, Artificial Sequence
  Synthetic oligonucleotide
agtgatcgtcggacttctggttctttgtcg

SEQ ID NO: 315424 - DNA, 30 bp, Artificial Sequence
  Synthetic oligonucleotide
taggagggtgaggcggtagtaggtttgtcg

SEQ ID NO: 315425 - DNA, 30 bp, Artificial Sequence
  Synthetic oligonucleotide
aggcgtttacgttcgcccgagggtttgtcg

SEQ ID NO: 315426 - DNA, 30 bp, Artificial Sequence
  Synthetic oligonucleotide
agcacttctactaatagagatcaaaattcg

SEQ ID NO: 315427 - DNA, 30 bp, Artificial Sequence
  Synthetic oligonucleotide
cttatctccggcgaccaagtttgaaattcg

SEQ ID NO: 315428 - DNA, 30 bp, Artificial Sequence
  Synthetic oligonucleotide
aaagtgagctgagctacctgttagaattcg

SEQ ID NO: 315429 - DNA, 30 bp, Artificial Sequence
  Synthetic oligonucleotide
acctgttaaatgattcggtatcctaattcg

SEQ ID NO: 315430 - DNA, 30 bp, Artificial Sequence
  Synthetic oligonucleotide
ctgaatatggagtccaagacaggtaattcg

SEQ ID NO: 315431 - DNA, 30 bp, Artificial Sequence
  Synthetic oligonucleotide
atccaacgcgcccgcgctaaacttaattcg

SEQ ID NO: 315432 - DNA, 30 bp, Artificial Sequence
  Synthetic oligonucleotide
attcatggaaaggttaccttctaacattcg

SEQ ID NO: 315433 - DNA, 30 bp, Artificial Sequence
  Synthetic oligonucleotide
attaggggacttgatttcaagatacattcg

SEQ ID NO: 315434 - DNA, 30 bp, Artificial Sequence
  Synthetic oligonucleotide
gctcatctgctccgagatatcaaccattcg

SEQ ID NO: 315435 - DNA, 30 bp, Artificial Sequence
  Synthetic oligonucleotide
ttggacaagtgtgaaaccgagggccattcg

SEQ ID NO: 315436 - DNA, 30 bp, Artificial Sequence
  Synthetic oligonucleotide
cgtatgtgcgtccgacagtccctgcattcg

SEQ ID NO: 315437 - DNA, 31 bp, Artificial Sequence
  Synthetic oligonucleotide
cttaagacttacccctggacaggttcattcg

SEQ ID NO: 315438 - DNA, 30 bp, Artificial Sequence
  Synthetic oligonucleotide
gttagctatgttaacaagtcatgagattcg

SEQ ID NO: 315439 - DNA, 30 bp, Artificial Sequence
  Synthetic oligonucleotide
tccaagtgggaggtaacggatgaggattcg

SEQ ID NO: 315440 - DNA, 30 bp, Artificial Sequence
  Synthetic oligonucleotide
gttagatcccacagattgtgaactgattcg

SEQ ID NO: 315441 - DNA, 30 bp, Artificial Sequence
  Synthetic oligonucleotide
gttgacgcacaggttaatgccaaatattcg

SEQ ID NO: 315442 - DNA, 30 bp, Artificial Sequence
  Synthetic oligonucleotide
acataatgctgggacaagtcaggctattcg

SEQ ID NO: 315443 - DNA, 30 bp, Artificial Sequence
  Synthetic oligonucleotide
agtttgtagtgttagtgctctaattattcg

SEQ ID NO: 315444 - DNA, 30 bp, Artificial Sequence
  Synthetic oligonucleotide
gctatagagtatgttagaacttattattcg

SEQ ID NO: 315445 - DNA, 30 bp, Artificial Sequence
  Synthetic oligonucleotide
ctcttacctcggaccctgcgagcaacttcg

SEQ ID NO: 315446 - DNA, 30 bp, Artificial Sequence
  Synthetic oligonucleotide
cgcgcgaactttagtgccacatacacttcg

SEQ ID NO: 315447 - DNA, 30 bp, Artificial Sequence
  Synthetic oligonucleotide
ctcttaaatgcgtcacacgtttgcacttcg

SEQ ID NO: 315448 - DNA, 30 bp, Artificial Sequence
  Synthetic oligonucleotide
aagctctggaataacgagcacctcacttcg

SEQ ID NO: 315449 - DNA, 30 bp, Artificial Sequence
  Synthetic oligonucleotide
aggctttagtgcttgtccttatatacttcg

SEQ ID NO: 315450 - DNA, 30 bp, Artificial Sequence
  Synthetic oligonucleotide
tgaggagtacgaaccaacatcctaccttcg

SEQ ID NO: 315451 - DNA, 30 bp, Artificial Sequence
  Synthetic oligonucleotide
gtgaggccccgggaccatattcagccttcg

SEQ ID NO: 315452 - DNA, 30 bp, Artificial Sequence
  Synthetic oligonucleotide
caggggggctcttgccagcattccgcttcg

SEQ ID NO: 315453 - DNA, 30 bp, Artificial Sequence
  Synthetic oligonucleotide
tcgtcggcacaagtccacttctgcgcttcg

SEQ ID NO: 315454 - DNA, 30 bp, Artificial Sequence
  Synthetic oligonucleotide
actactggaactttggtaatactcgcttcg

SEQ ID NO: 315455 - DNA, 30 bp, Artificial Sequence
  Synthetic oligonucleotide
attgatgcaattatcaggaggtgtgcttcg

SEQ ID NO: 315456 - DNA, 30 bp, Artificial Sequence
  Synthetic oligonucleotide
tccgttaataatagctcggaaattgcttcg

SEQ ID NO: 315457 - DNA, 30 bp, Artificial Sequence
  Synthetic oligonucleotide
atctgtgtgcttccaaacatcattgcttcg

SEQ ID NO: 315458 - DNA, 30 bp, Artificial Sequence
  Synthetic oligonucleotide
ttcaatgaaatcaagggcaagccctcttcg

SEQ ID NO: 315459 - DNA, 30 bp, Artificial Sequence
  Synthetic oligonucleotide
actattttcataccaaaggtaagctcttcg

SEQ ID NO: 315460 - DNA, 30 bp, Artificial Sequence
  Synthetic oligonucleotide
gagcgatctggctgggtctgggcgtcttcg

SEQ ID NO: 315461 - DNA, 30 bp, Artificial Sequence
  Synthetic oligonucleotide
tacattaatcaatggctttgtgggtcttcg

SEQ ID NO: 315462 - DNA, 30 bp, Artificial Sequence
  Synthetic oligonucleotide
tgatggtagagtgatatggctttaagttcg

SEQ ID NO: 315463 - DNA, 30 bp, Artificial Sequence
  Synthetic oligonucleotide
aatgatgctgatgatatgcaaaagagttcg

SEQ ID NO: 315464 - DNA, 30 bp, Artificial Sequence
  Synthetic oligonucleotide
tttagatcagcagcatttgttaggagttcg

SEQ ID NO: 315465 - DNA, 30 bp, Artificial Sequence
  Synthetic oligonucleotide
ttgcatacgctcagccccagggggagttcg

SEQ ID NO: 315466 - DNA, 30 bp, Artificial Sequence
  Synthetic oligonucleotide
cacggccctgggattacgccggatagttcg

SEQ ID NO: 315467 - DNA, 30 bp, Artificial Sequence
  Synthetic oligonucleotide
atatcggcaattccaacgggtcgtcgttcg

SEQ ID NO: 315468 - DNA, 30 bp, Artificial Sequence
  Synthetic oligonucleotide
tctggttaatacagtgtgggtaaaggttcg

SEQ ID NO: 315469 - DNA, 30 bp, Artificial Sequence
  Synthetic oligonucleotide
ggagaagctaaatcatatttttgaggttcg

SEQ ID NO: 315470 - DNA, 30 bp, Artificial Sequence
  Synthetic oligonucleotide
gaaggctaagcgcaggcccggggcggttcg

SEQ ID NO: 315471 - DNA, 30 bp, Artificial Sequence
  Synthetic oligonucleotide
aaagcaacagaacaaaagagtcagggttcg

SEQ ID NO: 315472 - DNA, 30 bp, Artificial Sequence
  Synthetic oligonucleotide
ggcggagtttaactcacgcgaactggttcg

SEQ ID NO: 315473 - DNA, 30 bp, Artificial Sequence
  Synthetic oligonucleotide
taaaatatcggcgagacgacataatgttcg

SEQ ID NO: 315474 - DNA, 30 bp, Artificial Sequence
  Synthetic oligonucleotide
cacgcataaccggctttgcggagttgttcg

SEQ ID NO: 315475 - DNA, 30 bp, Artificial Sequence
  Synthetic oligonucleotide
acttgcgtcggccaccagcctataatttcg

SEQ ID NO: 315476 - DNA, 30 bp, Artificial Sequence
  Synthetic oligonucleotide
gttggagagcggtcgactgatcgcatttcg

SEQ ID NO: 315477 - DNA, 30 bp, Artificial Sequence
  Synthetic oligonucleotide
gtctcggccgacagtctcacatagatttcg

SEQ ID NO: 315478 - DNA, 30 bp, Artificial Sequence
  Synthetic oligonucleotide
aagtaagatgaaggacgcgctgcgctttcg

SEQ ID NO: 315479 - DNA, 30 bp, Artificial Sequence
  Synthetic oligonucleotide
aactctgtcgcttatcgggttcgtctttcg

SEQ ID NO: 315480 - DNA, 30 bp, Artificial Sequence
  Synthetic oligonucleotide
gcatttatcagctaaactagaggtctttcg

SEQ ID NO: 315481 - DNA, 30 bp, Artificial Sequence
  Synthetic oligonucleotide
ggagaaatgtttcattctcccgccgtttcg

SEQ ID NO: 315482 - DNA, 30 bp, Artificial Sequence
  Synthetic oligonucleotide
gtaactaaacggtgacccggccgcgtttcg

SEQ ID NO: 315483 - DNA, 29 bp, Artificial Sequence
  Synthetic oligonucleotide
acgggatttaatcgcgtggaatcgtttcg

SEQ ID NO: 315484 - DNA, 30 bp, Artificial Sequence
  Synthetic oligonucleotide
aaaacctcaactgttaggataacggtttcg

SEQ ID NO: 315485 - DNA, 30 bp, Artificial Sequence
  Synthetic oligonucleotide
gttagatggtactatgcatgagatgtttcg

SEQ ID NO: 315486 - DNA, 30 bp, Artificial Sequence
  Synthetic oligonucleotide
ggtcctccggcgtacttgctggatgtttcg

SEQ ID NO: 315487 - DNA, 30 bp, Artificial Sequence
  Synthetic oligonucleotide
ctactacagacattctactgttatgtttcg

SEQ ID NO: 315488 - DNA, 30 bp, Artificial Sequence
  Synthetic oligonucleotide
caagtattccgcaatcaccactgtgtttcg

SEQ ID NO: 315489 - DNA, 30 bp, Artificial Sequence
  Synthetic oligonucleotide
tatgtcccattaatacgtgacgttgtttcg

SEQ ID NO: 315490 - DNA, 30 bp, Artificial Sequence
  Synthetic oligonucleotide
tcgatctttgttagggagtacaagttttcg

SEQ ID NO: 315491 - DNA, 30 bp, Artificial Sequence
  Synthetic oligonucleotide
gtagcgtaaatgcggtgcccgcggttttcg

SEQ ID NO: 315492 - DNA, 30 bp, Artificial Sequence
  Synthetic oligonucleotide
tgatcaaatgtaaatgtaaaaatgttttcg

SEQ ID NO: 315493 - DNA, 30 bp, Artificial Sequence
  Synthetic oligonucleotide
tccagacagtgtaaaactcgtaatttttcg

SEQ ID NO: 315494 - DNA, 30 bp, Artificial Sequence
  Synthetic oligonucleotide
ggtgcttgctacgtaactctgtatttttcg

SEQ ID NO: 315495 - DNA, 30 bp, Artificial Sequence
  Synthetic oligonucleotide
agatctagttcatgtttcccgcttttttcg

SEQ ID NO: 315496 - DNA, 30 bp, Artificial Sequence
  Synthetic oligonucleotide
gtgatcgacgaggcggttatgtttttttcg

SEQ ID NO: 315497 - DNA, 30 bp, Artificial Sequence
  Synthetic oligonucleotide
cctttgaatttagcaagagctgtaaaaagg

SEQ ID NO: 315498 - DNA, 30 bp, Artificial Sequence
  Synthetic oligonucleotide
gttcacttggaatgggctggaaacaaaagg

SEQ ID NO: 315499 - DNA, 30 bp, Artificial Sequence
  Synthetic oligonucleotide
gcgcagtatcgtgcgaaagctcgcaaaagg

SEQ ID NO: 315500 - DNA, 30 bp, Artificial Sequence
  Synthetic oligonucleotide
cacactgtcggggaccgaaaggtcaaaagg

SEQ ID NO: 315501 - DNA, 30 bp, Artificial Sequence
  Synthetic oligonucleotide
aagcctctccagacatatctcttgaaaagg

SEQ ID NO: 315502 - DNA, 30 bp, Artificial Sequence
  Synthetic oligonucleotide
ctccaaagtaagtgtcaattttataaaagg

SEQ ID NO: 315503 - DNA, 30 bp, Artificial Sequence
  Synthetic oligonucleotide
gcttggagtgccctttgtggacctaaaagg

SEQ ID NO: 315504 - DNA, 30 bp, Artificial Sequence
  Synthetic oligonucleotide
aagtctgtatacaggcgggttcgtaaaagg

SEQ ID NO: 315505 - DNA, 30 bp, Artificial Sequence
  Synthetic oligonucleotide
gccacaggcgatcggtgcttttttaaaagg

SEQ ID NO: 315506 - DNA, 30 bp, Artificial Sequence
  Synthetic oligonucleotide
cttcgcattacgttttctattggacaaagg

SEQ ID NO: 315507 - DNA, 30 bp, Artificial Sequence
  Synthetic oligonucleotide
gaaagcaacactttgattccgtgacaaagg

SEQ ID NO: 315508 - DNA, 30 bp, Artificial Sequence
  Synthetic oligonucleotide
gcgtagtaccgcttcgcgataatcgaaagg

SEQ ID NO: 315509 - DNA, 30 bp, Artificial Sequence
  Synthetic oligonucleotide
tagttttataggtacaatgaagtcgaaagg

SEQ ID NO: 315510 - DNA, 30 bp, Artificial Sequence
  Synthetic oligonucleotide
cagctagtacacattcgcatattcgaaagg

SEQ ID NO: 315511 - DNA, 30 bp, Artificial Sequence
  Synthetic oligonucleotide
tttgcctgccagctttaggggacggaaagg

SEQ ID NO: 315512 - DNA, 30 bp, Artificial Sequence
  Synthetic oligonucleotide
agtccagtaaggataagcgatagggaaagg

SEQ ID NO: 315513 - DNA, 30 bp, Artificial Sequence
  Synthetic oligonucleotide
cacgaaaatatggtatatttgtgggaaagg

SEQ ID NO: 315514 - DNA, 30 bp, Artificial Sequence
  Synthetic oligonucleotide
acaaaccactttgactgtgacatggaaagg

SEQ ID NO: 315515 - DNA, 30 bp, Artificial Sequence
  Synthetic oligonucleotide
gaagttggcactggccactacttggaaagg

SEQ ID NO: 315516 - DNA, 30 bp, Artificial Sequence
  Synthetic oligonucleotide
acatccctatggggagatcaaaaataaagg

SEQ ID NO: 315517 - DNA, 30 bp, Artificial Sequence
  Synthetic oligonucleotide
aatgaaaaaattggttgcgagccataaagg

SEQ ID NO: 315518 - DNA, 30 bp, Artificial Sequence
  Synthetic oligonucleotide
ggataccggtgagtggagtgggagtaaagg

SEQ ID NO: 315519 - DNA, 30 bp, Artificial Sequence
  Synthetic oligonucleotide
catatccagaaagcatgtccggggtaaagg

SEQ ID NO: 315520 - DNA, 30 bp, Artificial Sequence
  Synthetic oligonucleotide
ggattctcagagttgaggtcactgtaaagg

SEQ ID NO: 315521 - DNA, 30 bp, Artificial Sequence
  Synthetic oligonucleotide
gccccactggaatcagtgttggtgtaaagg

SEQ ID NO: 315522 - DNA, 30 bp, Artificial Sequence
  Synthetic oligonucleotide
ttactcgtaggtggaccataaaattaaagg

SEQ ID NO: 315523 - DNA, 30 bp, Artificial Sequence
  Synthetic oligonucleotide
taagactatcgctgtagcaacacttaaagg

SEQ ID NO: 315524 - DNA, 30 bp, Artificial Sequence
  Synthetic oligonucleotide
atagttggggcattattcgcctcaacaagg

SEQ ID NO: 315525 - DNA, 30 bp, Artificial Sequence
  Synthetic oligonucleotide
gtcaggcatactgcttatataggcacaagg

SEQ ID NO: 315526 - DNA, 30 bp, Artificial Sequence
  Synthetic oligonucleotide
ctaatgcggcatattcatccgggtacaagg

SEQ ID NO: 315527 - DNA, 30 bp, Artificial Sequence
  Synthetic oligonucleotide
gtgcagaatacggtatgttaaacaccaagg

SEQ ID NO: 315528 - DNA, 30 bp, Artificial Sequence
  Synthetic oligonucleotide
cctttagtggtgcgagctagagctccaagg

SEQ ID NO: 315529 - DNA, 30 bp, Artificial Sequence
  Synthetic oligonucleotide
gctcccccattcaacgagcttattccaagg

SEQ ID NO: 315530 - DNA, 30 bp, Artificial Sequence
  Synthetic oligonucleotide
gccgcttaacctatcgtacggtaagcaagg

SEQ ID NO: 315531 - DNA, 30 bp, Artificial Sequence
  Synthetic oligonucleotide
gtactttaccaaagttaaatgccagcaagg

SEQ ID NO: 315532 - DNA, 30 bp, Artificial Sequence
  Synthetic oligonucleotide
ggattgccatgttggtcagtttgagcaagg

SEQ ID NO: 315533 - DNA, 30 bp, Artificial Sequence
  Synthetic oligonucleotide
gctcatgttatgagatagtacctagcaagg

SEQ ID NO: 315534 - DNA, 30 bp, Artificial Sequence
  Synthetic oligonucleotide
atccgataaatcggatggtagggcgcaagg

SEQ ID NO: 315535 - DNA, 30 bp, Artificial Sequence
  Synthetic oligonucleotide
gacttatggcagggatgagcacgggcaagg

SEQ ID NO: 315536 - DNA, 30 bp, Artificial Sequence
  Synthetic oligonucleotide
gtgtgtatgaacataaccaattatgcaagg

SEQ ID NO: 315537 - DNA, 30 bp, Artificial Sequence
  Synthetic oligonucleotide
acgagttttatcgtgacaagaacatcaagg

SEQ ID NO: 315538 - DNA, 30 bp, Artificial Sequence
  Synthetic oligonucleotide
acctcgacccggtcggtaaattactcaagg

SEQ ID NO: 315539 - DNA, 30 bp, Artificial Sequence
  Synthetic oligonucleotide
agtctggagtcactgagggcctgctcaagg

SEQ ID NO: 315540 - DNA, 30 bp, Artificial Sequence
  Synthetic oligonucleotide
tttaaggcgttaatcgcataaatctcaagg

SEQ ID NO: 315541 - DNA, 30 bp, Artificial Sequence
  Synthetic oligonucleotide
gaaaccatttaaatcgggctggcgtcaagg

SEQ ID NO: 315542 - DNA, 30 bp, Artificial Sequence
  Synthetic oligonucleotide
cggttaccaatgtccccaacttgttcaagg

SEQ ID NO: 315543 - DNA, 30 bp, Artificial Sequence
  Synthetic oligonucleotide
ccaaacgggacacggattctcgaaagaagg

SEQ ID NO: 315544 - DNA, 30 bp, Artificial Sequence
  Synthetic oligonucleotide
tagcagtcggcgccgtccgattaaagaagg

SEQ ID NO: 315545 - DNA, 30 bp, Artificial Sequence
  Synthetic oligonucleotide
ccgcttttcgagtgggaacggcgcagaagg

SEQ ID NO: 315546 - DNA, 30 bp, Artificial Sequence
  Synthetic oligonucleotide
tttgcgtcactccatatcggggcgagaagg

SEQ ID NO: 315547 - DNA, 30 bp, Artificial Sequence
  Synthetic oligonucleotide
tccaacatgtacaacgacgtttttagaagg

SEQ ID NO: 315548 - DNA, 30 bp, Artificial Sequence
  Synthetic oligonucleotide
ttattcatattcagttaaaccgtacgaagg

SEQ ID NO: 315549 - DNA, 30 bp, Artificial Sequence
  Synthetic oligonucleotide
ctttcgtgtgcatttaaacccaaccgaagg

SEQ ID NO: 315550 - DNA, 30 bp, Artificial Sequence
  Synthetic oligonucleotide
gagctaagggccggcgcttctggccgaagg

SEQ ID NO: 315551 - DNA, 30 bp, Artificial Sequence
  Synthetic oligonucleotide
accggaggtttttgttacttaccgcgaagg

SEQ ID NO: 315552 - DNA, 29 bp, Artificial Sequence
  Synthetic oligonucleotide
catatagaaaaacgggtatatggcgaagg

SEQ ID NO: 315553 - DNA, 30 bp, Artificial Sequence
  Synthetic oligonucleotide
aagtctatatctggctaagtagtgcgaagg

SEQ ID NO: 315554 - DNA, 30 bp, Artificial Sequence
  Synthetic oligonucleotide
ctacttgggtccagtttagatgtgcgaagg

SEQ ID NO: 315555 - DNA, 30 bp, Artificial Sequence
  Synthetic oligonucleotide
cagacgaaggtctccgaacatgttcgaagg

SEQ ID NO: 315556 - DNA, 30 bp, Artificial Sequence
  Synthetic oligonucleotide
taaggcgtgcatcacccttctccaggaagg

SEQ ID NO: 315557 - DNA, 30 bp, Artificial Sequence
  Synthetic oligonucleotide
tgtaattttggcgccgaaacgcgaggaagg

SEQ ID NO: 315558 - DNA, 30 bp, Artificial Sequence
  Synthetic oligonucleotide
actaccggttgtatcttgggttacggaagg

SEQ ID NO: 315559 - DNA, 30 bp, Artificial Sequence
  Synthetic oligonucleotide
tctcagaatccggacaatcggcccggaagg

SEQ ID NO: 315560 - DNA, 30 bp, Artificial Sequence
  Synthetic oligonucleotide
ggttggagcttggtgtgatgaggcggaagg

SEQ ID NO: 315561 - DNA, 30 bp, Artificial Sequence
  Synthetic oligonucleotide
gtataaactcactaccgggatatcggaagg

SEQ ID NO: 315562 - DNA, 30 bp, Artificial Sequence
  Synthetic oligonucleotide
tgcaaccttgactatctacgctagggaagg

SEQ ID NO: 315563 - DNA, 30 bp, Artificial Sequence
  Synthetic oligonucleotide
ctgccatcccaacacgattaacggggaagg

SEQ ID NO: 315564 - DNA, 30 bp, Artificial Sequence
  Synthetic oligonucleotide
cagatttctagatgggcgtggcggggaagg

SEQ ID NO: 315565 - DNA, 30 bp, Artificial Sequence
  Synthetic oligonucleotide
taaccgaacgttaggcagtgaacatgaagg

SEQ ID NO: 315566 - DNA, 30 bp, Artificial Sequence
  Synthetic oligonucleotide
tcgaggatggttgagtatgccggatgaagg

SEQ ID NO: 315567 - DNA, 30 bp, Artificial Sequence
  Synthetic oligonucleotide
gttcgaggcccttaaacaagcacctgaagg

SEQ ID NO: 315568 - DNA, 30 bp, Artificial Sequence
  Synthetic oligonucleotide
tccacgcaacataccagtcttatgtgaagg

SEQ ID NO: 315569 - DNA, 30 bp, Artificial Sequence
  Synthetic oligonucleotide
gatcaccggatgatacgcctggtgtgaagg

SEQ ID NO: 315570 - DNA, 30 bp, Artificial Sequence
  Synthetic oligonucleotide
ttgccgtaaataggcaaagtgacttgaagg

SEQ ID NO: 315571 - DNA, 30 bp, Artificial Sequence
  Synthetic oligonucleotide
actaactggtctctaccgttactaataagg

SEQ ID NO: 315572 - DNA, 30 bp, Artificial Sequence
  Synthetic oligonucleotide
cgatcgccggtggcgtcatcgttaataagg

SEQ ID NO: 315573 - DNA, 30 bp, Artificial Sequence
  Synthetic oligonucleotide
gatctccagcgtgattgcccgtgcataagg

SEQ ID NO: 315574 - DNA, 30 bp, Artificial Sequence
  Synthetic oligonucleotide
cccgtgctctggaggggtagattcataagg

SEQ ID NO: 315575 - DNA, 30 bp, Artificial Sequence
  Synthetic oligonucleotide
tacatgctagcaagataacgttagataagg

SEQ ID NO: 315576 - DNA, 30 bp, Artificial Sequence
  Synthetic oligonucleotide
atccgcgtttatcggatcagtgtgataagg

SEQ ID NO: 315577 - DNA, 30 bp, Artificial Sequence
  Synthetic oligonucleotide
agcgaatggtaccgttaccgctttataagg

SEQ ID NO: 315578 - DNA, 30 bp, Artificial Sequence
  Synthetic oligonucleotide
tcatctaacttgagggagaatcgactaagg

SEQ ID NO: 315579 - DNA, 30 bp, Artificial Sequence
  Synthetic oligonucleotide
cgcatcaaccattcccttctgaacctaagg

SEQ ID NO: 315580 - DNA, 30 bp, Artificial Sequence
  Synthetic oligonucleotide
aacggtttgcatctaggaacttcgctaagg

SEQ ID NO: 315581 - DNA, 30 bp, Artificial Sequence
  Synthetic oligonucleotide
tggagcacgcaagatccccgaggtctaagg

SEQ ID NO: 315582 - DNA, 30 bp, Artificial Sequence
  Synthetic oligonucleotide
aaatcaacacatgtcctggttccagtaagg

SEQ ID NO: 315583 - DNA, 30 bp, Artificial Sequence
  Synthetic oligonucleotide
actagttctacggggggttatgtagtaagg

SEQ ID NO: 315584 - DNA, 30 bp, Artificial Sequence
  Synthetic oligonucleotide
ctttaaagcggctcgggcgataacgtaagg

SEQ ID NO: 315585 - DNA, 30 bp, Artificial Sequence
  Synthetic oligonucleotide
aagtattagactgtagtatagtttgtaagg

SEQ ID NO: 315586 - DNA, 30 bp, Artificial Sequence
  Synthetic oligonucleotide
tgacaaaggcggatagtgtttagcttaagg

SEQ ID NO: 315587 - DNA, 30 bp, Artificial Sequence
  Synthetic oligonucleotide
caaggatgtcgggtactttagaatttaagg

SEQ ID NO: 315588 - DNA, 30 bp, Artificial Sequence
  Synthetic oligonucleotide
ttgatttgacatggtaggctaagtttaagg

SEQ ID NO: 315589 - DNA, 30 bp, Artificial Sequence
  Synthetic oligonucleotide
ctatagcaaaccgttgagttcgttttaagg

SEQ ID NO: 315590 - DNA, 30 bp, Artificial Sequence
  Synthetic oligonucleotide
tcagcatactgttcacaaccgacaaacagg

SEQ ID NO: 315591 - DNA, 30 bp, Artificial Sequence
  Synthetic oligonucleotide
ttcacggatctgattatggacagaaacagg

SEQ ID NO: 315592 - DNA, 30 bp, Artificial Sequence
  Synthetic oligonucleotide
tccgggtagtgacagctcccattaaacagg

SEQ ID NO: 315593 - DNA, 30 bp, Artificial Sequence
  Synthetic oligonucleotide
aagggggaagttggagtgtaacccaacagg

SEQ ID NO: 315594 - DNA, 30 bp, Artificial Sequence
  Synthetic oligonucleotide
ggtccactttcattaggcatgtgcaacagg

SEQ ID NO: 315595 - DNA, 30 bp, Artificial Sequence
  Synthetic oligonucleotide
gaaagattttaaatgcggatcatcaacagg

SEQ ID NO: 315596 - DNA, 30 bp, Artificial Sequence
  Synthetic oligonucleotide
tatttctccggtaagtccgacatgaacagg

SEQ ID NO: 315597 - DNA, 30 bp, Artificial Sequence
  Synthetic oligonucleotide
gcagttgtgcaacagtggcgcatgaacagg

SEQ ID NO: 315598 - DNA, 30 bp, Artificial Sequence
  Synthetic oligonucleotide
gcgttcccgacgggccacgtcagccacagg

SEQ ID NO: 315599 - DNA, 30 bp, Artificial Sequence
  Synthetic oligonucleotide
tttgactgtctgtatgtcagatgccacagg

SEQ ID NO: 315600 - DNA, 30 bp, Artificial Sequence
  Synthetic oligonucleotide
ttaatgcattccgcttgtggcaagcacagg

SEQ ID NO: 315601 - DNA, 30 bp, Artificial Sequence
  Synthetic oligonucleotide
ttggaggacgagacgtgaggttagcacagg

SEQ ID NO: 315602 - DNA, 30 bp, Artificial Sequence
  Synthetic oligonucleotide
tcctcctttaagcgatgcctgaatcacagg

SEQ ID NO: 315603 - DNA, 30 bp, Artificial Sequence
  Synthetic oligonucleotide
agtcgagtctcacgaattggatctcacagg

SEQ ID NO: 315604 - DNA, 30 bp, Artificial Sequence
  Synthetic oligonucleotide
cagcgtgtacggtactcagaagaagacagg

SEQ ID NO: 315605 - DNA, 30 bp, Artificial Sequence
  Synthetic oligonucleotide
tgaattattgaaatcttttacggagacagg

SEQ ID NO: 315606 - DNA, 30 bp, Artificial Sequence
  Synthetic oligonucleotide
tctgtattcatgaaccacggataggacagg

SEQ ID NO: 315607 - DNA, 30 bp, Artificial Sequence
  Synthetic oligonucleotide
tagtccacctttgattgtccacctgacagg

SEQ ID NO: 315608 - DNA, 30 bp, Artificial Sequence
  Synthetic oligonucleotide
cccatttctaactgagcggctgaatacagg

SEQ ID NO: 315609 - DNA, 30 bp, Artificial Sequence
  Synthetic oligonucleotide
tctactaatccttcagtgtggagatacagg

SEQ ID NO: 315610 - DNA, 30 bp, Artificial Sequence
  Synthetic oligonucleotide
aaggtattctaaattgctggtacctacagg

SEQ ID NO: 315611 - DNA, 30 bp, Artificial Sequence
  Synthetic oligonucleotide
gaaacaggtttcgtaacgtcgggctacagg

SEQ ID NO: 315612 - DNA, 30 bp, Artificial Sequence
  Synthetic oligonucleotide
gtaatgtacccgagaatgcgcgagtacagg

SEQ ID NO: 315613 - DNA, 30 bp, Artificial Sequence
  Synthetic oligonucleotide
gctgcataccaggtggatccggcgtacagg

SEQ ID NO: 315614 - DNA, 30 bp, Artificial Sequence
  Synthetic oligonucleotide
aactgttcaaggtttcgtatcaggtacagg

SEQ ID NO: 315615 - DNA, 30 bp, Artificial Sequence
  Synthetic oligonucleotide
tcgagcacttatggggttgcagggtacagg

SEQ ID NO: 315616 - DNA, 30 bp, Artificial Sequence
  Synthetic oligonucleotide
catagacgtcggggcagcaaactgtacagg

SEQ ID NO: 315617 - DNA, 30 bp, Artificial Sequence
  Synthetic oligonucleotide
gtcagcacgactgaatgacgggtgtacagg

SEQ ID NO: 315618 - DNA, 30 bp, Artificial Sequence
  Synthetic oligonucleotide
tggcatatcgttgcccctgcacattacagg

SEQ ID NO: 315619 - DNA, 30 bp, Artificial Sequence
  Synthetic oligonucleotide
gaactatatagctggtcacgttgttacagg

SEQ ID NO: 315620 - DNA, 30 bp, Artificial Sequence
  Synthetic oligonucleotide
attgtcatgcgtcacgtgacgacaaccagg

SEQ ID NO: 315621 - DNA, 30 bp, Artificial Sequence
  Synthetic oligonucleotide
aatcttataatgacacctgctgtaaccagg

SEQ ID NO: 315622 - DNA, 30 bp, Artificial Sequence
  Synthetic oligonucleotide
accgatcggcggtaaagtagtgtaaccagg

SEQ ID NO: 315623 - DNA, 30 bp, Artificial Sequence
  Synthetic oligonucleotide
agcgcatcctggttccgctgaatcaccagg

SEQ ID NO: 315624 - DNA, 30 bp, Artificial Sequence
  Synthetic oligonucleotide
cccaactggcatccaagaggtacgaccagg

SEQ ID NO: 315625 - DNA, 30 bp, Artificial Sequence
  Synthetic oligonucleotide
tacatcgtcaggaccgcctccatgaccagg

SEQ ID NO: 315626 - DNA, 30 bp, Artificial Sequence
  Synthetic oligonucleotide
aaagccggtgggacagaatttactaccagg

SEQ ID NO: 315627 - DNA, 30 bp, Artificial Sequence
  Synthetic oligonucleotide
tcgttaatggcgcagactaatgtacccagg

SEQ ID NO: 315628 - DNA, 30 bp, Artificial Sequence
  Synthetic oligonucleotide
gctatcgcttagcctggacttgtacccagg

SEQ ID NO: 315629 - DNA, 30 bp, Artificial Sequence
  Synthetic oligonucleotide
actgtgtgcttttcgctctccagccccagg

SEQ ID NO: 315630 - DNA, 30 bp, Artificial Sequence
  Synthetic oligonucleotide
gttcagtgcaccacaggcgcgctccccagg

SEQ ID NO: 315631 - DNA, 30 bp, Artificial Sequence
  Synthetic oligonucleotide
ctcgaccacgcaatgtggtgggggcccagg

SEQ ID NO: 315632 - DNA, 30 bp, Artificial Sequence
  Synthetic oligonucleotide
gttagttccatgtaggtacctcctcccagg

SEQ ID NO: 315633 - DNA, 30 bp, Artificial Sequence
  Synthetic oligonucleotide
gcaggcctaacccgtactgtaggcgccagg

SEQ ID NO: 315634 - DNA, 30 bp, Artificial Sequence
  Synthetic oligonucleotide
attcagttaacaaaaggctgcccggccagg

SEQ ID NO: 315635 - DNA, 30 bp, Artificial Sequence
  Synthetic oligonucleotide
tgtagtgccgggcatttttcatgggccagg

SEQ ID NO: 315636 - DNA, 30 bp, Artificial Sequence
  Synthetic oligonucleotide
agatataggagttttacgccctgtgccagg

SEQ ID NO: 315637 - DNA, 30 bp, Artificial Sequence
  Synthetic oligonucleotide
cgcgccggggcgaatattattacgtccagg

SEQ ID NO: 315638 - DNA, 30 bp, Artificial Sequence
  Synthetic oligonucleotide
agtaatatactaaacgatactaaaagcagg

SEQ ID NO: 315639 - DNA, 30 bp, Artificial Sequence
  Synthetic oligonucleotide
aaagagcactcggtgaaacatcgaagcagg

SEQ ID NO: 315640 - DNA, 30 bp, Artificial Sequence
  Synthetic oligonucleotide
ggctacaggactgattgagagcacagcagg

SEQ ID NO: 315641 - DNA, 30 bp, Artificial Sequence
  Synthetic oligonucleotide
cagaaatggttgggtgttttgagcagcagg

SEQ ID NO: 315642 - DNA, 31 bp, Artificial Sequence
  Synthetic oligonucleotide
gcccacaccggacacatgcgtatgcagcagg

SEQ ID NO: 315643 - DNA, 30 bp, Artificial Sequence
  Synthetic oligonucleotide
ctaggtagtcataactggctagtgagcagg

SEQ ID NO: 315644 - DNA, 30 bp, Artificial Sequence
  Synthetic oligonucleotide
ccgtgtaagtagccgaacctggttagcagg

SEQ ID NO: 315645 - DNA, 30 bp, Artificial Sequence
  Synthetic oligonucleotide
tcaataaaagcatatgacggggaccgcagg

SEQ ID NO: 315646 - DNA, 30 bp, Artificial Sequence
  Synthetic oligonucleotide
atctctaacaaaatccgacgatagcgcagg

SEQ ID NO: 315647 - DNA, 30 bp, Artificial Sequence
  Synthetic oligonucleotide
ggacagtctgatgtgcccgtgtagcgcagg

SEQ ID NO: 315648 - DNA, 30 bp, Artificial Sequence
  Synthetic oligonucleotide
tatcatacacttggcctgttggctcgcagg

SEQ ID NO: 315649 - DNA, 29 bp, Artificial Sequence
  Synthetic oligonucleotide
cgcgattaatgctgttaggcatcggcagg

SEQ ID NO: 315650 - DNA, 30 bp, Artificial Sequence
  Synthetic oligonucleotide
ttggttagtccgaatcgaagtgagggcagg

SEQ ID NO: 315651 - DNA, 30 bp, Artificial Sequence
  Synthetic oligonucleotide
ctgcgttgttgactctctcttccgggcagg

SEQ ID NO: 315652 - DNA, 30 bp, Artificial Sequence
  Synthetic oligonucleotide
tgcaacacggtttcaagtcaatggggcagg

SEQ ID NO: 315653 - DNA, 30 bp, Artificial Sequence
  Synthetic oligonucleotide
ccacaagtccttcggattgtactgggcagg

SEQ ID NO: 315654 - DNA, 30 bp, Artificial Sequence
  Synthetic oligonucleotide
ggagtgcatgaggtggccttgctgggcagg

SEQ ID NO: 315655 - DNA, 30 bp, Artificial Sequence
  Synthetic oligonucleotide
tgttgcttcatttttagctaagatggcagg

SEQ ID NO: 315656 - DNA, 30 bp, Artificial Sequence
  Synthetic oligonucleotide
ggtcaggaaccatctgagcagggtggcagg

SEQ ID NO: 315657 - DNA, 30 bp, Artificial Sequence
  Synthetic oligonucleotide
ctgaggaatttctaggcatgttgtggcagg

SEQ ID NO: 315658 - DNA, 30 bp, Artificial Sequence
  Synthetic oligonucleotide
attaagcgcacgcgttggttaattggcagg

SEQ ID NO: 315659 - DNA, 30 bp, Artificial Sequence
  Synthetic oligonucleotide
tagaaatgcacaataacccgtatctgcagg

SEQ ID NO: 315660 - DNA, 30 bp, Artificial Sequence
  Synthetic oligonucleotide
gtgcaatacgttcaaaatggtcagtgcagg

SEQ ID NO: 315661 - DNA, 30 bp, Artificial Sequence
  Synthetic oligonucleotide
tggcacatggctattggcgtgtagtgcagg

SEQ ID NO: 315662 - DNA, 30 bp, Artificial Sequence
  Synthetic oligonucleotide
tcagaccgcgctttgctcacttcgtgcagg

SEQ ID NO: 315663 - DNA, 30 bp, Artificial Sequence
  Synthetic oligonucleotide
gcttacagaatccgataataaaacatcagg

SEQ ID NO: 315664 - DNA, 30 bp, Artificial Sequence
  Synthetic oligonucleotide
ggaagattggagtagacgtgtcccatcagg

SEQ ID NO: 315665 - DNA, 31 bp, Artificial Sequence
  Synthetic oligonucleotide
cgtgttacgcagttaatagtttaagatcagg

SEQ ID NO: 315666 - DNA, 30 bp, Artificial Sequence
  Synthetic oligonucleotide
tggagaaagttatatcgggttcggatcagg

SEQ ID NO: 315667 - DNA, 30 bp, Artificial Sequence
  Synthetic oligonucleotide
gtattcatgtgagtgtgagactatatcagg

SEQ ID NO: 315668 - DNA, 30 bp, Artificial Sequence
  Synthetic oligonucleotide
gcgtctaaggaataggacaggtccctcagg

SEQ ID NO: 315669 - DNA, 30 bp, Artificial Sequence
  Synthetic oligonucleotide
actgcattcaaacgacgcattgagctcagg

SEQ ID NO: 315670 - DNA, 30 bp, Artificial Sequence
  Synthetic oligonucleotide
cgcaactcaaatcagcatatcggagtcagg

SEQ ID NO: 315671 - DNA, 30 bp, Artificial Sequence
  Synthetic oligonucleotide
aaaaatgcaatctcagcgtccacggtcagg

SEQ ID NO: 315672 - DNA, 30 bp, Artificial Sequence
  Synthetic oligonucleotide
cccggtgcttagaactcaccttcggtcagg

SEQ ID NO: 315673 - DNA, 30 bp, Artificial Sequence
  Synthetic oligonucleotide
gtagtcagtcgaggcgcagaaggggtcagg

SEQ ID NO: 315674 - DNA, 29 bp, Artificial Sequence
  Synthetic oligonucleotide
ttaccgcgcattgagctaatatggtcagg

SEQ ID NO: 315675 - DNA, 30 bp, Artificial Sequence
  Synthetic oligonucleotide
tggttaaccgggaaatgccaactggtcagg

SEQ ID NO: 315676 - DNA, 30 bp, Artificial Sequence
  Synthetic oligonucleotide
gtgcaaagttacctgaacctgttggtcagg

SEQ ID NO: 315677 - DNA, 30 bp, Artificial Sequence
  Synthetic oligonucleotide
ccaatgcgtatccaagaattgtcgttcagg

SEQ ID NO: 315678 - DNA, 30 bp, Artificial Sequence
  Synthetic oligonucleotide
tccacaaggcagtggagctggcggttcagg

SEQ ID NO: 315679 - DNA, 30 bp, Artificial Sequence
  Synthetic oligonucleotide
ggagacgagtttgttgcgtttcctttcagg

SEQ ID NO: 315680 - DNA, 30 bp, Artificial Sequence
  Synthetic oligonucleotide
tcgatcggggttcatcacatacttttcagg

SEQ ID NO: 315681 - DNA, 30 bp, Artificial Sequence
  Synthetic oligonucleotide
gattaattgacaactaccgactacaagagg

SEQ ID NO: 315682 - DNA, 30 bp, Artificial Sequence
  Synthetic oligonucleotide
agcgcgtgttagcgcattgctagcaagagg

SEQ ID NO: 315683 - DNA, 30 bp, Artificial Sequence
  Synthetic oligonucleotide
cggcacatcgacatgccgcagatcaagagg

SEQ ID NO: 315684 - DNA, 30 bp, Artificial Sequence
  Synthetic oligonucleotide
agtcaataagcgatgtcctcccgtaagagg

SEQ ID NO: 315685 - DNA, 30 bp, Artificial Sequence
  Synthetic oligonucleotide
aaagaggccggatagtggatgcgtaagagg

SEQ ID NO: 315686 - DNA, 30 bp, Artificial Sequence
  Synthetic oligonucleotide
caagttccctcttgaatatgatgacagagg

SEQ ID NO: 315687 - DNA, 30 bp, Artificial Sequence
  Synthetic oligonucleotide
gacccaatcctcgcgtggtcgcttcagagg

SEQ ID NO: 315688 - DNA, 30 bp, Artificial Sequence
  Synthetic oligonucleotide
gaacttcaaaatgattagtttggcgagagg

SEQ ID NO: 315689 - DNA, 30 bp, Artificial Sequence
  Synthetic oligonucleotide
tataggtcgtgtcagggactaatggagagg

SEQ ID NO: 315690 - DNA, 30 bp, Artificial Sequence
  Synthetic oligonucleotide
cacgggtcgggtaaaccggataatgagagg

SEQ ID NO: 315691 - DNA, 30 bp, Artificial Sequence
  Synthetic oligonucleotide
gaatcgcttcgttattgtaaatgtgagagg

SEQ ID NO: 315692 - DNA, 30 bp, Artificial Sequence
  Synthetic oligonucleotide
gaagcaaatggcgaataacctgttgagagg

SEQ ID NO: 315693 - DNA, 30 bp, Artificial Sequence
  Synthetic oligonucleotide
gaacgcttgcgttcggaatataaatagagg

SEQ ID NO: 315694 - DNA, 30 bp, Artificial Sequence
  Synthetic oligonucleotide
aatttggccaattttgtgagaaggtagagg

SEQ ID NO: 315695 - DNA, 30 bp, Artificial Sequence
  Synthetic oligonucleotide
gactggcaacggtgaagggatgtgtagagg

SEQ ID NO: 315696 - DNA, 30 bp, Artificial Sequence
  Synthetic oligonucleotide
ctttgatcgacttccaggatcaattagagg

SEQ ID NO: 315697 - DNA, 30 bp, Artificial Sequence
  Synthetic oligonucleotide
gggttcccatggccgtaaggtgattagagg

SEQ ID NO: 315698 - DNA, 30 bp, Artificial Sequence
  Synthetic oligonucleotide
tgtcacgaccgtaaatgtgtaccttagagg

SEQ ID NO: 315699 - DNA, 30 bp, Artificial Sequence
  Synthetic oligonucleotide
aaatgaaatcattactccccacaaacgagg

SEQ ID NO: 315700 - DNA, 30 bp, Artificial Sequence
  Synthetic oligonucleotide
cgtcgggcccggctcggggatactacgagg

SEQ ID NO: 315701 - DNA, 30 bp, Artificial Sequence
  Synthetic oligonucleotide
attgccggcatttatacaccggcaccgagg

SEQ ID NO: 315702 - DNA, 30 bp, Artificial Sequence
  Synthetic oligonucleotide
gtgaggcggccgcaaaagactttaccgagg

SEQ ID NO: 315703 - DNA, 30 bp, Artificial Sequence
  Synthetic oligonucleotide
attagaatatgaagttatgcctagccgagg

SEQ ID NO: 315704 - DNA, 30 bp, Artificial Sequence
  Synthetic oligonucleotide
atgaatccccgcgctcctaatgctccgagg

SEQ ID NO: 315705 - DNA, 30 bp, Artificial Sequence
  Synthetic oligonucleotide
ggaattgttggccggcctttgtctccgagg

SEQ ID NO: 315706 - DNA, 30 bp, Artificial Sequence
  Synthetic oligonucleotide
ttactcgcgggtagaactgcgagtccgagg

SEQ ID NO: 315707 - DNA, 30 bp, Artificial Sequence
  Synthetic oligonucleotide
acccgcaagttaatgcggatcggtccgagg

SEQ ID NO: 315708 - DNA, 30 bp, Artificial Sequence
  Synthetic oligonucleotide
cgacgtatcgaatgggtatctgcagcgagg

SEQ ID NO: 315709 - DNA, 30 bp, Artificial Sequence
  Synthetic oligonucleotide
gagtcgtcggtcagccttagtggcgcgagg

SEQ ID NO: 315710 - DNA, 30 bp, Artificial Sequence
  Synthetic oligonucleotide
gggtctatggaacgggtcaacgatgcgagg

SEQ ID NO: 315711 - DNA, 30 bp, Artificial Sequence
  Synthetic oligonucleotide
tattaccaaatctgtgggccgggtgcgagg

SEQ ID NO: 315712 - DNA, 30 bp, Artificial Sequence
  Synthetic oligonucleotide
acctacggtgtcgatgttccgcagtcgagg

SEQ ID NO: 315713 - DNA, 30 bp, Artificial Sequence
  Synthetic oligonucleotide
tcgttcgagcctgtagtacagatgtcgagg

SEQ ID NO: 315714 - DNA, 30 bp, Artificial Sequence
  Synthetic oligonucleotide
ttatcatggcaatggcttgcctcttcgagg

SEQ ID NO: 315715 - DNA, 30 bp, Artificial Sequence
  Synthetic oligonucleotide
atggtttactgcgttgaggatcgttcgagg

SEQ ID NO: 315716 - DNA, 30 bp, Artificial Sequence
  Synthetic oligonucleotide
ctgagagattcagatcttcagttttcgagg

SEQ ID NO: 315717 - DNA, 30 bp, Artificial Sequence
  Synthetic oligonucleotide
ttggagatgagggagggttcataaaggagg

SEQ ID NO: 315718 - DNA, 30 bp, Artificial Sequence
  Synthetic oligonucleotide
atcatgaagtctaatttacctccgaggagg

SEQ ID NO: 315719 - DNA, 30 bp, Artificial Sequence
  Synthetic oligonucleotide
ggagaacccttgggcatggaacggaggagg

SEQ ID NO: 315720 - DNA, 30 bp, Artificial Sequence
  Synthetic oligonucleotide
atttatgcacggcgaatacgttcgcggagg

SEQ ID NO: 315721 - DNA, 30 bp, Artificial Sequence
  Synthetic oligonucleotide
actagtatcacggtatcggaatggcggagg

SEQ ID NO: 315722 - DNA, 30 bp, Artificial Sequence
  Synthetic oligonucleotide
tgacggaatttgctcattcggagtcggagg

SEQ ID NO: 315723 - DNA, 30 bp, Artificial Sequence
  Synthetic oligonucleotide
ttcaccgtccacaaacttgcttccgggagg

SEQ ID NO: 315724 - DNA, 30 bp, Artificial Sequence
  Synthetic oligonucleotide
tccacgcgtgtggggggtataccggggagg

SEQ ID NO: 315725 - DNA, 30 bp, Artificial Sequence
  Synthetic oligonucleotide
gcggaccatgcaacggacgggtcggggagg

SEQ ID NO: 315726 - DNA, 30 bp, Artificial Sequence
  Synthetic oligonucleotide
tgcggcccgtctgcgaggattcgggggagg

SEQ ID NO: 315727 - DNA, 30 bp, Artificial Sequence
  Synthetic oligonucleotide
ttccacctttggcgtgagcagaaatggagg

SEQ ID NO: 315728 - DNA, 30 bp, Artificial Sequence
  Synthetic oligonucleotide
tactcctgtttaattataacgctatggagg

SEQ ID NO: 315729 - DNA, 30 bp, Artificial Sequence
  Synthetic oligonucleotide
tatgtatagttgcggagggagacctggagg

SEQ ID NO: 315730 - DNA, 30 bp, Artificial Sequence
  Synthetic oligonucleotide
gagactagcctccatgtctcgtgctggagg

SEQ ID NO: 315731 - DNA, 30 bp, Artificial Sequence
  Synthetic oligonucleotide
ctgcatttatcgacacgaaacaagtggagg

SEQ ID NO: 315732 - DNA, 30 bp, Artificial Sequence
  Synthetic oligonucleotide
taccgacgctagtttaacctagcgtggagg

SEQ ID NO: 315733 - DNA, 30 bp, Artificial Sequence
  Synthetic oligonucleotide
ccgacgccgggcgttagatccatttggagg

SEQ ID NO: 315734 - DNA, 30 bp, Artificial Sequence
  Synthetic oligonucleotide
agcgtccgatccctccggagactttggagg

SEQ ID NO: 315735 - DNA, 30 bp, Artificial Sequence
  Synthetic oligonucleotide
ttctgttgtaagggaccgagcagcatgagg

SEQ ID NO: 315736 - DNA, 30 bp, Artificial Sequence
  Synthetic oligonucleotide
ggttgctggttagctacgcgtgagatgagg

SEQ ID NO: 315737 - DNA, 30 bp, Artificial Sequence
  Synthetic oligonucleotide
tatcctatcactgtgggggaccatatgagg

SEQ ID NO: 315738 - DNA, 30 bp, Artificial Sequence
  Synthetic oligonucleotide
tcaaattcgggttacaccgaggctatgagg

SEQ ID NO: 315739 - DNA, 30 bp, Artificial Sequence
  Synthetic oligonucleotide
ctaggtcgagatggtttccgcagactgagg

SEQ ID NO: 315740 - DNA, 30 bp, Artificial Sequence
  Synthetic oligonucleotide
actctttaattagaaactctatacctgagg

SEQ ID NO: 315741 - DNA, 30 bp, Artificial Sequence
  Synthetic oligonucleotide
gcgacatgctgaaggaatcatagcctgagg

SEQ ID NO: 315742 - DNA, 30 bp, Artificial Sequence
  Synthetic oligonucleotide
tgggtgcactgccaactaactcggctgagg

SEQ ID NO: 315743 - DNA, 30 bp, Artificial Sequence
  Synthetic oligonucleotide
tcatcaaccgcatttgtttgcaaagtgagg

SEQ ID NO: 315744 - DNA, 30 bp, Artificial Sequence
  Synthetic oligonucleotide
ccccttcctgtcggtgtaggggccgtgagg

SEQ ID NO: 315745 - DNA, 30 bp, Artificial Sequence
  Synthetic oligonucleotide
atttagcggcagttcaaagggtccgtgagg

SEQ ID NO: 315746 - DNA, 30 bp, Artificial Sequence
  Synthetic oligonucleotide
cataggtactggcgctctacggtcgtgagg

SEQ ID NO: 315747 - DNA, 30 bp, Artificial Sequence
  Synthetic oligonucleotide
aagttagcccacggtcaacggattgtgagg

SEQ ID NO: 315748 - DNA, 30 bp, Artificial Sequence
  Synthetic oligonucleotide
cctggtgcttgtatgctagcacgattgagg

SEQ ID NO: 315749 - DNA, 30 bp, Artificial Sequence
  Synthetic oligonucleotide
tatgggacaactattcgggaaaacttgagg

SEQ ID NO: 315750 - DNA, 30 bp, Artificial Sequence
  Synthetic oligonucleotide
cttatagagcgtctttaggcacgcttgagg

SEQ ID NO: 315751 - DNA, 30 bp, Artificial Sequence
  Synthetic oligonucleotide
acggatgatgctagtcaccctgtcttgagg

SEQ ID NO: 315752 - DNA, 30 bp, Artificial Sequence
  Synthetic oligonucleotide
acggcaggacgctcccctcgaaagttgagg

SEQ ID NO: 315753 - DNA, 30 bp, Artificial Sequence
  Synthetic oligonucleotide
gcgccccgaggacatggcagctggttgagg

SEQ ID NO: 315754 - DNA, 30 bp, Artificial Sequence
  Synthetic oligonucleotide
gattatgtatttagtactttctggttgagg

SEQ ID NO: 315755 - DNA, 30 bp, Artificial Sequence
  Synthetic oligonucleotide
cttgcatattaacgcttaacgtggttgagg

SEQ ID NO: 315756 - DNA, 30 bp, Artificial Sequence
  Synthetic oligonucleotide
acttgccttgagtaatgcgtgtatttgagg

SEQ ID NO: 315757 - DNA, 30 bp, Artificial Sequence
  Synthetic oligonucleotide
tcatacaagggcagaggcaggggtttgagg

SEQ ID NO: 315758 - DNA, 30 bp, Artificial Sequence
  Synthetic oligonucleotide
tgagggtttagaattcgtgcaattttgagg

SEQ ID NO: 315759 - DNA, 30 bp, Artificial Sequence
  Synthetic oligonucleotide
gatgaccttacttaccaacgtattttgagg

SEQ ID NO: 315760 - DNA, 30 bp, Artificial Sequence
  Synthetic oligonucleotide
gttatgagccaattatggcaagttttgagg

SEQ ID NO: 315761 - DNA, 30 bp, Artificial Sequence
  Synthetic oligonucleotide
cggtttgcggcctcaccctagataaatagg

SEQ ID NO: 315762 - DNA, 30 bp, Artificial Sequence
  Synthetic oligonucleotide
gatcttacggttgtatatcccttaaatagg

SEQ ID NO: 315763 - DNA, 30 bp, Artificial Sequence
  Synthetic oligonucleotide
ccttattacagtatccaggaacgcaatagg

SEQ ID NO: 315764 - DNA, 30 bp, Artificial Sequence
  Synthetic oligonucleotide
tgtagctggtctgttgcgactggtaatagg

SEQ ID NO: 315765 - DNA, 30 bp, Artificial Sequence
  Synthetic oligonucleotide
accaagtgtgctttgtctatagttaatagg

SEQ ID NO: 315766 - DNA, 30 bp, Artificial Sequence
  Synthetic oligonucleotide
tatgagagtggacggttgtttaaacatagg

SEQ ID NO: 315767 - DNA, 30 bp, Artificial Sequence
  Synthetic oligonucleotide
cccactgaatacttgtgcgttacacatagg

SEQ ID NO: 315768 - DNA, 30 bp, Artificial Sequence
  Synthetic oligonucleotide
cccaagctcggtttttgcatattacatagg

SEQ ID NO: 315769 - DNA, 30 bp, Artificial Sequence
  Synthetic oligonucleotide
ttcgatcatggggacctggtacggcatagg

SEQ ID NO: 315770 - DNA, 30 bp, Artificial Sequence
  Synthetic oligonucleotide
aactcgactcggccctcctgggggcatagg

SEQ ID NO: 315771 - DNA, 30 bp, Artificial Sequence
  Synthetic oligonucleotide
ggtcggccggtccactgttttctgcatagg

SEQ ID NO: 315772 - DNA, 30 bp, Artificial Sequence
  Synthetic oligonucleotide
gaatttaaggtgccacaaagcaaagatagg

SEQ ID NO: 315773 - DNA, 30 bp, Artificial Sequence
  Synthetic oligonucleotide
tcgcgtttgtctggatatactaccgatagg

SEQ ID NO: 315774 - DNA, 31 bp, Artificial Sequence
  Synthetic oligonucleotide
ttgtgattggcaaatattgctgatcgatagg

SEQ ID NO: 315775 - DNA, 30 bp, Artificial Sequence
  Synthetic oligonucleotide
tctgtaagggttttcacttgctaggatagg

SEQ ID NO: 315776 - DNA, 30 bp, Artificial Sequence
  Synthetic oligonucleotide
cactccttctaataactctcatgggatagg

SEQ ID NO: 315777 - DNA, 30 bp, Artificial Sequence
  Synthetic oligonucleotide
gctttccggccaggtcgataactggatagg

SEQ ID NO: 315778 - DNA, 30 bp, Artificial Sequence
  Synthetic oligonucleotide
taatccgcttggcgataaaacatatatagg

SEQ ID NO: 315779 - DNA, 30 bp, Artificial Sequence
  Synthetic oligonucleotide
gttatggtggtctgtagcgacgcctatagg

SEQ ID NO: 315780 - DNA, 30 bp, Artificial Sequence
  Synthetic oligonucleotide
taaggctacatcggcagcttgcgctatagg

SEQ ID NO: 315781 - DNA, 30 bp, Artificial Sequence
  Synthetic oligonucleotide
aacaggtgaagtcaaatcaatttctatagg

SEQ ID NO: 315782 - DNA, 30 bp, Artificial Sequence
  Synthetic oligonucleotide
accttgttagaagtcatcgttaagtatagg

SEQ ID NO: 315783 - DNA, 30 bp, Artificial Sequence
  Synthetic oligonucleotide
acgcgcgtatgctgagtaaatgggtatagg

SEQ ID NO: 315784 - DNA, 30 bp, Artificial Sequence
  Synthetic oligonucleotide
atctccaatatcaaaattaattggtatagg

SEQ ID NO: 315785 - DNA, 30 bp, Artificial Sequence
  Synthetic oligonucleotide
atgtcccacgcaagcgacccgtcttatagg

SEQ ID NO: 315786 - DNA, 30 bp, Artificial Sequence
  Synthetic oligonucleotide
cttccaggcaccaatcttggtaaaactagg

SEQ ID NO: 315787 - DNA, 30 bp, Artificial Sequence
  Synthetic oligonucleotide
ggtttacttttcgttgatgtctaaactagg

SEQ ID NO: 315788 - DNA, 30 bp, Artificial Sequence
  Synthetic oligonucleotide
catcgactgcgggctagaggccccactagg

SEQ ID NO: 315789 - DNA, 30 bp, Artificial Sequence
  Synthetic oligonucleotide
ggataatttaagctaggaaatcccactagg

SEQ ID NO: 315790 - DNA, 30 bp, Artificial Sequence
  Synthetic oligonucleotide
aacgagcgccattgggttgtcatcactagg

SEQ ID NO: 315791 - DNA, 30 bp, Artificial Sequence
  Synthetic oligonucleotide
gttagtgtcaattggttactcgggactagg

SEQ ID NO: 315792 - DNA, 30 bp, Artificial Sequence
  Synthetic oligonucleotide
gcgctgggactacgctaaaggcgtactagg

SEQ ID NO: 315793 - DNA, 30 bp, Artificial Sequence
  Synthetic oligonucleotide
atattggcggcgtttgtcaaaattactagg

SEQ ID NO: 315794 - DNA, 30 bp, Artificial Sequence
  Synthetic oligonucleotide
tggtcacgttgcgaaccttatgttactagg

SEQ ID NO: 315795 - DNA, 30 bp, Artificial Sequence
  Synthetic oligonucleotide
gaacacgggggtagtcgttaactacctagg

SEQ ID NO: 315796 - DNA, 30 bp, Artificial Sequence
  Synthetic oligonucleotide
tttaggtcggtaacgggtctttaccctagg

SEQ ID NO: 315797 - DNA, 30 bp, Artificial Sequence
  Synthetic oligonucleotide
tgtggggcaaaagtttcagaatcccctagg

SEQ ID NO: 315798 - DNA, 30 bp, Artificial Sequence
  Synthetic oligonucleotide
catgagagtttttttcccacgctccctagg

SEQ ID NO: 315799 - DNA, 30 bp, Artificial Sequence
  Synthetic oligonucleotide
caaaataggtcgatccattgaaggcctagg

SEQ ID NO: 315800 - DNA, 30 bp, Artificial Sequence
  Synthetic oligonucleotide
acgatctaaatctcgcgacagtatcctagg

SEQ ID NO: 315801 - DNA, 30 bp, Artificial Sequence
  Synthetic oligonucleotide
ggaccgcttttctcgtagaaagaagctagg

SEQ ID NO: 315802 - DNA, 30 bp, Artificial Sequence
  Synthetic oligonucleotide
aaagggagaagctgtaaggggggcgctagg

SEQ ID NO: 315803 - DNA, 30 bp, Artificial Sequence
  Synthetic oligonucleotide
ataaagcgtagctcggccgacaaggctagg

SEQ ID NO: 315804 - DNA, 30 bp, Artificial Sequence
  Synthetic oligonucleotide
gatgaagattactcggtcgttacggctagg

SEQ ID NO: 315805 - DNA, 30 bp, Artificial Sequence
  Synthetic oligonucleotide
gcttagacccttagtgagtaaggggctagg

SEQ ID NO: 315806 - DNA, 30 bp, Artificial Sequence
  Synthetic oligonucleotide
tgggtctttcatagtaagaataaatctagg

SEQ ID NO: 315807 - DNA, 30 bp, Artificial Sequence
  Synthetic oligonucleotide
accttgatctaatgacaggctacatctagg

SEQ ID NO: 315808 - DNA, 30 bp, Artificial Sequence
  Synthetic oligonucleotide
ttactacgggggcgttatagccgatctagg

SEQ ID NO: 315809 - DNA, 30 bp, Artificial Sequence
  Synthetic oligonucleotide
acttctgcatcagggatcggaatatctagg

SEQ ID NO: 315810 - DNA, 30 bp, Artificial Sequence
  Synthetic oligonucleotide
ggtacttttagtgtgctaaataagtctagg

SEQ ID NO: 315811 - DNA, 30 bp, Artificial Sequence
  Synthetic oligonucleotide
tccgcgcgttgcccgtcccgcgagtctagg

SEQ ID NO: 315812 - DNA, 30 bp, Artificial Sequence
  Synthetic oligonucleotide
aaagaggtgaaacggctcgataggtctagg

SEQ ID NO: 315813 - DNA, 30 bp, Artificial Sequence
  Synthetic oligonucleotide
atgaggaacccttatactgactggtctagg

SEQ ID NO: 315814 - DNA, 30 bp, Artificial Sequence
  Synthetic oligonucleotide
gcgtgccaacgttctatcacaggttctagg

SEQ ID NO: 315815 - DNA, 30 bp, Artificial Sequence
  Synthetic oligonucleotide
tgctatatgttggttgttctagaaagtagg

SEQ ID NO: 315816 - DNA, 30 bp, Artificial Sequence
  Synthetic oligonucleotide
tagaagtctaggtcattgcagtcaagtagg

SEQ ID NO: 315817 - DNA, 30 bp, Artificial Sequence
  Synthetic oligonucleotide
gtactcctctgggagtgctgcataagtagg

SEQ ID NO: 315818 - DNA, 30 bp, Artificial Sequence
  Synthetic oligonucleotide
tgtccacgtataaatggggaagtaagtagg

SEQ ID NO: 315819 - DNA, 30 bp, Artificial Sequence
  Synthetic oligonucleotide
acagttatattacttcaaatattaagtagg

SEQ ID NO: 315820 - DNA, 30 bp, Artificial Sequence
  Synthetic oligonucleotide
cttaacaaatacgtgtttgtcaccagtagg

SEQ ID NO: 315821 - DNA, 30 bp, Artificial Sequence
  Synthetic oligonucleotide
acacctacccgactcaagatgtagagtagg

SEQ ID NO: 315822 - DNA, 30 bp, Artificial Sequence
  Synthetic oligonucleotide
gcccttttggtaataggggaaagtagtagg

SEQ ID NO: 315823 - DNA, 30 bp, Artificial Sequence
  Synthetic oligonucleotide
ggatgtgccaggccgatagtagcacgtagg

SEQ ID NO: 315824 - DNA, 30 bp, Artificial Sequence
  Synthetic oligonucleotide
gttgttgagggttgtgcgcatggccgtagg

SEQ ID NO: 315825 - DNA, 30 bp, Artificial Sequence
  Synthetic oligonucleotide
gagtacggctaccgtctaagtaagcgtagg

SEQ ID NO: 315826 - DNA, 30 bp, Artificial Sequence
  Synthetic oligonucleotide
cgatcccgcatatagcaacaatctcgtagg

SEQ ID NO: 315827 - DNA, 29 bp, Artificial Sequence
  Synthetic oligonucleotide
gtagagccccgtattaagatggtcgtagg

SEQ ID NO: 315828 - DNA, 30 bp, Artificial Sequence
  Synthetic oligonucleotide
gactgtaccggaaacctccagtcaggtagg

SEQ ID NO: 315829 - DNA, 29 bp, Artificial Sequence
  Synthetic oligonucleotide
ctagaatcttagttaggatttgaggtagg

SEQ ID NO: 315830 - DNA, 30 bp, Artificial Sequence
  Synthetic oligonucleotide
ccgcctacatgtgcacttactatcggtagg

SEQ ID NO: 315831 - DNA, 30 bp, Artificial Sequence
  Synthetic oligonucleotide
ctgtctatcggctgagaggggttcggtagg

SEQ ID NO: 315832 - DNA, 30 bp, Artificial Sequence
  Synthetic oligonucleotide
ggggcgattgccaacctgggagggggtagg

SEQ ID NO: 315833 - DNA, 30 bp, Artificial Sequence
  Synthetic oligonucleotide
cgttttggggtctggaatgacgggggtagg

SEQ ID NO: 315834 - DNA, 30 bp, Artificial Sequence
  Synthetic oligonucleotide
aagagtacgtgtacatggaagcatggtagg

SEQ ID NO: 315835 - DNA, 30 bp, Artificial Sequence
  Synthetic oligonucleotide
ctcgggtcattttcgaaaggtaaatgtagg

SEQ ID NO: 315836 - DNA, 30 bp, Artificial Sequence
  Synthetic oligonucleotide
tggccgttctatgtaagatcctcatgtagg

SEQ ID NO: 315837 - DNA, 30 bp, Artificial Sequence
  Synthetic oligonucleotide
ctagcaaattattgttgtgactcctgtagg

SEQ ID NO: 315838 - DNA, 30 bp, Artificial Sequence
  Synthetic oligonucleotide
ttcggtccattttgcagcaaagcgtgtagg

SEQ ID NO: 315839 - DNA, 30 bp, Artificial Sequence
  Synthetic oligonucleotide
ataacagtatcaactacggtctcgtgtagg

SEQ ID NO: 315840 - DNA, 30 bp, Artificial Sequence
  Synthetic oligonucleotide
agaaagattattagtgacgtgaggtgtagg

SEQ ID NO: 315841 - DNA, 30 bp, Artificial Sequence
  Synthetic oligonucleotide
agacgctattgtatttagtgggtgtgtagg

SEQ ID NO: 315842 - DNA, 30 bp, Artificial Sequence
  Synthetic oligonucleotide
agcgcttgtcgaagctgctagccttgtagg

SEQ ID NO: 315843 - DNA, 30 bp, Artificial Sequence
  Synthetic oligonucleotide
ttataccctctaggcagaaggcacattagg

SEQ ID NO: 315844 - DNA, 30 bp, Artificial Sequence
  Synthetic oligonucleotide
cggcgtcggaaagacgcgaactgcattagg

SEQ ID NO: 315845 - DNA, 30 bp, Artificial Sequence
  Synthetic oligonucleotide
aagtaccgggaaggtatgcctttcattagg

SEQ ID NO: 315846 - DNA, 30 bp, Artificial Sequence
  Synthetic oligonucleotide
atttgaatcagtttcaaaagaaagattagg

SEQ ID NO: 315847 - DNA, 30 bp, Artificial Sequence
  Synthetic oligonucleotide
tagagattgctacaataaatccagattagg

SEQ ID NO: 315848 - DNA, 30 bp, Artificial Sequence
  Synthetic oligonucleotide
ttgcggcggcgtttagatgtgcgtattagg

SEQ ID NO: 315849 - DNA, 30 bp, Artificial Sequence
  Synthetic oligonucleotide
cggcatactagcgataaattagttattagg

SEQ ID NO: 315850 - DNA, 30 bp, Artificial Sequence
  Synthetic oligonucleotide
tgcgctcgctgggaggcgatacaacttagg

SEQ ID NO: 315851 - DNA, 30 bp, Artificial Sequence
  Synthetic oligonucleotide
atatcattgactgcggaccagcaacttagg

SEQ ID NO: 315852 - DNA, 30 bp, Artificial Sequence
  Synthetic oligonucleotide
ttacaaaaaatttgactcgttacacttagg

SEQ ID NO: 315853 - DNA, 30 bp, Artificial Sequence
  Synthetic oligonucleotide
tgtagatagcccctaagccatggacttagg

SEQ ID NO: 315854 - DNA, 30 bp, Artificial Sequence
  Synthetic oligonucleotide
atatgccatgtaagcagacccgtacttagg

SEQ ID NO: 315855 - DNA, 30 bp, Artificial Sequence
  Synthetic oligonucleotide
tctagaaaatacgcgttttcataccttagg

SEQ ID NO: 315856 - DNA, 30 bp, Artificial Sequence
  Synthetic oligonucleotide
atcgcggtcgttcgcctcgcatagcttagg

SEQ ID NO: 315857 - DNA, 30 bp, Artificial Sequence
  Synthetic oligonucleotide
gaaactatgtcgctagataatattcttagg

SEQ ID NO: 315858 - DNA, 30 bp, Artificial Sequence
  Synthetic oligonucleotide
cgcttccgactgacatcctaagaagttagg

SEQ ID NO: 315859 - DNA, 30 bp, Artificial Sequence
  Synthetic oligonucleotide
cttgtgaaagggattttcgaaagagttagg

SEQ ID NO: 315860 - DNA, 30 bp, Artificial Sequence
  Synthetic oligonucleotide
gtctaactcggcaagtactgcagcgttagg

SEQ ID NO: 315861 - DNA, 30 bp, Artificial Sequence
  Synthetic oligonucleotide
atcgttccctcgcggtccagcacggttagg

SEQ ID NO: 315862 - DNA, 30 bp, Artificial Sequence
  Synthetic oligonucleotide
gaagagacggcaaactaagctagggttagg

SEQ ID NO: 315863 - DNA, 30 bp, Artificial Sequence
  Synthetic oligonucleotide
aggggcttctatgtacccatatgggttagg

SEQ ID NO: 315864 - DNA, 30 bp, Artificial Sequence
  Synthetic oligonucleotide
gtatttggacttaacgatataactgttagg

SEQ ID NO: 315865 - DNA, 30 bp, Artificial Sequence
  Synthetic oligonucleotide
gggggctagtagtcaatcttttcatttagg

SEQ ID NO: 315866 - DNA, 30 bp, Artificial Sequence
  Synthetic oligonucleotide
atgtactcgtctaatttatgttgatttagg

SEQ ID NO: 315867 - DNA, 30 bp, Artificial Sequence
  Synthetic oligonucleotide
gtgatatcttcacggccagcaatctttagg

SEQ ID NO: 315868 - DNA, 30 bp, Artificial Sequence
  Synthetic oligonucleotide
acatgttccccggagtagacagtctttagg

SEQ ID NO: 315869 - DNA, 30 bp, Artificial Sequence
  Synthetic oligonucleotide
taatagtttcggctaacatgggtctttagg

SEQ ID NO: 315870 - DNA, 30 bp, Artificial Sequence
  Synthetic oligonucleotide
ggttccatgggtttaaacatgtcgtttagg

SEQ ID NO: 315871 - DNA, 30 bp, Artificial Sequence
  Synthetic oligonucleotide
ataggaatattgatttacaaatcttttagg

SEQ ID NO: 315872 - DNA, 30 bp, Artificial Sequence
  Synthetic oligonucleotide
ctcggtacgcgttgacgtaatccaaaacgg

SEQ ID NO: 315873 - DNA, 30 bp, Artificial Sequence
  Synthetic oligonucleotide
gatgctttaggtcacgacccggcaaaacgg

SEQ ID NO: 315874 - DNA, 30 bp, Artificial Sequence
  Synthetic oligonucleotide
tagataagagggcttaattgttcaaaacgg

SEQ ID NO: 315875 - DNA, 30 bp, Artificial Sequence
  Synthetic oligonucleotide
attagatactgattcggtcaatacaaacgg

SEQ ID NO: 315876 - DNA, 30 bp, Artificial Sequence
  Synthetic oligonucleotide
gcctctagcagaaccacctagagcaaacgg

SEQ ID NO: 315877 - DNA, 30 bp, Artificial Sequence
  Synthetic oligonucleotide
aactaagaaatttcggggtcgggcaaacgg

SEQ ID NO: 315878 - DNA, 30 bp, Artificial Sequence
  Synthetic oligonucleotide
gtactagaaaggcaacttcggtagaaacgg

SEQ ID NO: 315879 - DNA, 30 bp, Artificial Sequence
  Synthetic oligonucleotide
cattggactagcgtaggatatgggaaacgg

SEQ ID NO: 315880 - DNA, 30 bp, Artificial Sequence
  Synthetic oligonucleotide
acaagggtttcgttcactatattgaaacgg

SEQ ID NO: 315881 - DNA, 30 bp, Artificial Sequence
  Synthetic oligonucleotide
tgaggctgaatagtcgtaaagaataaacgg

SEQ ID NO: 315882 - DNA, 30 bp, Artificial Sequence
  Synthetic oligonucleotide
gacagtaggtctgccagggtgactaaacgg

SEQ ID NO: 315883 - DNA, 30 bp, Artificial Sequence
  Synthetic oligonucleotide
gcgtggggcaacggttccatggttaaacgg

SEQ ID NO: 315884 - DNA, 30 bp, Artificial Sequence
  Synthetic oligonucleotide
ggaccaactttacacgaatcgtttaaacgg

SEQ ID NO: 315885 - DNA, 30 bp, Artificial Sequence
  Synthetic oligonucleotide
cacccgcgagaccctcacaatgaacaacgg

SEQ ID NO: 315886 - DNA, 31 bp, Artificial Sequence
  Synthetic oligonucleotide
agcctcgacacatcacccaaacacccaacgg

SEQ ID NO: 315887 - DNA, 30 bp, Artificial Sequence
  Synthetic oligonucleotide
gaactcaatcccaacccccttctgcaacgg

SEQ ID NO: 315888 - DNA, 30 bp, Artificial Sequence
  Synthetic oligonucleotide
gccatgagatacgtcaaacgcattcaacgg

SEQ ID NO: 315889 - DNA, 30 bp, Artificial Sequence
  Synthetic oligonucleotide
atggcggtgtgctaagggttcaaagaacgg

SEQ ID NO: 315890 - DNA, 30 bp, Artificial Sequence
  Synthetic oligonucleotide
ccggagaattgagcacgcacgtacgaacgg

SEQ ID NO: 315891 - DNA, 30 bp, Artificial Sequence
  Synthetic oligonucleotide
tcaaatagcggtccatcgataagggaacgg

SEQ ID NO: 315892 - DNA, 30 bp, Artificial Sequence
  Synthetic oligonucleotide
tgggtaatatcctgctcctcgtgggaacgg

SEQ ID NO: 315893 - DNA, 30 bp, Artificial Sequence
  Synthetic oligonucleotide
ttttgggaataacctgtccgacttgaacgg

SEQ ID NO: 315894 - DNA, 30 bp, Artificial Sequence
  Synthetic oligonucleotide
gatcaacagtcaaatgtggacggataacgg

SEQ ID NO: 315895 - DNA, 30 bp, Artificial Sequence
  Synthetic oligonucleotide
cttgcacacgctaagtgttgcgactaacgg

SEQ ID NO: 315896 - DNA, 30 bp, Artificial Sequence
  Synthetic oligonucleotide
cttacatgtggatgagacataatctaacgg

SEQ ID NO: 315897 - DNA, 30 bp, Artificial Sequence
  Synthetic oligonucleotide
gtccgtgcagtcgacggaatcacgtaacgg

SEQ ID NO: 315898 - DNA, 30 bp, Artificial Sequence
  Synthetic oligonucleotide
caacgtcctcgaattttcgagacgtaacgg

SEQ ID NO: 315899 - DNA, 30 bp, Artificial Sequence
  Synthetic oligonucleotide
gggggatgatcagcacggagtttgtaacgg

SEQ ID NO: 315900 - DNA, 30 bp, Artificial Sequence
  Synthetic oligonucleotide
caagatacaacctattgagccgattaacgg

SEQ ID NO: 315901 - DNA, 30 bp, Artificial Sequence
  Synthetic oligonucleotide
atgtgccaagatgttctcagtggaacacgg

SEQ ID NO: 315902 - DNA, 30 bp, Artificial Sequence
  Synthetic oligonucleotide
aaaagagcatctttagttttcgtaacacgg

SEQ ID NO: 315903 - DNA, 30 bp, Artificial Sequence
  Synthetic oligonucleotide
gacaggcgtcacgcaagccccaacacacgg

SEQ ID NO: 315904 - DNA, 30 bp, Artificial Sequence
  Synthetic oligonucleotide
tcgctgcattgtaactcggagatcacacgg

SEQ ID NO: 315905 - DNA, 30 bp, Artificial Sequence
  Synthetic oligonucleotide
gtgttatcactcgattgcaggctcacacgg

SEQ ID NO: 315906 - DNA, 30 bp, Artificial Sequence
  Synthetic oligonucleotide
cgaaccataaataatcacacggctacacgg

SEQ ID NO: 315907 - DNA, 30 bp, Artificial Sequence
  Synthetic oligonucleotide
tttgataagtaaacgcgaatctgtacacgg

SEQ ID NO: 315908 - DNA, 30 bp, Artificial Sequence
  Synthetic oligonucleotide
cggcataatggccttttgaattttacacgg

SEQ ID NO: 315909 - DNA, 30 bp, Artificial Sequence
  Synthetic oligonucleotide
cggacgacagctacggacgggcaaccacgg

SEQ ID NO: 315910 - DNA, 30 bp, Artificial Sequence
  Synthetic oligonucleotide
taacatggcagtatgctggatacaccacgg

SEQ ID NO: 315911 - DNA, 31 bp, Artificial Sequence
  Synthetic oligonucleotide
tccaggctagcatataatgccacagccacgg

SEQ ID NO: 315912 - DNA, 30 bp, Artificial Sequence
  Synthetic oligonucleotide
aaggtggagattgtcggttatggcgcacgg

SEQ ID NO: 315913 - DNA, 30 bp, Artificial Sequence
  Synthetic oligonucleotide
cgtgcatcaatgtggagtacgtcggcacgg

SEQ ID NO: 315914 - DNA, 30 bp, Artificial Sequence
  Synthetic oligonucleotide
gtgtggcacaccatccgccgaggggcacgg

SEQ ID NO: 315915 - DNA, 30 bp, Artificial Sequence
  Synthetic oligonucleotide
tgattgaattggaagaaagtctgggcacgg

SEQ ID NO: 315916 - DNA, 30 bp, Artificial Sequence
  Synthetic oligonucleotide
gggggactgcatgttgcaggagatgcacgg

SEQ ID NO: 315917 - DNA, 30 bp, Artificial Sequence
  Synthetic oligonucleotide
accagtttgttctgtcatcgtctatcacgg

SEQ ID NO: 315918 - DNA, 30 bp, Artificial Sequence
  Synthetic oligonucleotide
tactcggcgatttccgtacataagtcacgg

SEQ ID NO: 315919 - DNA, 30 bp, Artificial Sequence
  Synthetic oligonucleotide
tgaaagtagaaggttaatttagagtcacgg

SEQ ID NO: 315920 - DNA, 30 bp, Artificial Sequence
  Synthetic oligonucleotide
agacaggtgatctcccgtgaacgcagacgg

SEQ ID NO: 315921 - DNA, 30 bp, Artificial Sequence
  Synthetic oligonucleotide
gaattaggtactggtcacgaatagagacgg

SEQ ID NO: 315922 - DNA, 30 bp, Artificial Sequence
  Synthetic oligonucleotide
gactgatatgtcatggatgtctcgagacgg

SEQ ID NO: 315923 - DNA, 30 bp, Artificial Sequence
  Synthetic oligonucleotide
taaccccgaacccaatatttcgggagacgg

SEQ ID NO: 315924 - DNA, 30 bp, Artificial Sequence
  Synthetic oligonucleotide
agtgcagctctcagcacatgaatgagacgg

SEQ ID NO: 315925 - DNA, 30 bp, Artificial Sequence
  Synthetic oligonucleotide
tgatcgagagcgttggtacgacatagacgg

SEQ ID NO: 315926 - DNA, 30 bp, Artificial Sequence
  Synthetic oligonucleotide
ggtcattgggtagccctagaaactagacgg

SEQ ID NO: 315927 - DNA, 30 bp, Artificial Sequence
  Synthetic oligonucleotide
ggcttgtgatgtgtgtccaaacgtagacgg

SEQ ID NO: 315928 - DNA, 30 bp, Artificial Sequence
  Synthetic oligonucleotide
gtgtcctgtccgaatgatctcgaccgacgg

SEQ ID NO: 315929 - DNA, 30 bp, Artificial Sequence
  Synthetic oligonucleotide
atactgcgcattgactcgtaccgccgacgg

SEQ ID NO: 315930 - DNA, 30 bp, Artificial Sequence
  Synthetic oligonucleotide
gtctaagtaacgtgagtggctgggcgacgg

SEQ ID NO: 315931 - DNA, 30 bp, Artificial Sequence
  Synthetic oligonucleotide
gtaactaagggaacccgggtcggtcgacgg

SEQ ID NO: 315932 - DNA, 30 bp, Artificial Sequence
  Synthetic oligonucleotide
ctcaaaagtcacattttatttcaaggacgg

SEQ ID NO: 315933 - DNA, 30 bp, Artificial Sequence
  Synthetic oligonucleotide
cataccgtatctgtcagtggctaaggacgg

SEQ ID NO: 315934 - DNA, 30 bp, Artificial Sequence
  Synthetic oligonucleotide
gaaaggaaatatgctgaaggtaccggacgg

SEQ ID NO: 315935 - DNA, 30 bp, Artificial Sequence
  Synthetic oligonucleotide
gttagcagcactaactctatactcggacgg

SEQ ID NO: 315936 - DNA, 30 bp, Artificial Sequence
  Synthetic oligonucleotide
cgcacaccatggatgtaatgtaagggacgg

SEQ ID NO: 315937 - DNA, 30 bp, Artificial Sequence
  Synthetic oligonucleotide
ctcaaggtgagctagctatttgggggacgg

SEQ ID NO: 315938 - DNA, 30 bp, Artificial Sequence
  Synthetic oligonucleotide
aggcaggattctttattcagatggggacgg

SEQ ID NO: 315939 - DNA, 30 bp, Artificial Sequence
  Synthetic oligonucleotide
gttgaggaggaataccagctttgtggacgg

SEQ ID NO: 315940 - DNA, 30 bp, Artificial Sequence
  Synthetic oligonucleotide
tcgttataaagggcgagatccgttggacgg

SEQ ID NO: 315941 - DNA, 30 bp, Artificial Sequence
  Synthetic oligonucleotide
ctctggttcaggacagtatcggcatgacgg

SEQ ID NO: 315942 - DNA, 30 bp, Artificial Sequence
  Synthetic oligonucleotide
gtaacagtgatgagtccaaaaggctgacgg

SEQ ID NO: 315943 - DNA, 30 bp, Artificial Sequence
  Synthetic oligonucleotide
atacaccgtaatatcgtatgtgcgtgacgg

SEQ ID NO: 315944 - DNA, 30 bp, Artificial Sequence
  Synthetic oligonucleotide
atcgcattccgtgcatgttgggggtgacgg

SEQ ID NO: 315945 - DNA, 30 bp, Artificial Sequence
  Synthetic oligonucleotide
ggaccgcaaggggcctggtaatcttgacgg

SEQ ID NO: 315946 - DNA, 30 bp, Artificial Sequence
  Synthetic oligonucleotide
gtgggctaacgacctctttcatcaatacgg

SEQ ID NO: 315947 - DNA, 30 bp, Artificial Sequence
  Synthetic oligonucleotide
actgcccccccggcactggggtcaatacgg

SEQ ID NO: 315948 - DNA, 30 bp, Artificial Sequence
  Synthetic oligonucleotide
gagcgtactgaagggggttgccccatacgg

SEQ ID NO: 315949 - DNA, 30 bp, Artificial Sequence
  Synthetic oligonucleotide
gcctgattgcgcaataatcaattcatacgg

SEQ ID NO: 315950 - DNA, 30 bp, Artificial Sequence
  Synthetic oligonucleotide
ttaggagtataggtcgataataggatacgg

SEQ ID NO: 315951 - DNA, 30 bp, Artificial Sequence
  Synthetic oligonucleotide
gtccctctacacggatagtatcggatacgg

SEQ ID NO: 315952 - DNA, 30 bp, Artificial Sequence
  Synthetic oligonucleotide
gttgttaagaaaggcggcaacgggatacgg

SEQ ID NO: 315953 - DNA, 30 bp, Artificial Sequence
  Synthetic oligonucleotide
gaggttgaatggtacctcagatggatacgg

SEQ ID NO: 315954 - DNA, 30 bp, Artificial Sequence
  Synthetic oligonucleotide
cagcgtggtttgagaaattatatgatacgg

SEQ ID NO: 315955 - DNA, 30 bp, Artificial Sequence
  Synthetic oligonucleotide
ttcgactcatcttgtctcgggctgatacgg

SEQ ID NO: 315956 - DNA, 30 bp, Artificial Sequence
  Synthetic oligonucleotide
ggccacataagatgactccttgtgatacgg

SEQ ID NO: 315957 - DNA, 30 bp, Artificial Sequence
  Synthetic oligonucleotide
atggcagtgcggcatttatcgcctatacgg

SEQ ID NO: 315958 - DNA, 30 bp, Artificial Sequence
  Synthetic oligonucleotide
ggttactctggcatttcccgagctatacgg

SEQ ID NO: 315959 - DNA, 30 bp, Artificial Sequence
  Synthetic oligonucleotide
gcgctgagtcttagtataaaaggtatacgg

SEQ ID NO: 315960 - DNA, 30 bp, Artificial Sequence
  Synthetic oligonucleotide
cctaacgataagcgcatctgattactacgg

SEQ ID NO: 315961 - DNA, 30 bp, Artificial Sequence
  Synthetic oligonucleotide
atggcttcggacatttttcaaaatctacgg

SEQ ID NO: 315962 - DNA, 30 bp, Artificial Sequence
  Synthetic oligonucleotide
ggttcgagactatttccggttgacgtacgg

SEQ ID NO: 315963 - DNA, 30 bp, Artificial Sequence
  Synthetic oligonucleotide
taagggtaaacgtaccccttatacgtacgg

SEQ ID NO: 315964 - DNA, 30 bp, Artificial Sequence
  Synthetic oligonucleotide
agtcaacatgtaagttttgacatcgtacgg

SEQ ID NO: 315965 - DNA, 30 bp, Artificial Sequence
  Synthetic oligonucleotide
acgcatctcctatggctgccaacggtacgg

SEQ ID NO: 315966 - DNA, 30 bp, Artificial Sequence
  Synthetic oligonucleotide
ctagcgtaggcgatgtcctagccggtacgg

SEQ ID NO: 315967 - DNA, 30 bp, Artificial Sequence
  Synthetic oligonucleotide
gttgattagttcacattcattcgggtacgg

SEQ ID NO: 315968 - DNA, 30 bp, Artificial Sequence
  Synthetic oligonucleotide
gtgcagtccgcacgaaagctctgggtacgg

SEQ ID NO: 315969 - DNA, 30 bp, Artificial Sequence
  Synthetic oligonucleotide
gtgtttacggcggaatcattcattgtacgg

SEQ ID NO: 315970 - DNA, 30 bp, Artificial Sequence
  Synthetic oligonucleotide
cgcgtatattaatctagtattcaattacgg

SEQ ID NO: 315971 - DNA, 30 bp, Artificial Sequence
  Synthetic oligonucleotide
ttacatacatttacgtatgtacgattacgg

SEQ ID NO: 315972 - DNA, 30 bp, Artificial Sequence
  Synthetic oligonucleotide
ctctggcaatatacatataggggattacgg

SEQ ID NO: 315973 - DNA, 30 bp, Artificial Sequence
  Synthetic oligonucleotide
ggcgatctttataagaatcatggattacgg

SEQ ID NO: 315974 - DNA, 30 bp, Artificial Sequence
  Synthetic oligonucleotide
ccaggctccggaaacatgcatatattacgg

SEQ ID NO: 315975 - DNA, 30 bp, Artificial Sequence
  Synthetic oligonucleotide
atctgacagaagggcttgactaagttacgg

SEQ ID NO: 315976 - DNA, 30 bp, Artificial Sequence
  Synthetic oligonucleotide
gctgcaggcttccggatacactggttacgg

SEQ ID NO: 315977 - DNA, 30 bp, Artificial Sequence
  Synthetic oligonucleotide
cccgacatggccccaaatggcgatttacgg

SEQ ID NO: 315978 - DNA, 30 bp, Artificial Sequence
  Synthetic oligonucleotide
aatactaatgggaactgcgagtgtttacgg

SEQ ID NO: 315979 - DNA, 30 bp, Artificial Sequence
  Synthetic oligonucleotide
agttaatagtttgaagtcttgcttttacgg

SEQ ID NO: 315980 - DNA, 30 bp, Artificial Sequence
  Synthetic oligonucleotide
gagatttatagcgaagtaaactaaaaccgg

SEQ ID NO: 315981 - DNA, 30 bp, Artificial Sequence
  Synthetic oligonucleotide
tatatccctgtagagaacacgacaaaccgg

SEQ ID NO: 315982 - DNA, 30 bp, Artificial Sequence
  Synthetic oligonucleotide
aagccaatagaaaagttgagctacaaccgg

SEQ ID NO: 315983 - DNA, 30 bp, Artificial Sequence
  Synthetic oligonucleotide
tcccataagtctgtaagaccagccaaccgg

SEQ ID NO: 315984 - DNA, 30 bp, Artificial Sequence
  Synthetic oligonucleotide
tgggcgaaggcgcggatagggcctaaccgg

SEQ ID NO: 315985 - DNA, 30 bp, Artificial Sequence
  Synthetic oligonucleotide
ttcaactctgaatcagtgacaagtaaccgg

SEQ ID NO: 315986 - DNA, 30 bp, Artificial Sequence
  Synthetic oligonucleotide
aggctgcctgagtagagactgcaacaccgg

SEQ ID NO: 315987 - DNA, 30 bp, Artificial Sequence
  Synthetic oligonucleotide
tgtataggtgcggctagccaatcacaccgg

SEQ ID NO: 315988 - DNA, 30 bp, Artificial Sequence
  Synthetic oligonucleotide
aaacaatattacctccggttgtgccaccgg

SEQ ID NO: 315989 - DNA, 30 bp, Artificial Sequence
  Synthetic oligonucleotide
cggcgattagaaagtgttctcacgcaccgg

SEQ ID NO: 315990 - DNA, 30 bp, Artificial Sequence
  Synthetic oligonucleotide
aggtgtgtgacgaactccgaaaatcaccgg

SEQ ID NO: 315991 - DNA, 30 bp, Artificial Sequence
  Synthetic oligonucleotide
tcggtcagcaaaataacgcgttttcaccgg

SEQ ID NO: 315992 - DNA, 30 bp, Artificial Sequence
  Synthetic oligonucleotide
gccatccgacttcacgctacgcaagaccgg

SEQ ID NO: 315993 - DNA, 30 bp, Artificial Sequence
  Synthetic oligonucleotide
caaacgtgcctcgattattacagcgaccgg

SEQ ID NO: 315994 - DNA, 30 bp, Artificial Sequence
  Synthetic oligonucleotide
gcgctaaaggtggagccatagtgcgaccgg

SEQ ID NO: 315995 - DNA, 30 bp, Artificial Sequence
  Synthetic oligonucleotide
ctcgttagcgcacagatcagtttcgaccgg

SEQ ID NO: 315996 - DNA, 30 bp, Artificial Sequence
  Synthetic oligonucleotide
aatagcaggatatggtagggatcggaccgg

SEQ ID NO: 315997 - DNA, 30 bp, Artificial Sequence
  Synthetic oligonucleotide
gtggcagggtgggctcaggaactggaccgg

SEQ ID NO: 315998 - DNA, 29 bp, Artificial Sequence
  Synthetic oligonucleotide
ggagcgttttaaactgatgaggtgaccgg

SEQ ID NO: 315999 - DNA, 30 bp, Artificial Sequence
  Synthetic oligonucleotide
agaggatacacacccggtatgccataccgg

SEQ ID NO: 316000 - DNA, 30 bp, Artificial Sequence
  Synthetic oligonucleotide
gtcgataggaagcgccttgatgcataccgg

SEQ ID NO: 316001 - DNA, 30 bp, Artificial Sequence
  Synthetic oligonucleotide
acccatatttctccgtatgctctataccgg

SEQ ID NO: 316002 - DNA, 30 bp, Artificial Sequence
  Synthetic oligonucleotide
cgatgacgattcgggacggccctctaccgg

SEQ ID NO: 316003 - DNA, 30 bp, Artificial Sequence
  Synthetic oligonucleotide
gtttctaatccgaatgccccaaagtaccgg

SEQ ID NO: 316004 - DNA, 30 bp, Artificial Sequence
  Synthetic oligonucleotide
cacatgagactggaatgtagaccttaccgg

SEQ ID NO: 316005 - DNA, 30 bp, Artificial Sequence
  Synthetic oligonucleotide
ctatgcagaggcaatactcccctttaccgg

SEQ ID NO: 316006 - DNA, 30 bp, Artificial Sequence
  Synthetic oligonucleotide
agtaaaactatgctgccacgtagcacccgg

SEQ ID NO: 316007 - DNA, 30 bp, Artificial Sequence
  Synthetic oligonucleotide
agttgaaacgtggggtttgcgtgcacccgg

SEQ ID NO: 316008 - DNA, 30 bp, Artificial Sequence
  Synthetic oligonucleotide
accttcctcccagcaacacgttgcacccgg

SEQ ID NO: 316009 - DNA, 30 bp, Artificial Sequence
  Synthetic oligonucleotide
taatttgacggggagtctcacaagacccgg

SEQ ID NO: 316010 - DNA, 30 bp, Artificial Sequence
  Synthetic oligonucleotide
gttccggggccatagatccagcagacccgg

SEQ ID NO: 316011 - DNA, 30 bp, Artificial Sequence
  Synthetic oligonucleotide
gttatgtcgacatagtatctcgagacccgg

SEQ ID NO: 316012 - DNA, 30 bp, Artificial Sequence
  Synthetic oligonucleotide
cactttactgcaacgcgtttccaaccccgg

SEQ ID NO: 316013 - DNA, 30 bp, Artificial Sequence
  Synthetic oligonucleotide
agttcatcgcctcagcaatcagaaccccgg

SEQ ID NO: 316014 - DNA, 30 bp, Artificial Sequence
  Synthetic oligonucleotide
cctagactcactctgattgcgctaccccgg

SEQ ID NO: 316015 - DNA, 30 bp, Artificial Sequence
  Synthetic oligonucleotide
acaacacgcttgcaggcggaaaatccccgg

SEQ ID NO: 316016 - DNA, 30 bp, Artificial Sequence
  Synthetic oligonucleotide
agatatcaagcattttgagtggatccccgg

SEQ ID NO: 316017 - DNA, 30 bp, Artificial Sequence
  Synthetic oligonucleotide
tcgtaaaaggacgatgtccatactccccgg

SEQ ID NO: 316018 - DNA, 30 bp, Artificial Sequence
  Synthetic oligonucleotide
ttgtagtgactgtggtgtttaagtccccgg

SEQ ID NO: 316019 - DNA, 30 bp, Artificial Sequence
  Synthetic oligonucleotide
ccaggccaacagtatttatacattccccgg

SEQ ID NO: 316020 - DNA, 30 bp, Artificial Sequence
  Synthetic oligonucleotide
gaagtaagagcgtgattgtcagtagcccgg

SEQ ID NO: 316021 - DNA, 30 bp, Artificial Sequence
  Synthetic oligonucleotide
gcgagagcgtctattataactctcgcccgg

SEQ ID NO: 316022 - DNA, 30 bp, Artificial Sequence
  Synthetic oligonucleotide
gctttaagatccgtcggggagtcggcccgg

SEQ ID NO: 316023 - DNA, 30 bp, Artificial Sequence
  Synthetic oligonucleotide
atgttggacgtacgccaataagtggcccgg

SEQ ID NO: 316024 - DNA, 30 bp, Artificial Sequence
  Synthetic oligonucleotide
tgaacgtaccgagagatttatcctgcccgg

SEQ ID NO: 316025 - DNA, 30 bp, Artificial Sequence
  Synthetic oligonucleotide
ttcaaaatgtgcttgtacctagaatcccgg

SEQ ID NO: 316026 - DNA, 30 bp, Artificial Sequence
  Synthetic oligonucleotide
gtctgtatccgttagcctgtcacatcccgg

SEQ ID NO: 316027 - DNA, 30 bp, Artificial Sequence
  Synthetic oligonucleotide
gatttatcctcaccatctggagcatcccgg

SEQ ID NO: 316028 - DNA, 30 bp, Artificial Sequence
  Synthetic oligonucleotide
tgaagattaatggaacgttgggcatcccgg

SEQ ID NO: 316029 - DNA, 30 bp, Artificial Sequence
  Synthetic oligonucleotide
tcggcgtgcaacagcggggcaatatcccgg

SEQ ID NO: 316030 - DNA, 30 bp, Artificial Sequence
  Synthetic oligonucleotide
aaccgttggaagattgatttgatatcccgg

SEQ ID NO: 316031 - DNA, 30 bp, Artificial Sequence
  Synthetic oligonucleotide
ccggtacacgactatgttggcttatcccgg

SEQ ID NO: 316032 - DNA, 30 bp, Artificial Sequence
  Synthetic oligonucleotide
gacaatccattatgaagggtttactcccgg

SEQ ID NO: 316033 - DNA, 30 bp, Artificial Sequence
  Synthetic oligonucleotide
agtatagggccaccgaaactcgcgtcccgg

SEQ ID NO: 316034 - DNA, 30 bp, Artificial Sequence
  Synthetic oligonucleotide
gttgatgcacactcaggtacgttgtcccgg

SEQ ID NO: 316035 - DNA, 30 bp, Artificial Sequence
  Synthetic oligonucleotide
accattataaattcatcattggcaagccgg

SEQ ID NO: 316036 - DNA, 30 bp, Artificial Sequence
  Synthetic oligonucleotide
tgtagtctcgttgaaacgcagtgcagccgg

SEQ ID NO: 316037 - DNA, 30 bp, Artificial Sequence
  Synthetic oligonucleotide
ttccgcgtattaggctcgggaaaccgccgg

SEQ ID NO: 316038 - DNA, 30 bp, Artificial Sequence
  Synthetic oligonucleotide
aggcctttcccagttgctgaccgccgccgg

SEQ ID NO: 316039 - DNA, 30 bp, Artificial Sequence
  Synthetic oligonucleotide
accgaattcgctccgacatcgctccgccgg

SEQ ID NO: 316040 - DNA, 30 bp, Artificial Sequence
  Synthetic oligonucleotide
tgatataaccaacaacttgagacgcgccgg

SEQ ID NO: 316041 - DNA, 30 bp, Artificial Sequence
  Synthetic oligonucleotide
gttcatcatagttttctgtatcacggccgg

SEQ ID NO: 316042 - DNA, 30 bp, Artificial Sequence
  Synthetic oligonucleotide
ctaaggcggcgcacaaacttcggcggccgg

SEQ ID NO: 316043 - DNA, 30 bp, Artificial Sequence
  Synthetic oligonucleotide
tttaattatagtcgtcataagtgcggccgg

SEQ ID NO: 316044 - DNA, 30 bp, Artificial Sequence
  Synthetic oligonucleotide
acaggggatcaccagggagcgatgggccgg

SEQ ID NO: 316045 - DNA, 30 bp, Artificial Sequence
  Synthetic oligonucleotide
gcagggagacattccgaaccggctggccgg

SEQ ID NO: 316046 - DNA, 30 bp, Artificial Sequence
  Synthetic oligonucleotide
cataaatcagaccagacgattagtggccgg

SEQ ID NO: 316047 - DNA, 30 bp, Artificial Sequence
  Synthetic oligonucleotide
gacctcgcgtctatacctaggcgtggccgg

SEQ ID NO: 316048 - DNA, 30 bp, Artificial Sequence
  Synthetic oligonucleotide
cacataagttctgcggacgggtcatgccgg

SEQ ID NO: 316049 - DNA, 30 bp, Artificial Sequence
  Synthetic oligonucleotide
tctgaaccttggtcaaaataaccgtgccgg

SEQ ID NO: 316050 - DNA, 30 bp, Artificial Sequence
  Synthetic oligonucleotide
attcccgagcgctggtaggtatggtgccgg

SEQ ID NO: 316051 - DNA, 30 bp, Artificial Sequence
  Synthetic oligonucleotide
accctggaagctacatggtctgcaatccgg

SEQ ID NO: 316052 - DNA, 30 bp, Artificial Sequence
  Synthetic oligonucleotide
gctaccgaaatggcaacattaagaatccgg

SEQ ID NO: 316053 - DNA, 30 bp, Artificial Sequence
  Synthetic oligonucleotide
ttgggttattaggagataaacggaatccgg

SEQ ID NO: 316054 - DNA, 30 bp, Artificial Sequence
  Synthetic oligonucleotide
acgggacacaatgacggtggtgtaatccgg

SEQ ID NO: 316055 - DNA, 30 bp, Artificial Sequence
  Synthetic oligonucleotide
gtttgggatccatggactcgtacgatccgg

SEQ ID NO: 316056 - DNA, 30 bp, Artificial Sequence
  Synthetic oligonucleotide
ggtgagttgagaatggtgaattctatccgg

SEQ ID NO: 316057 - DNA, 30 bp, Artificial Sequence
  Synthetic oligonucleotide
cagcacagttgcaccgcaactcacctccgg

SEQ ID NO: 316058 - DNA, 30 bp, Artificial Sequence
  Synthetic oligonucleotide
ctccggtaccaagtttcgacttgcctccgg

SEQ ID NO: 316059 - DNA, 30 bp, Artificial Sequence
  Synthetic oligonucleotide
taagagcggcgcggatgcttcctcctccgg

SEQ ID NO: 316060 - DNA, 30 bp, Artificial Sequence
  Synthetic oligonucleotide
aaccttgtctcgtatgtgtaagcgctccgg

SEQ ID NO: 316061 - DNA, 30 bp, Artificial Sequence
  Synthetic oligonucleotide
ctggtgccgtaatgagtgatcgcgctccgg

SEQ ID NO: 316062 - DNA, 30 bp, Artificial Sequence
  Synthetic oligonucleotide
taccccagttttaatcgggaagatctccgg

SEQ ID NO: 316063 - DNA, 30 bp, Artificial Sequence
  Synthetic oligonucleotide
caaacaacggccgtctaaacagctctccgg

SEQ ID NO: 316064 - DNA, 30 bp, Artificial Sequence
  Synthetic oligonucleotide
aacggagtcgaacaaactgtaagtctccgg

SEQ ID NO: 316065 - DNA, 30 bp, Artificial Sequence
  Synthetic oligonucleotide
gaccgacttcaacactatgtaccagtccgg

SEQ ID NO: 316066 - DNA, 30 bp, Artificial Sequence
  Synthetic oligonucleotide
atgtagtacccgaaccggacactcgtccgg

SEQ ID NO: 316067 - DNA, 30 bp, Artificial Sequence
  Synthetic oligonucleotide
gaaataaaaccgccgaacttataggtccgg

SEQ ID NO: 316068 - DNA, 30 bp, Artificial Sequence
  Synthetic oligonucleotide
gagtcaggctatttgttaggaacggtccgg

SEQ ID NO: 316069 - DNA, 30 bp, Artificial Sequence
  Synthetic oligonucleotide
cataagcgatacttaccggacgccttccgg

SEQ ID NO: 316070 - DNA, 30 bp, Artificial Sequence
  Synthetic oligonucleotide
tcggggccaataaagactggcggtttccgg

SEQ ID NO: 316071 - DNA, 30 bp, Artificial Sequence
  Synthetic oligonucleotide
ttaactcttatagttgtcgaatttttccgg

SEQ ID NO: 316072 - DNA, 30 bp, Artificial Sequence
  Synthetic oligonucleotide
cgcagctatatcagtcaaggagaaaagcgg

SEQ ID NO: 316073 - DNA, 30 bp, Artificial Sequence
  Synthetic oligonucleotide
ctgactccaaagttgcatgggcggaagcgg

SEQ ID NO: 316074 - DNA, 30 bp, Artificial Sequence
  Synthetic oligonucleotide
cgtccatacggactacgtctctggaagcgg

SEQ ID NO: 316075 - DNA, 30 bp, Artificial Sequence
  Synthetic oligonucleotide
cacctatatcgtccctgcaggttgaagcgg

SEQ ID NO: 316076 - DNA, 30 bp, Artificial Sequence
  Synthetic oligonucleotide
tatggagaacagagtggtacgaataagcgg

SEQ ID NO: 316077 - DNA, 30 bp, Artificial Sequence
  Synthetic oligonucleotide
ataccgcgcgtggaatgaatagataagcgg

SEQ ID NO: 316078 - DNA, 30 bp, Artificial Sequence
  Synthetic oligonucleotide
ccggacacaagtagggttcggtataagcgg

SEQ ID NO: 316079 - DNA, 30 bp, Artificial Sequence
  Synthetic oligonucleotide
gattcaaaccggtgagactgctaacagcgg

SEQ ID NO: 316080 - DNA, 30 bp, Artificial Sequence
  Synthetic oligonucleotide
atcaaaaatgggctctctggcaggcagcgg

SEQ ID NO: 316081 - DNA, 30 bp, Artificial Sequence
  Synthetic oligonucleotide
ctcgttcgcttagaccatatggtgcagcgg

SEQ ID NO: 316082 - DNA, 31 bp, Artificial Sequence
  Synthetic oligonucleotide
aaaccaacacgaccatgacggcactcagcgg

SEQ ID NO: 316083 - DNA, 30 bp, Artificial Sequence
  Synthetic oligonucleotide
aactacaaatatgatcaaaaaagtcagcgg

SEQ ID NO: 316084 - DNA, 30 bp, Artificial Sequence
  Synthetic oligonucleotide
gttacgtgactctcaattaaaattcagcgg

SEQ ID NO: 316085 - DNA, 30 bp, Artificial Sequence
  Synthetic oligonucleotide
agcactccaaattgtgtaacacgagagcgg

SEQ ID NO: 316086 - DNA, 30 bp, Artificial Sequence
  Synthetic oligonucleotide
atggtacgtggtacaaacggtgacgagcgg

SEQ ID NO: 316087 - DNA, 30 bp, Artificial Sequence
  Synthetic oligonucleotide
atgtctgcgccagtagttcgacccgagcgg

SEQ ID NO: 316088 - DNA, 30 bp, Artificial Sequence
  Synthetic oligonucleotide
tcgttatctgcccgaggctaaggcgagcgg

SEQ ID NO: 316089 - DNA, 30 bp, Artificial Sequence
  Synthetic oligonucleotide
gtctattcggcgatagggttcctcgagcgg

SEQ ID NO: 316090 - DNA, 30 bp, Artificial Sequence
  Synthetic oligonucleotide
agtaagttaaccttctcattcggggagcgg

SEQ ID NO: 316091 - DNA, 30 bp, Artificial Sequence
  Synthetic oligonucleotide
atttagcggtattacttccggggggagcgg

SEQ ID NO: 316092 - DNA, 30 bp, Artificial Sequence
  Synthetic oligonucleotide
ggttaagaatgtttcatttcctgggagcgg

SEQ ID NO: 316093 - DNA, 30 bp, Artificial Sequence
  Synthetic oligonucleotide
tcggtgccggtcgaacctctttatgagcgg

SEQ ID NO: 316094 - DNA, 30 bp, Artificial Sequence
  Synthetic oligonucleotide
tgaactgttgaacgatctattgctgagcgg

SEQ ID NO: 316095 - DNA, 30 bp, Artificial Sequence
  Synthetic oligonucleotide
agttcctagttagatgttgatcaatagcgg

SEQ ID NO: 316096 - DNA, 30 bp, Artificial Sequence
  Synthetic oligonucleotide
catggaagttcattaacaccgccatagcgg

SEQ ID NO: 316097 - DNA, 30 bp, Artificial Sequence
  Synthetic oligonucleotide
gttccgccgagctagtattcgtagtagcgg

SEQ ID NO: 316098 - DNA, 30 bp, Artificial Sequence
  Synthetic oligonucleotide
gtagttaagggaccttaagaaaggtagcgg

SEQ ID NO: 316099 - DNA, 30 bp, Artificial Sequence
  Synthetic oligonucleotide
tcgattacttcccggcatgggataacgcgg

SEQ ID NO: 316100 - DNA, 30 bp, Artificial Sequence
  Synthetic oligonucleotide
gatagtgggtgagtctgtaaaaacacgcgg

SEQ ID NO: 316101 - DNA, 30 bp, Artificial Sequence
  Synthetic oligonucleotide
tcatacaggtaggcatctccctggacgcgg

SEQ ID NO: 316102 - DNA, 30 bp, Artificial Sequence
  Synthetic oligonucleotide
cagcataagcgggttctgtaatgtacgcgg

SEQ ID NO: 316103 - DNA, 30 bp, Artificial Sequence
  Synthetic oligonucleotide
tcagtctttgaactaaacgacgttacgcgg

SEQ ID NO: 316104 - DNA, 30 bp, Artificial Sequence
  Synthetic oligonucleotide
caatggactccttgtgaacgatcaccgcgg

SEQ ID NO: 316105 - DNA, 30 bp, Artificial Sequence
  Synthetic oligonucleotide
atagttctgtagctccattgaggaccgcgg

SEQ ID NO: 316106 - DNA, 30 bp, Artificial Sequence
  Synthetic oligonucleotide
atgattgtagtgtagttggcggccccgcgg

SEQ ID NO: 316107 - DNA, 30 bp, Artificial Sequence
  Synthetic oligonucleotide
tgactaggtctctcggaccggttagcgcgg

SEQ ID NO: 316108 - DNA, 30 bp, Artificial Sequence
  Synthetic oligonucleotide
tccaggatgatggtattggaacacgcgcgg

SEQ ID NO: 316109 - DNA, 30 bp, Artificial Sequence
  Synthetic oligonucleotide
ccgggcaagagggggggaggacaggcgcgg

SEQ ID NO: 316110 - DNA, 30 bp, Artificial Sequence
  Synthetic oligonucleotide
gagtatctatttgtctgtcttagggcgcgg

SEQ ID NO: 316111 - DNA, 30 bp, Artificial Sequence
  Synthetic oligonucleotide
gcggaacttctagcatctacctgggcgcgg

SEQ ID NO: 316112 - DNA, 30 bp, Artificial Sequence
  Synthetic oligonucleotide
tccagatatgataggggttacgactcgcgg

SEQ ID NO: 316113 - DNA, 30 bp, Artificial Sequence
  Synthetic oligonucleotide
aagaaggttctatgggggttagaaaggcgg

SEQ ID NO: 316114 - DNA, 30 bp, Artificial Sequence
  Synthetic oligonucleotide
attgatattggtcataaccggagaaggcgg

SEQ ID NO: 316115 - DNA, 30 bp, Artificial Sequence
  Synthetic oligonucleotide
cttagcggtagcgtgtcctccataaggcgg

SEQ ID NO: 316116 - DNA, 30 bp, Artificial Sequence
  Synthetic oligonucleotide
gtgtcattcagtttcagacgctggaggcgg

SEQ ID NO: 316117 - DNA, 30 bp, Artificial Sequence
  Synthetic oligonucleotide
ccctcctcctcatatcgagtcactaggcgg

SEQ ID NO: 316118 - DNA, 30 bp, Artificial Sequence
  Synthetic oligonucleotide
gttaaaggacggggtaacggtgctaggcgg

SEQ ID NO: 316119 - DNA, 30 bp, Artificial Sequence
  Synthetic oligonucleotide
ggcactgaaagagcagtataaatacggcgg

SEQ ID NO: 316120 - DNA, 30 bp, Artificial Sequence
  Synthetic oligonucleotide
cgccgtctggatgataacggcgaccggcgg

SEQ ID NO: 316121 - DNA, 30 bp, Artificial Sequence
  Synthetic oligonucleotide
agacgcattgggtcagaacccacccggcgg

SEQ ID NO: 316122 - DNA, 30 bp, Artificial Sequence
  Synthetic oligonucleotide
atgtaaagtcctcctgtaatccggcggcgg

SEQ ID NO: 316123 - DNA, 30 bp, Artificial Sequence
  Synthetic oligonucleotide
tttccgtcagccaaataaaagtttcggcgg

SEQ ID NO: 316124 - DNA, 30 bp, Artificial Sequence
  Synthetic oligonucleotide
cagatttcagtaagttagcaagaagggcgg

SEQ ID NO: 316125 - DNA, 30 bp, Artificial Sequence
  Synthetic oligonucleotide
atgtataggaccggcgagtgcatcgggcgg

SEQ ID NO: 316126 - DNA, 30 bp, Artificial Sequence
  Synthetic oligonucleotide
tcctgtaggagctgagcagtggcggggcgg

SEQ ID NO: 316127 - DNA, 30 bp, Artificial Sequence
  Synthetic oligonucleotide
cacaagaccagccgcgggggtctggggcgg

SEQ ID NO: 316128 - DNA, 30 bp, Artificial Sequence
  Synthetic oligonucleotide
ggaggcggaccgtttgaaatacaatggcgg

SEQ ID NO: 316129 - DNA, 30 bp, Artificial Sequence
  Synthetic oligonucleotide
ggcttaaaacagccatctgacagatggcgg

SEQ ID NO: 316130 - DNA, 30 bp, Artificial Sequence
  Synthetic oligonucleotide
attacaatgggcagtttgacacactggcgg

SEQ ID NO: 316131 - DNA, 30 bp, Artificial Sequence
  Synthetic oligonucleotide
cataagataggcttgaatgtagcctggcgg

SEQ ID NO: 316132 - DNA, 30 bp, Artificial Sequence
  Synthetic oligonucleotide
tctcaggaatttaccttatagcgctggcgg

SEQ ID NO: 316133 - DNA, 30 bp, Artificial Sequence
  Synthetic oligonucleotide
taagcgttgagaaccgaaaagcagtggcgg

SEQ ID NO: 316134 - DNA, 30 bp, Artificial Sequence
  Synthetic oligonucleotide
cctacagggtctaaagattgaacgtggcgg

SEQ ID NO: 316135 - DNA, 30 bp, Artificial Sequence
  Synthetic oligonucleotide
catgttgaaactttttcgacgccgtggcgg

SEQ ID NO: 316136 - DNA, 30 bp, Artificial Sequence
  Synthetic oligonucleotide
cggcaattaaaggtccggagggggtggcgg

SEQ ID NO: 316137 - DNA, 30 bp, Artificial Sequence
  Synthetic oligonucleotide
cagaagctactagaagtccgactgtggcgg

SEQ ID NO: 316138 - DNA, 29 bp, Artificial Sequence
  Synthetic oligonucleotide
gagaacgctgatgctaatcgataatgcgg

SEQ ID NO: 316139 - DNA, 30 bp, Artificial Sequence
  Synthetic oligonucleotide
gtcctcgaacgtttccggagggacatgcgg

SEQ ID NO: 316140 - DNA, 30 bp, Artificial Sequence
  Synthetic oligonucleotide
atctaagtggcaccaagggttggcatgcgg

SEQ ID NO: 316141 - DNA, 30 bp, Artificial Sequence
  Synthetic oligonucleotide
atggcgagtagtgatgtcgcactcatgcgg

SEQ ID NO: 316142 - DNA, 30 bp, Artificial Sequence
  Synthetic oligonucleotide
tgagtgaagatattcgttatgtcgatgcgg

SEQ ID NO: 316143 - DNA, 30 bp, Artificial Sequence
  Synthetic oligonucleotide
atcgtgaatacgacccgtcttcggatgcgg

SEQ ID NO: 316144 - DNA, 30 bp, Artificial Sequence
  Synthetic oligonucleotide
aagtcttattcaggggagactatgatgcgg

SEQ ID NO: 316145 - DNA, 30 bp, Artificial Sequence
  Synthetic oligonucleotide
tgtgtttcgttcgtccgacctttgatgcgg

SEQ ID NO: 316146 - DNA, 30 bp, Artificial Sequence
  Synthetic oligonucleotide
cgcccaggtggggtattgattactatgcgg

SEQ ID NO: 316147 - DNA, 30 bp, Artificial Sequence
  Synthetic oligonucleotide
tagttgcattacaaagcctgatgtatgcgg

SEQ ID NO: 316148 - DNA, 30 bp, Artificial Sequence
  Synthetic oligonucleotide
gttgcttattagataactctaaaactgcgg

SEQ ID NO: 316149 - DNA, 30 bp, Artificial Sequence
  Synthetic oligonucleotide
gtgatgcggctagttcgaacataactgcgg

SEQ ID NO: 316150 - DNA, 30 bp, Artificial Sequence
  Synthetic oligonucleotide
ggggatcaagaatgtattctaatactgcgg

SEQ ID NO: 316151 - DNA, 30 bp, Artificial Sequence
  Synthetic oligonucleotide
gagcgattcaccttagcgtacaatctgcgg

SEQ ID NO: 316152 - DNA, 30 bp, Artificial Sequence
  Synthetic oligonucleotide
gtcagtgtattcgcatacacggttctgcgg

SEQ ID NO: 316153 - DNA, 30 bp, Artificial Sequence
  Synthetic oligonucleotide
ttggatttgcacgttcatagcgaagtgcgg

SEQ ID NO: 316154 - DNA, 30 bp, Artificial Sequence
  Synthetic oligonucleotide
accgtcaggctggaccggccagcagtgcgg

SEQ ID NO: 316155 - DNA, 30 bp, Artificial Sequence
  Synthetic oligonucleotide
ttagagtataatagtataagggccgtgcgg

SEQ ID NO: 316156 - DNA, 30 bp, Artificial Sequence
  Synthetic oligonucleotide
tgattgttgtaattacgggtacgtgtgcgg

SEQ ID NO: 316157 - DNA, 30 bp, Artificial Sequence
  Synthetic oligonucleotide
gaaagggccggatacccggaagaattgcgg

SEQ ID NO: 316158 - DNA, 30 bp, Artificial Sequence
  Synthetic oligonucleotide
ggcctgtcttatctatcacttagattgcgg

SEQ ID NO: 316159 - DNA, 30 bp, Artificial Sequence
  Synthetic oligonucleotide
ccgctgacgaaagcatatagttccttgcgg

SEQ ID NO: 316160 - DNA, 30 bp, Artificial Sequence
  Synthetic oligonucleotide
aaattgcggtcatctaacccaagcaatcgg

SEQ ID NO: 316161 - DNA, 30 bp, Artificial Sequence
  Synthetic oligonucleotide
cggtagcacaggacggattagggcaatcgg

SEQ ID NO: 316162 - DNA, 30 bp, Artificial Sequence
  Synthetic oligonucleotide
cccacactttattgcccttcagtcaatcgg

SEQ ID NO: 316163 - DNA, 30 bp, Artificial Sequence
  Synthetic oligonucleotide
tcgcgatgacacgccgcacgtgtcaatcgg

SEQ ID NO: 316164 - DNA, 30 bp, Artificial Sequence
  Synthetic oligonucleotide
tcggcggcacggcggtatttgaggaatcgg

SEQ ID NO: 316165 - DNA, 30 bp, Artificial Sequence
  Synthetic oligonucleotide
ggtttgtggttaaccttcttagaacatcgg

SEQ ID NO: 316166 - DNA, 30 bp, Artificial Sequence
  Synthetic oligonucleotide
actaatcctgcgtatgattatagacatcgg

SEQ ID NO: 316167 - DNA, 30 bp, Artificial Sequence
  Synthetic oligonucleotide
ggtgaacacgatttagtcgagtaccatcgg

SEQ ID NO: 316168 - DNA, 30 bp, Artificial Sequence
  Synthetic oligonucleotide
tgtaaacgggacctcccacattaccatcgg

SEQ ID NO: 316169 - DNA, 30 bp, Artificial Sequence
  Synthetic oligonucleotide
cgtgatacttcggattgcattagccatcgg

SEQ ID NO: 316170 - DNA, 30 bp, Artificial Sequence
  Synthetic oligonucleotide
cttcgtatatacttttaggaacagcatcgg

SEQ ID NO: 316171 - DNA, 30 bp, Artificial Sequence
  Synthetic oligonucleotide
ttcggggcatgtacataatggttgcatcgg

SEQ ID NO: 316172 - DNA, 30 bp, Artificial Sequence
  Synthetic oligonucleotide
agactctaaagcggtagacgccatcatcgg

SEQ ID NO: 316173 - DNA, 30 bp, Artificial Sequence
  Synthetic oligonucleotide
gtgactcgcttccacaatggaagagatcgg

SEQ ID NO: 316174 - DNA, 30 bp, Artificial Sequence
  Synthetic oligonucleotide
aatatcgcattgcgtgcatgtttagatcgg

SEQ ID NO: 316175 - DNA, 30 bp, Artificial Sequence
  Synthetic oligonucleotide
agatgctcgtaaccggagaatacggatcgg

SEQ ID NO: 316176 - DNA, 30 bp, Artificial Sequence
  Synthetic oligonucleotide
atgcagtgagaaggctgtttcatggatcgg

SEQ ID NO: 316177 - DNA, 30 bp, Artificial Sequence
  Synthetic oligonucleotide
ggaccccaatgcgtcaaccatactgatcgg

SEQ ID NO: 316178 - DNA, 30 bp, Artificial Sequence
  Synthetic oligonucleotide
cagtggtaatctaggatttctggtgatcgg

SEQ ID NO: 316179 - DNA, 30 bp, Artificial Sequence
  Synthetic oligonucleotide
aacgaatttcactcctatggaccatatcgg

SEQ ID NO: 316180 - DNA, 30 bp, Artificial Sequence
  Synthetic oligonucleotide
ctggcgttactgatggaaacacagtatcgg

SEQ ID NO: 316181 - DNA, 30 bp, Artificial Sequence
  Synthetic oligonucleotide
gcgggccagggaggcgactacccgtatcgg

SEQ ID NO: 316182 - DNA, 30 bp, Artificial Sequence
  Synthetic oligonucleotide
ttacgtattattgtaaatcgatgttatcgg

SEQ ID NO: 316183 - DNA, 30 bp, Artificial Sequence
  Synthetic oligonucleotide
ataatccttgtaagcgccttggaaactcgg

SEQ ID NO: 316184 - DNA, 30 bp, Artificial Sequence
  Synthetic oligonucleotide
gccctcagtgcagaagtccaaagaactcgg

SEQ ID NO: 316185 - DNA, 30 bp, Artificial Sequence
  Synthetic oligonucleotide
taaaattgggcttggtcggaaggaactcgg

SEQ ID NO: 316186 - DNA, 30 bp, Artificial Sequence
  Synthetic oligonucleotide
cgcgatcgtgttggatatgaacacactcgg

SEQ ID NO: 316187 - DNA, 30 bp, Artificial Sequence
  Synthetic oligonucleotide
ggtacggcacgtcctattaaggtcactcgg

SEQ ID NO: 316188 - DNA, 30 bp, Artificial Sequence
  Synthetic oligonucleotide
tacgactgtttaacgaaggcggatactcgg

SEQ ID NO: 316189 - DNA, 30 bp, Artificial Sequence
  Synthetic oligonucleotide
tctagattatcgtcggaggctcaccctcgg

SEQ ID NO: 316190 - DNA, 30 bp, Artificial Sequence
  Synthetic oligonucleotide
ggaggggatagtaggactccctgtcctcgg

SEQ ID NO: 316191 - DNA, 30 bp, Artificial Sequence
  Synthetic oligonucleotide
ggggcgcatctggcactcaaggacgctcgg

SEQ ID NO: 316192 - DNA, 30 bp, Artificial Sequence
  Synthetic oligonucleotide
acatatgacttgctgatagagcgcgctcgg

SEQ ID NO: 316193 - DNA, 30 bp, Artificial Sequence
  Synthetic oligonucleotide
ctgaaaacaaacccagttcacgtggctcgg

SEQ ID NO: 316194 - DNA, 30 bp, Artificial Sequence
  Synthetic oligonucleotide
tcgctcccactgaacttcgtatctgctcgg

SEQ ID NO: 316195 - DNA, 30 bp, Artificial Sequence
  Synthetic oligonucleotide
acatgcgtaatagaccggggtctatctcgg

SEQ ID NO: 316196 - DNA, 30 bp, Artificial Sequence
  Synthetic oligonucleotide
atgcgtgtaaatcaccacctaaagtctcgg

SEQ ID NO: 316197 - DNA, 30 bp, Artificial Sequence
  Synthetic oligonucleotide
cggttacagcctgatacgcaatagtctcgg

SEQ ID NO: 316198 - DNA, 30 bp, Artificial Sequence
  Synthetic oligonucleotide
ctcactgtgcgacagcagtcgaggtctcgg

SEQ ID NO: 316199 - DNA, 30 bp, Artificial Sequence
  Synthetic oligonucleotide
tcaccgaacgctgacagttttggcagtcgg

SEQ ID NO: 316200 - DNA, 30 bp, Artificial Sequence
  Synthetic oligonucleotide
tgggagagacattagtagtaatgcagtcgg

SEQ ID NO: 316201 - DNA, 30 bp, Artificial Sequence
  Synthetic oligonucleotide
actcagactatcctgattgccggtagtcgg

SEQ ID NO: 316202 - DNA, 30 bp, Artificial Sequence
  Synthetic oligonucleotide
tataacgtagtgctggaccctcttagtcgg

SEQ ID NO: 316203 - DNA, 30 bp, Artificial Sequence
  Synthetic oligonucleotide
tgtaacttgaatgtcggaattagacgtcgg

SEQ ID NO: 316204 - DNA, 30 bp, Artificial Sequence
  Synthetic oligonucleotide
tcggctacacgtgacgttccggtacgtcgg

SEQ ID NO: 316205 - DNA, 30 bp, Artificial Sequence
  Synthetic oligonucleotide
atcgcagagactggctcttctcgccgtcgg

SEQ ID NO: 316206 - DNA, 30 bp, Artificial Sequence
  Synthetic oligonucleotide
gtaactaatatttgctagaaaccgcgtcgg

SEQ ID NO: 316207 - DNA, 30 bp, Artificial Sequence
  Synthetic oligonucleotide
atatattaaccgttgtgttgatggcgtcgg

SEQ ID NO: 316208 - DNA, 30 bp, Artificial Sequence
  Synthetic oligonucleotide
aagtgtatcagtaaacctggctggcgtcgg

SEQ ID NO: 316209 - DNA, 30 bp, Artificial Sequence
  Synthetic oligonucleotide
cattattgttgaacgcctcttgctcgtcgg

SEQ ID NO: 316210 - DNA, 30 bp, Artificial Sequence
  Synthetic oligonucleotide
acagaagcgtatctggtacgctacggtcgg

SEQ ID NO: 316211 - DNA, 30 bp, Artificial Sequence
  Synthetic oligonucleotide
cgatacaaacctaacgcgggtcctggtcgg

SEQ ID NO: 316212 - DNA, 30 bp, Artificial Sequence
  Synthetic oligonucleotide
ctgagataaagtttgaatggctttggtcgg

SEQ ID NO: 316213 - DNA, 30 bp, Artificial Sequence
  Synthetic oligonucleotide
aaccgctgaacatgccttcgaaaatgtcgg

SEQ ID NO: 316214 - DNA, 30 bp, Artificial Sequence
  Synthetic oligonucleotide
agcctcatgtgggttacaaattaatgtcgg

SEQ ID NO: 316215 - DNA, 30 bp, Artificial Sequence
  Synthetic oligonucleotide
cccgtacgactgcctcttatcggctgtcgg

SEQ ID NO: 316216 - DNA, 30 bp, Artificial Sequence
  Synthetic oligonucleotide
ttcgggccgaccttaggcatcacgtgtcgg

SEQ ID NO: 316217 - DNA, 30 bp, Artificial Sequence
  Synthetic oligonucleotide
actacctagagtaagacttcgttgtgtcgg

SEQ ID NO: 316218 - DNA, 30 bp, Artificial Sequence
  Synthetic oligonucleotide
tgtctggatccattcacgacaaaaattcgg

SEQ ID NO: 316219 - DNA, 30 bp, Artificial Sequence
  Synthetic oligonucleotide
aagataaacctggtaagcgtttaaattcgg

SEQ ID NO: 316220 - DNA, 30 bp, Artificial Sequence
  Synthetic oligonucleotide
tcaaccgcagaatgttctcgtagaattcgg

SEQ ID NO: 316221 - DNA, 30 bp, Artificial Sequence
  Synthetic oligonucleotide
tcatggaccacggctccagagcgaattcgg

SEQ ID NO: 316222 - DNA, 30 bp, Artificial Sequence
  Synthetic oligonucleotide
aatttcagttcggcatgctaggtaattcgg

SEQ ID NO: 316223 - DNA, 30 bp, Artificial Sequence
  Synthetic oligonucleotide
caaggatactctgtccgctcgcacattcgg

SEQ ID NO: 316224 - DNA, 30 bp, Artificial Sequence
  Synthetic oligonucleotide
gctggtaagacgttagatactaaccttcgg

SEQ ID NO: 316225 - DNA, 30 bp, Artificial Sequence
  Synthetic oligonucleotide
actttgcccttagggactctacctcttcgg

SEQ ID NO: 316226 - DNA, 30 bp, Artificial Sequence
  Synthetic oligonucleotide
cagctccgctgaacatccgaatcagttcgg

SEQ ID NO: 316227 - DNA, 30 bp, Artificial Sequence
  Synthetic oligonucleotide
aaggagtttgcatcttcatgattggttcgg

SEQ ID NO: 316228 - DNA, 30 bp, Artificial Sequence
  Synthetic oligonucleotide
agccaaggggaatcgctgccgggtgttcgg

SEQ ID NO: 316229 - DNA, 30 bp, Artificial Sequence
  Synthetic oligonucleotide
tctcttaccagagggtatatctcctttcgg

SEQ ID NO: 316230 - DNA, 30 bp, Artificial Sequence
  Synthetic oligonucleotide
ggcgaagtatcaatgaaggagcgctttcgg

SEQ ID NO: 316231 - DNA, 30 bp, Artificial Sequence
  Synthetic oligonucleotide
cgcattgtcaattaacgtgtgaggtttcgg

SEQ ID NO: 316232 - DNA, 30 bp, Artificial Sequence
  Synthetic oligonucleotide
cggttgattggttaagtctaagggtttcgg

SEQ ID NO: 316233 - DNA, 30 bp, Artificial Sequence
  Synthetic oligonucleotide
ctgggtaagtaacaggtggtgccttttcgg

SEQ ID NO: 316234 - DNA, 30 bp, Artificial Sequence
  Synthetic oligonucleotide
cgacttttcgtctagcaacaaggttttcgg

SEQ ID NO: 316235 - DNA, 30 bp, Artificial Sequence
  Synthetic oligonucleotide
tggttgctcacatcaccccctatttttcgg

SEQ ID NO: 316236 - DNA, 30 bp, Artificial Sequence
  Synthetic oligonucleotide
gacaccgtgtcaggcgctttgtaaaaaggg

SEQ ID NO: 316237 - DNA, 30 bp, Artificial Sequence
  Synthetic oligonucleotide
ataggattgcctctagtgagaactaaaggg

SEQ ID NO: 316238 - DNA, 30 bp, Artificial Sequence
  Synthetic oligonucleotide
taaatgtagcgttgtgcattttctaaaggg

SEQ ID NO: 316239 - DNA, 30 bp, Artificial Sequence
  Synthetic oligonucleotide
cttaacgatagtacttatcgaagacaaggg

SEQ ID NO: 316240 - DNA, 29 bp, Artificial Sequence
  Synthetic oligonucleotide
gccattaacggccaggcggctcccaaggg

SEQ ID NO: 316241 - DNA, 30 bp, Artificial Sequence
  Synthetic oligonucleotide
taaacgcagcttgtggtgtcgtgccaaggg

SEQ ID NO: 316242 - DNA, 30 bp, Artificial Sequence
  Synthetic oligonucleotide
tgtgaaacctcggcagcgccgtcgcaaggg

SEQ ID NO: 316243 - DNA, 30 bp, Artificial Sequence
  Synthetic oligonucleotide
tcatactctgtttaatgtagctggcaaggg

SEQ ID NO: 316244 - DNA, 30 bp, Artificial Sequence
  Synthetic oligonucleotide
ttgatataagttctgtatgtcgatcaaggg

SEQ ID NO: 316245 - DNA, 30 bp, Artificial Sequence
  Synthetic oligonucleotide
gattacgcaaaaaccgtcattactcaaggg

SEQ ID NO: 316246 - DNA, 30 bp, Artificial Sequence
  Synthetic oligonucleotide
aaaggcgttgagtcagcccttgctcaaggg

SEQ ID NO: 316247 - DNA, 28 bp, Artificial Sequence
  Synthetic oligonucleotide
ccctttaaattaacttgcacgtcaaggg

SEQ ID NO: 316248 - DNA, 30 bp, Artificial Sequence
  Synthetic oligonucleotide
ggccgccctttcccatccaaagttcaaggg

SEQ ID NO: 316249 - DNA, 30 bp, Artificial Sequence
  Synthetic oligonucleotide
cctgacgccacagatatgtcaggagaaggg

SEQ ID NO: 316250 - DNA, 30 bp, Artificial Sequence
  Synthetic oligonucleotide
agtcccgttggtcctagggcatccgaaggg

SEQ ID NO: 316251 - DNA, 30 bp, Artificial Sequence
  Synthetic oligonucleotide
caccttagcatgttaatggtcctcgaaggg

SEQ ID NO: 316252 - DNA, 30 bp, Artificial Sequence
  Synthetic oligonucleotide
ggcatcgctaactttatttagccggaaggg

SEQ ID NO: 316253 - DNA, 30 bp, Artificial Sequence
  Synthetic oligonucleotide
taattacgtggtcacagtgattcggaaggg

SEQ ID NO: 316254 - DNA, 30 bp, Artificial Sequence
  Synthetic oligonucleotide
tatcgcttttatatagtctgccgggaaggg

SEQ ID NO: 316255 - DNA, 30 bp, Artificial Sequence
  Synthetic oligonucleotide
tgccattctgttgccacgtgttgggaaggg

SEQ ID NO: 316256 - DNA, 30 bp, Artificial Sequence
  Synthetic oligonucleotide
aagatgtgggtttcatataatcatgaaggg

SEQ ID NO: 316257 - DNA, 30 bp, Artificial Sequence
  Synthetic oligonucleotide
gtacatcggcaggtaacttttgatgaaggg

SEQ ID NO: 316258 - DNA, 30 bp, Artificial Sequence
  Synthetic oligonucleotide
gtttagatcccactcgatctgctataaggg

SEQ ID NO: 316259 - DNA, 30 bp, Artificial Sequence
  Synthetic oligonucleotide
tgagttccactccagtctccatactaaggg

SEQ ID NO: 316260 - DNA, 30 bp, Artificial Sequence
  Synthetic oligonucleotide
acgcttggtacggcttctatgccttaaggg

SEQ ID NO: 316261 - DNA, 30 bp, Artificial Sequence
  Synthetic oligonucleotide
tactctttagaagctgtttcgataacaggg

SEQ ID NO: 316262 - DNA, 30 bp, Artificial Sequence
  Synthetic oligonucleotide
caaagtgttattgggaatattctaacaggg

SEQ ID NO: 316263 - DNA, 30 bp, Artificial Sequence
  Synthetic oligonucleotide
tttgtgccgctttgtacgtgattaacaggg

SEQ ID NO: 316264 - DNA, 30 bp, Artificial Sequence
  Synthetic oligonucleotide
tagcatgcggcctgggttggagagacaggg

SEQ ID NO: 316265 - DNA, 30 bp, Artificial Sequence
  Synthetic oligonucleotide
ctatacgggattggaataaatcatacaggg

SEQ ID NO: 316266 - DNA, 30 bp, Artificial Sequence
  Synthetic oligonucleotide
tttacgtaggttgctgatgctgttacaggg

SEQ ID NO: 316267 - DNA, 30 bp, Artificial Sequence
  Synthetic oligonucleotide
tactttaggactcaacatctgccaccaggg

SEQ ID NO: 316268 - DNA, 30 bp, Artificial Sequence
  Synthetic oligonucleotide
tataaggattccgatccgtcaacgccaggg

SEQ ID NO: 316269 - DNA, 30 bp, Artificial Sequence
  Synthetic oligonucleotide
agttatcagagcacaatgattcctccaggg

SEQ ID NO: 316270 - DNA, 30 bp, Artificial Sequence
  Synthetic oligonucleotide
acttcgtacggtgcgaacaactttccaggg

SEQ ID NO: 316271 - DNA, 30 bp, Artificial Sequence
  Synthetic oligonucleotide
gacgtactacagtatgccgttacagcaggg

SEQ ID NO: 316272 - DNA, 30 bp, Artificial Sequence
  Synthetic oligonucleotide
tatctaaatagattggtcgggttagcaggg

SEQ ID NO: 316273 - DNA, 30 bp, Artificial Sequence
  Synthetic oligonucleotide
gcgctacgtgagcagaagtatcacgcaggg

SEQ ID NO: 316274 - DNA, 30 bp, Artificial Sequence
  Synthetic oligonucleotide
ttaatgcaaatacagttcattaaggcaggg

SEQ ID NO: 316275 - DNA, 30 bp, Artificial Sequence
  Synthetic oligonucleotide
actagcgcgggatgacaggcacgggcaggg

SEQ ID NO: 316276 - DNA, 30 bp, Artificial Sequence
  Synthetic oligonucleotide
gggtaatataaaaggccggttcactcaggg

SEQ ID NO: 316277 - DNA, 30 bp, Artificial Sequence
  Synthetic oligonucleotide
ccgcgataggcagtggactccgcctcaggg

SEQ ID NO: 316278 - DNA, 30 bp, Artificial Sequence
  Synthetic oligonucleotide
ttcgctcgcggctaagctccaagttcaggg

SEQ ID NO: 316279 - DNA, 30 bp, Artificial Sequence
  Synthetic oligonucleotide
aggtgccctcgcgatttaaatttttcaggg

SEQ ID NO: 316280 - DNA, 30 bp, Artificial Sequence
  Synthetic oligonucleotide
aacggtccccccgggatatctaccagaggg

SEQ ID NO: 316281 - DNA, 30 bp, Artificial Sequence
  Synthetic oligonucleotide
atcgcgtagcgctagagtggtgccagaggg

SEQ ID NO: 316282 - DNA, 30 bp, Artificial Sequence
  Synthetic oligonucleotide
cttatttgattgctggttaaaggcagaggg

SEQ ID NO: 316283 - DNA, 30 bp, Artificial Sequence
  Synthetic oligonucleotide
tgtctgatagtaggttatacagagagaggg

SEQ ID NO: 316284 - DNA, 30 bp, Artificial Sequence
  Synthetic oligonucleotide
ccagacatgaagatgtcgctggctagaggg

SEQ ID NO: 316285 - DNA, 30 bp, Artificial Sequence
  Synthetic oligonucleotide
agttgtatagacgcgggtttacaacgaggg

SEQ ID NO: 316286 - DNA, 30 bp, Artificial Sequence
  Synthetic oligonucleotide
acatgcacattcacgtctcccacacgaggg

SEQ ID NO: 316287 - DNA, 30 bp, Artificial Sequence
  Synthetic oligonucleotide
agccagatatttcatatggcgcaccgaggg

SEQ ID NO: 316288 - DNA, 30 bp, Artificial Sequence
  Synthetic oligonucleotide
tagccgcgtgaccgccggttaacccgaggg

SEQ ID NO: 316289 - DNA, 30 bp, Artificial Sequence
  Synthetic oligonucleotide
agcagattagactggcgctagattcgaggg

SEQ ID NO: 316290 - DNA, 30 bp, Artificial Sequence
  Synthetic oligonucleotide
ggtaccttagaagtcccatcctcaggaggg

SEQ ID NO: 316291 - DNA, 30 bp, Artificial Sequence
  Synthetic oligonucleotide
aaaggttgtaaacttatagggggaggaggg

SEQ ID NO: 316292 - DNA, 30 bp, Artificial Sequence
  Synthetic oligonucleotide
ctgggcaaattcgtttgcacatgaggaggg

SEQ ID NO: 316293 - DNA, 30 bp, Artificial Sequence
  Synthetic oligonucleotide
ggctgggatcttggtgccgtagagggaggg

SEQ ID NO: 316294 - DNA, 30 bp, Artificial Sequence
  Synthetic oligonucleotide
gcatttggcagcctaaatttgatgggaggg

SEQ ID NO: 316295 - DNA, 30 bp, Artificial Sequence
  Synthetic oligonucleotide
tatttaaccgtttttaatattccatgaggg

SEQ ID NO: 316296 - DNA, 30 bp, Artificial Sequence
  Synthetic oligonucleotide
gcactaaaatgtactccagtcttctgaggg

SEQ ID NO: 316297 - DNA, 30 bp, Artificial Sequence
  Synthetic oligonucleotide
aggggccctcaactatctgttgcgtgaggg

SEQ ID NO: 316298 - DNA, 30 bp, Artificial Sequence
  Synthetic oligonucleotide
cccctgggccacgtagggacgaggtgaggg

SEQ ID NO: 316299 - DNA, 30 bp, Artificial Sequence
  Synthetic oligonucleotide
atagccacactcggtgttagttcttgaggg

SEQ ID NO: 316300 - DNA, 30 bp, Artificial Sequence
  Synthetic oligonucleotide
ttcatttcgtgattggtcgtgagaataggg

SEQ ID NO: 316301 - DNA, 30 bp, Artificial Sequence
  Synthetic oligonucleotide
atccccataaaaagagacgcgtgaataggg

SEQ ID NO: 316302 - DNA, 30 bp, Artificial Sequence
  Synthetic oligonucleotide
ggggcctcctaagtggtagatataataggg

SEQ ID NO: 316303 - DNA, 30 bp, Artificial Sequence
  Synthetic oligonucleotide
gatatggctaatcttcgactatacataggg

SEQ ID NO: 316304 - DNA, 30 bp, Artificial Sequence
  Synthetic oligonucleotide
actctgtagtgttggtcccgcttcataggg

SEQ ID NO: 316305 - DNA, 30 bp, Artificial Sequence
  Synthetic oligonucleotide
ttgagttttttagcgttgggatggataggg

SEQ ID NO: 316306 - DNA, 30 bp, Artificial Sequence
  Synthetic oligonucleotide
tttcgacccagcacaatggagttgataggg

SEQ ID NO: 316307 - DNA, 30 bp, Artificial Sequence
  Synthetic oligonucleotide
gagatagaaagtgttgcggaggagctaggg

SEQ ID NO: 316308 - DNA, 30 bp, Artificial Sequence
  Synthetic oligonucleotide
ggtccgacggatccaggctctgctctaggg

SEQ ID NO: 316309 - DNA, 30 bp, Artificial Sequence
  Synthetic oligonucleotide
tatcgtactcacaacatgatgacagtaggg

SEQ ID NO: 316310 - DNA, 30 bp, Artificial Sequence
  Synthetic oligonucleotide
ctcctctgcgtcccggtacatagagtaggg

SEQ ID NO: 316311 - DNA, 30 bp, Artificial Sequence
  Synthetic oligonucleotide
gcccgttgtaggcaaatggattacgtaggg

SEQ ID NO: 316312 - DNA, 30 bp, Artificial Sequence
  Synthetic oligonucleotide
ggagcaagtggtatcttctgcgcggtaggg

SEQ ID NO: 316313 - DNA, 30 bp, Artificial Sequence
  Synthetic oligonucleotide
ctccactggttatattatatgagggtaggg

SEQ ID NO: 316314 - DNA, 30 bp, Artificial Sequence
  Synthetic oligonucleotide
actcgatagggttgcggatggggggtaggg

SEQ ID NO: 316315 - DNA, 30 bp, Artificial Sequence
  Synthetic oligonucleotide
aaaacggaattagtcaaggttatggtaggg

SEQ ID NO: 316316 - DNA, 30 bp, Artificial Sequence
  Synthetic oligonucleotide
gcttgccgataggatgcgccggctgtaggg

SEQ ID NO: 316317 - DNA, 30 bp, Artificial Sequence
  Synthetic oligonucleotide
aatcgagctttaaatgtagcttctgtaggg

SEQ ID NO: 316318 - DNA, 30 bp, Artificial Sequence
  Synthetic oligonucleotide
aggtagatgggttttcttacggacttaggg

SEQ ID NO: 316319 - DNA, 30 bp, Artificial Sequence
  Synthetic oligonucleotide
ttcacaacctcgcggttaatttagttaggg

SEQ ID NO: 316320 - DNA, 30 bp, Artificial Sequence
  Synthetic oligonucleotide
atagatcgtcgcacgtaatgcatgttaggg

SEQ ID NO: 316321 - DNA, 31 bp, Artificial Sequence
  Synthetic oligonucleotide
aagtgatatacaatcgattcgccctttaggg

SEQ ID NO: 316322 - DNA, 30 bp, Artificial Sequence
  Synthetic oligonucleotide
ccgccagctttagaagcccagtctttaggg

SEQ ID NO: 316323 - DNA, 30 bp, Artificial Sequence
  Synthetic oligonucleotide
cattggccaccccagtaacttataaacggg

SEQ ID NO: 316324 - DNA, 30 bp, Artificial Sequence
  Synthetic oligonucleotide
gcgaaggcgtgagttgacagatgcaacggg

SEQ ID NO: 316325 - DNA, 30 bp, Artificial Sequence
  Synthetic oligonucleotide
tgggaagagagtgacatgccagtgaacggg

SEQ ID NO: 316326 - DNA, 30 bp, Artificial Sequence
  Synthetic oligonucleotide
ccactgcgacagttggtccccagtaacggg

SEQ ID NO: 316327 - DNA, 30 bp, Artificial Sequence
  Synthetic oligonucleotide
ggtttccactgaacttactgccgtaacggg

SEQ ID NO: 316328 - DNA, 30 bp, Artificial Sequence
  Synthetic oligonucleotide
gtcgcacggagagtggtgtatacacacggg

SEQ ID NO: 316329 - DNA, 30 bp, Artificial Sequence
  Synthetic oligonucleotide
tgaccaccccggaagcaaatgagacacggg

SEQ ID NO: 316330 - DNA, 30 bp, Artificial Sequence
  Synthetic oligonucleotide
gaccgtactactcaggacagactacacggg

SEQ ID NO: 316331 - DNA, 30 bp, Artificial Sequence
  Synthetic oligonucleotide
agaaacttgttgcatgacgttgtacacggg

SEQ ID NO: 316332 - DNA, 30 bp, Artificial Sequence
  Synthetic oligonucleotide
gatagtcgcatatcttaaatctaccacggg

SEQ ID NO: 316333 - DNA, 30 bp, Artificial Sequence
  Synthetic oligonucleotide
ttccttctggcagttaaaaggtaccacggg

SEQ ID NO: 316334 - DNA, 30 bp, Artificial Sequence
  Synthetic oligonucleotide
ggccaaatgatagatttatgaggccacggg

SEQ ID NO: 316335 - DNA, 30 bp, Artificial Sequence
  Synthetic oligonucleotide
caggatcggacgccatatccgctagacggg

SEQ ID NO: 316336 - DNA, 30 bp, Artificial Sequence
  Synthetic oligonucleotide
tagttcgtacagggtcaaaatgtagacggg

SEQ ID NO: 316337 - DNA, 30 bp, Artificial Sequence
  Synthetic oligonucleotide
gaatccgggggttacattgtccgcgacggg

SEQ ID NO: 316338 - DNA, 31 bp, Artificial Sequence
  Synthetic oligonucleotide
aaacgattcccagacgtcagcagaatacggg

SEQ ID NO: 316339 - DNA, 30 bp, Artificial Sequence
  Synthetic oligonucleotide
agcagattgaggaatttcccataatacggg

SEQ ID NO: 316340 - DNA, 30 bp, Artificial Sequence
  Synthetic oligonucleotide
cagtaggctagcttctaccacgcatacggg

SEQ ID NO: 316341 - DNA, 30 bp, Artificial Sequence
  Synthetic oligonucleotide
agtctcttttcacgggtgctcctctacggg

SEQ ID NO: 316342 - DNA, 30 bp, Artificial Sequence
  Synthetic oligonucleotide
ttgtacgcattcagaggttttaggtacggg

SEQ ID NO: 316343 - DNA, 30 bp, Artificial Sequence
  Synthetic oligonucleotide
tacttaattaagcaaagctgttgttacggg

SEQ ID NO: 316344 - DNA, 30 bp, Artificial Sequence
  Synthetic oligonucleotide
ggcccagagtgatataaaacgttaaccggg

SEQ ID NO: 316345 - DNA, 30 bp, Artificial Sequence
  Synthetic oligonucleotide
tgttgagtttaaatatctcatggcaccggg

SEQ ID NO: 316346 - DNA, 30 bp, Artificial Sequence
  Synthetic oligonucleotide
cacgttttcggtgaggttcgaatcaccggg

SEQ ID NO: 316347 - DNA, 30 bp, Artificial Sequence
  Synthetic oligonucleotide
aaacacgctgcgagaatctacttcaccggg

SEQ ID NO: 316348 - DNA, 30 bp, Artificial Sequence
  Synthetic oligonucleotide
tagatctcctaacgcctcgagtagaccggg

SEQ ID NO: 316349 - DNA, 30 bp, Artificial Sequence
  Synthetic oligonucleotide
atacctgaagcattctaagcccctaccggg

SEQ ID NO: 316350 - DNA, 30 bp, Artificial Sequence
  Synthetic oligonucleotide
ggagatatagttcgggtgtcgtaacccggg

SEQ ID NO: 316351 - DNA, 30 bp, Artificial Sequence
  Synthetic oligonucleotide
cgcaaatcatcttcgtcgccgctacccggg

SEQ ID NO: 316352 - DNA, 30 bp, Artificial Sequence
  Synthetic oligonucleotide
tgcggtccgagtttataggtcacccccggg

SEQ ID NO: 316353 - DNA, 30 bp, Artificial Sequence
  Synthetic oligonucleotide
ccaataaagaaaacccataagagccccggg

SEQ ID NO: 316354 - DNA, 30 bp, Artificial Sequence
  Synthetic oligonucleotide
gacgcggtcctgtcataagtgaggcccggg

SEQ ID NO: 316355 - DNA, 30 bp, Artificial Sequence
  Synthetic oligonucleotide
gatcgtagtgtatgttataaattgcccggg

SEQ ID NO: 316356 - DNA, 30 bp, Artificial Sequence
  Synthetic oligonucleotide
tgcgatcacgggcgtcgtattagtcccggg

SEQ ID NO: 316357 - DNA, 29 bp, Artificial Sequence
  Synthetic oligonucleotide
ttgtgctggggaggtgaaaccgtcccggg

SEQ ID NO: 316358 - DNA, 30 bp, Artificial Sequence
  Synthetic oligonucleotide
ctgctctacttcgattctgagcaagccggg

SEQ ID NO: 316359 - DNA, 30 bp, Artificial Sequence
  Synthetic oligonucleotide
aaccgaggctgggtctctaaccacgccggg

SEQ ID NO: 316360 - DNA, 30 bp, Artificial Sequence
  Synthetic oligonucleotide
ttgtatttcctggggaagtaataggccggg

SEQ ID NO: 316361 - DNA, 30 bp, Artificial Sequence
  Synthetic oligonucleotide
ttggggtgcgagggaggggttagggccggg

SEQ ID NO: 316362 - DNA, 30 bp, Artificial Sequence
  Synthetic oligonucleotide
cgaggtactagccgtccgtcccgtgccggg

SEQ ID NO: 316363 - DNA, 30 bp, Artificial Sequence
  Synthetic oligonucleotide
ccagctgtggggtcggctgtaccctccggg

SEQ ID NO: 316364 - DNA, 30 bp, Artificial Sequence
  Synthetic oligonucleotide
attctcgtaagttaagcaaacaagtccggg

SEQ ID NO: 316365 - DNA, 30 bp, Artificial Sequence
  Synthetic oligonucleotide
cgcatagttacgcacgccgaaccaagcggg

SEQ ID NO: 316366 - DNA, 30 bp, Artificial Sequence
  Synthetic oligonucleotide
tttcctgatttgcagcgtaaaagaagcggg

SEQ ID NO: 316367 - DNA, 30 bp, Artificial Sequence
  Synthetic oligonucleotide
tcaggactccgggctaacgcgtacagcggg

SEQ ID NO: 316368 - DNA, 30 bp, Artificial Sequence
  Synthetic oligonucleotide
gactcgtactgcacaactcgtatacgcggg

SEQ ID NO: 316369 - DNA, 30 bp, Artificial Sequence
  Synthetic oligonucleotide
ggtctatgtgcggatctttgggtacgcggg

SEQ ID NO: 316370 - DNA, 30 bp, Artificial Sequence
  Synthetic oligonucleotide
acaggtgcaacaagcggctcgttacgcggg

SEQ ID NO: 316371 - DNA, 30 bp, Artificial Sequence
  Synthetic oligonucleotide
gcgtggagtgatgtgcgcctcctccgcggg

SEQ ID NO: 316372 - DNA, 30 bp, Artificial Sequence
  Synthetic oligonucleotide
gtgctatgggtagaatcgtagtgtcgcggg

SEQ ID NO: 316373 - DNA, 30 bp, Artificial Sequence
  Synthetic oligonucleotide
cacttattcgcttgcagtaaagttcgcggg

SEQ ID NO: 316374 - DNA, 31 bp, Artificial Sequence
  Synthetic oligonucleotide
aacaatcaggctaggaccccaaccaggcggg

SEQ ID NO: 316375 - DNA, 30 bp, Artificial Sequence
  Synthetic oligonucleotide
ggaatgttacgaggattccgtcagggcggg

SEQ ID NO: 316376 - DNA, 30 bp, Artificial Sequence
  Synthetic oligonucleotide
ggtccgggtctgagtaggggctatggcggg

SEQ ID NO: 316377 - DNA, 30 bp, Artificial Sequence
  Synthetic oligonucleotide
aagcgtatatataattcactcattggcggg

SEQ ID NO: 316378 - DNA, 30 bp, Artificial Sequence
  Synthetic oligonucleotide
taccgaaagtaagttagtaccccctgcggg

SEQ ID NO: 316379 - DNA, 30 bp, Artificial Sequence
  Synthetic oligonucleotide
ataacattgtttactgtagcacggtgcggg

SEQ ID NO: 316380 - DNA, 30 bp, Artificial Sequence
  Synthetic oligonucleotide
tagcattagcactgggaccttgtgtgcggg

SEQ ID NO: 316381 - DNA, 30 bp, Artificial Sequence
  Synthetic oligonucleotide
accaacttgctatgtcgcccttcaatcggg

SEQ ID NO: 316382 - DNA, 30 bp, Artificial Sequence
  Synthetic oligonucleotide
gctagtctcagacggagggaaagaatcggg

SEQ ID NO: 316383 - DNA, 30 bp, Artificial Sequence
  Synthetic oligonucleotide
cgtcgacaccgatgcgtagccttgatcggg

SEQ ID NO: 316384 - DNA, 30 bp, Artificial Sequence
  Synthetic oligonucleotide
taagaacgcattactcggaggttgatcggg

SEQ ID NO: 316385 - DNA, 30 bp, Artificial Sequence
  Synthetic oligonucleotide
gagacggtttacggggtaaggcatatcggg

SEQ ID NO: 316386 - DNA, 30 bp, Artificial Sequence
  Synthetic oligonucleotide
tgggtctcgtaaggattactctctatcggg

SEQ ID NO: 316387 - DNA, 30 bp, Artificial Sequence
  Synthetic oligonucleotide
tggtccaccaatagttatggtagtatcggg

SEQ ID NO: 316388 - DNA, 30 bp, Artificial Sequence
  Synthetic oligonucleotide
cgacgcccgtgggcgagtatgcttatcggg

SEQ ID NO: 316389 - DNA, 30 bp, Artificial Sequence
  Synthetic oligonucleotide
catccagtaaaccgtccgtttcacgtcggg

SEQ ID NO: 316390 - DNA, 30 bp, Artificial Sequence
  Synthetic oligonucleotide
tggcagaaccgtagcaccttcgtcgtcggg

SEQ ID NO: 316391 - DNA, 30 bp, Artificial Sequence
  Synthetic oligonucleotide
tatggtttcgacgtccgacacttcgtcggg

SEQ ID NO: 316392 - DNA, 30 bp, Artificial Sequence
  Synthetic oligonucleotide
gaatggggccattcgcagagttaggtcggg

SEQ ID NO: 316393 - DNA, 30 bp, Artificial Sequence
  Synthetic oligonucleotide
aagcagatatgtactctttatccggtcggg

SEQ ID NO: 316394 - DNA, 30 bp, Artificial Sequence
  Synthetic oligonucleotide
ctgagaatcttcatttcggttctggtcggg

SEQ ID NO: 316395 - DNA, 30 bp, Artificial Sequence
  Synthetic oligonucleotide
gactcttgggactgacacgatcctgtcggg

SEQ ID NO: 316396 - DNA, 30 bp, Artificial Sequence
  Synthetic oligonucleotide
ggatggtcatccgcgcgggtgtaattcggg

SEQ ID NO: 316397 - DNA, 30 bp, Artificial Sequence
  Synthetic oligonucleotide
cgctcccagtgccctcatcggaacttcggg

SEQ ID NO: 316398 - DNA, 30 bp, Artificial Sequence
  Synthetic oligonucleotide
tatgttcagattactaacccgacgttcggg

SEQ ID NO: 316399 - DNA, 30 bp, Artificial Sequence
  Synthetic oligonucleotide
taaatcgatctgagagatagcctgttcggg

SEQ ID NO: 316400 - DNA, 30 bp, Artificial Sequence
  Synthetic oligonucleotide
cataattgaatatctatttgcttgttcggg

SEQ ID NO: 316401 - DNA, 30 bp, Artificial Sequence
  Synthetic oligonucleotide
ttcccgcccatgacatggattattttcggg

SEQ ID NO: 316402 - DNA, 30 bp, Artificial Sequence
  Synthetic oligonucleotide
tgaaaaatataagtgtcggcgctaaagggg

SEQ ID NO: 316403 - DNA, 30 bp, Artificial Sequence
  Synthetic oligonucleotide
aaagggctggcgaccctttagggcaagggg

SEQ ID NO: 316404 - DNA, 30 bp, Artificial Sequence
  Synthetic oligonucleotide
gtctggcttgctggacaatgggagaagggg

SEQ ID NO: 316405 - DNA, 30 bp, Artificial Sequence
  Synthetic oligonucleotide
ggtgaccacgatggtgttattacgaagggg

SEQ ID NO: 316406 - DNA, 30 bp, Artificial Sequence
  Synthetic oligonucleotide
tgtcggaattactaggaatttgcacagggg

SEQ ID NO: 316407 - DNA, 30 bp, Artificial Sequence
  Synthetic oligonucleotide
tagtatagtccaggacatgaaagacagggg

SEQ ID NO: 316408 - DNA, 30 bp, Artificial Sequence
  Synthetic oligonucleotide
tccgaattcagttgcagtggtggacagggg

SEQ ID NO: 316409 - DNA, 30 bp, Artificial Sequence
  Synthetic oligonucleotide
agccggttcaatcacgtacagctacagggg

SEQ ID NO: 316410 - DNA, 30 bp, Artificial Sequence
  Synthetic oligonucleotide
cgctaagtgctactgcgaagctcccagggg

SEQ ID NO: 316411 - DNA, 30 bp, Artificial Sequence
  Synthetic oligonucleotide
cctattagtggaagggtggcgaagcagggg

SEQ ID NO: 316412 - DNA, 30 bp, Artificial Sequence
  Synthetic oligonucleotide
acataggcctttatttttggtcagcagggg

SEQ ID NO: 316413 - DNA, 30 bp, Artificial Sequence
  Synthetic oligonucleotide
tttggaaagagtgggaagggcgggcagggg

SEQ ID NO: 316414 - DNA, 30 bp, Artificial Sequence
  Synthetic oligonucleotide
gtcccaatccaacgaacggcccttcagggg

SEQ ID NO: 316415 - DNA, 30 bp, Artificial Sequence
  Synthetic oligonucleotide
caccgggaagggccacaggcaccagagggg

SEQ ID NO: 316416 - DNA, 30 bp, Artificial Sequence
  Synthetic oligonucleotide
gagccatgcgtgtgtgaggatcgggagggg

SEQ ID NO: 316417 - DNA, 30 bp, Artificial Sequence
  Synthetic oligonucleotide
tgagggatagtaaatttgaggactgagggg

SEQ ID NO: 316418 - DNA, 30 bp, Artificial Sequence
  Synthetic oligonucleotide
tgttccttagggaattccgcctctgagggg

SEQ ID NO: 316419 - DNA, 30 bp, Artificial Sequence
  Synthetic oligonucleotide
tccagagggaaggcctgggatggtgagggg

SEQ ID NO: 316420 - DNA, 30 bp, Artificial Sequence
  Synthetic oligonucleotide
gcttcgcttacggctgggtaaggatagggg

SEQ ID NO: 316421 - DNA, 30 bp, Artificial Sequence
  Synthetic oligonucleotide
ctacttcactacgtggcaggcttatagggg

SEQ ID NO: 316422 - DNA, 30 bp, Artificial Sequence
  Synthetic oligonucleotide
ctaatgcttgcaagcagtctcaactagggg

SEQ ID NO: 316423 - DNA, 30 bp, Artificial Sequence
  Synthetic oligonucleotide
ggattaagagtcattcgcagatagtagggg

SEQ ID NO: 316424 - DNA, 30 bp, Artificial Sequence
  Synthetic oligonucleotide
cggcaattacgatgaccggcagtgtagggg

SEQ ID NO: 316425 - DNA, 30 bp, Artificial Sequence
  Synthetic oligonucleotide
gtatcctctgtagagtcttaacattagggg

SEQ ID NO: 316426 - DNA, 30 bp, Artificial Sequence
  Synthetic oligonucleotide
agacaggttagtgcgcgaacgccttagggg

SEQ ID NO: 316427 - DNA, 30 bp, Artificial Sequence
  Synthetic oligonucleotide
aggaataagggcacgcgtatactcacgggg

SEQ ID NO: 316428 - DNA, 30 bp, Artificial Sequence
  Synthetic oligonucleotide
tggggtgccgagcaaggcccagtcacgggg

SEQ ID NO: 316429 - DNA, 30 bp, Artificial Sequence
  Synthetic oligonucleotide
aaaacgcttctgacatgtcttaggacgggg

SEQ ID NO: 316430 - DNA, 30 bp, Artificial Sequence
  Synthetic oligonucleotide
aagaagtcccgacctggagagtggacgggg

SEQ ID NO: 316431 - DNA, 30 bp, Artificial Sequence
  Synthetic oligonucleotide
ataagatcatatgttaatgagaatacgggg

SEQ ID NO: 316432 - DNA, 30 bp, Artificial Sequence
  Synthetic oligonucleotide
taaagaatgcctgagagactcagtacgggg

SEQ ID NO: 316433 - DNA, 30 bp, Artificial Sequence
  Synthetic oligonucleotide
tacaccgaataacgattcctttgtacgggg

SEQ ID NO: 316434 - DNA, 30 bp, Artificial Sequence
  Synthetic oligonucleotide
gatgtccccttttgggcgttcgaaccgggg

SEQ ID NO: 316435 - DNA, 30 bp, Artificial Sequence
  Synthetic oligonucleotide
ataaggcttaggttcggggctgggccgggg

SEQ ID NO: 316436 - DNA, 31 bp, Artificial Sequence
  Synthetic oligonucleotide
tgtggtacttcggcaggcagcgtatccgggg

SEQ ID NO: 316437 - DNA, 30 bp, Artificial Sequence
  Synthetic oligonucleotide
tagctaactgcttgggtacattctccgggg

SEQ ID NO: 316438 - DNA, 30 bp, Artificial Sequence
  Synthetic oligonucleotide
aatccaacgtacaatgtgaaggttccgggg

SEQ ID NO: 316439 - DNA, 30 bp, Artificial Sequence
  Synthetic oligonucleotide
actaattcttattgctgtctggtagcgggg

SEQ ID NO: 316440 - DNA, 30 bp, Artificial Sequence
  Synthetic oligonucleotide
agcggcttgccgttaatcacgagcgcgggg

SEQ ID NO: 316441 - DNA, 30 bp, Artificial Sequence
  Synthetic oligonucleotide
gctagtttagagcccccaagctgcgcgggg

SEQ ID NO: 316442 - DNA, 30 bp, Artificial Sequence
  Synthetic oligonucleotide
tttatggacttagtgtgacatggctcgggg

SEQ ID NO: 316443 - DNA, 30 bp, Artificial Sequence
  Synthetic oligonucleotide
tgccccaactaagctgtccacatctcgggg

SEQ ID NO: 316444 - DNA, 30 bp, Artificial Sequence
  Synthetic oligonucleotide
gatcctgggttatgatggaaacagtcgggg

SEQ ID NO: 316445 - DNA, 30 bp, Artificial Sequence
  Synthetic oligonucleotide
taccaggacagtatgggcccagagtcgggg

SEQ ID NO: 316446 - DNA, 30 bp, Artificial Sequence
  Synthetic oligonucleotide
gaaaaagccagtacttgaactctgtcgggg

SEQ ID NO: 316447 - DNA, 30 bp, Artificial Sequence
  Synthetic oligonucleotide
acaatctactctctcgatttaccttcgggg

SEQ ID NO: 316448 - DNA, 29 bp, Artificial Sequence
  Synthetic oligonucleotide
acagtttaattagccactggtaaaggggg

SEQ ID NO: 316449 - DNA, 30 bp, Artificial Sequence
  Synthetic oligonucleotide
atttgaaatcgcgaggacacggacaggggg

SEQ ID NO: 316450 - DNA, 30 bp, Artificial Sequence
  Synthetic oligonucleotide
ccggctgttcttcgggttgggcgcaggggg

SEQ ID NO: 316451 - DNA, 30 bp, Artificial Sequence
  Synthetic oligonucleotide
ggtccccgctatctcatcgaactcaggggg

SEQ ID NO: 316452 - DNA, 30 bp, Artificial Sequence
  Synthetic oligonucleotide
tcgttccactcgtcactcagaaagaggggg

SEQ ID NO: 316453 - DNA, 30 bp, Artificial Sequence
  Synthetic oligonucleotide
tcctctctgcattctctgtagcagaggggg

SEQ ID NO: 316454 - DNA, 30 bp, Artificial Sequence
  Synthetic oligonucleotide
cacaggtaaatctccgacttagagaggggg

SEQ ID NO: 316455 - DNA, 30 bp, Artificial Sequence
  Synthetic oligonucleotide
cgctctttgtgtcattgcgctggtaggggg

SEQ ID NO: 316456 - DNA, 30 bp, Artificial Sequence
  Synthetic oligonucleotide
cgcgttgcacaaggttccaacaaacggggg

SEQ ID NO: 316457 - DNA, 30 bp, Artificial Sequence
  Synthetic oligonucleotide
ggtgtcaaggcttgcgcattaaagcggggg

SEQ ID NO: 316458 - DNA, 30 bp, Artificial Sequence
  Synthetic oligonucleotide
ctcgaacaacgcgttgttttgaggcggggg

SEQ ID NO: 316459 - DNA, 30 bp, Artificial Sequence
  Synthetic oligonucleotide
aatatgcctctgttaaatatttatcggggg

SEQ ID NO: 316460 - DNA, 30 bp, Artificial Sequence
  Synthetic oligonucleotide
tcgacggcaggtccagctaggcaagggggg

SEQ ID NO: 316461 - DNA, 30 bp, Artificial Sequence
  Synthetic oligonucleotide
tcaaggactcgatcactaggtcgagggggg

SEQ ID NO: 316462 - DNA, 30 bp, Artificial Sequence
  Synthetic oligonucleotide
gctaccccaagcgaccccatcaaggggggg

SEQ ID NO: 316463 - DNA, 30 bp, Artificial Sequence
  Synthetic oligonucleotide
ccaacaggaaagggttgacgggcggggggg

SEQ ID NO: 316464 - DNA, 30 bp, Artificial Sequence
  Synthetic oligonucleotide
tgttgcaggttacttaggcatggggggggg

SEQ ID NO: 316465 - DNA, 30 bp, Artificial Sequence
  Synthetic oligonucleotide
tgcaaccgcttatgcctttgtgtggggggg

SEQ ID NO: 316466 - DNA, 30 bp, Artificial Sequence
  Synthetic oligonucleotide
ctgggcaccagtccggccagaaatgggggg

SEQ ID NO: 316467 - DNA, 30 bp, Artificial Sequence
  Synthetic oligonucleotide
tgtacggattacgtctaggttcactggggg

SEQ ID NO: 316468 - DNA, 30 bp, Artificial Sequence
  Synthetic oligonucleotide
tcattatgagaactcaataccgcctggggg

SEQ ID NO: 316469 - DNA, 30 bp, Artificial Sequence
  Synthetic oligonucleotide
agccggagaggcagactctgaccgtggggg

SEQ ID NO: 316470 - DNA, 30 bp, Artificial Sequence
  Synthetic oligonucleotide
gttcggattgtatggggcactgcgtggggg

SEQ ID NO: 316471 - DNA, 30 bp, Artificial Sequence
  Synthetic oligonucleotide
tcgagatccgttgtggtcactcattggggg

SEQ ID NO: 316472 - DNA, 30 bp, Artificial Sequence
  Synthetic oligonucleotide
ggtctgcctgaagagattgttagttggggg

SEQ ID NO: 316473 - DNA, 30 bp, Artificial Sequence
  Synthetic oligonucleotide
gtgtcttcgtaccctgtatggatttggggg

SEQ ID NO: 316474 - DNA, 30 bp, Artificial Sequence
  Synthetic oligonucleotide
tcatagacttggctcttaccgttaatgggg

SEQ ID NO: 316475 - DNA, 30 bp, Artificial Sequence
  Synthetic oligonucleotide
ttctgatccaagtcacgaaattcgatgggg

SEQ ID NO: 316476 - DNA, 30 bp, Artificial Sequence
  Synthetic oligonucleotide
atactagtgagatagaggacggggatgggg

SEQ ID NO: 316477 - DNA, 30 bp, Artificial Sequence
  Synthetic oligonucleotide
agtacacaagatttcaggatttcactgggg

SEQ ID NO: 316478 - DNA, 30 bp, Artificial Sequence
  Synthetic oligonucleotide
agccttgattggaaggagctttcactgggg

SEQ ID NO: 316479 - DNA, 30 bp, Artificial Sequence
  Synthetic oligonucleotide
ttggcatggccgaccagcgcaggactgggg

SEQ ID NO: 316480 - DNA, 30 bp, Artificial Sequence
  Synthetic oligonucleotide
gttacacatcgcgccaacgtattactgggg

SEQ ID NO: 316481 - DNA, 30 bp, Artificial Sequence
  Synthetic oligonucleotide
acttaatagcgtactaagccagtcctgggg

SEQ ID NO: 316482 - DNA, 30 bp, Artificial Sequence
  Synthetic oligonucleotide
ctcagtccgtaagggacaaaagcgctgggg

SEQ ID NO: 316483 - DNA, 30 bp, Artificial Sequence
  Synthetic oligonucleotide
ctcactggcaggttaacggtagggctgggg

SEQ ID NO: 316484 - DNA, 30 bp, Artificial Sequence
  Synthetic oligonucleotide
tggccgacggtctgggaaggggatctgggg

SEQ ID NO: 316485 - DNA, 30 bp, Artificial Sequence
  Synthetic oligonucleotide
ccggcgcaggaaataatacagtctctgggg

SEQ ID NO: 316486 - DNA, 30 bp, Artificial Sequence
  Synthetic oligonucleotide
agtctattgggacaagctcgtagtctgggg

SEQ ID NO: 316487 - DNA, 30 bp, Artificial Sequence
  Synthetic oligonucleotide
gctgggtcgaaaacggaacctgacgtgggg

SEQ ID NO: 316488 - DNA, 30 bp, Artificial Sequence
  Synthetic oligonucleotide
tcaagtgcgcggactttctcacgcgtgggg

SEQ ID NO: 316489 - DNA, 30 bp, Artificial Sequence
  Synthetic oligonucleotide
tttggacaatactcatcaaacatcgtgggg

SEQ ID NO: 316490 - DNA, 30 bp, Artificial Sequence
  Synthetic oligonucleotide
tacggctgccaaatcgcggggtaggtgggg

SEQ ID NO: 316491 - DNA, 30 bp, Artificial Sequence
  Synthetic oligonucleotide
gttccggcacgacggccaaatttggtgggg

SEQ ID NO: 316492 - DNA, 30 bp, Artificial Sequence
  Synthetic oligonucleotide
ggcgcacatgcatcggacatggatgtgggg

SEQ ID NO: 316493 - DNA, 30 bp, Artificial Sequence
  Synthetic oligonucleotide
ctctcagcctgttagggtgtgagtgtgggg

SEQ ID NO: 316494 - DNA, 30 bp, Artificial Sequence
  Synthetic oligonucleotide
gtcaaagagtccatatggtggggtgtgggg

SEQ ID NO: 316495 - DNA, 30 bp, Artificial Sequence
  Synthetic oligonucleotide
gcaggaagacgcacatatctgcttgtgggg

SEQ ID NO: 316496 - DNA, 30 bp, Artificial Sequence
  Synthetic oligonucleotide
gtgagcgaaggtggggcctaatttgtgggg

SEQ ID NO: 316497 - DNA, 30 bp, Artificial Sequence
  Synthetic oligonucleotide
gcgccgtctacgtggtacgttatattgggg

SEQ ID NO: 316498 - DNA, 30 bp, Artificial Sequence
  Synthetic oligonucleotide
cctggctagtgcgctaaactcctattgggg

SEQ ID NO: 316499 - DNA, 30 bp, Artificial Sequence
  Synthetic oligonucleotide
ataaaactgggaatcgttgctgacttgggg

SEQ ID NO: 316500 - DNA, 30 bp, Artificial Sequence
  Synthetic oligonucleotide
acagtatctacttcccgcgctagcttgggg

SEQ ID NO: 316501 - DNA, 30 bp, Artificial Sequence
  Synthetic oligonucleotide
cccgggatccgcagatatgagctcttgggg

SEQ ID NO: 316502 - DNA, 30 bp, Artificial Sequence
  Synthetic oligonucleotide
taaatgatatgttagataatgaagttgggg

SEQ ID NO: 316503 - DNA, 30 bp, Artificial Sequence
  Synthetic oligonucleotide
ttagtggaagccttcaaaggggagttgggg

SEQ ID NO: 316504 - DNA, 30 bp, Artificial Sequence
  Synthetic oligonucleotide
aattggttcgccgatcttaaagttttgggg

SEQ ID NO: 316505 - DNA, 30 bp, Artificial Sequence
  Synthetic oligonucleotide
ttgagtctctactgtgattcagaaaatggg

SEQ ID NO: 316506 - DNA, 30 bp, Artificial Sequence
  Synthetic oligonucleotide
ccggaccggtatagcgtccatcgcaatggg

SEQ ID NO: 316507 - DNA, 30 bp, Artificial Sequence
  Synthetic oligonucleotide
ttcggtgaactagggaacgcggtcaatggg

SEQ ID NO: 316508 - DNA, 30 bp, Artificial Sequence
  Synthetic oligonucleotide
ctattctgttgacgatcgggctcgaatggg

SEQ ID NO: 316509 - DNA, 30 bp, Artificial Sequence
  Synthetic oligonucleotide
attcagtagaagctatctgcctgtaatggg

SEQ ID NO: 316510 - DNA, 30 bp, Artificial Sequence
  Synthetic oligonucleotide
atatgtgcccgatcgataaaatttaatggg

SEQ ID NO: 316511 - DNA, 30 bp, Artificial Sequence
  Synthetic oligonucleotide
aatgagcattcacacgccgctagccatggg

SEQ ID NO: 316512 - DNA, 30 bp, Artificial Sequence
  Synthetic oligonucleotide
taggttgttacacggaaggaccgccatggg

SEQ ID NO: 316513 - DNA, 30 bp, Artificial Sequence
  Synthetic oligonucleotide
tataccgtttagaggccaataaagcatggg

SEQ ID NO: 316514 - DNA, 30 bp, Artificial Sequence
  Synthetic oligonucleotide
aatccgcgagaatccaatgatgcgcatggg

SEQ ID NO: 316515 - DNA, 30 bp, Artificial Sequence
  Synthetic oligonucleotide
acgaggcccaatgcgcgaatgcggcatggg

SEQ ID NO: 316516 - DNA, 30 bp, Artificial Sequence
  Synthetic oligonucleotide
taataggaggtactatgtcttaaagatggg

SEQ ID NO: 316517 - DNA, 30 bp, Artificial Sequence
  Synthetic oligonucleotide
tagtgtaaaataggagaaagtggagatggg

SEQ ID NO: 316518 - DNA, 30 bp, Artificial Sequence
  Synthetic oligonucleotide
cttgccttggaatatacctccatcgatggg

SEQ ID NO: 316519 - DNA, 30 bp, Artificial Sequence
  Synthetic oligonucleotide
gacgaggatttgtggggtcttgaggatggg

SEQ ID NO: 316520 - DNA, 30 bp, Artificial Sequence
  Synthetic oligonucleotide
aactaggtcaatttcgcctagccggatggg

SEQ ID NO: 316521 - DNA, 30 bp, Artificial Sequence
  Synthetic oligonucleotide
gtgctcccgcctatgtgatggccggatggg

SEQ ID NO: 316522 - DNA, 30 bp, Artificial Sequence
  Synthetic oligonucleotide
attcaaagtgctccagcgaactcggatggg

SEQ ID NO: 316523 - DNA, 30 bp, Artificial Sequence
  Synthetic oligonucleotide
agtattctaccaacacgggcatctgatggg

SEQ ID NO: 316524 - DNA, 30 bp, Artificial Sequence
  Synthetic oligonucleotide
gtactgggcacgtaggtgtctagtgatggg

SEQ ID NO: 316525 - DNA, 30 bp, Artificial Sequence
  Synthetic oligonucleotide
tagtcagatttaatagtgaactttgatggg

SEQ ID NO: 316526 - DNA, 30 bp, Artificial Sequence
  Synthetic oligonucleotide
tagcttcaatatatcggaggcaaatatggg

SEQ ID NO: 316527 - DNA, 30 bp, Artificial Sequence
  Synthetic oligonucleotide
taaaatcgaccggagagtctcacatatggg

SEQ ID NO: 316528 - DNA, 30 bp, Artificial Sequence
  Synthetic oligonucleotide
actgtccaaaggtctggggttatatatggg

SEQ ID NO: 316529 - DNA, 30 bp, Artificial Sequence
  Synthetic oligonucleotide
ctctgggtaaagcgggcggcactatatggg

SEQ ID NO: 316530 - DNA, 30 bp, Artificial Sequence
  Synthetic oligonucleotide
cgttggaggtctgtctccaatacttatggg

SEQ ID NO: 316531 - DNA, 30 bp, Artificial Sequence
  Synthetic oligonucleotide
agtctttactcctggcaccgattttatggg

SEQ ID NO: 316532 - DNA, 30 bp, Artificial Sequence
  Synthetic oligonucleotide
gcaacagctcgcgcatttaattatactggg

SEQ ID NO: 316533 - DNA, 30 bp, Artificial Sequence
  Synthetic oligonucleotide
tctagtagggtgggatattctaaacctggg

SEQ ID NO: 316534 - DNA, 30 bp, Artificial Sequence
  Synthetic oligonucleotide
aatcacagttgtgatctgcgataacctggg

SEQ ID NO: 316535 - DNA, 30 bp, Artificial Sequence
  Synthetic oligonucleotide
tttagtggatacgtctaggtttaacctggg

SEQ ID NO: 316536 - DNA, 30 bp, Artificial Sequence
  Synthetic oligonucleotide
ggtcatctggggccaagcaaaacacctggg

SEQ ID NO: 316537 - DNA, 30 bp, Artificial Sequence
  Synthetic oligonucleotide
gaagttcgatggtcaaccatagaccctggg

SEQ ID NO: 316538 - DNA, 30 bp, Artificial Sequence
  Synthetic oligonucleotide
atatatagactcattatacatccccctggg

SEQ ID NO: 316539 - DNA, 30 bp, Artificial Sequence
  Synthetic oligonucleotide
agttacccgggaatcattgggccgcctggg

SEQ ID NO: 316540 - DNA, 30 bp, Artificial Sequence
  Synthetic oligonucleotide
ccgcaatgaacaatttttgctgtgcctggg

SEQ ID NO: 316541 - DNA, 30 bp, Artificial Sequence
  Synthetic oligonucleotide
tctcgggaaagaccgtaattatatcctggg

SEQ ID NO: 316542 - DNA, 30 bp, Artificial Sequence
  Synthetic oligonucleotide
cccgcgggagatagacagtggcgggctggg

SEQ ID NO: 316543 - DNA, 30 bp, Artificial Sequence
  Synthetic oligonucleotide
accgaaggttggattggcccccgtgctggg

SEQ ID NO: 316544 - DNA, 30 bp, Artificial Sequence
  Synthetic oligonucleotide
tattaattggcataatccctcgcatctggg

SEQ ID NO: 316545 - DNA, 30 bp, Artificial Sequence
  Synthetic oligonucleotide
gtttagttaggtcttccccgagtctctggg

SEQ ID NO: 316546 - DNA, 30 bp, Artificial Sequence
  Synthetic oligonucleotide
aatttttgagttaatcgaatctcgtctggg

SEQ ID NO: 316547 - DNA, 30 bp, Artificial Sequence
  Synthetic oligonucleotide
aaagaccaggacgtctccgtaaggtctggg

SEQ ID NO: 316548 - DNA, 30 bp, Artificial Sequence
  Synthetic oligonucleotide
cggtaagaagggttctgtctctcttctggg

SEQ ID NO: 316549 - DNA, 30 bp, Artificial Sequence
  Synthetic oligonucleotide
accagccaggcgaacactgatcgttctggg

SEQ ID NO: 316550 - DNA, 30 bp, Artificial Sequence
  Synthetic oligonucleotide
gaacgatctaaccccctattatgttctggg

SEQ ID NO: 316551 - DNA, 30 bp, Artificial Sequence
  Synthetic oligonucleotide
gaactccactgaaaataggattaaagtggg

SEQ ID NO: 316552 - DNA, 30 bp, Artificial Sequence
  Synthetic oligonucleotide
tatatcggatctagcgttctgcccagtggg

SEQ ID NO: 316553 - DNA, 30 bp, Artificial Sequence
  Synthetic oligonucleotide
aataattctgaagaggaattaagcagtggg

SEQ ID NO: 316554 - DNA, 30 bp, Artificial Sequence
  Synthetic oligonucleotide
gagacaggagagtcttcggtatgcagtggg

SEQ ID NO: 316555 - DNA, 30 bp, Artificial Sequence
  Synthetic oligonucleotide
acgcgcatacgccagcccaagggtagtggg

SEQ ID NO: 316556 - DNA, 30 bp, Artificial Sequence
  Synthetic oligonucleotide
caggacgcgacactggttgttccacgtggg

SEQ ID NO: 316557 - DNA, 28 bp, Artificial Sequence
  Synthetic oligonucleotide
tgatacgtgacaataataaatacgtggg

SEQ ID NO: 316558 - DNA, 30 bp, Artificial Sequence
  Synthetic oligonucleotide
caccggagctggcttcatgtacagcgtggg

SEQ ID NO: 316559 - DNA, 30 bp, Artificial Sequence
  Synthetic oligonucleotide
attctcaataggcgagctattgagcgtggg

SEQ ID NO: 316560 - DNA, 30 bp, Artificial Sequence
  Synthetic oligonucleotide
tactattaaaaatagtccggatagcgtggg

SEQ ID NO: 316561 - DNA, 30 bp, Artificial Sequence
  Synthetic oligonucleotide
gcgttctgacgcatagtacatataggtggg

SEQ ID NO: 316562 - DNA, 30 bp, Artificial Sequence
  Synthetic oligonucleotide
tatgcgaatttacaatatcgcggcggtggg

SEQ ID NO: 316563 - DNA, 30 bp, Artificial Sequence
  Synthetic oligonucleotide
gtctgcaagatacgcagaattaagggtggg

SEQ ID NO: 316564 - DNA, 30 bp, Artificial Sequence
  Synthetic oligonucleotide
atgcaaagggattggaattgagtgggtggg

SEQ ID NO: 316565 - DNA, 30 bp, Artificial Sequence
  Synthetic oligonucleotide
gatttgcacaaccttgtcgttggatgtggg

SEQ ID NO: 316566 - DNA, 30 bp, Artificial Sequence
  Synthetic oligonucleotide
aacctggcccagacggggacagtctgtggg

SEQ ID NO: 316567 - DNA, 30 bp, Artificial Sequence
  Synthetic oligonucleotide
aagcacaggctgtgggttgtcccgtgtggg

SEQ ID NO: 316568 - DNA, 30 bp, Artificial Sequence
  Synthetic oligonucleotide
cgggcttggtcgattaatatttggtgtggg

SEQ ID NO: 316569 - DNA, 30 bp, Artificial Sequence
  Synthetic oligonucleotide
ggacccaaaagtaggtagtataattgtggg

SEQ ID NO: 316570 - DNA, 30 bp, Artificial Sequence
  Synthetic oligonucleotide
tgaccccgactcaggtcggtgatcattggg

SEQ ID NO: 316571 - DNA, 30 bp, Artificial Sequence
  Synthetic oligonucleotide
ccgcgatcggagacgcaggagaagattggg

SEQ ID NO: 316572 - DNA, 30 bp, Artificial Sequence
  Synthetic oligonucleotide
gcaaaactgacacttggtgtctagattggg

SEQ ID NO: 316573 - DNA, 30 bp, Artificial Sequence
  Synthetic oligonucleotide
tttgcgtggtgggggaaggtgagtattggg

SEQ ID NO: 316574 - DNA, 30 bp, Artificial Sequence
  Synthetic oligonucleotide
agtggagaatattccccaccagggcttggg

SEQ ID NO: 316575 - DNA, 30 bp, Artificial Sequence
  Synthetic oligonucleotide
gtaggctttaggttacactaataagttggg

SEQ ID NO: 316576 - DNA, 30 bp, Artificial Sequence
  Synthetic oligonucleotide
aaaagagagttgtacaacgtaaacgttggg

SEQ ID NO: 316577 - DNA, 30 bp, Artificial Sequence
  Synthetic oligonucleotide
agtttcaagctccaagcgttaagcgttggg

SEQ ID NO: 316578 - DNA, 30 bp, Artificial Sequence
  Synthetic oligonucleotide
cacgaactactggatgggggccctgttggg

SEQ ID NO: 316579 - DNA, 30 bp, Artificial Sequence
  Synthetic oligonucleotide
gtcgataggggcgcatgactgtttgttggg

SEQ ID NO: 316580 - DNA, 30 bp, Artificial Sequence
  Synthetic oligonucleotide
aagcggcaacaacggatattacaatttggg

SEQ ID NO: 316581 - DNA, 30 bp, Artificial Sequence
  Synthetic oligonucleotide
gttctcaaggttggaaaatcccaatttggg

SEQ ID NO: 316582 - DNA, 30 bp, Artificial Sequence
  Synthetic oligonucleotide
atggaacgatcggattgtgtggaatttggg

SEQ ID NO: 316583 - DNA, 30 bp, Artificial Sequence
  Synthetic oligonucleotide
ccgattcggtaaagatgcgtgtactttggg

SEQ ID NO: 316584 - DNA, 30 bp, Artificial Sequence
  Synthetic oligonucleotide
agaatcccactgtctttcgacatgtttggg

SEQ ID NO: 316585 - DNA, 30 bp, Artificial Sequence
  Synthetic oligonucleotide
aatgtaggtagcacgttgtaggtttttggg

SEQ ID NO: 316586 - DNA, 30 bp, Artificial Sequence
  Synthetic oligonucleotide
tagtcagggaagccagtgttaaaaaaatgg

SEQ ID NO: 316587 - DNA, 30 bp, Artificial Sequence
  Synthetic oligonucleotide
agatactcggattaaaacgagaaaaaatgg

SEQ ID NO: 316588 - DNA, 30 bp, Artificial Sequence
  Synthetic oligonucleotide
ggttatcacccctggcgccgaacaaaatgg

SEQ ID NO: 316589 - DNA, 30 bp, Artificial Sequence
  Synthetic oligonucleotide
gtttatagctaatatgtggatgcaaaatgg

SEQ ID NO: 316590 - DNA, 30 bp, Artificial Sequence
  Synthetic oligonucleotide
tgcaagcggaccgggacgtaagtcaaatgg

SEQ ID NO: 316591 - DNA, 30 bp, Artificial Sequence
  Synthetic oligonucleotide
cttttaacccagaggacactgtcgaaatgg

SEQ ID NO: 316592 - DNA, 30 bp, Artificial Sequence
  Synthetic oligonucleotide
gcagtcttccccgcctaccaagataaatgg

SEQ ID NO: 316593 - DNA, 30 bp, Artificial Sequence
  Synthetic oligonucleotide
gagcattactacaacgttctaggtaaatgg

SEQ ID NO: 316594 - DNA, 30 bp, Artificial Sequence
  Synthetic oligonucleotide
tctaggtgccatgggaatcaatgtaaatgg

SEQ ID NO: 316595 - DNA, 30 bp, Artificial Sequence
  Synthetic oligonucleotide
ttctcgctgagtgttcaaccatttaaatgg

SEQ ID NO: 316596 - DNA, 30 bp, Artificial Sequence
  Synthetic oligonucleotide
acctgtcacatcagctaaagataacaatgg

SEQ ID NO: 316597 - DNA, 30 bp, Artificial Sequence
  Synthetic oligonucleotide
ttgtatatcctgcgcagttaaacacaatgg

SEQ ID NO: 316598 - DNA, 30 bp, Artificial Sequence
  Synthetic oligonucleotide
tgtacatcggtgcgtatatacatccaatgg

SEQ ID NO: 316599 - DNA, 30 bp, Artificial Sequence
  Synthetic oligonucleotide
agttaggattggtcagggacgctccaatgg

SEQ ID NO: 316600 - DNA, 30 bp, Artificial Sequence
  Synthetic oligonucleotide
gtaatagtggttcaggtgcaggcgcaatgg

SEQ ID NO: 316601 - DNA, 30 bp, Artificial Sequence
  Synthetic oligonucleotide
gctccatcgtaagatttagtctggcaatgg

SEQ ID NO: 316602 - DNA, 30 bp, Artificial Sequence
  Synthetic oligonucleotide
tgaaagcaatgcacattgtcacatcaatgg

SEQ ID NO: 316603 - DNA, 30 bp, Artificial Sequence
  Synthetic oligonucleotide
gagtacattagcctattttcagttcaatgg

SEQ ID NO: 316604 - DNA, 30 bp, Artificial Sequence
  Synthetic oligonucleotide
agtcagattcggctgctattctgcgaatgg

SEQ ID NO: 316605 - DNA, 30 bp, Artificial Sequence
  Synthetic oligonucleotide
catttgccgtcggcctggtcaatcgaatgg

SEQ ID NO: 316606 - DNA, 30 bp, Artificial Sequence
  Synthetic oligonucleotide
atcctttataaaaatgactaatcggaatgg

SEQ ID NO: 316607 - DNA, 30 bp, Artificial Sequence
  Synthetic oligonucleotide
gctcggctcatttggcagccgcatgaatgg

SEQ ID NO: 316608 - DNA, 30 bp, Artificial Sequence
  Synthetic oligonucleotide
gattcccagaggttagtgtcatgtgaatgg

SEQ ID NO: 316609 - DNA, 30 bp, Artificial Sequence
  Synthetic oligonucleotide
attgctcaatgcgaggcaacttttgaatgg

SEQ ID NO: 316610 - DNA, 30 bp, Artificial Sequence
  Synthetic oligonucleotide
tttgccaacacttagagtatgacataatgg

SEQ ID NO: 316611 - DNA, 30 bp, Artificial Sequence
  Synthetic oligonucleotide
attaggagggtgatttgtcctggataatgg

SEQ ID NO: 316612 - DNA, 30 bp, Artificial Sequence
  Synthetic oligonucleotide
gatgctgagtaaaggcatcataactaatgg

SEQ ID NO: 316613 - DNA, 30 bp, Artificial Sequence
  Synthetic oligonucleotide
ataataccgctcttatatggcacctaatgg

SEQ ID NO: 316614 - DNA, 30 bp, Artificial Sequence
  Synthetic oligonucleotide
gaaccgtgggggaatcaaaattagtaatgg

SEQ ID NO: 316615 - DNA, 30 bp, Artificial Sequence
  Synthetic oligonucleotide
cagtcacctggtcttaactctacttaatgg

SEQ ID NO: 316616 - DNA, 30 bp, Artificial Sequence
  Synthetic oligonucleotide
caatgccgctagcgggcaacgtgaacatgg

SEQ ID NO: 316617 - DNA, 30 bp, Artificial Sequence
  Synthetic oligonucleotide
gggcaacacggggaacctggcgtaacatgg

SEQ ID NO: 316618 - DNA, 30 bp, Artificial Sequence
  Synthetic oligonucleotide
ctaataccccaccgttggtcatggacatgg

SEQ ID NO: 316619 - DNA, 30 bp, Artificial Sequence
  Synthetic oligonucleotide
actggtcatctggttaatagatgtacatgg

SEQ ID NO: 316620 - DNA, 30 bp, Artificial Sequence
  Synthetic oligonucleotide
accgtccgcggtcaggacttgcaaccatgg

SEQ ID NO: 316621 - DNA, 30 bp, Artificial Sequence
  Synthetic oligonucleotide
tcgtcggtagaatctgtacatttcccatgg

SEQ ID NO: 316622 - DNA, 30 bp, Artificial Sequence
  Synthetic oligonucleotide
tggatacgggaagcatcaacagtgccatgg

SEQ ID NO: 316623 - DNA, 30 bp, Artificial Sequence
  Synthetic oligonucleotide
gcggcacctgttagaacctggcatccatgg

SEQ ID NO: 316624 - DNA, 30 bp, Artificial Sequence
  Synthetic oligonucleotide
aagttaatgcgtagcgtgtttcctccatgg

SEQ ID NO: 316625 - DNA, 30 bp, Artificial Sequence
  Synthetic oligonucleotide
cgggtcgttgcgggtgccgccacagcatgg

SEQ ID NO: 316626 - DNA, 30 bp, Artificial Sequence
  Synthetic oligonucleotide
ggtagcccgttcgaatcccgatccgcatgg

SEQ ID NO: 316627 - DNA, 30 bp, Artificial Sequence
  Synthetic oligonucleotide
tcgagacacaattccggccttctggcatgg

SEQ ID NO: 316628 - DNA, 30 bp, Artificial Sequence
  Synthetic oligonucleotide
ttcttcagatttgttgactcgtaatcatgg

SEQ ID NO: 316629 - DNA, 30 bp, Artificial Sequence
  Synthetic oligonucleotide
gagagttgtatacgctccggacgatcatgg

SEQ ID NO: 316630 - DNA, 30 bp, Artificial Sequence
  Synthetic oligonucleotide
cccaaaattatcatgtcccggggatcatgg

SEQ ID NO: 316631 - DNA, 30 bp, Artificial Sequence
  Synthetic oligonucleotide
ccgtgctacagtcgacggatactatcatgg

SEQ ID NO: 316632 - DNA, 30 bp, Artificial Sequence
  Synthetic oligonucleotide
gacgtacttggttctctagaaccctcatgg

SEQ ID NO: 316633 - DNA, 30 bp, Artificial Sequence
  Synthetic oligonucleotide
cacccccgtctataactccatggctcatgg

SEQ ID NO: 316634 - DNA, 30 bp, Artificial Sequence
  Synthetic oligonucleotide
atacatacattattttccgccgattcatgg

SEQ ID NO: 316635 - DNA, 30 bp, Artificial Sequence
  Synthetic oligonucleotide
agcattcaatccgtctgtcgcgattcatgg

SEQ ID NO: 316636 - DNA, 30 bp, Artificial Sequence
  Synthetic oligonucleotide
agatgttcgtgtaaagtcgaaacttcatgg

SEQ ID NO: 316637 - DNA, 30 bp, Artificial Sequence
  Synthetic oligonucleotide
tgataaacggaatttacagactcttcatgg

SEQ ID NO: 316638 - DNA, 31 bp, Artificial Sequence
  Synthetic oligonucleotide
gagctggcagggcatagatccgttttcatgg

SEQ ID NO: 316639 - DNA, 30 bp, Artificial Sequence
  Synthetic oligonucleotide
ggtgataaccatatgcggactcccagatgg

SEQ ID NO: 316640 - DNA, 30 bp, Artificial Sequence
  Synthetic oligonucleotide
agaatactcgtacggtttctgtccagatgg

SEQ ID NO: 316641 - DNA, 30 bp, Artificial Sequence
  Synthetic oligonucleotide
ggggtcccttaaggttgctgcctcagatgg

SEQ ID NO: 316642 - DNA, 30 bp, Artificial Sequence
  Synthetic oligonucleotide
tgcactacaacatttttacgcccgagatgg

SEQ ID NO: 316643 - DNA, 30 bp, Artificial Sequence
  Synthetic oligonucleotide
cgccatgaccttacaaatgccgatagatgg

SEQ ID NO: 316644 - DNA, 30 bp, Artificial Sequence
  Synthetic oligonucleotide
tccaaaccttcaccagtaaagactagatgg

SEQ ID NO: 316645 - DNA, 30 bp, Artificial Sequence
  Synthetic oligonucleotide
gatacgtgtggacccatcccccgtagatgg

SEQ ID NO: 316646 - DNA, 30 bp, Artificial Sequence
  Synthetic oligonucleotide
tgcgggaaccttctaccatattttagatgg

SEQ ID NO: 316647 - DNA, 30 bp, Artificial Sequence
  Synthetic oligonucleotide
actgacagcacatcgtcctaagaccgatgg

SEQ ID NO: 316648 - DNA, 30 bp, Artificial Sequence
  Synthetic oligonucleotide
catatacgttcattggtcggtggccgatgg

SEQ ID NO: 316649 - DNA, 30 bp, Artificial Sequence
  Synthetic oligonucleotide
actggtcaaacggccgctagcgatcgatgg

SEQ ID NO: 316650 - DNA, 30 bp, Artificial Sequence
  Synthetic oligonucleotide
gagcatgttctgtatcctctggaaggatgg

SEQ ID NO: 316651 - DNA, 30 bp, Artificial Sequence
  Synthetic oligonucleotide
cgatcgcgcgcacaaatcatttgaggatgg

SEQ ID NO: 316652 - DNA, 30 bp, Artificial Sequence
  Synthetic oligonucleotide
tgctattcctcgtattgggggtgcggatgg

SEQ ID NO: 316653 - DNA, 30 bp, Artificial Sequence
  Synthetic oligonucleotide
ttgccttccaagatattacctgtcggatgg

SEQ ID NO: 316654 - DNA, 30 bp, Artificial Sequence
  Synthetic oligonucleotide
agataggggatattattagctttcggatgg

SEQ ID NO: 316655 - DNA, 30 bp, Artificial Sequence
  Synthetic oligonucleotide
taaagcagggtgttatctctggagggatgg

SEQ ID NO: 316656 - DNA, 30 bp, Artificial Sequence
  Synthetic oligonucleotide
cccggcttatttgcgcgaacgtagggatgg

SEQ ID NO: 316657 - DNA, 30 bp, Artificial Sequence
  Synthetic oligonucleotide
tttaaacgcagattttaggtggcgggatgg

SEQ ID NO: 316658 - DNA, 30 bp, Artificial Sequence
  Synthetic oligonucleotide
gtctgcggtatattgatgcaggatggatgg

SEQ ID NO: 316659 - DNA, 30 bp, Artificial Sequence
  Synthetic oligonucleotide
aatcgcaccccacttggagaaagtggatgg

SEQ ID NO: 316660 - DNA, 30 bp, Artificial Sequence
  Synthetic oligonucleotide
atcggtcttcatattgtttaaattggatgg

SEQ ID NO: 316661 - DNA, 30 bp, Artificial Sequence
  Synthetic oligonucleotide
tgcattggaacgtttaaagcacttggatgg

SEQ ID NO: 316662 - DNA, 30 bp, Artificial Sequence
  Synthetic oligonucleotide
ggctaaatgagcctgccagcgcttggatgg

SEQ ID NO: 316663 - DNA, 30 bp, Artificial Sequence
  Synthetic oligonucleotide
gtgaagttaacctccgtgctccactgatgg

SEQ ID NO: 316664 - DNA, 30 bp, Artificial Sequence
  Synthetic oligonucleotide
ggattaaaagatgaacgctttaagtgatgg

SEQ ID NO: 316665 - DNA, 30 bp, Artificial Sequence
  Synthetic oligonucleotide
tatagggtgtctgtaataacatcgtgatgg

SEQ ID NO: 316666 - DNA, 30 bp, Artificial Sequence
  Synthetic oligonucleotide
ccgaaacgggatcggtctattgggtgatgg

SEQ ID NO: 316667 - DNA, 30 bp, Artificial Sequence
  Synthetic oligonucleotide
gaatgaaccaacctgatacgcatgtgatgg

SEQ ID NO: 316668 - DNA, 30 bp, Artificial Sequence
  Synthetic oligonucleotide
aagagacctcttgtatatgcagattgatgg

SEQ ID NO: 316669 - DNA, 30 bp, Artificial Sequence
  Synthetic oligonucleotide
gtggttttgattgtacatgtcggttgatgg

SEQ ID NO: 316670 - DNA, 30 bp, Artificial Sequence
  Synthetic oligonucleotide
acctgcatcccatctgttgtttaaatatgg

SEQ ID NO: 316671 - DNA, 29 bp, Artificial Sequence
  Synthetic oligonucleotide
aaaatcagacattcttcaagggaatatgg

SEQ ID NO: 316672 - DNA, 30 bp, Artificial Sequence
  Synthetic oligonucleotide
cggagggttctggtagctctcaccatatgg

SEQ ID NO: 316673 - DNA, 30 bp, Artificial Sequence
  Synthetic oligonucleotide
gtaccggatgctcacgtgaccgggatatgg

SEQ ID NO: 316674 - DNA, 30 bp, Artificial Sequence
  Synthetic oligonucleotide
gaatgtgccacgaatgcaaagttgatatgg

SEQ ID NO: 316675 - DNA, 30 bp, Artificial Sequence
  Synthetic oligonucleotide
gttcggcactccgacaagcgcagtatatgg

SEQ ID NO: 316676 - DNA, 30 bp, Artificial Sequence
  Synthetic oligonucleotide
caagtcgggaatgtctggtttgcactatgg

SEQ ID NO: 316677 - DNA, 30 bp, Artificial Sequence
  Synthetic oligonucleotide
catatatagtggagcatacagcacctatgg

SEQ ID NO: 316678 - DNA, 30 bp, Artificial Sequence
  Synthetic oligonucleotide
attccaaaggaagcagagggctcgctatgg

SEQ ID NO: 316679 - DNA, 30 bp, Artificial Sequence
  Synthetic oligonucleotide
aatagctgaaggtagtgatagtatctatgg

SEQ ID NO: 316680 - DNA, 30 bp, Artificial Sequence
  Synthetic oligonucleotide
gcacactgcgtgaatgtgccgcttctatgg

SEQ ID NO: 316681 - DNA, 30 bp, Artificial Sequence
  Synthetic oligonucleotide
ttcggacatatgacgttgtaggacgtatgg

SEQ ID NO: 316682 - DNA, 30 bp, Artificial Sequence
  Synthetic oligonucleotide
ccagtcattgtgaaccctgcttgggtatgg

SEQ ID NO: 316683 - DNA, 30 bp, Artificial Sequence
  Synthetic oligonucleotide
taggcagggggtgcgggcctctatgtatgg

SEQ ID NO: 316684 - DNA, 30 bp, Artificial Sequence
  Synthetic oligonucleotide
gtggcccgaaggtaatcaggaggtgtatgg

SEQ ID NO: 316685 - DNA, 30 bp, Artificial Sequence
  Synthetic oligonucleotide
ggaaccaacgactctaattcttgtgtatgg

SEQ ID NO: 316686 - DNA, 30 bp, Artificial Sequence
  Synthetic oligonucleotide
agccaatggtggtctctcatgccattatgg

SEQ ID NO: 316687 - DNA, 30 bp, Artificial Sequence
  Synthetic oligonucleotide
ggagacgcagtcaatgcgcttcacttatgg

SEQ ID NO: 316688 - DNA, 30 bp, Artificial Sequence
  Synthetic oligonucleotide
ttctctagacgtgtcttctggcttttatgg

SEQ ID NO: 316689 - DNA, 30 bp, Artificial Sequence
  Synthetic oligonucleotide
caggggccaccggcacattgtgaaaactgg

SEQ ID NO: 316690 - DNA, 30 bp, Artificial Sequence
  Synthetic oligonucleotide
atacccgcatgtgcttcagtttaaaactgg

SEQ ID NO: 316691 - DNA, 30 bp, Artificial Sequence
  Synthetic oligonucleotide
tgtacagtggacacttaaagtatcaactgg

SEQ ID NO: 316692 - DNA, 30 bp, Artificial Sequence
  Synthetic oligonucleotide
tcacgcgtcatgcttgtggcaaataactgg

SEQ ID NO: 316693 - DNA, 31 bp, Artificial Sequence
  Synthetic oligonucleotide
ttggacctttcagacgacctgatctaactgg

SEQ ID NO: 316694 - DNA, 30 bp, Artificial Sequence
  Synthetic oligonucleotide
ctctaattaagttaacggcgctctaactgg

SEQ ID NO: 316695 - DNA, 27 bp, Artificial Sequence
  Synthetic oligonucleotide
ttcgggcgatttataatccaacactgg

SEQ ID NO: 316696 - DNA, 30 bp, Artificial Sequence
  Synthetic oligonucleotide
ggtgtgctcccctcgagcactacacactgg

SEQ ID NO: 316697 - DNA, 30 bp, Artificial Sequence
  Synthetic oligonucleotide
gttaatcgggtccagtcggaggcacactgg

SEQ ID NO: 316698 - DNA, 30 bp, Artificial Sequence
  Synthetic oligonucleotide
tgtcatgtatatgtacagcaacggcactgg

SEQ ID NO: 316699 - DNA, 30 bp, Artificial Sequence
  Synthetic oligonucleotide
taaacgctacgttaaatctcgttgcactgg

SEQ ID NO: 316700 - DNA, 31 bp, Artificial Sequence
  Synthetic oligonucleotide
ttagttgataggaaactaagtggaagactgg

SEQ ID NO: 316701 - DNA, 30 bp, Artificial Sequence
  Synthetic oligonucleotide
ggacttcgggatgtcgtattgaacgactgg

SEQ ID NO: 316702 - DNA, 30 bp, Artificial Sequence
  Synthetic oligonucleotide
aacgttgtgacgttgaaattattcgactgg

SEQ ID NO: 316703 - DNA, 30 bp, Artificial Sequence
  Synthetic oligonucleotide
aatacccagaccgaaattactccggactgg

SEQ ID NO: 316704 - DNA, 30 bp, Artificial Sequence
  Synthetic oligonucleotide
caaactgaggtgtttttggttggggactgg

SEQ ID NO: 316705 - DNA, 30 bp, Artificial Sequence
  Synthetic oligonucleotide
aggccttgccatacaaattattgggactgg

SEQ ID NO: 316706 - DNA, 30 bp, Artificial Sequence
  Synthetic oligonucleotide
aggcaatgcccggtttgtaccttggactgg

SEQ ID NO: 316707 - DNA, 30 bp, Artificial Sequence
  Synthetic oligonucleotide
agctatttcgattacacgggctaatactgg

SEQ ID NO: 316708 - DNA, 30 bp, Artificial Sequence
  Synthetic oligonucleotide
gaaaacgacatctcgaatagatgatactgg

SEQ ID NO: 316709 - DNA, 30 bp, Artificial Sequence
  Synthetic oligonucleotide
tcaaaagcgcagataaaccggaactactgg

SEQ ID NO: 316710 - DNA, 30 bp, Artificial Sequence
  Synthetic oligonucleotide
taggttagcgcgatttcatgggggtactgg

SEQ ID NO: 316711 - DNA, 30 bp, Artificial Sequence
  Synthetic oligonucleotide
gggtggagtagcggcagactagattactgg

SEQ ID NO: 316712 - DNA, 30 bp, Artificial Sequence
  Synthetic oligonucleotide
tatgttaacgtctatatagcttcttactgg

SEQ ID NO: 316713 - DNA, 30 bp, Artificial Sequence
  Synthetic oligonucleotide
agagacggtcggttcacacgaccaacctgg

SEQ ID NO: 316714 - DNA, 30 bp, Artificial Sequence
  Synthetic oligonucleotide
aaatgacgtagtccacggctatgaacctgg

SEQ ID NO: 316715 - DNA, 30 bp, Artificial Sequence
  Synthetic oligonucleotide
ggtggcgtacgggcctgcagtcgcacctgg

SEQ ID NO: 316716 - DNA, 30 bp, Artificial Sequence
  Synthetic oligonucleotide
tagttgaagctcttgaagataatcccctgg

SEQ ID NO: 316717 - DNA, 30 bp, Artificial Sequence
  Synthetic oligonucleotide
acccaaaggctatcaaccgtatggccctgg

SEQ ID NO: 316718 - DNA, 30 bp, Artificial Sequence
  Synthetic oligonucleotide
cccccggattccggtagaacagtgccctgg

SEQ ID NO: 316719 - DNA, 30 bp, Artificial Sequence
  Synthetic oligonucleotide
atgaataaacacaccaggactggtccctgg

SEQ ID NO: 316720 - DNA, 30 bp, Artificial Sequence
  Synthetic oligonucleotide
gtatccctcgtcaggccgcccgcagcctgg

SEQ ID NO: 316721 - DNA, 30 bp, Artificial Sequence
  Synthetic oligonucleotide
ttgcagataaaatccagtaacatagcctgg

SEQ ID NO: 316722 - DNA, 30 bp, Artificial Sequence
  Synthetic oligonucleotide
gtgatgagtgtcctttgttaccgcgcctgg

SEQ ID NO: 316723 - DNA, 30 bp, Artificial Sequence
  Synthetic oligonucleotide
ttgtacttactcctcagatgtatcgcctgg

SEQ ID NO: 316724 - DNA, 30 bp, Artificial Sequence
  Synthetic oligonucleotide
cgtaagtcacgtggaacctgttgggcctgg

SEQ ID NO: 316725 - DNA, 30 bp, Artificial Sequence
  Synthetic oligonucleotide
ccagcgggtgacatttgcgcgattgcctgg

SEQ ID NO: 316726 - DNA, 30 bp, Artificial Sequence
  Synthetic oligonucleotide
gcaccaaatgttattctgagatactcctgg

SEQ ID NO: 316727 - DNA, 30 bp, Artificial Sequence
  Synthetic oligonucleotide
ataaacggggaacttaacggggcgtcctgg

SEQ ID NO: 316728 - DNA, 30 bp, Artificial Sequence
  Synthetic oligonucleotide
gtccattatagaacagtctcaatgtcctgg

SEQ ID NO: 316729 - DNA, 30 bp, Artificial Sequence
  Synthetic oligonucleotide
gaaaaggagatcagcctgtagttttcctgg

SEQ ID NO: 316730 - DNA, 30 bp, Artificial Sequence
  Synthetic oligonucleotide
aaagttcatcggggggtttgaaccagctgg

SEQ ID NO: 316731 - DNA, 30 bp, Artificial Sequence
  Synthetic oligonucleotide
gaaaattaacacctacacctagggagctgg

SEQ ID NO: 316732 - DNA, 30 bp, Artificial Sequence
  Synthetic oligonucleotide
tccagtctatccggttcaattgatagctgg

SEQ ID NO: 316733 - DNA, 30 bp, Artificial Sequence
  Synthetic oligonucleotide
catttgatgacctcggtagagtctagctgg

SEQ ID NO: 316734 - DNA, 27 bp, Artificial Sequence
  Synthetic oligonucleotide
gatgaaaccctaaagagttctagctgg

SEQ ID NO: 316735 - DNA, 30 bp, Artificial Sequence
  Synthetic oligonucleotide
gtgataaatgatggtcgcctccaacgctgg

SEQ ID NO: 316736 - DNA, 30 bp, Artificial Sequence
  Synthetic oligonucleotide
ggaccgttcaattgccactgacgacgctgg

SEQ ID NO: 316737 - DNA, 30 bp, Artificial Sequence
  Synthetic oligonucleotide
aaatcaagatatcattctgtagcccgctgg

SEQ ID NO: 316738 - DNA, 30 bp, Artificial Sequence
  Synthetic oligonucleotide
gactccttcaccataaataatgcgcgctgg

SEQ ID NO: 316739 - DNA, 30 bp, Artificial Sequence
  Synthetic oligonucleotide
cgggatatgcccgaaacggttaggcgctgg

SEQ ID NO: 316740 - DNA, 31 bp, Artificial Sequence
  Synthetic oligonucleotide
attgcttctccgtacaacagaagtgcgctgg

SEQ ID NO: 316741 - DNA, 30 bp, Artificial Sequence
  Synthetic oligonucleotide
ctatttataatataccacccaaatcgctgg

SEQ ID NO: 316742 - DNA, 30 bp, Artificial Sequence
  Synthetic oligonucleotide
agttcagcgctaaacatcatgtaaggctgg

SEQ ID NO: 316743 - DNA, 30 bp, Artificial Sequence
  Synthetic oligonucleotide
ggtccgtgattgcgttttataccgggctgg

SEQ ID NO: 316744 - DNA, 30 bp, Artificial Sequence
  Synthetic oligonucleotide
aacaagagcactttgggattctttggctgg

SEQ ID NO: 316745 - DNA, 30 bp, Artificial Sequence
  Synthetic oligonucleotide
agtactccgagttgcactgttacgtgctgg

SEQ ID NO: 316746 - DNA, 30 bp, Artificial Sequence
  Synthetic oligonucleotide
aagcacctaatgcattagcaagcttgctgg

SEQ ID NO: 316747 - DNA, 30 bp, Artificial Sequence
  Synthetic oligonucleotide
atatagacttgcaccatcaagatttgctgg

SEQ ID NO: 316748 - DNA, 30 bp, Artificial Sequence
  Synthetic oligonucleotide
ccgatgagctttgtaatacgactttgctgg

SEQ ID NO: 316749 - DNA, 30 bp, Artificial Sequence
  Synthetic oligonucleotide
aaagtggcttgaatggaacaattttgctgg

SEQ ID NO: 316750 - DNA, 30 bp, Artificial Sequence
  Synthetic oligonucleotide
tacttttgttaccgacctgtactaatctgg

SEQ ID NO: 316751 - DNA, 30 bp, Artificial Sequence
  Synthetic oligonucleotide
ttgcctgatagagaagggattgatatctgg

SEQ ID NO: 316752 - DNA, 30 bp, Artificial Sequence
  Synthetic oligonucleotide
cttctataaagctttacttcaattatctgg

SEQ ID NO: 316753 - DNA, 30 bp, Artificial Sequence
  Synthetic oligonucleotide
gatagaattttaagtgtgaacgtactctgg

SEQ ID NO: 316754 - DNA, 30 bp, Artificial Sequence
  Synthetic oligonucleotide
ggactccctgcccgcatagactgtctctgg

SEQ ID NO: 316755 - DNA, 30 bp, Artificial Sequence
  Synthetic oligonucleotide
atgccgcctaatcaccgcctattcgtctgg

SEQ ID NO: 316756 - DNA, 30 bp, Artificial Sequence
  Synthetic oligonucleotide
cacacgagataaacggctctccgtgtctgg

SEQ ID NO: 316757 - DNA, 30 bp, Artificial Sequence
  Synthetic oligonucleotide
cggcccctattacagtcatcgcttgtctgg

SEQ ID NO: 316758 - DNA, 30 bp, Artificial Sequence
  Synthetic oligonucleotide
taatcccgtagtatcttacggcgattctgg

SEQ ID NO: 316759 - DNA, 30 bp, Artificial Sequence
  Synthetic oligonucleotide
tattaccgcgtatctgaagtatgattctgg

SEQ ID NO: 316760 - DNA, 30 bp, Artificial Sequence
  Synthetic oligonucleotide
agctgtggagtttagttgtcgtgattctgg

SEQ ID NO: 316761 - DNA, 30 bp, Artificial Sequence
  Synthetic oligonucleotide
agccatactttgcctttaatgagtttctgg

SEQ ID NO: 316762 - DNA, 30 bp, Artificial Sequence
  Synthetic oligonucleotide
ttacaaccgtttgtcgacatgtgtttctgg

SEQ ID NO: 316763 - DNA, 30 bp, Artificial Sequence
  Synthetic oligonucleotide
tggttcatcgcccacatcacgcgaaagtgg

SEQ ID NO: 316764 - DNA, 30 bp, Artificial Sequence
  Synthetic oligonucleotide
actacaatcacggttcacttaaccaagtgg

SEQ ID NO: 316765 - DNA, 30 bp, Artificial Sequence
  Synthetic oligonucleotide
gcgtccccttcctggttgtatatcaagtgg

SEQ ID NO: 316766 - DNA, 30 bp, Artificial Sequence
  Synthetic oligonucleotide
gcagttaagggacccacccggcataagtgg

SEQ ID NO: 316767 - DNA, 30 bp, Artificial Sequence
  Synthetic oligonucleotide
tttcattgtaatcgtggcgaagataagtgg

SEQ ID NO: 316768 - DNA, 30 bp, Artificial Sequence
  Synthetic oligonucleotide
tgctggtctgtgtagaccatttataagtgg

SEQ ID NO: 316769 - DNA, 30 bp, Artificial Sequence
  Synthetic oligonucleotide
acaaagttgcgctatgtagcaattaagtgg

SEQ ID NO: 316770 - DNA, 30 bp, Artificial Sequence
  Synthetic oligonucleotide
agtcatctagaggtcgtttaagcagagtgg

SEQ ID NO: 316771 - DNA, 30 bp, Artificial Sequence
  Synthetic oligonucleotide
tataaccgcgcggcctccaggcgagagtgg

SEQ ID NO: 316772 - DNA, 30 bp, Artificial Sequence
  Synthetic oligonucleotide
cggcagggtggttacggataccatgagtgg

SEQ ID NO: 316773 - DNA, 30 bp, Artificial Sequence
  Synthetic oligonucleotide
cactgtcagcaatcgaaccgacgtgagtgg

SEQ ID NO: 316774 - DNA, 30 bp, Artificial Sequence
  Synthetic oligonucleotide
gtgttctaattgacagttgtcacatagtgg

SEQ ID NO: 316775 - DNA, 30 bp, Artificial Sequence
  Synthetic oligonucleotide
aatctcttgctacggtaggggccatagtgg

SEQ ID NO: 316776 - DNA, 30 bp, Artificial Sequence
  Synthetic oligonucleotide
tcttgtcgatggaacatatttatatagtgg

SEQ ID NO: 316777 - DNA, 30 bp, Artificial Sequence
  Synthetic oligonucleotide
tgcttcgtaggtcatacgaaaggctagtgg

SEQ ID NO: 316778 - DNA, 30 bp, Artificial Sequence
  Synthetic oligonucleotide
ggccttgggcattcacgccatgtctagtgg

SEQ ID NO: 316779 - DNA, 30 bp, Artificial Sequence
  Synthetic oligonucleotide
tggaagtgtataggacccgcacggtagtgg

SEQ ID NO: 316780 - DNA, 30 bp, Artificial Sequence
  Synthetic oligonucleotide
ttagcccgttattgctattgggggtagtgg

SEQ ID NO: 316781 - DNA, 30 bp, Artificial Sequence
  Synthetic oligonucleotide
tacgaccaaaagcttacgatttattagtgg

SEQ ID NO: 316782 - DNA, 30 bp, Artificial Sequence
  Synthetic oligonucleotide
atactgagcttctggttttgaatttagtgg

SEQ ID NO: 316783 - DNA, 30 bp, Artificial Sequence
  Synthetic oligonucleotide
gttccaagttgcacctcacgggtaacgtgg

SEQ ID NO: 316784 - DNA, 30 bp, Artificial Sequence
  Synthetic oligonucleotide
ataagacgagttgtagaggttcacacgtgg

SEQ ID NO: 316785 - DNA, 30 bp, Artificial Sequence
  Synthetic oligonucleotide
gtacttattccgataaccacaaccacgtgg

SEQ ID NO: 316786 - DNA, 30 bp, Artificial Sequence
  Synthetic oligonucleotide
ctccccattcgcctggcaagttagacgtgg

SEQ ID NO: 316787 - DNA, 30 bp, Artificial Sequence
  Synthetic oligonucleotide
taataagcaattacccagctcgctacgtgg

SEQ ID NO: 316788 - DNA, 30 bp, Artificial Sequence
  Synthetic oligonucleotide
ccagagcgcgtttccttgtctagtacgtgg

SEQ ID NO: 316789 - DNA, 30 bp, Artificial Sequence
  Synthetic oligonucleotide
aggggccgcctcgcacgaggcaaaccgtgg

SEQ ID NO: 316790 - DNA, 30 bp, Artificial Sequence
  Synthetic oligonucleotide
taactatgacggtacctacggaaaccgtgg

SEQ ID NO: 316791 - DNA, 30 bp, Artificial Sequence
  Synthetic oligonucleotide
catgcgggatacgagagtaatcagccgtgg

SEQ ID NO: 316792 - DNA, 30 bp, Artificial Sequence
  Synthetic oligonucleotide
gccttgccaccactagcggcagagccgtgg

SEQ ID NO: 316793 - DNA, 30 bp, Artificial Sequence
  Synthetic oligonucleotide
tgctatcaaaggtgaggatggactccgtgg

SEQ ID NO: 316794 - DNA, 30 bp, Artificial Sequence
  Synthetic oligonucleotide
taatgttggaccattcaaacatgcgcgtgg

SEQ ID NO: 316795 - DNA, 30 bp, Artificial Sequence
  Synthetic oligonucleotide
gctagagatcgcttcgccttaatggcgtgg

SEQ ID NO: 316796 - DNA, 30 bp, Artificial Sequence
  Synthetic oligonucleotide
ctgttagccgttattctgatgcactcgtgg

SEQ ID NO: 316797 - DNA, 30 bp, Artificial Sequence
  Synthetic oligonucleotide
gcgcagacccgggattggaaagtcaggtgg

SEQ ID NO: 316798 - DNA, 30 bp, Artificial Sequence
  Synthetic oligonucleotide
gacccgaacttcatgaaaatcgtcaggtgg

SEQ ID NO: 316799 - DNA, 30 bp, Artificial Sequence
  Synthetic oligonucleotide
cttatcgtcccggaaccaatcgagaggtgg

SEQ ID NO: 316800 - DNA, 30 bp, Artificial Sequence
  Synthetic oligonucleotide
catatacagttattgggacgtaggaggtgg

SEQ ID NO: 316801 - DNA, 30 bp, Artificial Sequence
  Synthetic oligonucleotide
ttaatacaaaacacgtagtcagtgaggtgg

SEQ ID NO: 316802 - DNA, 30 bp, Artificial Sequence
  Synthetic oligonucleotide
cgatttaatgctattgctaccggtaggtgg

SEQ ID NO: 316803 - DNA, 30 bp, Artificial Sequence
  Synthetic oligonucleotide
ccctaaagtcggagggttcggcttaggtgg

SEQ ID NO: 316804 - DNA, 30 bp, Artificial Sequence
  Synthetic oligonucleotide
catgccacatttaaagaggtccaacggtgg

SEQ ID NO: 316805 - DNA, 30 bp, Artificial Sequence
  Synthetic oligonucleotide
gaaagtcttgcggaagcaggcccacggtgg

SEQ ID NO: 316806 - DNA, 30 bp, Artificial Sequence
  Synthetic oligonucleotide
gctcaacgacttaaaagaaagctacggtgg

SEQ ID NO: 316807 - DNA, 30 bp, Artificial Sequence
  Synthetic oligonucleotide
ttgtagaggtattcatctctataccggtgg

SEQ ID NO: 316808 - DNA, 30 bp, Artificial Sequence
  Synthetic oligonucleotide
aaaagggttcgaaacgagtgtaggcggtgg

SEQ ID NO: 316809 - DNA, 30 bp, Artificial Sequence
  Synthetic oligonucleotide
ttagaccagggtgcattcacttggcggtgg

SEQ ID NO: 316810 - DNA, 30 bp, Artificial Sequence
  Synthetic oligonucleotide
tcttttctagtaccgtagattaacgggtgg

SEQ ID NO: 316811 - DNA, 30 bp, Artificial Sequence
  Synthetic oligonucleotide
tgaatcaggtgttatcaatgtgccgggtgg

SEQ ID NO: 316812 - DNA, 30 bp, Artificial Sequence
  Synthetic oligonucleotide
ccacgaacaattaccagtgctctcgggtgg

SEQ ID NO: 316813 - DNA, 30 bp, Artificial Sequence
  Synthetic oligonucleotide
gaaggagttagggaagtattcagggggtgg

SEQ ID NO: 316814 - DNA, 30 bp, Artificial Sequence
  Synthetic oligonucleotide
atgaatacgtttgcagtacaagtggggtgg

SEQ ID NO: 316815 - DNA, 30 bp, Artificial Sequence
  Synthetic oligonucleotide
attaacctagttagactggacgatgggtgg

SEQ ID NO: 316816 - DNA, 30 bp, Artificial Sequence
  Synthetic oligonucleotide
gtggtgggatccgatggcagggggtggtgg

SEQ ID NO: 316817 - DNA, 30 bp, Artificial Sequence
  Synthetic oligonucleotide
gtggttcggactctggggagctggtggtgg

SEQ ID NO: 316818 - DNA, 30 bp, Artificial Sequence
  Synthetic oligonucleotide
gatataatcaaacagttccgggtgtggtgg

SEQ ID NO: 316819 - DNA, 30 bp, Artificial Sequence
  Synthetic oligonucleotide
gggaattcaggacaggagcttgtgtggtgg

SEQ ID NO: 316820 - DNA, 30 bp, Artificial Sequence
  Synthetic oligonucleotide
aatcacgatcagccaatcggctattggtgg

SEQ ID NO: 316821 - DNA, 30 bp, Artificial Sequence
  Synthetic oligonucleotide
cttatcgatgtcttttgtagcatttggtgg

SEQ ID NO: 316822 - DNA, 30 bp, Artificial Sequence
  Synthetic oligonucleotide
atacgtgactggagattgcattaaatgtgg

SEQ ID NO: 316823 - DNA, 30 bp, Artificial Sequence
  Synthetic oligonucleotide
aattcgacaaggccctacgtgcgaatgtgg

SEQ ID NO: 316824 - DNA, 30 bp, Artificial Sequence
  Synthetic oligonucleotide
agttatcttgagtctcgcatgcccatgtgg

SEQ ID NO: 316825 - DNA, 30 bp, Artificial Sequence
  Synthetic oligonucleotide
catctgtttaaaattcttaagtagatgtgg

SEQ ID NO: 316826 - DNA, 30 bp, Artificial Sequence
  Synthetic oligonucleotide
taggtttgggtgaataatatcatgatgtgg

SEQ ID NO: 316827 - DNA, 30 bp, Artificial Sequence
  Synthetic oligonucleotide
gtattctataacagattgtataacctgtgg

SEQ ID NO: 316828 - DNA, 31 bp, Artificial Sequence
  Synthetic oligonucleotide
ttcgtctggtctatcataatccttcctgtgg

SEQ ID NO: 316829 - DNA, 30 bp, Artificial Sequence
  Synthetic oligonucleotide
ttctcgaacctactgttgaacggagtgtgg

SEQ ID NO: 316830 - DNA, 30 bp, Artificial Sequence
  Synthetic oligonucleotide
cgtgatgagttaccgcttcaggtagtgtgg

SEQ ID NO: 316831 - DNA, 30 bp, Artificial Sequence
  Synthetic oligonucleotide
ggagtttgcttgtgtccgcggtcggtgtgg

SEQ ID NO: 316832 - DNA, 30 bp, Artificial Sequence
  Synthetic oligonucleotide
taactatcacggggcacaggaggggtgtgg

SEQ ID NO: 316833 - DNA, 30 bp, Artificial Sequence
  Synthetic oligonucleotide
atgagtcataggctccgtctttgggtgtgg

SEQ ID NO: 316834 - DNA, 30 bp, Artificial Sequence
  Synthetic oligonucleotide
gcaatcgtacggctttcaaagttggtgtgg

SEQ ID NO: 316835 - DNA, 30 bp, Artificial Sequence
  Synthetic oligonucleotide
gggtctctggagttgagacggggattgtgg

SEQ ID NO: 316836 - DNA, 30 bp, Artificial Sequence
  Synthetic oligonucleotide
ttcgtttcaaggtcggtccaatacttgtgg

SEQ ID NO: 316837 - DNA, 30 bp, Artificial Sequence
  Synthetic oligonucleotide
gagagaacctaagaaacttacttcttgtgg

SEQ ID NO: 316838 - DNA, 30 bp, Artificial Sequence
  Synthetic oligonucleotide
ccacgggcgttttgtaacctatcgttgtgg

SEQ ID NO: 316839 - DNA, 30 bp, Artificial Sequence
  Synthetic oligonucleotide
atgcccttcgaactaagtggtgggttgtgg

SEQ ID NO: 316840 - DNA, 30 bp, Artificial Sequence
  Synthetic oligonucleotide
cgcggcgtccgcccgaacggttccaattgg

SEQ ID NO: 316841 - DNA, 30 bp, Artificial Sequence
  Synthetic oligonucleotide
cagacatccggtgtattccttttcaattgg

SEQ ID NO: 316842 - DNA, 30 bp, Artificial Sequence
  Synthetic oligonucleotide
tgtcgcagtcttagaatctagatgaattgg

SEQ ID NO: 316843 - DNA, 30 bp, Artificial Sequence
  Synthetic oligonucleotide
ggttggctctgtacgtaaatgcaccattgg

SEQ ID NO: 316844 - DNA, 30 bp, Artificial Sequence
  Synthetic oligonucleotide
cctattgtccgttcatgtgtgcatcattgg

SEQ ID NO: 316845 - DNA, 30 bp, Artificial Sequence
  Synthetic oligonucleotide
ttgcgaatacatgctagtgtcgatcattgg

SEQ ID NO: 316846 - DNA, 30 bp, Artificial Sequence
  Synthetic oligonucleotide
tattcatggttagttgttccacaagattgg

SEQ ID NO: 316847 - DNA, 30 bp, Artificial Sequence
  Synthetic oligonucleotide
aagccatctcacgtttctcgtcgagattgg

SEQ ID NO: 316848 - DNA, 30 bp, Artificial Sequence
  Synthetic oligonucleotide
ggatagacccggtcaggacgtatagattgg

SEQ ID NO: 316849 - DNA, 30 bp, Artificial Sequence
  Synthetic oligonucleotide
tgttctgatcaactgaactcgttagattgg

SEQ ID NO: 316850 - DNA, 30 bp, Artificial Sequence
  Synthetic oligonucleotide
aactgggcgttgttacataaattcgattgg

SEQ ID NO: 316851 - DNA, 30 bp, Artificial Sequence
  Synthetic oligonucleotide
aaggcgcgagcgcggagtcgggtggattgg

SEQ ID NO: 316852 - DNA, 30 bp, Artificial Sequence
  Synthetic oligonucleotide
tgaggagtaggaaggtccgtattggattgg

SEQ ID NO: 316853 - DNA, 30 bp, Artificial Sequence
  Synthetic oligonucleotide
caacagacgcttgagccggcgagtgattgg

SEQ ID NO: 316854 - DNA, 29 bp, Artificial Sequence
  Synthetic oligonucleotide
aatctgtttggtgtggcattgtctattgg

SEQ ID NO: 316855 - DNA, 30 bp, Artificial Sequence
  Synthetic oligonucleotide
tattcgtaaaccagcagggtccagtattgg

SEQ ID NO: 316856 - DNA, 30 bp, Artificial Sequence
  Synthetic oligonucleotide
taacgcagaattttgtcggttgcgtattgg

SEQ ID NO: 316857 - DNA, 30 bp, Artificial Sequence
  Synthetic oligonucleotide
gtgggaacagcgtatccatcggggtattgg

SEQ ID NO: 316858 - DNA, 30 bp, Artificial Sequence
  Synthetic oligonucleotide
gggcaacactccatactgcaggtgtattgg

SEQ ID NO: 316859 - DNA, 30 bp, Artificial Sequence
  Synthetic oligonucleotide
agtagaaaatgggtccgcagtagttattgg

SEQ ID NO: 316860 - DNA, 30 bp, Artificial Sequence
  Synthetic oligonucleotide
ggtgctcacatatcccgctcggtttattgg

SEQ ID NO: 316861 - DNA, 30 bp, Artificial Sequence
  Synthetic oligonucleotide
ctatgcgcaggttgaattgttgcaacttgg

SEQ ID NO: 316862 - DNA, 30 bp, Artificial Sequence
  Synthetic oligonucleotide
aaatgagcaattagggacgttttaacttgg

SEQ ID NO: 316863 - DNA, 31 bp, Artificial Sequence
  Synthetic oligonucleotide
tttggcctggtattaatggtgatacacttgg

SEQ ID NO: 316864 - DNA, 30 bp, Artificial Sequence
  Synthetic oligonucleotide
tttagctttagtgaagggcattggacttgg

SEQ ID NO: 316865 - DNA, 30 bp, Artificial Sequence
  Synthetic oligonucleotide
cggcgagcttccactcctcgcagtacttgg

SEQ ID NO: 316866 - DNA, 30 bp, Artificial Sequence
  Synthetic oligonucleotide
aattgcatcgtgggagagtattgtacttgg

SEQ ID NO: 316867 - DNA, 30 bp, Artificial Sequence
  Synthetic oligonucleotide
actttgaactttccttcacagcgaccttgg

SEQ ID NO: 316868 - DNA, 30 bp, Artificial Sequence
  Synthetic oligonucleotide
tcagcttaggttactgatagaagcccttgg

SEQ ID NO: 316869 - DNA, 30 bp, Artificial Sequence
  Synthetic oligonucleotide
tagatattgacggtcgttacaaagccttgg

SEQ ID NO: 316870 - DNA, 30 bp, Artificial Sequence
  Synthetic oligonucleotide
gcgatatggcattttacccagcggccttgg

SEQ ID NO: 316871 - DNA, 30 bp, Artificial Sequence
  Synthetic oligonucleotide
agcaaacggcatcaattacaattgccttgg

SEQ ID NO: 316872 - DNA, 30 bp, Artificial Sequence
  Synthetic oligonucleotide
cttcgatcgctttattgtggatgtccttgg

SEQ ID NO: 316873 - DNA, 30 bp, Artificial Sequence
  Synthetic oligonucleotide
gacatgtaagcataaccgcacattccttgg

SEQ ID NO: 316874 - DNA, 30 bp, Artificial Sequence
  Synthetic oligonucleotide
gcatatacctcgtggggatcggaagcttgg

SEQ ID NO: 316875 - DNA, 30 bp, Artificial Sequence
  Synthetic oligonucleotide
aagaacgagctggtcaaaggcatagcttgg

SEQ ID NO: 316876 - DNA, 30 bp, Artificial Sequence
  Synthetic oligonucleotide
gcctactctatgcatcgaatgtaggcttgg

SEQ ID NO: 316877 - DNA, 30 bp, Artificial Sequence
  Synthetic oligonucleotide
tgtgctgacgaaagccgcccagtggcttgg

SEQ ID NO: 316878 - DNA, 30 bp, Artificial Sequence
  Synthetic oligonucleotide
atttagaattacggggcattcttggcttgg

SEQ ID NO: 316879 - DNA, 30 bp, Artificial Sequence
  Synthetic oligonucleotide
taaagttcgaggaggataagcgaatcttgg

SEQ ID NO: 316880 - DNA, 30 bp, Artificial Sequence
  Synthetic oligonucleotide
attgaagagaaggcagcccgccactcttgg

SEQ ID NO: 316881 - DNA, 30 bp, Artificial Sequence
  Synthetic oligonucleotide
cattctaggggaaccaggccgcactcttgg

SEQ ID NO: 316882 - DNA, 30 bp, Artificial Sequence
  Synthetic oligonucleotide
cataacgactcatgtcgagaggtgtcttgg

SEQ ID NO: 316883 - DNA, 30 bp, Artificial Sequence
  Synthetic oligonucleotide
tgtgttcaatcgtggttttaagtttcttgg

SEQ ID NO: 316884 - DNA, 30 bp, Artificial Sequence
  Synthetic oligonucleotide
catcgcgctgtctcccgccactaaagttgg

SEQ ID NO: 316885 - DNA, 30 bp, Artificial Sequence
  Synthetic oligonucleotide
tgaggttgtgtcgtggacagcacaagttgg

SEQ ID NO: 316886 - DNA, 30 bp, Artificial Sequence
  Synthetic oligonucleotide
acataacctcatattgagccgcggagttgg

SEQ ID NO: 316887 - DNA, 30 bp, Artificial Sequence
  Synthetic oligonucleotide
tgcagtatgaccaggggcagctatagttgg

SEQ ID NO: 316888 - DNA, 30 bp, Artificial Sequence
  Synthetic oligonucleotide
atatagtctagacatcgtgcaactagttgg

SEQ ID NO: 316889 - DNA, 30 bp, Artificial Sequence
  Synthetic oligonucleotide
ctacaggaggcagtccggttcgcacgttgg

SEQ ID NO: 316890 - DNA, 30 bp, Artificial Sequence
  Synthetic oligonucleotide
atttcaaacaccgataccctcccccgttgg

SEQ ID NO: 316891 - DNA, 30 bp, Artificial Sequence
  Synthetic oligonucleotide
taatccagtactcctcgttgagttcgttgg

SEQ ID NO: 316892 - DNA, 30 bp, Artificial Sequence
  Synthetic oligonucleotide
taccaaatgtaagctttcggagcaggttgg

SEQ ID NO: 316893 - DNA, 30 bp, Artificial Sequence
  Synthetic oligonucleotide
tttataggacggaggttagcgtgaggttgg

SEQ ID NO: 316894 - DNA, 30 bp, Artificial Sequence
  Synthetic oligonucleotide
cgaggcgccctccgactaattaacggttgg

SEQ ID NO: 316895 - DNA, 30 bp, Artificial Sequence
  Synthetic oligonucleotide
ttatattagtgggaagacgaccccggttgg

SEQ ID NO: 316896 - DNA, 30 bp, Artificial Sequence
  Synthetic oligonucleotide
tacgtcatcctctctaggagcggcggttgg

SEQ ID NO: 316897 - DNA, 30 bp, Artificial Sequence
  Synthetic oligonucleotide
ggtacacttgtcggagggcgtctcggttgg

SEQ ID NO: 316898 - DNA, 30 bp, Artificial Sequence
  Synthetic oligonucleotide
ctgagatgatgctcatagtgagggggttgg

SEQ ID NO: 316899 - DNA, 30 bp, Artificial Sequence
  Synthetic oligonucleotide
gggattgaccaaaatttttagtgtggttgg

SEQ ID NO: 316900 - DNA, 30 bp, Artificial Sequence
  Synthetic oligonucleotide
cactagtactcttgcgagtgttgtggttgg

SEQ ID NO: 316901 - DNA, 30 bp, Artificial Sequence
  Synthetic oligonucleotide
tagtcgttaactgttcacccctaatgttgg

SEQ ID NO: 316902 - DNA, 30 bp, Artificial Sequence
  Synthetic oligonucleotide
gtggtttgtacttttgattctctatgttgg

SEQ ID NO: 316903 - DNA, 30 bp, Artificial Sequence
  Synthetic oligonucleotide
gtgacagtctacaatgagttgtattgttgg

SEQ ID NO: 316904 - DNA, 30 bp, Artificial Sequence
  Synthetic oligonucleotide
gaagaaggactcgacatacagccaatttgg

SEQ ID NO: 316905 - DNA, 30 bp, Artificial Sequence
  Synthetic oligonucleotide
gtctttcattctgaaatacttggaatttgg

SEQ ID NO: 316906 - DNA, 30 bp, Artificial Sequence
  Synthetic oligonucleotide
cctctatgggcatgtgaaatttgaatttgg

SEQ ID NO: 316907 - DNA, 30 bp, Artificial Sequence
  Synthetic oligonucleotide
gcaaattttggacaaccccaaggcatttgg

SEQ ID NO: 316908 - DNA, 30 bp, Artificial Sequence
  Synthetic oligonucleotide
ggttaggtcagacaacatgtaggcatttgg

SEQ ID NO: 316909 - DNA, 30 bp, Artificial Sequence
  Synthetic oligonucleotide
cgcggggctagcgaatttcctaagatttgg

SEQ ID NO: 316910 - DNA, 30 bp, Artificial Sequence
  Synthetic oligonucleotide
agatgcatagtatcccattaagggatttgg

SEQ ID NO: 316911 - DNA, 30 bp, Artificial Sequence
  Synthetic oligonucleotide
atgactaatgatgaagtatccctgatttgg

SEQ ID NO: 316912 - DNA, 30 bp, Artificial Sequence
  Synthetic oligonucleotide
cggatttgaaattaataagaagctatttgg

SEQ ID NO: 316913 - DNA, 30 bp, Artificial Sequence
  Synthetic oligonucleotide
agctattggacctgcagacgggctatttgg

SEQ ID NO: 316914 - DNA, 30 bp, Artificial Sequence
  Synthetic oligonucleotide
accatatgggtattggtgttccgtatttgg

SEQ ID NO: 316915 - DNA, 30 bp, Artificial Sequence
  Synthetic oligonucleotide
ccatgggtctggtgatcctacgttatttgg

SEQ ID NO: 316916 - DNA, 30 bp, Artificial Sequence
  Synthetic oligonucleotide
ttctgcattgagacggtcgcacgactttgg

SEQ ID NO: 316917 - DNA, 30 bp, Artificial Sequence
  Synthetic oligonucleotide
ctctgcaacttttagggatgactcctttgg

SEQ ID NO: 316918 - DNA, 30 bp, Artificial Sequence
  Synthetic oligonucleotide
cacaaacttaaccgaattgatcaagtttgg

SEQ ID NO: 316919 - DNA, 30 bp, Artificial Sequence
  Synthetic oligonucleotide
agctgttacgctttacctgggacagtttgg

SEQ ID NO: 316920 - DNA, 30 bp, Artificial Sequence
  Synthetic oligonucleotide
tcctgcgtgtcaatacgacggaacgtttgg

SEQ ID NO: 316921 - DNA, 30 bp, Artificial Sequence
  Synthetic oligonucleotide
ttagtgttcgcaccaaatcccttcgtttgg

SEQ ID NO: 316922 - DNA, 30 bp, Artificial Sequence
  Synthetic oligonucleotide
actttgttcgccgtgaagtgaacggtttgg

SEQ ID NO: 316923 - DNA, 30 bp, Artificial Sequence
  Synthetic oligonucleotide
tggtagcatttctcggacgtgtgtgtttgg

SEQ ID NO: 316924 - DNA, 30 bp, Artificial Sequence
  Synthetic oligonucleotide
aaccgaagctgcattggctgcgaattttgg

SEQ ID NO: 316925 - DNA, 30 bp, Artificial Sequence
  Synthetic oligonucleotide
tgtaattgcgccagctttgcttaattttgg

SEQ ID NO: 316926 - DNA, 30 bp, Artificial Sequence
  Synthetic oligonucleotide
ctattgcaacaaattgtttaaacattttgg

SEQ ID NO: 316927 - DNA, 30 bp, Artificial Sequence
  Synthetic oligonucleotide
aaaccggaaggtcaagttgtcacattttgg

SEQ ID NO: 316928 - DNA, 30 bp, Artificial Sequence
  Synthetic oligonucleotide
cagtatctgagtgagacacttggattttgg

SEQ ID NO: 316929 - DNA, 30 bp, Artificial Sequence
  Synthetic oligonucleotide
gagtttagacacgttgttgttttattttgg

SEQ ID NO: 316930 - DNA, 30 bp, Artificial Sequence
  Synthetic oligonucleotide
ccgtaatcttgcgatcactagaagttttgg

SEQ ID NO: 316931 - DNA, 30 bp, Artificial Sequence
  Synthetic oligonucleotide
gactatactaatgctgagagccctttttgg

SEQ ID NO: 316932 - DNA, 30 bp, Artificial Sequence
  Synthetic oligonucleotide
ttttaccatgcgataaggggagctttttgg

SEQ ID NO: 316933 - DNA, 30 bp, Artificial Sequence
  Synthetic oligonucleotide
taaagcctgattaactgacctagtttttgg

SEQ ID NO: 316934 - DNA, 30 bp, Artificial Sequence
  Synthetic oligonucleotide
cgctcatttatccgctagacgtgtttttgg

SEQ ID NO: 316935 - DNA, 30 bp, Artificial Sequence
  Synthetic oligonucleotide
tccaacgtagagagtgtaggatttttttgg

SEQ ID NO: 316936 - DNA, 30 bp, Artificial Sequence
  Synthetic oligonucleotide
gaggttgcaaacctctccttcgcaaaaatg

SEQ ID NO: 316937 - DNA, 30 bp, Artificial Sequence
  Synthetic oligonucleotide
tgccaaagatagtagcttggtgtaaaaatg

SEQ ID NO: 316938 - DNA, 30 bp, Artificial Sequence
  Synthetic oligonucleotide
aactttttattcacagatcggcagaaaatg

SEQ ID NO: 316939 - DNA, 30 bp, Artificial Sequence
  Synthetic oligonucleotide
taaacaggaacaccgggctcatagaaaatg

SEQ ID NO: 316940 - DNA, 30 bp, Artificial Sequence
  Synthetic oligonucleotide
ttcgcacctaccgtttgggtatagaaaatg

SEQ ID NO: 316941 - DNA, 30 bp, Artificial Sequence
  Synthetic oligonucleotide
gggttacctcagaatttgacctcgaaaatg

SEQ ID NO: 316942 - DNA, 30 bp, Artificial Sequence
  Synthetic oligonucleotide
cgatcttcggctagaataacgtggaaaatg

SEQ ID NO: 316943 - DNA, 30 bp, Artificial Sequence
  Synthetic oligonucleotide
ttagcttgtcctatcggtctgaaacaaatg

SEQ ID NO: 316944 - DNA, 30 bp, Artificial Sequence
  Synthetic oligonucleotide
gttacgggtatgttagtaactaaacaaatg

SEQ ID NO: 316945 - DNA, 30 bp, Artificial Sequence
  Synthetic oligonucleotide
gaagtttaactcaccttgcgacgacaaatg

SEQ ID NO: 316946 - DNA, 30 bp, Artificial Sequence
  Synthetic oligonucleotide
aagtattaacctgaggtgtcttggcaaatg

SEQ ID NO: 316947 - DNA, 30 bp, Artificial Sequence
  Synthetic oligonucleotide
gactctgctgcacacgcattgtttcaaatg

SEQ ID NO: 316948 - DNA, 30 bp, Artificial Sequence
  Synthetic oligonucleotide
atttaagaatcatcgtaaatctaagaaatg

SEQ ID NO: 316949 - DNA, 30 bp, Artificial Sequence
  Synthetic oligonucleotide
gcatattacgaagacgaagctgcagaaatg

SEQ ID NO: 316950 - DNA, 30 bp, Artificial Sequence
  Synthetic oligonucleotide
ctccgataataacacccacgacgcgaaatg

SEQ ID NO: 316951 - DNA, 30 bp, Artificial Sequence
  Synthetic oligonucleotide
taaagtaccgctatttaagtgctcgaaatg

SEQ ID NO: 316952 - DNA, 30 bp, Artificial Sequence
  Synthetic oligonucleotide
gacgcgcaccttagtgattaaaaggaaatg

SEQ ID NO: 316953 - DNA, 30 bp, Artificial Sequence
  Synthetic oligonucleotide
actttatatcggttagcagtagctgaaatg

SEQ ID NO: 316954 - DNA, 30 bp, Artificial Sequence
  Synthetic oligonucleotide
ggtttaaaggatacgaggtctgctgaaatg

SEQ ID NO: 316955 - DNA, 30 bp, Artificial Sequence
  Synthetic oligonucleotide
acgggcaaattaataagctccgttgaaatg

SEQ ID NO: 316956 - DNA, 30 bp, Artificial Sequence
  Synthetic oligonucleotide
agttcaataccgtgactctccggataaatg

SEQ ID NO: 316957 - DNA, 30 bp, Artificial Sequence
  Synthetic oligonucleotide
gttgcgttagaagatcccgtcatataaatg

SEQ ID NO: 316958 - DNA, 30 bp, Artificial Sequence
  Synthetic oligonucleotide
aagccaaccttccaagagtaacggtaaatg

SEQ ID NO: 316959 - DNA, 30 bp, Artificial Sequence
  Synthetic oligonucleotide
ggggagcgcaggcgtttccctttgtaaatg

SEQ ID NO: 316960 - DNA, 30 bp, Artificial Sequence
  Synthetic oligonucleotide
gatgtatggtattagcccgttttgtaaatg

SEQ ID NO: 316961 - DNA, 30 bp, Artificial Sequence
  Synthetic oligonucleotide
gtaagaaacgttcgtgaagagtattaaatg

SEQ ID NO: 316962 - DNA, 30 bp, Artificial Sequence
  Synthetic oligonucleotide
tcaacatgcagggatccaatatcttaaatg

SEQ ID NO: 316963 - DNA, 30 bp, Artificial Sequence
  Synthetic oligonucleotide
cgtttaatataaagagaattaaacacaatg

SEQ ID NO: 316964 - DNA, 30 bp, Artificial Sequence
  Synthetic oligonucleotide
tgacagtgtacacgggggagtcgtacaatg

SEQ ID NO: 316965 - DNA, 30 bp, Artificial Sequence
  Synthetic oligonucleotide
gtatagtcgtccagaggccgaaccccaatg

SEQ ID NO: 316966 - DNA, 30 bp, Artificial Sequence
  Synthetic oligonucleotide
ggaactatagaattgttgttgaggccaatg

SEQ ID NO: 316967 - DNA, 30 bp, Artificial Sequence
  Synthetic oligonucleotide
tatcaacaattgggatggttcgggccaatg

SEQ ID NO: 316968 - DNA, 31 bp, Artificial Sequence
  Synthetic oligonucleotide
agctatgactactagtcatgactatccaatg

SEQ ID NO: 316969 - DNA, 30 bp, Artificial Sequence
  Synthetic oligonucleotide
gaaagatttaggggtggactgagtccaatg

SEQ ID NO: 316970 - DNA, 30 bp, Artificial Sequence
  Synthetic oligonucleotide
ggtacgcatctgatagtttctggtccaatg

SEQ ID NO: 316971 - DNA, 30 bp, Artificial Sequence
  Synthetic oligonucleotide
ataatacagcgttgtgtttatggagcaatg

SEQ ID NO: 316972 - DNA, 30 bp, Artificial Sequence
  Synthetic oligonucleotide
gagcacgcttctgaaaggctgaaggcaatg

SEQ ID NO: 316973 - DNA, 30 bp, Artificial Sequence
  Synthetic oligonucleotide
ggtatggccgagctcagactcgatgcaatg

SEQ ID NO: 316974 - DNA, 30 bp, Artificial Sequence
  Synthetic oligonucleotide
aatagggtatcctctgaatcggatgcaatg

SEQ ID NO: 316975 - DNA, 30 bp, Artificial Sequence
  Synthetic oligonucleotide
ctccgcactacgttttctgggattgcaatg

SEQ ID NO: 316976 - DNA, 30 bp, Artificial Sequence
  Synthetic oligonucleotide
tgcccatattagtagggtgaaccatcaatg

SEQ ID NO: 316977 - DNA, 30 bp, Artificial Sequence
  Synthetic oligonucleotide
gggcccaggaggtccacgggggcatcaatg

SEQ ID NO: 316978 - DNA, 30 bp, Artificial Sequence
  Synthetic oligonucleotide
atacatagcagatgctgtgaactatcaatg

SEQ ID NO: 316979 - DNA, 30 bp, Artificial Sequence
  Synthetic oligonucleotide
tacccgttccggtggttttacagctcaatg

SEQ ID NO: 316980 - DNA, 30 bp, Artificial Sequence
  Synthetic oligonucleotide
ataaaccgtcgtttatgagactgctcaatg

SEQ ID NO: 316981 - DNA, 30 bp, Artificial Sequence
  Synthetic oligonucleotide
cctgctcacggtcagatcaatatgtcaatg

SEQ ID NO: 316982 - DNA, 30 bp, Artificial Sequence
  Synthetic oligonucleotide
tctcccagtatcagatctcggtattcaatg

SEQ ID NO: 316983 - DNA, 30 bp, Artificial Sequence
  Synthetic oligonucleotide
acacggccgtttcctcatgatggttcaatg

SEQ ID NO: 316984 - DNA, 30 bp, Artificial Sequence
  Synthetic oligonucleotide
cggtggggtgaatggaggaatatttcaatg

SEQ ID NO: 316985 - DNA, 30 bp, Artificial Sequence
  Synthetic oligonucleotide
aagtcgaaaatggccgcgttttaaagaatg

SEQ ID NO: 316986 - DNA, 30 bp, Artificial Sequence
  Synthetic oligonucleotide
atggggacgctgatcattatatcaagaatg

SEQ ID NO: 316987 - DNA, 31 bp, Artificial Sequence
  Synthetic oligonucleotide
aaagcgtggtacagcgtaacatttaagaatg

SEQ ID NO: 316988 - DNA, 30 bp, Artificial Sequence
  Synthetic oligonucleotide
aaataactcattaaagagagccacagaatg

SEQ ID NO: 316989 - DNA, 30 bp, Artificial Sequence
  Synthetic oligonucleotide
tgcctcctccggttctagacgtcgagaatg

SEQ ID NO: 316990 - DNA, 30 bp, Artificial Sequence
  Synthetic oligonucleotide
gcatataacacagtcctacccggtagaatg

SEQ ID NO: 316991 - DNA, 30 bp, Artificial Sequence
  Synthetic oligonucleotide
tatgaggacgcattttcccaactgcgaatg

SEQ ID NO: 316992 - DNA, 30 bp, Artificial Sequence
  Synthetic oligonucleotide
ttgatcgtaatcgagtggaccggcggaatg

SEQ ID NO: 316993 - DNA, 30 bp, Artificial Sequence
  Synthetic oligonucleotide
tgtgtgattggatgggggatgctgggaatg

SEQ ID NO: 316994 - DNA, 30 bp, Artificial Sequence
  Synthetic oligonucleotide
agttatctacctctggcttctcgtggaatg

SEQ ID NO: 316995 - DNA, 30 bp, Artificial Sequence
  Synthetic oligonucleotide
gttggggccgatggcagcataattggaatg

SEQ ID NO: 316996 - DNA, 30 bp, Artificial Sequence
  Synthetic oligonucleotide
accttaatgtgagctacatactttggaatg

SEQ ID NO: 316997 - DNA, 30 bp, Artificial Sequence
  Synthetic oligonucleotide
tccttttagtaccggagatgttaatgaatg

SEQ ID NO: 316998 - DNA, 30 bp, Artificial Sequence
  Synthetic oligonucleotide
tgtctggccagtgcaataagcttatgaatg

SEQ ID NO: 316999 - DNA, 30 bp, Artificial Sequence
  Synthetic oligonucleotide
aattagcagctcatgtatagatcctgaatg

SEQ ID NO: 317000 - DNA, 30 bp, Artificial Sequence
  Synthetic oligonucleotide
tgcgccgcaaaagtcactgcaaggtgaatg

SEQ ID NO: 317001 - DNA, 30 bp, Artificial Sequence
  Synthetic oligonucleotide
caatgtctattacaggacgtgcattgaatg

SEQ ID NO: 317002 - DNA, 30 bp, Artificial Sequence
  Synthetic oligonucleotide
ggccatataaattgagggaggacttgaatg

SEQ ID NO: 317003 - DNA, 30 bp, Artificial Sequence
  Synthetic oligonucleotide
agtaagctaacttcgtacgatagttgaatg

SEQ ID NO: 317004 - DNA, 30 bp, Artificial Sequence
  Synthetic oligonucleotide
tgagcactaaggcctgccagggcaataatg

SEQ ID NO: 317005 - DNA, 30 bp, Artificial Sequence
  Synthetic oligonucleotide
caaccatatgagtcctcgctgttaataatg

SEQ ID NO: 317006 - DNA, 30 bp, Artificial Sequence
  Synthetic oligonucleotide
ggaggtctaacctatttgtgttacataatg

SEQ ID NO: 317007 - DNA, 30 bp, Artificial Sequence
  Synthetic oligonucleotide
gtatgcgaagccgaatgcctatgcataatg

SEQ ID NO: 317008 - DNA, 30 bp, Artificial Sequence
  Synthetic oligonucleotide
gatagccttcgaacacggctttagataatg

SEQ ID NO: 317009 - DNA, 30 bp, Artificial Sequence
  Synthetic oligonucleotide
gaggaaagactaattactatctctataatg

SEQ ID NO: 317010 - DNA, 30 bp, Artificial Sequence
  Synthetic oligonucleotide
aactaggattggccagcgaaaagtataatg

SEQ ID NO: 317011 - DNA, 30 bp, Artificial Sequence
  Synthetic oligonucleotide
ccgcaaacggcctacgtcgtcggcctaatg

SEQ ID NO: 317012 - DNA, 30 bp, Artificial Sequence
  Synthetic oligonucleotide
cctaagtttcgatcttgctcgctcctaatg

SEQ ID NO: 317013 - DNA, 30 bp, Artificial Sequence
  Synthetic oligonucleotide
ggatgtaaatatttagaccatccgctaatg

SEQ ID NO: 317014 - DNA, 30 bp, Artificial Sequence
  Synthetic oligonucleotide
gcctagcatctcgcagcttcagcgctaatg

SEQ ID NO: 317015 - DNA, 31 bp, Artificial Sequence
  Synthetic oligonucleotide
tctcggattgacatccatcgatgtgctaatg

SEQ ID NO: 317016 - DNA, 30 bp, Artificial Sequence
  Synthetic oligonucleotide
gctactatgcttggataccttcgtctaatg

SEQ ID NO: 317017 - DNA, 30 bp, Artificial Sequence
  Synthetic oligonucleotide
cacatgcaatacaatacacacagcgtaatg

SEQ ID NO: 317018 - DNA, 30 bp, Artificial Sequence
  Synthetic oligonucleotide
ccttggcggattttctcggtcagcgtaatg

SEQ ID NO: 317019 - DNA, 30 bp, Artificial Sequence
  Synthetic oligonucleotide
gatgaaaaaatgttgtgatatttcgtaatg

SEQ ID NO: 317020 - DNA, 30 bp, Artificial Sequence
  Synthetic oligonucleotide
aatggaatcgataaggttgtgcaggtaatg

SEQ ID NO: 317021 - DNA, 30 bp, Artificial Sequence
  Synthetic oligonucleotide
tgtctaatatacatgagcgtgtgggtaatg

SEQ ID NO: 317022 - DNA, 30 bp, Artificial Sequence
  Synthetic oligonucleotide
aattgacggtcgtactggaagatggtaatg

SEQ ID NO: 317023 - DNA, 30 bp, Artificial Sequence
  Synthetic oligonucleotide
taaatagtccttacgcggatactggtaatg

SEQ ID NO: 317024 - DNA, 30 bp, Artificial Sequence
  Synthetic oligonucleotide
cttgacgacagtgtacggaaagatgtaatg

SEQ ID NO: 317025 - DNA, 30 bp, Artificial Sequence
  Synthetic oligonucleotide
caatcccgacagttcatggctgttgtaatg

SEQ ID NO: 317026 - DNA, 30 bp, Artificial Sequence
  Synthetic oligonucleotide
acctttagcagatgtcttctcatattaatg

SEQ ID NO: 317027 - DNA, 30 bp, Artificial Sequence
  Synthetic oligonucleotide
gacctcaggttcagttagccattgttaatg

SEQ ID NO: 317028 - DNA, 30 bp, Artificial Sequence
  Synthetic oligonucleotide
tgtggtaagatcgtctaggcgcttttaatg

SEQ ID NO: 317029 - DNA, 30 bp, Artificial Sequence
  Synthetic oligonucleotide
ctggaaacgtgcccttttatggcaaacatg

SEQ ID NO: 317030 - DNA, 30 bp, Artificial Sequence
  Synthetic oligonucleotide
ggttctagggagcactagcgcaataacatg

SEQ ID NO: 317031 - DNA, 30 bp, Artificial Sequence
  Synthetic oligonucleotide
ggacgcgtttctttggcaattgataacatg

SEQ ID NO: 317032 - DNA, 30 bp, Artificial Sequence
  Synthetic oligonucleotide
aaatgatgtgcggagaaggaatataacatg

SEQ ID NO: 317033 - DNA, 30 bp, Artificial Sequence
  Synthetic oligonucleotide
ctccataaggcacagcccacctttaacatg

SEQ ID NO: 317034 - DNA, 30 bp, Artificial Sequence
  Synthetic oligonucleotide
ctctacttttagtatggtagacaacacatg

SEQ ID NO: 317035 - DNA, 30 bp, Artificial Sequence
  Synthetic oligonucleotide
aagggaggcagtagagagtcatgacacatg

SEQ ID NO: 317036 - DNA, 30 bp, Artificial Sequence
  Synthetic oligonucleotide
atgattgcccagggtgcattgatacacatg

SEQ ID NO: 317037 - DNA, 30 bp, Artificial Sequence
  Synthetic oligonucleotide
taagtacctatttatgaactcacccacatg

SEQ ID NO: 317038 - DNA, 30 bp, Artificial Sequence
  Synthetic oligonucleotide
gtgcgtaaagcaatatgcgcacggcacatg

SEQ ID NO: 317039 - DNA, 30 bp, Artificial Sequence
  Synthetic oligonucleotide
agtatgggggagtaagtacgcaatcacatg

SEQ ID NO: 317040 - DNA, 30 bp, Artificial Sequence
  Synthetic oligonucleotide
ccggtgcgtcacgccggaagtgatcacatg

SEQ ID NO: 317041 - DNA, 30 bp, Artificial Sequence
  Synthetic oligonucleotide
atccctatccgcctcccacacaaggacatg

SEQ ID NO: 317042 - DNA, 30 bp, Artificial Sequence
  Synthetic oligonucleotide
aattagctaacatgctgccaggaggacatg

SEQ ID NO: 317043 - DNA, 30 bp, Artificial Sequence
  Synthetic oligonucleotide
ttcattaggacctagaaatcaccggacatg

SEQ ID NO: 317044 - DNA, 30 bp, Artificial Sequence
  Synthetic oligonucleotide
atcctgccaccagcgaagggcccggacatg

SEQ ID NO: 317045 - DNA, 30 bp, Artificial Sequence
  Synthetic oligonucleotide
cagatggcacacaatttctgcgtggacatg

SEQ ID NO: 317046 - DNA, 30 bp, Artificial Sequence
  Synthetic oligonucleotide
cggtcatttagcgccctctcacctgacatg

SEQ ID NO: 317047 - DNA, 30 bp, Artificial Sequence
  Synthetic oligonucleotide
cgaaacacaagcgaagaccactttgacatg

SEQ ID NO: 317048 - DNA, 30 bp, Artificial Sequence
  Synthetic oligonucleotide
ctcaacgcctgctcaggcttctaatacatg

SEQ ID NO: 317049 - DNA, 30 bp, Artificial Sequence
  Synthetic oligonucleotide
tagtggtatggcgatgcagtgagatacatg

SEQ ID NO: 317050 - DNA, 30 bp, Artificial Sequence
  Synthetic oligonucleotide
ctgttaacgtggaacaattccatatacatg

SEQ ID NO: 317051 - DNA, 30 bp, Artificial Sequence
  Synthetic oligonucleotide
tcagagatgccgggactggaatcctacatg

SEQ ID NO: 317052 - DNA, 30 bp, Artificial Sequence
  Synthetic oligonucleotide
tgggctagcttcatcacatgggtctacatg

SEQ ID NO: 317053 - DNA, 30 bp, Artificial Sequence
  Synthetic oligonucleotide
tatccgcgcgatcggagttacgcgtacatg

SEQ ID NO: 317054 - DNA, 30 bp, Artificial Sequence
  Synthetic oligonucleotide
cactgtaaactacatctttcgtggtacatg

SEQ ID NO: 317055 - DNA, 30 bp, Artificial Sequence
  Synthetic oligonucleotide
tgtaaccgccatcctgcaagcaattacatg

SEQ ID NO: 317056 - DNA, 30 bp, Artificial Sequence
  Synthetic oligonucleotide
accagctgtctctttcatgggacttacatg

SEQ ID NO: 317057 - DNA, 30 bp, Artificial Sequence
  Synthetic oligonucleotide
atatattatatcactaaaatattcaccatg

SEQ ID NO: 317058 - DNA, 30 bp, Artificial Sequence
  Synthetic oligonucleotide
gaactgacgatgggctttcacctgaccatg

SEQ ID NO: 317059 - DNA, 30 bp, Artificial Sequence
  Synthetic oligonucleotide
aggtttgaagaagctccggcaaaacccatg

SEQ ID NO: 317060 - DNA, 30 bp, Artificial Sequence
  Synthetic oligonucleotide
ttcccttgatcaaggtagggggaacccatg

SEQ ID NO: 317061 - DNA, 30 bp, Artificial Sequence
  Synthetic oligonucleotide
gattggacacgcaaataatgggaacccatg

SEQ ID NO: 317062 - DNA, 30 bp, Artificial Sequence
  Synthetic oligonucleotide
tccctgaaatgaaagcggagaggacccatg

SEQ ID NO: 317063 - DNA, 30 bp, Artificial Sequence
  Synthetic oligonucleotide
ataactcgcggattggttagtctacccatg

SEQ ID NO: 317064 - DNA, 30 bp, Artificial Sequence
  Synthetic oligonucleotide
attcatcggtcttcgcggaaatagcccatg

SEQ ID NO: 317065 - DNA, 30 bp, Artificial Sequence
  Synthetic oligonucleotide
ttagcgaacaggttctatagacggcccatg

SEQ ID NO: 317066 - DNA, 30 bp, Artificial Sequence
  Synthetic oligonucleotide
gaaatattgaatccgcttcttcggcccatg

SEQ ID NO: 317067 - DNA, 30 bp, Artificial Sequence
  Synthetic oligonucleotide
acaggattgcttctcagtcttcatcccatg

SEQ ID NO: 317068 - DNA, 30 bp, Artificial Sequence
  Synthetic oligonucleotide
catcaacgatgagcggcatgtgatcccatg

SEQ ID NO: 317069 - DNA, 30 bp, Artificial Sequence
  Synthetic oligonucleotide
tgtcttctaagagatatggggtgtcccatg

SEQ ID NO: 317070 - DNA, 30 bp, Artificial Sequence
  Synthetic oligonucleotide
aactgtaataccaggatcaccggcgccatg

SEQ ID NO: 317071 - DNA, 30 bp, Artificial Sequence
  Synthetic oligonucleotide
gtggtagcgatactttgctacaaggccatg

SEQ ID NO: 317072 - DNA, 30 bp, Artificial Sequence
  Synthetic oligonucleotide
ctggttagcgttcttggcaagctggccatg

SEQ ID NO: 317073 - DNA, 30 bp, Artificial Sequence
  Synthetic oligonucleotide
accgcggacaagggcagtacagatgccatg

SEQ ID NO: 317074 - DNA, 30 bp, Artificial Sequence
  Synthetic oligonucleotide
aattacccggggtgttcactagtatccatg

SEQ ID NO: 317075 - DNA, 30 bp, Artificial Sequence
  Synthetic oligonucleotide
tcttcgggcaagtacatcgaaccctccatg

SEQ ID NO: 317076 - DNA, 30 bp, Artificial Sequence
  Synthetic oligonucleotide
tttagatatgtccagatcttactctccatg

SEQ ID NO: 317077 - DNA, 30 bp, Artificial Sequence
  Synthetic oligonucleotide
tctcacggacataattatcgccagtccatg

SEQ ID NO: 317078 - DNA, 30 bp, Artificial Sequence
  Synthetic oligonucleotide
tggggggctacgcgttggaaagggtccatg

SEQ ID NO: 317079 - DNA, 30 bp, Artificial Sequence
  Synthetic oligonucleotide
gtgaacgtggcactgaggcgggattccatg

SEQ ID NO: 317080 - DNA, 30 bp, Artificial Sequence
  Synthetic oligonucleotide
gtgtaccactattaaccacgggcttccatg

SEQ ID NO: 317081 - DNA, 30 bp, Artificial Sequence
  Synthetic oligonucleotide
tgttcgcagcaaaataaacgacaaagcatg

SEQ ID NO: 317082 - DNA, 30 bp, Artificial Sequence
  Synthetic oligonucleotide
agtactcataagtgaacaagttaaagcatg

SEQ ID NO: 317083 - DNA, 30 bp, Artificial Sequence
  Synthetic oligonucleotide
atagtcccggtacagggtgtcttaagcatg

SEQ ID NO: 317084 - DNA, 30 bp, Artificial Sequence
  Synthetic oligonucleotide
ccctataagtccgggatagtatacagcatg

SEQ ID NO: 317085 - DNA, 30 bp, Artificial Sequence
  Synthetic oligonucleotide
acgcaaacattgagaacccggtacagcatg

SEQ ID NO: 317086 - DNA, 30 bp, Artificial Sequence
  Synthetic oligonucleotide
actcatatgacctgggatgtcacgagcatg

SEQ ID NO: 317087 - DNA, 30 bp, Artificial Sequence
  Synthetic oligonucleotide
actccattcgggacagaacaatatagcatg

SEQ ID NO: 317088 - DNA, 30 bp, Artificial Sequence
  Synthetic oligonucleotide
gaaagggtcgcaaggccaacggttagcatg

SEQ ID NO: 317089 - DNA, 30 bp, Artificial Sequence
  Synthetic oligonucleotide
aggcctctcaccctgcggtcgaaacgcatg

SEQ ID NO: 317090 - DNA, 30 bp, Artificial Sequence
  Synthetic oligonucleotide
gcctgaattagtaattggaacagacgcatg

SEQ ID NO: 317091 - DNA, 30 bp, Artificial Sequence
  Synthetic oligonucleotide
catgtccgatatgtatgggggcaccgcatg

SEQ ID NO: 317092 - DNA, 30 bp, Artificial Sequence
  Synthetic oligonucleotide
tggcaagggtatggtgaggcggaccgcatg

SEQ ID NO: 317093 - DNA, 30 bp, Artificial Sequence
  Synthetic oligonucleotide
ttacggtaggtcggcctgttctatcgcatg

SEQ ID NO: 317094 - DNA, 30 bp, Artificial Sequence
  Synthetic oligonucleotide
caaagtaaatcggttggcgcaactcgcatg

SEQ ID NO: 317095 - DNA, 30 bp, Artificial Sequence
  Synthetic oligonucleotide
atgtggaatgaagggttgcctcaaggcatg

SEQ ID NO: 317096 - DNA, 30 bp, Artificial Sequence
  Synthetic oligonucleotide
taaacagtaaagtgggtcggtgcaggcatg

SEQ ID NO: 317097 - DNA, 30 bp, Artificial Sequence
  Synthetic oligonucleotide
ggccattcagtggcttcgcatcgaggcatg

SEQ ID NO: 317098 - DNA, 30 bp, Artificial Sequence
  Synthetic oligonucleotide
gctaaaggcacataggcaccagacggcatg

SEQ ID NO: 317099 - DNA, 30 bp, Artificial Sequence
  Synthetic oligonucleotide
ggggtagaagctgcgggtatgggcggcatg

SEQ ID NO: 317100 - DNA, 30 bp, Artificial Sequence
  Synthetic oligonucleotide
gaggatcgatcggagcgttttgtcggcatg

SEQ ID NO: 317101 - DNA, 30 bp, Artificial Sequence
  Synthetic oligonucleotide
aaatgttggatcagcagagcgtaatgcatg

SEQ ID NO: 317102 - DNA, 30 bp, Artificial Sequence
  Synthetic oligonucleotide
tgcatcaggtcatggagcatgtaatgcatg

SEQ ID NO: 317103 - DNA, 30 bp, Artificial Sequence
  Synthetic oligonucleotide
gacgtcttcccgcttgccataacatgcatg

SEQ ID NO: 317104 - DNA, 30 bp, Artificial Sequence
  Synthetic oligonucleotide
ctgggaccattcagcaattatgcatgcatg

SEQ ID NO: 317105 - DNA, 30 bp, Artificial Sequence
  Synthetic oligonucleotide
cgataaggccgacatgtagccttatgcatg

SEQ ID NO: 317106 - DNA, 30 bp, Artificial Sequence
  Synthetic oligonucleotide
cacctgttaaggggacttgtcacgtgcatg

SEQ ID NO: 317107 - DNA, 30 bp, Artificial Sequence
  Synthetic oligonucleotide
agcacggccgcatcgctaggtgcaatcatg

SEQ ID NO: 317108 - DNA, 30 bp, Artificial Sequence
  Synthetic oligonucleotide
ccacggatttgaaaggcacaaaggatcatg

SEQ ID NO: 317109 - DNA, 30 bp, Artificial Sequence
  Synthetic oligonucleotide
acagcttgtagagtcccgttggctatcatg

SEQ ID NO: 317110 - DNA, 30 bp, Artificial Sequence
  Synthetic oligonucleotide
tatgcatctgcaggtcggtggcgtatcatg

SEQ ID NO: 317111 - DNA, 30 bp, Artificial Sequence
  Synthetic oligonucleotide
aatggatgaaatcatcctgcaggactcatg

SEQ ID NO: 317112 - DNA, 30 bp, Artificial Sequence
  Synthetic oligonucleotide
gaatgctctagcaggacggggtacctcatg

SEQ ID NO: 317113 - DNA, 30 bp, Artificial Sequence
  Synthetic oligonucleotide
gtaagaggaactttattcaacacgctcatg

SEQ ID NO: 317114 - DNA, 30 bp, Artificial Sequence
  Synthetic oligonucleotide
cctgatttcattacctgcccaatgctcatg

SEQ ID NO: 317115 - DNA, 30 bp, Artificial Sequence
  Synthetic oligonucleotide
aagctataagacggtagggtacccgtcatg

SEQ ID NO: 317116 - DNA, 30 bp, Artificial Sequence
  Synthetic oligonucleotide
agttgggatcgagaggatttgattgtcatg

SEQ ID NO: 317117 - DNA, 30 bp, Artificial Sequence
  Synthetic oligonucleotide
aacccatactatagttacattgttgtcatg

SEQ ID NO: 317118 - DNA, 30 bp, Artificial Sequence
  Synthetic oligonucleotide
agtgacggggtacagggtggctttgtcatg

SEQ ID NO: 317119 - DNA, 30 bp, Artificial Sequence
  Synthetic oligonucleotide
ccgactattcaagctagcgattaattcatg

SEQ ID NO: 317120 - DNA, 30 bp, Artificial Sequence
  Synthetic oligonucleotide
atcagggttatcttttgtgtcgcattcatg

SEQ ID NO: 317121 - DNA, 30 bp, Artificial Sequence
  Synthetic oligonucleotide
attaggtcttagacgttttattacttcatg

SEQ ID NO: 317122 - DNA, 30 bp, Artificial Sequence
  Synthetic oligonucleotide
taagacagtccgtctcaccagtccttcatg

SEQ ID NO: 317123 - DNA, 30 bp, Artificial Sequence
  Synthetic oligonucleotide
tgatagccctcaaatggcgctatcttcatg

SEQ ID NO: 317124 - DNA, 30 bp, Artificial Sequence
  Synthetic oligonucleotide
agagtcccgcgaccgaacggcctcttcatg

SEQ ID NO: 317125 - DNA, 30 bp, Artificial Sequence
  Synthetic oligonucleotide
gtttatgaggggattacaagtgagttcatg

SEQ ID NO: 317126 - DNA, 30 bp, Artificial Sequence
  Synthetic oligonucleotide
gtacacgcgtgtcactaaatcccgttcatg

SEQ ID NO: 317127 - DNA, 30 bp, Artificial Sequence
  Synthetic oligonucleotide
aaaaaggatgtggtagggtcggcgttcatg

SEQ ID NO: 317128 - DNA, 30 bp, Artificial Sequence
  Synthetic oligonucleotide
aaaataatatcgatctcatgaaggttcatg

SEQ ID NO: 317129 - DNA, 30 bp, Artificial Sequence
  Synthetic oligonucleotide
agaaggcgtcagccttaccggaggttcatg

SEQ ID NO: 317130 - DNA, 30 bp, Artificial Sequence
  Synthetic oligonucleotide
aatgcggttcaaggttgcgggatgttcatg

SEQ ID NO: 317131 - DNA, 30 bp, Artificial Sequence
  Synthetic oligonucleotide
ctttcagcgcatataagtggattgttcatg

SEQ ID NO: 317132 - DNA, 30 bp, Artificial Sequence
  Synthetic oligonucleotide
ttcaggggatagtatagctaaattttcatg

SEQ ID NO: 317133 - DNA, 30 bp, Artificial Sequence
  Synthetic oligonucleotide
aagcttgattcatggttagggaccaagatg

SEQ ID NO: 317134 - DNA, 30 bp, Artificial Sequence
  Synthetic oligonucleotide
agtgccgttctctcagatccctagaagatg

SEQ ID NO: 317135 - DNA, 30 bp, Artificial Sequence
  Synthetic oligonucleotide
tagagcgtttccgaccctggtgtgaagatg

SEQ ID NO: 317136 - DNA, 30 bp, Artificial Sequence
  Synthetic oligonucleotide
tgagcttttacccttaggtgcaataagatg

SEQ ID NO: 317137 - DNA, 30 bp, Artificial Sequence
  Synthetic oligonucleotide
cattgatataactcctaaaagactaagatg

SEQ ID NO: 317138 - DNA, 30 bp, Artificial Sequence
  Synthetic oligonucleotide
gccacactggtgctaggtcaacaacagatg

SEQ ID NO: 317139 - DNA, 30 bp, Artificial Sequence
  Synthetic oligonucleotide
tgttctggcaacatactgtgcctacagatg

SEQ ID NO: 317140 - DNA, 30 bp, Artificial Sequence
  Synthetic oligonucleotide
tgtgtggcgggggttctttcgtagcagatg

SEQ ID NO: 317141 - DNA, 30 bp, Artificial Sequence
  Synthetic oligonucleotide
ataaggagttggagaggaagtgcgcagatg

SEQ ID NO: 317142 - DNA, 30 bp, Artificial Sequence
  Synthetic oligonucleotide
tgtattttgagtttccgacgtgatcagatg

SEQ ID NO: 317143 - DNA, 30 bp, Artificial Sequence
  Synthetic oligonucleotide
atttatgagaaagcggtagggtccgagatg

SEQ ID NO: 317144 - DNA, 30 bp, Artificial Sequence
  Synthetic oligonucleotide
tgccagctcgcacccattttcttcgagatg

SEQ ID NO: 317145 - DNA, 30 bp, Artificial Sequence
  Synthetic oligonucleotide
tagaaatctagatcatttatttgggagatg

SEQ ID NO: 317146 - DNA, 30 bp, Artificial Sequence
  Synthetic oligonucleotide
cgccccatcatttacttattaaatgagatg

SEQ ID NO: 317147 - DNA, 30 bp, Artificial Sequence
  Synthetic oligonucleotide
acagcatttagtgtcgaggtatgtgagatg

SEQ ID NO: 317148 - DNA, 30 bp, Artificial Sequence
  Synthetic oligonucleotide
gcggcaattccaaacgactctgttgagatg

SEQ ID NO: 317149 - DNA, 30 bp, Artificial Sequence
  Synthetic oligonucleotide
gaaaatggccagcaatattcggggtagatg

SEQ ID NO: 317150 - DNA, 30 bp, Artificial Sequence
  Synthetic oligonucleotide
gtctctaatagcgcatattgtccttagatg

SEQ ID NO: 317151 - DNA, 30 bp, Artificial Sequence
  Synthetic oligonucleotide
cttaaaggcggttgagggtttgcaacgatg

SEQ ID NO: 317152 - DNA, 30 bp, Artificial Sequence
  Synthetic oligonucleotide
aatatatgctcggcactttaatgaacgatg

SEQ ID NO: 317153 - DNA, 30 bp, Artificial Sequence
  Synthetic oligonucleotide
tagtacaccgccacatttgtgcccacgatg

SEQ ID NO: 317154 - DNA, 30 bp, Artificial Sequence
  Synthetic oligonucleotide
attgtagggattacgtggaagatcacgatg

SEQ ID NO: 317155 - DNA, 30 bp, Artificial Sequence
  Synthetic oligonucleotide
cggcgtacgataatcatgtgggtcacgatg

SEQ ID NO: 317156 - DNA, 30 bp, Artificial Sequence
  Synthetic oligonucleotide
tgttatcaaggtgcagagattttcacgatg

SEQ ID NO: 317157 - DNA, 30 bp, Artificial Sequence
  Synthetic oligonucleotide
ggttacgtagcttgatgcaaatctacgatg

SEQ ID NO: 317158 - DNA, 30 bp, Artificial Sequence
  Synthetic oligonucleotide
gaaacgactaagcagaggctatgtacgatg

SEQ ID NO: 317159 - DNA, 30 bp, Artificial Sequence
  Synthetic oligonucleotide
ggctacctattggcgtctaaggcaccgatg

SEQ ID NO: 317160 - DNA, 30 bp, Artificial Sequence
  Synthetic oligonucleotide
ggttggtcacaattttttccaataccgatg

SEQ ID NO: 317161 - DNA, 30 bp, Artificial Sequence
  Synthetic oligonucleotide
aaaatgacgattcataacatgtccccgatg

SEQ ID NO: 317162 - DNA, 30 bp, Artificial Sequence
  Synthetic oligonucleotide
gaggagcacggcgtcgacaagcggccgatg

SEQ ID NO: 317163 - DNA, 30 bp, Artificial Sequence
  Synthetic oligonucleotide
tgtgcatgtaacaattgagtgccagcgatg

SEQ ID NO: 317164 - DNA, 30 bp, Artificial Sequence
  Synthetic oligonucleotide
cttgcaattacgtatgactttctagcgatg

SEQ ID NO: 317165 - DNA, 30 bp, Artificial Sequence
  Synthetic oligonucleotide
aacctggtatgacaagtattggtcgcgatg

SEQ ID NO: 317166 - DNA, 30 bp, Artificial Sequence
  Synthetic oligonucleotide
agacgtttgcctccttacgactgggcgatg

SEQ ID NO: 317167 - DNA, 30 bp, Artificial Sequence
  Synthetic oligonucleotide
tgattgagaatacttattggcctggcgatg

SEQ ID NO: 317168 - DNA, 30 bp, Artificial Sequence
  Synthetic oligonucleotide
gaagtaggcttccatgagatcctggcgatg

SEQ ID NO: 317169 - DNA, 30 bp, Artificial Sequence
  Synthetic oligonucleotide
tgcagcgttccgtgccacaggcctgcgatg

SEQ ID NO: 317170 - DNA, 30 bp, Artificial Sequence
  Synthetic oligonucleotide
cattccaaacacgcaaggcaagcatcgatg

SEQ ID NO: 317171 - DNA, 30 bp, Artificial Sequence
  Synthetic oligonucleotide
taggtactaatttattaaggtgtatcgatg

SEQ ID NO: 317172 - DNA, 30 bp, Artificial Sequence
  Synthetic oligonucleotide
cggccaaaggaacctgccattttgtcgatg

SEQ ID NO: 317173 - DNA, 30 bp, Artificial Sequence
  Synthetic oligonucleotide
agtaatggatgaatatgttacctttcgatg

SEQ ID NO: 317174 - DNA, 30 bp, Artificial Sequence
  Synthetic oligonucleotide
aaaaaggtttagcgatgcgtcctttcgatg

SEQ ID NO: 317175 - DNA, 30 bp, Artificial Sequence
  Synthetic oligonucleotide
ctctgtaatgtaagatcgtttctttcgatg

SEQ ID NO: 317176 - DNA, 30 bp, Artificial Sequence
  Synthetic oligonucleotide
gtggcttgggcttcagtggcagtttcgatg

SEQ ID NO: 317177 - DNA, 30 bp, Artificial Sequence
  Synthetic oligonucleotide
gacatcgtggtacccacatagtgaaggatg

SEQ ID NO: 317178 - DNA, 30 bp, Artificial Sequence
  Synthetic oligonucleotide
ggtgtgttaacgtcctattaagtcaggatg

SEQ ID NO: 317179 - DNA, 30 bp, Artificial Sequence
  Synthetic oligonucleotide
tagtacttagacaggggctttgataggatg

SEQ ID NO: 317180 - DNA, 30 bp, Artificial Sequence
  Synthetic oligonucleotide
tagcatcacaatgccaattagtataggatg

SEQ ID NO: 317181 - DNA, 30 bp, Artificial Sequence
  Synthetic oligonucleotide
ttcattgatagtgatctatgcacacggatg

SEQ ID NO: 317182 - DNA, 30 bp, Artificial Sequence
  Synthetic oligonucleotide
taactgcgttacctcccggcggtacggatg

SEQ ID NO: 317183 - DNA, 30 bp, Artificial Sequence
  Synthetic oligonucleotide
ttggacccgcagagctagccagaccggatg

SEQ ID NO: 317184 - DNA, 30 bp, Artificial Sequence
  Synthetic oligonucleotide
gcatgccgtatatgtgatcataggcggatg

SEQ ID NO: 317185 - DNA, 30 bp, Artificial Sequence
  Synthetic oligonucleotide
taagaaaaccgacgccgtggaatcgggatg

SEQ ID NO: 317186 - DNA, 30 bp, Artificial Sequence
  Synthetic oligonucleotide
ggcggacgatacacccgtctgcgggggatg

SEQ ID NO: 317187 - DNA, 30 bp, Artificial Sequence
  Synthetic oligonucleotide
tactcatgtatctttccttaactggggatg

SEQ ID NO: 317188 - DNA, 30 bp, Artificial Sequence
  Synthetic oligonucleotide
acaataggactacgtggtacgtttgggatg

SEQ ID NO: 317189 - DNA, 30 bp, Artificial Sequence
  Synthetic oligonucleotide
ctattgcgggggatttcgaagtcctggatg

SEQ ID NO: 317190 - DNA, 30 bp, Artificial Sequence
  Synthetic oligonucleotide
gacctgcgtgaaagagacgaaagctggatg

SEQ ID NO: 317191 - DNA, 31 bp, Artificial Sequence
  Synthetic oligonucleotide
ttgcgaaattttgttgttgactatctggatg

SEQ ID NO: 317192 - DNA, 30 bp, Artificial Sequence
  Synthetic oligonucleotide
ctttacatgttatcatttgttacgtggatg

SEQ ID NO: 317193 - DNA, 30 bp, Artificial Sequence
  Synthetic oligonucleotide
agcctgattgggcgtaacgtccggtggatg

SEQ ID NO: 317194 - DNA, 30 bp, Artificial Sequence
  Synthetic oligonucleotide
agtatatggtggtaaaaaacttgttggatg

SEQ ID NO: 317195 - DNA, 30 bp, Artificial Sequence
  Synthetic oligonucleotide
accagatttattaggacgatggcaatgatg

SEQ ID NO: 317196 - DNA, 30 bp, Artificial Sequence
  Synthetic oligonucleotide
agtccagcgtggtcgaataagcccatgatg

SEQ ID NO: 317197 - DNA, 30 bp, Artificial Sequence
  Synthetic oligonucleotide
attggcatgacaatggcatcagatatgatg

SEQ ID NO: 317198 - DNA, 30 bp, Artificial Sequence
  Synthetic oligonucleotide
aggctagcctcttttacgttagcgctgatg

SEQ ID NO: 317199 - DNA, 30 bp, Artificial Sequence
  Synthetic oligonucleotide
ggccgggcatacggtagtcttgcgctgatg

SEQ ID NO: 317200 - DNA, 30 bp, Artificial Sequence
  Synthetic oligonucleotide
cgccgtcacggcaacccgtgatatctgatg

SEQ ID NO: 317201 - DNA, 30 bp, Artificial Sequence
  Synthetic oligonucleotide
ggctatggacatccgggcgcgtctctgatg

SEQ ID NO: 317202 - DNA, 30 bp, Artificial Sequence
  Synthetic oligonucleotide
taactgggtttagggggaaattttctgatg

SEQ ID NO: 317203 - DNA, 30 bp, Artificial Sequence
  Synthetic oligonucleotide
tggtttacaggtgtcaggcagatcgtgatg

SEQ ID NO: 317204 - DNA, 30 bp, Artificial Sequence
  Synthetic oligonucleotide
ttctggcaatacgcaaaggaatcggtgatg

SEQ ID NO: 317205 - DNA, 30 bp, Artificial Sequence
  Synthetic oligonucleotide
ctttcgtgacagaacatcttccatgtgatg

SEQ ID NO: 317206 - DNA, 30 bp, Artificial Sequence
  Synthetic oligonucleotide
gcgcttgcgtaggcaagttagcaattgatg

SEQ ID NO: 317207 - DNA, 30 bp, Artificial Sequence
  Synthetic oligonucleotide
tactggacatctctacgtttgatgttgatg

SEQ ID NO: 317208 - DNA, 30 bp, Artificial Sequence
  Synthetic oligonucleotide
acagttcaggggcattcccgtaaaaatatg

SEQ ID NO: 317209 - DNA, 30 bp, Artificial Sequence
  Synthetic oligonucleotide
cacggtgtgtctcgtacaacgtaaaatatg

SEQ ID NO: 317210 - DNA, 30 bp, Artificial Sequence
  Synthetic oligonucleotide
taatccaggggttaggctacggcaaatatg

SEQ ID NO: 317211 - DNA, 30 bp, Artificial Sequence
  Synthetic oligonucleotide
tgcgttggtcgcacaccaagggacaatatg

SEQ ID NO: 317212 - DNA, 30 bp, Artificial Sequence
  Synthetic oligonucleotide
cctagcattgtcgcgactattgtcaatatg

SEQ ID NO: 317213 - DNA, 30 bp, Artificial Sequence
  Synthetic oligonucleotide
ttgaacagttattgttcatttacgaatatg

SEQ ID NO: 317214 - DNA, 30 bp, Artificial Sequence
  Synthetic oligonucleotide
actggggtcctccagaagcgtacacatatg

SEQ ID NO: 317215 - DNA, 30 bp, Artificial Sequence
  Synthetic oligonucleotide
aaccaagttctgtgccataaaagacatatg

SEQ ID NO: 317216 - DNA, 30 bp, Artificial Sequence
  Synthetic oligonucleotide
ttcgtcccctaacggcatgtcctacatatg

SEQ ID NO: 317217 - DNA, 30 bp, Artificial Sequence
  Synthetic oligonucleotide
tcatcgacctataaagcacttgaccatatg

SEQ ID NO: 317218 - DNA, 30 bp, Artificial Sequence
  Synthetic oligonucleotide
cactgaggtggcttgggtgtattccatatg

SEQ ID NO: 317219 - DNA, 30 bp, Artificial Sequence
  Synthetic oligonucleotide
tccgggcttcctagtgcaaggagtcatatg

SEQ ID NO: 317220 - DNA, 30 bp, Artificial Sequence
  Synthetic oligonucleotide
tgatgctaactagaagctttggcagatatg

SEQ ID NO: 317221 - DNA, 30 bp, Artificial Sequence
  Synthetic oligonucleotide
ggtacagacatctactgacgggccgatatg

SEQ ID NO: 317222 - DNA, 30 bp, Artificial Sequence
  Synthetic oligonucleotide
cacgccgatgtgtgttacaccaaggatatg

SEQ ID NO: 317223 - DNA, 30 bp, Artificial Sequence
  Synthetic oligonucleotide
ttagagtcggtgggaaatatgagggatatg

SEQ ID NO: 317224 - DNA, 30 bp, Artificial Sequence
  Synthetic oligonucleotide
ctgtaatcccgtttggtataatatgatatg

SEQ ID NO: 317225 - DNA, 30 bp, Artificial Sequence
  Synthetic oligonucleotide
ggaagagttcatgacgcctgcggtgatatg

SEQ ID NO: 317226 - DNA, 30 bp, Artificial Sequence
  Synthetic oligonucleotide
ttgatttgtattgacctgtaacagtatatg

SEQ ID NO: 317227 - DNA, 30 bp, Artificial Sequence
  Synthetic oligonucleotide
tatgcagttgaaagtatggagacgtatatg

SEQ ID NO: 317228 - DNA, 30 bp, Artificial Sequence
  Synthetic oligonucleotide
ggttgtctggccatgttattgaaaactatg

SEQ ID NO: 317229 - DNA, 30 bp, Artificial Sequence
  Synthetic oligonucleotide
ataaggcgtgcatacatacggcaaactatg

SEQ ID NO: 317230 - DNA, 30 bp, Artificial Sequence
  Synthetic oligonucleotide
agaactacgtgggcttcccctgccactatg

SEQ ID NO: 317231 - DNA, 30 bp, Artificial Sequence
  Synthetic oligonucleotide
atttggggggacataaaaagtggcactatg

SEQ ID NO: 317232 - DNA, 30 bp, Artificial Sequence
  Synthetic oligonucleotide
gacgacggctattaattgtctgtcactatg

SEQ ID NO: 317233 - DNA, 30 bp, Artificial Sequence
  Synthetic oligonucleotide
agcctcgttactccagcgaaaagacctatg

SEQ ID NO: 317234 - DNA, 30 bp, Artificial Sequence
  Synthetic oligonucleotide
ggtgcaacacaatgtatggtgggacctatg

SEQ ID NO: 317235 - DNA, 30 bp, Artificial Sequence
  Synthetic oligonucleotide
aaggtccgagaggcattgatttagcctatg

SEQ ID NO: 317236 - DNA, 31 bp, Artificial Sequence
  Synthetic oligonucleotide
gggcccaggaaagacatcagcaacgcctatg

SEQ ID NO: 317237 - DNA, 30 bp, Artificial Sequence
  Synthetic oligonucleotide
cttcatcggttgcacccattggttcctatg

SEQ ID NO: 317238 - DNA, 30 bp, Artificial Sequence
  Synthetic oligonucleotide
aactggcttcaataaacgaatctagctatg

SEQ ID NO: 317239 - DNA, 30 bp, Artificial Sequence
  Synthetic oligonucleotide
accgatagacacttagctcccttagctatg

SEQ ID NO: 317240 - DNA, 30 bp, Artificial Sequence
  Synthetic oligonucleotide
atagacgcagttgatgtgagacacgctatg

SEQ ID NO: 317241 - DNA, 30 bp, Artificial Sequence
  Synthetic oligonucleotide
taactgcttgcaattatgagttccgctatg

SEQ ID NO: 317242 - DNA, 30 bp, Artificial Sequence
  Synthetic oligonucleotide
tttgagtgattagttgtttatctcgctatg

SEQ ID NO: 317243 - DNA, 30 bp, Artificial Sequence
  Synthetic oligonucleotide
tgataccgttaactcttttagtcggctatg

SEQ ID NO: 317244 - DNA, 30 bp, Artificial Sequence
  Synthetic oligonucleotide
tacggggcaggcatagaattcattgctatg

SEQ ID NO: 317245 - DNA, 30 bp, Artificial Sequence
  Synthetic oligonucleotide
tatctcgctctttggggggtgtttgctatg

SEQ ID NO: 317246 - DNA, 30 bp, Artificial Sequence
  Synthetic oligonucleotide
ttttgaaatgggaagcagttacaatctatg

SEQ ID NO: 317247 - DNA, 30 bp, Artificial Sequence
  Synthetic oligonucleotide
aaaagaggtgaaaaacgggttggctctatg

SEQ ID NO: 317248 - DNA, 30 bp, Artificial Sequence
  Synthetic oligonucleotide
tagagatagcctctcctgcgatgctctatg

SEQ ID NO: 317249 - DNA, 30 bp, Artificial Sequence
  Synthetic oligonucleotide
taatagatccatgctcatagagagtctatg

SEQ ID NO: 317250 - DNA, 30 bp, Artificial Sequence
  Synthetic oligonucleotide
cagctaagagcacattttacatcgtctatg

SEQ ID NO: 317251 - DNA, 30 bp, Artificial Sequence
  Synthetic oligonucleotide
aaatctccacatggaaatgttaggtctatg

SEQ ID NO: 317252 - DNA, 30 bp, Artificial Sequence
  Synthetic oligonucleotide
agttgagtaatacctattaaattgtctatg

SEQ ID NO: 317253 - DNA, 30 bp, Artificial Sequence
  Synthetic oligonucleotide
tatggctacatagttggagctcaaagtatg

SEQ ID NO: 317254 - DNA, 30 bp, Artificial Sequence
  Synthetic oligonucleotide
gcgccgatcggtcgcgcaaaacgaagtatg

SEQ ID NO: 317255 - DNA, 30 bp, Artificial Sequence
  Synthetic oligonucleotide
taaattcgaaattggaagggccacagtatg

SEQ ID NO: 317256 - DNA, 30 bp, Artificial Sequence
  Synthetic oligonucleotide
gtcgcaccatttccccgtactcacagtatg

SEQ ID NO: 317257 - DNA, 30 bp, Artificial Sequence
  Synthetic oligonucleotide
cagtgatctcggctccatgctgacagtatg

SEQ ID NO: 317258 - DNA, 30 bp, Artificial Sequence
  Synthetic oligonucleotide
agcaattgccatcaacaagataccagtatg

SEQ ID NO: 317259 - DNA, 30 bp, Artificial Sequence
  Synthetic oligonucleotide
acattgacacggagggtcgaggtcagtatg

SEQ ID NO: 317260 - DNA, 30 bp, Artificial Sequence
  Synthetic oligonucleotide
agcacgtcattcccgtggacggggagtatg

SEQ ID NO: 317261 - DNA, 30 bp, Artificial Sequence
  Synthetic oligonucleotide
gtaagaagctggtagaatctggggagtatg

SEQ ID NO: 317262 - DNA, 30 bp, Artificial Sequence
  Synthetic oligonucleotide
acctctgtcagcggtaatcaccatagtatg

SEQ ID NO: 317263 - DNA, 30 bp, Artificial Sequence
  Synthetic oligonucleotide
gagtacgaatcaatacttatggaacgtatg

SEQ ID NO: 317264 - DNA, 30 bp, Artificial Sequence
  Synthetic oligonucleotide
tgacgtctaatagctaatgggatacgtatg

SEQ ID NO: 317265 - DNA, 30 bp, Artificial Sequence
  Synthetic oligonucleotide
catgaatagtctttaaaccgtggccgtatg

SEQ ID NO: 317266 - DNA, 30 bp, Artificial Sequence
  Synthetic oligonucleotide
tcttcgacgtcattaactcggacgcgtatg

SEQ ID NO: 317267 - DNA, 30 bp, Artificial Sequence
  Synthetic oligonucleotide
tagcatgacacggaatgtaacgtgcgtatg

SEQ ID NO: 317268 - DNA, 30 bp, Artificial Sequence
  Synthetic oligonucleotide
tctactgatattcgcgtatttagtcgtatg

SEQ ID NO: 317269 - DNA, 30 bp, Artificial Sequence
  Synthetic oligonucleotide
agaagtatgctacctgacaaacgcggtatg

SEQ ID NO: 317270 - DNA, 30 bp, Artificial Sequence
  Synthetic oligonucleotide
gaattagtggggaaactatggggcggtatg

SEQ ID NO: 317271 - DNA, 30 bp, Artificial Sequence
  Synthetic oligonucleotide
tagcaagtttagcttgctcatggcggtatg

SEQ ID NO: 317272 - DNA, 30 bp, Artificial Sequence
  Synthetic oligonucleotide
ctatcagcatcttgactcgcgtcgggtatg

SEQ ID NO: 317273 - DNA, 30 bp, Artificial Sequence
  Synthetic oligonucleotide
gtcggtcacgtaagtccaatcggtggtatg

SEQ ID NO: 317274 - DNA, 30 bp, Artificial Sequence
  Synthetic oligonucleotide
tgcaatctttcccgatatcttcgctgtatg

SEQ ID NO: 317275 - DNA, 30 bp, Artificial Sequence
  Synthetic oligonucleotide
tcgctagactcggtattaaccaggtgtatg

SEQ ID NO: 317276 - DNA, 30 bp, Artificial Sequence
  Synthetic oligonucleotide
gtacatatggtctataggtgagtgtgtatg

SEQ ID NO: 317277 - DNA, 30 bp, Artificial Sequence
  Synthetic oligonucleotide
cctctcaatgagacttttttaacttgtatg

SEQ ID NO: 317278 - DNA, 30 bp, Artificial Sequence
  Synthetic oligonucleotide
tgaatactaaatctccttgcgtcttgtatg

SEQ ID NO: 317279 - DNA, 30 bp, Artificial Sequence
  Synthetic oligonucleotide
tagggacgctttgacggaacagtttgtatg

SEQ ID NO: 317280 - DNA, 30 bp, Artificial Sequence
  Synthetic oligonucleotide
tgaaattcctgcttcaagaattgaattatg

SEQ ID NO: 317281 - DNA, 30 bp, Artificial Sequence
  Synthetic oligonucleotide
atagcggtctgtggatgcgcattaattatg

SEQ ID NO: 317282 - DNA, 30 bp, Artificial Sequence
  Synthetic oligonucleotide
gaggaccggtgtagagaatatcgcattatg

SEQ ID NO: 317283 - DNA, 30 bp, Artificial Sequence
  Synthetic oligonucleotide
tctttgccattattacgagaaaagattatg

SEQ ID NO: 317284 - DNA, 30 bp, Artificial Sequence
  Synthetic oligonucleotide
tgcgagtgagaacctcgtatctgtattatg

SEQ ID NO: 317285 - DNA, 30 bp, Artificial Sequence
  Synthetic oligonucleotide
ccatagtgttgtattggtttttgtattatg

SEQ ID NO: 317286 - DNA, 30 bp, Artificial Sequence
  Synthetic oligonucleotide
aaatcagccactgctaatgtgtaacttatg

SEQ ID NO: 317287 - DNA, 30 bp, Artificial Sequence
  Synthetic oligonucleotide
tacttttgcgctttgggtcggatacttatg

SEQ ID NO: 317288 - DNA, 30 bp, Artificial Sequence
  Synthetic oligonucleotide
ggtcgtcactggacgttacgtgcccttatg

SEQ ID NO: 317289 - DNA, 30 bp, Artificial Sequence
  Synthetic oligonucleotide
gagatcataccccaatgcaaaacgcttatg

SEQ ID NO: 317290 - DNA, 30 bp, Artificial Sequence
  Synthetic oligonucleotide
catgccacttgactacatataaatcttatg

SEQ ID NO: 317291 - DNA, 30 bp, Artificial Sequence
  Synthetic oligonucleotide
ccgtacagtggcggtgtaccttatcttatg

SEQ ID NO: 317292 - DNA, 30 bp, Artificial Sequence
  Synthetic oligonucleotide
atcggagccaccccccatgaaagtcttatg

SEQ ID NO: 317293 - DNA, 30 bp, Artificial Sequence
  Synthetic oligonucleotide
tattcaagaactggcagtttagtagttatg

SEQ ID NO: 317294 - DNA, 30 bp, Artificial Sequence
  Synthetic oligonucleotide
taaaatacaaaatgccggttaaacgttatg

SEQ ID NO: 317295 - DNA, 30 bp, Artificial Sequence
  Synthetic oligonucleotide
tgaggtgtcaagggacggacgggcgttatg

SEQ ID NO: 317296 - DNA, 30 bp, Artificial Sequence
  Synthetic oligonucleotide
tgtatagcggaatgaacaagtggcgttatg

SEQ ID NO: 317297 - DNA, 30 bp, Artificial Sequence
  Synthetic oligonucleotide
tgaagtaagcaatatgcacatccggttatg

SEQ ID NO: 317298 - DNA, 30 bp, Artificial Sequence
  Synthetic oligonucleotide
ctagaaagccatacggtcggagcggttatg

SEQ ID NO: 317299 - DNA, 30 bp, Artificial Sequence
  Synthetic oligonucleotide
aaccgattttggatatcgtgcgatgttatg

SEQ ID NO: 317300 - DNA, 30 bp, Artificial Sequence
  Synthetic oligonucleotide
ggcagcagaatctgaggtaattagtttatg

SEQ ID NO: 317301 - DNA, 30 bp, Artificial Sequence
  Synthetic oligonucleotide
gccttactaagtatcgctgagtcgtttatg

SEQ ID NO: 317302 - DNA, 30 bp, Artificial Sequence
  Synthetic oligonucleotide
aatgggcgcaaatagctatccttgtttatg

SEQ ID NO: 317303 - DNA, 30 bp, Artificial Sequence
  Synthetic oligonucleotide
ggctccatttggggaacacgcgattttatg

SEQ ID NO: 317304 - DNA, 30 bp, Artificial Sequence
  Synthetic oligonucleotide
cattaggggctgagctaaggcagttttatg

SEQ ID NO: 317305 - DNA, 30 bp, Artificial Sequence
  Synthetic oligonucleotide
gatcagactgtggaatgagaggaaaaactg

SEQ ID NO: 317306 - DNA, 30 bp, Artificial Sequence
  Synthetic oligonucleotide
gtagacgccattgtggtaagtgcaaaactg

SEQ ID NO: 317307 - DNA, 30 bp, Artificial Sequence
  Synthetic oligonucleotide
cttcttcgtatagtccaggtcataaaactg

SEQ ID NO: 317308 - DNA, 30 bp, Artificial Sequence
  Synthetic oligonucleotide
gtgtaccactggattggcgtgggcaaactg

SEQ ID NO: 317309 - DNA, 30 bp, Artificial Sequence
  Synthetic oligonucleotide
gttagccgagcatctagacattcgaaactg

SEQ ID NO: 317310 - DNA, 30 bp, Artificial Sequence
  Synthetic oligonucleotide
caagcgtgcatactccggggtttgaaactg

SEQ ID NO: 317311 - DNA, 30 bp, Artificial Sequence
  Synthetic oligonucleotide
accagaaacgcccgacaggaagttaaactg

SEQ ID NO: 317312 - DNA, 30 bp, Artificial Sequence
  Synthetic oligonucleotide
ggtcaggaagaggatcagataaaacaactg

SEQ ID NO: 317313 - DNA, 30 bp, Artificial Sequence
  Synthetic oligonucleotide
cgagtattgtttctttctcgttaacaactg

SEQ ID NO: 317314 - DNA, 30 bp, Artificial Sequence
  Synthetic oligonucleotide
gacaggttcaagggttcttttagacaactg

SEQ ID NO: 317315 - DNA, 29 bp, Artificial Sequence
  Synthetic oligonucleotide
ccaattcactataggcggtagtacaactg

SEQ ID NO: 317316 - DNA, 30 bp, Artificial Sequence
  Synthetic oligonucleotide
acaacagggattgcgactctccaccaactg

SEQ ID NO: 317317 - DNA, 30 bp, Artificial Sequence
  Synthetic oligonucleotide
gcacatttagtacaagcgcgcgcgcaactg

SEQ ID NO: 317318 - DNA, 30 bp, Artificial Sequence
  Synthetic oligonucleotide
gaatgtagatgttgtgtttattgtcaactg

SEQ ID NO: 317319 - DNA, 30 bp, Artificial Sequence
  Synthetic oligonucleotide
tggtgcgtcacagcctcctaccatgaactg

SEQ ID NO: 317320 - DNA, 30 bp, Artificial Sequence
  Synthetic oligonucleotide
gttaattacgtactccgcaatgatgaactg

SEQ ID NO: 317321 - DNA, 30 bp, Artificial Sequence
  Synthetic oligonucleotide
tcagtttcaacattcggtgcttaataactg

SEQ ID NO: 317322 - DNA, 30 bp, Artificial Sequence
  Synthetic oligonucleotide
agatattatgttaaatgtagcacataactg

SEQ ID NO: 317323 - DNA, 30 bp, Artificial Sequence
  Synthetic oligonucleotide
ccttgtgactcaccatctctgctataactg

SEQ ID NO: 317324 - DNA, 30 bp, Artificial Sequence
  Synthetic oligonucleotide
cttagattgattcttttgaaattataactg

SEQ ID NO: 317325 - DNA, 30 bp, Artificial Sequence
  Synthetic oligonucleotide
cgtgattgagaaccacacaaaatctaactg

SEQ ID NO: 317326 - DNA, 30 bp, Artificial Sequence
  Synthetic oligonucleotide
ctcgcgtactctaatctacggtggtaactg

SEQ ID NO: 317327 - DNA, 30 bp, Artificial Sequence
  Synthetic oligonucleotide
cagtgggttttttaagtgaccgtgtaactg

SEQ ID NO: 317328 - DNA, 30 bp, Artificial Sequence
  Synthetic oligonucleotide
cgcagtttcaaataggttcttttgtaactg

SEQ ID NO: 317329 - DNA, 30 bp, Artificial Sequence
  Synthetic oligonucleotide
agtcggaagactttacaaggtagttaactg

SEQ ID NO: 317330 - DNA, 30 bp, Artificial Sequence
  Synthetic oligonucleotide
cgtaggtagtatttactcgccacaacactg

SEQ ID NO: 317331 - DNA, 30 bp, Artificial Sequence
  Synthetic oligonucleotide
ccgatacactcaacgggcgatagaacactg

SEQ ID NO: 317332 - DNA, 30 bp, Artificial Sequence
  Synthetic oligonucleotide
tgggcaaaattactggccagtcggacactg

SEQ ID NO: 317333 - DNA, 30 bp, Artificial Sequence
  Synthetic oligonucleotide
cacagactgagatgttcgatatggacactg

SEQ ID NO: 317334 - DNA, 30 bp, Artificial Sequence
  Synthetic oligonucleotide
tgcttccaccgagggatggtgacaccactg

SEQ ID NO: 317335 - DNA, 30 bp, Artificial Sequence
  Synthetic oligonucleotide
atagcggtgattatgaagggatccccactg

SEQ ID NO: 317336 - DNA, 30 bp, Artificial Sequence
  Synthetic oligonucleotide
ttccgtataaccggaataatctctccactg

SEQ ID NO: 317337 - DNA, 30 bp, Artificial Sequence
  Synthetic oligonucleotide
agagaatttgcctagaggagccttccactg

SEQ ID NO: 317338 - DNA, 30 bp, Artificial Sequence
  Synthetic oligonucleotide
ctttactagtgcacgcatagtaaagcactg

SEQ ID NO: 317339 - DNA, 30 bp, Artificial Sequence
  Synthetic oligonucleotide
atagctaagaatgctaatggccgggcactg

SEQ ID NO: 317340 - DNA, 30 bp, Artificial Sequence
  Synthetic oligonucleotide
tgttgcaggcttttgactattgtggcactg

SEQ ID NO: 317341 - DNA, 30 bp, Artificial Sequence
  Synthetic oligonucleotide
gtacgacagaacgtgctggcgtatgcactg

SEQ ID NO: 317342 - DNA, 30 bp, Artificial Sequence
  Synthetic oligonucleotide
ctcgtacgggggcgcaggaagtctgcactg

SEQ ID NO: 317343 - DNA, 30 bp, Artificial Sequence
  Synthetic oligonucleotide
gatggggcccgcaaatgcttcaaatcactg

SEQ ID NO: 317344 - DNA, 30 bp, Artificial Sequence
  Synthetic oligonucleotide
aactctaatcggagacctcgtagctcactg

SEQ ID NO: 317345 - DNA, 30 bp, Artificial Sequence
  Synthetic oligonucleotide
atgaaactggggccgccgttactctcactg

SEQ ID NO: 317346 - DNA, 30 bp, Artificial Sequence
  Synthetic oligonucleotide
gcaacgcaactctttgcagaaatgtcactg

SEQ ID NO: 317347 - DNA, 30 bp, Artificial Sequence
  Synthetic oligonucleotide
cagatggcatatgcaatacttggttcactg

SEQ ID NO: 317348 - DNA, 30 bp, Artificial Sequence
  Synthetic oligonucleotide
taagcctggtcaaccaaccgattttcactg

SEQ ID NO: 317349 - DNA, 30 bp, Artificial Sequence
  Synthetic oligonucleotide
gagtcagagcatccgcaaaagataagactg

SEQ ID NO: 317350 - DNA, 30 bp, Artificial Sequence
  Synthetic oligonucleotide
gcggcggaacagttttcaccaaagagactg

SEQ ID NO: 317351 - DNA, 30 bp, Artificial Sequence
  Synthetic oligonucleotide
ctccattgcttgcctattgtgactagactg

SEQ ID NO: 317352 - DNA, 30 bp, Artificial Sequence
  Synthetic oligonucleotide
gatctaccagcgaaagggcgatcgcgactg

SEQ ID NO: 317353 - DNA, 30 bp, Artificial Sequence
  Synthetic oligonucleotide
aggggcgctaggtggcctagtatcggactg

SEQ ID NO: 317354 - DNA, 31 bp, Artificial Sequence
  Synthetic oligonucleotide
ccccgcgtatgttcagtcttagtggggactg

SEQ ID NO: 317355 - DNA, 30 bp, Artificial Sequence
  Synthetic oligonucleotide
agcggctgggcgaagcgggaggtgggactg

SEQ ID NO: 317356 - DNA, 30 bp, Artificial Sequence
  Synthetic oligonucleotide
tatgtgagcctcctcccctaggtgggactg

SEQ ID NO: 317357 - DNA, 30 bp, Artificial Sequence
  Synthetic oligonucleotide
ccttggtgaacactttaccaccctggactg

SEQ ID NO: 317358 - DNA, 30 bp, Artificial Sequence
  Synthetic oligonucleotide
aagttttgacagaaggtaccaagatgactg

SEQ ID NO: 317359 - DNA, 30 bp, Artificial Sequence
  Synthetic oligonucleotide
ttctgattggcctccatttcaggctgactg

SEQ ID NO: 317360 - DNA, 30 bp, Artificial Sequence
  Synthetic oligonucleotide
tacgctccccggtgatactctttgtgactg

SEQ ID NO: 317361 - DNA, 30 bp, Artificial Sequence
  Synthetic oligonucleotide
cggagttaattagtaacggtggaaatactg

SEQ ID NO: 317362 - DNA, 30 bp, Artificial Sequence
  Synthetic oligonucleotide
gccgcacagatcgcgatccctggaatactg

SEQ ID NO: 317363 - DNA, 30 bp, Artificial Sequence
  Synthetic oligonucleotide
ctcatcttaagagtacagagcgagatactg

SEQ ID NO: 317364 - DNA, 30 bp, Artificial Sequence
  Synthetic oligonucleotide
tggtgttcatgacgcggagggtatatactg

SEQ ID NO: 317365 - DNA, 30 bp, Artificial Sequence
  Synthetic oligonucleotide
aaacggatgattgtatccgtgaccctactg

SEQ ID NO: 317366 - DNA, 30 bp, Artificial Sequence
  Synthetic oligonucleotide
catatgtaaagactataccgtctgctactg

SEQ ID NO: 317367 - DNA, 30 bp, Artificial Sequence
  Synthetic oligonucleotide
ttatcttcggtgacgtagtaattgctactg

SEQ ID NO: 317368 - DNA, 30 bp, Artificial Sequence
  Synthetic oligonucleotide
tgtccacggcgtgaacatagaactctactg

SEQ ID NO: 317369 - DNA, 30 bp, Artificial Sequence
  Synthetic oligonucleotide
cccttgaattctctaaggatttttctactg

SEQ ID NO: 317370 - DNA, 30 bp, Artificial Sequence
  Synthetic oligonucleotide
aaatatcagggttagtccgggcaagtactg

SEQ ID NO: 317371 - DNA, 30 bp, Artificial Sequence
  Synthetic oligonucleotide
tgtaggggatgcacactatttggggtactg

SEQ ID NO: 317372 - DNA, 30 bp, Artificial Sequence
  Synthetic oligonucleotide
aaaaccagaatcatttaaaaggtggtactg

SEQ ID NO: 317373 - DNA, 30 bp, Artificial Sequence
  Synthetic oligonucleotide
taagtcgacaaggtgggtcaagatgtactg

SEQ ID NO: 317374 - DNA, 30 bp, Artificial Sequence
  Synthetic oligonucleotide
tgtgccgtgttcctatgcattcgaaacctg

SEQ ID NO: 317375 - DNA, 30 bp, Artificial Sequence
  Synthetic oligonucleotide
aatatatgcagcgagggaaacataaacctg

SEQ ID NO: 317376 - DNA, 30 bp, Artificial Sequence
  Synthetic oligonucleotide
ggtctaagcggtatatctgttataaacctg

SEQ ID NO: 317377 - DNA, 30 bp, Artificial Sequence
  Synthetic oligonucleotide
ccgcgttatagacttgtttgggtaaacctg

SEQ ID NO: 317378 - DNA, 30 bp, Artificial Sequence
  Synthetic oligonucleotide
gactgttcacaacacgatggtcacaacctg

SEQ ID NO: 317379 - DNA, 30 bp, Artificial Sequence
  Synthetic oligonucleotide
tggcgaccgtgcggcgaagtccggaacctg

SEQ ID NO: 317380 - DNA, 30 bp, Artificial Sequence
  Synthetic oligonucleotide
aagtcaaagctggtttaaaacattaacctg

SEQ ID NO: 317381 - DNA, 30 bp, Artificial Sequence
  Synthetic oligonucleotide
aatgtacattctacagatggatagcacctg

SEQ ID NO: 317382 - DNA, 30 bp, Artificial Sequence
  Synthetic oligonucleotide
tcattgacttacacagcccaaatagacctg

SEQ ID NO: 317383 - DNA, 30 bp, Artificial Sequence
  Synthetic oligonucleotide
aaagtttcgctcagagtcgggttagacctg

SEQ ID NO: 317384 - DNA, 30 bp, Artificial Sequence
  Synthetic oligonucleotide
tcggagcgtacgcatacttctcaggacctg

SEQ ID NO: 317385 - DNA, 30 bp, Artificial Sequence
  Synthetic oligonucleotide
ttacgtcactgtgcatcgtggacggacctg

SEQ ID NO: 317386 - DNA, 30 bp, Artificial Sequence
  Synthetic oligonucleotide
ctcatcgttgaggatatgtctacatacctg

SEQ ID NO: 317387 - DNA, 30 bp, Artificial Sequence
  Synthetic oligonucleotide
tagagcctgttttaatggcctccctacctg

SEQ ID NO: 317388 - DNA, 30 bp, Artificial Sequence
  Synthetic oligonucleotide
gacttcggtccgacagctaggaattacctg

SEQ ID NO: 317389 - DNA, 30 bp, Artificial Sequence
  Synthetic oligonucleotide
gtggcgatggtcgcagtgaagctttacctg

SEQ ID NO: 317390 - DNA, 30 bp, Artificial Sequence
  Synthetic oligonucleotide
attcatcgtgtggatcgagcttcaaccctg

SEQ ID NO: 317391 - DNA, 30 bp, Artificial Sequence
  Synthetic oligonucleotide
actcgttcagtaatgacgtaaagaaccctg

SEQ ID NO: 317392 - DNA, 30 bp, Artificial Sequence
  Synthetic oligonucleotide
ggactacatggatagttacttgacaccctg

SEQ ID NO: 317393 - DNA, 30 bp, Artificial Sequence
  Synthetic oligonucleotide
gatggggggatctattaagcatccaccctg

SEQ ID NO: 317394 - DNA, 30 bp, Artificial Sequence
  Synthetic oligonucleotide
gccaatgtgtcacgtgcagtacggaccctg

SEQ ID NO: 317395 - DNA, 30 bp, Artificial Sequence
  Synthetic oligonucleotide
acgttcgtccagcttcgcgcagctaccctg

SEQ ID NO: 317396 - DNA, 30 bp, Artificial Sequence
  Synthetic oligonucleotide
ttgccgaccgactcggtagacgaacccctg

SEQ ID NO: 317397 - DNA, 30 bp, Artificial Sequence
  Synthetic oligonucleotide
gaaaactaaagagcgcgtttttcacccctg

SEQ ID NO: 317398 - DNA, 30 bp, Artificial Sequence
  Synthetic oligonucleotide
tgtcacacaaacacgcagaggacccccctg

SEQ ID NO: 317399 - DNA, 30 bp, Artificial Sequence
  Synthetic oligonucleotide
tgctcgcaccctgagttatggtctgccctg

SEQ ID NO: 317400 - DNA, 31 bp, Artificial Sequence
  Synthetic oligonucleotide
gggcgtctagtatagactgctcaaatccctg

SEQ ID NO: 317401 - DNA, 30 bp, Artificial Sequence
  Synthetic oligonucleotide
cattaacgatgctatgctcttgtgtccctg

SEQ ID NO: 317402 - DNA, 30 bp, Artificial Sequence
  Synthetic oligonucleotide
gttcaacaagaaaaatcgccgctcagcctg

SEQ ID NO: 317403 - DNA, 30 bp, Artificial Sequence
  Synthetic oligonucleotide
ttgcatcgaattctgtgatgcgtcagcctg

SEQ ID NO: 317404 - DNA, 30 bp, Artificial Sequence
  Synthetic oligonucleotide
tgtcctgagtcttagtaaatgtagagcctg

SEQ ID NO: 317405 - DNA, 30 bp, Artificial Sequence
  Synthetic oligonucleotide
gctcgtgcttcgtgtcggcacgctagcctg

SEQ ID NO: 317406 - DNA, 30 bp, Artificial Sequence
  Synthetic oligonucleotide
aaccaattgcttggactcacgagtagcctg

SEQ ID NO: 317407 - DNA, 30 bp, Artificial Sequence
  Synthetic oligonucleotide
caatacgctagtgcgcgcgactaacgcctg

SEQ ID NO: 317408 - DNA, 30 bp, Artificial Sequence
  Synthetic oligonucleotide
gggatgaacgtcatcaggaattaacgcctg

SEQ ID NO: 317409 - DNA, 30 bp, Artificial Sequence
  Synthetic oligonucleotide
gggcggactgcgttatgcttgacacgcctg

SEQ ID NO: 317410 - DNA, 30 bp, Artificial Sequence
  Synthetic oligonucleotide
gaacggagcgcggtagctaatttacgcctg

SEQ ID NO: 317411 - DNA, 30 bp, Artificial Sequence
  Synthetic oligonucleotide
cccatagttattagtacgttacttcgcctg

SEQ ID NO: 317412 - DNA, 30 bp, Artificial Sequence
  Synthetic oligonucleotide
ttgccatgagtgagtaagggctaaggcctg

SEQ ID NO: 317413 - DNA, 30 bp, Artificial Sequence
  Synthetic oligonucleotide
agtctttttagtatctggcattaaggcctg

SEQ ID NO: 317414 - DNA, 30 bp, Artificial Sequence
  Synthetic oligonucleotide
ggtagaggaggcggcagctgaccaggcctg

SEQ ID NO: 317415 - DNA, 30 bp, Artificial Sequence
  Synthetic oligonucleotide
tgaacagttggctatggaatcataggcctg

SEQ ID NO: 317416 - DNA, 30 bp, Artificial Sequence
  Synthetic oligonucleotide
tagcctctactatcatgatccgccggcctg

SEQ ID NO: 317417 - DNA, 30 bp, Artificial Sequence
  Synthetic oligonucleotide
acgtgggcatttcccagcatggagggcctg

SEQ ID NO: 317418 - DNA, 30 bp, Artificial Sequence
  Synthetic oligonucleotide
gtctaacgtctaacggatactcctggcctg

SEQ ID NO: 317419 - DNA, 30 bp, Artificial Sequence
  Synthetic oligonucleotide
ctcattcaatcggaagggcagacatgcctg

SEQ ID NO: 317420 - DNA, 30 bp, Artificial Sequence
  Synthetic oligonucleotide
tcttctgagcgaactgttcggacgtgcctg

SEQ ID NO: 317421 - DNA, 30 bp, Artificial Sequence
  Synthetic oligonucleotide
tggggcatgatctaggtagtcgtttgcctg

SEQ ID NO: 317422 - DNA, 30 bp, Artificial Sequence
  Synthetic oligonucleotide
ataggtaaagagactcggaacgcaatcctg

SEQ ID NO: 317423 - DNA, 30 bp, Artificial Sequence
  Synthetic oligonucleotide
tcctagtcaactgcgacaagggcaatcctg

SEQ ID NO: 317424 - DNA, 30 bp, Artificial Sequence
  Synthetic oligonucleotide
ttgagtgccttacctcgcggattaatcctg

SEQ ID NO: 317425 - DNA, 30 bp, Artificial Sequence
  Synthetic oligonucleotide
ccctataactttaacaaaggtcacatcctg

SEQ ID NO: 317426 - DNA, 30 bp, Artificial Sequence
  Synthetic oligonucleotide
accggtgttgtatgaataaaggatatcctg

SEQ ID NO: 317427 - DNA, 30 bp, Artificial Sequence
  Synthetic oligonucleotide
ccggacttctaacttctacattttatcctg

SEQ ID NO: 317428 - DNA, 30 bp, Artificial Sequence
  Synthetic oligonucleotide
aataagttgcctccttgttaacgcctcctg

SEQ ID NO: 317429 - DNA, 30 bp, Artificial Sequence
  Synthetic oligonucleotide
gaagttcttgtaatgtaatcgttcctcctg

SEQ ID NO: 317430 - DNA, 30 bp, Artificial Sequence
  Synthetic oligonucleotide
tcctagcacctgctattacagattctcctg

SEQ ID NO: 317431 - DNA, 30 bp, Artificial Sequence
  Synthetic oligonucleotide
tatcacaaacttctaggattggaggtcctg

SEQ ID NO: 317432 - DNA, 30 bp, Artificial Sequence
  Synthetic oligonucleotide
ctcagcgagagtcagatattgaaattcctg

SEQ ID NO: 317433 - DNA, 30 bp, Artificial Sequence
  Synthetic oligonucleotide
acaaagcgtcttgtatgtaggagcttcctg

SEQ ID NO: 317434 - DNA, 30 bp, Artificial Sequence
  Synthetic oligonucleotide
tatacttacattgctggcccaaggttcctg

SEQ ID NO: 317435 - DNA, 30 bp, Artificial Sequence
  Synthetic oligonucleotide
agcggccccggccaaacttcatggttcctg

SEQ ID NO: 317436 - DNA, 30 bp, Artificial Sequence
  Synthetic oligonucleotide
atgccaccgggggggtacggcgatttcctg

SEQ ID NO: 317437 - DNA, 30 bp, Artificial Sequence
  Synthetic oligonucleotide
tgtgcaattctcaatatatcacctttcctg

SEQ ID NO: 317438 - DNA, 30 bp, Artificial Sequence
  Synthetic oligonucleotide
ttcgcctgtctttgtaaggcgacaaagctg

SEQ ID NO: 317439 - DNA, 30 bp, Artificial Sequence
  Synthetic oligonucleotide
aaaagccaccggacaatcggatcaaagctg

SEQ ID NO: 317440 - DNA, 30 bp, Artificial Sequence
  Synthetic oligonucleotide
caattaggcgttccttgagggcgaaagctg

SEQ ID NO: 317441 - DNA, 30 bp, Artificial Sequence
  Synthetic oligonucleotide
tggctcttcactcttaaaagtggaaagctg

SEQ ID NO: 317442 - DNA, 30 bp, Artificial Sequence
  Synthetic oligonucleotide
accaagacggaagttcaccaattaaagctg

SEQ ID NO: 317443 - DNA, 30 bp, Artificial Sequence
  Synthetic oligonucleotide
cacctgcatagagctataatggttaagctg

SEQ ID NO: 317444 - DNA, 30 bp, Artificial Sequence
  Synthetic oligonucleotide
gactattgggggatgcgggcaggccagctg

SEQ ID NO: 317445 - DNA, 30 bp, Artificial Sequence
  Synthetic oligonucleotide
cgggacgtttgacgtgaacagggccagctg

SEQ ID NO: 317446 - DNA, 30 bp, Artificial Sequence
  Synthetic oligonucleotide
cgcggtggatagaattcagactgccagctg

SEQ ID NO: 317447 - DNA, 30 bp, Artificial Sequence
  Synthetic oligonucleotide
attcagcttgttattctctcctagcagctg

SEQ ID NO: 317448 - DNA, 30 bp, Artificial Sequence
  Synthetic oligonucleotide
gaacggcacgctaaaccgtgcgggcagctg

SEQ ID NO: 317449 - DNA, 30 bp, Artificial Sequence
  Synthetic oligonucleotide
acgcgtgaatcagtacatcctgggcagctg

SEQ ID NO: 317450 - DNA, 30 bp, Artificial Sequence
  Synthetic oligonucleotide
aaccgtcttattacggcacgcagagagctg

SEQ ID NO: 317451 - DNA, 30 bp, Artificial Sequence
  Synthetic oligonucleotide
agaaaattgcgtatgacggagtaggagctg

SEQ ID NO: 317452 - DNA, 30 bp, Artificial Sequence
  Synthetic oligonucleotide
agttcatgacgattgcagggtatatagctg

SEQ ID NO: 317453 - DNA, 30 bp, Artificial Sequence
  Synthetic oligonucleotide
actcagggcacacagcctctatacacgctg

SEQ ID NO: 317454 - DNA, 30 bp, Artificial Sequence
  Synthetic oligonucleotide
ccatctcctatgatgagctacagtacgctg

SEQ ID NO: 317455 - DNA, 30 bp, Artificial Sequence
  Synthetic oligonucleotide
aacacgggacctcaggaactcattacgctg

SEQ ID NO: 317456 - DNA, 30 bp, Artificial Sequence
  Synthetic oligonucleotide
tgcgcttccacttggtttcaaggaccgctg

SEQ ID NO: 317457 - DNA, 31 bp, Artificial Sequence
  Synthetic oligonucleotide
cggtcagattataactggtgcggggccgctg

SEQ ID NO: 317458 - DNA, 30 bp, Artificial Sequence
  Synthetic oligonucleotide
aaggagctatcattagatacctctccgctg

SEQ ID NO: 317459 - DNA, 30 bp, Artificial Sequence
  Synthetic oligonucleotide
cggtcgcagaacctgcaacctcttccgctg

SEQ ID NO: 317460 - DNA, 30 bp, Artificial Sequence
  Synthetic oligonucleotide
tcttgtgccatttgagttacttgagcgctg

SEQ ID NO: 317461 - DNA, 30 bp, Artificial Sequence
  Synthetic oligonucleotide
ggccatgtggtagaactgtacttcgcgctg

SEQ ID NO: 317462 - DNA, 30 bp, Artificial Sequence
  Synthetic oligonucleotide
caaaaacgcaatgggcgactcggggcgctg

SEQ ID NO: 317463 - DNA, 30 bp, Artificial Sequence
  Synthetic oligonucleotide
gtgttcctaaaaggtctggaagatgcgctg

SEQ ID NO: 317464 - DNA, 30 bp, Artificial Sequence
  Synthetic oligonucleotide
ggcatgtagttacacgtcgacgaatcgctg

SEQ ID NO: 317465 - DNA, 30 bp, Artificial Sequence
  Synthetic oligonucleotide
aagatccacgcatgggactctgtgtcgctg

SEQ ID NO: 317466 - DNA, 30 bp, Artificial Sequence
  Synthetic oligonucleotide
tggccgctcatgttaagctgaggttcgctg

SEQ ID NO: 317467 - DNA, 30 bp, Artificial Sequence
  Synthetic oligonucleotide
ggccttgtacataagaggaaaggacggctg

SEQ ID NO: 317468 - DNA, 30 bp, Artificial Sequence
  Synthetic oligonucleotide
acgcctggtaaagaattataaggacggctg

SEQ ID NO: 317469 - DNA, 30 bp, Artificial Sequence
  Synthetic oligonucleotide
agtctgggctcgccgttcctacaccggctg

SEQ ID NO: 317470 - DNA, 30 bp, Artificial Sequence
  Synthetic oligonucleotide
atggcgacggttcatgctacagcccggctg

SEQ ID NO: 317471 - DNA, 30 bp, Artificial Sequence
  Synthetic oligonucleotide
gatagtgcgcagatttctgtgtcgcggctg

SEQ ID NO: 317472 - DNA, 30 bp, Artificial Sequence
  Synthetic oligonucleotide
tttgaccctgtcgatataaacgatcggctg

SEQ ID NO: 317473 - DNA, 30 bp, Artificial Sequence
  Synthetic oligonucleotide
cgccggccaacaaattgtagagttcggctg

SEQ ID NO: 317474 - DNA, 29 bp, Artificial Sequence
  Synthetic oligonucleotide
ataggacttacttttcttgtcaagggctg

SEQ ID NO: 317475 - DNA, 30 bp, Artificial Sequence
  Synthetic oligonucleotide
gtaaggctgggaactctattatcggggctg

SEQ ID NO: 317476 - DNA, 30 bp, Artificial Sequence
  Synthetic oligonucleotide
acgtatatggacgcttgctcatctgggctg

SEQ ID NO: 317477 - DNA, 30 bp, Artificial Sequence
  Synthetic oligonucleotide
atctagactggtgcaaccatccaatggctg

SEQ ID NO: 317478 - DNA, 30 bp, Artificial Sequence
  Synthetic oligonucleotide
ctggagtgggccaatgcagaggactggctg

SEQ ID NO: 317479 - DNA, 30 bp, Artificial Sequence
  Synthetic oligonucleotide
gggattgggcaaccggtgtgcacgtggctg

SEQ ID NO: 317480 - DNA, 30 bp, Artificial Sequence
  Synthetic oligonucleotide
gacgcgtggcaaagcacattatgttggctg

SEQ ID NO: 317481 - DNA, 30 bp, Artificial Sequence
  Synthetic oligonucleotide
gaaatggcgcccgacaaagcgtgttggctg

SEQ ID NO: 317482 - DNA, 30 bp, Artificial Sequence
  Synthetic oligonucleotide
gggtctggatgaagtaattaagcaatgctg

SEQ ID NO: 317483 - DNA, 30 bp, Artificial Sequence
  Synthetic oligonucleotide
ttcaataagaggaattcgggggcaatgctg

SEQ ID NO: 317484 - DNA, 30 bp, Artificial Sequence
  Synthetic oligonucleotide
gttcgcaatacaccgagacgccacatgctg

SEQ ID NO: 317485 - DNA, 30 bp, Artificial Sequence
  Synthetic oligonucleotide
ctcgtctgtgtaccgaatggattcatgctg

SEQ ID NO: 317486 - DNA, 30 bp, Artificial Sequence
  Synthetic oligonucleotide
tgcaaagaagacgaaagaacgcagatgctg

SEQ ID NO: 317487 - DNA, 30 bp, Artificial Sequence
  Synthetic oligonucleotide
agtttacgccaggattctcaaacgatgctg

SEQ ID NO: 317488 - DNA, 30 bp, Artificial Sequence
  Synthetic oligonucleotide
tcacattgcaactcgtacactatgatgctg

SEQ ID NO: 317489 - DNA, 30 bp, Artificial Sequence
  Synthetic oligonucleotide
cccactattcgtggatgtgattaactgctg

SEQ ID NO: 317490 - DNA, 30 bp, Artificial Sequence
  Synthetic oligonucleotide
agggttagtatcccgagccagttactgctg

SEQ ID NO: 317491 - DNA, 30 bp, Artificial Sequence
  Synthetic oligonucleotide
tttaataaaggttggattaagtctctgctg

SEQ ID NO: 317492 - DNA, 30 bp, Artificial Sequence
  Synthetic oligonucleotide
gtccgcaattttccacattggttcgtgctg

SEQ ID NO: 317493 - DNA, 30 bp, Artificial Sequence
  Synthetic oligonucleotide
tcattgtacttgtatcgtatgtgggtgctg

SEQ ID NO: 317494 - DNA, 30 bp, Artificial Sequence
  Synthetic oligonucleotide
tacgtaactgtgttttagttgatggtgctg

SEQ ID NO: 317495 - DNA, 30 bp, Artificial Sequence
  Synthetic oligonucleotide
caaccgtgtgctagtcaaaaatttgtgctg

SEQ ID NO: 317496 - DNA, 30 bp, Artificial Sequence
  Synthetic oligonucleotide
gtgacggttcttacgtgtcatatattgctg

SEQ ID NO: 317497 - DNA, 30 bp, Artificial Sequence
  Synthetic oligonucleotide
cttccaccgtatatatagctgtgcttgctg

SEQ ID NO: 317498 - DNA, 30 bp, Artificial Sequence
  Synthetic oligonucleotide
atgtcctcaagtgttgcttagctcttgctg

SEQ ID NO: 317499 - DNA, 30 bp, Artificial Sequence
  Synthetic oligonucleotide
tgcgacagcgagcattcccgcttcttgctg

SEQ ID NO: 317500 - DNA, 27 bp, Artificial Sequence
  Synthetic oligonucleotide
atactcggggtctagcggaagttgctg

SEQ ID NO: 317501 - DNA, 30 bp, Artificial Sequence
  Synthetic oligonucleotide
gtcggattggtaaggccattttatttgctg

SEQ ID NO: 317502 - DNA, 29 bp, Artificial Sequence
  Synthetic oligonucleotide
gagtggagccggaatgttcgcaaaatctg

SEQ ID NO: 317503 - DNA, 30 bp, Artificial Sequence
  Synthetic oligonucleotide
tttgtacgtattgattaccggggaaatctg

SEQ ID NO: 317504 - DNA, 30 bp, Artificial Sequence
  Synthetic oligonucleotide
gttgttacactgtccgcacccggtaatctg

SEQ ID NO: 317505 - DNA, 30 bp, Artificial Sequence
  Synthetic oligonucleotide
ggttttgggtcttgatgtatgaaacatctg

SEQ ID NO: 317506 - DNA, 30 bp, Artificial Sequence
  Synthetic oligonucleotide
tcacggttatgaagcgttggaagacatctg

SEQ ID NO: 317507 - DNA, 30 bp, Artificial Sequence
  Synthetic oligonucleotide
tttaccgatccgtgagggaagagacatctg

SEQ ID NO: 317508 - DNA, 30 bp, Artificial Sequence
  Synthetic oligonucleotide
cccaagttccatatggagcaaccccatctg

SEQ ID NO: 317509 - DNA, 30 bp, Artificial Sequence
  Synthetic oligonucleotide
ccggcagcagctaggtctaggtcccatctg

SEQ ID NO: 317510 - DNA, 30 bp, Artificial Sequence
  Synthetic oligonucleotide
agtattaaagtgaaatctctttccgatctg

SEQ ID NO: 317511 - DNA, 30 bp, Artificial Sequence
  Synthetic oligonucleotide
ggaatcacacttatatggacgtgatatctg

SEQ ID NO: 317512 - DNA, 30 bp, Artificial Sequence
  Synthetic oligonucleotide
cgagcatcggcgtgagacgcccagtatctg

SEQ ID NO: 317513 - DNA, 30 bp, Artificial Sequence
  Synthetic oligonucleotide
tagtctcaatgtgcccgggctacgtatctg

SEQ ID NO: 317514 - DNA, 30 bp, Artificial Sequence
  Synthetic oligonucleotide
ggcatagactcgcgtctgcaccattatctg

SEQ ID NO: 317515 - DNA, 30 bp, Artificial Sequence
  Synthetic oligonucleotide
ttagttctatgggatcaacttgtttatctg

SEQ ID NO: 317516 - DNA, 30 bp, Artificial Sequence
  Synthetic oligonucleotide
ttacctaggctgggtcgagggcaaactctg

SEQ ID NO: 317517 - DNA, 30 bp, Artificial Sequence
  Synthetic oligonucleotide
atcacgctacgggggagcaatcgcactctg

SEQ ID NO: 317518 - DNA, 30 bp, Artificial Sequence
  Synthetic oligonucleotide
atgcatcgcggacaagccaggttcactctg

SEQ ID NO: 317519 - DNA, 30 bp, Artificial Sequence
  Synthetic oligonucleotide
aagccccggttgcagagctcaccgactctg

SEQ ID NO: 317520 - DNA, 30 bp, Artificial Sequence
  Synthetic oligonucleotide
agcttcttgggggtgtaaggcaggactctg

SEQ ID NO: 317521 - DNA, 30 bp, Artificial Sequence
  Synthetic oligonucleotide
tcgcagactgtaagggagtgtgatactctg

SEQ ID NO: 317522 - DNA, 30 bp, Artificial Sequence
  Synthetic oligonucleotide
agtaattttgggtaattagacccccctctg

SEQ ID NO: 317523 - DNA, 30 bp, Artificial Sequence
  Synthetic oligonucleotide
ggtaatggggggaggtaactagcccctctg

SEQ ID NO: 317524 - DNA, 30 bp, Artificial Sequence
  Synthetic oligonucleotide
tagctcgaggtaacacgatgcggccctctg

SEQ ID NO: 317525 - DNA, 30 bp, Artificial Sequence
  Synthetic oligonucleotide
gatttgggataccacctatgcgttcctctg

SEQ ID NO: 317526 - DNA, 30 bp, Artificial Sequence
  Synthetic oligonucleotide
gggtctaacaccagcaggggcgaagctctg

SEQ ID NO: 317527 - DNA, 30 bp, Artificial Sequence
  Synthetic oligonucleotide
catgatgcaggtagccgtgtgggagctctg

SEQ ID NO: 317528 - DNA, 30 bp, Artificial Sequence
  Synthetic oligonucleotide
ctaccgcgcagcgaggaatagttggctctg

SEQ ID NO: 317529 - DNA, 30 bp, Artificial Sequence
  Synthetic oligonucleotide
ttaactgaaaaatcaagttcaaactctctg

SEQ ID NO: 317530 - DNA, 30 bp, Artificial Sequence
  Synthetic oligonucleotide
gcgttggatccctcaacaaacacctctctg

SEQ ID NO: 317531 - DNA, 30 bp, Artificial Sequence
  Synthetic oligonucleotide
ttagcatagggtcatgcataggcctctctg

SEQ ID NO: 317532 - DNA, 30 bp, Artificial Sequence
  Synthetic oligonucleotide
gtaatcgccaccgttagctcagagtctctg

SEQ ID NO: 317533 - DNA, 30 bp, Artificial Sequence
  Synthetic oligonucleotide
acagggcctagacccaggacgagttctctg

SEQ ID NO: 317534 - DNA, 30 bp, Artificial Sequence
  Synthetic oligonucleotide
gaacgctgatgagtagcttcccgttctctg

SEQ ID NO: 317535 - DNA, 30 bp, Artificial Sequence
  Synthetic oligonucleotide
agtgtgagctttccgaaagttgcaagtctg

SEQ ID NO: 317536 - DNA, 30 bp, Artificial Sequence
  Synthetic oligonucleotide
gtgctctcccgccgcgagcggataagtctg

SEQ ID NO: 317537 - DNA, 30 bp, Artificial Sequence
  Synthetic oligonucleotide
gcgagacaaccacttcggtagcttagtctg

SEQ ID NO: 317538 - DNA, 30 bp, Artificial Sequence
  Synthetic oligonucleotide
gaagtccactaagttaggcccctccgtctg

SEQ ID NO: 317539 - DNA, 30 bp, Artificial Sequence
  Synthetic oligonucleotide
cggactgtcgaatcgaatgagacaggtctg

SEQ ID NO: 317540 - DNA, 30 bp, Artificial Sequence
  Synthetic oligonucleotide
tataggtcgggttaagtccctggaggtctg

SEQ ID NO: 317541 - DNA, 30 bp, Artificial Sequence
  Synthetic oligonucleotide
tacgtctgaatttaggtattgtacggtctg

SEQ ID NO: 317542 - DNA, 30 bp, Artificial Sequence
  Synthetic oligonucleotide
tggggcaccatcgcgccaacaagcggtctg

SEQ ID NO: 317543 - DNA, 30 bp, Artificial Sequence
  Synthetic oligonucleotide
tgccccggcgtgagagttgacatcggtctg

SEQ ID NO: 317544 - DNA, 30 bp, Artificial Sequence
  Synthetic oligonucleotide
gaaaggtcatcaagttgttgtgtcggtctg

SEQ ID NO: 317545 - DNA, 30 bp, Artificial Sequence
  Synthetic oligonucleotide
cgttcgcggattaaaggccttcagggtctg

SEQ ID NO: 317546 - DNA, 30 bp, Artificial Sequence
  Synthetic oligonucleotide
ctgggtaaagaacgcttttgtgatggtctg

SEQ ID NO: 317547 - DNA, 30 bp, Artificial Sequence
  Synthetic oligonucleotide
gtcgaaggtacatcaaacacctctggtctg

SEQ ID NO: 317548 - DNA, 30 bp, Artificial Sequence
  Synthetic oligonucleotide
ccgttgattgatgtgcagacgcaatgtctg

SEQ ID NO: 317549 - DNA, 30 bp, Artificial Sequence
  Synthetic oligonucleotide
cgactccagcagcgttcagtggaatgtctg

SEQ ID NO: 317550 - DNA, 30 bp, Artificial Sequence
  Synthetic oligonucleotide
atccagggtacagcacatgagctatgtctg

SEQ ID NO: 317551 - DNA, 30 bp, Artificial Sequence
  Synthetic oligonucleotide
atgtagccatacgagcgcaatgactgtctg

SEQ ID NO: 317552 - DNA, 30 bp, Artificial Sequence
  Synthetic oligonucleotide
ctatgatactcggagcgagcaacctgtctg

SEQ ID NO: 317553 - DNA, 30 bp, Artificial Sequence
  Synthetic oligonucleotide
aagagatggggtgaaccggaaacttgtctg

SEQ ID NO: 317554 - DNA, 30 bp, Artificial Sequence
  Synthetic oligonucleotide
ggattcgcgggtacggggagtttttgtctg

SEQ ID NO: 317555 - DNA, 30 bp, Artificial Sequence
  Synthetic oligonucleotide
aatgcggtgcctaggtgacgctaaattctg

SEQ ID NO: 317556 - DNA, 30 bp, Artificial Sequence
  Synthetic oligonucleotide
ggcgaagatgttatgtgagatttaattctg

SEQ ID NO: 317557 - DNA, 30 bp, Artificial Sequence
  Synthetic oligonucleotide
gcagaacagtagactctaatagtgattctg

SEQ ID NO: 317558 - DNA, 30 bp, Artificial Sequence
  Synthetic oligonucleotide
gaagcaataaaaggcatataaactattctg

SEQ ID NO: 317559 - DNA, 30 bp, Artificial Sequence
  Synthetic oligonucleotide
taaggagcccgattcaccaaatgtattctg

SEQ ID NO: 317560 - DNA, 30 bp, Artificial Sequence
  Synthetic oligonucleotide
gtaggcaacctgatgtattgaattattctg

SEQ ID NO: 317561 - DNA, 30 bp, Artificial Sequence
  Synthetic oligonucleotide
cgacttcagcgggacacatttacacttctg

SEQ ID NO: 317562 - DNA, 30 bp, Artificial Sequence
  Synthetic oligonucleotide
gccagaatacactgttcaagattacttctg

SEQ ID NO: 317563 - DNA, 30 bp, Artificial Sequence
  Synthetic oligonucleotide
tcacgcgaagtcccttacagatgccttctg

SEQ ID NO: 317564 - DNA, 30 bp, Artificial Sequence
  Synthetic oligonucleotide
aaccagggacaaggtgtcagcgatcttctg

SEQ ID NO: 317565 - DNA, 30 bp, Artificial Sequence
  Synthetic oligonucleotide
taccctgaggccatgtgacacgttcttctg

SEQ ID NO: 317566 - DNA, 30 bp, Artificial Sequence
  Synthetic oligonucleotide
ggattcacgatgtatcataagatagttctg

SEQ ID NO: 317567 - DNA, 30 bp, Artificial Sequence
  Synthetic oligonucleotide
cgtagaaatcgttttcaaatgttagttctg

SEQ ID NO: 317568 - DNA, 30 bp, Artificial Sequence
  Synthetic oligonucleotide
ttggacaaaagtgttgaggtagtcgttctg

SEQ ID NO: 317569 - DNA, 30 bp, Artificial Sequence
  Synthetic oligonucleotide
tggaggcacattaccgaatactaggttctg

SEQ ID NO: 317570 - DNA, 30 bp, Artificial Sequence
  Synthetic oligonucleotide
attctcacctattcgtcttcatgggttctg

SEQ ID NO: 317571 - DNA, 30 bp, Artificial Sequence
  Synthetic oligonucleotide
taagaaactctatccatcaggggtgttctg

SEQ ID NO: 317572 - DNA, 30 bp, Artificial Sequence
  Synthetic oligonucleotide
agttagttggtagtatgtcagtgatttctg

SEQ ID NO: 317573 - DNA, 30 bp, Artificial Sequence
  Synthetic oligonucleotide
agtcccaatatctacccacgtatatttctg

SEQ ID NO: 317574 - DNA, 30 bp, Artificial Sequence
  Synthetic oligonucleotide
aacagtgttcaacgtacttgatattttctg

SEQ ID NO: 317575 - DNA, 30 bp, Artificial Sequence
  Synthetic oligonucleotide
atacgattatgatggtgtacgtcaaaagtg

SEQ ID NO: 317576 - DNA, 30 bp, Artificial Sequence
  Synthetic oligonucleotide
tatggccgggaatctcatcttgacaaagtg

SEQ ID NO: 317577 - DNA, 30 bp, Artificial Sequence
  Synthetic oligonucleotide
atagtgccaacccgctgtccttcgaaagtg

SEQ ID NO: 317578 - DNA, 30 bp, Artificial Sequence
  Synthetic oligonucleotide
cattatggcaggcggccaggtgggaaagtg

SEQ ID NO: 317579 - DNA, 30 bp, Artificial Sequence
  Synthetic oligonucleotide
tgtgtatctgtggcgtcccgcctgaaagtg

SEQ ID NO: 317580 - DNA, 30 bp, Artificial Sequence
  Synthetic oligonucleotide
tttgtacgtttatggtaggggtttaaagtg

SEQ ID NO: 317581 - DNA, 30 bp, Artificial Sequence
  Synthetic oligonucleotide
ctgtgcatatgatctttaggacgccaagtg

SEQ ID NO: 317582 - DNA, 30 bp, Artificial Sequence
  Synthetic oligonucleotide
ttaggcttatcgactggcgacaagcaagtg

SEQ ID NO: 317583 - DNA, 30 bp, Artificial Sequence
  Synthetic oligonucleotide
tgtaggacgcctcataaaggaacgcaagtg

SEQ ID NO: 317584 - DNA, 30 bp, Artificial Sequence
  Synthetic oligonucleotide
agcttcttaatcgtggcgaaacgtcaagtg

SEQ ID NO: 317585 - DNA, 30 bp, Artificial Sequence
  Synthetic oligonucleotide
gcacgaggattgcgccaggaatttcaagtg

SEQ ID NO: 317586 - DNA, 30 bp, Artificial Sequence
  Synthetic oligonucleotide
caactgttggggtagtatttacaagaagtg

SEQ ID NO: 317587 - DNA, 30 bp, Artificial Sequence
  Synthetic oligonucleotide
ggccttatatgggaagaagcgcgagaagtg

SEQ ID NO: 317588 - DNA, 30 bp, Artificial Sequence
  Synthetic oligonucleotide
tagggtgtaaatgtgtgaggtatcgaagtg

SEQ ID NO: 317589 - DNA, 30 bp, Artificial Sequence
  Synthetic oligonucleotide
ttcgattatgtttcgcacaatgtggaagtg

SEQ ID NO: 317590 - DNA, 30 bp, Artificial Sequence
  Synthetic oligonucleotide
cacggtcttgtagtgggtagatcataagtg

SEQ ID NO: 317591 - DNA, 30 bp, Artificial Sequence
  Synthetic oligonucleotide
tgttctttcattaaagccatgtgataagtg

SEQ ID NO: 317592 - DNA, 30 bp, Artificial Sequence
  Synthetic oligonucleotide
agaccagacgtaatcctcagacactaagtg

SEQ ID NO: 317593 - DNA, 30 bp, Artificial Sequence
  Synthetic oligonucleotide
cagccgagacttcggcaggtaatctaagtg

SEQ ID NO: 317594 - DNA, 30 bp, Artificial Sequence
  Synthetic oligonucleotide
ttatattgtagtgccccacgcacttaagtg

SEQ ID NO: 317595 - DNA, 30 bp, Artificial Sequence
  Synthetic oligonucleotide
gataggttagtagtacttgtgtcttaagtg

SEQ ID NO: 317596 - DNA, 30 bp, Artificial Sequence
  Synthetic oligonucleotide
acaaactaaaactcgtcaagaggttaagtg

SEQ ID NO: 317597 - DNA, 30 bp, Artificial Sequence
  Synthetic oligonucleotide
ttgtatatcaacaccattcggcaaacagtg

SEQ ID NO: 317598 - DNA, 30 bp, Artificial Sequence
  Synthetic oligonucleotide
attctactcagcgatagagtttcgacagtg

SEQ ID NO: 317599 - DNA, 30 bp, Artificial Sequence
  Synthetic oligonucleotide
ttgttcacggactcggattcctctacagtg

SEQ ID NO: 317600 - DNA, 30 bp, Artificial Sequence
  Synthetic oligonucleotide
attgccattaacatagctccgtctacagtg

SEQ ID NO: 317601 - DNA, 30 bp, Artificial Sequence
  Synthetic oligonucleotide
gctcaattgcggttcgccggcgcgccagtg

SEQ ID NO: 317602 - DNA, 30 bp, Artificial Sequence
  Synthetic oligonucleotide
agccactgggtgagcttaaaggaagcagtg

SEQ ID NO: 317603 - DNA, 30 bp, Artificial Sequence
  Synthetic oligonucleotide
gaaactaaaacgcttcgggaccccgcagtg

SEQ ID NO: 317604 - DNA, 30 bp, Artificial Sequence
  Synthetic oligonucleotide
acacactctcggcgcagtagtcccgcagtg

SEQ ID NO: 317605 - DNA, 30 bp, Artificial Sequence
  Synthetic oligonucleotide
atgacttcagcctccatttacgaggcagtg

SEQ ID NO: 317606 - DNA, 30 bp, Artificial Sequence
  Synthetic oligonucleotide
ggattcctctaattaatgcgagttgcagtg

SEQ ID NO: 317607 - DNA, 30 bp, Artificial Sequence
  Synthetic oligonucleotide
aatgttcctgttacaacggcacaatcagtg

SEQ ID NO: 317608 - DNA, 30 bp, Artificial Sequence
  Synthetic oligonucleotide
agtacctcggactgggtgtatcaaagagtg

SEQ ID NO: 317609 - DNA, 30 bp, Artificial Sequence
  Synthetic oligonucleotide
cggcagacgcattcttcatatcggagagtg

SEQ ID NO: 317610 - DNA, 30 bp, Artificial Sequence
  Synthetic oligonucleotide
tccgaaatcctttgcgtgtactcacgagtg

SEQ ID NO: 317611 - DNA, 30 bp, Artificial Sequence
  Synthetic oligonucleotide
ctagcttaatgcgggcgtctactacgagtg

SEQ ID NO: 317612 - DNA, 30 bp, Artificial Sequence
  Synthetic oligonucleotide
tacctagaacatcattctaagcttcgagtg

SEQ ID NO: 317613 - DNA, 30 bp, Artificial Sequence
  Synthetic oligonucleotide
ctattataaataattggtatctgcggagtg

SEQ ID NO: 317614 - DNA, 30 bp, Artificial Sequence
  Synthetic oligonucleotide
aatattttaatctgtgggatgagtggagtg

SEQ ID NO: 317615 - DNA, 30 bp, Artificial Sequence
  Synthetic oligonucleotide
cgtttcgcactctgcactttagcatgagtg

SEQ ID NO: 317616 - DNA, 30 bp, Artificial Sequence
  Synthetic oligonucleotide
tgatacagtatgtcggtgggttcatgagtg

SEQ ID NO: 317617 - DNA, 30 bp, Artificial Sequence
  Synthetic oligonucleotide
gacccccaccgatcagtcccgtgatgagtg

SEQ ID NO: 317618 - DNA, 30 bp, Artificial Sequence
  Synthetic oligonucleotide
gtcaaacgagaaaaggcttttttgtgagtg

SEQ ID NO: 317619 - DNA, 30 bp, Artificial Sequence
  Synthetic oligonucleotide
gcgccgtaaagcacgtttaccaattgagtg

SEQ ID NO: 317620 - DNA, 30 bp, Artificial Sequence
  Synthetic oligonucleotide
taatgagtgtctcaggccggaccttgagtg

SEQ ID NO: 317621 - DNA, 30 bp, Artificial Sequence
  Synthetic oligonucleotide
taaatattctcaaagttcatccaaatagtg

SEQ ID NO: 317622 - DNA, 30 bp, Artificial Sequence
  Synthetic oligonucleotide
ggctctgggatacccgaatacacaatagtg

SEQ ID NO: 317623 - DNA, 30 bp, Artificial Sequence
  Synthetic oligonucleotide
attgcaatgcgtattggcgacagcatagtg

SEQ ID NO: 317624 - DNA, 30 bp, Artificial Sequence
  Synthetic oligonucleotide
gtatacgatgaacgtctacgaacactagtg

SEQ ID NO: 317625 - DNA, 30 bp, Artificial Sequence
  Synthetic oligonucleotide
taacgggtaagggacgtggcaatcctagtg

SEQ ID NO: 317626 - DNA, 30 bp, Artificial Sequence
  Synthetic oligonucleotide
ggctctttatataccgactagaagctagtg

SEQ ID NO: 317627 - DNA, 30 bp, Artificial Sequence
  Synthetic oligonucleotide
ggcatcgtagccaccactattgatctagtg

SEQ ID NO: 317628 - DNA, 30 bp, Artificial Sequence
  Synthetic oligonucleotide
tagagtctgacgtcgtattcgatcgtagtg

SEQ ID NO: 317629 - DNA, 30 bp, Artificial Sequence
  Synthetic oligonucleotide
atactatccctagacgggtcactcgtagtg

SEQ ID NO: 317630 - DNA, 30 bp, Artificial Sequence
  Synthetic oligonucleotide
tgacgcaaatgaaagtaggtccaggtagtg

SEQ ID NO: 317631 - DNA, 30 bp, Artificial Sequence
  Synthetic oligonucleotide
tccacgtggtttttgataacggaggtagtg

SEQ ID NO: 317632 - DNA, 30 bp, Artificial Sequence
  Synthetic oligonucleotide
taggcggtaagcactcagcttgtggtagtg

SEQ ID NO: 317633 - DNA, 30 bp, Artificial Sequence
  Synthetic oligonucleotide
ctatatgggcgatggtaagtgtttgtagtg

SEQ ID NO: 317634 - DNA, 30 bp, Artificial Sequence
  Synthetic oligonucleotide
gtcgaagggaattatcattttccattagtg

SEQ ID NO: 317635 - DNA, 30 bp, Artificial Sequence
  Synthetic oligonucleotide
taaatagtttaacaaccacgatgattagtg

SEQ ID NO: 317636 - DNA, 30 bp, Artificial Sequence
  Synthetic oligonucleotide
tgcacgaatcgttttagcatggtattagtg

SEQ ID NO: 317637 - DNA, 30 bp, Artificial Sequence
  Synthetic oligonucleotide
cataggtcgccttagagatggcgcttagtg

SEQ ID NO: 317638 - DNA, 30 bp, Artificial Sequence
  Synthetic oligonucleotide
gcatccgtcccctggattaaaatcttagtg

SEQ ID NO: 317639 - DNA, 30 bp, Artificial Sequence
  Synthetic oligonucleotide
ctggactcgctttacagcttcgtcttagtg

SEQ ID NO: 317640 - DNA, 30 bp, Artificial Sequence
  Synthetic oligonucleotide
ttgagatggtcattccagaatatgttagtg

SEQ ID NO: 317641 - DNA, 30 bp, Artificial Sequence
  Synthetic oligonucleotide
caaggagatcccgtcgtctctatgttagtg

SEQ ID NO: 317642 - DNA, 30 bp, Artificial Sequence
  Synthetic oligonucleotide
gtacaacatggtcttcggagaagaaacgtg

SEQ ID NO: 317643 - DNA, 30 bp, Artificial Sequence
  Synthetic oligonucleotide
gaacggtctagcagtcctgtgattcacgtg

SEQ ID NO: 317644 - DNA, 30 bp, Artificial Sequence
  Synthetic oligonucleotide
accattatccggggcaacgagctcgacgtg

SEQ ID NO: 317645 - DNA, 30 bp, Artificial Sequence
  Synthetic oligonucleotide
ctcggcttgcttcctgtgaagtcggacgtg

SEQ ID NO: 317646 - DNA, 30 bp, Artificial Sequence
  Synthetic oligonucleotide
tcatattacggcgctggaccaggggacgtg

SEQ ID NO: 317647 - DNA, 30 bp, Artificial Sequence
  Synthetic oligonucleotide
aaactgccaattgcatctagaaactacgtg

SEQ ID NO: 317648 - DNA, 30 bp, Artificial Sequence
  Synthetic oligonucleotide
aaaccgcaacacaataaacacgactacgtg

SEQ ID NO: 317649 - DNA, 30 bp, Artificial Sequence
  Synthetic oligonucleotide
tcattatgtaaaaggctattcgactacgtg

SEQ ID NO: 317650 - DNA, 30 bp, Artificial Sequence
  Synthetic oligonucleotide
gaatatgagcaggacaagatggactacgtg

SEQ ID NO: 317651 - DNA, 30 bp, Artificial Sequence
  Synthetic oligonucleotide
tctggaggtaggcaacaacatcggtacgtg

SEQ ID NO: 317652 - DNA, 30 bp, Artificial Sequence
  Synthetic oligonucleotide
gcactcaccaggtacaagacgagttacgtg

SEQ ID NO: 317653 - DNA, 30 bp, Artificial Sequence
  Synthetic oligonucleotide
tatgtagtaactacatttggtacaaccgtg

SEQ ID NO: 317654 - DNA, 30 bp, Artificial Sequence
  Synthetic oligonucleotide
tcaacagataggttataatatgtaaccgtg

SEQ ID NO: 317655 - DNA, 30 bp, Artificial Sequence
  Synthetic oligonucleotide
cgcccgactataatgttaagggccaccgtg

SEQ ID NO: 317656 - DNA, 30 bp, Artificial Sequence
  Synthetic oligonucleotide
catgaacggtatccagctcccagcaccgtg

SEQ ID NO: 317657 - DNA, 30 bp, Artificial Sequence
  Synthetic oligonucleotide
atgcagacggtttatactcttgtcaccgtg

SEQ ID NO: 317658 - DNA, 30 bp, Artificial Sequence
  Synthetic oligonucleotide
aaaacagaacacggttcgactcagaccgtg

SEQ ID NO: 317659 - DNA, 30 bp, Artificial Sequence
  Synthetic oligonucleotide
tgcacacgtatggtacactaggaacccgtg

SEQ ID NO: 317660 - DNA, 30 bp, Artificial Sequence
  Synthetic oligonucleotide
tcagtatgggacaatatttcataacccgtg

SEQ ID NO: 317661 - DNA, 30 bp, Artificial Sequence
  Synthetic oligonucleotide
gttcccgggacgaggaggcttttacccgtg

SEQ ID NO: 317662 - DNA, 30 bp, Artificial Sequence
  Synthetic oligonucleotide
gtttagaagagtcaggctattaaagccgtg

SEQ ID NO: 317663 - DNA, 30 bp, Artificial Sequence
  Synthetic oligonucleotide
agggatcgcttcgatgggcccggcgccgtg

SEQ ID NO: 317664 - DNA, 30 bp, Artificial Sequence
  Synthetic oligonucleotide
aaacacgtagaatactaagaagaggccgtg

SEQ ID NO: 317665 - DNA, 30 bp, Artificial Sequence
  Synthetic oligonucleotide
cttggctaaagttttgccaaagttgccgtg

SEQ ID NO: 317666 - DNA, 30 bp, Artificial Sequence
  Synthetic oligonucleotide
ttccatcccggtcgtgctctatgatccgtg

SEQ ID NO: 317667 - DNA, 30 bp, Artificial Sequence
  Synthetic oligonucleotide
gttatgatgggccggagtgtattatccgtg

SEQ ID NO: 317668 - DNA, 30 bp, Artificial Sequence
  Synthetic oligonucleotide
aactagtccggttccagagaccggtccgtg

SEQ ID NO: 317669 - DNA, 30 bp, Artificial Sequence
  Synthetic oligonucleotide
ttgagggtttcttgctattgacgttccgtg

SEQ ID NO: 317670 - DNA, 30 bp, Artificial Sequence
  Synthetic oligonucleotide
tctacgtggtgaactccgagcggaagcgtg

SEQ ID NO: 317671 - DNA, 30 bp, Artificial Sequence
  Synthetic oligonucleotide
agttgtttaagcttactaagtataagcgtg

SEQ ID NO: 317672 - DNA, 30 bp, Artificial Sequence
  Synthetic oligonucleotide
ttaatctcgtacaatcccaaactcagcgtg

SEQ ID NO: 317673 - DNA, 30 bp, Artificial Sequence
  Synthetic oligonucleotide
ttttatccgaagaaatagagggggagcgtg

SEQ ID NO: 317674 - DNA, 30 bp, Artificial Sequence
  Synthetic oligonucleotide
aatagccctcaaatgcccagctggagcgtg

SEQ ID NO: 317675 - DNA, 30 bp, Artificial Sequence
  Synthetic oligonucleotide
attgtccaggtatagggccactcacgcgtg

SEQ ID NO: 317676 - DNA, 30 bp, Artificial Sequence
  Synthetic oligonucleotide
tgacgtaacgaattggtgttataccgcgtg

SEQ ID NO: 317677 - DNA, 30 bp, Artificial Sequence
  Synthetic oligonucleotide
taggtggctttatattgtttttcaggcgtg

SEQ ID NO: 317678 - DNA, 30 bp, Artificial Sequence
  Synthetic oligonucleotide
ggccacggagggtattaggaaaggggcgtg

SEQ ID NO: 317679 - DNA, 30 bp, Artificial Sequence
  Synthetic oligonucleotide
taatgtattcgcgttctcacttttggcgtg

SEQ ID NO: 317680 - DNA, 30 bp, Artificial Sequence
  Synthetic oligonucleotide
ccacccatgtttgatacatttggctgcgtg

SEQ ID NO: 317681 - DNA, 30 bp, Artificial Sequence
  Synthetic oligonucleotide
ttcaattctagtcgagaataatattgcgtg

SEQ ID NO: 317682 - DNA, 29 bp, Artificial Sequence
  Synthetic oligonucleotide
cgcataagtatcagattattagttgcgtg

SEQ ID NO: 317683 - DNA, 30 bp, Artificial Sequence
  Synthetic oligonucleotide
accggtatgtagaaggactgtcacatcgtg

SEQ ID NO: 317684 - DNA, 30 bp, Artificial Sequence
  Synthetic oligonucleotide
ctaattctaaatattaaatctgacatcgtg

SEQ ID NO: 317685 - DNA, 30 bp, Artificial Sequence
  Synthetic oligonucleotide
cgagcctctacggcgaggctggccctcgtg

SEQ ID NO: 317686 - DNA, 30 bp, Artificial Sequence
  Synthetic oligonucleotide
agataacttaagtgggatcttggtctcgtg

SEQ ID NO: 317687 - DNA, 30 bp, Artificial Sequence
  Synthetic oligonucleotide
actcgcgccttggcggagcactgggtcgtg

SEQ ID NO: 317688 - DNA, 30 bp, Artificial Sequence
  Synthetic oligonucleotide
atcacgggtaaatagatgctgtctgtcgtg

SEQ ID NO: 317689 - DNA, 30 bp, Artificial Sequence
  Synthetic oligonucleotide
tgtggcccctacctgattttgacattcgtg

SEQ ID NO: 317690 - DNA, 30 bp, Artificial Sequence
  Synthetic oligonucleotide
gtattcctaacattgaaaatccgattcgtg

SEQ ID NO: 317691 - DNA, 30 bp, Artificial Sequence
  Synthetic oligonucleotide
gaagtcctctatgatcctgataacttcgtg

SEQ ID NO: 317692 - DNA, 30 bp, Artificial Sequence
  Synthetic oligonucleotide
gctggcattctagttttcgtcggcttcgtg

SEQ ID NO: 317693 - DNA, 30 bp, Artificial Sequence
  Synthetic oligonucleotide
gaagtttaagttggggaatgcgcgaaggtg

SEQ ID NO: 317694 - DNA, 30 bp, Artificial Sequence
  Synthetic oligonucleotide
acaaaatcccgtactggcaacctgaaggtg

SEQ ID NO: 317695 - DNA, 30 bp, Artificial Sequence
  Synthetic oligonucleotide
gtaaactgccgcttgccgattcgtaaggtg

SEQ ID NO: 317696 - DNA, 30 bp, Artificial Sequence
  Synthetic oligonucleotide
gcaagaaactttgaatcctgctgacaggtg

SEQ ID NO: 317697 - DNA, 30 bp, Artificial Sequence
  Synthetic oligonucleotide
agagttcaggatctagacgcataccaggtg

SEQ ID NO: 317698 - DNA, 30 bp, Artificial Sequence
  Synthetic oligonucleotide
tgacaggcatcttagaatgaatagcaggtg

SEQ ID NO: 317699 - DNA, 30 bp, Artificial Sequence
  Synthetic oligonucleotide
gtttcgcttagtcacgcaatatcgcaggtg

SEQ ID NO: 317700 - DNA, 30 bp, Artificial Sequence
  Synthetic oligonucleotide
taaggctgtaagattggtctggtgcaggtg

SEQ ID NO: 317701 - DNA, 30 bp, Artificial Sequence
  Synthetic oligonucleotide
cattaatgcttattcttgtacactcaggtg

SEQ ID NO: 317702 - DNA, 30 bp, Artificial Sequence
  Synthetic oligonucleotide
ggacaccccgcggtttcagggaaagaggtg

SEQ ID NO: 317703 - DNA, 30 bp, Artificial Sequence
  Synthetic oligonucleotide
gagtcatcgccaggaaaaactggagaggtg

SEQ ID NO: 317704 - DNA, 30 bp, Artificial Sequence
  Synthetic oligonucleotide
tatataaagttgctacgacacgtagaggtg

SEQ ID NO: 317705 - DNA, 30 bp, Artificial Sequence
  Synthetic oligonucleotide
taacaaccgtcctaccgtgttaacgaggtg

SEQ ID NO: 317706 - DNA, 30 bp, Artificial Sequence
  Synthetic oligonucleotide
attcaaattcatattctaacgaccgaggtg

SEQ ID NO: 317707 - DNA, 30 bp, Artificial Sequence
  Synthetic oligonucleotide
caacaccgtagcactcaagagcccgaggtg

SEQ ID NO: 317708 - DNA, 30 bp, Artificial Sequence
  Synthetic oligonucleotide
ttgggtggcctcctccaggcaaaggaggtg

SEQ ID NO: 317709 - DNA, 30 bp, Artificial Sequence
  Synthetic oligonucleotide
aaagtgggatgtgcaagcccggaggaggtg

SEQ ID NO: 317710 - DNA, 30 bp, Artificial Sequence
  Synthetic oligonucleotide
agatcctataattggaaccgggaggaggtg

SEQ ID NO: 317711 - DNA, 30 bp, Artificial Sequence
  Synthetic oligonucleotide
ctatgcggtgggcccctggcaccggaggtg

SEQ ID NO: 317712 - DNA, 30 bp, Artificial Sequence
  Synthetic oligonucleotide
tcgcaactggctacaatgatctcggaggtg

SEQ ID NO: 317713 - DNA, 30 bp, Artificial Sequence
  Synthetic oligonucleotide
tgggagaactctcaggggttttgggaggtg

SEQ ID NO: 317714 - DNA, 30 bp, Artificial Sequence
  Synthetic oligonucleotide
tgcgcgccctaacacagtgggattgaggtg

SEQ ID NO: 317715 - DNA, 30 bp, Artificial Sequence
  Synthetic oligonucleotide
gatagagtctacccttggaagcgataggtg

SEQ ID NO: 317716 - DNA, 30 bp, Artificial Sequence
  Synthetic oligonucleotide
ataaatcgatgctgcttgaaatattaggtg

SEQ ID NO: 317717 - DNA, 30 bp, Artificial Sequence
  Synthetic oligonucleotide
tttaggggatgtagcttgattggttaggtg

SEQ ID NO: 317718 - DNA, 30 bp, Artificial Sequence
  Synthetic oligonucleotide
ttagcggccattcacacgatgtgttaggtg

SEQ ID NO: 317719 - DNA, 30 bp, Artificial Sequence
  Synthetic oligonucleotide
aagaacgtgtggacagatatggaaacggtg

SEQ ID NO: 317720 - DNA, 30 bp, Artificial Sequence
  Synthetic oligonucleotide
gtttcaattatggagagatgttcaacggtg

SEQ ID NO: 317721 - DNA, 30 bp, Artificial Sequence
  Synthetic oligonucleotide
agtgtggagcgggcgtgtaggtgaacggtg

SEQ ID NO: 317722 - DNA, 30 bp, Artificial Sequence
  Synthetic oligonucleotide
ccgtcgcaccaacttaacatcgtaacggtg

SEQ ID NO: 317723 - DNA, 30 bp, Artificial Sequence
  Synthetic oligonucleotide
caacactttcgtattttcttagtcacggtg

SEQ ID NO: 317724 - DNA, 30 bp, Artificial Sequence
  Synthetic oligonucleotide
attttcggcaggaacgctcgagaaccggtg

SEQ ID NO: 317725 - DNA, 30 bp, Artificial Sequence
  Synthetic oligonucleotide
tatcactccccatgagtgcattcaccggtg

SEQ ID NO: 317726 - DNA, 30 bp, Artificial Sequence
  Synthetic oligonucleotide
ctgggtaaccattctgcttacaccccggtg

SEQ ID NO: 317727 - DNA, 30 bp, Artificial Sequence
  Synthetic oligonucleotide
gtaagggaacgcgggacgagaatgccggtg

SEQ ID NO: 317728 - DNA, 30 bp, Artificial Sequence
  Synthetic oligonucleotide
cacaggaaacatggcagcgctatgccggtg

SEQ ID NO: 317729 - DNA, 30 bp, Artificial Sequence
  Synthetic oligonucleotide
acgttacgcatgtggcaagctcgtccggtg

SEQ ID NO: 317730 - DNA, 30 bp, Artificial Sequence
  Synthetic oligonucleotide
ggttgagcacagtgtgggtgtagagcggtg

SEQ ID NO: 317731 - DNA, 30 bp, Artificial Sequence
  Synthetic oligonucleotide
ctcatgttccggtccacagtaaatgcggtg

SEQ ID NO: 317732 - DNA, 30 bp, Artificial Sequence
  Synthetic oligonucleotide
tttggggtttactacgcgtcaccatcggtg

SEQ ID NO: 317733 - DNA, 30 bp, Artificial Sequence
  Synthetic oligonucleotide
gtggcgcgaatctcggaccggagatcggtg

SEQ ID NO: 317734 - DNA, 30 bp, Artificial Sequence
  Synthetic oligonucleotide
accattatatgttctatccgttcctcggtg

SEQ ID NO: 317735 - DNA, 30 bp, Artificial Sequence
  Synthetic oligonucleotide
gtaactatctatctcggtcaaatcagggtg

SEQ ID NO: 317736 - DNA, 30 bp, Artificial Sequence
  Synthetic oligonucleotide
ggtcatccgtcgttgacagatgtcagggtg

SEQ ID NO: 317737 - DNA, 30 bp, Artificial Sequence
  Synthetic oligonucleotide
gaagcacaacgacaacgtctgcagagggtg

SEQ ID NO: 317738 - DNA, 30 bp, Artificial Sequence
  Synthetic oligonucleotide
ataaagtcacaagaagttgtgactagggtg

SEQ ID NO: 317739 - DNA, 30 bp, Artificial Sequence
  Synthetic oligonucleotide
tgttgggtgagctctggctcggctagggtg

SEQ ID NO: 317740 - DNA, 30 bp, Artificial Sequence
  Synthetic oligonucleotide
cacctgactctaccggagatgcgtagggtg

SEQ ID NO: 317741 - DNA, 30 bp, Artificial Sequence
  Synthetic oligonucleotide
ctcgtattggaagtactcagcattagggtg

SEQ ID NO: 317742 - DNA, 30 bp, Artificial Sequence
  Synthetic oligonucleotide
gaaacgctggaaaagtcgatgatccgggtg

SEQ ID NO: 317743 - DNA, 30 bp, Artificial Sequence
  Synthetic oligonucleotide
atggtcgaagggataggtttactccgggtg

SEQ ID NO: 317744 - DNA, 30 bp, Artificial Sequence
  Synthetic oligonucleotide
aaaaccggtgctgagtacgtttagcgggtg

SEQ ID NO: 317745 - DNA, 30 bp, Artificial Sequence
  Synthetic oligonucleotide
aatctcaaagtaaggatatcgtggcgggtg

SEQ ID NO: 317746 - DNA, 30 bp, Artificial Sequence
  Synthetic oligonucleotide
tacaaaggatatatagattacccaggggtg

SEQ ID NO: 317747 - DNA, 30 bp, Artificial Sequence
  Synthetic oligonucleotide
ttgctcatggcgacgatggcggcaggggtg

SEQ ID NO: 317748 - DNA, 30 bp, Artificial Sequence
  Synthetic oligonucleotide
caaacaagccgaaattactccgacggggtg

SEQ ID NO: 317749 - DNA, 29 bp, Artificial Sequence
  Synthetic oligonucleotide
tacaatacagtggaacatggaccggggtg

SEQ ID NO: 317750 - DNA, 30 bp, Artificial Sequence
  Synthetic oligonucleotide
cttctgaccttacgattggactgcggggtg

SEQ ID NO: 317751 - DNA, 30 bp, Artificial Sequence
  Synthetic oligonucleotide
gcgtctgcccgggagcgtctttagggggtg

SEQ ID NO: 317752 - DNA, 30 bp, Artificial Sequence
  Synthetic oligonucleotide
taactgtagtccgggggttggtgtggggtg

SEQ ID NO: 317753 - DNA, 30 bp, Artificial Sequence
  Synthetic oligonucleotide
tagaaccctagaaataaagtatttggggtg

SEQ ID NO: 317754 - DNA, 30 bp, Artificial Sequence
  Synthetic oligonucleotide
gactctcccccgtagttcatgaaatgggtg

SEQ ID NO: 317755 - DNA, 30 bp, Artificial Sequence
  Synthetic oligonucleotide
ctcattctgtgtcttcattaacactgggtg

SEQ ID NO: 317756 - DNA, 30 bp, Artificial Sequence
  Synthetic oligonucleotide
agttgtacaagcggtgattgcgcgtgggtg

SEQ ID NO: 317757 - DNA, 30 bp, Artificial Sequence
  Synthetic oligonucleotide
taggtgaataccgaattttgtttgtgggtg

SEQ ID NO: 317758 - DNA, 30 bp, Artificial Sequence
  Synthetic oligonucleotide
ctagataaagggatcagcttcccttgggtg

SEQ ID NO: 317759 - DNA, 30 bp, Artificial Sequence
  Synthetic oligonucleotide
agatttccgcggacctcggttggcatggtg

SEQ ID NO: 317760 - DNA, 30 bp, Artificial Sequence
  Synthetic oligonucleotide
gggttgacgtattttccgggcacgatggtg

SEQ ID NO: 317761 - DNA, 30 bp, Artificial Sequence
  Synthetic oligonucleotide
gacaatgaggtttgaacagcttcgatggtg

SEQ ID NO: 317762 - DNA, 30 bp, Artificial Sequence
  Synthetic oligonucleotide
cgttcggatcgaaagacacccgctatggtg

SEQ ID NO: 317763 - DNA, 30 bp, Artificial Sequence
  Synthetic oligonucleotide
cggcaagttcaccgtataggaaaactggtg

SEQ ID NO: 317764 - DNA, 30 bp, Artificial Sequence
  Synthetic oligonucleotide
tttcgaaaggctcactcatccacactggtg

SEQ ID NO: 317765 - DNA, 30 bp, Artificial Sequence
  Synthetic oligonucleotide
taatccgaactagaagtaagacagctggtg

SEQ ID NO: 317766 - DNA, 30 bp, Artificial Sequence
  Synthetic oligonucleotide
tgattttactaggatataggggaagtggtg

SEQ ID NO: 317767 - DNA, 30 bp, Artificial Sequence
  Synthetic oligonucleotide
aatatacctcttatgaactaacacgtggtg

SEQ ID NO: 317768 - DNA, 30 bp, Artificial Sequence
  Synthetic oligonucleotide
cagccggactactctcgggtgcacgtggtg

SEQ ID NO: 317769 - DNA, 30 bp, Artificial Sequence
  Synthetic oligonucleotide
aaaagcgcgcggcaagtgaccgacgtggtg

SEQ ID NO: 317770 - DNA, 30 bp, Artificial Sequence
  Synthetic oligonucleotide
gatagcatcctacgagatacctacgtggtg

SEQ ID NO: 317771 - DNA, 30 bp, Artificial Sequence
  Synthetic oligonucleotide
agtatcacttggtacaccaatgaggtggtg

SEQ ID NO: 317772 - DNA, 30 bp, Artificial Sequence
  Synthetic oligonucleotide
ataagtttgaccccgacatgttaggtggtg

SEQ ID NO: 317773 - DNA, 30 bp, Artificial Sequence
  Synthetic oligonucleotide
aatactttgtagttagaagcttaattggtg

SEQ ID NO: 317774 - DNA, 30 bp, Artificial Sequence
  Synthetic oligonucleotide
gttaggtacaagacgttggactacttggtg

SEQ ID NO: 317775 - DNA, 30 bp, Artificial Sequence
  Synthetic oligonucleotide
gtccgggcgccccgttatttgagtttggtg

SEQ ID NO: 317776 - DNA, 30 bp, Artificial Sequence
  Synthetic oligonucleotide
cgtcttgtctactacaccgtaattttggtg

SEQ ID NO: 317777 - DNA, 30 bp, Artificial Sequence
  Synthetic oligonucleotide
ctcgccgcagtgctggtcaggtttttggtg

SEQ ID NO: 317778 - DNA, 30 bp, Artificial Sequence
  Synthetic oligonucleotide
ccgaatggatcactctatgtactcaatgtg

SEQ ID NO: 317779 - DNA, 30 bp, Artificial Sequence
  Synthetic oligonucleotide
cctattccaatagacttatatccgaatgtg

SEQ ID NO: 317780 - DNA, 30 bp, Artificial Sequence
  Synthetic oligonucleotide
tcttacccgatacaatggggatgtaatgtg

SEQ ID NO: 317781 - DNA, 30 bp, Artificial Sequence
  Synthetic oligonucleotide
attacaccgatacttcggcgacttaatgtg

SEQ ID NO: 317782 - DNA, 30 bp, Artificial Sequence
  Synthetic oligonucleotide
agtccagcatttggcgaatatcgacatgtg

SEQ ID NO: 317783 - DNA, 30 bp, Artificial Sequence
  Synthetic oligonucleotide
aagattgcgagtgaggtcattggacatgtg

SEQ ID NO: 317784 - DNA, 30 bp, Artificial Sequence
  Synthetic oligonucleotide
aatcgctagaaattgaatgggtcccatgtg

SEQ ID NO: 317785 - DNA, 30 bp, Artificial Sequence
  Synthetic oligonucleotide
cgtacctctcctgaaggacactgtcatgtg

SEQ ID NO: 317786 - DNA, 30 bp, Artificial Sequence
  Synthetic oligonucleotide
ccatgagagagtgcgtcgttatttcatgtg

SEQ ID NO: 317787 - DNA, 30 bp, Artificial Sequence
  Synthetic oligonucleotide
tcagtggttagagtcgctttacgggatgtg

SEQ ID NO: 317788 - DNA, 30 bp, Artificial Sequence
  Synthetic oligonucleotide
aatttataggacccagtgcgttgatatgtg

SEQ ID NO: 317789 - DNA, 30 bp, Artificial Sequence
  Synthetic oligonucleotide
tgatccaactaatgttcgtttatatatgtg

SEQ ID NO: 317790 - DNA, 30 bp, Artificial Sequence
  Synthetic oligonucleotide
taccgttctaatttcagagggtcctatgtg

SEQ ID NO: 317791 - DNA, 30 bp, Artificial Sequence
  Synthetic oligonucleotide
acccttaacagctccgagaagggttatgtg

SEQ ID NO: 317792 - DNA, 30 bp, Artificial Sequence
  Synthetic oligonucleotide
cgaatcaggtatgatcagcgttgttatgtg

SEQ ID NO: 317793 - DNA, 30 bp, Artificial Sequence
  Synthetic oligonucleotide
ttgtttaattcactgaaattattaactgtg

SEQ ID NO: 317794 - DNA, 30 bp, Artificial Sequence
  Synthetic oligonucleotide
tacgagtattaggtcccacccagcactgtg

SEQ ID NO: 317795 - DNA, 30 bp, Artificial Sequence
  Synthetic oligonucleotide
agttgtccttactaggggaaccatactgtg

SEQ ID NO: 317796 - DNA, 30 bp, Artificial Sequence
  Synthetic oligonucleotide
aatctaagctggctggaagcaaaccctgtg

SEQ ID NO: 317797 - DNA, 30 bp, Artificial Sequence
  Synthetic oligonucleotide
aaatgacagtatatttatcatatgcctgtg

SEQ ID NO: 317798 - DNA, 30 bp, Artificial Sequence
  Synthetic oligonucleotide
ctcgacgagtctcaggtatggcatcctgtg

SEQ ID NO: 317799 - DNA, 30 bp, Artificial Sequence
  Synthetic oligonucleotide
ggggtagaacggccgcgaccccccgctgtg

SEQ ID NO: 317800 - DNA, 30 bp, Artificial Sequence
  Synthetic oligonucleotide
gagccaagataatggtacctccccgctgtg

SEQ ID NO: 317801 - DNA, 30 bp, Artificial Sequence
  Synthetic oligonucleotide
tggtagggatcgcgcacaggtggtgctgtg

SEQ ID NO: 317802 - DNA, 30 bp, Artificial Sequence
  Synthetic oligonucleotide
acttatgcgggtctaaacttttcatctgtg

SEQ ID NO: 317803 - DNA, 30 bp, Artificial Sequence
  Synthetic oligonucleotide
ggtatgtaacattctagaggtgcctctgtg

SEQ ID NO: 317804 - DNA, 30 bp, Artificial Sequence
  Synthetic oligonucleotide
gcactgagtctactagctcccctgtctgtg

SEQ ID NO: 317805 - DNA, 30 bp, Artificial Sequence
  Synthetic oligonucleotide
aagttaaataacaggactagtctgtctgtg

SEQ ID NO: 317806 - DNA, 30 bp, Artificial Sequence
  Synthetic oligonucleotide
tcatgatcgtgggtcaccgctgtgtctgtg

SEQ ID NO: 317807 - DNA, 30 bp, Artificial Sequence
  Synthetic oligonucleotide
acagtatttcggattatttcttgttctgtg

SEQ ID NO: 317808 - DNA, 30 bp, Artificial Sequence
  Synthetic oligonucleotide
tatagtgctagttgatctgctatttctgtg

SEQ ID NO: 317809 - DNA, 30 bp, Artificial Sequence
  Synthetic oligonucleotide
cgagctgggagtcagatatagctttctgtg

SEQ ID NO: 317810 - DNA, 30 bp, Artificial Sequence
  Synthetic oligonucleotide
ccagttctggcagatgaatcggaaagtgtg

SEQ ID NO: 317811 - DNA, 30 bp, Artificial Sequence
  Synthetic oligonucleotide
ttatgggagaccggtccaattcacagtgtg

SEQ ID NO: 317812 - DNA, 30 bp, Artificial Sequence
  Synthetic oligonucleotide
ataactgaacgtcttgggggagacagtgtg

SEQ ID NO: 317813 - DNA, 30 bp, Artificial Sequence
  Synthetic oligonucleotide
taagttcaggatcgtacgatcttgagtgtg

SEQ ID NO: 317814 - DNA, 30 bp, Artificial Sequence
  Synthetic oligonucleotide
gttacccttaggccacgcacgaatagtgtg

SEQ ID NO: 317815 - DNA, 30 bp, Artificial Sequence
  Synthetic oligonucleotide
atgcaccatctgttagagcgatttagtgtg

SEQ ID NO: 317816 - DNA, 30 bp, Artificial Sequence
  Synthetic oligonucleotide
acctgtcctcgacatctgtcaagacgtgtg

SEQ ID NO: 317817 - DNA, 30 bp, Artificial Sequence
  Synthetic oligonucleotide
gcagaacttccaggcggaagcgaccgtgtg

SEQ ID NO: 317818 - DNA, 30 bp, Artificial Sequence
  Synthetic oligonucleotide
gaggctcctgtgtgagggattggccgtgtg

SEQ ID NO: 317819 - DNA, 30 bp, Artificial Sequence
  Synthetic oligonucleotide
aaataaaagtgtactccagttggccgtgtg

SEQ ID NO: 317820 - DNA, 30 bp, Artificial Sequence
  Synthetic oligonucleotide
attaagtttacgaggggctccaggcgtgtg

SEQ ID NO: 317821 - DNA, 30 bp, Artificial Sequence
  Synthetic oligonucleotide
gaaaacattcatgacttggacaatcgtgtg

SEQ ID NO: 317822 - DNA, 30 bp, Artificial Sequence
  Synthetic oligonucleotide
cggggaagggtaggagaggaagctcgtgtg

SEQ ID NO: 317823 - DNA, 30 bp, Artificial Sequence
  Synthetic oligonucleotide
gaacgatacctggacgcattagctcgtgtg

SEQ ID NO: 317824 - DNA, 30 bp, Artificial Sequence
  Synthetic oligonucleotide
ctggcgtatttcataggccgcgaaggtgtg

SEQ ID NO: 317825 - DNA, 30 bp, Artificial Sequence
  Synthetic oligonucleotide
ctcactggaccatcagggaacgcaggtgtg

SEQ ID NO: 317826 - DNA, 30 bp, Artificial Sequence
  Synthetic oligonucleotide
tgagtttatcgaaggtgttgcaacggtgtg

SEQ ID NO: 317827 - DNA, 30 bp, Artificial Sequence
  Synthetic oligonucleotide
cattattgaagcagattccatggcggtgtg

SEQ ID NO: 317828 - DNA, 30 bp, Artificial Sequence
  Synthetic oligonucleotide
aagagcatacgaaaaccgaataggggtgtg

SEQ ID NO: 317829 - DNA, 30 bp, Artificial Sequence
  Synthetic oligonucleotide
ttggtaccagtaaagggcatatttggtgtg

SEQ ID NO: 317830 - DNA, 30 bp, Artificial Sequence
  Synthetic oligonucleotide
gaagtacttgacaaataaggtttatgtgtg

SEQ ID NO: 317831 - DNA, 30 bp, Artificial Sequence
  Synthetic oligonucleotide
gactcgcgttacgtaacagtccagtgtgtg

SEQ ID NO: 317832 - DNA, 30 bp, Artificial Sequence
  Synthetic oligonucleotide
tggtgcttgtgttttagaggtcgttgtgtg

SEQ ID NO: 317833 - DNA, 30 bp, Artificial Sequence
  Synthetic oligonucleotide
gcccctgctctaacaggcgacgaaattgtg

SEQ ID NO: 317834 - DNA, 30 bp, Artificial Sequence
  Synthetic oligonucleotide
atcgccattttggaggaccccctaattgtg

SEQ ID NO: 317835 - DNA, 30 bp, Artificial Sequence
  Synthetic oligonucleotide
gagatcgggcatcttccgtccttaattgtg

SEQ ID NO: 317836 - DNA, 30 bp, Artificial Sequence
  Synthetic oligonucleotide
agaccccgagcgatttctaggcacattgtg

SEQ ID NO: 317837 - DNA, 30 bp, Artificial Sequence
  Synthetic oligonucleotide
cgtagggatgtcatgctgagagacattgtg

SEQ ID NO: 317838 - DNA, 30 bp, Artificial Sequence
  Synthetic oligonucleotide
tcgtcgattggctacgataactacattgtg

SEQ ID NO: 317839 - DNA, 30 bp, Artificial Sequence
  Synthetic oligonucleotide
aggcaaccgcccttacctctttatattgtg

SEQ ID NO: 317840 - DNA, 30 bp, Artificial Sequence
  Synthetic oligonucleotide
ggcgttgcaagcttaatcgcacctattgtg

SEQ ID NO: 317841 - DNA, 30 bp, Artificial Sequence
  Synthetic oligonucleotide
gtcaagggaaattttacgcggtgtattgtg

SEQ ID NO: 317842 - DNA, 30 bp, Artificial Sequence
  Synthetic oligonucleotide
ggaacggggcaaggttggcgggaacttgtg

SEQ ID NO: 317843 - DNA, 30 bp, Artificial Sequence
  Synthetic oligonucleotide
tcagggcggtcgtacctggttgcacttgtg

SEQ ID NO: 317844 - DNA, 30 bp, Artificial Sequence
  Synthetic oligonucleotide
actaaagttccaacatcggcattacttgtg

SEQ ID NO: 317845 - DNA, 30 bp, Artificial Sequence
  Synthetic oligonucleotide
cagagcagacgggcccacatccgccttgtg

SEQ ID NO: 317846 - DNA, 30 bp, Artificial Sequence
  Synthetic oligonucleotide
tttcggtataactttctggcagagcttgtg

SEQ ID NO: 317847 - DNA, 30 bp, Artificial Sequence
  Synthetic oligonucleotide
ctatatatagacgtaccagtatctcttgtg

SEQ ID NO: 317848 - DNA, 30 bp, Artificial Sequence
  Synthetic oligonucleotide
gcaaaggggtgataccctttatgtcttgtg

SEQ ID NO: 317849 - DNA, 30 bp, Artificial Sequence
  Synthetic oligonucleotide
ggttatagggtcaaataagcctacgttgtg

SEQ ID NO: 317850 - DNA, 30 bp, Artificial Sequence
  Synthetic oligonucleotide
gtgagacctacgtagcggaaaggcgttgtg

SEQ ID NO: 317851 - DNA, 30 bp, Artificial Sequence
  Synthetic oligonucleotide
gggtggaggagggtaaaggtgggggttgtg

SEQ ID NO: 317852 - DNA, 30 bp, Artificial Sequence
  Synthetic oligonucleotide
cgtggacagcacaaatttaaccttgttgtg

SEQ ID NO: 317853 - DNA, 30 bp, Artificial Sequence
  Synthetic oligonucleotide
gcacgactaccagtgactgctcttgttgtg

SEQ ID NO: 317854 - DNA, 30 bp, Artificial Sequence
  Synthetic oligonucleotide
gcggaagagtacttttaacgagttgttgtg

SEQ ID NO: 317855 - DNA, 30 bp, Artificial Sequence
  Synthetic oligonucleotide
caaacacgacaagccgtacgttgatttgtg

SEQ ID NO: 317856 - DNA, 30 bp, Artificial Sequence
  Synthetic oligonucleotide
caatcacttacacaatatgaatactttgtg

SEQ ID NO: 317857 - DNA, 30 bp, Artificial Sequence
  Synthetic oligonucleotide
gtatcgatcgagtttgctcgatcctttgtg

SEQ ID NO: 317858 - DNA, 30 bp, Artificial Sequence
  Synthetic oligonucleotide
tacgccacgagcgctactatggcgtttgtg

SEQ ID NO: 317859 - DNA, 30 bp, Artificial Sequence
  Synthetic oligonucleotide
ttagaggaatttcgcgttatagggtttgtg

SEQ ID NO: 317860 - DNA, 30 bp, Artificial Sequence
  Synthetic oligonucleotide
atactattcattgtagactagaattttgtg

SEQ ID NO: 317861 - DNA, 30 bp, Artificial Sequence
  Synthetic oligonucleotide
ggacatcactagacgactgcagattttgtg

SEQ ID NO: 317862 - DNA, 30 bp, Artificial Sequence
  Synthetic oligonucleotide
gaggtttcaccttcgtccagtaacaaattg

SEQ ID NO: 317863 - DNA, 30 bp, Artificial Sequence
  Synthetic oligonucleotide
cccaacgcactcgcgccaatatacaaattg

SEQ ID NO: 317864 - DNA, 30 bp, Artificial Sequence
  Synthetic oligonucleotide
ggtttgattttgccgatgttaagcaaattg

SEQ ID NO: 317865 - DNA, 30 bp, Artificial Sequence
  Synthetic oligonucleotide
atagagatttggcgataattgcgcaaattg

SEQ ID NO: 317866 - DNA, 30 bp, Artificial Sequence
  Synthetic oligonucleotide
ctttgacgatgaccttcaaccttcaaattg

SEQ ID NO: 317867 - DNA, 30 bp, Artificial Sequence
  Synthetic oligonucleotide
cacactcgacctgtgctttaagggaaattg

SEQ ID NO: 317868 - DNA, 30 bp, Artificial Sequence
  Synthetic oligonucleotide
ctcctaaatatatgaggttgtggtaaattg

SEQ ID NO: 317869 - DNA, 30 bp, Artificial Sequence
  Synthetic oligonucleotide
tagaagacgcggcgacccgattagcaattg

SEQ ID NO: 317870 - DNA, 30 bp, Artificial Sequence
  Synthetic oligonucleotide
tcctgcgcaacgtgtgtctactcgcaattg

SEQ ID NO: 317871 - DNA, 30 bp, Artificial Sequence
  Synthetic oligonucleotide
atcttctttggacgaattgtcgctcaattg

SEQ ID NO: 317872 - DNA, 30 bp, Artificial Sequence
  Synthetic oligonucleotide
gtaacggttataggattagtttgtcaattg

SEQ ID NO: 317873 - DNA, 30 bp, Artificial Sequence
  Synthetic oligonucleotide
aacgggggtggacaaaactgccttcaattg

SEQ ID NO: 317874 - DNA, 30 bp, Artificial Sequence
  Synthetic oligonucleotide
catgtaagttattcacgatgtggagaattg

SEQ ID NO: 317875 - DNA, 30 bp, Artificial Sequence
  Synthetic oligonucleotide
agtcagacgctatgatcacagtacgaattg

SEQ ID NO: 317876 - DNA, 30 bp, Artificial Sequence
  Synthetic oligonucleotide
tatcttgtggaactaggtatcgtcgaattg

SEQ ID NO: 317877 - DNA, 30 bp, Artificial Sequence
  Synthetic oligonucleotide
tagcataagattagattttgtcaggaattg

SEQ ID NO: 317878 - DNA, 30 bp, Artificial Sequence
  Synthetic oligonucleotide
gcaattttgtccatcctcgagtgggaattg

SEQ ID NO: 317879 - DNA, 30 bp, Artificial Sequence
  Synthetic oligonucleotide
taatctcggcgagtgcgagcggatgaattg

SEQ ID NO: 317880 - DNA, 30 bp, Artificial Sequence
  Synthetic oligonucleotide
ttatatattttctatgtaggccgtgaattg

SEQ ID NO: 317881 - DNA, 30 bp, Artificial Sequence
  Synthetic oligonucleotide
ccatgttcacttaagtgccaagcgtaattg

SEQ ID NO: 317882 - DNA, 30 bp, Artificial Sequence
  Synthetic oligonucleotide
gccgtctgtaggatagctgagatttaattg

SEQ ID NO: 317883 - DNA, 30 bp, Artificial Sequence
  Synthetic oligonucleotide
cgtttttcaccatcacttatctaaacattg

SEQ ID NO: 317884 - DNA, 30 bp, Artificial Sequence
  Synthetic oligonucleotide
aagcacgtacatataattgtgataacattg

SEQ ID NO: 317885 - DNA, 30 bp, Artificial Sequence
  Synthetic oligonucleotide
tagcaggtttcaagtccgaccaagacattg

SEQ ID NO: 317886 - DNA, 30 bp, Artificial Sequence
  Synthetic oligonucleotide
tttgtggtgacatctaccccgcgtacattg

SEQ ID NO: 317887 - DNA, 30 bp, Artificial Sequence
  Synthetic oligonucleotide
gaggggttagaatcacaaagaaagccattg

SEQ ID NO: 317888 - DNA, 30 bp, Artificial Sequence
  Synthetic oligonucleotide
agacacggctttaaaccgttcaggccattg

SEQ ID NO: 317889 - DNA, 30 bp, Artificial Sequence
  Synthetic oligonucleotide
ttacttggtgaaatgggccattggccattg

SEQ ID NO: 317890 - DNA, 30 bp, Artificial Sequence
  Synthetic oligonucleotide
agctgtgccacggacatttttgaagcattg

SEQ ID NO: 317891 - DNA, 30 bp, Artificial Sequence
  Synthetic oligonucleotide
cctaccgtagtggatgacagcaaggcattg

SEQ ID NO: 317892 - DNA, 30 bp, Artificial Sequence
  Synthetic oligonucleotide
actagtattcttggtgagctggcatcattg

SEQ ID NO: 317893 - DNA, 30 bp, Artificial Sequence
  Synthetic oligonucleotide
tgctcttagccctccacactccgctcattg

SEQ ID NO: 317894 - DNA, 30 bp, Artificial Sequence
  Synthetic oligonucleotide
gtacttaaattctagaaacactagtcattg

SEQ ID NO: 317895 - DNA, 30 bp, Artificial Sequence
  Synthetic oligonucleotide
gtaaccaacgttctagagttctattcattg

SEQ ID NO: 317896 - DNA, 30 bp, Artificial Sequence
  Synthetic oligonucleotide
aattatcagcggatgctagcttattcattg

SEQ ID NO: 317897 - DNA, 30 bp, Artificial Sequence
  Synthetic oligonucleotide
tgtaaaaggtggcagtcacattaaagattg

SEQ ID NO: 317898 - DNA, 30 bp, Artificial Sequence
  Synthetic oligonucleotide
gaattgtcttcatcaatcagagcaagattg

SEQ ID NO: 317899 - DNA, 30 bp, Artificial Sequence
  Synthetic oligonucleotide
ggcggtcaggacgcgctacagagaagattg

SEQ ID NO: 317900 - DNA, 30 bp, Artificial Sequence
  Synthetic oligonucleotide
ttcaacaggaacctatatttttacagattg

SEQ ID NO: 317901 - DNA, 30 bp, Artificial Sequence
  Synthetic oligonucleotide
gtagcttagcatgcaggagatagtagattg

SEQ ID NO: 317902 - DNA, 30 bp, Artificial Sequence
  Synthetic oligonucleotide
cgatgtcagttttaacatggaggtagattg

SEQ ID NO: 317903 - DNA, 29 bp, Artificial Sequence
  Synthetic oligonucleotide
tgtcgggtaacgagtgtgacgttagattg

SEQ ID NO: 317904 - DNA, 30 bp, Artificial Sequence
  Synthetic oligonucleotide
ctgtggttaaaagttggtcgtcaacgattg

SEQ ID NO: 317905 - DNA, 30 bp, Artificial Sequence
  Synthetic oligonucleotide
gctcttagcgtcagcgtatcaacacgattg

SEQ ID NO: 317906 - DNA, 30 bp, Artificial Sequence
  Synthetic oligonucleotide
tccgcgcccctaatcgctagccaccgattg

SEQ ID NO: 317907 - DNA, 30 bp, Artificial Sequence
  Synthetic oligonucleotide
agggactgttgcggtgaacgcctgcgattg

SEQ ID NO: 317908 - DNA, 30 bp, Artificial Sequence
  Synthetic oligonucleotide
atgacatgttgttaggctaaccatcgattg

SEQ ID NO: 317909 - DNA, 30 bp, Artificial Sequence
  Synthetic oligonucleotide
gcagtaattgacactagagcctatcgattg

SEQ ID NO: 317910 - DNA, 30 bp, Artificial Sequence
  Synthetic oligonucleotide
gaacataggtcgcggtattagattcgattg

SEQ ID NO: 317911 - DNA, 30 bp, Artificial Sequence
  Synthetic oligonucleotide
gtaaaaaagcacagaagacgctttcgattg

SEQ ID NO: 317912 - DNA, 30 bp, Artificial Sequence
  Synthetic oligonucleotide
ctactctaactcgtgtggacataaggattg

SEQ ID NO: 317913 - DNA, 30 bp, Artificial Sequence
  Synthetic oligonucleotide
gcacagcttaaagtaggagatcgaggattg

SEQ ID NO: 317914 - DNA, 30 bp, Artificial Sequence
  Synthetic oligonucleotide
atctatcatcagagacaatcggagggattg

SEQ ID NO: 317915 - DNA, 30 bp, Artificial Sequence
  Synthetic oligonucleotide
aacggagtgggaagagagacaaggggattg

SEQ ID NO: 317916 - DNA, 30 bp, Artificial Sequence
  Synthetic oligonucleotide
agtataatccgcggctataggtctggattg

SEQ ID NO: 317917 - DNA, 30 bp, Artificial Sequence
  Synthetic oligonucleotide
tgtcgaaatatacgttgatttgcatgattg

SEQ ID NO: 317918 - DNA, 30 bp, Artificial Sequence
  Synthetic oligonucleotide
gcttctcgaacgtaatactggatatgattg

SEQ ID NO: 317919 - DNA, 30 bp, Artificial Sequence
  Synthetic oligonucleotide
cacgtttaaactgtggtgatgtgctgattg

SEQ ID NO: 317920 - DNA, 30 bp, Artificial Sequence
  Synthetic oligonucleotide
ctatcagactgagtgtgttcattgtgattg

SEQ ID NO: 317921 - DNA, 30 bp, Artificial Sequence
  Synthetic oligonucleotide
atctcgatcatacatgacaaatcttgattg

SEQ ID NO: 317922 - DNA, 30 bp, Artificial Sequence
  Synthetic oligonucleotide
aaagttccgggagagagcgtccgaatattg

SEQ ID NO: 317923 - DNA, 30 bp, Artificial Sequence
  Synthetic oligonucleotide
attcgggcgtttaagacagcactaatattg

SEQ ID NO: 317924 - DNA, 30 bp, Artificial Sequence
  Synthetic oligonucleotide
ttaggaatgtcatctaataactacatattg

SEQ ID NO: 317925 - DNA, 30 bp, Artificial Sequence
  Synthetic oligonucleotide
ccgaacttgagttccgccagcgccatattg

SEQ ID NO: 317926 - DNA, 30 bp, Artificial Sequence
  Synthetic oligonucleotide
gtataaagccgaggtcttaggcgcatattg

SEQ ID NO: 317927 - DNA, 30 bp, Artificial Sequence
  Synthetic oligonucleotide
agattggataccacgtgccggtcgatattg

SEQ ID NO: 317928 - DNA, 30 bp, Artificial Sequence
  Synthetic oligonucleotide
tctatgctgtaggcggacattaggatattg

SEQ ID NO: 317929 - DNA, 30 bp, Artificial Sequence
  Synthetic oligonucleotide
cccagccggtattggggcgaactgatattg

SEQ ID NO: 317930 - DNA, 30 bp, Artificial Sequence
  Synthetic oligonucleotide
gtacgccgactcatctggatgttgatattg

SEQ ID NO: 317931 - DNA, 30 bp, Artificial Sequence
  Synthetic oligonucleotide
catggggtgtgtccgcctcgggcgctattg

SEQ ID NO: 317932 - DNA, 30 bp, Artificial Sequence
  Synthetic oligonucleotide
aaagacacggaaacctggttacatctattg

SEQ ID NO: 317933 - DNA, 30 bp, Artificial Sequence
  Synthetic oligonucleotide
ccagttggcagtaactttagtgttctattg

SEQ ID NO: 317934 - DNA, 30 bp, Artificial Sequence
  Synthetic oligonucleotide
aaggatttgtccgacagcctctcagtattg

SEQ ID NO: 317935 - DNA, 30 bp, Artificial Sequence
  Synthetic oligonucleotide
ctttgaaggacagtcttgtgtcgagtattg

SEQ ID NO: 317936 - DNA, 30 bp, Artificial Sequence
  Synthetic oligonucleotide
cctgttcagcttacctaatgcttagtattg

SEQ ID NO: 317937 - DNA, 30 bp, Artificial Sequence
  Synthetic oligonucleotide
ttaaaagatggggtgaaagtttcggtattg

SEQ ID NO: 317938 - DNA, 30 bp, Artificial Sequence
  Synthetic oligonucleotide
cgatgccaatagcaacacggcaatgtattg

SEQ ID NO: 317939 - DNA, 30 bp, Artificial Sequence
  Synthetic oligonucleotide
aaacgtgatcatcctaatatctttgtattg

SEQ ID NO: 317940 - DNA, 30 bp, Artificial Sequence
  Synthetic oligonucleotide
tattgaaaagctctgcgactaaaattattg

SEQ ID NO: 317941 - DNA, 30 bp, Artificial Sequence
  Synthetic oligonucleotide
ccactaagctactgtaaaagtgtgttattg

SEQ ID NO: 317942 - DNA, 30 bp, Artificial Sequence
  Synthetic oligonucleotide
gggcaaaacaaatgggagggaattttattg

SEQ ID NO: 317943 - DNA, 30 bp, Artificial Sequence
  Synthetic oligonucleotide
attgcttcttcgtcctctctacttttattg

SEQ ID NO: 317944 - DNA, 30 bp, Artificial Sequence
  Synthetic oligonucleotide
gggtcaaatatcacctcggggtttttattg

SEQ ID NO: 317945 - DNA, 30 bp, Artificial Sequence
  Synthetic oligonucleotide
tgaactagccatgcattaatcgaaaacttg

SEQ ID NO: 317946 - DNA, 30 bp, Artificial Sequence
  Synthetic oligonucleotide
cacactacgatgcccgccattataaacttg

SEQ ID NO: 317947 - DNA, 30 bp, Artificial Sequence
  Synthetic oligonucleotide
gaggtccactacgaacccgcaaacaacttg

SEQ ID NO: 317948 - DNA, 30 bp, Artificial Sequence
  Synthetic oligonucleotide
gcagtctgacttccgaagagggccaacttg

SEQ ID NO: 317949 - DNA, 30 bp, Artificial Sequence
  Synthetic oligonucleotide
tacagcacaatgcggcaaagaaagaacttg

SEQ ID NO: 317950 - DNA, 30 bp, Artificial Sequence
  Synthetic oligonucleotide
tgatcggtggcaaacacctatcagaacttg

SEQ ID NO: 317951 - DNA, 30 bp, Artificial Sequence
  Synthetic oligonucleotide
tcatgtcggtgctattttaatacgaacttg

SEQ ID NO: 317952 - DNA, 30 bp, Artificial Sequence
  Synthetic oligonucleotide
gccatttgattcgggaacatcgataacttg

SEQ ID NO: 317953 - DNA, 30 bp, Artificial Sequence
  Synthetic oligonucleotide
cctggaaccgatgacttaccatataacttg

SEQ ID NO: 317954 - DNA, 30 bp, Artificial Sequence
  Synthetic oligonucleotide
taattcggaactcattctcagggacacttg

SEQ ID NO: 317955 - DNA, 30 bp, Artificial Sequence
  Synthetic oligonucleotide
ttttcatagaaaacccaaggtttacacttg

SEQ ID NO: 317956 - DNA, 30 bp, Artificial Sequence
  Synthetic oligonucleotide
aataaaagaccggtatccgttctccacttg

SEQ ID NO: 317957 - DNA, 30 bp, Artificial Sequence
  Synthetic oligonucleotide
tgtacggtgagtaacaactacttccacttg

SEQ ID NO: 317958 - DNA, 30 bp, Artificial Sequence
  Synthetic oligonucleotide
tatcttgcggaacggataatatatcacttg

SEQ ID NO: 317959 - DNA, 30 bp, Artificial Sequence
  Synthetic oligonucleotide
cctgccgtaccaaggactttatatcacttg

SEQ ID NO: 317960 - DNA, 30 bp, Artificial Sequence
  Synthetic oligonucleotide
tacgaggatcggcagttttatattcacttg

SEQ ID NO: 317961 - DNA, 30 bp, Artificial Sequence
  Synthetic oligonucleotide
atggctattataattcacgttatagacttg

SEQ ID NO: 317962 - DNA, 30 bp, Artificial Sequence
  Synthetic oligonucleotide
tggggctttactaagcttagatgcgacttg

SEQ ID NO: 317963 - DNA, 30 bp, Artificial Sequence
  Synthetic oligonucleotide
ttgtcggggtccatttaatatgtcgacttg

SEQ ID NO: 317964 - DNA, 30 bp, Artificial Sequence
  Synthetic oligonucleotide
atcctatacgcagagattatgaaggacttg

SEQ ID NO: 317965 - DNA, 30 bp, Artificial Sequence
  Synthetic oligonucleotide
aaagatataaaccacagttacgaggacttg

SEQ ID NO: 317966 - DNA, 30 bp, Artificial Sequence
  Synthetic oligonucleotide
aatctaggtatgacgttttcggaggacttg

SEQ ID NO: 317967 - DNA, 30 bp, Artificial Sequence
  Synthetic oligonucleotide
agttaatcccgtcgactttgcacggacttg

SEQ ID NO: 317968 - DNA, 30 bp, Artificial Sequence
  Synthetic oligonucleotide
tgaggctgaattcactaggaccctgacttg

SEQ ID NO: 317969 - DNA, 30 bp, Artificial Sequence
  Synthetic oligonucleotide
tttgtccattctgcctcggtatctgacttg

SEQ ID NO: 317970 - DNA, 30 bp, Artificial Sequence
  Synthetic oligonucleotide
agccttatatggaagctcattggatacttg

SEQ ID NO: 317971 - DNA, 30 bp, Artificial Sequence
  Synthetic oligonucleotide
aggatgagtgaatgtactagtgtgtacttg

SEQ ID NO: 317972 - DNA, 30 bp, Artificial Sequence
  Synthetic oligonucleotide
cagcccgaacccgcggcatgttaaaccttg

SEQ ID NO: 317973 - DNA, 30 bp, Artificial Sequence
  Synthetic oligonucleotide
aaagtaaaatcgtgttaacgacctaccttg

SEQ ID NO: 317974 - DNA, 30 bp, Artificial Sequence
  Synthetic oligonucleotide
atatcgggtttccaggtatacacacccttg

SEQ ID NO: 317975 - DNA, 30 bp, Artificial Sequence
  Synthetic oligonucleotide
tgccgagaagtggggtggctatgacccttg

SEQ ID NO: 317976 - DNA, 30 bp, Artificial Sequence
  Synthetic oligonucleotide
ggtccacttagaagtaccgccgtccccttg

SEQ ID NO: 317977 - DNA, 30 bp, Artificial Sequence
  Synthetic oligonucleotide
gtatattcgggtttgaggatccagcccttg

SEQ ID NO: 317978 - DNA, 30 bp, Artificial Sequence
  Synthetic oligonucleotide
cgatttttattatgacagtggcatcccttg

SEQ ID NO: 317979 - DNA, 30 bp, Artificial Sequence
  Synthetic oligonucleotide
gaatggtatagttgcgtcgaggttcccttg

SEQ ID NO: 317980 - DNA, 30 bp, Artificial Sequence
  Synthetic oligonucleotide
cttcgccggaaatagcaaacgtaagccttg

SEQ ID NO: 317981 - DNA, 30 bp, Artificial Sequence
  Synthetic oligonucleotide
accagttagaagggctgtataacagccttg

SEQ ID NO: 317982 - DNA, 30 bp, Artificial Sequence
  Synthetic oligonucleotide
cttttactaagtgacctaaattgagccttg

SEQ ID NO: 317983 - DNA, 31 bp, Artificial Sequence
  Synthetic oligonucleotide
gcttaagcaagtctgatgaataatggccttg

SEQ ID NO: 317984 - DNA, 30 bp, Artificial Sequence
  Synthetic oligonucleotide
ggtaaggagattcggactgtttctgccttg

SEQ ID NO: 317985 - DNA, 30 bp, Artificial Sequence
  Synthetic oligonucleotide
gagtaatctttcagttaagtcgttgccttg

SEQ ID NO: 317986 - DNA, 30 bp, Artificial Sequence
  Synthetic oligonucleotide
aaccgcagcctgacgggggataggtccttg

SEQ ID NO: 317987 - DNA, 30 bp, Artificial Sequence
  Synthetic oligonucleotide
ccaaagttcccaattaatgacacttccttg

SEQ ID NO: 317988 - DNA, 30 bp, Artificial Sequence
  Synthetic oligonucleotide
tctagagagcagaccgttggagcttccttg

SEQ ID NO: 317989 - DNA, 30 bp, Artificial Sequence
  Synthetic oligonucleotide
actgtgtgtcgaggctataagttttccttg

SEQ ID NO: 317990 - DNA, 30 bp, Artificial Sequence
  Synthetic oligonucleotide
agttaatggccatcagactcataaagcttg

SEQ ID NO: 317991 - DNA, 30 bp, Artificial Sequence
  Synthetic oligonucleotide
ctatcgctaggacttacaacaaccagcttg

SEQ ID NO: 317992 - DNA, 30 bp, Artificial Sequence
  Synthetic oligonucleotide
agggaatcccagaatatattgatgagcttg

SEQ ID NO: 317993 - DNA, 30 bp, Artificial Sequence
  Synthetic oligonucleotide
catatcatctcgtcctccaccgttagcttg

SEQ ID NO: 317994 - DNA, 30 bp, Artificial Sequence
  Synthetic oligonucleotide
caagtagcttccgtcgagtccaaaggcttg

SEQ ID NO: 317995 - DNA, 30 bp, Artificial Sequence
  Synthetic oligonucleotide
gagacttgttacacaaaaggtggaggcttg

SEQ ID NO: 317996 - DNA, 30 bp, Artificial Sequence
  Synthetic oligonucleotide
aggacccggtttaagtatgttttaggcttg

SEQ ID NO: 317997 - DNA, 30 bp, Artificial Sequence
  Synthetic oligonucleotide
tgcccgggcatactgctcgtctggggcttg

SEQ ID NO: 317998 - DNA, 30 bp, Artificial Sequence
  Synthetic oligonucleotide
ttagttcaagtgtttagagcttggggcttg

SEQ ID NO: 317999 - DNA, 30 bp, Artificial Sequence
  Synthetic oligonucleotide
gacgataaacctgcttccgcaactggcttg

SEQ ID NO: 318000 - DNA, 30 bp, Artificial Sequence
  Synthetic oligonucleotide
catgggcggctgacttgggagggatgcttg

SEQ ID NO: 318001 - DNA, 30 bp, Artificial Sequence
  Synthetic oligonucleotide
ttcatacaaatttaaactgtatcctgcttg

SEQ ID NO: 318002 - DNA, 30 bp, Artificial Sequence
  Synthetic oligonucleotide
tattctaattagtcgtgcccggtgtgcttg

SEQ ID NO: 318003 - DNA, 30 bp, Artificial Sequence
  Synthetic oligonucleotide
aacatttgtatatagcttcttacttgcttg

SEQ ID NO: 318004 - DNA, 30 bp, Artificial Sequence
  Synthetic oligonucleotide
cgcgcgtgggatgacgggaacgcttgcttg

SEQ ID NO: 318005 - DNA, 30 bp, Artificial Sequence
  Synthetic oligonucleotide
ctgtacttgttccgggagttcttttgcttg

SEQ ID NO: 318006 - DNA, 30 bp, Artificial Sequence
  Synthetic oligonucleotide
cttatttaagaagctggtcacgaaatcttg

SEQ ID NO: 318007 - DNA, 30 bp, Artificial Sequence
  Synthetic oligonucleotide
gaaagaattatgctgtgttccgcaatcttg

SEQ ID NO: 318008 - DNA, 30 bp, Artificial Sequence
  Synthetic oligonucleotide
tacgccaaaatatagcaagttcgcatcttg

SEQ ID NO: 318009 - DNA, 30 bp, Artificial Sequence
  Synthetic oligonucleotide
actgaagcatctcagggtggtatcatcttg

SEQ ID NO: 318010 - DNA, 30 bp, Artificial Sequence
  Synthetic oligonucleotide
ctatcggtagatgctgctttaacgatcttg

SEQ ID NO: 318011 - DNA, 30 bp, Artificial Sequence
  Synthetic oligonucleotide
ggggttttagggcgtcatggcgagctcttg

SEQ ID NO: 318012 - DNA, 30 bp, Artificial Sequence
  Synthetic oligonucleotide
caacctggataggccagctctccgctcttg

SEQ ID NO: 318013 - DNA, 30 bp, Artificial Sequence
  Synthetic oligonucleotide
ggcaataatgattctaactgttatctcttg

SEQ ID NO: 318014 - DNA, 30 bp, Artificial Sequence
  Synthetic oligonucleotide
ccaattacatcaacattatagtgtctcttg

SEQ ID NO: 318015 - DNA, 30 bp, Artificial Sequence
  Synthetic oligonucleotide
atacacgtgcccggccaggaagttctcttg

SEQ ID NO: 318016 - DNA, 30 bp, Artificial Sequence
  Synthetic oligonucleotide
cgaacgtacaagagggttttagttctcttg

SEQ ID NO: 318017 - DNA, 30 bp, Artificial Sequence
  Synthetic oligonucleotide
ggcatacgctgtgtcggcgggcgcgtcttg

SEQ ID NO: 318018 - DNA, 30 bp, Artificial Sequence
  Synthetic oligonucleotide
gcccgctaccagagagtaggacaggtcttg

SEQ ID NO: 318019 - DNA, 30 bp, Artificial Sequence
  Synthetic oligonucleotide
agtgatttaagtgggaatcgataattcttg

SEQ ID NO: 318020 - DNA, 30 bp, Artificial Sequence
  Synthetic oligonucleotide
aggagggcaagtacctgctccccattcttg

SEQ ID NO: 318021 - DNA, 30 bp, Artificial Sequence
  Synthetic oligonucleotide
gggatattgggtacacggcgatcattcttg

SEQ ID NO: 318022 - DNA, 30 bp, Artificial Sequence
  Synthetic oligonucleotide
tgggggaagtttaacatagtttcgttcttg

SEQ ID NO: 318023 - DNA, 30 bp, Artificial Sequence
  Synthetic oligonucleotide
tgcgttcagaattgggatctgaaaaagttg

SEQ ID NO: 318024 - DNA, 30 bp, Artificial Sequence
  Synthetic oligonucleotide
aaatgacccgagcgggggagtacgaagttg

SEQ ID NO: 318025 - DNA, 30 bp, Artificial Sequence
  Synthetic oligonucleotide
taaataccccgacgatcccttacgaagttg

SEQ ID NO: 318026 - DNA, 30 bp, Artificial Sequence
  Synthetic oligonucleotide
gtatctccagtgtgatcacatgctaagttg

SEQ ID NO: 318027 - DNA, 30 bp, Artificial Sequence
  Synthetic oligonucleotide
aaaggagctatctacaggtgggaacagttg

SEQ ID NO: 318028 - DNA, 30 bp, Artificial Sequence
  Synthetic oligonucleotide
agttgggacagtgtcaccgcaggccagttg

SEQ ID NO: 318029 - DNA, 30 bp, Artificial Sequence
  Synthetic oligonucleotide
ttgtcgagcgactcttgagatatccagttg

SEQ ID NO: 318030 - DNA, 30 bp, Artificial Sequence
  Synthetic oligonucleotide
ttgaataagcctgtgggctagtatcagttg

SEQ ID NO: 318031 - DNA, 30 bp, Artificial Sequence
  Synthetic oligonucleotide
tattgtagaagcgtactaacgactcagttg

SEQ ID NO: 318032 - DNA, 30 bp, Artificial Sequence
  Synthetic oligonucleotide
ccgcgcacatgaaggcagccaccagagttg

SEQ ID NO: 318033 - DNA, 30 bp, Artificial Sequence
  Synthetic oligonucleotide
tatacattaactgtcgggttgcgcgagttg

SEQ ID NO: 318034 - DNA, 30 bp, Artificial Sequence
  Synthetic oligonucleotide
ctgcgcaagcatgcaagctcttaggagttg

SEQ ID NO: 318035 - DNA, 30 bp, Artificial Sequence
  Synthetic oligonucleotide
tggttgtcgggccggtagtatggggagttg

SEQ ID NO: 318036 - DNA, 30 bp, Artificial Sequence
  Synthetic oligonucleotide
atcagtttcgagtatgggccccatgagttg

SEQ ID NO: 318037 - DNA, 30 bp, Artificial Sequence
  Synthetic oligonucleotide
gctacgtaagaacgtttcgccatatagttg

SEQ ID NO: 318038 - DNA, 30 bp, Artificial Sequence
  Synthetic oligonucleotide
cactatggtcctcacattcgcctatagttg

SEQ ID NO: 318039 - DNA, 30 bp, Artificial Sequence
  Synthetic oligonucleotide
tagattatatgagattacttgagctagttg

SEQ ID NO: 318040 - DNA, 30 bp, Artificial Sequence
  Synthetic oligonucleotide
ataagcttttccgataccgcgtagtagttg

SEQ ID NO: 318041 - DNA, 30 bp, Artificial Sequence
  Synthetic oligonucleotide
cgtatatatggtcgtacagtttagtagttg

SEQ ID NO: 318042 - DNA, 30 bp, Artificial Sequence
  Synthetic oligonucleotide
aaccccactgttcaaacgtactaaacgttg

SEQ ID NO: 318043 - DNA, 30 bp, Artificial Sequence
  Synthetic oligonucleotide
agtgatcggtgcatcggataacgaacgttg

SEQ ID NO: 318044 - DNA, 30 bp, Artificial Sequence
  Synthetic oligonucleotide
ctccgtgtacgaagtaagcacataacgttg

SEQ ID NO: 318045 - DNA, 30 bp, Artificial Sequence
  Synthetic oligonucleotide
ggttcacgttgatcaattcctcggccgttg

SEQ ID NO: 318046 - DNA, 30 bp, Artificial Sequence
  Synthetic oligonucleotide
cgcaagggttacacccattttattccgttg

SEQ ID NO: 318047 - DNA, 30 bp, Artificial Sequence
  Synthetic oligonucleotide
ccctcaaataaatttaatgtgaaagcgttg

SEQ ID NO: 318048 - DNA, 30 bp, Artificial Sequence
  Synthetic oligonucleotide
agcgtaaagttaacaattttgtacgcgttg

SEQ ID NO: 318049 - DNA, 30 bp, Artificial Sequence
  Synthetic oligonucleotide
aaatgaagttaggtcttcgacgaggcgttg

SEQ ID NO: 318050 - DNA, 30 bp, Artificial Sequence
  Synthetic oligonucleotide
ggctcaaatccccatgtgcatagggcgttg

SEQ ID NO: 318051 - DNA, 30 bp, Artificial Sequence
  Synthetic oligonucleotide
gtcatttgacgtaaagtcgttcctgcgttg

SEQ ID NO: 318052 - DNA, 30 bp, Artificial Sequence
  Synthetic oligonucleotide
attttataaaacaggttctccgactcgttg

SEQ ID NO: 318053 - DNA, 30 bp, Artificial Sequence
  Synthetic oligonucleotide
gaaacttcacttataaaggttgcctcgttg

SEQ ID NO: 318054 - DNA, 30 bp, Artificial Sequence
  Synthetic oligonucleotide
ggattcacaggctgcctcaccgcgtcgttg

SEQ ID NO: 318055 - DNA, 30 bp, Artificial Sequence
  Synthetic oligonucleotide
gtatatataaccagcgatttatcgtcgttg

SEQ ID NO: 318056 - DNA, 30 bp, Artificial Sequence
  Synthetic oligonucleotide
tgagccgttgggcagactttttaaaggttg

SEQ ID NO: 318057 - DNA, 30 bp, Artificial Sequence
  Synthetic oligonucleotide
ctagcaaaggacggtttaagcacaaggttg

SEQ ID NO: 318058 - DNA, 30 bp, Artificial Sequence
  Synthetic oligonucleotide
attggtcgaccgtaccgattgtacaggttg

SEQ ID NO: 318059 - DNA, 30 bp, Artificial Sequence
  Synthetic oligonucleotide
tctcataacagatatgttctagccaggttg

SEQ ID NO: 318060 - DNA, 30 bp, Artificial Sequence
  Synthetic oligonucleotide
ttactacgcgttctgctacctttcaggttg

SEQ ID NO: 318061 - DNA, 30 bp, Artificial Sequence
  Synthetic oligonucleotide
atttcgtctggagaatgccaacagaggttg

SEQ ID NO: 318062 - DNA, 30 bp, Artificial Sequence
  Synthetic oligonucleotide
tacctcaattggccttttgcacggaggttg

SEQ ID NO: 318063 - DNA, 30 bp, Artificial Sequence
  Synthetic oligonucleotide
gttacgttcctcagagagatattgaggttg

SEQ ID NO: 318064 - DNA, 30 bp, Artificial Sequence
  Synthetic oligonucleotide
tgctagggcttaaccacttgatataggttg

SEQ ID NO: 318065 - DNA, 30 bp, Artificial Sequence
  Synthetic oligonucleotide
gagaagggggctggcagacccattaggttg

SEQ ID NO: 318066 - DNA, 30 bp, Artificial Sequence
  Synthetic oligonucleotide
caaacaggtgtacttcatggacttaggttg

SEQ ID NO: 318067 - DNA, 30 bp, Artificial Sequence
  Synthetic oligonucleotide
attagtaaaggcgtccggcagaaacggttg

SEQ ID NO: 318068 - DNA, 30 bp, Artificial Sequence
  Synthetic oligonucleotide
atggagtcacatatttaggagtcacggttg

SEQ ID NO: 318069 - DNA, 30 bp, Artificial Sequence
  Synthetic oligonucleotide
gagttcaatgttcctaatgaaagacggttg

SEQ ID NO: 318070 - DNA, 30 bp, Artificial Sequence
  Synthetic oligonucleotide
gctatacgcagtatgtatgtcatacggttg

SEQ ID NO: 318071 - DNA, 30 bp, Artificial Sequence
  Synthetic oligonucleotide
tgcatggcgatatccaggcaccaccggttg

SEQ ID NO: 318072 - DNA, 30 bp, Artificial Sequence
  Synthetic oligonucleotide
tatacctaataggcgcaaaaatggcggttg

SEQ ID NO: 318073 - DNA, 30 bp, Artificial Sequence
  Synthetic oligonucleotide
gggtcctgtttgccgggtcttagtcggttg

SEQ ID NO: 318074 - DNA, 30 bp, Artificial Sequence
  Synthetic oligonucleotide
ggactccgctcggaggctttgcgtcggttg

SEQ ID NO: 318075 - DNA, 30 bp, Artificial Sequence
  Synthetic oligonucleotide
caccttcgcgcggtactttgaggagggttg

SEQ ID NO: 318076 - DNA, 30 bp, Artificial Sequence
  Synthetic oligonucleotide
gtagaacgttgaaggatccaatacgggttg

SEQ ID NO: 318077 - DNA, 30 bp, Artificial Sequence
  Synthetic oligonucleotide
acgactattagtctgccgtccaccgggttg

SEQ ID NO: 318078 - DNA, 30 bp, Artificial Sequence
  Synthetic oligonucleotide
gaagttgtagggaagcacgcatccgggttg

SEQ ID NO: 318079 - DNA, 30 bp, Artificial Sequence
  Synthetic oligonucleotide
tgaaggcttatacgttgaagataggggttg

SEQ ID NO: 318080 - DNA, 30 bp, Artificial Sequence
  Synthetic oligonucleotide
ggagcggactcgggcgtgcaaggggggttg

SEQ ID NO: 318081 - DNA, 30 bp, Artificial Sequence
  Synthetic oligonucleotide
acgcggtcgggcagctttctcggtgggttg

SEQ ID NO: 318082 - DNA, 30 bp, Artificial Sequence
  Synthetic oligonucleotide
tgagtctaaaaaactacgtgcatatggttg

SEQ ID NO: 318083 - DNA, 30 bp, Artificial Sequence
  Synthetic oligonucleotide
gaactgggagtacacgaccaggcctggttg

SEQ ID NO: 318084 - DNA, 30 bp, Artificial Sequence
  Synthetic oligonucleotide
cgcactcgagacaacatgataatttggttg

SEQ ID NO: 318085 - DNA, 30 bp, Artificial Sequence
  Synthetic oligonucleotide
tcgacaaccaaattactggtgggaatgttg

SEQ ID NO: 318086 - DNA, 30 bp, Artificial Sequence
  Synthetic oligonucleotide
aaccaatatgacgaatacgagcccatgttg

SEQ ID NO: 318087 - DNA, 30 bp, Artificial Sequence
  Synthetic oligonucleotide
taaaatctacgacggtgggtagcgatgttg

SEQ ID NO: 318088 - DNA, 30 bp, Artificial Sequence
  Synthetic oligonucleotide
agttatggaaaatctatttggtctatgttg

SEQ ID NO: 318089 - DNA, 30 bp, Artificial Sequence
  Synthetic oligonucleotide
cttgaactttccttaagcacctacctgttg

SEQ ID NO: 318090 - DNA, 30 bp, Artificial Sequence
  Synthetic oligonucleotide
tgcgtgctcaaaagcattataatcctgttg

SEQ ID NO: 318091 - DNA, 30 bp, Artificial Sequence
  Synthetic oligonucleotide
gtggagtcggtcgtggggaatcctctgttg

SEQ ID NO: 318092 - DNA, 30 bp, Artificial Sequence
  Synthetic oligonucleotide
gttttgaataaggacgtggtggcagtgttg

SEQ ID NO: 318093 - DNA, 30 bp, Artificial Sequence
  Synthetic oligonucleotide
ggcccttaccgccttctacactcagtgttg

SEQ ID NO: 318094 - DNA, 30 bp, Artificial Sequence
  Synthetic oligonucleotide
aagatgtattgtttcgcataaggagtgttg

SEQ ID NO: 318095 - DNA, 30 bp, Artificial Sequence
  Synthetic oligonucleotide
aacgttgagtgagttagctggacggtgttg

SEQ ID NO: 318096 - DNA, 30 bp, Artificial Sequence
  Synthetic oligonucleotide
aaatataggtaggagtaatttagattgttg

SEQ ID NO: 318097 - DNA, 30 bp, Artificial Sequence
  Synthetic oligonucleotide
ccccggattagcatagtctaatacttgttg

SEQ ID NO: 318098 - DNA, 30 bp, Artificial Sequence
  Synthetic oligonucleotide
gcttccagctagggacagagtcggttgttg

SEQ ID NO: 318099 - DNA, 30 bp, Artificial Sequence
  Synthetic oligonucleotide
gttgtatagccgtgaagtgaatgtttgttg

SEQ ID NO: 318100 - DNA, 30 bp, Artificial Sequence
  Synthetic oligonucleotide
tttcgctggatctggtgtctttgtttgttg

SEQ ID NO: 318101 - DNA, 30 bp, Artificial Sequence
  Synthetic oligonucleotide
tgcctctctacgcactgtgaagttttgttg

SEQ ID NO: 318102 - DNA, 30 bp, Artificial Sequence
  Synthetic oligonucleotide
caacttgagcgccattctccttttttgttg

SEQ ID NO: 318103 - DNA, 30 bp, Artificial Sequence
  Synthetic oligonucleotide
gcatcggaccagtatagcctataaaatttg

SEQ ID NO: 318104 - DNA, 30 bp, Artificial Sequence
  Synthetic oligonucleotide
aagggccggttgtcaatctatagaaatttg

SEQ ID NO: 318105 - DNA, 30 bp, Artificial Sequence
  Synthetic oligonucleotide
tttctaatctttcatagaaggggaaatttg

SEQ ID NO: 318106 - DNA, 30 bp, Artificial Sequence
  Synthetic oligonucleotide
ttatacactttggccagaggagccaatttg

SEQ ID NO: 318107 - DNA, 30 bp, Artificial Sequence
  Synthetic oligonucleotide
acctctatcctcacaaaacgggagaatttg

SEQ ID NO: 318108 - DNA, 30 bp, Artificial Sequence
  Synthetic oligonucleotide
tagagcgcgtattgggtggtcatgaatttg

SEQ ID NO: 318109 - DNA, 30 bp, Artificial Sequence
  Synthetic oligonucleotide
gctggagccggaaatttagctttgaatttg

SEQ ID NO: 318110 - DNA, 30 bp, Artificial Sequence
  Synthetic oligonucleotide
aaggtgataggtaatccgggtattaatttg

SEQ ID NO: 318111 - DNA, 30 bp, Artificial Sequence
  Synthetic oligonucleotide
agcaccaacctaaccgcggatacacatttg

SEQ ID NO: 318112 - DNA, 30 bp, Artificial Sequence
  Synthetic oligonucleotide
aatggtgtttgcctcagccgtacacatttg

SEQ ID NO: 318113 - DNA, 30 bp, Artificial Sequence
  Synthetic oligonucleotide
gtccagtttgtcggaggatgtaagcatttg

SEQ ID NO: 318114 - DNA, 30 bp, Artificial Sequence
  Synthetic oligonucleotide
gctctgtcattttcgggaattgatcatttg

SEQ ID NO: 318115 - DNA, 30 bp, Artificial Sequence
  Synthetic oligonucleotide
gctcaagctcttcagatacatcgtcatttg

SEQ ID NO: 318116 - DNA, 30 bp, Artificial Sequence
  Synthetic oligonucleotide
aaaaagcctgtatcatactgacaggatttg

SEQ ID NO: 318117 - DNA, 30 bp, Artificial Sequence
  Synthetic oligonucleotide
gtctgcatgtggatcaattgcagggatttg

SEQ ID NO: 318118 - DNA, 30 bp, Artificial Sequence
  Synthetic oligonucleotide
tgttcccggtcgcggttacgggcatatttg

SEQ ID NO: 318119 - DNA, 30 bp, Artificial Sequence
  Synthetic oligonucleotide
gcggtgcttggtaggtattaaggatatttg

SEQ ID NO: 318120 - DNA, 30 bp, Artificial Sequence
  Synthetic oligonucleotide
aacgcgcaattgacaggttatttatatttg

SEQ ID NO: 318121 - DNA, 30 bp, Artificial Sequence
  Synthetic oligonucleotide
acatccagagctctaagtatctcctatttg

SEQ ID NO: 318122 - DNA, 30 bp, Artificial Sequence
  Synthetic oligonucleotide
cagaggagttatgtataagtcaagtatttg

SEQ ID NO: 318123 - DNA, 30 bp, Artificial Sequence
  Synthetic oligonucleotide
gatctagaggttctcgctatcacgtatttg

SEQ ID NO: 318124 - DNA, 30 bp, Artificial Sequence
  Synthetic oligonucleotide
tgccgccagaatcagatggcagtgtatttg

SEQ ID NO: 318125 - DNA, 30 bp, Artificial Sequence
  Synthetic oligonucleotide
acataagcaaaaacgcattacaattatttg

SEQ ID NO: 318126 - DNA, 30 bp, Artificial Sequence
  Synthetic oligonucleotide
acgcaacattgaaggcatgcacgaactttg

SEQ ID NO: 318127 - DNA, 30 bp, Artificial Sequence
  Synthetic oligonucleotide
ggcggaaaaagtttaactgtctagactttg

SEQ ID NO: 318128 - DNA, 30 bp, Artificial Sequence
  Synthetic oligonucleotide
atccgtagaatctgagcgtttcctactttg

SEQ ID NO: 318129 - DNA, 30 bp, Artificial Sequence
  Synthetic oligonucleotide
tcttgttcgggggacatagatcttactttg

SEQ ID NO: 318130 - DNA, 30 bp, Artificial Sequence
  Synthetic oligonucleotide
acaaagccgtgcctctgcgcacatcctttg

SEQ ID NO: 318131 - DNA, 30 bp, Artificial Sequence
  Synthetic oligonucleotide
ctacagtattggcgcgtggcgcgtcctttg

SEQ ID NO: 318132 - DNA, 30 bp, Artificial Sequence
  Synthetic oligonucleotide
acgcactgggtacggtggccctttcctttg

SEQ ID NO: 318133 - DNA, 30 bp, Artificial Sequence
  Synthetic oligonucleotide
tccttgctggtaaaccgatggtaagctttg

SEQ ID NO: 318134 - DNA, 30 bp, Artificial Sequence
  Synthetic oligonucleotide
tcgtttgcagacaggacccaccaggctttg

SEQ ID NO: 318135 - DNA, 30 bp, Artificial Sequence
  Synthetic oligonucleotide
cgtctgggagatcaaatgagtcaggctttg

SEQ ID NO: 318136 - DNA, 30 bp, Artificial Sequence
  Synthetic oligonucleotide
tataggagtcatacggcactattggctttg

SEQ ID NO: 318137 - DNA, 30 bp, Artificial Sequence
  Synthetic oligonucleotide
tgtaggtcaggcctctatctgatatctttg

SEQ ID NO: 318138 - DNA, 30 bp, Artificial Sequence
  Synthetic oligonucleotide
agaattcctgaaccggtgataaactctttg

SEQ ID NO: 318139 - DNA, 30 bp, Artificial Sequence
  Synthetic oligonucleotide
agtaatctcctgctgcacgtatagtctttg

SEQ ID NO: 318140 - DNA, 30 bp, Artificial Sequence
  Synthetic oligonucleotide
gattgcttctggaaaaggcaaaggtctttg

SEQ ID NO: 318141 - DNA, 30 bp, Artificial Sequence
  Synthetic oligonucleotide
cttacaggatggagagacgtacggtctttg

SEQ ID NO: 318142 - DNA, 30 bp, Artificial Sequence
  Synthetic oligonucleotide
ttctatggtttaaagacttgaccttctttg

SEQ ID NO: 318143 - DNA, 30 bp, Artificial Sequence
  Synthetic oligonucleotide
ggtcaggattacatgcctccgcaaagtttg

SEQ ID NO: 318144 - DNA, 30 bp, Artificial Sequence
  Synthetic oligonucleotide
gctccgtcccatctcaatataagaagtttg

SEQ ID NO: 318145 - DNA, 30 bp, Artificial Sequence
  Synthetic oligonucleotide
tgtttatcctcataatggtagataagtttg

SEQ ID NO: 318146 - DNA, 30 bp, Artificial Sequence
  Synthetic oligonucleotide
tgctaatttgagcgagcggtcctaagtttg

SEQ ID NO: 318147 - DNA, 30 bp, Artificial Sequence
  Synthetic oligonucleotide
acgacactccaaatgaacgcaagcagtttg

SEQ ID NO: 318148 - DNA, 30 bp, Artificial Sequence
  Synthetic oligonucleotide
tctgccacgcgtgtggaggcgagtagtttg

SEQ ID NO: 318149 - DNA, 30 bp, Artificial Sequence
  Synthetic oligonucleotide
cccattcaactagcgtcgagataacgtttg

SEQ ID NO: 318150 - DNA, 30 bp, Artificial Sequence
  Synthetic oligonucleotide
aatactcaggggacgatgcggagacgtttg

SEQ ID NO: 318151 - DNA, 30 bp, Artificial Sequence
  Synthetic oligonucleotide
agaacggagtttattatcataaaccgtttg

SEQ ID NO: 318152 - DNA, 30 bp, Artificial Sequence
  Synthetic oligonucleotide
ctgcgtgagagagctctgaagccccgtttg

SEQ ID NO: 318153 - DNA, 30 bp, Artificial Sequence
  Synthetic oligonucleotide
ttcgcatactcaggtgacctgcagcgtttg

SEQ ID NO: 318154 - DNA, 30 bp, Artificial Sequence
  Synthetic oligonucleotide
agatggctcaaaaaaccgatacttcgtttg

SEQ ID NO: 318155 - DNA, 30 bp, Artificial Sequence
  Synthetic oligonucleotide
gaaattccagaaggactaagttcaggtttg

SEQ ID NO: 318156 - DNA, 30 bp, Artificial Sequence
  Synthetic oligonucleotide
aagagatacactggtatctatgacggtttg

SEQ ID NO: 318157 - DNA, 30 bp, Artificial Sequence
  Synthetic oligonucleotide
gcctagcagtgctatatgaacaggggtttg

SEQ ID NO: 318158 - DNA, 30 bp, Artificial Sequence
  Synthetic oligonucleotide
taccagcgtattgaaacgaagcttggtttg

SEQ ID NO: 318159 - DNA, 30 bp, Artificial Sequence
  Synthetic oligonucleotide
ctatgtgttcggacacgaggcatatgtttg

SEQ ID NO: 318160 - DNA, 30 bp, Artificial Sequence
  Synthetic oligonucleotide
gagcgcgctaaccagtatatgtactgtttg

SEQ ID NO: 318161 - DNA, 30 bp, Artificial Sequence
  Synthetic oligonucleotide
ctcaaataccggtatctcatcgtgtgtttg

SEQ ID NO: 318162 - DNA, 30 bp, Artificial Sequence
  Synthetic oligonucleotide
tcagcccttcaatctgaatggccttgtttg

SEQ ID NO: 318163 - DNA, 30 bp, Artificial Sequence
  Synthetic oligonucleotide
ggccccacctacattttccggtcttgtttg

SEQ ID NO: 318164 - DNA, 30 bp, Artificial Sequence
  Synthetic oligonucleotide
ggggacacctttttcggctaatgttgtttg

SEQ ID NO: 318165 - DNA, 30 bp, Artificial Sequence
  Synthetic oligonucleotide
ttgaggtgtttgtctggattaataattttg

SEQ ID NO: 318166 - DNA, 30 bp, Artificial Sequence
  Synthetic oligonucleotide
accacggagagattcatcattctaattttg

SEQ ID NO: 318167 - DNA, 30 bp, Artificial Sequence
  Synthetic oligonucleotide
gcggtccttcgtttgcaagtggtaattttg

SEQ ID NO: 318168 - DNA, 31 bp, Artificial Sequence
  Synthetic oligonucleotide
cagcctcgcgcgtccaatctagacgattttg

SEQ ID NO: 318169 - DNA, 30 bp, Artificial Sequence
  Synthetic oligonucleotide
gatagctctgcacgtaggagcatgattttg

SEQ ID NO: 318170 - DNA, 30 bp, Artificial Sequence
  Synthetic oligonucleotide
tatttgggctacaggaagtaattgattttg

SEQ ID NO: 318171 - DNA, 30 bp, Artificial Sequence
  Synthetic oligonucleotide
tccgagttcagctgaataaatagtattttg

SEQ ID NO: 318172 - DNA, 30 bp, Artificial Sequence
  Synthetic oligonucleotide
ggcggtcctatgcgccgactcggtattttg

SEQ ID NO: 318173 - DNA, 30 bp, Artificial Sequence
  Synthetic oligonucleotide
cggacaattggccgggagactattattttg

SEQ ID NO: 318174 - DNA, 30 bp, Artificial Sequence
  Synthetic oligonucleotide
aataggaaccgaggcagttcctcacttttg

SEQ ID NO: 318175 - DNA, 30 bp, Artificial Sequence
  Synthetic oligonucleotide
tcaagtactcgcggatttacgcgccttttg

SEQ ID NO: 318176 - DNA, 30 bp, Artificial Sequence
  Synthetic oligonucleotide
gcgctttcggacccaaaaagagcgcttttg

SEQ ID NO: 318177 - DNA, 30 bp, Artificial Sequence
  Synthetic oligonucleotide
gcagcaacgtagagattcatggggcttttg

SEQ ID NO: 318178 - DNA, 30 bp, Artificial Sequence
  Synthetic oligonucleotide
cagaaatatcacgaagggtgtatgcttttg

SEQ ID NO: 318179 - DNA, 30 bp, Artificial Sequence
  Synthetic oligonucleotide
gcacatcttaaccgcggtgatcctcttttg

SEQ ID NO: 318180 - DNA, 30 bp, Artificial Sequence
  Synthetic oligonucleotide
attgtaaaaagctacgaggcgtctcttttg

SEQ ID NO: 318181 - DNA, 30 bp, Artificial Sequence
  Synthetic oligonucleotide
actcgcaaacccgaccctgctcgtcttttg

SEQ ID NO: 318182 - DNA, 30 bp, Artificial Sequence
  Synthetic oligonucleotide
tcggtgaactttcggtggacagaagttttg

SEQ ID NO: 318183 - DNA, 30 bp, Artificial Sequence
  Synthetic oligonucleotide
cctaacaaaggcgcatccgtgggcgttttg

SEQ ID NO: 318184 - DNA, 30 bp, Artificial Sequence
  Synthetic oligonucleotide
tgtatggctcgggcagtcctactcgttttg

SEQ ID NO: 318185 - DNA, 30 bp, Artificial Sequence
  Synthetic oligonucleotide
tacctgaaccaacgctgcgcgagggttttg

SEQ ID NO: 318186 - DNA, 30 bp, Artificial Sequence
  Synthetic oligonucleotide
tgcctaagaaggttgcatcagtgggttttg

SEQ ID NO: 318187 - DNA, 30 bp, Artificial Sequence
  Synthetic oligonucleotide
aaataggaaaagagtaggagatctgttttg

SEQ ID NO: 318188 - DNA, 30 bp, Artificial Sequence
  Synthetic oligonucleotide
gacggacgtacgcatggcattcactttttg

SEQ ID NO: 318189 - DNA, 30 bp, Artificial Sequence
  Synthetic oligonucleotide
accaaatatacgctcccaacagactttttg

SEQ ID NO: 318190 - DNA, 30 bp, Artificial Sequence
  Synthetic oligonucleotide
ccctggtgatatgggtccccagactttttg

SEQ ID NO: 318191 - DNA, 30 bp, Artificial Sequence
  Synthetic oligonucleotide
ctacaatcgactgcacatgaaacctttttg

SEQ ID NO: 318192 - DNA, 30 bp, Artificial Sequence
  Synthetic oligonucleotide
ggcttgggtctcgagttgttgcgctttttg

SEQ ID NO: 318193 - DNA, 30 bp, Artificial Sequence
  Synthetic oligonucleotide
ctgcgcgtctacaagtgttactggtttttg

SEQ ID NO: 318194 - DNA, 30 bp, Artificial Sequence
  Synthetic oligonucleotide
catccaggacacggcaagtatcattttttg

SEQ ID NO: 318195 - DNA, 30 bp, Artificial Sequence
  Synthetic oligonucleotide
atttagcatctatagagaaatgattttttg

SEQ ID NO: 318196 - DNA, 30 bp, Artificial Sequence
  Synthetic oligonucleotide
ggcctaaccaagtaaggtttggaaaaaaat

SEQ ID NO: 318197 - DNA, 30 bp, Artificial Sequence
  Synthetic oligonucleotide
tgaacgacagagtggttaggacccaaaaat

SEQ ID NO: 318198 - DNA, 30 bp, Artificial Sequence
  Synthetic oligonucleotide
cgcggaacttcaaaataagtcgtcaaaaat

SEQ ID NO: 318199 - DNA, 30 bp, Artificial Sequence
  Synthetic oligonucleotide
ggattagctgagggaggagatacgaaaaat

SEQ ID NO: 318200 - DNA, 30 bp, Artificial Sequence
  Synthetic oligonucleotide
caaaaatctctccacgggcttccgaaaaat

SEQ ID NO: 318201 - DNA, 30 bp, Artificial Sequence
  Synthetic oligonucleotide
acatcgagtcgtccggcttatcggaaaaat

SEQ ID NO: 318202 - DNA, 30 bp, Artificial Sequence
  Synthetic oligonucleotide
gtaatctactgttgggacggccgtaaaaat

SEQ ID NO: 318203 - DNA, 30 bp, Artificial Sequence
  Synthetic oligonucleotide
gagctcggccaacgcacttcacaacaaaat

SEQ ID NO: 318204 - DNA, 30 bp, Artificial Sequence
  Synthetic oligonucleotide
gttacaatatggcagccgtcatgacaaaat

SEQ ID NO: 318205 - DNA, 30 bp, Artificial Sequence
  Synthetic oligonucleotide
ccacgtggatactactcgggtgtacaaaat

SEQ ID NO: 318206 - DNA, 30 bp, Artificial Sequence
  Synthetic oligonucleotide
cttcgcgaaggatcgatttgccagcaaaat

SEQ ID NO: 318207 - DNA, 30 bp, Artificial Sequence
  Synthetic oligonucleotide
tatagcagcgcatatatacggaggcaaaat

SEQ ID NO: 318208 - DNA, 30 bp, Artificial Sequence
  Synthetic oligonucleotide
ctggatctggttctcccgcgaaatcaaaat

SEQ ID NO: 318209 - DNA, 30 bp, Artificial Sequence
  Synthetic oligonucleotide
ccttccatagccggtaaatcgcatcaaaat

SEQ ID NO: 318210 - DNA, 30 bp, Artificial Sequence
  Synthetic oligonucleotide
tcagctaagccacggttcgtgcgtcaaaat

SEQ ID NO: 318211 - DNA, 30 bp, Artificial Sequence
  Synthetic oligonucleotide
gcgaaagacttcagctatgcagttcaaaat

SEQ ID NO: 318212 - DNA, 30 bp, Artificial Sequence
  Synthetic oligonucleotide
catagatcttaaaaacacaggtttcaaaat

SEQ ID NO: 318213 - DNA, 30 bp, Artificial Sequence
  Synthetic oligonucleotide
taggacgtgacagtcccaataacagaaaat

SEQ ID NO: 318214 - DNA, 30 bp, Artificial Sequence
  Synthetic oligonucleotide
ggcttttcggtgcacgacactacagaaaat

SEQ ID NO: 318215 - DNA, 30 bp, Artificial Sequence
  Synthetic oligonucleotide
aggtcattcgtataatcacaacaggaaaat

SEQ ID NO: 318216 - DNA, 30 bp, Artificial Sequence
  Synthetic oligonucleotide
tgtgagctcgcacgggtggacgcggaaaat

SEQ ID NO: 318217 - DNA, 30 bp, Artificial Sequence
  Synthetic oligonucleotide
gttcagcggtttttatgtgatgcggaaaat

SEQ ID NO: 318218 - DNA, 30 bp, Artificial Sequence
  Synthetic oligonucleotide
ggttttaagggaatcgacaggctggaaaat

SEQ ID NO: 318219 - DNA, 30 bp, Artificial Sequence
  Synthetic oligonucleotide
gatctaagcccagttcgtcagattgaaaat

SEQ ID NO: 318220 - DNA, 30 bp, Artificial Sequence
  Synthetic oligonucleotide
tttccaacagcgccagtttaagaataaaat

SEQ ID NO: 318221 - DNA, 30 bp, Artificial Sequence
  Synthetic oligonucleotide
aactaaagatgatcgggcgcttaataaaat

SEQ ID NO: 318222 - DNA, 30 bp, Artificial Sequence
  Synthetic oligonucleotide
ggtaaagaagcttgactgaattgataaaat

SEQ ID NO: 318223 - DNA, 30 bp, Artificial Sequence
  Synthetic oligonucleotide
cttaggtaaagcaccaccctcttctaaaat

SEQ ID NO: 318224 - DNA, 30 bp, Artificial Sequence
  Synthetic oligonucleotide
aaccgatggagttacgcctctgcgtaaaat

SEQ ID NO: 318225 - DNA, 30 bp, Artificial Sequence
  Synthetic oligonucleotide
cccggctgccgaaaacaggctaggtaaaat

SEQ ID NO: 318226 - DNA, 30 bp, Artificial Sequence
  Synthetic oligonucleotide
ggcttaaacgtcaaaattatctggtaaaat

SEQ ID NO: 318227 - DNA, 30 bp, Artificial Sequence
  Synthetic oligonucleotide
caaactcctgtacacttccggatttaaaat

SEQ ID NO: 318228 - DNA, 30 bp, Artificial Sequence
  Synthetic oligonucleotide
atctgtaacgcaatcaagcgatacacaaat

SEQ ID NO: 318229 - DNA, 30 bp, Artificial Sequence
  Synthetic oligonucleotide
caccatctaggatctcagcgggccacaaat

SEQ ID NO: 318230 - DNA, 30 bp, Artificial Sequence
  Synthetic oligonucleotide
gatatggtggttatgtaagaacgcacaaat

SEQ ID NO: 318231 - DNA, 30 bp, Artificial Sequence
  Synthetic oligonucleotide
taccaatccccgctcattttcgggacaaat

SEQ ID NO: 318232 - DNA, 30 bp, Artificial Sequence
  Synthetic oligonucleotide
gaggatgtggtgggcatttgcgctacaaat

SEQ ID NO: 318233 - DNA, 30 bp, Artificial Sequence
  Synthetic oligonucleotide
gcttcccaagtattggtagcatgtacaaat

SEQ ID NO: 318234 - DNA, 30 bp, Artificial Sequence
  Synthetic oligonucleotide
attggaaaatcgtcgtaacgccgaccaaat

SEQ ID NO: 318235 - DNA, 30 bp, Artificial Sequence
  Synthetic oligonucleotide
ggggctttctggtgtcaactactcccaaat

SEQ ID NO: 318236 - DNA, 30 bp, Artificial Sequence
  Synthetic oligonucleotide
gaccccatttggtaaaagattctgccaaat

SEQ ID NO: 318237 - DNA, 30 bp, Artificial Sequence
  Synthetic oligonucleotide
actattaccaacgaccgggcctaagcaaat

SEQ ID NO: 318238 - DNA, 30 bp, Artificial Sequence
  Synthetic oligonucleotide
gtagctggacgtaacctaagtttagcaaat

SEQ ID NO: 318239 - DNA, 30 bp, Artificial Sequence
  Synthetic oligonucleotide
taaccaatacatcctattagccgcgcaaat

SEQ ID NO: 318240 - DNA, 30 bp, Artificial Sequence
  Synthetic oligonucleotide
gtagtttgaacagtgcttcgctgcgcaaat

SEQ ID NO: 318241 - DNA, 30 bp, Artificial Sequence
  Synthetic oligonucleotide
gagcttaataggggtctaaatatcgcaaat

SEQ ID NO: 318242 - DNA, 30 bp, Artificial Sequence
  Synthetic oligonucleotide
gcctcttgccggggtgaaggggaggcaaat

SEQ ID NO: 318243 - DNA, 30 bp, Artificial Sequence
  Synthetic oligonucleotide
ggtatgtgcggtttgcagactgaggcaaat

SEQ ID NO: 318244 - DNA, 30 bp, Artificial Sequence
  Synthetic oligonucleotide
gcgatttcaagagttatgttgtgggcaaat

SEQ ID NO: 318245 - DNA, 30 bp, Artificial Sequence
  Synthetic oligonucleotide
cagacaatacatcacgcagctatggcaaat

SEQ ID NO: 318246 - DNA, 30 bp, Artificial Sequence
  Synthetic oligonucleotide
aatcgatgcgcggccatacgagcatcaaat

SEQ ID NO: 318247 - DNA, 30 bp, Artificial Sequence
  Synthetic oligonucleotide
tgctttaaggtatacaacccgggctcaaat

SEQ ID NO: 318248 - DNA, 30 bp, Artificial Sequence
  Synthetic oligonucleotide
aacctaactcaaaatggggggtgctcaaat

SEQ ID NO: 318249 - DNA, 30 bp, Artificial Sequence
  Synthetic oligonucleotide
ctcccgagtggtggctactatccgtcaaat

SEQ ID NO: 318250 - DNA, 30 bp, Artificial Sequence
  Synthetic oligonucleotide
ccgcagaagattctaatagcagcgtcaaat

SEQ ID NO: 318251 - DNA, 30 bp, Artificial Sequence
  Synthetic oligonucleotide
caagcttgaggtcaggacgtccggtcaaat

SEQ ID NO: 318252 - DNA, 30 bp, Artificial Sequence
  Synthetic oligonucleotide
caagttcggcgaaggcttagtctgtcaaat

SEQ ID NO: 318253 - DNA, 30 bp, Artificial Sequence
  Synthetic oligonucleotide
cagaccgggtaataaataacggtgtcaaat

SEQ ID NO: 318254 - DNA, 30 bp, Artificial Sequence
  Synthetic oligonucleotide
tccaccaaatctatgagcgcgttgtcaaat

SEQ ID NO: 318255 - DNA, 30 bp, Artificial Sequence
  Synthetic oligonucleotide
gatattacaaactctcaaacgaaaagaaat

SEQ ID NO: 318256 - DNA, 30 bp, Artificial Sequence
  Synthetic oligonucleotide
caatctagaggtactgtgatttcaagaaat

SEQ ID NO: 318257 - DNA, 30 bp, Artificial Sequence
  Synthetic oligonucleotide
aatgttccaactcacttagactgaagaaat

SEQ ID NO: 318258 - DNA, 30 bp, Artificial Sequence
  Synthetic oligonucleotide
ggaaggagctatcttcgagataggagaaat

SEQ ID NO: 318259 - DNA, 30 bp, Artificial Sequence
  Synthetic oligonucleotide
ttctgcgtatgttagggaatcgatagaaat

SEQ ID NO: 318260 - DNA, 30 bp, Artificial Sequence
  Synthetic oligonucleotide
cgtgctggatcacagagacggactagaaat

SEQ ID NO: 318261 - DNA, 30 bp, Artificial Sequence
  Synthetic oligonucleotide
ttcaggtggccatacgcgccacttagaaat

SEQ ID NO: 318262 - DNA, 30 bp, Artificial Sequence
  Synthetic oligonucleotide
acttcgactgtcaggattgcagaacgaaat

SEQ ID NO: 318263 - DNA, 30 bp, Artificial Sequence
  Synthetic oligonucleotide
ccgaacgcgctatagtaaatggaacgaaat

SEQ ID NO: 318264 - DNA, 30 bp, Artificial Sequence
  Synthetic oligonucleotide
taacctctatcagacgataatctacgaaat

SEQ ID NO: 318265 - DNA, 30 bp, Artificial Sequence
  Synthetic oligonucleotide
agtctttagggagtggtcaactcgcgaaat

SEQ ID NO: 318266 - DNA, 30 bp, Artificial Sequence
  Synthetic oligonucleotide
ggaggcggcgaggtgtcaaagcctcgaaat

SEQ ID NO: 318267 - DNA, 30 bp, Artificial Sequence
  Synthetic oligonucleotide
ggagtcataagtactatggttcacggaaat

SEQ ID NO: 318268 - DNA, 30 bp, Artificial Sequence
  Synthetic oligonucleotide
cataataggtcatgacaatttcccggaaat

SEQ ID NO: 318269 - DNA, 30 bp, Artificial Sequence
  Synthetic oligonucleotide
ccacctgagtttgggatgtccctcggaaat

SEQ ID NO: 318270 - DNA, 31 bp, Artificial Sequence
  Synthetic oligonucleotide
tagctggcgaccaggatagttaaagggaaat

SEQ ID NO: 318271 - DNA, 30 bp, Artificial Sequence
  Synthetic oligonucleotide
tgccaataggactctcccggtcagggaaat

SEQ ID NO: 318272 - DNA, 30 bp, Artificial Sequence
  Synthetic oligonucleotide
ataccgcaataggtccttgtaccgggaaat

SEQ ID NO: 318273 - DNA, 30 bp, Artificial Sequence
  Synthetic oligonucleotide
gcgagagactttatgaggtcatcgggaaat

SEQ ID NO: 318274 - DNA, 30 bp, Artificial Sequence
  Synthetic oligonucleotide
gcttcttatgtgttgggcacaatgggaaat

SEQ ID NO: 318275 - DNA, 30 bp, Artificial Sequence
  Synthetic oligonucleotide
aaggtcgagaaggggtgtgggttgggaaat

SEQ ID NO: 318276 - DNA, 30 bp, Artificial Sequence
  Synthetic oligonucleotide
gaaacttagcaacaagagcatcttggaaat

SEQ ID NO: 318277 - DNA, 30 bp, Artificial Sequence
  Synthetic oligonucleotide
cctctgccaggcattaggggcagatgaaat

SEQ ID NO: 318278 - DNA, 30 bp, Artificial Sequence
  Synthetic oligonucleotide
tcactgagtagtctgactatcaattgaaat

SEQ ID NO: 318279 - DNA, 30 bp, Artificial Sequence
  Synthetic oligonucleotide
atagaagtctaatgggtatcttattgaaat

SEQ ID NO: 318280 - DNA, 30 bp, Artificial Sequence
  Synthetic oligonucleotide
gtgatgacccgtcagtcttctgcttgaaat

SEQ ID NO: 318281 - DNA, 30 bp, Artificial Sequence
  Synthetic oligonucleotide
caaacgctttcgggccatgtcagttgaaat

SEQ ID NO: 318282 - DNA, 30 bp, Artificial Sequence
  Synthetic oligonucleotide
cggatgtgatagaaatgattgaaaataaat

SEQ ID NO: 318283 - DNA, 30 bp, Artificial Sequence
  Synthetic oligonucleotide
aagagcccgtacataccaacggtaataaat

SEQ ID NO: 318284 - DNA, 30 bp, Artificial Sequence
  Synthetic oligonucleotide
ttattaagagttaggtaagaagacataaat

SEQ ID NO: 318285 - DNA, 30 bp, Artificial Sequence
  Synthetic oligonucleotide
acagcctgcaataggtgcagccgcataaat

SEQ ID NO: 318286 - DNA, 30 bp, Artificial Sequence
  Synthetic oligonucleotide
acgcctgatggggcgaaaatccagataaat

SEQ ID NO: 318287 - DNA, 30 bp, Artificial Sequence
  Synthetic oligonucleotide
ttaccagaacaagggaggcttgagataaat

SEQ ID NO: 318288 - DNA, 30 bp, Artificial Sequence
  Synthetic oligonucleotide
actctgtcggcaacgggtggcctgataaat

SEQ ID NO: 318289 - DNA, 30 bp, Artificial Sequence
  Synthetic oligonucleotide
cgcggtttatgcggatatttgtccctaaat

SEQ ID NO: 318290 - DNA, 30 bp, Artificial Sequence
  Synthetic oligonucleotide
ggacgatagtagttgttattgatcctaaat

SEQ ID NO: 318291 - DNA, 30 bp, Artificial Sequence
  Synthetic oligonucleotide
aggtcctggcttataataagactcctaaat

SEQ ID NO: 318292 - DNA, 30 bp, Artificial Sequence
  Synthetic oligonucleotide
ggaactcttcgataccaatactggctaaat

SEQ ID NO: 318293 - DNA, 30 bp, Artificial Sequence
  Synthetic oligonucleotide
tataaggctaaagatataaagttgctaaat

SEQ ID NO: 318294 - DNA, 30 bp, Artificial Sequence
  Synthetic oligonucleotide
gtctaatacggaaggaaggtggatctaaat

SEQ ID NO: 318295 - DNA, 30 bp, Artificial Sequence
  Synthetic oligonucleotide
accacaagtaggggcatccagaaagtaaat

SEQ ID NO: 318296 - DNA, 30 bp, Artificial Sequence
  Synthetic oligonucleotide
tgtcaggtgcttattaggtggtgagtaaat

SEQ ID NO: 318297 - DNA, 30 bp, Artificial Sequence
  Synthetic oligonucleotide
ggtgggtaacgtgagcgcatattagtaaat

SEQ ID NO: 318298 - DNA, 30 bp, Artificial Sequence
  Synthetic oligonucleotide
ggcaagacgggcagttacctgaccgtaaat

SEQ ID NO: 318299 - DNA, 30 bp, Artificial Sequence
  Synthetic oligonucleotide
gagttggcgggggtcctacatttcgtaaat

SEQ ID NO: 318300 - DNA, 30 bp, Artificial Sequence
  Synthetic oligonucleotide
tttaggcgactagcgagcaatccggtaaat

SEQ ID NO: 318301 - DNA, 30 bp, Artificial Sequence
  Synthetic oligonucleotide
tccctgatccattctcaatttatggtaaat

SEQ ID NO: 318302 - DNA, 30 bp, Artificial Sequence
  Synthetic oligonucleotide
aagtaagttcggacgaccccacttgtaaat

SEQ ID NO: 318303 - DNA, 30 bp, Artificial Sequence
  Synthetic oligonucleotide
ttgcggacaaatgtgttaagcggattaaat

SEQ ID NO: 318304 - DNA, 30 bp, Artificial Sequence
  Synthetic oligonucleotide
tttgaaaacatgatacagagctacttaaat

SEQ ID NO: 318305 - DNA, 30 bp, Artificial Sequence
  Synthetic oligonucleotide
tgaacggtgaaatttatggtcgccttaaat

SEQ ID NO: 318306 - DNA, 30 bp, Artificial Sequence
  Synthetic oligonucleotide
actgactacgtctacgtaccgcgcttaaat

SEQ ID NO: 318307 - DNA, 30 bp, Artificial Sequence
  Synthetic oligonucleotide
tgctaccgaagaagatgccgcttcttaaat

SEQ ID NO: 318308 - DNA, 30 bp, Artificial Sequence
  Synthetic oligonucleotide
gggcaattatgtcggcagtccacgttaaat

SEQ ID NO: 318309 - DNA, 31 bp, Artificial Sequence
  Synthetic oligonucleotide
ttgccaagctgcctacaggctgacgttaaat

SEQ ID NO: 318310 - DNA, 30 bp, Artificial Sequence
  Synthetic oligonucleotide
cacggtatcagcgatatactgtggttaaat

SEQ ID NO: 318311 - DNA, 30 bp, Artificial Sequence
  Synthetic oligonucleotide
tttccatcggaacatggattggctttaaat

SEQ ID NO: 318312 - DNA, 30 bp, Artificial Sequence
  Synthetic oligonucleotide
gggggacttctgcactttagcagtttaaat

SEQ ID NO: 318313 - DNA, 30 bp, Artificial Sequence
  Synthetic oligonucleotide
cccagagtgttatttaaggtttcaaacaat

SEQ ID NO: 318314 - DNA, 30 bp, Artificial Sequence
  Synthetic oligonucleotide
atcagacctctccgtcccggacagaacaat

SEQ ID NO: 318315 - DNA, 30 bp, Artificial Sequence
  Synthetic oligonucleotide
ccccctattggtttcatcctaacgaacaat

SEQ ID NO: 318316 - DNA, 30 bp, Artificial Sequence
  Synthetic oligonucleotide
ccgcgtgtggcctatgaatgaaggaacaat

SEQ ID NO: 318317 - DNA, 30 bp, Artificial Sequence
  Synthetic oligonucleotide
atgtatctcttaatggtattgcggaacaat

SEQ ID NO: 318318 - DNA, 30 bp, Artificial Sequence
  Synthetic oligonucleotide
gcggagtcgacattaggcatattgaacaat

SEQ ID NO: 318319 - DNA, 30 bp, Artificial Sequence
  Synthetic oligonucleotide
gctgtgctccagggtagatatttgaacaat

SEQ ID NO: 318320 - DNA, 30 bp, Artificial Sequence
  Synthetic oligonucleotide
tctatgtgaatccgtatctgtaataacaat

SEQ ID NO: 318321 - DNA, 30 bp, Artificial Sequence
  Synthetic oligonucleotide
gctcactatgtttacacccttgctaacaat

SEQ ID NO: 318322 - DNA, 30 bp, Artificial Sequence
  Synthetic oligonucleotide
ctgcgtgcgccgacgttatctgttaacaat

SEQ ID NO: 318323 - DNA, 30 bp, Artificial Sequence
  Synthetic oligonucleotide
accagacggggtgcgacggttccacacaat

SEQ ID NO: 318324 - DNA, 30 bp, Artificial Sequence
  Synthetic oligonucleotide
gaggatcccaaattttacatcgcgcacaat

SEQ ID NO: 318325 - DNA, 30 bp, Artificial Sequence
  Synthetic oligonucleotide
ccaaattcggtgaacaaactacggcacaat

SEQ ID NO: 318326 - DNA, 30 bp, Artificial Sequence
  Synthetic oligonucleotide
atctgttatggctaggtgaatgtgcacaat

SEQ ID NO: 318327 - DNA, 30 bp, Artificial Sequence
  Synthetic oligonucleotide
ggaggtctcacacgggattgaaatcacaat

SEQ ID NO: 318328 - DNA, 30 bp, Artificial Sequence
  Synthetic oligonucleotide
tgaacattttcagctaacccgcatcacaat

SEQ ID NO: 318329 - DNA, 30 bp, Artificial Sequence
  Synthetic oligonucleotide
gtcggcccagcccggtggcaagttcacaat

SEQ ID NO: 318330 - DNA, 30 bp, Artificial Sequence
  Synthetic oligonucleotide
caaacataaagtgcagtctgccaagacaat

SEQ ID NO: 318331 - DNA, 30 bp, Artificial Sequence
  Synthetic oligonucleotide
cgcagaacctcaatgatcacctcagacaat

SEQ ID NO: 318332 - DNA, 30 bp, Artificial Sequence
  Synthetic oligonucleotide
gttggacgggatgttagttttatagacaat

SEQ ID NO: 318333 - DNA, 30 bp, Artificial Sequence
  Synthetic oligonucleotide
gttcacacgctagttgccacgaacgacaat

SEQ ID NO: 318334 - DNA, 30 bp, Artificial Sequence
  Synthetic oligonucleotide
cgcgcacaggaatgtccaaaggacgacaat

SEQ ID NO: 318335 - DNA, 30 bp, Artificial Sequence
  Synthetic oligonucleotide
atagcatgtccgtgctctcgacgcgacaat

SEQ ID NO: 318336 - DNA, 30 bp, Artificial Sequence
  Synthetic oligonucleotide
tgcaaaaggtttgtcaacactatcgacaat

SEQ ID NO: 318337 - DNA, 30 bp, Artificial Sequence
  Synthetic oligonucleotide
ttagattgttggtcgaaaacacgtgacaat

SEQ ID NO: 318338 - DNA, 30 bp, Artificial Sequence
  Synthetic oligonucleotide
gaggacggcgcatacctattcggtgacaat

SEQ ID NO: 318339 - DNA, 30 bp, Artificial Sequence
  Synthetic oligonucleotide
caaaaagcctccatgcattgagttgacaat

SEQ ID NO: 318340 - DNA, 30 bp, Artificial Sequence
  Synthetic oligonucleotide
tcgcagaggctcctggtacaggttgacaat

SEQ ID NO: 318341 - DNA, 30 bp, Artificial Sequence
  Synthetic oligonucleotide
ccgcaggactagtgatagcgcagctacaat

SEQ ID NO: 318342 - DNA, 30 bp, Artificial Sequence
  Synthetic oligonucleotide
ggaatatctaggatcgcttttaggtacaat

SEQ ID NO: 318343 - DNA, 30 bp, Artificial Sequence
  Synthetic oligonucleotide
taagctcggacattggcgcaatattacaat

SEQ ID NO: 318344 - DNA, 30 bp, Artificial Sequence
  Synthetic oligonucleotide
aagatcagggttcttgtagtggcttacaat

SEQ ID NO: 318345 - DNA, 30 bp, Artificial Sequence
  Synthetic oligonucleotide
gagaagcttagttccaaaacgtcttacaat

SEQ ID NO: 318346 - DNA, 30 bp, Artificial Sequence
  Synthetic oligonucleotide
atgatgcaaagcgtgtggtcagtttacaat

SEQ ID NO: 318347 - DNA, 30 bp, Artificial Sequence
  Synthetic oligonucleotide
gaaggtcacggtccatcggaatgaaccaat

SEQ ID NO: 318348 - DNA, 30 bp, Artificial Sequence
  Synthetic oligonucleotide
gagcacgcttcgcacaagcggcacaccaat

SEQ ID NO: 318349 - DNA, 30 bp, Artificial Sequence
  Synthetic oligonucleotide
attataatctaagtgtataacaccaccaat

SEQ ID NO: 318350 - DNA, 30 bp, Artificial Sequence
  Synthetic oligonucleotide
ataatgatgcggcaggtaggagggaccaat

SEQ ID NO: 318351 - DNA, 30 bp, Artificial Sequence
  Synthetic oligonucleotide
tcgacccttatagataagtaccttaccaat

SEQ ID NO: 318352 - DNA, 30 bp, Artificial Sequence
  Synthetic oligonucleotide
gctggctaattatagcaatccaaccccaat

SEQ ID NO: 318353 - DNA, 30 bp, Artificial Sequence
  Synthetic oligonucleotide
ggtaaatcccggtcatctccgtaccccaat

SEQ ID NO: 318354 - DNA, 30 bp, Artificial Sequence
  Synthetic oligonucleotide
ttcaattccatgcccgagtctcagcccaat

SEQ ID NO: 318355 - DNA, 30 bp, Artificial Sequence
  Synthetic oligonucleotide
gcctgcaaacaaagtggtcacgagcccaat

SEQ ID NO: 318356 - DNA, 30 bp, Artificial Sequence
  Synthetic oligonucleotide
tcaatgtcccttcaagctacgaatcccaat

SEQ ID NO: 318357 - DNA, 30 bp, Artificial Sequence
  Synthetic oligonucleotide
gtatcgagggtaagctccctgtctcccaat

SEQ ID NO: 318358 - DNA, 30 bp, Artificial Sequence
  Synthetic oligonucleotide
ttctcaccgcttagggcggtatgtcccaat

SEQ ID NO: 318359 - DNA, 30 bp, Artificial Sequence
  Synthetic oligonucleotide
gatgtactgatcccgtttgacatcgccaat

SEQ ID NO: 318360 - DNA, 30 bp, Artificial Sequence
  Synthetic oligonucleotide
gtggtgaatttagccctgtcgttcgccaat

SEQ ID NO: 318361 - DNA, 31 bp, Artificial Sequence
  Synthetic oligonucleotide
aaagactggactgtagctagatcaggccaat

SEQ ID NO: 318362 - DNA, 30 bp, Artificial Sequence
  Synthetic oligonucleotide
tagactacctccggcagaaaaccggccaat

SEQ ID NO: 318363 - DNA, 30 bp, Artificial Sequence
  Synthetic oligonucleotide
attgacacgatcggtgtgatctatgccaat

SEQ ID NO: 318364 - DNA, 30 bp, Artificial Sequence
  Synthetic oligonucleotide
aaggtcgatcatacccgagacgcctccaat

SEQ ID NO: 318365 - DNA, 30 bp, Artificial Sequence
  Synthetic oligonucleotide
tgaattgtatagttcacacagagttccaat

SEQ ID NO: 318366 - DNA, 30 bp, Artificial Sequence
  Synthetic oligonucleotide
cgggtcgcgttatgaatagcctacagcaat

SEQ ID NO: 318367 - DNA, 30 bp, Artificial Sequence
  Synthetic oligonucleotide
gtgacacatttttcagccacgatcagcaat

SEQ ID NO: 318368 - DNA, 30 bp, Artificial Sequence
  Synthetic oligonucleotide
atattatattttccgatgtaaaagagcaat

SEQ ID NO: 318369 - DNA, 30 bp, Artificial Sequence
  Synthetic oligonucleotide
gaaaagcgggataagatcccgactagcaat

SEQ ID NO: 318370 - DNA, 30 bp, Artificial Sequence
  Synthetic oligonucleotide
ctgtggacgtgatattagacgtctagcaat

SEQ ID NO: 318371 - DNA, 30 bp, Artificial Sequence
  Synthetic oligonucleotide
ggtatttcctggcacgtcaatggtagcaat

SEQ ID NO: 318372 - DNA, 30 bp, Artificial Sequence
  Synthetic oligonucleotide
cggcctgatccaacacgatatcaacgcaat

SEQ ID NO: 318373 - DNA, 30 bp, Artificial Sequence
  Synthetic oligonucleotide
ggtacgacgcacgcaaagccataccgcaat

SEQ ID NO: 318374 - DNA, 30 bp, Artificial Sequence
  Synthetic oligonucleotide
aacgttttatcgaccatcttataccgcaat

SEQ ID NO: 318375 - DNA, 30 bp, Artificial Sequence
  Synthetic oligonucleotide
aagaagtaaagagacatgaacacgcgcaat

SEQ ID NO: 318376 - DNA, 30 bp, Artificial Sequence
  Synthetic oligonucleotide
gtcctgtgggtgttgtgctagttgcgcaat

SEQ ID NO: 318377 - DNA, 30 bp, Artificial Sequence
  Synthetic oligonucleotide
tgggtacaacacctctcgtcctgtcgcaat

SEQ ID NO: 318378 - DNA, 30 bp, Artificial Sequence
  Synthetic oligonucleotide
atgggatttgtaacctacgtcgcaggcaat

SEQ ID NO: 318379 - DNA, 30 bp, Artificial Sequence
  Synthetic oligonucleotide
ttgcggtgtagacgcgccagctacggcaat

SEQ ID NO: 318380 - DNA, 30 bp, Artificial Sequence
  Synthetic oligonucleotide
taggattgaaccgcttatggaatcggcaat

SEQ ID NO: 318381 - DNA, 30 bp, Artificial Sequence
  Synthetic oligonucleotide
aatgccagatctttgtcgtcgctcggcaat

SEQ ID NO: 318382 - DNA, 30 bp, Artificial Sequence
  Synthetic oligonucleotide
ctgggtgtttgttaaccagtgtagggcaat

SEQ ID NO: 318383 - DNA, 30 bp, Artificial Sequence
  Synthetic oligonucleotide
actgtcgtgtatcggcaggctgggggcaat

SEQ ID NO: 318384 - DNA, 30 bp, Artificial Sequence
  Synthetic oligonucleotide
cacggtccgacaattgaccgtaatggcaat

SEQ ID NO: 318385 - DNA, 30 bp, Artificial Sequence
  Synthetic oligonucleotide
atggatgcggtttagatacttaaatgcaat

SEQ ID NO: 318386 - DNA, 30 bp, Artificial Sequence
  Synthetic oligonucleotide
gacactgtcctaaggacgtgaggctgcaat

SEQ ID NO: 318387 - DNA, 30 bp, Artificial Sequence
  Synthetic oligonucleotide
tcgcaattgttagcatcctgtaggtgcaat

SEQ ID NO: 318388 - DNA, 30 bp, Artificial Sequence
  Synthetic oligonucleotide
gctctttaaaatctagcacttgcaatcaat

SEQ ID NO: 318389 - DNA, 30 bp, Artificial Sequence
  Synthetic oligonucleotide
tttcttccctgtctcatttggtagatcaat

SEQ ID NO: 318390 - DNA, 30 bp, Artificial Sequence
  Synthetic oligonucleotide
gtcttaatctgcgtgcccggcccgatcaat

SEQ ID NO: 318391 - DNA, 30 bp, Artificial Sequence
  Synthetic oligonucleotide
aacccaaaaatagaagcagcatcgatcaat

SEQ ID NO: 318392 - DNA, 30 bp, Artificial Sequence
  Synthetic oligonucleotide
atcaccagttgcctcatggacaaactcaat

SEQ ID NO: 318393 - DNA, 30 bp, Artificial Sequence
  Synthetic oligonucleotide
cattggttaaaggtggtcgatagactcaat

SEQ ID NO: 318394 - DNA, 30 bp, Artificial Sequence
  Synthetic oligonucleotide
gagcaaggagagatccaacgttgactcaat

SEQ ID NO: 318395 - DNA, 30 bp, Artificial Sequence
  Synthetic oligonucleotide
ttcggtcctcgggctagtctagagctcaat

SEQ ID NO: 318396 - DNA, 30 bp, Artificial Sequence
  Synthetic oligonucleotide
cgcaatttcccgtttacaaaagatctcaat

SEQ ID NO: 318397 - DNA, 30 bp, Artificial Sequence
  Synthetic oligonucleotide
gtatgagagaggacattcaccggtctcaat

SEQ ID NO: 318398 - DNA, 30 bp, Artificial Sequence
  Synthetic oligonucleotide
agtgtctctgaaggaggctgctcggtcaat

SEQ ID NO: 318399 - DNA, 30 bp, Artificial Sequence
  Synthetic oligonucleotide
gaaccacacggacaagggggccttgtcaat

SEQ ID NO: 318400 - DNA, 30 bp, Artificial Sequence
  Synthetic oligonucleotide
gggtggtttatctgaggccagcaattcaat

SEQ ID NO: 318401 - DNA, 30 bp, Artificial Sequence
  Synthetic oligonucleotide
taccgagcatacccagtcgttccattcaat

SEQ ID NO: 318402 - DNA, 30 bp, Artificial Sequence
  Synthetic oligonucleotide
ttaatcataagcgtaacagatagattcaat

SEQ ID NO: 318403 - DNA, 31 bp, Artificial Sequence
  Synthetic oligonucleotide
gcttgaggcaagcactgaacttagattcaat

SEQ ID NO: 318404 - DNA, 30 bp, Artificial Sequence
  Synthetic oligonucleotide
acgttagctgaagcgcgaccgaccttcaat

SEQ ID NO: 318405 - DNA, 30 bp, Artificial Sequence
  Synthetic oligonucleotide
attcatgggatactcgtacacatcttcaat

SEQ ID NO: 318406 - DNA, 30 bp, Artificial Sequence
  Synthetic oligonucleotide
ctagtacgaaccatgcagtctcagttcaat

SEQ ID NO: 318407 - DNA, 30 bp, Artificial Sequence
  Synthetic oligonucleotide
attgaaaccgtggcttaaccatctttcaat

SEQ ID NO: 318408 - DNA, 30 bp, Artificial Sequence
  Synthetic oligonucleotide
agaccatatgattaggactctattttcaat

SEQ ID NO: 318409 - DNA, 30 bp, Artificial Sequence
  Synthetic oligonucleotide
cccgttgtagattagtgaagtcaaaagaat

SEQ ID NO: 318410 - DNA, 30 bp, Artificial Sequence
  Synthetic oligonucleotide
tcgcctaaaaggacggtcatgtcaaagaat

SEQ ID NO: 318411 - DNA, 30 bp, Artificial Sequence
  Synthetic oligonucleotide
atatgatactattcctatccgggaaagaat

SEQ ID NO: 318412 - DNA, 30 bp, Artificial Sequence
  Synthetic oligonucleotide
tgttcatagcagccaaccctggagaagaat

SEQ ID NO: 318413 - DNA, 30 bp, Artificial Sequence
  Synthetic oligonucleotide
ttgtattgacatgtaagacatcgtaagaat

SEQ ID NO: 318414 - DNA, 30 bp, Artificial Sequence
  Synthetic oligonucleotide
taatattaaaacaaccgtaagggtaagaat

SEQ ID NO: 318415 - DNA, 30 bp, Artificial Sequence
  Synthetic oligonucleotide
ccggtggagccactggtgttgaaacagaat

SEQ ID NO: 318416 - DNA, 30 bp, Artificial Sequence
  Synthetic oligonucleotide
attcgaaatactccttcacgtacccagaat

SEQ ID NO: 318417 - DNA, 30 bp, Artificial Sequence
  Synthetic oligonucleotide
ttggtcctcaacgatataggccagcagaat

SEQ ID NO: 318418 - DNA, 30 bp, Artificial Sequence
  Synthetic oligonucleotide
ggagaaacgacggactgcaattccgagaat

SEQ ID NO: 318419 - DNA, 30 bp, Artificial Sequence
  Synthetic oligonucleotide
aaaccatggtgtctagatcgtctcgagaat

SEQ ID NO: 318420 - DNA, 30 bp, Artificial Sequence
  Synthetic oligonucleotide
caatttgggcagcccagacattgggagaat

SEQ ID NO: 318421 - DNA, 30 bp, Artificial Sequence
  Synthetic oligonucleotide
acatggccaagtatagacagttgggagaat

SEQ ID NO: 318422 - DNA, 30 bp, Artificial Sequence
  Synthetic oligonucleotide
cgaatatttaaatgatttataaaatagaat

SEQ ID NO: 318423 - DNA, 30 bp, Artificial Sequence
  Synthetic oligonucleotide
gtatgcaggtggtacaaggggccatagaat

SEQ ID NO: 318424 - DNA, 30 bp, Artificial Sequence
  Synthetic oligonucleotide
ccactatacttggggccatactactagaat

SEQ ID NO: 318425 - DNA, 30 bp, Artificial Sequence
  Synthetic oligonucleotide
ggcgtatgcttcccctatgattactagaat

SEQ ID NO: 318426 - DNA, 30 bp, Artificial Sequence
  Synthetic oligonucleotide
ggaggggggaaacccagaagttcctagaat

SEQ ID NO: 318427 - DNA, 30 bp, Artificial Sequence
  Synthetic oligonucleotide
aactttgaagtgggccggcaaaagtagaat

SEQ ID NO: 318428 - DNA, 30 bp, Artificial Sequence
  Synthetic oligonucleotide
gcttattgtcgtctgcttgataagtagaat

SEQ ID NO: 318429 - DNA, 30 bp, Artificial Sequence
  Synthetic oligonucleotide
tggagaagagttttctcgagttcgtagaat

SEQ ID NO: 318430 - DNA, 30 bp, Artificial Sequence
  Synthetic oligonucleotide
gctgttcgcaattggcatcaagggtagaat

SEQ ID NO: 318431 - DNA, 30 bp, Artificial Sequence
  Synthetic oligonucleotide
gccccgaagattagggcatgaatttagaat

SEQ ID NO: 318432 - DNA, 30 bp, Artificial Sequence
  Synthetic oligonucleotide
tttagtcgaaaccgtccttgcacaacgaat

SEQ ID NO: 318433 - DNA, 30 bp, Artificial Sequence
  Synthetic oligonucleotide
gaccgttgctgtaatcagacaccaacgaat

SEQ ID NO: 318434 - DNA, 30 bp, Artificial Sequence
  Synthetic oligonucleotide
cccctaactcggtttacggtctcaacgaat

SEQ ID NO: 318435 - DNA, 30 bp, Artificial Sequence
  Synthetic oligonucleotide
ggcaaataaaacagtcgctctggaacgaat

SEQ ID NO: 318436 - DNA, 30 bp, Artificial Sequence
  Synthetic oligonucleotide
aacactgtcgacagacatgcgtgaacgaat

SEQ ID NO: 318437 - DNA, 30 bp, Artificial Sequence
  Synthetic oligonucleotide
gatgtcttagcggaattccttcccacgaat

SEQ ID NO: 318438 - DNA, 30 bp, Artificial Sequence
  Synthetic oligonucleotide
aaaagactcgagggtgggctagagacgaat

SEQ ID NO: 318439 - DNA, 30 bp, Artificial Sequence
  Synthetic oligonucleotide
gtcagagctaacgtccgaatatatacgaat

SEQ ID NO: 318440 - DNA, 30 bp, Artificial Sequence
  Synthetic oligonucleotide
aaactgacgttctaccgagcgcctacgaat

SEQ ID NO: 318441 - DNA, 30 bp, Artificial Sequence
  Synthetic oligonucleotide
gccttgggctccaaattggtgtcaccgaat

SEQ ID NO: 318442 - DNA, 30 bp, Artificial Sequence
  Synthetic oligonucleotide
gctttaagaggctagtcttggatcccgaat

SEQ ID NO: 318443 - DNA, 30 bp, Artificial Sequence
  Synthetic oligonucleotide
gtccggctgtcttatcactcacctccgaat

SEQ ID NO: 318444 - DNA, 30 bp, Artificial Sequence
  Synthetic oligonucleotide
aaaccgtccgaccataacaaatctccgaat

SEQ ID NO: 318445 - DNA, 30 bp, Artificial Sequence
  Synthetic oligonucleotide
atgcagcggtacagagctctcagcgcgaat

SEQ ID NO: 318446 - DNA, 30 bp, Artificial Sequence
  Synthetic oligonucleotide
cgagccagtcagtgctgtatactcgcgaat

SEQ ID NO: 318447 - DNA, 30 bp, Artificial Sequence
  Synthetic oligonucleotide
tcttctcaccaagtctagttatgggcgaat

SEQ ID NO: 318448 - DNA, 30 bp, Artificial Sequence
  Synthetic oligonucleotide
gtgtacaatatttaagccccagtggcgaat

SEQ ID NO: 318449 - DNA, 30 bp, Artificial Sequence
  Synthetic oligonucleotide
caggaatggagttctggaaccgtggcgaat

SEQ ID NO: 318450 - DNA, 30 bp, Artificial Sequence
  Synthetic oligonucleotide
ctaggggtttccagctcacaagcatcgaat

SEQ ID NO: 318451 - DNA, 30 bp, Artificial Sequence
  Synthetic oligonucleotide
gaattactacagcagagggaaggatcgaat

SEQ ID NO: 318452 - DNA, 30 bp, Artificial Sequence
  Synthetic oligonucleotide
ttaagcgttctcccaaaggtaaactcgaat

SEQ ID NO: 318453 - DNA, 30 bp, Artificial Sequence
  Synthetic oligonucleotide
gtgtcgtccaagctaacaaactcttcgaat

SEQ ID NO: 318454 - DNA, 30 bp, Artificial Sequence
  Synthetic oligonucleotide
acgtagacccggggggctcttgtttcgaat

SEQ ID NO: 318455 - DNA, 30 bp, Artificial Sequence
  Synthetic oligonucleotide
gtggggattataagttacagataaaggaat

SEQ ID NO: 318456 - DNA, 30 bp, Artificial Sequence
  Synthetic oligonucleotide
tagttaagtatggaatcacccaacaggaat

SEQ ID NO: 318457 - DNA, 30 bp, Artificial Sequence
  Synthetic oligonucleotide
gcgcgcattttcatctgatcgaacaggaat

SEQ ID NO: 318458 - DNA, 30 bp, Artificial Sequence
  Synthetic oligonucleotide
agtggtgacctaaaggtgttagacaggaat

SEQ ID NO: 318459 - DNA, 30 bp, Artificial Sequence
  Synthetic oligonucleotide
gttggtggcgacgaactgttggacaggaat

SEQ ID NO: 318460 - DNA, 30 bp, Artificial Sequence
  Synthetic oligonucleotide
agcatcacctttgctggatcggccaggaat

SEQ ID NO: 318461 - DNA, 30 bp, Artificial Sequence
  Synthetic oligonucleotide
gtgagaaatccattatatgattccaggaat

SEQ ID NO: 318462 - DNA, 30 bp, Artificial Sequence
  Synthetic oligonucleotide
aggtcaacactctgcattactctcaggaat

SEQ ID NO: 318463 - DNA, 30 bp, Artificial Sequence
  Synthetic oligonucleotide
tcacagtgacccaccaacccatcgaggaat

SEQ ID NO: 318464 - DNA, 30 bp, Artificial Sequence
  Synthetic oligonucleotide
tggtgtccaccattgtgaaaacataggaat

SEQ ID NO: 318465 - DNA, 30 bp, Artificial Sequence
  Synthetic oligonucleotide
tggtatttttagaccaactcagataggaat

SEQ ID NO: 318466 - DNA, 30 bp, Artificial Sequence
  Synthetic oligonucleotide
tgatcggtcagttatcggtcgcgtaggaat

SEQ ID NO: 318467 - DNA, 30 bp, Artificial Sequence
  Synthetic oligonucleotide
tcactgcgcggatacggtaagtgtaggaat

SEQ ID NO: 318468 - DNA, 30 bp, Artificial Sequence
  Synthetic oligonucleotide
acgcgtcgagttgttggacagctacggaat

SEQ ID NO: 318469 - DNA, 30 bp, Artificial Sequence
  Synthetic oligonucleotide
gttacccatgatctttacgttcaccggaat

SEQ ID NO: 318470 - DNA, 30 bp, Artificial Sequence
  Synthetic oligonucleotide
gtagaactatcaatgcctgcataccggaat

SEQ ID NO: 318471 - DNA, 30 bp, Artificial Sequence
  Synthetic oligonucleotide
ggcacagttttcgggcatctgtcccggaat

SEQ ID NO: 318472 - DNA, 30 bp, Artificial Sequence
  Synthetic oligonucleotide
ccctgtgggagtatgtcgcctaatcggaat

SEQ ID NO: 318473 - DNA, 30 bp, Artificial Sequence
  Synthetic oligonucleotide
gagcgggagggtgcgggatttagtcggaat

SEQ ID NO: 318474 - DNA, 30 bp, Artificial Sequence
  Synthetic oligonucleotide
tactttcagggaagtggtaatggtcggaat

SEQ ID NO: 318475 - DNA, 30 bp, Artificial Sequence
  Synthetic oligonucleotide
cgccactcctagccgataatacccgggaat

SEQ ID NO: 318476 - DNA, 30 bp, Artificial Sequence
  Synthetic oligonucleotide
ggaactcaaaagggctcagttagcgggaat

SEQ ID NO: 318477 - DNA, 30 bp, Artificial Sequence
  Synthetic oligonucleotide
gagtaagaggtagagaagtatatggggaat

SEQ ID NO: 318478 - DNA, 30 bp, Artificial Sequence
  Synthetic oligonucleotide
aatcgaatccacttggcaatcccatggaat

SEQ ID NO: 318479 - DNA, 30 bp, Artificial Sequence
  Synthetic oligonucleotide
acaaccaagaatatagtgccgggctggaat

SEQ ID NO: 318480 - DNA, 30 bp, Artificial Sequence
  Synthetic oligonucleotide
gttccgggaggatgtcagcgtggctggaat

SEQ ID NO: 318481 - DNA, 30 bp, Artificial Sequence
  Synthetic oligonucleotide
caagtttccaattcctcgtacgtctggaat

SEQ ID NO: 318482 - DNA, 30 bp, Artificial Sequence
  Synthetic oligonucleotide
tcattcggcggcacctatcgaaagtggaat

SEQ ID NO: 318483 - DNA, 30 bp, Artificial Sequence
  Synthetic oligonucleotide
aaagtctaaagggccaagtgcccgtggaat

SEQ ID NO: 318484 - DNA, 30 bp, Artificial Sequence
  Synthetic oligonucleotide
catcgattctcgattcgaggaatgtggaat

SEQ ID NO: 318485 - DNA, 30 bp, Artificial Sequence
  Synthetic oligonucleotide
ggtctgccgtgagcgttagcttattggaat

SEQ ID NO: 318486 - DNA, 30 bp, Artificial Sequence
  Synthetic oligonucleotide
agtgaaagtacttacgttttgtaaatgaat

SEQ ID NO: 318487 - DNA, 30 bp, Artificial Sequence
  Synthetic oligonucleotide
tcgcgtcgagtagccattcctccaatgaat

SEQ ID NO: 318488 - DNA, 30 bp, Artificial Sequence
  Synthetic oligonucleotide
caccagccctccctgtggcgcggaatgaat

SEQ ID NO: 318489 - DNA, 30 bp, Artificial Sequence
  Synthetic oligonucleotide
ttgccttttcttgtaggtgtattaatgaat

SEQ ID NO: 318490 - DNA, 30 bp, Artificial Sequence
  Synthetic oligonucleotide
tggtagataaatcggctgcatctcatgaat

SEQ ID NO: 318491 - DNA, 29 bp, Artificial Sequence
  Synthetic oligonucleotide
tgatgacccggagcggtatcgcgatgaat

SEQ ID NO: 318492 - DNA, 30 bp, Artificial Sequence
  Synthetic oligonucleotide
gctgcgattctagcgacaacggcgatgaat

SEQ ID NO: 318493 - DNA, 30 bp, Artificial Sequence
  Synthetic oligonucleotide
atcgcgagtcactcctgttaatgtatgaat

SEQ ID NO: 318494 - DNA, 30 bp, Artificial Sequence
  Synthetic oligonucleotide
cagcattagagcctgtaaatggttatgaat

SEQ ID NO: 318495 - DNA, 26 bp, Artificial Sequence
  Synthetic oligonucleotide
gatcaaacttgatttccagactgaat

SEQ ID NO: 318496 - DNA, 30 bp, Artificial Sequence
  Synthetic oligonucleotide
gctaaggtacgcacgtgtgtacagctgaat

SEQ ID NO: 318497 - DNA, 30 bp, Artificial Sequence
  Synthetic oligonucleotide
ctcaccaggtagtgataaattgcgctgaat

SEQ ID NO: 318498 - DNA, 30 bp, Artificial Sequence
  Synthetic oligonucleotide
ctacttagataataggttcaggtcgtgaat

SEQ ID NO: 318499 - DNA, 30 bp, Artificial Sequence
  Synthetic oligonucleotide
taatagaaaaccacagggtgtgtcgtgaat

SEQ ID NO: 318500 - DNA, 30 bp, Artificial Sequence
  Synthetic oligonucleotide
gtatactaaggtattcgtggaatattgaat

SEQ ID NO: 318501 - DNA, 30 bp, Artificial Sequence
  Synthetic oligonucleotide
ggcctaacaagaccaatatcaatcttgaat

SEQ ID NO: 318502 - DNA, 30 bp, Artificial Sequence
  Synthetic oligonucleotide
gcttcatgtctattccagagattcttgaat

SEQ ID NO: 318503 - DNA, 30 bp, Artificial Sequence
  Synthetic oligonucleotide
atcgggtgacagtccctaggaaggttgaat

SEQ ID NO: 318504 - DNA, 30 bp, Artificial Sequence
  Synthetic oligonucleotide
ttgggctgcgattgaggctggaggttgaat

SEQ ID NO: 318505 - DNA, 30 bp, Artificial Sequence
  Synthetic oligonucleotide
cgcaggcataattaactcaatttgttgaat

SEQ ID NO: 318506 - DNA, 30 bp, Artificial Sequence
  Synthetic oligonucleotide
cgcctctggggggccttctgcccaaataat

SEQ ID NO: 318507 - DNA, 30 bp, Artificial Sequence
  Synthetic oligonucleotide
tggcttatggttgctgctgacagaaataat

SEQ ID NO: 318508 - DNA, 30 bp, Artificial Sequence
  Synthetic oligonucleotide
aggtctagcatgacgccgatgttaaataat

SEQ ID NO: 318509 - DNA, 30 bp, Artificial Sequence
  Synthetic oligonucleotide
gtctcaacgtacttaaatggcacgaataat

SEQ ID NO: 318510 - DNA, 30 bp, Artificial Sequence
  Synthetic oligonucleotide
ctaattctgataacgagaagtgggaataat

SEQ ID NO: 318511 - DNA, 30 bp, Artificial Sequence
  Synthetic oligonucleotide
gaacatcgtatgcgctacaacatgaataat

SEQ ID NO: 318512 - DNA, 30 bp, Artificial Sequence
  Synthetic oligonucleotide
agcaaatgaaaagactcgcgccataataat

SEQ ID NO: 318513 - DNA, 30 bp, Artificial Sequence
  Synthetic oligonucleotide
gagtaaaaacagctattatgccataataat

SEQ ID NO: 318514 - DNA, 30 bp, Artificial Sequence
  Synthetic oligonucleotide
ttcggttgtattaagatgttgtcccataat

SEQ ID NO: 318515 - DNA, 30 bp, Artificial Sequence
  Synthetic oligonucleotide
aactgtagccgtaagacccatggccataat

SEQ ID NO: 318516 - DNA, 30 bp, Artificial Sequence
  Synthetic oligonucleotide
attgcaaattgcgaatctcaaatccataat

SEQ ID NO: 318517 - DNA, 30 bp, Artificial Sequence
  Synthetic oligonucleotide
ggaaatccactccgccacggggcgcataat

SEQ ID NO: 318518 - DNA, 30 bp, Artificial Sequence
  Synthetic oligonucleotide
ttcactcggcccgctccggacgatcataat

SEQ ID NO: 318519 - DNA, 30 bp, Artificial Sequence
  Synthetic oligonucleotide
aacaggtttagaggatatatcgatcataat

SEQ ID NO: 318520 - DNA, 30 bp, Artificial Sequence
  Synthetic oligonucleotide
gttaaatacccgaggtccgtgggtcataat

SEQ ID NO: 318521 - DNA, 30 bp, Artificial Sequence
  Synthetic oligonucleotide
ctgggcagattgtcgaatctatgagataat

SEQ ID NO: 318522 - DNA, 30 bp, Artificial Sequence
  Synthetic oligonucleotide
gtgtctctaaggggattcgttcaggataat

SEQ ID NO: 318523 - DNA, 30 bp, Artificial Sequence
  Synthetic oligonucleotide
gaaatgtctagcttagggacaggtgataat

SEQ ID NO: 318524 - DNA, 30 bp, Artificial Sequence
  Synthetic oligonucleotide
gaagtaatttgggactggtttagatataat

SEQ ID NO: 318525 - DNA, 30 bp, Artificial Sequence
  Synthetic oligonucleotide
tttaggactacatacgtatccggatataat

SEQ ID NO: 318526 - DNA, 30 bp, Artificial Sequence
  Synthetic oligonucleotide
actggtacgtgtccagcggataactataat

SEQ ID NO: 318527 - DNA, 30 bp, Artificial Sequence
  Synthetic oligonucleotide
agacctactcaatgactagcacactataat

SEQ ID NO: 318528 - DNA, 30 bp, Artificial Sequence
  Synthetic oligonucleotide
ggcgagtgagggattatttcaacctataat

SEQ ID NO: 318529 - DNA, 30 bp, Artificial Sequence
  Synthetic oligonucleotide
tgaggtaacaataaatttgacgcctataat

SEQ ID NO: 318530 - DNA, 30 bp, Artificial Sequence
  Synthetic oligonucleotide
tctcgaggaggctctgtgggttgaactaat

SEQ ID NO: 318531 - DNA, 30 bp, Artificial Sequence
  Synthetic oligonucleotide
cttaatgcttatagcttgagaccgactaat

SEQ ID NO: 318532 - DNA, 30 bp, Artificial Sequence
  Synthetic oligonucleotide
gttactttagttagatgtcacctgactaat

SEQ ID NO: 318533 - DNA, 30 bp, Artificial Sequence
  Synthetic oligonucleotide
agcagcactgactggatatggcttactaat

SEQ ID NO: 318534 - DNA, 30 bp, Artificial Sequence
  Synthetic oligonucleotide
gcatacgtaaatatttaaaaagcacctaat

SEQ ID NO: 318535 - DNA, 30 bp, Artificial Sequence
  Synthetic oligonucleotide
aacttagcgattgaccagggggcccctaat

SEQ ID NO: 318536 - DNA, 30 bp, Artificial Sequence
  Synthetic oligonucleotide
ttgcaccggcactctcctttagtagctaat

SEQ ID NO: 318537 - DNA, 30 bp, Artificial Sequence
  Synthetic oligonucleotide
cgataagcattgaaggtatgaagggctaat

SEQ ID NO: 318538 - DNA, 30 bp, Artificial Sequence
  Synthetic oligonucleotide
acggttcgatttagttcactttttgctaat

SEQ ID NO: 318539 - DNA, 30 bp, Artificial Sequence
  Synthetic oligonucleotide
gcagcttgaacgtaactatttaaatctaat

SEQ ID NO: 318540 - DNA, 30 bp, Artificial Sequence
  Synthetic oligonucleotide
aggttcttgtcagcatagcaaccatctaat

SEQ ID NO: 318541 - DNA, 30 bp, Artificial Sequence
  Synthetic oligonucleotide
actcgataccagtatcgtgccggatctaat

SEQ ID NO: 318542 - DNA, 30 bp, Artificial Sequence
  Synthetic oligonucleotide
ttgatgcttagtattctgttggcctctaat

SEQ ID NO: 318543 - DNA, 30 bp, Artificial Sequence
  Synthetic oligonucleotide
aggtgacggtccatgtcggagggctctaat

SEQ ID NO: 318544 - DNA, 30 bp, Artificial Sequence
  Synthetic oligonucleotide
attgctcagtctgctcattcgtattctaat

SEQ ID NO: 318545 - DNA, 30 bp, Artificial Sequence
  Synthetic oligonucleotide
ggatgataggcggtaactccgagttctaat

SEQ ID NO: 318546 - DNA, 30 bp, Artificial Sequence
  Synthetic oligonucleotide
gcataacccaggaactactgaatttctaat

SEQ ID NO: 318547 - DNA, 30 bp, Artificial Sequence
  Synthetic oligonucleotide
acggctcatgatatagttggcaaaagtaat

SEQ ID NO: 318548 - DNA, 30 bp, Artificial Sequence
  Synthetic oligonucleotide
attagtgcactttgtattccttgaagtaat

SEQ ID NO: 318549 - DNA, 30 bp, Artificial Sequence
  Synthetic oligonucleotide
gacccccacaataattttcacaacagtaat

SEQ ID NO: 318550 - DNA, 30 bp, Artificial Sequence
  Synthetic oligonucleotide
atactatttgataacgtggatgacagtaat

SEQ ID NO: 318551 - DNA, 30 bp, Artificial Sequence
  Synthetic oligonucleotide
tgaggatcctatatgacaatgtccagtaat

SEQ ID NO: 318552 - DNA, 30 bp, Artificial Sequence
  Synthetic oligonucleotide
accaagggatgcgtgtttctgggcagtaat

SEQ ID NO: 318553 - DNA, 30 bp, Artificial Sequence
  Synthetic oligonucleotide
aacggatcaatagtagagtcatagagtaat

SEQ ID NO: 318554 - DNA, 30 bp, Artificial Sequence
  Synthetic oligonucleotide
cgcatttaatttaaggctctcacgagtaat

SEQ ID NO: 318555 - DNA, 30 bp, Artificial Sequence
  Synthetic oligonucleotide
tttaatagctcagggaacagacatagtaat

SEQ ID NO: 318556 - DNA, 30 bp, Artificial Sequence
  Synthetic oligonucleotide
agctcgctgatgcgcatgggctatagtaat

SEQ ID NO: 318557 - DNA, 30 bp, Artificial Sequence
  Synthetic oligonucleotide
tgtgccttcggctaagacaatcctagtaat

SEQ ID NO: 318558 - DNA, 30 bp, Artificial Sequence
  Synthetic oligonucleotide
ggagataagttaggactaaaacgtagtaat

SEQ ID NO: 318559 - DNA, 30 bp, Artificial Sequence
  Synthetic oligonucleotide
agcgcttagtcgagtataaagcgacgtaat

SEQ ID NO: 318560 - DNA, 30 bp, Artificial Sequence
  Synthetic oligonucleotide
ataggtatgatactgaaactaacccgtaat

SEQ ID NO: 318561 - DNA, 30 bp, Artificial Sequence
  Synthetic oligonucleotide
tagccggagctaaatctttgtacccgtaat

SEQ ID NO: 318562 - DNA, 30 bp, Artificial Sequence
  Synthetic oligonucleotide
gtaacctcgagaccaatgttcgcccgtaat

SEQ ID NO: 318563 - DNA, 30 bp, Artificial Sequence
  Synthetic oligonucleotide
tcatagtttatgctctcgcctgcccgtaat

SEQ ID NO: 318564 - DNA, 30 bp, Artificial Sequence
  Synthetic oligonucleotide
aaggagtttcgcgagatccagttgcgtaat

SEQ ID NO: 318565 - DNA, 30 bp, Artificial Sequence
  Synthetic oligonucleotide
gatttaccagggggcggccaaactcgtaat

SEQ ID NO: 318566 - DNA, 30 bp, Artificial Sequence
  Synthetic oligonucleotide
cagttgacatataagtaccactaaggtaat

SEQ ID NO: 318567 - DNA, 30 bp, Artificial Sequence
  Synthetic oligonucleotide
cattcgtgtactaaccttacgtaaggtaat

SEQ ID NO: 318568 - DNA, 30 bp, Artificial Sequence
  Synthetic oligonucleotide
taaacaattaagatcatatttcgaggtaat

SEQ ID NO: 318569 - DNA, 30 bp, Artificial Sequence
  Synthetic oligonucleotide
gaaagacatagattatttacactaggtaat

SEQ ID NO: 318570 - DNA, 30 bp, Artificial Sequence
  Synthetic oligonucleotide
agagaggtttttgatccgagtcgcggtaat

SEQ ID NO: 318571 - DNA, 30 bp, Artificial Sequence
  Synthetic oligonucleotide
aaaacactaggataaggaggggcgggtaat

SEQ ID NO: 318572 - DNA, 30 bp, Artificial Sequence
  Synthetic oligonucleotide
aagagaagacagggatgtagatcgggtaat

SEQ ID NO: 318573 - DNA, 30 bp, Artificial Sequence
  Synthetic oligonucleotide
cgatgcatcagactccgtaagtggggtaat

SEQ ID NO: 318574 - DNA, 30 bp, Artificial Sequence
  Synthetic oligonucleotide
gatcatggaaagaagagctcctatggtaat

SEQ ID NO: 318575 - DNA, 30 bp, Artificial Sequence
  Synthetic oligonucleotide
attggaacagaaaccctcttatttggtaat

SEQ ID NO: 318576 - DNA, 30 bp, Artificial Sequence
  Synthetic oligonucleotide
tgtagcacatttgacaccgaagattgtaat

SEQ ID NO: 318577 - DNA, 30 bp, Artificial Sequence
  Synthetic oligonucleotide
tcaatggtaagtaataaaaaagtttgtaat

SEQ ID NO: 318578 - DNA, 30 bp, Artificial Sequence
  Synthetic oligonucleotide
ctatcaacacacaaaaaccatcaaattaat

SEQ ID NO: 318579 - DNA, 30 bp, Artificial Sequence
  Synthetic oligonucleotide
aaacagcctagctgagtgaaaccaattaat

SEQ ID NO: 318580 - DNA, 30 bp, Artificial Sequence
  Synthetic oligonucleotide
ctggtcattgtgtgtcacctctcaattaat

SEQ ID NO: 318581 - DNA, 30 bp, Artificial Sequence
  Synthetic oligonucleotide
gatccactccgcacacccatttacattaat

SEQ ID NO: 318582 - DNA, 30 bp, Artificial Sequence
  Synthetic oligonucleotide
ctcgctgacccgctcactcgagcgattaat

SEQ ID NO: 318583 - DNA, 30 bp, Artificial Sequence
  Synthetic oligonucleotide
gggctggggttcagattttagatgattaat

SEQ ID NO: 318584 - DNA, 30 bp, Artificial Sequence
  Synthetic oligonucleotide
gcgaagattgatacatagtcgaatattaat

SEQ ID NO: 318585 - DNA, 30 bp, Artificial Sequence
  Synthetic oligonucleotide
tgagttcgtccgagtatgtccagtattaat

SEQ ID NO: 318586 - DNA, 30 bp, Artificial Sequence
  Synthetic oligonucleotide
gcgaacacaggtttaattcgtattattaat

SEQ ID NO: 318587 - DNA, 30 bp, Artificial Sequence
  Synthetic oligonucleotide
ctctttaggtggaacttacgccttattaat

SEQ ID NO: 318588 - DNA, 30 bp, Artificial Sequence
  Synthetic oligonucleotide
atggcattaggagcagggcaaacacttaat

SEQ ID NO: 318589 - DNA, 30 bp, Artificial Sequence
  Synthetic oligonucleotide
caaaacgcaagttaaatattgaaccttaat

SEQ ID NO: 318590 - DNA, 30 bp, Artificial Sequence
  Synthetic oligonucleotide
tcggtgcgtacactgcaggaaaatcttaat

SEQ ID NO: 318591 - DNA, 30 bp, Artificial Sequence
  Synthetic oligonucleotide
tccggagttcgtcagcgttaaagtcttaat

SEQ ID NO: 318592 - DNA, 30 bp, Artificial Sequence
  Synthetic oligonucleotide
aagcctttttggagtgaagttgaagttaat

SEQ ID NO: 318593 - DNA, 30 bp, Artificial Sequence
  Synthetic oligonucleotide
ctcctcataggtaggaggatgtaagttaat

SEQ ID NO: 318594 - DNA, 30 bp, Artificial Sequence
  Synthetic oligonucleotide
gatagggcatcgagatattagatagttaat

SEQ ID NO: 318595 - DNA, 30 bp, Artificial Sequence
  Synthetic oligonucleotide
ccctacgtcggcgctggaagggaggttaat

SEQ ID NO: 318596 - DNA, 30 bp, Artificial Sequence
  Synthetic oligonucleotide
ggtttgaatgaaatgaataaacgggttaat

SEQ ID NO: 318597 - DNA, 30 bp, Artificial Sequence
  Synthetic oligonucleotide
gcagtaattcgcgttatcgttgtggttaat

SEQ ID NO: 318598 - DNA, 30 bp, Artificial Sequence
  Synthetic oligonucleotide
gcacaaagtagataagaatgcttggttaat

SEQ ID NO: 318599 - DNA, 30 bp, Artificial Sequence
  Synthetic oligonucleotide
agctcgtgccccacataattcttggttaat

SEQ ID NO: 318600 - DNA, 30 bp, Artificial Sequence
  Synthetic oligonucleotide
tgctgacgtagatagatgactactgttaat

SEQ ID NO: 318601 - DNA, 30 bp, Artificial Sequence
  Synthetic oligonucleotide
gcctgcggcccgcgcgcaaaagctgttaat

SEQ ID NO: 318602 - DNA, 30 bp, Artificial Sequence
  Synthetic oligonucleotide
gagctgttgcgatacgtctgaagtgttaat

SEQ ID NO: 318603 - DNA, 30 bp, Artificial Sequence
  Synthetic oligonucleotide
tgcgcttgttattgaaaatgggttgttaat

SEQ ID NO: 318604 - DNA, 30 bp, Artificial Sequence
  Synthetic oligonucleotide
agatggacggaccttgcgatcgaatttaat

SEQ ID NO: 318605 - DNA, 30 bp, Artificial Sequence
  Synthetic oligonucleotide
caatcgccagaccgtctccagatatttaat

SEQ ID NO: 318606 - DNA, 30 bp, Artificial Sequence
  Synthetic oligonucleotide
ccagatctagaggaacgggaagactttaat

SEQ ID NO: 318607 - DNA, 30 bp, Artificial Sequence
  Synthetic oligonucleotide
gacgacagcaacgtccatcttccctttaat

SEQ ID NO: 318608 - DNA, 30 bp, Artificial Sequence
  Synthetic oligonucleotide
accctggaagttttgacacgaatctttaat

SEQ ID NO: 318609 - DNA, 30 bp, Artificial Sequence
  Synthetic oligonucleotide
gggtactcgattcaggtgaatgtctttaat

SEQ ID NO: 318610 - DNA, 30 bp, Artificial Sequence
  Synthetic oligonucleotide
acccagtcacaattaacgcgtgtctttaat

SEQ ID NO: 318611 - DNA, 30 bp, Artificial Sequence
  Synthetic oligonucleotide
aatgattcataactggacgggtgttttaat

SEQ ID NO: 318612 - DNA, 30 bp, Artificial Sequence
  Synthetic oligonucleotide
tacgcgcgttggaagcaaagtatttttaat

SEQ ID NO: 318613 - DNA, 30 bp, Artificial Sequence
  Synthetic oligonucleotide
tgttggaaagtacacaatcttctttttaat

SEQ ID NO: 318614 - DNA, 30 bp, Artificial Sequence
  Synthetic oligonucleotide
gttagtttagtggccaatcttccaaaacat

SEQ ID NO: 318615 - DNA, 30 bp, Artificial Sequence
  Synthetic oligonucleotide
ggtactaggaaagcctacgtgtcaaaacat

SEQ ID NO: 318616 - DNA, 30 bp, Artificial Sequence
  Synthetic oligonucleotide
acccgccggcgagcgagattcctaaaacat

SEQ ID NO: 318617 - DNA, 30 bp, Artificial Sequence
  Synthetic oligonucleotide
gacatgcttataatttcatccttaaaacat

SEQ ID NO: 318618 - DNA, 30 bp, Artificial Sequence
  Synthetic oligonucleotide
tattgtgaaagtggcgcgtaatgcaaacat

SEQ ID NO: 318619 - DNA, 30 bp, Artificial Sequence
  Synthetic oligonucleotide
tttaaatcccggggatagggctggaaacat

SEQ ID NO: 318620 - DNA, 30 bp, Artificial Sequence
  Synthetic oligonucleotide
tgtccagtaaccgcttgatttagtaaacat

SEQ ID NO: 318621 - DNA, 30 bp, Artificial Sequence
  Synthetic oligonucleotide
gggttcgctaataaattgggtacgcaacat

SEQ ID NO: 318622 - DNA, 30 bp, Artificial Sequence
  Synthetic oligonucleotide
tagcgggatatgtgtcctattacgcaacat

SEQ ID NO: 318623 - DNA, 30 bp, Artificial Sequence
  Synthetic oligonucleotide
gttgtggaattggggaacaattcgcaacat

SEQ ID NO: 318624 - DNA, 30 bp, Artificial Sequence
  Synthetic oligonucleotide
atacctttcacagataatttagatcaacat

SEQ ID NO: 318625 - DNA, 30 bp, Artificial Sequence
  Synthetic oligonucleotide
acacgcatgttaccgaggatatgtcaacat

SEQ ID NO: 318626 - DNA, 30 bp, Artificial Sequence
  Synthetic oligonucleotide
gagtatggaggcattgagctaaaggaacat

SEQ ID NO: 318627 - DNA, 30 bp, Artificial Sequence
  Synthetic oligonucleotide
gaattgatgagtcgatacctctgggaacat

SEQ ID NO: 318628 - DNA, 30 bp, Artificial Sequence
  Synthetic oligonucleotide
ctccgtgcagtactaagcgcagactaacat

SEQ ID NO: 318629 - DNA, 30 bp, Artificial Sequence
  Synthetic oligonucleotide
tataagtgctaccgcgactctacctaacat

SEQ ID NO: 318630 - DNA, 30 bp, Artificial Sequence
  Synthetic oligonucleotide
tatggttcgcaccggcgcgacccgtaacat

SEQ ID NO: 318631 - DNA, 30 bp, Artificial Sequence
  Synthetic oligonucleotide
aggtttacataagaccactcgtccacacat

SEQ ID NO: 318632 - DNA, 30 bp, Artificial Sequence
  Synthetic oligonucleotide
ttctaggggattcagggcaggcgcacacat

SEQ ID NO: 318633 - DNA, 30 bp, Artificial Sequence
  Synthetic oligonucleotide
gctccttgcgaaaagggaaaactcacacat

SEQ ID NO: 318634 - DNA, 30 bp, Artificial Sequence
  Synthetic oligonucleotide
gtataaaaataccgtcctgcgacgacacat

SEQ ID NO: 318635 - DNA, 30 bp, Artificial Sequence
  Synthetic oligonucleotide
gtcccagcgtaaatcctacagcttacacat

SEQ ID NO: 318636 - DNA, 31 bp, Artificial Sequence
  Synthetic oligonucleotide
ggtgcattgacgttggtagtttctgccacat

SEQ ID NO: 318637 - DNA, 30 bp, Artificial Sequence
  Synthetic oligonucleotide
ttctggagcagtccgcgcgttcatccacat

SEQ ID NO: 318638 - DNA, 30 bp, Artificial Sequence
  Synthetic oligonucleotide
aaccataaacagggactggttggtccacat

SEQ ID NO: 318639 - DNA, 30 bp, Artificial Sequence
  Synthetic oligonucleotide
cacaacactatgttgccaaccattccacat

SEQ ID NO: 318640 - DNA, 30 bp, Artificial Sequence
  Synthetic oligonucleotide
agtcagtttttaatacaaaccgtagcacat

SEQ ID NO: 318641 - DNA, 30 bp, Artificial Sequence
  Synthetic oligonucleotide
acgtccctttgttggagaccggaggcacat

SEQ ID NO: 318642 - DNA, 30 bp, Artificial Sequence
  Synthetic oligonucleotide
atcttaatccgggaattccgggaggcacat

SEQ ID NO: 318643 - DNA, 30 bp, Artificial Sequence
  Synthetic oligonucleotide
agaaccccttatagctcgggacaatcacat

SEQ ID NO: 318644 - DNA, 30 bp, Artificial Sequence
  Synthetic oligonucleotide
atgtctttggaccccgtaacgtaatcacat

SEQ ID NO: 318645 - DNA, 30 bp, Artificial Sequence
  Synthetic oligonucleotide
atagtgggaatcatatgtccacactcacat

SEQ ID NO: 318646 - DNA, 30 bp, Artificial Sequence
  Synthetic oligonucleotide
gagtcgtgggatcattcataacgctcacat

SEQ ID NO: 318647 - DNA, 30 bp, Artificial Sequence
  Synthetic oligonucleotide
gcactgttcaccgtaacgttacgttcacat

SEQ ID NO: 318648 - DNA, 30 bp, Artificial Sequence
  Synthetic oligonucleotide
cttgatgtgcttatggcaccatgttcacat

SEQ ID NO: 318649 - DNA, 30 bp, Artificial Sequence
  Synthetic oligonucleotide
gcaagcggtcaaaggatctgcatttcacat

SEQ ID NO: 318650 - DNA, 30 bp, Artificial Sequence
  Synthetic oligonucleotide
ccgatatgacatcgccgatgtaaaagacat

SEQ ID NO: 318651 - DNA, 30 bp, Artificial Sequence
  Synthetic oligonucleotide
ccatgttcaatatcctatctaataagacat

SEQ ID NO: 318652 - DNA, 30 bp, Artificial Sequence
  Synthetic oligonucleotide
ccaagggaggggcgtttggctgtcagacat

SEQ ID NO: 318653 - DNA, 30 bp, Artificial Sequence
  Synthetic oligonucleotide
gaactcatcggacccgaatctgctagacat

SEQ ID NO: 318654 - DNA, 30 bp, Artificial Sequence
  Synthetic oligonucleotide
tatagcccgggatggagcggtgttagacat

SEQ ID NO: 318655 - DNA, 30 bp, Artificial Sequence
  Synthetic oligonucleotide
aagcgggttagagtgtcttcatcacgacat

SEQ ID NO: 318656 - DNA, 30 bp, Artificial Sequence
  Synthetic oligonucleotide
agatcgaaagcctaatttctatcacgacat

SEQ ID NO: 318657 - DNA, 30 bp, Artificial Sequence
  Synthetic oligonucleotide
atgtatattgtaaggaggggttcgcgacat

SEQ ID NO: 318658 - DNA, 30 bp, Artificial Sequence
  Synthetic oligonucleotide
ctttacaaggtcgctcgatcaaaaggacat

SEQ ID NO: 318659 - DNA, 30 bp, Artificial Sequence
  Synthetic oligonucleotide
tctttatgaaacaagcactcccaaggacat

SEQ ID NO: 318660 - DNA, 30 bp, Artificial Sequence
  Synthetic oligonucleotide
gacaccaaatggttagttattcaaggacat

SEQ ID NO: 318661 - DNA, 30 bp, Artificial Sequence
  Synthetic oligonucleotide
tgcgctaccagtatatggataataggacat

SEQ ID NO: 318662 - DNA, 30 bp, Artificial Sequence
  Synthetic oligonucleotide
aaagccgggaccaaaataacgtacggacat

SEQ ID NO: 318663 - DNA, 30 bp, Artificial Sequence
  Synthetic oligonucleotide
aggatgcattgggtgttaatcaccggacat

SEQ ID NO: 318664 - DNA, 30 bp, Artificial Sequence
  Synthetic oligonucleotide
taaaagtgaacctagtctatgggcggacat

SEQ ID NO: 318665 - DNA, 30 bp, Artificial Sequence
  Synthetic oligonucleotide
agagagattattgcgggctacatcggacat

SEQ ID NO: 318666 - DNA, 30 bp, Artificial Sequence
  Synthetic oligonucleotide
cccctttctcggtccatcgttctcggacat

SEQ ID NO: 318667 - DNA, 30 bp, Artificial Sequence
  Synthetic oligonucleotide
ctactatttggtgtcggacggcagggacat

SEQ ID NO: 318668 - DNA, 30 bp, Artificial Sequence
  Synthetic oligonucleotide
gacaggatctatggggatgtttagggacat

SEQ ID NO: 318669 - DNA, 30 bp, Artificial Sequence
  Synthetic oligonucleotide
gacattgtgtcttcgatagcgaggggacat

SEQ ID NO: 318670 - DNA, 30 bp, Artificial Sequence
  Synthetic oligonucleotide
gggactctcacttatgttacccaatgacat

SEQ ID NO: 318671 - DNA, 30 bp, Artificial Sequence
  Synthetic oligonucleotide
acgtggattctgtagcaattaagatgacat

SEQ ID NO: 318672 - DNA, 30 bp, Artificial Sequence
  Synthetic oligonucleotide
aacacggggtacggcggccagggctgacat

SEQ ID NO: 318673 - DNA, 30 bp, Artificial Sequence
  Synthetic oligonucleotide
gcattttacacctcttaaagcttctgacat

SEQ ID NO: 318674 - DNA, 30 bp, Artificial Sequence
  Synthetic oligonucleotide
ccttagccgggcgccgggtgagagtgacat

SEQ ID NO: 318675 - DNA, 30 bp, Artificial Sequence
  Synthetic oligonucleotide
ggagacacggctagttggtggcaaatacat

SEQ ID NO: 318676 - DNA, 30 bp, Artificial Sequence
  Synthetic oligonucleotide
atgagttgtttcgggaggtggctaatacat

SEQ ID NO: 318677 - DNA, 30 bp, Artificial Sequence
  Synthetic oligonucleotide
gatctattcgccactgcaggggtaatacat

SEQ ID NO: 318678 - DNA, 30 bp, Artificial Sequence
  Synthetic oligonucleotide
aaatggatatggacgcaattaaacatacat

SEQ ID NO: 318679 - DNA, 30 bp, Artificial Sequence
  Synthetic oligonucleotide
cgtaggttcccgggattcttatacatacat

SEQ ID NO: 318680 - DNA, 30 bp, Artificial Sequence
  Synthetic oligonucleotide
gattgtactgatgaggtgcgttacatacat

SEQ ID NO: 318681 - DNA, 30 bp, Artificial Sequence
  Synthetic oligonucleotide
ggcactatgtaaggtcaaagtggcatacat

SEQ ID NO: 318682 - DNA, 30 bp, Artificial Sequence
  Synthetic oligonucleotide
ttactgaagtgtgtaggatcatagatacat

SEQ ID NO: 318683 - DNA, 30 bp, Artificial Sequence
  Synthetic oligonucleotide
tttgcgtaggatcgtgtctacttgatacat

SEQ ID NO: 318684 - DNA, 30 bp, Artificial Sequence
  Synthetic oligonucleotide
aggcacattcctgcctttcgggatatacat

SEQ ID NO: 318685 - DNA, 30 bp, Artificial Sequence
  Synthetic oligonucleotide
ggctcatctgtggtctgtatgtatatacat

SEQ ID NO: 318686 - DNA, 30 bp, Artificial Sequence
  Synthetic oligonucleotide
cgctgttgtgttgggcatatcgtactacat

SEQ ID NO: 318687 - DNA, 30 bp, Artificial Sequence
  Synthetic oligonucleotide
aaaactattcaagattatacgagcctacat

SEQ ID NO: 318688 - DNA, 30 bp, Artificial Sequence
  Synthetic oligonucleotide
tgtcatctcctcaaatctagtccagtacat

SEQ ID NO: 318689 - DNA, 30 bp, Artificial Sequence
  Synthetic oligonucleotide
aaatgggttaataatcgtcgtagagtacat

SEQ ID NO: 318690 - DNA, 30 bp, Artificial Sequence
  Synthetic oligonucleotide
actgtctcagcgagcaagtcacacgtacat

SEQ ID NO: 318691 - DNA, 30 bp, Artificial Sequence
  Synthetic oligonucleotide
aaaccaattggtgcaccggggcacgtacat

SEQ ID NO: 318692 - DNA, 30 bp, Artificial Sequence
  Synthetic oligonucleotide
ataaggatttacgatcgctaagccgtacat

SEQ ID NO: 318693 - DNA, 30 bp, Artificial Sequence
  Synthetic oligonucleotide
gtcagggctaaacctagataaccggtacat

SEQ ID NO: 318694 - DNA, 30 bp, Artificial Sequence
  Synthetic oligonucleotide
gtcggttggatagtttcaagaaaattacat

SEQ ID NO: 318695 - DNA, 30 bp, Artificial Sequence
  Synthetic oligonucleotide
gtcaacctctctggggatgagacattacat

SEQ ID NO: 318696 - DNA, 30 bp, Artificial Sequence
  Synthetic oligonucleotide
atggtgcgtttcgagttgggtacattacat

SEQ ID NO: 318697 - DNA, 30 bp, Artificial Sequence
  Synthetic oligonucleotide
aaacgcaccgcagctgcaggcgtattacat

SEQ ID NO: 318698 - DNA, 30 bp, Artificial Sequence
  Synthetic oligonucleotide
cctcccaactcgagacgaggcaagttacat

SEQ ID NO: 318699 - DNA, 30 bp, Artificial Sequence
  Synthetic oligonucleotide
tggcccttgcgactttccaaagcgttacat

SEQ ID NO: 318700 - DNA, 30 bp, Artificial Sequence
  Synthetic oligonucleotide
actggcgagttgtccgctggttcgttacat

SEQ ID NO: 318701 - DNA, 30 bp, Artificial Sequence
  Synthetic oligonucleotide
tagaagcatattttctcggtcctgttacat

SEQ ID NO: 318702 - DNA, 30 bp, Artificial Sequence
  Synthetic oligonucleotide
aggcccggctgtgggttctgaactttacat

SEQ ID NO: 318703 - DNA, 30 bp, Artificial Sequence
  Synthetic oligonucleotide
cccaacccgcaacatcaacgagctttacat

SEQ ID NO: 318704 - DNA, 30 bp, Artificial Sequence
  Synthetic oligonucleotide
ggtggtcacctaccggtgagcagtttacat

SEQ ID NO: 318705 - DNA, 30 bp, Artificial Sequence
  Synthetic oligonucleotide
ttgtgcaggtataggttctgcagtttacat

SEQ ID NO: 318706 - DNA, 30 bp, Artificial Sequence
  Synthetic oligonucleotide
ttggggataggcgcgcactcagacaaccat

SEQ ID NO: 318707 - DNA, 30 bp, Artificial Sequence
  Synthetic oligonucleotide
aagctcaaattccttcaacaattcaaccat

SEQ ID NO: 318708 - DNA, 30 bp, Artificial Sequence
  Synthetic oligonucleotide
agtggttatacgcgtatacgtctgaaccat

SEQ ID NO: 318709 - DNA, 29 bp, Artificial Sequence
  Synthetic oligonucleotide
tacgttaagtctttcctttaaataaccat

SEQ ID NO: 318710 - DNA, 30 bp, Artificial Sequence
  Synthetic oligonucleotide
tctagacaaacgaatatgccaagtaaccat

SEQ ID NO: 318711 - DNA, 30 bp, Artificial Sequence
  Synthetic oligonucleotide
gggtagatgggtgtggggcttagtaaccat

SEQ ID NO: 318712 - DNA, 30 bp, Artificial Sequence
  Synthetic oligonucleotide
gtatagactacaggattcgtgattaaccat

SEQ ID NO: 318713 - DNA, 30 bp, Artificial Sequence
  Synthetic oligonucleotide
ctgtgtcctattagacaataagttaaccat

SEQ ID NO: 318714 - DNA, 30 bp, Artificial Sequence
  Synthetic oligonucleotide
ggatgtattacacgatcgccggcacaccat

SEQ ID NO: 318715 - DNA, 30 bp, Artificial Sequence
  Synthetic oligonucleotide
tacatcaggagacgagtttttcaccaccat

SEQ ID NO: 318716 - DNA, 30 bp, Artificial Sequence
  Synthetic oligonucleotide
cagcggtcaaacgtaaccacctggcaccat

SEQ ID NO: 318717 - DNA, 30 bp, Artificial Sequence
  Synthetic oligonucleotide
gaatgcgtcaaagaattaactctgcaccat

SEQ ID NO: 318718 - DNA, 30 bp, Artificial Sequence
  Synthetic oligonucleotide
atttgccgtccgacaccctatgatcaccat

SEQ ID NO: 318719 - DNA, 30 bp, Artificial Sequence
  Synthetic oligonucleotide
tacctatatgggcagaggaatcctcaccat

SEQ ID NO: 318720 - DNA, 30 bp, Artificial Sequence
  Synthetic oligonucleotide
tgaattgggtctctccatccatcagaccat

SEQ ID NO: 318721 - DNA, 30 bp, Artificial Sequence
  Synthetic oligonucleotide
tgggtacgaattcagacattgagcgaccat

SEQ ID NO: 318722 - DNA, 30 bp, Artificial Sequence
  Synthetic oligonucleotide
agcacagacgtagaggtcaaaggtgaccat

SEQ ID NO: 318723 - DNA, 30 bp, Artificial Sequence
  Synthetic oligonucleotide
aggtgacctttgttagtttccacataccat

SEQ ID NO: 318724 - DNA, 30 bp, Artificial Sequence
  Synthetic oligonucleotide
tccgggcttgcagttcccatgttctaccat

SEQ ID NO: 318725 - DNA, 30 bp, Artificial Sequence
  Synthetic oligonucleotide
catgcgaaggattctgcggccacgtaccat

SEQ ID NO: 318726 - DNA, 30 bp, Artificial Sequence
  Synthetic oligonucleotide
cacttctgatcgatcaggcccgggtaccat

SEQ ID NO: 318727 - DNA, 30 bp, Artificial Sequence
  Synthetic oligonucleotide
gggtcgaaagctggccggggtgtttaccat

SEQ ID NO: 318728 - DNA, 30 bp, Artificial Sequence
  Synthetic oligonucleotide
ctcggagcaacaatagagttaaagacccat

SEQ ID NO: 318729 - DNA, 30 bp, Artificial Sequence
  Synthetic oligonucleotide
ggacaactatcaggagacaacattacccat

SEQ ID NO: 318730 - DNA, 30 bp, Artificial Sequence
  Synthetic oligonucleotide
gatggagcaccgggggcctggaaaccccat

SEQ ID NO: 318731 - DNA, 30 bp, Artificial Sequence
  Synthetic oligonucleotide
gtcctctggtacagtgagggacacccccat

SEQ ID NO: 318732 - DNA, 30 bp, Artificial Sequence
  Synthetic oligonucleotide
tacgcctgtgactaatgacaccagccccat

SEQ ID NO: 318733 - DNA, 30 bp, Artificial Sequence
  Synthetic oligonucleotide
ctacatgggctcgtcatattttcgccccat

SEQ ID NO: 318734 - DNA, 30 bp, Artificial Sequence
  Synthetic oligonucleotide
ccagttggtaaagagcatatgaatccccat

SEQ ID NO: 318735 - DNA, 30 bp, Artificial Sequence
  Synthetic oligonucleotide
cgagttcttaaattgtcgtctcatccccat

SEQ ID NO: 318736 - DNA, 30 bp, Artificial Sequence
  Synthetic oligonucleotide
ggatcctttatcaacgggtaaattccccat

SEQ ID NO: 318737 - DNA, 30 bp, Artificial Sequence
  Synthetic oligonucleotide
catgctgaatggttatagaatcaggcccat

SEQ ID NO: 318738 - DNA, 30 bp, Artificial Sequence
  Synthetic oligonucleotide
ggaccagatgcaagaataggtcaatcccat

SEQ ID NO: 318739 - DNA, 30 bp, Artificial Sequence
  Synthetic oligonucleotide
gagctggtattgcgttttttcacctcccat

SEQ ID NO: 318740 - DNA, 30 bp, Artificial Sequence
  Synthetic oligonucleotide
ccaatttactgcaatacatgacagtcccat

SEQ ID NO: 318741 - DNA, 30 bp, Artificial Sequence
  Synthetic oligonucleotide
cgaccgttgcccgggaggacttagtcccat

SEQ ID NO: 318742 - DNA, 30 bp, Artificial Sequence
  Synthetic oligonucleotide
tcagtcccatccgtagtgcctatgtcccat

SEQ ID NO: 318743 - DNA, 30 bp, Artificial Sequence
  Synthetic oligonucleotide
gatacgcgtagtatcaaaacggtgtcccat

SEQ ID NO: 318744 - DNA, 30 bp, Artificial Sequence
  Synthetic oligonucleotide
aactcctgggtgtcgtgaattgtgtcccat

SEQ ID NO: 318745 - DNA, 31 bp, Artificial Sequence
  Synthetic oligonucleotide
tccaatcctagattagggttacttgtcccat

SEQ ID NO: 318746 - DNA, 30 bp, Artificial Sequence
  Synthetic oligonucleotide
tactgaccatagtggatcagtggttcccat

SEQ ID NO: 318747 - DNA, 30 bp, Artificial Sequence
  Synthetic oligonucleotide
ctttggaatcatgtttagatttggagccat

SEQ ID NO: 318748 - DNA, 30 bp, Artificial Sequence
  Synthetic oligonucleotide
gaatgcaagaacgttcattgatatagccat

SEQ ID NO: 318749 - DNA, 30 bp, Artificial Sequence
  Synthetic oligonucleotide
tcagattgccatcaggagtggcaacgccat

SEQ ID NO: 318750 - DNA, 30 bp, Artificial Sequence
  Synthetic oligonucleotide
gaatgtgccccgagaaggtttgaccgccat

SEQ ID NO: 318751 - DNA, 30 bp, Artificial Sequence
  Synthetic oligonucleotide
agcgagtaccagcaccccgcagtccgccat

SEQ ID NO: 318752 - DNA, 30 bp, Artificial Sequence
  Synthetic oligonucleotide
cgatgctcgtccaccacgatcgtccgccat

SEQ ID NO: 318753 - DNA, 30 bp, Artificial Sequence
  Synthetic oligonucleotide
gcaggcgcccaaagcatgttaatgcgccat

SEQ ID NO: 318754 - DNA, 30 bp, Artificial Sequence
  Synthetic oligonucleotide
acagattgagttttcaaggctgttcgccat

SEQ ID NO: 318755 - DNA, 30 bp, Artificial Sequence
  Synthetic oligonucleotide
gccgcgggagcagaagcaccacgaggccat

SEQ ID NO: 318756 - DNA, 30 bp, Artificial Sequence
  Synthetic oligonucleotide
ttaataggacgactacaatcaggaggccat

SEQ ID NO: 318757 - DNA, 30 bp, Artificial Sequence
  Synthetic oligonucleotide
tagcccagctacgatgttggtaatggccat

SEQ ID NO: 318758 - DNA, 30 bp, Artificial Sequence
  Synthetic oligonucleotide
tgacttcacaagtccccaaccactggccat

SEQ ID NO: 318759 - DNA, 30 bp, Artificial Sequence
  Synthetic oligonucleotide
atcagtttttacgtcttgtgagagtgccat

SEQ ID NO: 318760 - DNA, 30 bp, Artificial Sequence
  Synthetic oligonucleotide
tggaaccgggagaagagatgcctgtgccat

SEQ ID NO: 318761 - DNA, 30 bp, Artificial Sequence
  Synthetic oligonucleotide
gacaacctgaagacataaataccttgccat

SEQ ID NO: 318762 - DNA, 30 bp, Artificial Sequence
  Synthetic oligonucleotide
gccgcattagtttatgcacagctgatccat

SEQ ID NO: 318763 - DNA, 30 bp, Artificial Sequence
  Synthetic oligonucleotide
ttttgttaatcgggtagtgagcgtatccat

SEQ ID NO: 318764 - DNA, 30 bp, Artificial Sequence
  Synthetic oligonucleotide
ggctcgctacgccccgaccaaagactccat

SEQ ID NO: 318765 - DNA, 30 bp, Artificial Sequence
  Synthetic oligonucleotide
tcgagagcggtatttgcgcaagtgctccat

SEQ ID NO: 318766 - DNA, 30 bp, Artificial Sequence
  Synthetic oligonucleotide
attatctgttgctcgagggcgcatctccat

SEQ ID NO: 318767 - DNA, 30 bp, Artificial Sequence
  Synthetic oligonucleotide
cttataatggaaagtggggaaactctccat

SEQ ID NO: 318768 - DNA, 30 bp, Artificial Sequence
  Synthetic oligonucleotide
aaatctcacagaggtgccggtaaagtccat

SEQ ID NO: 318769 - DNA, 30 bp, Artificial Sequence
  Synthetic oligonucleotide
gcctcgagcttacaataagtgcgcgtccat

SEQ ID NO: 318770 - DNA, 30 bp, Artificial Sequence
  Synthetic oligonucleotide
ctagaatctgcgaagcgcctgcaggtccat

SEQ ID NO: 318771 - DNA, 30 bp, Artificial Sequence
  Synthetic oligonucleotide
cccgactacgagtactttgtacgggtccat

SEQ ID NO: 318772 - DNA, 30 bp, Artificial Sequence
  Synthetic oligonucleotide
gtgtgtcataaagcttattggttggtccat

SEQ ID NO: 318773 - DNA, 30 bp, Artificial Sequence
  Synthetic oligonucleotide
gagtctgaatatactagtcgctatgtccat

SEQ ID NO: 318774 - DNA, 30 bp, Artificial Sequence
  Synthetic oligonucleotide
cattcattgatcggggagagagctgtccat

SEQ ID NO: 318775 - DNA, 30 bp, Artificial Sequence
  Synthetic oligonucleotide
ctttgagatgagcttacgaatgaattccat

SEQ ID NO: 318776 - DNA, 30 bp, Artificial Sequence
  Synthetic oligonucleotide
tggcagcgcatcagttttgtcgcgttccat

SEQ ID NO: 318777 - DNA, 30 bp, Artificial Sequence
  Synthetic oligonucleotide
cttagccatcagggtcgaagggtgttccat

SEQ ID NO: 318778 - DNA, 30 bp, Artificial Sequence
  Synthetic oligonucleotide
tcggtaagtgctatccatgtcgcaaagcat

SEQ ID NO: 318779 - DNA, 30 bp, Artificial Sequence
  Synthetic oligonucleotide
atactaaataccgttggcgccgagaagcat

SEQ ID NO: 318780 - DNA, 30 bp, Artificial Sequence
  Synthetic oligonucleotide
cgaggccgcgtcgtaagttacacgaagcat

SEQ ID NO: 318781 - DNA, 30 bp, Artificial Sequence
  Synthetic oligonucleotide
ttgtagccgttttctaacgactcgaagcat

SEQ ID NO: 318782 - DNA, 30 bp, Artificial Sequence
  Synthetic oligonucleotide
gaacttatctacgtacacgccaataagcat

SEQ ID NO: 318783 - DNA, 30 bp, Artificial Sequence
  Synthetic oligonucleotide
tcgtatgttctcgcggtattgggtaagcat

SEQ ID NO: 318784 - DNA, 30 bp, Artificial Sequence
  Synthetic oligonucleotide
agtaattgatttataaacaaaggacagcat

SEQ ID NO: 318785 - DNA, 30 bp, Artificial Sequence
  Synthetic oligonucleotide
tagactcgaaaggaccacggcgtacagcat

SEQ ID NO: 318786 - DNA, 30 bp, Artificial Sequence
  Synthetic oligonucleotide
cacgtccgggcttgcatgacggtccagcat

SEQ ID NO: 318787 - DNA, 30 bp, Artificial Sequence
  Synthetic oligonucleotide
cgtgtagaactgcagcctttgttccagcat

SEQ ID NO: 318788 - DNA, 30 bp, Artificial Sequence
  Synthetic oligonucleotide
atcataggtgaaggtgatggcaagcagcat

SEQ ID NO: 318789 - DNA, 30 bp, Artificial Sequence
  Synthetic oligonucleotide
cttctaaggcgtgtagcgaaatatcagcat

SEQ ID NO: 318790 - DNA, 30 bp, Artificial Sequence
  Synthetic oligonucleotide
atcaaatggatacgggttgctggtcagcat

SEQ ID NO: 318791 - DNA, 30 bp, Artificial Sequence
  Synthetic oligonucleotide
gtacatagactaacgttgattggtcagcat

SEQ ID NO: 318792 - DNA, 30 bp, Artificial Sequence
  Synthetic oligonucleotide
gggctccaattcgtacttcgagcagagcat

SEQ ID NO: 318793 - DNA, 30 bp, Artificial Sequence
  Synthetic oligonucleotide
gaagataaagattgcttttatttagagcat

SEQ ID NO: 318794 - DNA, 30 bp, Artificial Sequence
  Synthetic oligonucleotide
tcgaggcacgccaatgtccagcccgagcat

SEQ ID NO: 318795 - DNA, 30 bp, Artificial Sequence
  Synthetic oligonucleotide
gagtggatgtgactaattagcaaggagcat

SEQ ID NO: 318796 - DNA, 30 bp, Artificial Sequence
  Synthetic oligonucleotide
ttgcgcattggttgctttttacaggagcat

SEQ ID NO: 318797 - DNA, 30 bp, Artificial Sequence
  Synthetic oligonucleotide
acagcccgaacaaagcgaacaggggagcat

SEQ ID NO: 318798 - DNA, 30 bp, Artificial Sequence
  Synthetic oligonucleotide
ggaaggttagatactagcccagtttagcat

SEQ ID NO: 318799 - DNA, 30 bp, Artificial Sequence
  Synthetic oligonucleotide
ttaggataaaatgagaatgctttttagcat

SEQ ID NO: 318800 - DNA, 30 bp, Artificial Sequence
  Synthetic oligonucleotide
aacagtgtgtggtgtatcccagcaacgcat

SEQ ID NO: 318801 - DNA, 30 bp, Artificial Sequence
  Synthetic oligonucleotide
attgtccgaaaagaccgtagtgacacgcat

SEQ ID NO: 318802 - DNA, 30 bp, Artificial Sequence
  Synthetic oligonucleotide
tgaacgtagggataatttgaaactacgcat

SEQ ID NO: 318803 - DNA, 30 bp, Artificial Sequence
  Synthetic oligonucleotide
ttgccggaagactttacgttgtctacgcat

SEQ ID NO: 318804 - DNA, 30 bp, Artificial Sequence
  Synthetic oligonucleotide
atcaacgctgtcagcataagcggtacgcat

SEQ ID NO: 318805 - DNA, 30 bp, Artificial Sequence
  Synthetic oligonucleotide
gtgggtcggggaagtagtttagtcccgcat

SEQ ID NO: 318806 - DNA, 30 bp, Artificial Sequence
  Synthetic oligonucleotide
gtaccggagtgggggcttcctcgagcgcat

SEQ ID NO: 318807 - DNA, 30 bp, Artificial Sequence
  Synthetic oligonucleotide
ttcgagggcgccggactaccttccgcgcat

SEQ ID NO: 318808 - DNA, 30 bp, Artificial Sequence
  Synthetic oligonucleotide
tacacgttgaaagttgccttgtgggcgcat

SEQ ID NO: 318809 - DNA, 30 bp, Artificial Sequence
  Synthetic oligonucleotide
aagtgcgaggtcaggcggggacactcgcat

SEQ ID NO: 318810 - DNA, 30 bp, Artificial Sequence
  Synthetic oligonucleotide
tcctacgtgtaaactgctcaacggtcgcat

SEQ ID NO: 318811 - DNA, 30 bp, Artificial Sequence
  Synthetic oligonucleotide
ggcgtaacgggatcagcgctgcggtcgcat

SEQ ID NO: 318812 - DNA, 30 bp, Artificial Sequence
  Synthetic oligonucleotide
taaaaggcatgattctcggcaacttcgcat

SEQ ID NO: 318813 - DNA, 30 bp, Artificial Sequence
  Synthetic oligonucleotide
agcagtgcacacagcgactgtaaaaggcat

SEQ ID NO: 318814 - DNA, 30 bp, Artificial Sequence
  Synthetic oligonucleotide
ggagtttagatatatccctgtataaggcat

SEQ ID NO: 318815 - DNA, 30 bp, Artificial Sequence
  Synthetic oligonucleotide
tgtgactagatacgcgaacggcccaggcat

SEQ ID NO: 318816 - DNA, 30 bp, Artificial Sequence
  Synthetic oligonucleotide
tgtcttcaaatcacttcttgtgtcaggcat

SEQ ID NO: 318817 - DNA, 30 bp, Artificial Sequence
  Synthetic oligonucleotide
gttccggtagctcatcacggcaagaggcat

SEQ ID NO: 318818 - DNA, 30 bp, Artificial Sequence
  Synthetic oligonucleotide
actactggcttcatcatggtgactaggcat

SEQ ID NO: 318819 - DNA, 30 bp, Artificial Sequence
  Synthetic oligonucleotide
gtgtaggtgtttacagtgttgggtaggcat

SEQ ID NO: 318820 - DNA, 30 bp, Artificial Sequence
  Synthetic oligonucleotide
gtacagtttatttggagaatacaacggcat

SEQ ID NO: 318821 - DNA, 31 bp, Artificial Sequence
  Synthetic oligonucleotide
gcaaggcggcccggagttaataagacggcat

SEQ ID NO: 318822 - DNA, 30 bp, Artificial Sequence
  Synthetic oligonucleotide
ttaacgacacttttattcgtaggacggcat

SEQ ID NO: 318823 - DNA, 30 bp, Artificial Sequence
  Synthetic oligonucleotide
tgagtcgagccgaccagttggaaccggcat

SEQ ID NO: 318824 - DNA, 30 bp, Artificial Sequence
  Synthetic oligonucleotide
ttaattataaggcgggataaaatgcggcat

SEQ ID NO: 318825 - DNA, 30 bp, Artificial Sequence
  Synthetic oligonucleotide
gcggactcggcttattcgtacactcggcat

SEQ ID NO: 318826 - DNA, 30 bp, Artificial Sequence
  Synthetic oligonucleotide
gcactccaatccatgttacgaatcgggcat

SEQ ID NO: 318827 - DNA, 30 bp, Artificial Sequence
  Synthetic oligonucleotide
tcacaacaccggcgaacccctaaggggcat

SEQ ID NO: 318828 - DNA, 30 bp, Artificial Sequence
  Synthetic oligonucleotide
gccctctgacaccgctgtctcagggggcat

SEQ ID NO: 318829 - DNA, 30 bp, Artificial Sequence
  Synthetic oligonucleotide
atgatactattcgggcgaccggctgggcat

SEQ ID NO: 318830 - DNA, 30 bp, Artificial Sequence
  Synthetic oligonucleotide
acgcaatgagccctgacgtagagtgggcat

SEQ ID NO: 318831 - DNA, 30 bp, Artificial Sequence
  Synthetic oligonucleotide
aatgatgtggtgtggtggtagcttgggcat

SEQ ID NO: 318832 - DNA, 30 bp, Artificial Sequence
  Synthetic oligonucleotide
acataggcaacatgtattgacgaatggcat

SEQ ID NO: 318833 - DNA, 30 bp, Artificial Sequence
  Synthetic oligonucleotide
tagcatactgcccgaaacttgtcatggcat

SEQ ID NO: 318834 - DNA, 30 bp, Artificial Sequence
  Synthetic oligonucleotide
gatatacggcgtagtcgttccccgtggcat

SEQ ID NO: 318835 - DNA, 30 bp, Artificial Sequence
  Synthetic oligonucleotide
gtacgaactaggacccgacttgtgtggcat

SEQ ID NO: 318836 - DNA, 30 bp, Artificial Sequence
  Synthetic oligonucleotide
gcgaatgctataggccccgtcaattggcat

SEQ ID NO: 318837 - DNA, 30 bp, Artificial Sequence
  Synthetic oligonucleotide
gtcgtgtttgagaaagctagtagaatgcat

SEQ ID NO: 318838 - DNA, 30 bp, Artificial Sequence
  Synthetic oligonucleotide
ctaatagcagtgacagtaccatcactgcat

SEQ ID NO: 318839 - DNA, 30 bp, Artificial Sequence
  Synthetic oligonucleotide
tccggatgacatattctgcatacgctgcat

SEQ ID NO: 318840 - DNA, 30 bp, Artificial Sequence
  Synthetic oligonucleotide
atctgggcggcagcaaggtgtatgctgcat

SEQ ID NO: 318841 - DNA, 30 bp, Artificial Sequence
  Synthetic oligonucleotide
tcccatcaacgaaagtaacccgatctgcat

SEQ ID NO: 318842 - DNA, 30 bp, Artificial Sequence
  Synthetic oligonucleotide
ttatagctggctgacacaaaatcagtgcat

SEQ ID NO: 318843 - DNA, 30 bp, Artificial Sequence
  Synthetic oligonucleotide
ctgcccgcgactcgactccccgtagtgcat

SEQ ID NO: 318844 - DNA, 30 bp, Artificial Sequence
  Synthetic oligonucleotide
aacagatgttttgagaagcccggcgtgcat

SEQ ID NO: 318845 - DNA, 30 bp, Artificial Sequence
  Synthetic oligonucleotide
acctggtcatcctgtacgtaagtggtgcat

SEQ ID NO: 318846 - DNA, 30 bp, Artificial Sequence
  Synthetic oligonucleotide
acacgtaggcatgatttagagcgcttgcat

SEQ ID NO: 318847 - DNA, 30 bp, Artificial Sequence
  Synthetic oligonucleotide
gcgtaggacgcgacggaaggctgcttgcat

SEQ ID NO: 318848 - DNA, 30 bp, Artificial Sequence
  Synthetic oligonucleotide
tgtccgacacattgatgcgccagtttgcat

SEQ ID NO: 318849 - DNA, 30 bp, Artificial Sequence
  Synthetic oligonucleotide
acttgattaaagatcgttcgcaataatcat

SEQ ID NO: 318850 - DNA, 30 bp, Artificial Sequence
  Synthetic oligonucleotide
cgtgtcttgacgcactcacgacataatcat

SEQ ID NO: 318851 - DNA, 30 bp, Artificial Sequence
  Synthetic oligonucleotide
aaaaatcctacaaggcaatggtctaatcat

SEQ ID NO: 318852 - DNA, 30 bp, Artificial Sequence
  Synthetic oligonucleotide
aaggccgaaaagttttgtaatgaacatcat

SEQ ID NO: 318853 - DNA, 30 bp, Artificial Sequence
  Synthetic oligonucleotide
ttgggcgtcgctcataaaaagtcccatcat

SEQ ID NO: 318854 - DNA, 30 bp, Artificial Sequence
  Synthetic oligonucleotide
acaagtgatgcggcccctacaaagcatcat

SEQ ID NO: 318855 - DNA, 30 bp, Artificial Sequence
  Synthetic oligonucleotide
cgaagctcaaacttcgtggaattgcatcat

SEQ ID NO: 318856 - DNA, 30 bp, Artificial Sequence
  Synthetic oligonucleotide
cctacaataaccgggaagaggttgcatcat

SEQ ID NO: 318857 - DNA, 30 bp, Artificial Sequence
  Synthetic oligonucleotide
aatcgttctaaggggcttaaaggtcatcat

SEQ ID NO: 318858 - DNA, 30 bp, Artificial Sequence
  Synthetic oligonucleotide
tcatagttaattcatgagtgtcaagatcat

SEQ ID NO: 318859 - DNA, 30 bp, Artificial Sequence
  Synthetic oligonucleotide
cctccaacacggaataggaactgagatcat

SEQ ID NO: 318860 - DNA, 30 bp, Artificial Sequence
  Synthetic oligonucleotide
ccgaagggggttgactactgcgccgatcat

SEQ ID NO: 318861 - DNA, 30 bp, Artificial Sequence
  Synthetic oligonucleotide
cgtcttcccgtggagcatagcccggatcat

SEQ ID NO: 318862 - DNA, 30 bp, Artificial Sequence
  Synthetic oligonucleotide
gtatgtatgcaacctcccagggtctatcat

SEQ ID NO: 318863 - DNA, 30 bp, Artificial Sequence
  Synthetic oligonucleotide
cagtcccgcaacagagtcgtatagtatcat

SEQ ID NO: 318864 - DNA, 30 bp, Artificial Sequence
  Synthetic oligonucleotide
tagttaaacgcgccaaacatcagttatcat

SEQ ID NO: 318865 - DNA, 30 bp, Artificial Sequence
  Synthetic oligonucleotide
gcaatcaagtctaagtagagttaaactcat

SEQ ID NO: 318866 - DNA, 30 bp, Artificial Sequence
  Synthetic oligonucleotide
caactttataaacggttatgtgacactcat

SEQ ID NO: 318867 - DNA, 30 bp, Artificial Sequence
  Synthetic oligonucleotide
atagacagtaagatcgtggtttacactcat

SEQ ID NO: 318868 - DNA, 30 bp, Artificial Sequence
  Synthetic oligonucleotide
aaggacgtcggatggctgccaaccactcat

SEQ ID NO: 318869 - DNA, 30 bp, Artificial Sequence
  Synthetic oligonucleotide
taggagctataacgagtctcggagactcat

SEQ ID NO: 318870 - DNA, 30 bp, Artificial Sequence
  Synthetic oligonucleotide
gtgggatttctatagaaaagtgggactcat

SEQ ID NO: 318871 - DNA, 30 bp, Artificial Sequence
  Synthetic oligonucleotide
agcgtctatagaaacatggtgaaacctcat

SEQ ID NO: 318872 - DNA, 30 bp, Artificial Sequence
  Synthetic oligonucleotide
tcaatgatggggaccgcatccttacctcat

SEQ ID NO: 318873 - DNA, 30 bp, Artificial Sequence
  Synthetic oligonucleotide
gggaagtcttcccgcccgataggagctcat

SEQ ID NO: 318874 - DNA, 30 bp, Artificial Sequence
  Synthetic oligonucleotide
agattttagcaaacccgcactatagctcat

SEQ ID NO: 318875 - DNA, 30 bp, Artificial Sequence
  Synthetic oligonucleotide
aaatcggctgaacgtaggcgtggcgctcat

SEQ ID NO: 318876 - DNA, 30 bp, Artificial Sequence
  Synthetic oligonucleotide
gctgtaacttgaaggactggcctcgctcat

SEQ ID NO: 318877 - DNA, 30 bp, Artificial Sequence
  Synthetic oligonucleotide
gagaatcatagtcacagaagtaaggctcat

SEQ ID NO: 318878 - DNA, 31 bp, Artificial Sequence
  Synthetic oligonucleotide
cttaaatacttcactgagccttgtggctcat

SEQ ID NO: 318879 - DNA, 30 bp, Artificial Sequence
  Synthetic oligonucleotide
gagtatgcgtactgggatgggcatgctcat

SEQ ID NO: 318880 - DNA, 30 bp, Artificial Sequence
  Synthetic oligonucleotide
attgggattgcccgtttctgagctgctcat

SEQ ID NO: 318881 - DNA, 30 bp, Artificial Sequence
  Synthetic oligonucleotide
tactaactgatgaaatctcctgctgctcat

SEQ ID NO: 318882 - DNA, 30 bp, Artificial Sequence
  Synthetic oligonucleotide
acgccacccgggaggtcctaatctgctcat

SEQ ID NO: 318883 - DNA, 30 bp, Artificial Sequence
  Synthetic oligonucleotide
ctacacaaggtacttatcctcattgctcat

SEQ ID NO: 318884 - DNA, 30 bp, Artificial Sequence
  Synthetic oligonucleotide
taggaatgtcagcgcgctgaagttgctcat

SEQ ID NO: 318885 - DNA, 30 bp, Artificial Sequence
  Synthetic oligonucleotide
atgtgtgcacgtttcaaaaccagatctcat

SEQ ID NO: 318886 - DNA, 30 bp, Artificial Sequence
  Synthetic oligonucleotide
tcagggtccggagcgtaacctccctctcat

SEQ ID NO: 318887 - DNA, 30 bp, Artificial Sequence
  Synthetic oligonucleotide
attgggatttcgtatagcggccgctctcat

SEQ ID NO: 318888 - DNA, 30 bp, Artificial Sequence
  Synthetic oligonucleotide
tctggtccagaggccatgaacttctctcat

SEQ ID NO: 318889 - DNA, 30 bp, Artificial Sequence
  Synthetic oligonucleotide
gaatcgaggttcaaattcagggagtctcat

SEQ ID NO: 318890 - DNA, 30 bp, Artificial Sequence
  Synthetic oligonucleotide
gtctcagcgcaccctcgacttaggtctcat

SEQ ID NO: 318891 - DNA, 30 bp, Artificial Sequence
  Synthetic oligonucleotide
cggagggaagatgacattttacattctcat

SEQ ID NO: 318892 - DNA, 30 bp, Artificial Sequence
  Synthetic oligonucleotide
ggaggactcgttagatgaatttcaagtcat

SEQ ID NO: 318893 - DNA, 30 bp, Artificial Sequence
  Synthetic oligonucleotide
tgcagtcgctttatcaaacatataagtcat

SEQ ID NO: 318894 - DNA, 30 bp, Artificial Sequence
  Synthetic oligonucleotide
tacccgcaaggagatgttagcgggagtcat

SEQ ID NO: 318895 - DNA, 30 bp, Artificial Sequence
  Synthetic oligonucleotide
cgagattgtcctgctctgctttggagtcat

SEQ ID NO: 318896 - DNA, 30 bp, Artificial Sequence
  Synthetic oligonucleotide
actacggcggacctggttacgactagtcat

SEQ ID NO: 318897 - DNA, 30 bp, Artificial Sequence
  Synthetic oligonucleotide
tatagtttgggtacatctagtcgtagtcat

SEQ ID NO: 318898 - DNA, 30 bp, Artificial Sequence
  Synthetic oligonucleotide
actcgaattgaacggtagttctcccgtcat

SEQ ID NO: 318899 - DNA, 30 bp, Artificial Sequence
  Synthetic oligonucleotide
aatatgtcgtttcgaggtgacagccgtcat

SEQ ID NO: 318900 - DNA, 30 bp, Artificial Sequence
  Synthetic oligonucleotide
tatagatatgccatctcggtgctgcgtcat

SEQ ID NO: 318901 - DNA, 29 bp, Artificial Sequence
  Synthetic oligonucleotide
ttgtgatgattacagagataaatcgtcat

SEQ ID NO: 318902 - DNA, 30 bp, Artificial Sequence
  Synthetic oligonucleotide
aatagcagataattaggttgacttcgtcat

SEQ ID NO: 318903 - DNA, 30 bp, Artificial Sequence
  Synthetic oligonucleotide
atgtaatctgccaaatgagcccgaggtcat

SEQ ID NO: 318904 - DNA, 30 bp, Artificial Sequence
  Synthetic oligonucleotide
gaactaagatgcgccgaaactttaggtcat

SEQ ID NO: 318905 - DNA, 30 bp, Artificial Sequence
  Synthetic oligonucleotide
gatcaagacattccacgtgattgcggtcat

SEQ ID NO: 318906 - DNA, 30 bp, Artificial Sequence
  Synthetic oligonucleotide
ttagcggggtgaaccggtgggcagggtcat

SEQ ID NO: 318907 - DNA, 30 bp, Artificial Sequence
  Synthetic oligonucleotide
ggacttctaggcatcgtacattggggtcat

SEQ ID NO: 318908 - DNA, 30 bp, Artificial Sequence
  Synthetic oligonucleotide
gcggcaacaagctgttaggtgctatgtcat

SEQ ID NO: 318909 - DNA, 30 bp, Artificial Sequence
  Synthetic oligonucleotide
tatgaaagagcaatcgtagtgtcgtgtcat

SEQ ID NO: 318910 - DNA, 30 bp, Artificial Sequence
  Synthetic oligonucleotide
agcaccttttcccgcatccccagttgtcat

SEQ ID NO: 318911 - DNA, 30 bp, Artificial Sequence
  Synthetic oligonucleotide
taccgtctgtatttaggccgaatttgtcat

SEQ ID NO: 318912 - DNA, 30 bp, Artificial Sequence
  Synthetic oligonucleotide
tgtgttagagggtgtcaactcggaattcat

SEQ ID NO: 318913 - DNA, 30 bp, Artificial Sequence
  Synthetic oligonucleotide
gcgtatcacactttggggggcttcattcat

SEQ ID NO: 318914 - DNA, 30 bp, Artificial Sequence
  Synthetic oligonucleotide
gacgacgccacctatttaacttggattcat

SEQ ID NO: 318915 - DNA, 30 bp, Artificial Sequence
  Synthetic oligonucleotide
ggcaaccaggcatcgggaaccgatattcat

SEQ ID NO: 318916 - DNA, 30 bp, Artificial Sequence
  Synthetic oligonucleotide
cctctacctttgtccccgggtaaacttcat

SEQ ID NO: 318917 - DNA, 30 bp, Artificial Sequence
  Synthetic oligonucleotide
ataaccgaaagttgtctgcgcagtcttcat

SEQ ID NO: 318918 - DNA, 30 bp, Artificial Sequence
  Synthetic oligonucleotide
ttagatggctcaaccaacgttcacgttcat

SEQ ID NO: 318919 - DNA, 30 bp, Artificial Sequence
  Synthetic oligonucleotide
acaaaccgttcggactcgacaagggttcat

SEQ ID NO: 318920 - DNA, 30 bp, Artificial Sequence
  Synthetic oligonucleotide
cacgggcagatatagggtgcatgggttcat

SEQ ID NO: 318921 - DNA, 30 bp, Artificial Sequence
  Synthetic oligonucleotide
caaactagtgtcaaggcgattgtggttcat

SEQ ID NO: 318922 - DNA, 30 bp, Artificial Sequence
  Synthetic oligonucleotide
tttgtgacagccgttagtcgattggttcat

SEQ ID NO: 318923 - DNA, 30 bp, Artificial Sequence
  Synthetic oligonucleotide
tcgcaggtgggcacagcgggccgtgttcat

SEQ ID NO: 318924 - DNA, 30 bp, Artificial Sequence
  Synthetic oligonucleotide
tcgtagcgtaaatttggtcacattgttcat

SEQ ID NO: 318925 - DNA, 30 bp, Artificial Sequence
  Synthetic oligonucleotide
ttgttgaacataaaaccagtgccatttcat

SEQ ID NO: 318926 - DNA, 30 bp, Artificial Sequence
  Synthetic oligonucleotide
agtaccgttttgcgagacaacggatttcat

SEQ ID NO: 318927 - DNA, 30 bp, Artificial Sequence
  Synthetic oligonucleotide
acctaggtaaacgaaacattacagtttcat

SEQ ID NO: 318928 - DNA, 30 bp, Artificial Sequence
  Synthetic oligonucleotide
gcgcgaaggaccgactaccttgcgtttcat

SEQ ID NO: 318929 - DNA, 30 bp, Artificial Sequence
  Synthetic oligonucleotide
aaaatagtatgaacttcgtagcggtttcat

SEQ ID NO: 318930 - DNA, 30 bp, Artificial Sequence
  Synthetic oligonucleotide
tgtcactagccgtgcataactaattttcat

SEQ ID NO: 318931 - DNA, 30 bp, Artificial Sequence
  Synthetic oligonucleotide
aagatatccgtttgtgtgcgaccaaaagat

SEQ ID NO: 318932 - DNA, 30 bp, Artificial Sequence
  Synthetic oligonucleotide
taactatgtatgctgaacaagtgaaaagat

SEQ ID NO: 318933 - DNA, 30 bp, Artificial Sequence
  Synthetic oligonucleotide
cgcggtgacgttgggggtgtagtaaaagat

SEQ ID NO: 318934 - DNA, 30 bp, Artificial Sequence
  Synthetic oligonucleotide
aatcaaagtgcgcggaccatggtaaaagat

SEQ ID NO: 318935 - DNA, 29 bp, Artificial Sequence
  Synthetic oligonucleotide
gactaggccctagaggggtccacaaagat

SEQ ID NO: 318936 - DNA, 30 bp, Artificial Sequence
  Synthetic oligonucleotide
ggaccttgctaaggcaaaacatagaaagat

SEQ ID NO: 318937 - DNA, 30 bp, Artificial Sequence
  Synthetic oligonucleotide
gaattcataaaccgggcggtctggaaagat

SEQ ID NO: 318938 - DNA, 30 bp, Artificial Sequence
  Synthetic oligonucleotide
ctacagcaaggcaccagcaaaaataaagat

SEQ ID NO: 318939 - DNA, 30 bp, Artificial Sequence
  Synthetic oligonucleotide
cacgtctcagtggactacaaccctaaagat

SEQ ID NO: 318940 - DNA, 30 bp, Artificial Sequence
  Synthetic oligonucleotide
cagcctaggtcactttccgggaaacaagat

SEQ ID NO: 318941 - DNA, 30 bp, Artificial Sequence
  Synthetic oligonucleotide
atgttcttggcagaagatcgtaagcaagat

SEQ ID NO: 318942 - DNA, 30 bp, Artificial Sequence
  Synthetic oligonucleotide
gagccctcgactgaaaggttatttcaagat

SEQ ID NO: 318943 - DNA, 31 bp, Artificial Sequence
  Synthetic oligonucleotide
ggtcattaccgcatcgtggcagttagaagat

SEQ ID NO: 318944 - DNA, 30 bp, Artificial Sequence
  Synthetic oligonucleotide
cccattcttcgagagtggccgatcgaagat

SEQ ID NO: 318945 - DNA, 30 bp, Artificial Sequence
  Synthetic oligonucleotide
aactcggaccgagcgagttccttcgaagat

SEQ ID NO: 318946 - DNA, 30 bp, Artificial Sequence
  Synthetic oligonucleotide
aggtcaggcatccgttcactctcggaagat

SEQ ID NO: 318947 - DNA, 30 bp, Artificial Sequence
  Synthetic oligonucleotide
tcatgatatgaacacacattttatgaagat

SEQ ID NO: 318948 - DNA, 29 bp, Artificial Sequence
  Synthetic oligonucleotide
ggtctatacattcgaaacactaataagat

SEQ ID NO: 318949 - DNA, 30 bp, Artificial Sequence
  Synthetic oligonucleotide
aaaagtatgttgagttgcttagcataagat

SEQ ID NO: 318950 - DNA, 30 bp, Artificial Sequence
  Synthetic oligonucleotide
aagtgaactttgcgtcactccgcctaagat

SEQ ID NO: 318951 - DNA, 30 bp, Artificial Sequence
  Synthetic oligonucleotide
gctagccggagtattctgtacaattaagat

SEQ ID NO: 318952 - DNA, 30 bp, Artificial Sequence
  Synthetic oligonucleotide
gctaccaatggtggtacgtggagttaagat

SEQ ID NO: 318953 - DNA, 30 bp, Artificial Sequence
  Synthetic oligonucleotide
tccatgaatgaaatagtcctctgttaagat

SEQ ID NO: 318954 - DNA, 30 bp, Artificial Sequence
  Synthetic oligonucleotide
gacagccccaattgctacctttaaacagat

SEQ ID NO: 318955 - DNA, 30 bp, Artificial Sequence
  Synthetic oligonucleotide
accagattatagatgcaggattcaacagat

SEQ ID NO: 318956 - DNA, 30 bp, Artificial Sequence
  Synthetic oligonucleotide
ggcgtggccttccgatcaacgggaacagat

SEQ ID NO: 318957 - DNA, 30 bp, Artificial Sequence
  Synthetic oligonucleotide
tgtgatgcaaggaagcaggacctaacagat

SEQ ID NO: 318958 - DNA, 29 bp, Artificial Sequence
  Synthetic oligonucleotide
atattgcctcaccagatcgctggacagat

SEQ ID NO: 318959 - DNA, 30 bp, Artificial Sequence
  Synthetic oligonucleotide
ttgcctagtgtcgattgggcgctgacagat

SEQ ID NO: 318960 - DNA, 30 bp, Artificial Sequence
  Synthetic oligonucleotide
tatataggtccaagtggggatttgacagat

SEQ ID NO: 318961 - DNA, 30 bp, Artificial Sequence
  Synthetic oligonucleotide
gagattttcgcgttcacactcgacccagat

SEQ ID NO: 318962 - DNA, 30 bp, Artificial Sequence
  Synthetic oligonucleotide
cagtccaatgtccccgtctaactgccagat

SEQ ID NO: 318963 - DNA, 30 bp, Artificial Sequence
  Synthetic oligonucleotide
gaatcagtgcggaactaattttctccagat

SEQ ID NO: 318964 - DNA, 30 bp, Artificial Sequence
  Synthetic oligonucleotide
gtaaaggagccggctgcctacattccagat

SEQ ID NO: 318965 - DNA, 30 bp, Artificial Sequence
  Synthetic oligonucleotide
gggagagtgaggaataatatgaaggcagat

SEQ ID NO: 318966 - DNA, 30 bp, Artificial Sequence
  Synthetic oligonucleotide
cggtaccctaagaaattactgacggcagat

SEQ ID NO: 318967 - DNA, 30 bp, Artificial Sequence
  Synthetic oligonucleotide
cgcgcactggtcaggtatcagtgggcagat

SEQ ID NO: 318968 - DNA, 30 bp, Artificial Sequence
  Synthetic oligonucleotide
tcgcgatggctcaaatcataggatgcagat

SEQ ID NO: 318969 - DNA, 30 bp, Artificial Sequence
  Synthetic oligonucleotide
ggcggtacgtggcaaaccagcactgcagat

SEQ ID NO: 318970 - DNA, 30 bp, Artificial Sequence
  Synthetic oligonucleotide
caaccacggatgttttatatgaactcagat

SEQ ID NO: 318971 - DNA, 30 bp, Artificial Sequence
  Synthetic oligonucleotide
aattcgtttgggaaccgcacctgctcagat

SEQ ID NO: 318972 - DNA, 30 bp, Artificial Sequence
  Synthetic oligonucleotide
cagtgagcgtgaggtttaccactctcagat

SEQ ID NO: 318973 - DNA, 30 bp, Artificial Sequence
  Synthetic oligonucleotide
gtgttagggggttgacagtagctctcagat

SEQ ID NO: 318974 - DNA, 29 bp, Artificial Sequence
  Synthetic oligonucleotide
cggtaacgtctctgtcaaggttctcagat

SEQ ID NO: 318975 - DNA, 30 bp, Artificial Sequence
  Synthetic oligonucleotide
aacgtgacacagttactcattcagtcagat

SEQ ID NO: 318976 - DNA, 30 bp, Artificial Sequence
  Synthetic oligonucleotide
gccagtgttgcttcagacacaccgtcagat

SEQ ID NO: 318977 - DNA, 30 bp, Artificial Sequence
  Synthetic oligonucleotide
cagacacatcagacataacagtcttcagat

SEQ ID NO: 318978 - DNA, 30 bp, Artificial Sequence
  Synthetic oligonucleotide
tgtgttcgatatcattttgtcacaagagat

SEQ ID NO: 318979 - DNA, 30 bp, Artificial Sequence
  Synthetic oligonucleotide
cattatttacgtgtgtcatgtcgaagagat

SEQ ID NO: 318980 - DNA, 30 bp, Artificial Sequence
  Synthetic oligonucleotide
ctggtgtacacttgcgtgtttggaagagat

SEQ ID NO: 318981 - DNA, 30 bp, Artificial Sequence
  Synthetic oligonucleotide
agtgctataccttcatcaatcctaagagat

SEQ ID NO: 318982 - DNA, 30 bp, Artificial Sequence
  Synthetic oligonucleotide
gcagcgggggaagtttctaacccgagagat

SEQ ID NO: 318983 - DNA, 30 bp, Artificial Sequence
  Synthetic oligonucleotide
ctaaaagcttcaccctcacgtgatagagat

SEQ ID NO: 318984 - DNA, 30 bp, Artificial Sequence
  Synthetic oligonucleotide
accagttgaggtttccatcggcttagagat

SEQ ID NO: 318985 - DNA, 30 bp, Artificial Sequence
  Synthetic oligonucleotide
tgactaaagtcaggggaacctcttagagat

SEQ ID NO: 318986 - DNA, 30 bp, Artificial Sequence
  Synthetic oligonucleotide
gtaatttagctcgttatcggtcaacgagat

SEQ ID NO: 318987 - DNA, 30 bp, Artificial Sequence
  Synthetic oligonucleotide
gcgctcgatcagaggcaaatccggcgagat

SEQ ID NO: 318988 - DNA, 30 bp, Artificial Sequence
  Synthetic oligonucleotide
agactgggcagctccggactaagtcgagat

SEQ ID NO: 318989 - DNA, 30 bp, Artificial Sequence
  Synthetic oligonucleotide
taaatcgctcaggcgaagtaccttcgagat

SEQ ID NO: 318990 - DNA, 30 bp, Artificial Sequence
  Synthetic oligonucleotide
aactcgtacgtatcaggtctgcttcgagat

SEQ ID NO: 318991 - DNA, 30 bp, Artificial Sequence
  Synthetic oligonucleotide
gtacaggaaaggacctaccgtatgggagat

SEQ ID NO: 318992 - DNA, 30 bp, Artificial Sequence
  Synthetic oligonucleotide
atgatgcctgcttgcccccggctgggagat

SEQ ID NO: 318993 - DNA, 30 bp, Artificial Sequence
  Synthetic oligonucleotide
gttgcggagttatatggggggcgtggagat

SEQ ID NO: 318994 - DNA, 30 bp, Artificial Sequence
  Synthetic oligonucleotide
gtttaggccaaactgacagagtttggagat

SEQ ID NO: 318995 - DNA, 30 bp, Artificial Sequence
  Synthetic oligonucleotide
ggactaggtgtgttcatacatgtctgagat

SEQ ID NO: 318996 - DNA, 30 bp, Artificial Sequence
  Synthetic oligonucleotide
ctgtagctattacagaaataacggtgagat

SEQ ID NO: 318997 - DNA, 30 bp, Artificial Sequence
  Synthetic oligonucleotide
gctttacgtataggtccttggcggtgagat

SEQ ID NO: 318998 - DNA, 30 bp, Artificial Sequence
  Synthetic oligonucleotide
cgacagaagagttcggctttttgttgagat

SEQ ID NO: 318999 - DNA, 30 bp, Artificial Sequence
  Synthetic oligonucleotide
ttccgcaccacacgaattagtcaaatagat

SEQ ID NO: 319000 - DNA, 30 bp, Artificial Sequence
  Synthetic oligonucleotide
atgcttctaagcgaatgctattaaatagat

SEQ ID NO: 319001 - DNA, 30 bp, Artificial Sequence
  Synthetic oligonucleotide
aagaacggctagaactcgttgtgaatagat

SEQ ID NO: 319002 - DNA, 30 bp, Artificial Sequence
  Synthetic oligonucleotide
tagcccataggatctagatttataatagat

SEQ ID NO: 319003 - DNA, 30 bp, Artificial Sequence
  Synthetic oligonucleotide
gcaaatgctcatcctatttcttacatagat

SEQ ID NO: 319004 - DNA, 30 bp, Artificial Sequence
  Synthetic oligonucleotide
tcttctgtttgcgtcctgtaatagatagat

SEQ ID NO: 319005 - DNA, 30 bp, Artificial Sequence
  Synthetic oligonucleotide
tcatcgataaggttaacggggactatagat

SEQ ID NO: 319006 - DNA, 30 bp, Artificial Sequence
  Synthetic oligonucleotide
tgccagcttgacgatcttgaacttatagat

SEQ ID NO: 319007 - DNA, 30 bp, Artificial Sequence
  Synthetic oligonucleotide
cacaatcctacttattcgctacacctagat

SEQ ID NO: 319008 - DNA, 30 bp, Artificial Sequence
  Synthetic oligonucleotide
agcgcttcccgacccgtatcggacctagat

SEQ ID NO: 319009 - DNA, 30 bp, Artificial Sequence
  Synthetic oligonucleotide
ggctttacttgcgaaatccgtgccctagat

SEQ ID NO: 319010 - DNA, 30 bp, Artificial Sequence
  Synthetic oligonucleotide
tcccgaggtttgaaccatacctcgctagat

SEQ ID NO: 319011 - DNA, 30 bp, Artificial Sequence
  Synthetic oligonucleotide
ggacataattccagaccaacatggctagat

SEQ ID NO: 319012 - DNA, 30 bp, Artificial Sequence
  Synthetic oligonucleotide
tagggtcgtctgcgccgcttatggctagat

SEQ ID NO: 319013 - DNA, 30 bp, Artificial Sequence
  Synthetic oligonucleotide
cttatacctatcgcccctgccaatctagat

SEQ ID NO: 319014 - DNA, 30 bp, Artificial Sequence
  Synthetic oligonucleotide
ccttccaataaccgttccgtggctctagat

SEQ ID NO: 319015 - DNA, 30 bp, Artificial Sequence
  Synthetic oligonucleotide
gcgtaactttttgaggggagttctctagat

SEQ ID NO: 319016 - DNA, 30 bp, Artificial Sequence
  Synthetic oligonucleotide
atcatgggggcctaggcctgttaagtagat

SEQ ID NO: 319017 - DNA, 30 bp, Artificial Sequence
  Synthetic oligonucleotide
atgggcaaacgttcaaaattcggagtagat

SEQ ID NO: 319018 - DNA, 30 bp, Artificial Sequence
  Synthetic oligonucleotide
ttaagattacaacggcacgggtgcgtagat

SEQ ID NO: 319019 - DNA, 30 bp, Artificial Sequence
  Synthetic oligonucleotide
ttggcgaccaacccctatggatcggtagat

SEQ ID NO: 319020 - DNA, 30 bp, Artificial Sequence
  Synthetic oligonucleotide
gataaacaaactggacgatggactgtagat

SEQ ID NO: 319021 - DNA, 30 bp, Artificial Sequence
  Synthetic oligonucleotide
accagccctacaaggcgagaggaattagat

SEQ ID NO: 319022 - DNA, 30 bp, Artificial Sequence
  Synthetic oligonucleotide
gcgagaagagtagaggttaccaccttagat

SEQ ID NO: 319023 - DNA, 30 bp, Artificial Sequence
  Synthetic oligonucleotide
tatgagaaaaatgtccgtcgaagcttagat

SEQ ID NO: 319024 - DNA, 30 bp, Artificial Sequence
  Synthetic oligonucleotide
gggctacatgaaatccgggctgatttagat

SEQ ID NO: 319025 - DNA, 30 bp, Artificial Sequence
  Synthetic oligonucleotide
cgcagtgtaccaaataaatcatctttagat

SEQ ID NO: 319026 - DNA, 30 bp, Artificial Sequence
  Synthetic oligonucleotide
acaggttcatgactaattcgccgtttagat

SEQ ID NO: 319027 - DNA, 30 bp, Artificial Sequence
  Synthetic oligonucleotide
tcgaatctcgtagctcatcatcgtttagat

SEQ ID NO: 319028 - DNA, 30 bp, Artificial Sequence
  Synthetic oligonucleotide
gtaccacgtggatctactaagagaaacgat

SEQ ID NO: 319029 - DNA, 30 bp, Artificial Sequence
  Synthetic oligonucleotide
acaccgacttttcgggggtgtcgaaacgat

SEQ ID NO: 319030 - DNA, 30 bp, Artificial Sequence
  Synthetic oligonucleotide
acgtgaaagtgagggagcaccgtaaacgat

SEQ ID NO: 319031 - DNA, 30 bp, Artificial Sequence
  Synthetic oligonucleotide
accaagtgcaggggagtttggtccaacgat

SEQ ID NO: 319032 - DNA, 30 bp, Artificial Sequence
  Synthetic oligonucleotide
ggttgtatcttttccggacttgaacacgat

SEQ ID NO: 319033 - DNA, 30 bp, Artificial Sequence
  Synthetic oligonucleotide
aagcaatgtgtgaaagcggagagacacgat

SEQ ID NO: 319034 - DNA, 30 bp, Artificial Sequence
  Synthetic oligonucleotide
cttaacttatggttgcgggaattacacgat

SEQ ID NO: 319035 - DNA, 30 bp, Artificial Sequence
  Synthetic oligonucleotide
ccaattgcacaatccgtggggctgcacgat

SEQ ID NO: 319036 - DNA, 30 bp, Artificial Sequence
  Synthetic oligonucleotide
caatcaatgtgagcccaccggtgtcacgat

SEQ ID NO: 319037 - DNA, 30 bp, Artificial Sequence
  Synthetic oligonucleotide
cagggcgttaaaattcggttcttagacgat

SEQ ID NO: 319038 - DNA, 30 bp, Artificial Sequence
  Synthetic oligonucleotide
tactgtaaaatggtccactacttggacgat

SEQ ID NO: 319039 - DNA, 30 bp, Artificial Sequence
  Synthetic oligonucleotide
atctcactgctgatatactgctgtgacgat

SEQ ID NO: 319040 - DNA, 30 bp, Artificial Sequence
  Synthetic oligonucleotide
acaatctgtgagcaaaagcttgactacgat

SEQ ID NO: 319041 - DNA, 30 bp, Artificial Sequence
  Synthetic oligonucleotide
gacctgagtgagttgtatgtgctctacgat

SEQ ID NO: 319042 - DNA, 30 bp, Artificial Sequence
  Synthetic oligonucleotide
gctcgatcatccatatatatgcattacgat

SEQ ID NO: 319043 - DNA, 30 bp, Artificial Sequence
  Synthetic oligonucleotide
gctgagctaacgtttcgatgcaacaccgat

SEQ ID NO: 319044 - DNA, 30 bp, Artificial Sequence
  Synthetic oligonucleotide
ctattagcgcgtcttgtggacgacaccgat

SEQ ID NO: 319045 - DNA, 30 bp, Artificial Sequence
  Synthetic oligonucleotide
tgctaaggccgacgtatgtatacgaccgat

SEQ ID NO: 319046 - DNA, 30 bp, Artificial Sequence
  Synthetic oligonucleotide
tcctcttctttttaatattctcggaccgat

SEQ ID NO: 319047 - DNA, 30 bp, Artificial Sequence
  Synthetic oligonucleotide
taacgatattctctatcgagtgggaccgat

SEQ ID NO: 319048 - DNA, 30 bp, Artificial Sequence
  Synthetic oligonucleotide
aagaccatatgccaggactttaataccgat

SEQ ID NO: 319049 - DNA, 30 bp, Artificial Sequence
  Synthetic oligonucleotide
atattgtcgtctcacgaagtgcaccccgat

SEQ ID NO: 319050 - DNA, 30 bp, Artificial Sequence
  Synthetic oligonucleotide
aaacagggtccgtcatacgtagagcccgat

SEQ ID NO: 319051 - DNA, 30 bp, Artificial Sequence
  Synthetic oligonucleotide
acgccatcgaatgttgctaataatcccgat

SEQ ID NO: 319052 - DNA, 30 bp, Artificial Sequence
  Synthetic oligonucleotide
tccaaaagaaaggcggcctgctatcccgat

SEQ ID NO: 319053 - DNA, 30 bp, Artificial Sequence
  Synthetic oligonucleotide
actgccgggcgctactcagatgttcccgat

SEQ ID NO: 319054 - DNA, 30 bp, Artificial Sequence
  Synthetic oligonucleotide
atgaatcgaaatttcccggagacagccgat

SEQ ID NO: 319055 - DNA, 30 bp, Artificial Sequence
  Synthetic oligonucleotide
accgctctctttgtgctattactctccgat

SEQ ID NO: 319056 - DNA, 30 bp, Artificial Sequence
  Synthetic oligonucleotide
cgcatggatcatttgggggggcggtccgat

SEQ ID NO: 319057 - DNA, 30 bp, Artificial Sequence
  Synthetic oligonucleotide
tgctatcgcgcgagatataagaattccgat

SEQ ID NO: 319058 - DNA, 30 bp, Artificial Sequence
  Synthetic oligonucleotide
attgaggtcgtactaggcagatgaagcgat

SEQ ID NO: 319059 - DNA, 30 bp, Artificial Sequence
  Synthetic oligonucleotide
tcgtcgtagatcgttttcgacaacagcgat

SEQ ID NO: 319060 - DNA, 28 bp, Artificial Sequence
  Synthetic oligonucleotide
ggatggaaattacgcatctaggagcgat

SEQ ID NO: 319061 - DNA, 30 bp, Artificial Sequence
  Synthetic oligonucleotide
catggaacgtaactggatccttggagcgat

SEQ ID NO: 319062 - DNA, 30 bp, Artificial Sequence
  Synthetic oligonucleotide
accattgtcctactagactcctgtagcgat

SEQ ID NO: 319063 - DNA, 30 bp, Artificial Sequence
  Synthetic oligonucleotide
gtcaagaatttcgcggctggaatacgcgat

SEQ ID NO: 319064 - DNA, 30 bp, Artificial Sequence
  Synthetic oligonucleotide
agccacgagacgtccaacgggctacgcgat

SEQ ID NO: 319065 - DNA, 30 bp, Artificial Sequence
  Synthetic oligonucleotide
tagtacggggtttttaaacgtaaccgcgat

SEQ ID NO: 319066 - DNA, 30 bp, Artificial Sequence
  Synthetic oligonucleotide
aagtatactcttgaatagaacacccgcgat

SEQ ID NO: 319067 - DNA, 30 bp, Artificial Sequence
  Synthetic oligonucleotide
ttttcggtcaacgactacccatcccgcgat

SEQ ID NO: 319068 - DNA, 30 bp, Artificial Sequence
  Synthetic oligonucleotide
taagagtgagccacttaaggtcgtcgcgat

SEQ ID NO: 319069 - DNA, 30 bp, Artificial Sequence
  Synthetic oligonucleotide
atctcacagttacctttaggatcaggcgat

SEQ ID NO: 319070 - DNA, 30 bp, Artificial Sequence
  Synthetic oligonucleotide
tagattacatgttatattactatcggcgat

SEQ ID NO: 319071 - DNA, 30 bp, Artificial Sequence
  Synthetic oligonucleotide
gcggcccacacgtttagttgaaggggcgat

SEQ ID NO: 319072 - DNA, 30 bp, Artificial Sequence
  Synthetic oligonucleotide
cgcgactttcgtttgacccaagatggcgat

SEQ ID NO: 319073 - DNA, 30 bp, Artificial Sequence
  Synthetic oligonucleotide
aacattagtgccgttagtgaaactggcgat

SEQ ID NO: 319074 - DNA, 30 bp, Artificial Sequence
  Synthetic oligonucleotide
tgagttagatacgtgttagtgcaatgcgat

SEQ ID NO: 319075 - DNA, 30 bp, Artificial Sequence
  Synthetic oligonucleotide
ttgcggggtctactatatacggaatgcgat

SEQ ID NO: 319076 - DNA, 30 bp, Artificial Sequence
  Synthetic oligonucleotide
gagaggaaaaagcctagcttatcatgcgat

SEQ ID NO: 319077 - DNA, 30 bp, Artificial Sequence
  Synthetic oligonucleotide
tagtgcgtggggtgattataaagatgcgat

SEQ ID NO: 319078 - DNA, 30 bp, Artificial Sequence
  Synthetic oligonucleotide
ggggtgcgaacataagctacgttatgcgat

SEQ ID NO: 319079 - DNA, 30 bp, Artificial Sequence
  Synthetic oligonucleotide
ctgggcctacccaagaccagtttatgcgat

SEQ ID NO: 319080 - DNA, 30 bp, Artificial Sequence
  Synthetic oligonucleotide
gcaattatggggatcacgtggcagtgcgat

SEQ ID NO: 319081 - DNA, 30 bp, Artificial Sequence
  Synthetic oligonucleotide
tgccatgttgtggtcccgctgacgtgcgat

SEQ ID NO: 319082 - DNA, 30 bp, Artificial Sequence
  Synthetic oligonucleotide
gacctcaagtgtccacggtctatgtgcgat

SEQ ID NO: 319083 - DNA, 30 bp, Artificial Sequence
  Synthetic oligonucleotide
tatcatgtctaggtcaccagtctttgcgat

SEQ ID NO: 319084 - DNA, 30 bp, Artificial Sequence
  Synthetic oligonucleotide
atctgctgacggagcggctcccccatcgat

SEQ ID NO: 319085 - DNA, 30 bp, Artificial Sequence
  Synthetic oligonucleotide
gaggatgatttcggagtctgggcgatcgat

SEQ ID NO: 319086 - DNA, 30 bp, Artificial Sequence
  Synthetic oligonucleotide
ctacatacctcttaccagggtaggatcgat

SEQ ID NO: 319087 - DNA, 30 bp, Artificial Sequence
  Synthetic oligonucleotide
aatcccgacgtgatgttctgatctatcgat

SEQ ID NO: 319088 - DNA, 30 bp, Artificial Sequence
  Synthetic oligonucleotide
agaatggaaagagatatccaaggtatcgat

SEQ ID NO: 319089 - DNA, 30 bp, Artificial Sequence
  Synthetic oligonucleotide
aatcatctgatggctattctatgtatcgat

SEQ ID NO: 319090 - DNA, 30 bp, Artificial Sequence
  Synthetic oligonucleotide
aatgtaatgttaatatgggttgttatcgat

SEQ ID NO: 319091 - DNA, 30 bp, Artificial Sequence
  Synthetic oligonucleotide
tagttagggaatgttatcggctcactcgat

SEQ ID NO: 319092 - DNA, 30 bp, Artificial Sequence
  Synthetic oligonucleotide
gcgaggactatacgaatgtattgactcgat

SEQ ID NO: 319093 - DNA, 29 bp, Artificial Sequence
  Synthetic oligonucleotide
gcgatagcgtggctgacacagacctcgat

SEQ ID NO: 319094 - DNA, 30 bp, Artificial Sequence
  Synthetic oligonucleotide
ccggtcatgtccctagcggggatcctcgat

SEQ ID NO: 319095 - DNA, 30 bp, Artificial Sequence
  Synthetic oligonucleotide
tacaacagagtctcgctagtttcgctcgat

SEQ ID NO: 319096 - DNA, 30 bp, Artificial Sequence
  Synthetic oligonucleotide
ctatatcccttgttcgggttcatgctcgat

SEQ ID NO: 319097 - DNA, 30 bp, Artificial Sequence
  Synthetic oligonucleotide
gtctggaaaacgagatagcaactgctcgat

SEQ ID NO: 319098 - DNA, 30 bp, Artificial Sequence
  Synthetic oligonucleotide
accgtcaatactggggcattggatctcgat

SEQ ID NO: 319099 - DNA, 30 bp, Artificial Sequence
  Synthetic oligonucleotide
gattgactcaactatgtatgccttctcgat

SEQ ID NO: 319100 - DNA, 30 bp, Artificial Sequence
  Synthetic oligonucleotide
ttgtgcgcaattcgcccgggtggagtcgat

SEQ ID NO: 319101 - DNA, 30 bp, Artificial Sequence
  Synthetic oligonucleotide
ttcgtatgatatcttctagcgcaggtcgat

SEQ ID NO: 319102 - DNA, 30 bp, Artificial Sequence
  Synthetic oligonucleotide
atatgtgatctcttcaagcagttggtcgat

SEQ ID NO: 319103 - DNA, 30 bp, Artificial Sequence
  Synthetic oligonucleotide
tggaacgtatcgtgaattccatatgtcgat

SEQ ID NO: 319104 - DNA, 30 bp, Artificial Sequence
  Synthetic oligonucleotide
ctcgtttccagggcgggctggtttgtcgat

SEQ ID NO: 319105 - DNA, 30 bp, Artificial Sequence
  Synthetic oligonucleotide
ggatattttgggaaatggaccgaattcgat

SEQ ID NO: 319106 - DNA, 30 bp, Artificial Sequence
  Synthetic oligonucleotide
gcgggttggtttgtttagacgaacttcgat

SEQ ID NO: 319107 - DNA, 30 bp, Artificial Sequence
  Synthetic oligonucleotide
aactaagtgatacaaaaagattggttcgat

SEQ ID NO: 319108 - DNA, 30 bp, Artificial Sequence
  Synthetic oligonucleotide
ctagtcaacgatgatctcttagtgttcgat

SEQ ID NO: 319109 - DNA, 30 bp, Artificial Sequence
  Synthetic oligonucleotide
actatgggcaaaccattgatggctttcgat

SEQ ID NO: 319110 - DNA, 30 bp, Artificial Sequence
  Synthetic oligonucleotide
gcctctggtctggagggaacagtaaaggat

SEQ ID NO: 319111 - DNA, 30 bp, Artificial Sequence
  Synthetic oligonucleotide
ttggttcacctatggggtacgttaaaggat

SEQ ID NO: 319112 - DNA, 30 bp, Artificial Sequence
  Synthetic oligonucleotide
atccagattgaaatagtggcatacaaggat

SEQ ID NO: 319113 - DNA, 30 bp, Artificial Sequence
  Synthetic oligonucleotide
tccgttcgatataataaaatctccaaggat

SEQ ID NO: 319114 - DNA, 30 bp, Artificial Sequence
  Synthetic oligonucleotide
gctataaataatgcttaagcaagcaaggat

SEQ ID NO: 319115 - DNA, 30 bp, Artificial Sequence
  Synthetic oligonucleotide
aaccttggaaatagaagtttgcagaaggat

SEQ ID NO: 319116 - DNA, 30 bp, Artificial Sequence
  Synthetic oligonucleotide
aaaggattaaattaacggtgccataaggat

SEQ ID NO: 319117 - DNA, 30 bp, Artificial Sequence
  Synthetic oligonucleotide
tagtcgtaactactaccgtcatgtaaggat

SEQ ID NO: 319118 - DNA, 30 bp, Artificial Sequence
  Synthetic oligonucleotide
ggcaaaaacctctgtaccggttttaaggat

SEQ ID NO: 319119 - DNA, 30 bp, Artificial Sequence
  Synthetic oligonucleotide
gttcccactaaagggattaagtcccaggat

SEQ ID NO: 319120 - DNA, 30 bp, Artificial Sequence
  Synthetic oligonucleotide
tacattgtgtgagttactttcagccaggat

SEQ ID NO: 319121 - DNA, 30 bp, Artificial Sequence
  Synthetic oligonucleotide
ctaataaaaggcatagagcctagccaggat

SEQ ID NO: 319122 - DNA, 30 bp, Artificial Sequence
  Synthetic oligonucleotide
atctagaaggaaattacgtgtaagcaggat

SEQ ID NO: 319123 - DNA, 30 bp, Artificial Sequence
  Synthetic oligonucleotide
gcatctccatgaaggtgcaaaaggcaggat

SEQ ID NO: 319124 - DNA, 30 bp, Artificial Sequence
  Synthetic oligonucleotide
actgaatagctaggctggtcagggcaggat

SEQ ID NO: 319125 - DNA, 30 bp, Artificial Sequence
  Synthetic oligonucleotide
aggtgattctttgtatgtcgtcgtcaggat

SEQ ID NO: 319126 - DNA, 30 bp, Artificial Sequence
  Synthetic oligonucleotide
tggaatcgcactagttctggagacgaggat

SEQ ID NO: 319127 - DNA, 30 bp, Artificial Sequence
  Synthetic oligonucleotide
tctggttaatgtggtttaccacccgaggat

SEQ ID NO: 319128 - DNA, 30 bp, Artificial Sequence
  Synthetic oligonucleotide
aaagttcaatgatctattaagtaggaggat

SEQ ID NO: 319129 - DNA, 30 bp, Artificial Sequence
  Synthetic oligonucleotide
tctgaaacctcgcaactgttagtggaggat

SEQ ID NO: 319130 - DNA, 30 bp, Artificial Sequence
  Synthetic oligonucleotide
tccaaaggtgcactgtagcttgtggaggat

SEQ ID NO: 319131 - DNA, 30 bp, Artificial Sequence
  Synthetic oligonucleotide
tggataacggcaaagggtttatgtgaggat

SEQ ID NO: 319132 - DNA, 30 bp, Artificial Sequence
  Synthetic oligonucleotide
ggtaaaactggtatgtcgtgcaactaggat

SEQ ID NO: 319133 - DNA, 30 bp, Artificial Sequence
  Synthetic oligonucleotide
tttcctgcaaattcttcatgtatgtaggat

SEQ ID NO: 319134 - DNA, 30 bp, Artificial Sequence
  Synthetic oligonucleotide
agacaggggattaaggtgcgtaattaggat

SEQ ID NO: 319135 - DNA, 30 bp, Artificial Sequence
  Synthetic oligonucleotide
gccggaaaaccccgggagcaagcttaggat

SEQ ID NO: 319136 - DNA, 30 bp, Artificial Sequence
  Synthetic oligonucleotide
ctgctcccattggtgattgacagttaggat

SEQ ID NO: 319137 - DNA, 30 bp, Artificial Sequence
  Synthetic oligonucleotide
gctattcggttcaggtgccagagttaggat

SEQ ID NO: 319138 - DNA, 30 bp, Artificial Sequence
  Synthetic oligonucleotide
gctgtgagctagaacataaagacgacggat

SEQ ID NO: 319139 - DNA, 30 bp, Artificial Sequence
  Synthetic oligonucleotide
atgggggcacgtcggtacaagcggacggat

SEQ ID NO: 319140 - DNA, 30 bp, Artificial Sequence
  Synthetic oligonucleotide
tggcgtcttcccagggtgtggcatacggat

SEQ ID NO: 319141 - DNA, 30 bp, Artificial Sequence
  Synthetic oligonucleotide
tacgtccctatggcctacacgtccccggat

SEQ ID NO: 319142 - DNA, 30 bp, Artificial Sequence
  Synthetic oligonucleotide
gacccccaccaatgatataccggcccggat

SEQ ID NO: 319143 - DNA, 30 bp, Artificial Sequence
  Synthetic oligonucleotide
tcttcagtaacttcggaaccttggccggat

SEQ ID NO: 319144 - DNA, 30 bp, Artificial Sequence
  Synthetic oligonucleotide
gtgccggtagtgaagattacccgtccggat

SEQ ID NO: 319145 - DNA, 30 bp, Artificial Sequence
  Synthetic oligonucleotide
ggatcaagttgcagacggggtgcagcggat

SEQ ID NO: 319146 - DNA, 30 bp, Artificial Sequence
  Synthetic oligonucleotide
ctatgtaaccgaagttctgacagcgcggat

SEQ ID NO: 319147 - DNA, 30 bp, Artificial Sequence
  Synthetic oligonucleotide
tcagaaaatcgctctggcgggccggcggat

SEQ ID NO: 319148 - DNA, 30 bp, Artificial Sequence
  Synthetic oligonucleotide
gtctgccaattcttcttaagtccggcggat

SEQ ID NO: 319149 - DNA, 30 bp, Artificial Sequence
  Synthetic oligonucleotide
tagagggcagtttagtgtggacgggcggat

SEQ ID NO: 319150 - DNA, 31 bp, Artificial Sequence
  Synthetic oligonucleotide
tgtaaagctggaagcgtttcggctggcggat

SEQ ID NO: 319151 - DNA, 30 bp, Artificial Sequence
  Synthetic oligonucleotide
gactgtgtgaaatgacttaggttggcggat

SEQ ID NO: 319152 - DNA, 30 bp, Artificial Sequence
  Synthetic oligonucleotide
ttggtgattcgacagcaagtcgaatcggat

SEQ ID NO: 319153 - DNA, 30 bp, Artificial Sequence
  Synthetic oligonucleotide
tcgccgcagagtcatcattagtaatcggat

SEQ ID NO: 319154 - DNA, 30 bp, Artificial Sequence
  Synthetic oligonucleotide
gcttgataatcgctggagacgttatcggat

SEQ ID NO: 319155 - DNA, 30 bp, Artificial Sequence
  Synthetic oligonucleotide
tgcttgtgtccatttaactgcggctcggat

SEQ ID NO: 319156 - DNA, 30 bp, Artificial Sequence
  Synthetic oligonucleotide
tacggaaaagctgaggcttggcagtcggat

SEQ ID NO: 319157 - DNA, 30 bp, Artificial Sequence
  Synthetic oligonucleotide
gcgagctcggctacggcccaacgaagggat

SEQ ID NO: 319158 - DNA, 30 bp, Artificial Sequence
  Synthetic oligonucleotide
gatctagacgggtagtttcaggatagggat

SEQ ID NO: 319159 - DNA, 29 bp, Artificial Sequence
  Synthetic oligonucleotide
tcacgtaacgaggccccggataccgggat

SEQ ID NO: 319160 - DNA, 30 bp, Artificial Sequence
  Synthetic oligonucleotide
tcagtgtccctgagtaggccgtaccgggat

SEQ ID NO: 319161 - DNA, 30 bp, Artificial Sequence
  Synthetic oligonucleotide
caatcgcgcctatctagggcgttccgggat

SEQ ID NO: 319162 - DNA, 30 bp, Artificial Sequence
  Synthetic oligonucleotide
ggtaaggcaattagtggaagtccgcgggat

SEQ ID NO: 319163 - DNA, 30 bp, Artificial Sequence
  Synthetic oligonucleotide
actaccgcccgcggattgtcagctcgggat

SEQ ID NO: 319164 - DNA, 30 bp, Artificial Sequence
  Synthetic oligonucleotide
gcaatgggagggtgtgaggcgtctcgggat

SEQ ID NO: 319165 - DNA, 30 bp, Artificial Sequence
  Synthetic oligonucleotide
gagtgtatgatagggcgccacaccggggat

SEQ ID NO: 319166 - DNA, 30 bp, Artificial Sequence
  Synthetic oligonucleotide
tgttagcagaaaactagctgtcccggggat

SEQ ID NO: 319167 - DNA, 30 bp, Artificial Sequence
  Synthetic oligonucleotide
tatcctgaaacgttccgagtattcggggat

SEQ ID NO: 319168 - DNA, 30 bp, Artificial Sequence
  Synthetic oligonucleotide
aacgagctcccaatggtcaccttcggggat

SEQ ID NO: 319169 - DNA, 30 bp, Artificial Sequence
  Synthetic oligonucleotide
tccgtgcgcccatataaatggtggggggat

SEQ ID NO: 319170 - DNA, 30 bp, Artificial Sequence
  Synthetic oligonucleotide
ctgagataagacttatctatttggggggat

SEQ ID NO: 319171 - DNA, 30 bp, Artificial Sequence
  Synthetic oligonucleotide
taggtctgtgttgagccgtaggatggggat

SEQ ID NO: 319172 - DNA, 30 bp, Artificial Sequence
  Synthetic oligonucleotide
gatgacttggccacttgccgatatggggat

SEQ ID NO: 319173 - DNA, 30 bp, Artificial Sequence
  Synthetic oligonucleotide
tatcatgtcataggcttacggtctggggat

SEQ ID NO: 319174 - DNA, 30 bp, Artificial Sequence
  Synthetic oligonucleotide
tgcgcgccgagtaatcagcgtcaatgggat

SEQ ID NO: 319175 - DNA, 30 bp, Artificial Sequence
  Synthetic oligonucleotide
aaatgaattgggtcgataaatttatgggat

SEQ ID NO: 319176 - DNA, 30 bp, Artificial Sequence
  Synthetic oligonucleotide
tgaggtgttgcaatgattaagcactgggat

SEQ ID NO: 319177 - DNA, 30 bp, Artificial Sequence
  Synthetic oligonucleotide
gatgcacggtattcgagcgctacctgggat

SEQ ID NO: 319178 - DNA, 30 bp, Artificial Sequence
  Synthetic oligonucleotide
gggttgtaacacaggcaatctatctgggat

SEQ ID NO: 319179 - DNA, 30 bp, Artificial Sequence
  Synthetic oligonucleotide
acccttccgacgccggcgggaatgtgggat

SEQ ID NO: 319180 - DNA, 30 bp, Artificial Sequence
  Synthetic oligonucleotide
cattcaaattgcgcgtgttactgaatggat

SEQ ID NO: 319181 - DNA, 30 bp, Artificial Sequence
  Synthetic oligonucleotide
accaggaggagctagctcttctcgatggat

SEQ ID NO: 319182 - DNA, 30 bp, Artificial Sequence
  Synthetic oligonucleotide
ataaggctatgtaagtggtaaactatggat

SEQ ID NO: 319183 - DNA, 30 bp, Artificial Sequence
  Synthetic oligonucleotide
taagggggatggtgacagtgccctatggat

SEQ ID NO: 319184 - DNA, 30 bp, Artificial Sequence
  Synthetic oligonucleotide
aattgacagttagtgccgtatacactggat

SEQ ID NO: 319185 - DNA, 30 bp, Artificial Sequence
  Synthetic oligonucleotide
gtaccatgggcaacgcgtctccgactggat

SEQ ID NO: 319186 - DNA, 30 bp, Artificial Sequence
  Synthetic oligonucleotide
ggcgaggagcattttcttcaagtcctggat

SEQ ID NO: 319187 - DNA, 30 bp, Artificial Sequence
  Synthetic oligonucleotide
ggagtcggagcctggaagttgctgctggat

SEQ ID NO: 319188 - DNA, 30 bp, Artificial Sequence
  Synthetic oligonucleotide
acgctgtttagcctcccacatgatctggat

SEQ ID NO: 319189 - DNA, 30 bp, Artificial Sequence
  Synthetic oligonucleotide
acggccccgtctagcacccaaggtctggat

SEQ ID NO: 319190 - DNA, 30 bp, Artificial Sequence
  Synthetic oligonucleotide
tcgtgcttcggccatagcctctttctggat

SEQ ID NO: 319191 - DNA, 30 bp, Artificial Sequence
  Synthetic oligonucleotide
acaacgcagtaaagtttcggaagagtggat

SEQ ID NO: 319192 - DNA, 30 bp, Artificial Sequence
  Synthetic oligonucleotide
ataccgcccgtttcatccacactagtggat

SEQ ID NO: 319193 - DNA, 30 bp, Artificial Sequence
  Synthetic oligonucleotide
ctagtaagtgaatgtggtagtcccgtggat

SEQ ID NO: 319194 - DNA, 30 bp, Artificial Sequence
  Synthetic oligonucleotide
tgcgttctgcgtgggcagccacctgtggat

SEQ ID NO: 319195 - DNA, 30 bp, Artificial Sequence
  Synthetic oligonucleotide
ctatagatacaatctttatgcgctgtggat

SEQ ID NO: 319196 - DNA, 30 bp, Artificial Sequence
  Synthetic oligonucleotide
gggtagcatgagtgttaccagtgtgtggat

SEQ ID NO: 319197 - DNA, 30 bp, Artificial Sequence
  Synthetic oligonucleotide
aatatcaagtgggacagtaccattgtggat

SEQ ID NO: 319198 - DNA, 30 bp, Artificial Sequence
  Synthetic oligonucleotide
gccgtatcggcgcgcgtactcacattggat

SEQ ID NO: 319199 - DNA, 30 bp, Artificial Sequence
  Synthetic oligonucleotide
aaagttatagggtataacaggagattggat

SEQ ID NO: 319200 - DNA, 30 bp, Artificial Sequence
  Synthetic oligonucleotide
agaataatcccactggtaactctattggat

SEQ ID NO: 319201 - DNA, 30 bp, Artificial Sequence
  Synthetic oligonucleotide
ggttcggcatcagctctgaaatacttggat

SEQ ID NO: 319202 - DNA, 30 bp, Artificial Sequence
  Synthetic oligonucleotide
tgatacgtgcgcccatgcataacaaatgat

SEQ ID NO: 319203 - DNA, 30 bp, Artificial Sequence
  Synthetic oligonucleotide
aatgcgtggtgactcttttcatcaaatgat

SEQ ID NO: 319204 - DNA, 30 bp, Artificial Sequence
  Synthetic oligonucleotide
aggctccattggtcttgttctaacaatgat

SEQ ID NO: 319205 - DNA, 30 bp, Artificial Sequence
  Synthetic oligonucleotide
taacccaatcggtcaataggtcacaatgat

SEQ ID NO: 319206 - DNA, 30 bp, Artificial Sequence
  Synthetic oligonucleotide
tattcacggcaggccaaatgcggcaatgat

SEQ ID NO: 319207 - DNA, 30 bp, Artificial Sequence
  Synthetic oligonucleotide
ccttcaataaccacacaggatcataatgat

SEQ ID NO: 319208 - DNA, 30 bp, Artificial Sequence
  Synthetic oligonucleotide
acagtctgggcgttcaccatcggtaatgat

SEQ ID NO: 319209 - DNA, 30 bp, Artificial Sequence
  Synthetic oligonucleotide
gagtagagggaccttactttgcgacatgat

SEQ ID NO: 319210 - DNA, 30 bp, Artificial Sequence
  Synthetic oligonucleotide
tgtcgcccgcaaacgagtcgatgccatgat

SEQ ID NO: 319211 - DNA, 30 bp, Artificial Sequence
  Synthetic oligonucleotide
gaaatagttttagggaatgtatggcatgat

SEQ ID NO: 319212 - DNA, 30 bp, Artificial Sequence
  Synthetic oligonucleotide
gaacaaggactgggatctgagaatcatgat

SEQ ID NO: 319213 - DNA, 30 bp, Artificial Sequence
  Synthetic oligonucleotide
ttcaaatcctaaagtcaagtcactcatgat

SEQ ID NO: 319214 - DNA, 30 bp, Artificial Sequence
  Synthetic oligonucleotide
ggaaggcatgcagcagatcagtgtcatgat

SEQ ID NO: 319215 - DNA, 30 bp, Artificial Sequence
  Synthetic oligonucleotide
aagctcattgccataatatagtgtcatgat

SEQ ID NO: 319216 - DNA, 30 bp, Artificial Sequence
  Synthetic oligonucleotide
ctttgcaggattcgaatacttaaagatgat

SEQ ID NO: 319217 - DNA, 30 bp, Artificial Sequence
  Synthetic oligonucleotide
tgtagatatcggtagtatgttggagatgat

SEQ ID NO: 319218 - DNA, 30 bp, Artificial Sequence
  Synthetic oligonucleotide
gcatgttcatcatggataacgttcgatgat

SEQ ID NO: 319219 - DNA, 30 bp, Artificial Sequence
  Synthetic oligonucleotide
cctacattagctcttggttttcatgatgat

SEQ ID NO: 319220 - DNA, 30 bp, Artificial Sequence
  Synthetic oligonucleotide
tctcggtgagtaagatgctattctgatgat

SEQ ID NO: 319221 - DNA, 30 bp, Artificial Sequence
  Synthetic oligonucleotide
agcgataactccgtgcacggaattgatgat

SEQ ID NO: 319222 - DNA, 30 bp, Artificial Sequence
  Synthetic oligonucleotide
attgaacaactggtccatactccatatgat

SEQ ID NO: 319223 - DNA, 30 bp, Artificial Sequence
  Synthetic oligonucleotide
cattgtatgtggtcttttaggtcatatgat

SEQ ID NO: 319224 - DNA, 30 bp, Artificial Sequence
  Synthetic oligonucleotide
agttagcgttagggggtctggaactatgat

SEQ ID NO: 319225 - DNA, 30 bp, Artificial Sequence
  Synthetic oligonucleotide
tgcacccacggcacgtacgacgggtatgat

SEQ ID NO: 319226 - DNA, 30 bp, Artificial Sequence
  Synthetic oligonucleotide
acacaaagcggtgtccccgggttgtatgat

SEQ ID NO: 319227 - DNA, 30 bp, Artificial Sequence
  Synthetic oligonucleotide
gggatgttggcgtcaacgcacagttatgat

SEQ ID NO: 319228 - DNA, 30 bp, Artificial Sequence
  Synthetic oligonucleotide
ggcccttacctagacatgtccaaaactgat

SEQ ID NO: 319229 - DNA, 30 bp, Artificial Sequence
  Synthetic oligonucleotide
attggggttgacacatatttataaactgat

SEQ ID NO: 319230 - DNA, 30 bp, Artificial Sequence
  Synthetic oligonucleotide
gagagatccgggacgggcagagagactgat

SEQ ID NO: 319231 - DNA, 31 bp, Artificial Sequence
  Synthetic oligonucleotide
ctatgggaacgtcaaatcttttgtgactgat

SEQ ID NO: 319232 - DNA, 30 bp, Artificial Sequence
  Synthetic oligonucleotide
ggctctctgtagtagtttggaaatactgat

SEQ ID NO: 319233 - DNA, 30 bp, Artificial Sequence
  Synthetic oligonucleotide
gcattcgcaatttagagattagatactgat

SEQ ID NO: 319234 - DNA, 30 bp, Artificial Sequence
  Synthetic oligonucleotide
caacctctttactctggaacccgacctgat

SEQ ID NO: 319235 - DNA, 30 bp, Artificial Sequence
  Synthetic oligonucleotide
acagccatcagaacgcgcggccgccctgat

SEQ ID NO: 319236 - DNA, 30 bp, Artificial Sequence
  Synthetic oligonucleotide
gacattaagccgctacctaggatgcctgat

SEQ ID NO: 319237 - DNA, 30 bp, Artificial Sequence
  Synthetic oligonucleotide
tgagcggtccatcagggcttgctgcctgat

SEQ ID NO: 319238 - DNA, 30 bp, Artificial Sequence
  Synthetic oligonucleotide
tattaagggatgttcgtattttttcctgat

SEQ ID NO: 319239 - DNA, 30 bp, Artificial Sequence
  Synthetic oligonucleotide
gaggtaaagatcactcggttcccagctgat

SEQ ID NO: 319240 - DNA, 30 bp, Artificial Sequence
  Synthetic oligonucleotide
acactgttagcgatgtttaccgtcgctgat

SEQ ID NO: 319241 - DNA, 30 bp, Artificial Sequence
  Synthetic oligonucleotide
agctgtgctcagagctcaactccggctgat

SEQ ID NO: 319242 - DNA, 30 bp, Artificial Sequence
  Synthetic oligonucleotide
attaggcatgggtcttaagctaaatctgat

SEQ ID NO: 319243 - DNA, 30 bp, Artificial Sequence
  Synthetic oligonucleotide
gtgggtatggcggcgccgacgttatctgat

SEQ ID NO: 319244 - DNA, 30 bp, Artificial Sequence
  Synthetic oligonucleotide
taccgagttgaaattataattgactctgat

SEQ ID NO: 319245 - DNA, 30 bp, Artificial Sequence
  Synthetic oligonucleotide
taagctggctagtactcatggcagtctgat

SEQ ID NO: 319246 - DNA, 30 bp, Artificial Sequence
  Synthetic oligonucleotide
cagagtggggttcacttgcgcgagtctgat

SEQ ID NO: 319247 - DNA, 30 bp, Artificial Sequence
  Synthetic oligonucleotide
ccaaagagtttggcatcccgttggtctgat

SEQ ID NO: 319248 - DNA, 30 bp, Artificial Sequence
  Synthetic oligonucleotide
ccaacttagcggcatgcccgagccagtgat

SEQ ID NO: 319249 - DNA, 30 bp, Artificial Sequence
  Synthetic oligonucleotide
ggacgttaagtgggctgtgggcagagtgat

SEQ ID NO: 319250 - DNA, 30 bp, Artificial Sequence
  Synthetic oligonucleotide
catgtcggacgcttgaacgtttatagtgat

SEQ ID NO: 319251 - DNA, 30 bp, Artificial Sequence
  Synthetic oligonucleotide
ttaaaaggagggcgcgttcacgctagtgat

SEQ ID NO: 319252 - DNA, 30 bp, Artificial Sequence
  Synthetic oligonucleotide
ccacgtagcaaacgaaggttctgtagtgat

SEQ ID NO: 319253 - DNA, 30 bp, Artificial Sequence
  Synthetic oligonucleotide
gaggtccgagtcttggaatcagtacgtgat

SEQ ID NO: 319254 - DNA, 30 bp, Artificial Sequence
  Synthetic oligonucleotide
gatagcaagtcagaaggttgattacgtgat

SEQ ID NO: 319255 - DNA, 30 bp, Artificial Sequence
  Synthetic oligonucleotide
gactaaaggtgagcacagcctttgcgtgat

SEQ ID NO: 319256 - DNA, 30 bp, Artificial Sequence
  Synthetic oligonucleotide
gcccactcgggattcaaataaaatcgtgat

SEQ ID NO: 319257 - DNA, 30 bp, Artificial Sequence
  Synthetic oligonucleotide
taaaatattacacaatggaacagtcgtgat

SEQ ID NO: 319258 - DNA, 30 bp, Artificial Sequence
  Synthetic oligonucleotide
agaaattattaccaaatttcgagcggtgat

SEQ ID NO: 319259 - DNA, 30 bp, Artificial Sequence
  Synthetic oligonucleotide
agctgcgaatatgtttactagggcggtgat

SEQ ID NO: 319260 - DNA, 30 bp, Artificial Sequence
  Synthetic oligonucleotide
cgaaagacaaccggatcccgtgttggtgat

SEQ ID NO: 319261 - DNA, 30 bp, Artificial Sequence
  Synthetic oligonucleotide
ctgacatcacgtactctgcgggtatgtgat

SEQ ID NO: 319262 - DNA, 30 bp, Artificial Sequence
  Synthetic oligonucleotide
tggcacccttctggttaggatcactgtgat

SEQ ID NO: 319263 - DNA, 30 bp, Artificial Sequence
  Synthetic oligonucleotide
gaagccaatggtgctagacaagcgtgtgat

SEQ ID NO: 319264 - DNA, 30 bp, Artificial Sequence
  Synthetic oligonucleotide
aaacactaagattgcaacagtatgtgtgat

SEQ ID NO: 319265 - DNA, 30 bp, Artificial Sequence
  Synthetic oligonucleotide
cgtggcggtccttgaagctagttgtgtgat

SEQ ID NO: 319266 - DNA, 30 bp, Artificial Sequence
  Synthetic oligonucleotide
tcagcgtcatctcgtattctgcattgtgat

SEQ ID NO: 319267 - DNA, 30 bp, Artificial Sequence
  Synthetic oligonucleotide
ggtgggagcctatggaattgaacttgtgat

SEQ ID NO: 319268 - DNA, 30 bp, Artificial Sequence
  Synthetic oligonucleotide
tgtacggataaagttaagggcttttgtgat

SEQ ID NO: 319269 - DNA, 30 bp, Artificial Sequence
  Synthetic oligonucleotide
ccacgccgtcgtcagtccgtcgcaattgat

SEQ ID NO: 319270 - DNA, 30 bp, Artificial Sequence
  Synthetic oligonucleotide
cctatggctaaatgaagcaccaacattgat

SEQ ID NO: 319271 - DNA, 31 bp, Artificial Sequence
  Synthetic oligonucleotide
cctaacagtcatatattggaactagattgat

SEQ ID NO: 319272 - DNA, 30 bp, Artificial Sequence
  Synthetic oligonucleotide
acccaatcttagaccctactcgcgattgat

SEQ ID NO: 319273 - DNA, 30 bp, Artificial Sequence
  Synthetic oligonucleotide
gtcgtggttgtaatgcctgctactattgat

SEQ ID NO: 319274 - DNA, 30 bp, Artificial Sequence
  Synthetic oligonucleotide
tagatgacaaacaagctttatcgtattgat

SEQ ID NO: 319275 - DNA, 30 bp, Artificial Sequence
  Synthetic oligonucleotide
gccctaaattaagttgctgccattattgat

SEQ ID NO: 319276 - DNA, 30 bp, Artificial Sequence
  Synthetic oligonucleotide
aacacgaagagttcgcaggaagcacttgat

SEQ ID NO: 319277 - DNA, 30 bp, Artificial Sequence
  Synthetic oligonucleotide
actgattgtagtatttgcccctcacttgat

SEQ ID NO: 319278 - DNA, 30 bp, Artificial Sequence
  Synthetic oligonucleotide
cgacgccttgagactcggggcggacttgat

SEQ ID NO: 319279 - DNA, 30 bp, Artificial Sequence
  Synthetic oligonucleotide
acaattggaaatgttgtaccttgacttgat

SEQ ID NO: 319280 - DNA, 30 bp, Artificial Sequence
  Synthetic oligonucleotide
cagaaccgtaggcaatcggctaaccttgat

SEQ ID NO: 319281 - DNA, 30 bp, Artificial Sequence
  Synthetic oligonucleotide
gtcatatttccgtcgatggaaccccttgat

SEQ ID NO: 319282 - DNA, 30 bp, Artificial Sequence
  Synthetic oligonucleotide
tcttacccgattcaactcccgttccttgat

SEQ ID NO: 319283 - DNA, 29 bp, Artificial Sequence
  Synthetic oligonucleotide
tcggatactatccacatctggaagttgat

SEQ ID NO: 319284 - DNA, 30 bp, Artificial Sequence
  Synthetic oligonucleotide
tgaacttaaagaaactccggtgacgttgat

SEQ ID NO: 319285 - DNA, 26 bp, Artificial Sequence
  Synthetic oligonucleotide
gatagatacgtcaaattcccgttgat

SEQ ID NO: 319286 - DNA, 30 bp, Artificial Sequence
  Synthetic oligonucleotide
atttgacgagacgtttaccagaatgttgat

SEQ ID NO: 319287 - DNA, 30 bp, Artificial Sequence
  Synthetic oligonucleotide
tcttcgggggtttcatcctctcttgttgat

SEQ ID NO: 319288 - DNA, 30 bp, Artificial Sequence
  Synthetic oligonucleotide
tgctcacggaatctctaaaacgttgttgat

SEQ ID NO: 319289 - DNA, 30 bp, Artificial Sequence
  Synthetic oligonucleotide
agcatagtcagaggcagaacgccatttgat

SEQ ID NO: 319290 - DNA, 30 bp, Artificial Sequence
  Synthetic oligonucleotide
gctaggttggaaagggagtcgttatttgat

SEQ ID NO: 319291 - DNA, 30 bp, Artificial Sequence
  Synthetic oligonucleotide
aaggtaaaccacgcgcttggctactttgat

SEQ ID NO: 319292 - DNA, 30 bp, Artificial Sequence
  Synthetic oligonucleotide
agtaggcgaagaactggcattttgtttgat

SEQ ID NO: 319293 - DNA, 30 bp, Artificial Sequence
  Synthetic oligonucleotide
gactcacatagttaaatcggagaaaaatat

SEQ ID NO: 319294 - DNA, 30 bp, Artificial Sequence
  Synthetic oligonucleotide
ccctgggttagtgtgccagttcgaaaatat

SEQ ID NO: 319295 - DNA, 30 bp, Artificial Sequence
  Synthetic oligonucleotide
tctctgagtggaagggggttaaacaaatat

SEQ ID NO: 319296 - DNA, 30 bp, Artificial Sequence
  Synthetic oligonucleotide
tatatggggcaaatatgtatactgaaatat

SEQ ID NO: 319297 - DNA, 30 bp, Artificial Sequence
  Synthetic oligonucleotide
agcaagcttatgtatcatgtgctgaaatat

SEQ ID NO: 319298 - DNA, 30 bp, Artificial Sequence
  Synthetic oligonucleotide
atatatccctcaagaattgctcataaatat

SEQ ID NO: 319299 - DNA, 30 bp, Artificial Sequence
  Synthetic oligonucleotide
cctattaaggccgtcagtgcacgtaaatat

SEQ ID NO: 319300 - DNA, 30 bp, Artificial Sequence
  Synthetic oligonucleotide
aagcaatatgacctgtggcggtgtaaatat

SEQ ID NO: 319301 - DNA, 30 bp, Artificial Sequence
  Synthetic oligonucleotide
tggtgtcagacatgcggtaactttaaatat

SEQ ID NO: 319302 - DNA, 30 bp, Artificial Sequence
  Synthetic oligonucleotide
gtaaggtctattttgctatcttcccaatat

SEQ ID NO: 319303 - DNA, 30 bp, Artificial Sequence
  Synthetic oligonucleotide
cagttcaattgcggctatggttcccaatat

SEQ ID NO: 319304 - DNA, 30 bp, Artificial Sequence
  Synthetic oligonucleotide
ggcatatgcctgaatagaaagaatcaatat

SEQ ID NO: 319305 - DNA, 30 bp, Artificial Sequence
  Synthetic oligonucleotide
gtcacaatacggcgtgtagtttatcaatat

SEQ ID NO: 319306 - DNA, 30 bp, Artificial Sequence
  Synthetic oligonucleotide
cttagagatagtcccggagattctcaatat

SEQ ID NO: 319307 - DNA, 30 bp, Artificial Sequence
  Synthetic oligonucleotide
gcaaccacttttggagtaactcaagaatat

SEQ ID NO: 319308 - DNA, 30 bp, Artificial Sequence
  Synthetic oligonucleotide
gatgtcgtgaggttacctttctgcgaatat

SEQ ID NO: 319309 - DNA, 30 bp, Artificial Sequence
  Synthetic oligonucleotide
ttgcatgcaatgctatgtaaactataatat

SEQ ID NO: 319310 - DNA, 30 bp, Artificial Sequence
  Synthetic oligonucleotide
gcagtgaagatttatcggataaactaatat

SEQ ID NO: 319311 - DNA, 30 bp, Artificial Sequence
  Synthetic oligonucleotide
gcattccaggggaatacgagatcctaatat

SEQ ID NO: 319312 - DNA, 30 bp, Artificial Sequence
  Synthetic oligonucleotide
gtaacggttgctcgccaaggatcctaatat

SEQ ID NO: 319313 - DNA, 30 bp, Artificial Sequence
  Synthetic oligonucleotide
gtttggcaaaataagataccattgtaatat

SEQ ID NO: 319314 - DNA, 30 bp, Artificial Sequence
  Synthetic oligonucleotide
ggcatgcggcattttttcggtgtttaatat

SEQ ID NO: 319315 - DNA, 30 bp, Artificial Sequence
  Synthetic oligonucleotide
ccacgtgctaatattcccgagagaacatat

SEQ ID NO: 319316 - DNA, 30 bp, Artificial Sequence
  Synthetic oligonucleotide
ccagctgccactaaccagtggggaacatat

SEQ ID NO: 319317 - DNA, 30 bp, Artificial Sequence
  Synthetic oligonucleotide
aatagtcccgggcgggctgactgaacatat

SEQ ID NO: 319318 - DNA, 30 bp, Artificial Sequence
  Synthetic oligonucleotide
gaggtcgaataatcggtaattttcacatat

SEQ ID NO: 319319 - DNA, 30 bp, Artificial Sequence
  Synthetic oligonucleotide
tactaagggcccatttactgggcgacatat

SEQ ID NO: 319320 - DNA, 30 bp, Artificial Sequence
  Synthetic oligonucleotide
gcttcaaagggcttagcacggttgacatat

SEQ ID NO: 319321 - DNA, 30 bp, Artificial Sequence
  Synthetic oligonucleotide
cctctcgacacatggttattagctacatat

SEQ ID NO: 319322 - DNA, 30 bp, Artificial Sequence
  Synthetic oligonucleotide
agtttaagggcattgtgacaaaaaccatat

SEQ ID NO: 319323 - DNA, 30 bp, Artificial Sequence
  Synthetic oligonucleotide
ggctccaataatatacatcatcagccatat

SEQ ID NO: 319324 - DNA, 30 bp, Artificial Sequence
  Synthetic oligonucleotide
agtagcacggggcagagttagccgccatat

SEQ ID NO: 319325 - DNA, 30 bp, Artificial Sequence
  Synthetic oligonucleotide
aacttatgtttgttacgatcagcgccatat

SEQ ID NO: 319326 - DNA, 30 bp, Artificial Sequence
  Synthetic oligonucleotide
ataatcaaaggggcggacggcgcgccatat

SEQ ID NO: 319327 - DNA, 30 bp, Artificial Sequence
  Synthetic oligonucleotide
ctagttttggcgacagcgtggctgccatat

SEQ ID NO: 319328 - DNA, 30 bp, Artificial Sequence
  Synthetic oligonucleotide
aaatccccaaaacccgtacccactccatat

SEQ ID NO: 319329 - DNA, 30 bp, Artificial Sequence
  Synthetic oligonucleotide
aaccttcgaaaagaagggaatcctccatat

SEQ ID NO: 319330 - DNA, 30 bp, Artificial Sequence
  Synthetic oligonucleotide
ttggaatcatgaagcttgtaccgagcatat

SEQ ID NO: 319331 - DNA, 30 bp, Artificial Sequence
  Synthetic oligonucleotide
gttcgctctgcagaggcatgcgtagcatat

SEQ ID NO: 319332 - DNA, 30 bp, Artificial Sequence
  Synthetic oligonucleotide
ggactgtgacggacctggaagaacgcatat

SEQ ID NO: 319333 - DNA, 30 bp, Artificial Sequence
  Synthetic oligonucleotide
ggaatgggccattagaaaatcggcgcatat

SEQ ID NO: 319334 - DNA, 29 bp, Artificial Sequence
  Synthetic oligonucleotide
aaatgcaaatttaagaagcgcatgcatat

SEQ ID NO: 319335 - DNA, 30 bp, Artificial Sequence
  Synthetic oligonucleotide
tccaggtcttaagcttctagagctgcatat

SEQ ID NO: 319336 - DNA, 30 bp, Artificial Sequence
  Synthetic oligonucleotide
tcgaaaactcgtgtcgcatacagctcatat

SEQ ID NO: 319337 - DNA, 30 bp, Artificial Sequence
  Synthetic oligonucleotide
ggcaagtgcaatcctgcgttgacgtcatat

SEQ ID NO: 319338 - DNA, 30 bp, Artificial Sequence
  Synthetic oligonucleotide
cacagtaaggccgaccaaacctggtcatat

SEQ ID NO: 319339 - DNA, 30 bp, Artificial Sequence
  Synthetic oligonucleotide
taattgttacccgcccgagtaacttcatat

SEQ ID NO: 319340 - DNA, 30 bp, Artificial Sequence
  Synthetic oligonucleotide
tacagtctgcgtatcacgatcagaagatat

SEQ ID NO: 319341 - DNA, 30 bp, Artificial Sequence
  Synthetic oligonucleotide
aaggtttgacgatactggttaggaagatat

SEQ ID NO: 319342 - DNA, 30 bp, Artificial Sequence
  Synthetic oligonucleotide
taggagaagaagtagacgtctattagatat

SEQ ID NO: 319343 - DNA, 30 bp, Artificial Sequence
  Synthetic oligonucleotide
gtccttcggtcccatagactccgacgatat

SEQ ID NO: 319344 - DNA, 30 bp, Artificial Sequence
  Synthetic oligonucleotide
gggggaaatcggtctcggcagatacgatat

SEQ ID NO: 319345 - DNA, 30 bp, Artificial Sequence
  Synthetic oligonucleotide
tcgggacacagacatatggcaacgcgatat

SEQ ID NO: 319346 - DNA, 30 bp, Artificial Sequence
  Synthetic oligonucleotide
tcaacggtgtcaatcacgcacctgcgatat

SEQ ID NO: 319347 - DNA, 30 bp, Artificial Sequence
  Synthetic oligonucleotide
tgccagtaatgcatgagaagagatcgatat

SEQ ID NO: 319348 - DNA, 30 bp, Artificial Sequence
  Synthetic oligonucleotide
tacctcacaagctaagtacgcaagggatat

SEQ ID NO: 319349 - DNA, 30 bp, Artificial Sequence
  Synthetic oligonucleotide
aggtcataacctatggggtggactggatat

SEQ ID NO: 319350 - DNA, 30 bp, Artificial Sequence
  Synthetic oligonucleotide
agtacaccctgcaggaccgaatactgatat

SEQ ID NO: 319351 - DNA, 30 bp, Artificial Sequence
  Synthetic oligonucleotide
agcagcgcattaccgcttagagcctgatat

SEQ ID NO: 319352 - DNA, 30 bp, Artificial Sequence
  Synthetic oligonucleotide
tgtaggccatattatgagacgtcgtgatat

SEQ ID NO: 319353 - DNA, 30 bp, Artificial Sequence
  Synthetic oligonucleotide
gggcccgggcaatgcgctgaatggtgatat

SEQ ID NO: 319354 - DNA, 30 bp, Artificial Sequence
  Synthetic oligonucleotide
tccccgattagtcgttcagcccaaatatat

SEQ ID NO: 319355 - DNA, 30 bp, Artificial Sequence
  Synthetic oligonucleotide
gggagtcagggcatacacggaccaatatat

SEQ ID NO: 319356 - DNA, 31 bp, Artificial Sequence
  Synthetic oligonucleotide
aaaaatgtgtattggctttcgaagaatatat

SEQ ID NO: 319357 - DNA, 30 bp, Artificial Sequence
  Synthetic oligonucleotide
acagatcgtctaaccaggctgataatatat

SEQ ID NO: 319358 - DNA, 30 bp, Artificial Sequence
  Synthetic oligonucleotide
aggttgtgacttaccatcggggacatatat

SEQ ID NO: 319359 - DNA, 30 bp, Artificial Sequence
  Synthetic oligonucleotide
tcacttgtacactgaagtctactgatatat

SEQ ID NO: 319360 - DNA, 30 bp, Artificial Sequence
  Synthetic oligonucleotide
aacggtggtagaatcctaggttatatatat

SEQ ID NO: 319361 - DNA, 30 bp, Artificial Sequence
  Synthetic oligonucleotide
aagcgaagcggtacgcgcgtttatatatat

SEQ ID NO: 319362 - DNA, 30 bp, Artificial Sequence
  Synthetic oligonucleotide
ggtccaggccatccggggaaaagactatat

SEQ ID NO: 319363 - DNA, 30 bp, Artificial Sequence
  Synthetic oligonucleotide
tgaccgaactataaaagccacctactatat

SEQ ID NO: 319364 - DNA, 30 bp, Artificial Sequence
  Synthetic oligonucleotide
taggtaccgcgatagttcagtctactatat

SEQ ID NO: 319365 - DNA, 30 bp, Artificial Sequence
  Synthetic oligonucleotide
cgatgcttcatagaattatgatgcctatat

SEQ ID NO: 319366 - DNA, 30 bp, Artificial Sequence
  Synthetic oligonucleotide
agcgcggttgcaaccaagtagaagctatat

SEQ ID NO: 319367 - DNA, 30 bp, Artificial Sequence
  Synthetic oligonucleotide
gggattagtcacccatcgccctatctatat

SEQ ID NO: 319368 - DNA, 30 bp, Artificial Sequence
  Synthetic oligonucleotide
ctcagaatgaggcgaattaaagcagtatat

SEQ ID NO: 319369 - DNA, 30 bp, Artificial Sequence
  Synthetic oligonucleotide
ttaacaggagtctcaggagacagagtatat

SEQ ID NO: 319370 - DNA, 30 bp, Artificial Sequence
  Synthetic oligonucleotide
taaaaaccgcctaagggaacatgagtatat

SEQ ID NO: 319371 - DNA, 30 bp, Artificial Sequence
  Synthetic oligonucleotide
atgatttcactcccaggattgttagtatat

SEQ ID NO: 319372 - DNA, 30 bp, Artificial Sequence
  Synthetic oligonucleotide
agcggaaaggatacatgaactccggtatat

SEQ ID NO: 319373 - DNA, 30 bp, Artificial Sequence
  Synthetic oligonucleotide
ctccagtccaccgatggcgaaagggtatat

SEQ ID NO: 319374 - DNA, 30 bp, Artificial Sequence
  Synthetic oligonucleotide
tacagtaaattgaacagctgcggggtatat

SEQ ID NO: 319375 - DNA, 30 bp, Artificial Sequence
  Synthetic oligonucleotide
actgaccgcgtgaacagaccggctgtatat

SEQ ID NO: 319376 - DNA, 30 bp, Artificial Sequence
  Synthetic oligonucleotide
catagcatcgaagagcgaatgtgtgtatat

SEQ ID NO: 319377 - DNA, 30 bp, Artificial Sequence
  Synthetic oligonucleotide
tccgttctggtgccaaggctcattgtatat

SEQ ID NO: 319378 - DNA, 30 bp, Artificial Sequence
  Synthetic oligonucleotide
gtagtcatgcatagccaaatggtattatat

SEQ ID NO: 319379 - DNA, 30 bp, Artificial Sequence
  Synthetic oligonucleotide
tggagagccatgataattgcacacttatat

SEQ ID NO: 319380 - DNA, 30 bp, Artificial Sequence
  Synthetic oligonucleotide
cgcccaggaagcagggccacttacttatat

SEQ ID NO: 319381 - DNA, 29 bp, Artificial Sequence
  Synthetic oligonucleotide
taggtgtcttccaacaggataccttatat

SEQ ID NO: 319382 - DNA, 30 bp, Artificial Sequence
  Synthetic oligonucleotide
aggcaataatggaagtcatgatgcttatat

SEQ ID NO: 319383 - DNA, 30 bp, Artificial Sequence
  Synthetic oligonucleotide
gccacatcggatagaataatgacgttatat

SEQ ID NO: 319384 - DNA, 30 bp, Artificial Sequence
  Synthetic oligonucleotide
gaggctaggtgtgtacacgtgtttttatat

SEQ ID NO: 319385 - DNA, 30 bp, Artificial Sequence
  Synthetic oligonucleotide
aagctatgaccaggttagacggtaaactat

SEQ ID NO: 319386 - DNA, 30 bp, Artificial Sequence
  Synthetic oligonucleotide
cttataactggtaaacgtagagccaactat

SEQ ID NO: 319387 - DNA, 30 bp, Artificial Sequence
  Synthetic oligonucleotide
tggttatcgtgctccaccataatcaactat

SEQ ID NO: 319388 - DNA, 30 bp, Artificial Sequence
  Synthetic oligonucleotide
cacgtggcacttgctgccatcgggaactat

SEQ ID NO: 319389 - DNA, 30 bp, Artificial Sequence
  Synthetic oligonucleotide
ggtttaaagaagagacccaagatgaactat

SEQ ID NO: 319390 - DNA, 30 bp, Artificial Sequence
  Synthetic oligonucleotide
gcgtgttagcggcacagtcgtaataactat

SEQ ID NO: 319391 - DNA, 30 bp, Artificial Sequence
  Synthetic oligonucleotide
gctgaagtcgggactggggtggataactat

SEQ ID NO: 319392 - DNA, 30 bp, Artificial Sequence
  Synthetic oligonucleotide
aatactgcatgcaaatggattagtaactat

SEQ ID NO: 319393 - DNA, 30 bp, Artificial Sequence
  Synthetic oligonucleotide
ttggcttctgggcataatggaagacactat

SEQ ID NO: 319394 - DNA, 30 bp, Artificial Sequence
  Synthetic oligonucleotide
aactcacattacggaaactgatgccactat

SEQ ID NO: 319395 - DNA, 30 bp, Artificial Sequence
  Synthetic oligonucleotide
atccaggtagtcaatctaatggtccactat

SEQ ID NO: 319396 - DNA, 30 bp, Artificial Sequence
  Synthetic oligonucleotide
agaaccctcctacgatttctggcgcactat

SEQ ID NO: 319397 - DNA, 30 bp, Artificial Sequence
  Synthetic oligonucleotide
cgcagccgcagctcgacaaaccttcactat

SEQ ID NO: 319398 - DNA, 30 bp, Artificial Sequence
  Synthetic oligonucleotide
agagttaccgtcacccagagcgacgactat

SEQ ID NO: 319399 - DNA, 30 bp, Artificial Sequence
  Synthetic oligonucleotide
gccccatcggtctaacttatttgcgactat

SEQ ID NO: 319400 - DNA, 30 bp, Artificial Sequence
  Synthetic oligonucleotide
ctgacaaaaaacgtacaagtctaggactat

SEQ ID NO: 319401 - DNA, 30 bp, Artificial Sequence
  Synthetic oligonucleotide
taggggcgtaacgcgtgcagatcggactat

SEQ ID NO: 319402 - DNA, 30 bp, Artificial Sequence
  Synthetic oligonucleotide
aaaccaatcaataggctgtttgtggactat

SEQ ID NO: 319403 - DNA, 30 bp, Artificial Sequence
  Synthetic oligonucleotide
tccctagttgctagggcagggtatgactat

SEQ ID NO: 319404 - DNA, 31 bp, Artificial Sequence
  Synthetic oligonucleotide
ccgggtgttggtatggatcgttgctgactat

SEQ ID NO: 319405 - DNA, 30 bp, Artificial Sequence
  Synthetic oligonucleotide
ccttactaaaagtggctaaaatgtgactat

SEQ ID NO: 319406 - DNA, 30 bp, Artificial Sequence
  Synthetic oligonucleotide
tacgatatgaaggtcctacgatttgactat

SEQ ID NO: 319407 - DNA, 30 bp, Artificial Sequence
  Synthetic oligonucleotide
attagcgagggccatgtggagaaatactat

SEQ ID NO: 319408 - DNA, 30 bp, Artificial Sequence
  Synthetic oligonucleotide
gggaatccctaaatctcccaagaatactat

SEQ ID NO: 319409 - DNA, 30 bp, Artificial Sequence
  Synthetic oligonucleotide
tgggatcgggtcgacggcaggccctactat

SEQ ID NO: 319410 - DNA, 30 bp, Artificial Sequence
  Synthetic oligonucleotide
acgcccatatgatatgtactggcctactat

SEQ ID NO: 319411 - DNA, 29 bp, Artificial Sequence
  Synthetic oligonucleotide
accaatgcttgccgcttggagaaacctat

SEQ ID NO: 319412 - DNA, 30 bp, Artificial Sequence
  Synthetic oligonucleotide
tcgaactgatagtgttaaggtaagacctat

SEQ ID NO: 319413 - DNA, 30 bp, Artificial Sequence
  Synthetic oligonucleotide
ttcgacacttcactgttacctctgacctat

SEQ ID NO: 319414 - DNA, 30 bp, Artificial Sequence
  Synthetic oligonucleotide
ggcgtttcaggcacgataagtgatacctat

SEQ ID NO: 319415 - DNA, 30 bp, Artificial Sequence
  Synthetic oligonucleotide
accgaatgcatgacgtcaacagtaccctat

SEQ ID NO: 319416 - DNA, 30 bp, Artificial Sequence
  Synthetic oligonucleotide
aaccatgttagtggagatggcgacccctat

SEQ ID NO: 319417 - DNA, 30 bp, Artificial Sequence
  Synthetic oligonucleotide
agaatcctaaaaattcggtttgccccctat

SEQ ID NO: 319418 - DNA, 30 bp, Artificial Sequence
  Synthetic oligonucleotide
gcggcaattcagaatctatccgagccctat

SEQ ID NO: 319419 - DNA, 30 bp, Artificial Sequence
  Synthetic oligonucleotide
cttagaagtaaagcggcatagcttccctat

SEQ ID NO: 319420 - DNA, 30 bp, Artificial Sequence
  Synthetic oligonucleotide
tagggaggttaccgaacctatacagcctat

SEQ ID NO: 319421 - DNA, 30 bp, Artificial Sequence
  Synthetic oligonucleotide
ctctaaccacaaggtgttcttcgagcctat

SEQ ID NO: 319422 - DNA, 30 bp, Artificial Sequence
  Synthetic oligonucleotide
atcgcacgcggagtcaagattaacgcctat

SEQ ID NO: 319423 - DNA, 30 bp, Artificial Sequence
  Synthetic oligonucleotide
aaaatattgtctacacggtcgtgcgcctat

SEQ ID NO: 319424 - DNA, 30 bp, Artificial Sequence
  Synthetic oligonucleotide
taacccacatgcttgctactctcggcctat

SEQ ID NO: 319425 - DNA, 30 bp, Artificial Sequence
  Synthetic oligonucleotide
gggaagaacctgtagcaactatgggcctat

SEQ ID NO: 319426 - DNA, 30 bp, Artificial Sequence
  Synthetic oligonucleotide
tagcaaatgttaactatcgcaactgcctat

SEQ ID NO: 319427 - DNA, 30 bp, Artificial Sequence
  Synthetic oligonucleotide
aggggcttcaggctcaagcaacgtgcctat

SEQ ID NO: 319428 - DNA, 30 bp, Artificial Sequence
  Synthetic oligonucleotide
gcgatgcggtgcacttaggtgtactcctat

SEQ ID NO: 319429 - DNA, 30 bp, Artificial Sequence
  Synthetic oligonucleotide
tgagacccggttgtcatggaactttcctat

SEQ ID NO: 319430 - DNA, 30 bp, Artificial Sequence
  Synthetic oligonucleotide
ttgttgtattctctttttgtgttttcctat

SEQ ID NO: 319431 - DNA, 30 bp, Artificial Sequence
  Synthetic oligonucleotide
ttgttatgttctctttttgtgttttcctat

SEQ ID NO: 319432 - DNA, 30 bp, Artificial Sequence
  Synthetic oligonucleotide
agaaaatgctggaagatgcatgctagctat

SEQ ID NO: 319433 - DNA, 30 bp, Artificial Sequence
  Synthetic oligonucleotide
tcaacagcctgatgtccgatgatccgctat

SEQ ID NO: 319434 - DNA, 30 bp, Artificial Sequence
  Synthetic oligonucleotide
tctgcacgtaactataagcctgcgcgctat

SEQ ID NO: 319435 - DNA, 30 bp, Artificial Sequence
  Synthetic oligonucleotide
caggagcttcctgattcagtaggtcgctat

SEQ ID NO: 319436 - DNA, 30 bp, Artificial Sequence
  Synthetic oligonucleotide
tggggacaattagagatacctgttcgctat

SEQ ID NO: 319437 - DNA, 30 bp, Artificial Sequence
  Synthetic oligonucleotide
aatcaccttatggacaaggtatcaggctat

SEQ ID NO: 319438 - DNA, 30 bp, Artificial Sequence
  Synthetic oligonucleotide
gtcccgaccaggaatcttgtatcgggctat

SEQ ID NO: 319439 - DNA, 30 bp, Artificial Sequence
  Synthetic oligonucleotide
gttcacgaggaggagagcccagatggctat

SEQ ID NO: 319440 - DNA, 30 bp, Artificial Sequence
  Synthetic oligonucleotide
tactcgcaaaacgttacaaaatctggctat

SEQ ID NO: 319441 - DNA, 30 bp, Artificial Sequence
  Synthetic oligonucleotide
aacttggtggctgacaatgatcaatgctat

SEQ ID NO: 319442 - DNA, 30 bp, Artificial Sequence
  Synthetic oligonucleotide
ctaatggctgatccggcctaagaatgctat

SEQ ID NO: 319443 - DNA, 30 bp, Artificial Sequence
  Synthetic oligonucleotide
tatgttactgggctgttaccctagtgctat

SEQ ID NO: 319444 - DNA, 30 bp, Artificial Sequence
  Synthetic oligonucleotide
acctagttgtggaagagcgtctcgtgctat

SEQ ID NO: 319445 - DNA, 30 bp, Artificial Sequence
  Synthetic oligonucleotide
agatcgaagcttgggtagcatttgtgctat

SEQ ID NO: 319446 - DNA, 30 bp, Artificial Sequence
  Synthetic oligonucleotide
tggtcatacatacctaagccagaaatctat

SEQ ID NO: 319447 - DNA, 30 bp, Artificial Sequence
  Synthetic oligonucleotide
gccggccaacacatcgctatatcaatctat

SEQ ID NO: 319448 - DNA, 30 bp, Artificial Sequence
  Synthetic oligonucleotide
atacatcacgacggtattggtgacctctat

SEQ ID NO: 319449 - DNA, 30 bp, Artificial Sequence
  Synthetic oligonucleotide
catagagccgagggcatacacgccctctat

SEQ ID NO: 319450 - DNA, 30 bp, Artificial Sequence
  Synthetic oligonucleotide
acatccgaccctgacactcacttgctctat

SEQ ID NO: 319451 - DNA, 30 bp, Artificial Sequence
  Synthetic oligonucleotide
gccaggcatcggaatcgttataatctctat

SEQ ID NO: 319452 - DNA, 30 bp, Artificial Sequence
  Synthetic oligonucleotide
cgataccgctagctaacccagtgtctctat

SEQ ID NO: 319453 - DNA, 30 bp, Artificial Sequence
  Synthetic oligonucleotide
agatcaatcagagcaacttcaagagtctat

SEQ ID NO: 319454 - DNA, 30 bp, Artificial Sequence
  Synthetic oligonucleotide
gtcgacacgcatgtattgttttgagtctat

SEQ ID NO: 319455 - DNA, 30 bp, Artificial Sequence
  Synthetic oligonucleotide
cagctctgtttcaggacagtacgcgtctat

SEQ ID NO: 319456 - DNA, 30 bp, Artificial Sequence
  Synthetic oligonucleotide
ggtgactaaagcatgtgctcgtgcgtctat

SEQ ID NO: 319457 - DNA, 30 bp, Artificial Sequence
  Synthetic oligonucleotide
gtgcggcgcgttcaccggcgttgggtctat

SEQ ID NO: 319458 - DNA, 30 bp, Artificial Sequence
  Synthetic oligonucleotide
cgggtgccactatgaacaaatcctgtctat

SEQ ID NO: 319459 - DNA, 30 bp, Artificial Sequence
  Synthetic oligonucleotide
tgtccaccctccaatcatgaagcattctat

SEQ ID NO: 319460 - DNA, 30 bp, Artificial Sequence
  Synthetic oligonucleotide
actgttttgcgaccaggatgtaacttctat

SEQ ID NO: 319461 - DNA, 30 bp, Artificial Sequence
  Synthetic oligonucleotide
ttgatctagaatcggtgggctcgcttctat

SEQ ID NO: 319462 - DNA, 30 bp, Artificial Sequence
  Synthetic oligonucleotide
gcggattcagcagcatgcagaacgttctat

SEQ ID NO: 319463 - DNA, 30 bp, Artificial Sequence
  Synthetic oligonucleotide
ggcacacaggctgacggagtgccgttctat

SEQ ID NO: 319464 - DNA, 30 bp, Artificial Sequence
  Synthetic oligonucleotide
gtaaggggccagtaagcggagtcgttctat

SEQ ID NO: 319465 - DNA, 30 bp, Artificial Sequence
  Synthetic oligonucleotide
ttcgacatatgtcgaggtgactggttctat

SEQ ID NO: 319466 - DNA, 30 bp, Artificial Sequence
  Synthetic oligonucleotide
cctgtaccgcccgtgtgcccgtaaaagtat

SEQ ID NO: 319467 - DNA, 30 bp, Artificial Sequence
  Synthetic oligonucleotide
cacggttttttgtagtgccattcaaagtat

SEQ ID NO: 319468 - DNA, 30 bp, Artificial Sequence
  Synthetic oligonucleotide
acgaggcagtggcggcaaacaagcaagtat

SEQ ID NO: 319469 - DNA, 30 bp, Artificial Sequence
  Synthetic oligonucleotide
gctgggcgctgacataatttaaagaagtat

SEQ ID NO: 319470 - DNA, 30 bp, Artificial Sequence
  Synthetic oligonucleotide
agtgaacgaagtaagcaaccacttaagtat

SEQ ID NO: 319471 - DNA, 30 bp, Artificial Sequence
  Synthetic oligonucleotide
tcgcgttaggcgggcacgtaccttaagtat

SEQ ID NO: 319472 - DNA, 31 bp, Artificial Sequence
  Synthetic oligonucleotide
atatggctaacacaagggtaaaatacagtat

SEQ ID NO: 319473 - DNA, 30 bp, Artificial Sequence
  Synthetic oligonucleotide
cagctatgtcacggttacaagggccagtat

SEQ ID NO: 319474 - DNA, 30 bp, Artificial Sequence
  Synthetic oligonucleotide
ttgggaacgtgtcagcaagatatccagtat

SEQ ID NO: 319475 - DNA, 30 bp, Artificial Sequence
  Synthetic oligonucleotide
ctcgccttttcttcgtatggaccagagtat

SEQ ID NO: 319476 - DNA, 30 bp, Artificial Sequence
  Synthetic oligonucleotide
agttgaccgggaggcggttttccagagtat

SEQ ID NO: 319477 - DNA, 30 bp, Artificial Sequence
  Synthetic oligonucleotide
tccctaaaatattgttgtggaagcgagtat

SEQ ID NO: 319478 - DNA, 30 bp, Artificial Sequence
  Synthetic oligonucleotide
tgcgaaacaataggccgtacacgcgagtat

SEQ ID NO: 319479 - DNA, 30 bp, Artificial Sequence
  Synthetic oligonucleotide
gtgagtgtatacgcttatcttccggagtat

SEQ ID NO: 319480 - DNA, 30 bp, Artificial Sequence
  Synthetic oligonucleotide
acgggccggagagagttccggggggagtat

SEQ ID NO: 319481 - DNA, 30 bp, Artificial Sequence
  Synthetic oligonucleotide
gagcatgtccgctatattgccatggagtat

SEQ ID NO: 319482 - DNA, 30 bp, Artificial Sequence
  Synthetic oligonucleotide
ttgataggtataccgcgtcatttggagtat

SEQ ID NO: 319483 - DNA, 30 bp, Artificial Sequence
  Synthetic oligonucleotide
cacgcacgaaggcaatggaaaaaatagtat

SEQ ID NO: 319484 - DNA, 30 bp, Artificial Sequence
  Synthetic oligonucleotide
ggcgcttgagcaagtactgggccatagtat

SEQ ID NO: 319485 - DNA, 30 bp, Artificial Sequence
  Synthetic oligonucleotide
atggtgcaagacccggtacggtgatagtat

SEQ ID NO: 319486 - DNA, 30 bp, Artificial Sequence
  Synthetic oligonucleotide
agaaatgttgaagaaactctatactagtat

SEQ ID NO: 319487 - DNA, 30 bp, Artificial Sequence
  Synthetic oligonucleotide
caagaacgttaaggcatagggtactagtat

SEQ ID NO: 319488 - DNA, 30 bp, Artificial Sequence
  Synthetic oligonucleotide
cggcaagctaccggagctaagacgtagtat

SEQ ID NO: 319489 - DNA, 30 bp, Artificial Sequence
  Synthetic oligonucleotide
ttacagttatgcgtgccaagtaattagtat

SEQ ID NO: 319490 - DNA, 30 bp, Artificial Sequence
  Synthetic oligonucleotide
atcaacaaaaatgttcagcattattagtat

SEQ ID NO: 319491 - DNA, 30 bp, Artificial Sequence
  Synthetic oligonucleotide
ggatagcgcgtacgcatgcgccccacgtat

SEQ ID NO: 319492 - DNA, 30 bp, Artificial Sequence
  Synthetic oligonucleotide
ggtgcattcgcctcagctttcgggacgtat

SEQ ID NO: 319493 - DNA, 30 bp, Artificial Sequence
  Synthetic oligonucleotide
gcgtgtttttaggcttgttgacacccgtat

SEQ ID NO: 319494 - DNA, 30 bp, Artificial Sequence
  Synthetic oligonucleotide
ctagagccaacaatgttgagaaggccgtat

SEQ ID NO: 319495 - DNA, 30 bp, Artificial Sequence
  Synthetic oligonucleotide
cttctattttcttctgtggataggccgtat

SEQ ID NO: 319496 - DNA, 30 bp, Artificial Sequence
  Synthetic oligonucleotide
ttgtgtagggcaccgtcagacactccgtat

SEQ ID NO: 319497 - DNA, 30 bp, Artificial Sequence
  Synthetic oligonucleotide
aggcggacgttagctggaaagattccgtat

SEQ ID NO: 319498 - DNA, 30 bp, Artificial Sequence
  Synthetic oligonucleotide
atgattgtattgtctgcatgaaaagcgtat

SEQ ID NO: 319499 - DNA, 30 bp, Artificial Sequence
  Synthetic oligonucleotide
cataagcacttgactgcatggtgagcgtat

SEQ ID NO: 319500 - DNA, 30 bp, Artificial Sequence
  Synthetic oligonucleotide
tgccaggagaaagagctggccaatgcgtat

SEQ ID NO: 319501 - DNA, 30 bp, Artificial Sequence
  Synthetic oligonucleotide
tccttcctgatctaattcgcggttgcgtat

SEQ ID NO: 319502 - DNA, 30 bp, Artificial Sequence
  Synthetic oligonucleotide
ccctagcaacctgttgttacatttgcgtat

SEQ ID NO: 319503 - DNA, 30 bp, Artificial Sequence
  Synthetic oligonucleotide
tgtgtatatctaagcaatctgccatcgtat

SEQ ID NO: 319504 - DNA, 30 bp, Artificial Sequence
  Synthetic oligonucleotide
atccattcgcgccataggaacagatcgtat

SEQ ID NO: 319505 - DNA, 30 bp, Artificial Sequence
  Synthetic oligonucleotide
attcacattgtgtgtatgtgtctatcgtat

SEQ ID NO: 319506 - DNA, 30 bp, Artificial Sequence
  Synthetic oligonucleotide
acatgtttaccctaataatcccgctcgtat

SEQ ID NO: 319507 - DNA, 30 bp, Artificial Sequence
  Synthetic oligonucleotide
agataccgccccagagatggtccgtcgtat

SEQ ID NO: 319508 - DNA, 30 bp, Artificial Sequence
  Synthetic oligonucleotide
caccatgggatcccatacaagtcgtcgtat

SEQ ID NO: 319509 - DNA, 30 bp, Artificial Sequence
  Synthetic oligonucleotide
tgagaccccgatgtgctaacagggtcgtat

SEQ ID NO: 319510 - DNA, 30 bp, Artificial Sequence
  Synthetic oligonucleotide
acatacaatgatgggcgggatgattcgtat

SEQ ID NO: 319511 - DNA, 30 bp, Artificial Sequence
  Synthetic oligonucleotide
agaaaatgcgatattcacggtcgttcgtat

SEQ ID NO: 319512 - DNA, 30 bp, Artificial Sequence
  Synthetic oligonucleotide
aagcctttctagacagggacgctaaggtat

SEQ ID NO: 319513 - DNA, 30 bp, Artificial Sequence
  Synthetic oligonucleotide
cttaaacgtgtaatagaggctgtaaggtat

SEQ ID NO: 319514 - DNA, 30 bp, Artificial Sequence
  Synthetic oligonucleotide
gtttgtacaaagagacttgttggcaggtat

SEQ ID NO: 319515 - DNA, 30 bp, Artificial Sequence
  Synthetic oligonucleotide
aacgcgctctcaccgaaatcctgcaggtat

SEQ ID NO: 319516 - DNA, 30 bp, Artificial Sequence
  Synthetic oligonucleotide
gtctcgtggcacggatatggctgtaggtat

SEQ ID NO: 319517 - DNA, 30 bp, Artificial Sequence
  Synthetic oligonucleotide
gtttcgggaacctcatgccactttaggtat

SEQ ID NO: 319518 - DNA, 30 bp, Artificial Sequence
  Synthetic oligonucleotide
gagctgtttacgtgtggtaccttacggtat

SEQ ID NO: 319519 - DNA, 30 bp, Artificial Sequence
  Synthetic oligonucleotide
gtagtcgggtgcttaaccatctcgcggtat

SEQ ID NO: 319520 - DNA, 30 bp, Artificial Sequence
  Synthetic oligonucleotide
tgaagcaactgtccgacaagacggcggtat

SEQ ID NO: 319521 - DNA, 30 bp, Artificial Sequence
  Synthetic oligonucleotide
cataatattcataaaaaatatgacgggtat

SEQ ID NO: 319522 - DNA, 30 bp, Artificial Sequence
  Synthetic oligonucleotide
tagttcataggttttacatccaaggggtat

SEQ ID NO: 319523 - DNA, 30 bp, Artificial Sequence
  Synthetic oligonucleotide
tggggaaacgaagtagctaccactgggtat

SEQ ID NO: 319524 - DNA, 30 bp, Artificial Sequence
  Synthetic oligonucleotide
caaagatggcggtatgacgttacctggtat

SEQ ID NO: 319525 - DNA, 30 bp, Artificial Sequence
  Synthetic oligonucleotide
tcaccgtcaatggatttaacgtcctggtat

SEQ ID NO: 319526 - DNA, 30 bp, Artificial Sequence
  Synthetic oligonucleotide
caggtctaaccaatttaacgtcgctggtat

SEQ ID NO: 319527 - DNA, 30 bp, Artificial Sequence
  Synthetic oligonucleotide
ggtattttttcggacgtctaaaggtggtat

SEQ ID NO: 319528 - DNA, 30 bp, Artificial Sequence
  Synthetic oligonucleotide
ctagccgccacagagatggcagtgtggtat

SEQ ID NO: 319529 - DNA, 30 bp, Artificial Sequence
  Synthetic oligonucleotide
atacatccagctgtgatgacccgaatgtat

SEQ ID NO: 319530 - DNA, 30 bp, Artificial Sequence
  Synthetic oligonucleotide
taactggattcacggaacgcttgaatgtat

SEQ ID NO: 319531 - DNA, 30 bp, Artificial Sequence
  Synthetic oligonucleotide
acggcgcgtgtgggacacagtaacatgtat

SEQ ID NO: 319532 - DNA, 30 bp, Artificial Sequence
  Synthetic oligonucleotide
aagcgtctgatttggtcaaaaagcatgtat

SEQ ID NO: 319533 - DNA, 30 bp, Artificial Sequence
  Synthetic oligonucleotide
acggtaaaaaaaatcgcgtaaaatatgtat

SEQ ID NO: 319534 - DNA, 30 bp, Artificial Sequence
  Synthetic oligonucleotide
tctcgggggcattccaagtctaccctgtat

SEQ ID NO: 319535 - DNA, 30 bp, Artificial Sequence
  Synthetic oligonucleotide
taccacgaggcgaaagcaattttgctgtat

SEQ ID NO: 319536 - DNA, 30 bp, Artificial Sequence
  Synthetic oligonucleotide
actatatttggctaacactgtgatctgtat

SEQ ID NO: 319537 - DNA, 31 bp, Artificial Sequence
  Synthetic oligonucleotide
tgagtgtttctggctcgtgggttatctgtat

SEQ ID NO: 319538 - DNA, 30 bp, Artificial Sequence
  Synthetic oligonucleotide
ggtcggaaagtatagtactgtagtctgtat

SEQ ID NO: 319539 - DNA, 30 bp, Artificial Sequence
  Synthetic oligonucleotide
cgttgggtcatcgtctatccggttctgtat

SEQ ID NO: 319540 - DNA, 30 bp, Artificial Sequence
  Synthetic oligonucleotide
gacggttggaccatcagagagtcagtgtat

SEQ ID NO: 319541 - DNA, 30 bp, Artificial Sequence
  Synthetic oligonucleotide
agcctaaaaatatggtcgtgaatagtgtat

SEQ ID NO: 319542 - DNA, 30 bp, Artificial Sequence
  Synthetic oligonucleotide
ttctgttacgcgaaaattataagggtgtat

SEQ ID NO: 319543 - DNA, 30 bp, Artificial Sequence
  Synthetic oligonucleotide
gaggccttcgcgtagcagcgcatggtgtat

SEQ ID NO: 319544 - DNA, 30 bp, Artificial Sequence
  Synthetic oligonucleotide
aaatgaagggaggattatgtgtctgtgtat

SEQ ID NO: 319545 - DNA, 30 bp, Artificial Sequence
  Synthetic oligonucleotide
caggaaatttcccgcgccctatgtgtgtat

SEQ ID NO: 319546 - DNA, 30 bp, Artificial Sequence
  Synthetic oligonucleotide
cttgtaaatacctttggtaactgtgtgtat

SEQ ID NO: 319547 - DNA, 30 bp, Artificial Sequence
  Synthetic oligonucleotide
tcttatctgttgtattttcctcttgtgtat

SEQ ID NO: 319548 - DNA, 30 bp, Artificial Sequence
  Synthetic oligonucleotide
tatggggccggctttaccatattattgtat

SEQ ID NO: 319549 - DNA, 30 bp, Artificial Sequence
  Synthetic oligonucleotide
tgtagccggcagtctaaatacagcttgtat

SEQ ID NO: 319550 - DNA, 30 bp, Artificial Sequence
  Synthetic oligonucleotide
aatcgtacgcatattaccgtgatcttgtat

SEQ ID NO: 319551 - DNA, 30 bp, Artificial Sequence
  Synthetic oligonucleotide
acctaaggttcgacgcaagggggaaattat

SEQ ID NO: 319552 - DNA, 30 bp, Artificial Sequence
  Synthetic oligonucleotide
ctggtaagcctgctagttaacgccaattat

SEQ ID NO: 319553 - DNA, 30 bp, Artificial Sequence
  Synthetic oligonucleotide
aagcttgctttacagagtaggatacattat

SEQ ID NO: 319554 - DNA, 30 bp, Artificial Sequence
  Synthetic oligonucleotide
actacggcctaaataagcagaagccattat

SEQ ID NO: 319555 - DNA, 30 bp, Artificial Sequence
  Synthetic oligonucleotide
ggcgaataacgttgatcacagggccattat

SEQ ID NO: 319556 - DNA, 30 bp, Artificial Sequence
  Synthetic oligonucleotide
tccctgtgtgtaaggaaaagtggccattat

SEQ ID NO: 319557 - DNA, 30 bp, Artificial Sequence
  Synthetic oligonucleotide
ctatcgttacatcttccggaggagcattat

SEQ ID NO: 319558 - DNA, 30 bp, Artificial Sequence
  Synthetic oligonucleotide
gtgatcggcgccagaccggtaaatcattat

SEQ ID NO: 319559 - DNA, 30 bp, Artificial Sequence
  Synthetic oligonucleotide
aggcgagttaggggcgcagggaatcattat

SEQ ID NO: 319560 - DNA, 30 bp, Artificial Sequence
  Synthetic oligonucleotide
ctaaggtctgggaagttaggaaaagattat

SEQ ID NO: 319561 - DNA, 29 bp, Artificial Sequence
  Synthetic oligonucleotide
caagcgttacctgctccagtgcagattat

SEQ ID NO: 319562 - DNA, 30 bp, Artificial Sequence
  Synthetic oligonucleotide
acggtctccgatcagtgttgatgagattat

SEQ ID NO: 319563 - DNA, 30 bp, Artificial Sequence
  Synthetic oligonucleotide
gttattcacaaggtcgtaaacatagattat

SEQ ID NO: 319564 - DNA, 30 bp, Artificial Sequence
  Synthetic oligonucleotide
ttgctgacccgggactgttacctagattat

SEQ ID NO: 319565 - DNA, 30 bp, Artificial Sequence
  Synthetic oligonucleotide
gtccccgcaaaccagaccgggatcgattat

SEQ ID NO: 319566 - DNA, 30 bp, Artificial Sequence
  Synthetic oligonucleotide
gagagcagacggtgaatccggttcgattat

SEQ ID NO: 319567 - DNA, 30 bp, Artificial Sequence
  Synthetic oligonucleotide
actcactacaattccaggttgcaggattat

SEQ ID NO: 319568 - DNA, 30 bp, Artificial Sequence
  Synthetic oligonucleotide
gcttacaaattggaatcaatctaggattat

SEQ ID NO: 319569 - DNA, 30 bp, Artificial Sequence
  Synthetic oligonucleotide
ttacggcccacaattgtagctaatgattat

SEQ ID NO: 319570 - DNA, 30 bp, Artificial Sequence
  Synthetic oligonucleotide
agaccgggacctccaacagttgctgattat

SEQ ID NO: 319571 - DNA, 30 bp, Artificial Sequence
  Synthetic oligonucleotide
tacgacatgcatatcggtccaggtgattat

SEQ ID NO: 319572 - DNA, 30 bp, Artificial Sequence
  Synthetic oligonucleotide
gaggaataggcgtggcccttctaatattat

SEQ ID NO: 319573 - DNA, 30 bp, Artificial Sequence
  Synthetic oligonucleotide
taaagacagttgagccgaattccatattat

SEQ ID NO: 319574 - DNA, 30 bp, Artificial Sequence
  Synthetic oligonucleotide
atttgctacattccgaaataacagtattat

SEQ ID NO: 319575 - DNA, 30 bp, Artificial Sequence
  Synthetic oligonucleotide
ctttcgacgagtatgggtcctctgtattat

SEQ ID NO: 319576 - DNA, 30 bp, Artificial Sequence
  Synthetic oligonucleotide
cccggcaacactataccccagtattattat

SEQ ID NO: 319577 - DNA, 30 bp, Artificial Sequence
  Synthetic oligonucleotide
cgtgcataatgctccggcaggtcttattat

SEQ ID NO: 319578 - DNA, 30 bp, Artificial Sequence
  Synthetic oligonucleotide
gcggcgatggcaattacctttgcaacttat

SEQ ID NO: 319579 - DNA, 30 bp, Artificial Sequence
  Synthetic oligonucleotide
gacgaacaggcgttgattgtaatgacttat

SEQ ID NO: 319580 - DNA, 30 bp, Artificial Sequence
  Synthetic oligonucleotide
aacagttacacgagttgtaatgatacttat

SEQ ID NO: 319581 - DNA, 30 bp, Artificial Sequence
  Synthetic oligonucleotide
gagtagacttagagtggcataattacttat

SEQ ID NO: 319582 - DNA, 30 bp, Artificial Sequence
  Synthetic oligonucleotide
tatctttctgactccttggatcttacttat

SEQ ID NO: 319583 - DNA, 30 bp, Artificial Sequence
  Synthetic oligonucleotide
gaggaagttggagtcagcccgtttacttat

SEQ ID NO: 319584 - DNA, 30 bp, Artificial Sequence
  Synthetic oligonucleotide
aatcgccactcgcgagctatggaaccttat

SEQ ID NO: 319585 - DNA, 30 bp, Artificial Sequence
  Synthetic oligonucleotide
gatacattctcagaattgatttaaccttat

SEQ ID NO: 319586 - DNA, 30 bp, Artificial Sequence
  Synthetic oligonucleotide
gtagaacagaccgggccggtcacaccttat

SEQ ID NO: 319587 - DNA, 30 bp, Artificial Sequence
  Synthetic oligonucleotide
tgatcaagggaattcaggaactgagcttat

SEQ ID NO: 319588 - DNA, 30 bp, Artificial Sequence
  Synthetic oligonucleotide
acacaccggagcacacgctgaaccgcttat

SEQ ID NO: 319589 - DNA, 30 bp, Artificial Sequence
  Synthetic oligonucleotide
aaagatgctgaaaaactgatcgctgcttat

SEQ ID NO: 319590 - DNA, 30 bp, Artificial Sequence
  Synthetic oligonucleotide
acggacccacaagttagtccgtctgcttat

SEQ ID NO: 319591 - DNA, 30 bp, Artificial Sequence
  Synthetic oligonucleotide
atacatgtggcagagaaattacgatcttat

SEQ ID NO: 319592 - DNA, 30 bp, Artificial Sequence
  Synthetic oligonucleotide
ggtccaaccgtggactggtctatgtcttat

SEQ ID NO: 319593 - DNA, 30 bp, Artificial Sequence
  Synthetic oligonucleotide
tgccaccggttttagcaacaccattcttat

SEQ ID NO: 319594 - DNA, 30 bp, Artificial Sequence
  Synthetic oligonucleotide
caggacccgggggtccaaaaaggaagttat

SEQ ID NO: 319595 - DNA, 30 bp, Artificial Sequence
  Synthetic oligonucleotide
tacttagtcgttagccagccacacagttat

SEQ ID NO: 319596 - DNA, 30 bp, Artificial Sequence
  Synthetic oligonucleotide
actcaaacgggctcttagactcccagttat

SEQ ID NO: 319597 - DNA, 30 bp, Artificial Sequence
  Synthetic oligonucleotide
tccgacactttgcgcatcggggagagttat

SEQ ID NO: 319598 - DNA, 30 bp, Artificial Sequence
  Synthetic oligonucleotide
aggtctgtaacgatgcccaatcctagttat

SEQ ID NO: 319599 - DNA, 30 bp, Artificial Sequence
  Synthetic oligonucleotide
caaccgagagtaaggctcctccttagttat

SEQ ID NO: 319600 - DNA, 30 bp, Artificial Sequence
  Synthetic oligonucleotide
cgcagaactatagcaatccggtgacgttat

SEQ ID NO: 319601 - DNA, 30 bp, Artificial Sequence
  Synthetic oligonucleotide
gaatgctgatttaccgatgttgcccgttat

SEQ ID NO: 319602 - DNA, 30 bp, Artificial Sequence
  Synthetic oligonucleotide
gtcactggctccctttgctagaagcgttat

SEQ ID NO: 319603 - DNA, 30 bp, Artificial Sequence
  Synthetic oligonucleotide
gtaatggggtaacccgaatcgtagcgttat

SEQ ID NO: 319604 - DNA, 30 bp, Artificial Sequence
  Synthetic oligonucleotide
gctgggaagatctctccgaactatcgttat

SEQ ID NO: 319605 - DNA, 30 bp, Artificial Sequence
  Synthetic oligonucleotide
tttaagataaaaatatgctcacgaggttat

SEQ ID NO: 319606 - DNA, 30 bp, Artificial Sequence
  Synthetic oligonucleotide
gatcacctcgttgcggttattcgaggttat

SEQ ID NO: 319607 - DNA, 30 bp, Artificial Sequence
  Synthetic oligonucleotide
tatgcattagcgcttataactgacggttat

SEQ ID NO: 319608 - DNA, 30 bp, Artificial Sequence
  Synthetic oligonucleotide
attaagcggtaggcatgccgtaccggttat

SEQ ID NO: 319609 - DNA, 30 bp, Artificial Sequence
  Synthetic oligonucleotide
gcgagcgatccctaagcacttgagggttat

SEQ ID NO: 319610 - DNA, 30 bp, Artificial Sequence
  Synthetic oligonucleotide
taacgacacaatgaggtaaagcggggttat

SEQ ID NO: 319611 - DNA, 30 bp, Artificial Sequence
  Synthetic oligonucleotide
ggttatgagtaataaagtcttgatggttat

SEQ ID NO: 319612 - DNA, 30 bp, Artificial Sequence
  Synthetic oligonucleotide
actcgcctcagctgtgggcactatggttat

SEQ ID NO: 319613 - DNA, 30 bp, Artificial Sequence
  Synthetic oligonucleotide
ctagtatgagtaatcgttaattatggttat

SEQ ID NO: 319614 - DNA, 30 bp, Artificial Sequence
  Synthetic oligonucleotide
cccatgatcgtcaccaaccagactggttat

SEQ ID NO: 319615 - DNA, 30 bp, Artificial Sequence
  Synthetic oligonucleotide
tatggattgtgttaaattgatactggttat

SEQ ID NO: 319616 - DNA, 30 bp, Artificial Sequence
  Synthetic oligonucleotide
ctgtaccgtaggttttctctagctggttat

SEQ ID NO: 319617 - DNA, 30 bp, Artificial Sequence
  Synthetic oligonucleotide
gtaacaaattgacaattttatttatgttat

SEQ ID NO: 319618 - DNA, 30 bp, Artificial Sequence
  Synthetic oligonucleotide
gagtgtgttgacttgaaggtgccctgttat

SEQ ID NO: 319619 - DNA, 30 bp, Artificial Sequence
  Synthetic oligonucleotide
ggccggtcaatctgtgcgtaagtgtgttat

SEQ ID NO: 319620 - DNA, 30 bp, Artificial Sequence
  Synthetic oligonucleotide
tagcgatgggtgttccaggtcgtgtgttat

SEQ ID NO: 319621 - DNA, 30 bp, Artificial Sequence
  Synthetic oligonucleotide
acgggttccgataatcctctatcttgttat

SEQ ID NO: 319622 - DNA, 30 bp, Artificial Sequence
  Synthetic oligonucleotide
ggttagatcatggtatcccacacaatttat

SEQ ID NO: 319623 - DNA, 30 bp, Artificial Sequence
  Synthetic oligonucleotide
atgaaaccctttacatctgagtcaatttat

SEQ ID NO: 319624 - DNA, 30 bp, Artificial Sequence
  Synthetic oligonucleotide
caaggagacaatatgccgcaccgaatttat

SEQ ID NO: 319625 - DNA, 30 bp, Artificial Sequence
  Synthetic oligonucleotide
cagggatctccaaacgggaaggtaatttat

SEQ ID NO: 319626 - DNA, 30 bp, Artificial Sequence
  Synthetic oligonucleotide
gtctctaacccgcgggtgagatgcatttat

SEQ ID NO: 319627 - DNA, 30 bp, Artificial Sequence
  Synthetic oligonucleotide
gatatagcgatgaagtgtgtactgatttat

SEQ ID NO: 319628 - DNA, 30 bp, Artificial Sequence
  Synthetic oligonucleotide
catcaaggcttatacaaagcggtgatttat

SEQ ID NO: 319629 - DNA, 30 bp, Artificial Sequence
  Synthetic oligonucleotide
acccgttaagggctgcgcttaggtatttat

SEQ ID NO: 319630 - DNA, 30 bp, Artificial Sequence
  Synthetic oligonucleotide
ccttgcggggtaacttagtgtttactttat

SEQ ID NO: 319631 - DNA, 30 bp, Artificial Sequence
  Synthetic oligonucleotide
gatcgacctcttactggagcatacctttat

SEQ ID NO: 319632 - DNA, 30 bp, Artificial Sequence
  Synthetic oligonucleotide
cgaataagcgccgtaattggcagcctttat

SEQ ID NO: 319633 - DNA, 30 bp, Artificial Sequence
  Synthetic oligonucleotide
atagagatccgggctgtttttggcctttat

SEQ ID NO: 319634 - DNA, 30 bp, Artificial Sequence
  Synthetic oligonucleotide
caagcggtgccattcttagcgctgctttat

SEQ ID NO: 319635 - DNA, 30 bp, Artificial Sequence
  Synthetic oligonucleotide
gggtcaatgtgctatggcttccttctttat

SEQ ID NO: 319636 - DNA, 30 bp, Artificial Sequence
  Synthetic oligonucleotide
ccatcgcgtatctcgatggtataagtttat

SEQ ID NO: 319637 - DNA, 30 bp, Artificial Sequence
  Synthetic oligonucleotide
gaggtagggcgtgtgacggcctcagtttat

SEQ ID NO: 319638 - DNA, 30 bp, Artificial Sequence
  Synthetic oligonucleotide
aagagatccctgtagacaggtaacgtttat

SEQ ID NO: 319639 - DNA, 30 bp, Artificial Sequence
  Synthetic oligonucleotide
gtattcgatctgttatacatcaaggtttat

SEQ ID NO: 319640 - DNA, 30 bp, Artificial Sequence
  Synthetic oligonucleotide
agcgttcgaccccattcttagaaggtttat

SEQ ID NO: 319641 - DNA, 30 bp, Artificial Sequence
  Synthetic oligonucleotide
gactgtagggccgctagaactgcggtttat

SEQ ID NO: 319642 - DNA, 30 bp, Artificial Sequence
  Synthetic oligonucleotide
gaccttgtgccatggagctggatggtttat

SEQ ID NO: 319643 - DNA, 30 bp, Artificial Sequence
  Synthetic oligonucleotide
atgcgcccacaaggaatggaagtggtttat

SEQ ID NO: 319644 - DNA, 30 bp, Artificial Sequence
  Synthetic oligonucleotide
aatgtaggataggtcgatttcaaattttat

SEQ ID NO: 319645 - DNA, 30 bp, Artificial Sequence
  Synthetic oligonucleotide
caaggtggtgagagaatcatttcattttat

SEQ ID NO: 319646 - DNA, 30 bp, Artificial Sequence
  Synthetic oligonucleotide
gggtatgatcttatgcggtggttattttat

SEQ ID NO: 319647 - DNA, 30 bp, Artificial Sequence
  Synthetic oligonucleotide
acggattcccatcggggagcccgcttttat

SEQ ID NO: 319648 - DNA, 30 bp, Artificial Sequence
  Synthetic oligonucleotide
gaataacgtgctggcgttaacctgttttat

SEQ ID NO: 319649 - DNA, 30 bp, Artificial Sequence
  Synthetic oligonucleotide
tcatgcacaatgtaaacccttaatttttat

SEQ ID NO: 319650 - DNA, 30 bp, Artificial Sequence
  Synthetic oligonucleotide
aatgacgcggctcgcgtgtggtgaaaaact

SEQ ID NO: 319651 - DNA, 30 bp, Artificial Sequence
  Synthetic oligonucleotide
aaatccgcgacggttgacagccccaaaact

SEQ ID NO: 319652 - DNA, 29 bp, Artificial Sequence
  Synthetic oligonucleotide
gtaagtacgtgaatcgcagctagaaaact

SEQ ID NO: 319653 - DNA, 30 bp, Artificial Sequence
  Synthetic oligonucleotide
tctagtcggaaggctatagctacgaaaact

SEQ ID NO: 319654 - DNA, 30 bp, Artificial Sequence
  Synthetic oligonucleotide
acggccttaaacccgctttatcggaaaact

SEQ ID NO: 319655 - DNA, 30 bp, Artificial Sequence
  Synthetic oligonucleotide
tcgcaagtggaaaaacttagtatgaaaact

SEQ ID NO: 319656 - DNA, 30 bp, Artificial Sequence
  Synthetic oligonucleotide
ggaagcttagcatcagcgtctaataaaact

SEQ ID NO: 319657 - DNA, 30 bp, Artificial Sequence
  Synthetic oligonucleotide
gcgggcttcacatgttcgtatcaacaaact

SEQ ID NO: 319658 - DNA, 30 bp, Artificial Sequence
  Synthetic oligonucleotide
cccgcacaaagtgtgcatcccgaacaaact

SEQ ID NO: 319659 - DNA, 31 bp, Artificial Sequence
  Synthetic oligonucleotide
cattcgctctaaggatctgaccttacaaact

SEQ ID NO: 319660 - DNA, 30 bp, Artificial Sequence
  Synthetic oligonucleotide
ccggaacaatacctcttagggttacaaact

SEQ ID NO: 319661 - DNA, 30 bp, Artificial Sequence
  Synthetic oligonucleotide
ttgtgtcggagccagacgaccgcccaaact

SEQ ID NO: 319662 - DNA, 30 bp, Artificial Sequence
  Synthetic oligonucleotide
caccggaagcgtgtcttttatgcccaaact

SEQ ID NO: 319663 - DNA, 30 bp, Artificial Sequence
  Synthetic oligonucleotide
ctggaatgagctgcacttgtaacgcaaact

SEQ ID NO: 319664 - DNA, 30 bp, Artificial Sequence
  Synthetic oligonucleotide
attaccggcaacacaagcccacatcaaact

SEQ ID NO: 319665 - DNA, 30 bp, Artificial Sequence
  Synthetic oligonucleotide
tcaccgggtcataggtgtttacaagaaact

SEQ ID NO: 319666 - DNA, 30 bp, Artificial Sequence
  Synthetic oligonucleotide
gtatccttgaaccgttccaaagtagaaact

SEQ ID NO: 319667 - DNA, 30 bp, Artificial Sequence
  Synthetic oligonucleotide
gcatgcccgtcggagagtttagaggaaact

SEQ ID NO: 319668 - DNA, 30 bp, Artificial Sequence
  Synthetic oligonucleotide
gattagcaagcccggttcgtataggaaact

SEQ ID NO: 319669 - DNA, 30 bp, Artificial Sequence
  Synthetic oligonucleotide
ggggaagtagaccaaggtaggtaggaaact

SEQ ID NO: 319670 - DNA, 29 bp, Artificial Sequence
  Synthetic oligonucleotide
acttcggggctcttgtttgtacggaaact

SEQ ID NO: 319671 - DNA, 30 bp, Artificial Sequence
  Synthetic oligonucleotide
ttcagtgacggtaggaaacgtggggaaact

SEQ ID NO: 319672 - DNA, 30 bp, Artificial Sequence
  Synthetic oligonucleotide
agcggcgcttgcttggaaaaggtggaaact

SEQ ID NO: 319673 - DNA, 30 bp, Artificial Sequence
  Synthetic oligonucleotide
aagtgacaagctctagaatagaatgaaact

SEQ ID NO: 319674 - DNA, 30 bp, Artificial Sequence
  Synthetic oligonucleotide
tgtgttcacatagcgaaacatgaataaact

SEQ ID NO: 319675 - DNA, 30 bp, Artificial Sequence
  Synthetic oligonucleotide
agccaccgggtccccctctagggataaact

SEQ ID NO: 319676 - DNA, 30 bp, Artificial Sequence
  Synthetic oligonucleotide
ttttcgggaaccaacaaactgaactaaact

SEQ ID NO: 319677 - DNA, 30 bp, Artificial Sequence
  Synthetic oligonucleotide
cgcgagcaacggaatacagatcactaaact

SEQ ID NO: 319678 - DNA, 30 bp, Artificial Sequence
  Synthetic oligonucleotide
tacgacatatccaacgtattattctaaact

SEQ ID NO: 319679 - DNA, 30 bp, Artificial Sequence
  Synthetic oligonucleotide
gatggatgttagaaaactggaaagtaaact

SEQ ID NO: 319680 - DNA, 30 bp, Artificial Sequence
  Synthetic oligonucleotide
ggactgaaattattgtattgactgtaaact

SEQ ID NO: 319681 - DNA, 30 bp, Artificial Sequence
  Synthetic oligonucleotide
aatctataagtccaacgcgagttgtaaact

SEQ ID NO: 319682 - DNA, 30 bp, Artificial Sequence
  Synthetic oligonucleotide
agggataacgcccagcgctcaaattaaact

SEQ ID NO: 319683 - DNA, 30 bp, Artificial Sequence
  Synthetic oligonucleotide
cgcaagtgagaaatatcctttgtttaaact

SEQ ID NO: 319684 - DNA, 30 bp, Artificial Sequence
  Synthetic oligonucleotide
acgtgctttcagtggcacagtaaaacaact

SEQ ID NO: 319685 - DNA, 30 bp, Artificial Sequence
  Synthetic oligonucleotide
ttgccaaaaacgcctcaactataaacaact

SEQ ID NO: 319686 - DNA, 30 bp, Artificial Sequence
  Synthetic oligonucleotide
ggactattctgccgctttaatccaacaact

SEQ ID NO: 319687 - DNA, 30 bp, Artificial Sequence
  Synthetic oligonucleotide
gtctaccgctcggcgaatatgagaacaact

SEQ ID NO: 319688 - DNA, 30 bp, Artificial Sequence
  Synthetic oligonucleotide
caagctcttaaaaatcctctcataacaact

SEQ ID NO: 319689 - DNA, 30 bp, Artificial Sequence
  Synthetic oligonucleotide
tgacgggttcagtcgtgcgatgtaacaact

SEQ ID NO: 319690 - DNA, 30 bp, Artificial Sequence
  Synthetic oligonucleotide
tcaacgtagctctatgcattagccacaact

SEQ ID NO: 319691 - DNA, 30 bp, Artificial Sequence
  Synthetic oligonucleotide
tgccagttaagcggtagtaacgccacaact

SEQ ID NO: 319692 - DNA, 30 bp, Artificial Sequence
  Synthetic oligonucleotide
gccaatgtttattccgtttaggagacaact

SEQ ID NO: 319693 - DNA, 30 bp, Artificial Sequence
  Synthetic oligonucleotide
atctagagttcgatgcctaagacgacaact

SEQ ID NO: 319694 - DNA, 31 bp, Artificial Sequence
  Synthetic oligonucleotide
catactcaggttcctcatagttaggacaact

SEQ ID NO: 319695 - DNA, 30 bp, Artificial Sequence
  Synthetic oligonucleotide
caggccggtgaatttgtatcccctacaact

SEQ ID NO: 319696 - DNA, 30 bp, Artificial Sequence
  Synthetic oligonucleotide
caaaccgcagcgggagtaacagcaccaact

SEQ ID NO: 319697 - DNA, 30 bp, Artificial Sequence
  Synthetic oligonucleotide
tcgggggggagacatagtcaatagccaact

SEQ ID NO: 319698 - DNA, 30 bp, Artificial Sequence
  Synthetic oligonucleotide
agacatgattcacacggggtaattccaact

SEQ ID NO: 319699 - DNA, 30 bp, Artificial Sequence
  Synthetic oligonucleotide
agacatggtggtaagctctgtacagcaact

SEQ ID NO: 319700 - DNA, 30 bp, Artificial Sequence
  Synthetic oligonucleotide
aactgtcctttatcgttcagaccggcaact

SEQ ID NO: 319701 - DNA, 30 bp, Artificial Sequence
  Synthetic oligonucleotide
agctgccgaaccctagttccgcgggcaact

SEQ ID NO: 319702 - DNA, 30 bp, Artificial Sequence
  Synthetic oligonucleotide
gcgtctgtactgctcgccagaatggcaact

SEQ ID NO: 319703 - DNA, 30 bp, Artificial Sequence
  Synthetic oligonucleotide
aaaatgacatcggtagagagggtggcaact

SEQ ID NO: 319704 - DNA, 30 bp, Artificial Sequence
  Synthetic oligonucleotide
tcttcacgtaatgaataaactactgcaact

SEQ ID NO: 319705 - DNA, 30 bp, Artificial Sequence
  Synthetic oligonucleotide
ggtaagacccataagattatgatatcaact

SEQ ID NO: 319706 - DNA, 31 bp, Artificial Sequence
  Synthetic oligonucleotide
ccgcgggcgagaaattggctacacgtcaact

SEQ ID NO: 319707 - DNA, 30 bp, Artificial Sequence
  Synthetic oligonucleotide
tatgtacacggaaaatcggtcccgtcaact

SEQ ID NO: 319708 - DNA, 30 bp, Artificial Sequence
  Synthetic oligonucleotide
aggtttatgacccctgcgcctccgtcaact

SEQ ID NO: 319709 - DNA, 30 bp, Artificial Sequence
  Synthetic oligonucleotide
gaaccgggcggggcctgttggggttcaact

SEQ ID NO: 319710 - DNA, 30 bp, Artificial Sequence
  Synthetic oligonucleotide
tgccggtgcagtacagactccatttcaact

SEQ ID NO: 319711 - DNA, 30 bp, Artificial Sequence
  Synthetic oligonucleotide
ggggtttgaggtcaacaagaggtttcaact

SEQ ID NO: 319712 - DNA, 30 bp, Artificial Sequence
  Synthetic oligonucleotide
aagcgttacgaagcaattttagaaagaact

SEQ ID NO: 319713 - DNA, 30 bp, Artificial Sequence
  Synthetic oligonucleotide
caggggtagtttagtccagccagaagaact

SEQ ID NO: 319714 - DNA, 30 bp, Artificial Sequence
  Synthetic oligonucleotide
aaaattgactggaaaatttcccgaagaact

SEQ ID NO: 319715 - DNA, 30 bp, Artificial Sequence
  Synthetic oligonucleotide
cgtggactcttccgggcgttaggaagaact

SEQ ID NO: 319716 - DNA, 30 bp, Artificial Sequence
  Synthetic oligonucleotide
cgggctgctcaagcttgtataagcagaact

SEQ ID NO: 319717 - DNA, 30 bp, Artificial Sequence
  Synthetic oligonucleotide
tccgggtcagcgccaagaggtgtcagaact

SEQ ID NO: 319718 - DNA, 30 bp, Artificial Sequence
  Synthetic oligonucleotide
gtacagcgaacgtcagcttttgcgagaact

SEQ ID NO: 319719 - DNA, 30 bp, Artificial Sequence
  Synthetic oligonucleotide
aggcgttgccagcagcagaatcatagaact

SEQ ID NO: 319720 - DNA, 30 bp, Artificial Sequence
  Synthetic oligonucleotide
tcccaatatggatctgagatccgtagaact

SEQ ID NO: 319721 - DNA, 30 bp, Artificial Sequence
  Synthetic oligonucleotide
ctaacttatgaatcgcaaacatcacgaact

SEQ ID NO: 319722 - DNA, 30 bp, Artificial Sequence
  Synthetic oligonucleotide
aacggtgagtctacaggaggcctacgaact

SEQ ID NO: 319723 - DNA, 30 bp, Artificial Sequence
  Synthetic oligonucleotide
ggcctatgcttgcgtcacggggtacgaact

SEQ ID NO: 319724 - DNA, 30 bp, Artificial Sequence
  Synthetic oligonucleotide
atatcaattcgaggttccagcgaccgaact

SEQ ID NO: 319725 - DNA, 30 bp, Artificial Sequence
  Synthetic oligonucleotide
cattaggtgtttttgaattaccatcgaact

SEQ ID NO: 319726 - DNA, 30 bp, Artificial Sequence
  Synthetic oligonucleotide
cgcggtacgactactggatcctctcgaact

SEQ ID NO: 319727 - DNA, 30 bp, Artificial Sequence
  Synthetic oligonucleotide
atacgacatatcgcgttgaggagaggaact

SEQ ID NO: 319728 - DNA, 30 bp, Artificial Sequence
  Synthetic oligonucleotide
ccacctacggcaccagccggtagaggaact

SEQ ID NO: 319729 - DNA, 30 bp, Artificial Sequence
  Synthetic oligonucleotide
aaagaccgtataaccacgtacttaggaact

SEQ ID NO: 319730 - DNA, 30 bp, Artificial Sequence
  Synthetic oligonucleotide
atatgggaataagggttgagatccggaact

SEQ ID NO: 319731 - DNA, 30 bp, Artificial Sequence
  Synthetic oligonucleotide
aatgtgtccacgtcctaggattgcggaact

SEQ ID NO: 319732 - DNA, 30 bp, Artificial Sequence
  Synthetic oligonucleotide
gagtcagtactacgacggcatatcggaact

SEQ ID NO: 319733 - DNA, 30 bp, Artificial Sequence
  Synthetic oligonucleotide
gaatagtcgtagcctggcggaatgggaact

SEQ ID NO: 319734 - DNA, 30 bp, Artificial Sequence
  Synthetic oligonucleotide
tcgtcatgagcccgcgactgcgatggaact

SEQ ID NO: 319735 - DNA, 30 bp, Artificial Sequence
  Synthetic oligonucleotide
ggtttccaaaaataggcaaaacctggaact

SEQ ID NO: 319736 - DNA, 30 bp, Artificial Sequence
  Synthetic oligonucleotide
aggttaacgtcagagcggaacgctggaact

SEQ ID NO: 319737 - DNA, 30 bp, Artificial Sequence
  Synthetic oligonucleotide
gaattgagctcgtggcaggccggtggaact

SEQ ID NO: 319738 - DNA, 30 bp, Artificial Sequence
  Synthetic oligonucleotide
caacttaatagtgaagagttattatgaact

SEQ ID NO: 319739 - DNA, 30 bp, Artificial Sequence
  Synthetic oligonucleotide
ttggagtataattatcgggcggattgaact

SEQ ID NO: 319740 - DNA, 30 bp, Artificial Sequence
  Synthetic oligonucleotide
taatatcctaatttttacgtctattgaact

SEQ ID NO: 319741 - DNA, 30 bp, Artificial Sequence
  Synthetic oligonucleotide
tacctccatgcaatcgagccagtttgaact

SEQ ID NO: 319742 - DNA, 30 bp, Artificial Sequence
  Synthetic oligonucleotide
gcgatcagagtgctccttatcaaaataact

SEQ ID NO: 319743 - DNA, 31 bp, Artificial Sequence
  Synthetic oligonucleotide
gttataatgcgtaatcaaaattcggataact

SEQ ID NO: 319744 - DNA, 30 bp, Artificial Sequence
  Synthetic oligonucleotide
tcggtcgggatgtgccaaaatatgataact

SEQ ID NO: 319745 - DNA, 30 bp, Artificial Sequence
  Synthetic oligonucleotide
ctgtcgtgctgttgcactccctctataact

SEQ ID NO: 319746 - DNA, 30 bp, Artificial Sequence
  Synthetic oligonucleotide
gcagtgtagagcgaaaggccgggactaact

SEQ ID NO: 319747 - DNA, 30 bp, Artificial Sequence
  Synthetic oligonucleotide
acgtcccaatgggagatcctttgactaact

SEQ ID NO: 319748 - DNA, 30 bp, Artificial Sequence
  Synthetic oligonucleotide
ctactttgatttctgaattaaggcctaact

SEQ ID NO: 319749 - DNA, 30 bp, Artificial Sequence
  Synthetic oligonucleotide
gatgcaccactggcacctctcaagctaact

SEQ ID NO: 319750 - DNA, 30 bp, Artificial Sequence
  Synthetic oligonucleotide
caattatattctatagggaagtagctaact

SEQ ID NO: 319751 - DNA, 30 bp, Artificial Sequence
  Synthetic oligonucleotide
ctattgacgtaagatgacaacccgctaact

SEQ ID NO: 319752 - DNA, 30 bp, Artificial Sequence
  Synthetic oligonucleotide
gttacttcttaccgtccagtagtgctaact

SEQ ID NO: 319753 - DNA, 30 bp, Artificial Sequence
  Synthetic oligonucleotide
ctaagtaaagttacggcccaattgctaact

SEQ ID NO: 319754 - DNA, 30 bp, Artificial Sequence
  Synthetic oligonucleotide
atcaatgtcagaccgaataggtatctaact

SEQ ID NO: 319755 - DNA, 30 bp, Artificial Sequence
  Synthetic oligonucleotide
gcggctcaccgcgacatggtcattctaact

SEQ ID NO: 319756 - DNA, 30 bp, Artificial Sequence
  Synthetic oligonucleotide
gttcaaaccgtaatcaagatctacgtaact

SEQ ID NO: 319757 - DNA, 30 bp, Artificial Sequence
  Synthetic oligonucleotide
aggacgagccgtttgcggtacatcgtaact

SEQ ID NO: 319758 - DNA, 30 bp, Artificial Sequence
  Synthetic oligonucleotide
gcatctgatgcgttcttacccgcattaact

SEQ ID NO: 319759 - DNA, 30 bp, Artificial Sequence
  Synthetic oligonucleotide
gaagtcagcacaaactgaagagtattaact

SEQ ID NO: 319760 - DNA, 30 bp, Artificial Sequence
  Synthetic oligonucleotide
tcggaagtcacagtgttatcggtattaact

SEQ ID NO: 319761 - DNA, 30 bp, Artificial Sequence
  Synthetic oligonucleotide
ggtcaacgatgtcacgcgtttgtcttaact

SEQ ID NO: 319762 - DNA, 30 bp, Artificial Sequence
  Synthetic oligonucleotide
aaagacgcttatcccgcaaaattcttaact

SEQ ID NO: 319763 - DNA, 30 bp, Artificial Sequence
  Synthetic oligonucleotide
caagctttgctcacgatacgccagttaact

SEQ ID NO: 319764 - DNA, 30 bp, Artificial Sequence
  Synthetic oligonucleotide
tctacgagtgaacaggcaagacgaaacact

SEQ ID NO: 319765 - DNA, 30 bp, Artificial Sequence
  Synthetic oligonucleotide
gataagtgtttggaacgtcatcgaaacact

SEQ ID NO: 319766 - DNA, 30 bp, Artificial Sequence
  Synthetic oligonucleotide
cagagcagtgggctctagacgccccacact

SEQ ID NO: 319767 - DNA, 30 bp, Artificial Sequence
  Synthetic oligonucleotide
tatgcccagacggcttagtcgtcccacact

SEQ ID NO: 319768 - DNA, 30 bp, Artificial Sequence
  Synthetic oligonucleotide
gcgacacaaaactctattatctgccacact

SEQ ID NO: 319769 - DNA, 30 bp, Artificial Sequence
  Synthetic oligonucleotide
ggagcgggcggaggcacagtaatccacact

SEQ ID NO: 319770 - DNA, 30 bp, Artificial Sequence
  Synthetic oligonucleotide
ctatggtataaagtttaacgctctcacact

SEQ ID NO: 319771 - DNA, 30 bp, Artificial Sequence
  Synthetic oligonucleotide
ttacggaaattaacgtccgattttcacact

SEQ ID NO: 319772 - DNA, 30 bp, Artificial Sequence
  Synthetic oligonucleotide
tttgttaaagtttgggtggatccagacact

SEQ ID NO: 319773 - DNA, 30 bp, Artificial Sequence
  Synthetic oligonucleotide
atgaagaatatgggttcaccattagacact

SEQ ID NO: 319774 - DNA, 30 bp, Artificial Sequence
  Synthetic oligonucleotide
ggagtcactgggcagcctgatattgacact

SEQ ID NO: 319775 - DNA, 30 bp, Artificial Sequence
  Synthetic oligonucleotide
caattatggtgttaaatacgatgatacact

SEQ ID NO: 319776 - DNA, 30 bp, Artificial Sequence
  Synthetic oligonucleotide
aatgaagcgcgaaactatacgcggtacact

SEQ ID NO: 319777 - DNA, 30 bp, Artificial Sequence
  Synthetic oligonucleotide
attcaccattcgtgcgcctaggcttacact

SEQ ID NO: 319778 - DNA, 30 bp, Artificial Sequence
  Synthetic oligonucleotide
atcggtcagaagcccgctggttacaccact

SEQ ID NO: 319779 - DNA, 30 bp, Artificial Sequence
  Synthetic oligonucleotide
taagttcgcgtaggtaccgttatgaccact

SEQ ID NO: 319780 - DNA, 30 bp, Artificial Sequence
  Synthetic oligonucleotide
cctagttacaccactcccctaagtaccact

SEQ ID NO: 319781 - DNA, 30 bp, Artificial Sequence
  Synthetic oligonucleotide
ggtgttgggggaaggtgactaacacccact

SEQ ID NO: 319782 - DNA, 30 bp, Artificial Sequence
  Synthetic oligonucleotide
gaatgtaagctcaatcctgggatccccact

SEQ ID NO: 319783 - DNA, 30 bp, Artificial Sequence
  Synthetic oligonucleotide
gggtgaaatcccttaggcggtactcccact

SEQ ID NO: 319784 - DNA, 30 bp, Artificial Sequence
  Synthetic oligonucleotide
aagagcttcacgagcgtgcgagttcccact

SEQ ID NO: 319785 - DNA, 30 bp, Artificial Sequence
  Synthetic oligonucleotide
ggttatcggtactaagggaatagagccact

SEQ ID NO: 319786 - DNA, 30 bp, Artificial Sequence
  Synthetic oligonucleotide
gattatgacagtttggtctgtttggccact

SEQ ID NO: 319787 - DNA, 30 bp, Artificial Sequence
  Synthetic oligonucleotide
ctggtccttacattagaccaagatgccact

SEQ ID NO: 319788 - DNA, 30 bp, Artificial Sequence
  Synthetic oligonucleotide
tagttgcgcagatcaatttgagatgccact

SEQ ID NO: 319789 - DNA, 30 bp, Artificial Sequence
  Synthetic oligonucleotide
gctgggagccatttagagtctcgctccact

SEQ ID NO: 319790 - DNA, 30 bp, Artificial Sequence
  Synthetic oligonucleotide
aaagcgaatgcatcacgcatacagtccact

SEQ ID NO: 319791 - DNA, 30 bp, Artificial Sequence
  Synthetic oligonucleotide
cgcaggtgtgctcaccataacttttccact

SEQ ID NO: 319792 - DNA, 30 bp, Artificial Sequence
  Synthetic oligonucleotide
ccccattcacatgccaacgagggaagcact

SEQ ID NO: 319793 - DNA, 30 bp, Artificial Sequence
  Synthetic oligonucleotide
gcagagggctactcgtgccgtataagcact

SEQ ID NO: 319794 - DNA, 30 bp, Artificial Sequence
  Synthetic oligonucleotide
gtaacttaaccacggagtaggtccagcact

SEQ ID NO: 319795 - DNA, 30 bp, Artificial Sequence
  Synthetic oligonucleotide
tcccacatttctcggtcaggtgctagcact

SEQ ID NO: 319796 - DNA, 30 bp, Artificial Sequence
  Synthetic oligonucleotide
gctcgaatttgcttccagctgtctagcact

SEQ ID NO: 319797 - DNA, 30 bp, Artificial Sequence
  Synthetic oligonucleotide
tggaaaacaagcaggagtgcttgtagcact

SEQ ID NO: 319798 - DNA, 30 bp, Artificial Sequence
  Synthetic oligonucleotide
ttgtcaaaatagactctctgtcaacgcact

SEQ ID NO: 319799 - DNA, 30 bp, Artificial Sequence
  Synthetic oligonucleotide
tgacctataaaccgggccaaattccgcact

SEQ ID NO: 319800 - DNA, 30 bp, Artificial Sequence
  Synthetic oligonucleotide
ccaagcgagccaggggagtgatcgcgcact

SEQ ID NO: 319801 - DNA, 30 bp, Artificial Sequence
  Synthetic oligonucleotide
tccgaatcagcgatgctcaccgatcgcact

SEQ ID NO: 319802 - DNA, 30 bp, Artificial Sequence
  Synthetic oligonucleotide
cgtcgggtttggtcctgtatctatcgcact

SEQ ID NO: 319803 - DNA, 30 bp, Artificial Sequence
  Synthetic oligonucleotide
aagcagtactagagttctctaattcgcact

SEQ ID NO: 319804 - DNA, 30 bp, Artificial Sequence
  Synthetic oligonucleotide
gtagggcgataaagtagatcttttcgcact

SEQ ID NO: 319805 - DNA, 30 bp, Artificial Sequence
  Synthetic oligonucleotide
tttggggcagcttggatgaagaagggcact

SEQ ID NO: 319806 - DNA, 30 bp, Artificial Sequence
  Synthetic oligonucleotide
gtccaaaacgtatacggtgtcgcgggcact

SEQ ID NO: 319807 - DNA, 30 bp, Artificial Sequence
  Synthetic oligonucleotide
tcattattgaacggatcccggaatggcact

SEQ ID NO: 319808 - DNA, 30 bp, Artificial Sequence
  Synthetic oligonucleotide
cgataatcttttatgaccttcgcatgcact

SEQ ID NO: 319809 - DNA, 30 bp, Artificial Sequence
  Synthetic oligonucleotide
tataaggggtctgaggcaagtcgatgcact

SEQ ID NO: 319810 - DNA, 30 bp, Artificial Sequence
  Synthetic oligonucleotide
aacgatgcactttggttctgatcgtgcact

SEQ ID NO: 319811 - DNA, 30 bp, Artificial Sequence
  Synthetic oligonucleotide
aattcgagctcgatttctaaactgtgcact

SEQ ID NO: 319812 - DNA, 30 bp, Artificial Sequence
  Synthetic oligonucleotide
aaagtgtacgtatagttacggctgtgcact

SEQ ID NO: 319813 - DNA, 30 bp, Artificial Sequence
  Synthetic oligonucleotide
aatgaggtccggcagaagccttattgcact

SEQ ID NO: 319814 - DNA, 30 bp, Artificial Sequence
  Synthetic oligonucleotide
ttcggtctctccagttcgggtgaaatcact

SEQ ID NO: 319815 - DNA, 30 bp, Artificial Sequence
  Synthetic oligonucleotide
gccgattagcatcccgaattctaaatcact

SEQ ID NO: 319816 - DNA, 30 bp, Artificial Sequence
  Synthetic oligonucleotide
ggaggctcgccataggctcgtgcaatcact

SEQ ID NO: 319817 - DNA, 30 bp, Artificial Sequence
  Synthetic oligonucleotide
acaggggccgtgccacacaatagaatcact

SEQ ID NO: 319818 - DNA, 30 bp, Artificial Sequence
  Synthetic oligonucleotide
attaagcatcagaaggaaactcgaatcact

SEQ ID NO: 319819 - DNA, 30 bp, Artificial Sequence
  Synthetic oligonucleotide
gttctaagacttcaaccgtaagtaatcact

SEQ ID NO: 319820 - DNA, 30 bp, Artificial Sequence
  Synthetic oligonucleotide
cgacagaattttcgatgatagtcgatcact

SEQ ID NO: 319821 - DNA, 30 bp, Artificial Sequence
  Synthetic oligonucleotide
gagtcccgatgagtgcgagatatgatcact

SEQ ID NO: 319822 - DNA, 30 bp, Artificial Sequence
  Synthetic oligonucleotide
tccgccttatagattcactactttatcact

SEQ ID NO: 319823 - DNA, 30 bp, Artificial Sequence
  Synthetic oligonucleotide
ccctggcctgacgatgtcgagtttatcact

SEQ ID NO: 319824 - DNA, 30 bp, Artificial Sequence
  Synthetic oligonucleotide
gttactctaaggtgggctcagacgctcact

SEQ ID NO: 319825 - DNA, 30 bp, Artificial Sequence
  Synthetic oligonucleotide
tgtcaatacttataggataaaaggctcact

SEQ ID NO: 319826 - DNA, 30 bp, Artificial Sequence
  Synthetic oligonucleotide
ttaagattccctcgaaaacaacaagtcact

SEQ ID NO: 319827 - DNA, 30 bp, Artificial Sequence
  Synthetic oligonucleotide
agccatttttcaggttgtgatttagtcact

SEQ ID NO: 319828 - DNA, 30 bp, Artificial Sequence
  Synthetic oligonucleotide
agtagcacatgatctgcggataacgtcact

SEQ ID NO: 319829 - DNA, 30 bp, Artificial Sequence
  Synthetic oligonucleotide
ggctatcactaataatcgaattccgtcact

SEQ ID NO: 319830 - DNA, 30 bp, Artificial Sequence
  Synthetic oligonucleotide
aaatgatgacaccccgtggaactcgtcact

SEQ ID NO: 319831 - DNA, 30 bp, Artificial Sequence
  Synthetic oligonucleotide
aagacccgtctacaggaccacttggtcact

SEQ ID NO: 319832 - DNA, 30 bp, Artificial Sequence
  Synthetic oligonucleotide
caaacacaacggcaccgtgctgatgtcact

SEQ ID NO: 319833 - DNA, 30 bp, Artificial Sequence
  Synthetic oligonucleotide
agcaattgtgtggagtgtgtgcttgtcact

SEQ ID NO: 319834 - DNA, 30 bp, Artificial Sequence
  Synthetic oligonucleotide
tcactgagagcatggtgaaactcattcact

SEQ ID NO: 319835 - DNA, 30 bp, Artificial Sequence
  Synthetic oligonucleotide
ggttgcgggtgttacaatccaatgttcact

SEQ ID NO: 319836 - DNA, 30 bp, Artificial Sequence
  Synthetic oligonucleotide
ccggggaattcttggtccaggatgttcact

SEQ ID NO: 319837 - DNA, 30 bp, Artificial Sequence
  Synthetic oligonucleotide
tctcagttatctttgtaacctcatttcact

SEQ ID NO: 319838 - DNA, 30 bp, Artificial Sequence
  Synthetic oligonucleotide
agaggctatctgtcacgggcgccgaagact

SEQ ID NO: 319839 - DNA, 30 bp, Artificial Sequence
  Synthetic oligonucleotide
gagttatgagaactatctatctcgaagact

SEQ ID NO: 319840 - DNA, 30 bp, Artificial Sequence
  Synthetic oligonucleotide
gtgcctcgattgaatgcggtaaggaagact

SEQ ID NO: 319841 - DNA, 30 bp, Artificial Sequence
  Synthetic oligonucleotide
aaggttctggggcagggccctctgaagact

SEQ ID NO: 319842 - DNA, 30 bp, Artificial Sequence
  Synthetic oligonucleotide
ttcaactagactctgacacccgttaagact

SEQ ID NO: 319843 - DNA, 30 bp, Artificial Sequence
  Synthetic oligonucleotide
atgcgaaccttattgggtgagcaccagact

SEQ ID NO: 319844 - DNA, 30 bp, Artificial Sequence
  Synthetic oligonucleotide
ggaagcagaacgagaaggtttcaccagact

SEQ ID NO: 319845 - DNA, 30 bp, Artificial Sequence
  Synthetic oligonucleotide
tcggcacatcttttaccacagctgcagact

SEQ ID NO: 319846 - DNA, 30 bp, Artificial Sequence
  Synthetic oligonucleotide
acgtggcgttagaagtcggtggttcagact

SEQ ID NO: 319847 - DNA, 30 bp, Artificial Sequence
  Synthetic oligonucleotide
ggagatttcaacatcttgcaacaggagact

SEQ ID NO: 319848 - DNA, 30 bp, Artificial Sequence
  Synthetic oligonucleotide
tacgataaggcgcggtcctgggatgagact

SEQ ID NO: 319849 - DNA, 30 bp, Artificial Sequence
  Synthetic oligonucleotide
gcgtcatgtcaatattatgaaattgagact

SEQ ID NO: 319850 - DNA, 30 bp, Artificial Sequence
  Synthetic oligonucleotide
aagactattatttgggcaactattgagact

SEQ ID NO: 319851 - DNA, 30 bp, Artificial Sequence
  Synthetic oligonucleotide
acataacttgcgtaaaacgtagaatagact

SEQ ID NO: 319852 - DNA, 30 bp, Artificial Sequence
  Synthetic oligonucleotide
cctgcctgaggttaaggcagaatatagact

SEQ ID NO: 319853 - DNA, 30 bp, Artificial Sequence
  Synthetic oligonucleotide
ggtgagctcctccaacagtatcactagact

SEQ ID NO: 319854 - DNA, 30 bp, Artificial Sequence
  Synthetic oligonucleotide
tgaacggaacgttgccgcaagctaacgact

SEQ ID NO: 319855 - DNA, 30 bp, Artificial Sequence
  Synthetic oligonucleotide
ccttgcccccagggggaaagagtaacgact

SEQ ID NO: 319856 - DNA, 30 bp, Artificial Sequence
  Synthetic oligonucleotide
aatctggcacgggccacaacggggacgact

SEQ ID NO: 319857 - DNA, 30 bp, Artificial Sequence
  Synthetic oligonucleotide
gtctttacgcccccccagatgcttacgact

SEQ ID NO: 319858 - DNA, 30 bp, Artificial Sequence
  Synthetic oligonucleotide
ttccgcaatatgcttttgacagttacgact

SEQ ID NO: 319859 - DNA, 30 bp, Artificial Sequence
  Synthetic oligonucleotide
actcctcatctgagttacctgccaccgact

SEQ ID NO: 319860 - DNA, 30 bp, Artificial Sequence
  Synthetic oligonucleotide
tgccaaggactcgcaacctcgcgaccgact

SEQ ID NO: 319861 - DNA, 30 bp, Artificial Sequence
  Synthetic oligonucleotide
atttagcccgaagtgcgcaggcacccgact

SEQ ID NO: 319862 - DNA, 30 bp, Artificial Sequence
  Synthetic oligonucleotide
gctctttggataacgtaggtactgccgact

SEQ ID NO: 319863 - DNA, 30 bp, Artificial Sequence
  Synthetic oligonucleotide
gcggtctctcgtagcggttatgatccgact

SEQ ID NO: 319864 - DNA, 30 bp, Artificial Sequence
  Synthetic oligonucleotide
acgcgaatctaatatacctaaacagcgact

SEQ ID NO: 319865 - DNA, 30 bp, Artificial Sequence
  Synthetic oligonucleotide
aagtgtgcccgagagcagttcacggcgact

SEQ ID NO: 319866 - DNA, 30 bp, Artificial Sequence
  Synthetic oligonucleotide
agtcaaaaacctatcggaagaatggcgact

SEQ ID NO: 319867 - DNA, 30 bp, Artificial Sequence
  Synthetic oligonucleotide
atcgaagtccgggtggcggcgatggcgact

SEQ ID NO: 319868 - DNA, 30 bp, Artificial Sequence
  Synthetic oligonucleotide
acctccttagagcctggatacgatgcgact

SEQ ID NO: 319869 - DNA, 30 bp, Artificial Sequence
  Synthetic oligonucleotide
ggtttcagtcctggcctaagggatgcgact

SEQ ID NO: 319870 - DNA, 30 bp, Artificial Sequence
  Synthetic oligonucleotide
caattggaagcctaaaggatatctgcgact

SEQ ID NO: 319871 - DNA, 30 bp, Artificial Sequence
  Synthetic oligonucleotide
ggtttctggggattataggcggactcgact

SEQ ID NO: 319872 - DNA, 30 bp, Artificial Sequence
  Synthetic oligonucleotide
tagttgaaactgtcaatccagggctcgact

SEQ ID NO: 319873 - DNA, 30 bp, Artificial Sequence
  Synthetic oligonucleotide
caactgattaaggccgtctaaatctcgact

SEQ ID NO: 319874 - DNA, 30 bp, Artificial Sequence
  Synthetic oligonucleotide
tctgcaccttcggggggggtccagtcgact

SEQ ID NO: 319875 - DNA, 30 bp, Artificial Sequence
  Synthetic oligonucleotide
gttcccagaacaccatgtaaattgtcgact

SEQ ID NO: 319876 - DNA, 30 bp, Artificial Sequence
  Synthetic oligonucleotide
ttggtagggagtttagactgcgtttcgact

SEQ ID NO: 319877 - DNA, 30 bp, Artificial Sequence
  Synthetic oligonucleotide
gttaaaggcttatgtaatatggcaaggact

SEQ ID NO: 319878 - DNA, 30 bp, Artificial Sequence
  Synthetic oligonucleotide
cttgttaagtcaagtaaatgatcaaggact

SEQ ID NO: 319879 - DNA, 30 bp, Artificial Sequence
  Synthetic oligonucleotide
taggttgtaatggtttttgtgagaaggact

SEQ ID NO: 319880 - DNA, 30 bp, Artificial Sequence
  Synthetic oligonucleotide
agactatttgtctgacagcgtagaaggact

SEQ ID NO: 319881 - DNA, 30 bp, Artificial Sequence
  Synthetic oligonucleotide
gtcgtgcacaagagctctcaagccaggact

SEQ ID NO: 319882 - DNA, 30 bp, Artificial Sequence
  Synthetic oligonucleotide
tgtaggagatacccagtgccggtgaggact

SEQ ID NO: 319883 - DNA, 30 bp, Artificial Sequence
  Synthetic oligonucleotide
ttttgagtatatattgatatcaataggact

SEQ ID NO: 319884 - DNA, 30 bp, Artificial Sequence
  Synthetic oligonucleotide
tattgcgaggggggattctggtctaggact

SEQ ID NO: 319885 - DNA, 30 bp, Artificial Sequence
  Synthetic oligonucleotide
tacgccacattctacaaactaagacggact

SEQ ID NO: 319886 - DNA, 30 bp, Artificial Sequence
  Synthetic oligonucleotide
ctcagggaacaggtgttagatgtacggact

SEQ ID NO: 319887 - DNA, 30 bp, Artificial Sequence
  Synthetic oligonucleotide
tagatggcgtcacgttggagggcccggact

SEQ ID NO: 319888 - DNA, 30 bp, Artificial Sequence
  Synthetic oligonucleotide
ttagcattagacccacctggaaatcggact

SEQ ID NO: 319889 - DNA, 30 bp, Artificial Sequence
  Synthetic oligonucleotide
ttgcaaatcagggtatactctactcggact

SEQ ID NO: 319890 - DNA, 30 bp, Artificial Sequence
  Synthetic oligonucleotide
atggttgtccgatccgaagcatctcggact

SEQ ID NO: 319891 - DNA, 30 bp, Artificial Sequence
  Synthetic oligonucleotide
tgagacgaccacatagaagtttctcggact

SEQ ID NO: 319892 - DNA, 30 bp, Artificial Sequence
  Synthetic oligonucleotide
tttttgtgaaaatagtgcgaagaagggact

SEQ ID NO: 319893 - DNA, 30 bp, Artificial Sequence
  Synthetic oligonucleotide
gatcagtttgcgtgaccttcactagggact

SEQ ID NO: 319894 - DNA, 30 bp, Artificial Sequence
  Synthetic oligonucleotide
gatctacatggatatctcaataacgggact

SEQ ID NO: 319895 - DNA, 30 bp, Artificial Sequence
  Synthetic oligonucleotide
tatcgagcttgcatcggatggcacgggact

SEQ ID NO: 319896 - DNA, 30 bp, Artificial Sequence
  Synthetic oligonucleotide
gggcacctagattttacagtggccgggact

SEQ ID NO: 319897 - DNA, 30 bp, Artificial Sequence
  Synthetic oligonucleotide
acccgggtccttgtgcgttgaggcgggact

SEQ ID NO: 319898 - DNA, 30 bp, Artificial Sequence
  Synthetic oligonucleotide
gacaagattatccgacgtttgaaggggact

SEQ ID NO: 319899 - DNA, 30 bp, Artificial Sequence
  Synthetic oligonucleotide
atccatgacgattccaagcagactgggact

SEQ ID NO: 319900 - DNA, 30 bp, Artificial Sequence
  Synthetic oligonucleotide
catgccaggaaaagccaaaatcgtgggact

SEQ ID NO: 319901 - DNA, 30 bp, Artificial Sequence
  Synthetic oligonucleotide
gctcatcatgaaatcgataaaaaatggact

SEQ ID NO: 319902 - DNA, 30 bp, Artificial Sequence
  Synthetic oligonucleotide
tctcaccaatgtgttgcagcctcctggact

SEQ ID NO: 319903 - DNA, 30 bp, Artificial Sequence
  Synthetic oligonucleotide
tggcgtgtacccatagaactgggctggact

SEQ ID NO: 319904 - DNA, 30 bp, Artificial Sequence
  Synthetic oligonucleotide
ctgggagactcgggttgccttgagtggact

SEQ ID NO: 319905 - DNA, 31 bp, Artificial Sequence
  Synthetic oligonucleotide
gccatgctgcatcagcccgtaaacgtggact

SEQ ID NO: 319906 - DNA, 30 bp, Artificial Sequence
  Synthetic oligonucleotide
cctgcaacgaaaatggcaacgccgtggact

SEQ ID NO: 319907 - DNA, 29 bp, Artificial Sequence
  Synthetic oligonucleotide
ggttcagtaatattagcgccacttggact

SEQ ID NO: 319908 - DNA, 30 bp, Artificial Sequence
  Synthetic oligonucleotide
ggtcgcgcatgcacacccttataaatgact

SEQ ID NO: 319909 - DNA, 30 bp, Artificial Sequence
  Synthetic oligonucleotide
attgttcatagaagaggatccgtgatgact

SEQ ID NO: 319910 - DNA, 30 bp, Artificial Sequence
  Synthetic oligonucleotide
gaagaagggatacgttagtagggtatgact

SEQ ID NO: 319911 - DNA, 30 bp, Artificial Sequence
  Synthetic oligonucleotide
aaccgccaccatatcagaagcagactgact

SEQ ID NO: 319912 - DNA, 30 bp, Artificial Sequence
  Synthetic oligonucleotide
aaatgtagtgaaatgattgaatccctgact

SEQ ID NO: 319913 - DNA, 30 bp, Artificial Sequence
  Synthetic oligonucleotide
ccaacaggccgccacgcgcgcacgctgact

SEQ ID NO: 319914 - DNA, 30 bp, Artificial Sequence
  Synthetic oligonucleotide
cctcgatagactgaccgacactggctgact

SEQ ID NO: 319915 - DNA, 30 bp, Artificial Sequence
  Synthetic oligonucleotide
cacggtccacacgcaccggggtggctgact

SEQ ID NO: 319916 - DNA, 30 bp, Artificial Sequence
  Synthetic oligonucleotide
tccggaaagctgaagggtcgccctctgact

SEQ ID NO: 319917 - DNA, 30 bp, Artificial Sequence
  Synthetic oligonucleotide
ccattttgtgaccagctcatggctctgact

SEQ ID NO: 319918 - DNA, 30 bp, Artificial Sequence
  Synthetic oligonucleotide
ttagttagtcttattgggggccgtctgact

SEQ ID NO: 319919 - DNA, 30 bp, Artificial Sequence
  Synthetic oligonucleotide
gtggtagtccggttggaaacggcagtgact

SEQ ID NO: 319920 - DNA, 30 bp, Artificial Sequence
  Synthetic oligonucleotide
ggtaaccgagagagttatgggtaggtgact

SEQ ID NO: 319921 - DNA, 30 bp, Artificial Sequence
  Synthetic oligonucleotide
gcgacgtgcgatcgaagagttctggtgact

SEQ ID NO: 319922 - DNA, 30 bp, Artificial Sequence
  Synthetic oligonucleotide
gtagtcatcgctaaagcacgagatgtgact

SEQ ID NO: 319923 - DNA, 30 bp, Artificial Sequence
  Synthetic oligonucleotide
gaaaaggcacccggttttcgtattgtgact

SEQ ID NO: 319924 - DNA, 30 bp, Artificial Sequence
  Synthetic oligonucleotide
cccagctccgaggttataaccccattgact

SEQ ID NO: 319925 - DNA, 30 bp, Artificial Sequence
  Synthetic oligonucleotide
gtgagccgcaggcgggttcaagcattgact

SEQ ID NO: 319926 - DNA, 30 bp, Artificial Sequence
  Synthetic oligonucleotide
ctttcatcgaaccccaattagctattgact

SEQ ID NO: 319927 - DNA, 30 bp, Artificial Sequence
  Synthetic oligonucleotide
tgtactgtgagtaagaagaaatacttgact

SEQ ID NO: 319928 - DNA, 30 bp, Artificial Sequence
  Synthetic oligonucleotide
ccaattaacatttttcagtaagcgttgact

SEQ ID NO: 319929 - DNA, 30 bp, Artificial Sequence
  Synthetic oligonucleotide
atgaacgttagggtgccagattttttgact

SEQ ID NO: 319930 - DNA, 30 bp, Artificial Sequence
  Synthetic oligonucleotide
ggaaaacagatagttaagctaaaaaatact

SEQ ID NO: 319931 - DNA, 30 bp, Artificial Sequence
  Synthetic oligonucleotide
gaacgtaccttttttccgggcgacaatact

SEQ ID NO: 319932 - DNA, 30 bp, Artificial Sequence
  Synthetic oligonucleotide
cgtcctatgatttacttaatcgacaatact

SEQ ID NO: 319933 - DNA, 30 bp, Artificial Sequence
  Synthetic oligonucleotide
tgagatctcagttttacggattctaatact

SEQ ID NO: 319934 - DNA, 30 bp, Artificial Sequence
  Synthetic oligonucleotide
tttggaagaatggagcatcatggtaatact

SEQ ID NO: 319935 - DNA, 30 bp, Artificial Sequence
  Synthetic oligonucleotide
tgccgcatctcggatgtgatagttaatact

SEQ ID NO: 319936 - DNA, 30 bp, Artificial Sequence
  Synthetic oligonucleotide
atatgccgccaataagccggaaaacatact

SEQ ID NO: 319937 - DNA, 30 bp, Artificial Sequence
  Synthetic oligonucleotide
atattcagataaatcaagtggccacatact

SEQ ID NO: 319938 - DNA, 30 bp, Artificial Sequence
  Synthetic oligonucleotide
aaggatatgccccggcccacaagacatact

SEQ ID NO: 319939 - DNA, 30 bp, Artificial Sequence
  Synthetic oligonucleotide
aaggttataaaccagctctatcgacatact

SEQ ID NO: 319940 - DNA, 30 bp, Artificial Sequence
  Synthetic oligonucleotide
gcaaatggcgacgaccggcgactacatact

SEQ ID NO: 319941 - DNA, 31 bp, Artificial Sequence
  Synthetic oligonucleotide
ggggtcatggaagctgttaagagatcatact

SEQ ID NO: 319942 - DNA, 30 bp, Artificial Sequence
  Synthetic oligonucleotide
taaggttaattataccgaccacaagatact

SEQ ID NO: 319943 - DNA, 30 bp, Artificial Sequence
  Synthetic oligonucleotide
tgttagcgctatcaaagggtagcagatact

SEQ ID NO: 319944 - DNA, 30 bp, Artificial Sequence
  Synthetic oligonucleotide
cagtttacgacggactgattaagagatact

SEQ ID NO: 319945 - DNA, 30 bp, Artificial Sequence
  Synthetic oligonucleotide
gaaagccgaccgcttgaaggacacgatact

SEQ ID NO: 319946 - DNA, 30 bp, Artificial Sequence
  Synthetic oligonucleotide
gctggccgacggcgtgcatgtacggatact

SEQ ID NO: 319947 - DNA, 30 bp, Artificial Sequence
  Synthetic oligonucleotide
ggaccaaccgtcgttttataatgtgatact

SEQ ID NO: 319948 - DNA, 30 bp, Artificial Sequence
  Synthetic oligonucleotide
aatgggtaaacatttagattgacatatact

SEQ ID NO: 319949 - DNA, 30 bp, Artificial Sequence
  Synthetic oligonucleotide
acgggataacggcactctgtggcatatact

SEQ ID NO: 319950 - DNA, 30 bp, Artificial Sequence
  Synthetic oligonucleotide
cgtttagataactggtctgccggatatact

SEQ ID NO: 319951 - DNA, 30 bp, Artificial Sequence
  Synthetic oligonucleotide
cggtaccacggaagtctagctctatatact

SEQ ID NO: 319952 - DNA, 30 bp, Artificial Sequence
  Synthetic oligonucleotide
cgttatacgctccaatcgcacgtctatact

SEQ ID NO: 319953 - DNA, 30 bp, Artificial Sequence
  Synthetic oligonucleotide
aatgcgaactccttgtaatggacgtatact

SEQ ID NO: 319954 - DNA, 30 bp, Artificial Sequence
  Synthetic oligonucleotide
cgtaagcttagagcgctcttgtcgtatact

SEQ ID NO: 319955 - DNA, 30 bp, Artificial Sequence
  Synthetic oligonucleotide
gtgacacttgcccactcccaaatgtatact

SEQ ID NO: 319956 - DNA, 30 bp, Artificial Sequence
  Synthetic oligonucleotide
ggtacgtttgatttaactacgggttatact

SEQ ID NO: 319957 - DNA, 30 bp, Artificial Sequence
  Synthetic oligonucleotide
cttcatattatccacaactccaaaactact

SEQ ID NO: 319958 - DNA, 30 bp, Artificial Sequence
  Synthetic oligonucleotide
aggcgcttcgagggtgacgggtaaactact

SEQ ID NO: 319959 - DNA, 30 bp, Artificial Sequence
  Synthetic oligonucleotide
tgcgataaaaccacaacggttggaactact

SEQ ID NO: 319960 - DNA, 30 bp, Artificial Sequence
  Synthetic oligonucleotide
caaccatctcgttttaattgggtaactact

SEQ ID NO: 319961 - DNA, 30 bp, Artificial Sequence
  Synthetic oligonucleotide
agataccgctcattgtggagccgcactact

SEQ ID NO: 319962 - DNA, 30 bp, Artificial Sequence
  Synthetic oligonucleotide
tatgatgtttctgcgtccactatcactact

SEQ ID NO: 319963 - DNA, 30 bp, Artificial Sequence
  Synthetic oligonucleotide
tggactcgctgatcattatcgcggactact

SEQ ID NO: 319964 - DNA, 30 bp, Artificial Sequence
  Synthetic oligonucleotide
tgttcatttaataagagtagcggccctact

SEQ ID NO: 319965 - DNA, 30 bp, Artificial Sequence
  Synthetic oligonucleotide
gcggtattaaggtgttacaacttccctact

SEQ ID NO: 319966 - DNA, 30 bp, Artificial Sequence
  Synthetic oligonucleotide
caacctaaggaatgccagtaggggcctact

SEQ ID NO: 319967 - DNA, 30 bp, Artificial Sequence
  Synthetic oligonucleotide
aagtaaccgacagatggtaaagatcctact

SEQ ID NO: 319968 - DNA, 30 bp, Artificial Sequence
  Synthetic oligonucleotide
tggaacaatggtgcccggtgtgttcctact

SEQ ID NO: 319969 - DNA, 30 bp, Artificial Sequence
  Synthetic oligonucleotide
agcgaccaagattagaagtcatttcctact

SEQ ID NO: 319970 - DNA, 30 bp, Artificial Sequence
  Synthetic oligonucleotide
cacttacgagagttcatgggcacagctact

SEQ ID NO: 319971 - DNA, 30 bp, Artificial Sequence
  Synthetic oligonucleotide
atcgcatggcttgttgcgcataccgctact

SEQ ID NO: 319972 - DNA, 30 bp, Artificial Sequence
  Synthetic oligonucleotide
ataattagatgttgactagcgagcgctact

SEQ ID NO: 319973 - DNA, 30 bp, Artificial Sequence
  Synthetic oligonucleotide
gcaataggctttaagtagaaggaggctact

SEQ ID NO: 319974 - DNA, 30 bp, Artificial Sequence
  Synthetic oligonucleotide
gactggttgagagacatagaaagggctact

SEQ ID NO: 319975 - DNA, 30 bp, Artificial Sequence
  Synthetic oligonucleotide
tactacatgtacggggccgggcgctctact

SEQ ID NO: 319976 - DNA, 30 bp, Artificial Sequence
  Synthetic oligonucleotide
tgtcgtcgagtagtacagatgccgtctact

SEQ ID NO: 319977 - DNA, 30 bp, Artificial Sequence
  Synthetic oligonucleotide
tgacataagcgagtgcacctgcgttctact

SEQ ID NO: 319978 - DNA, 30 bp, Artificial Sequence
  Synthetic oligonucleotide
gtatactgactacatcgctagatttctact

SEQ ID NO: 319979 - DNA, 30 bp, Artificial Sequence
  Synthetic oligonucleotide
actttcccggacgaggtatgcgaaagtact

SEQ ID NO: 319980 - DNA, 30 bp, Artificial Sequence
  Synthetic oligonucleotide
ttcggtcaatttagggcccaaagaagtact

SEQ ID NO: 319981 - DNA, 30 bp, Artificial Sequence
  Synthetic oligonucleotide
aacaaggctaacggacttccccgaagtact

SEQ ID NO: 319982 - DNA, 30 bp, Artificial Sequence
  Synthetic oligonucleotide
tagtcacctcacttcaggcgtataagtact

SEQ ID NO: 319983 - DNA, 30 bp, Artificial Sequence
  Synthetic oligonucleotide
ccaagcacgatcgttaagaatagcagtact

SEQ ID NO: 319984 - DNA, 30 bp, Artificial Sequence
  Synthetic oligonucleotide
tcagcaaaccgtcgttgttcaaggagtact

SEQ ID NO: 319985 - DNA, 30 bp, Artificial Sequence
  Synthetic oligonucleotide
acgatagatacagggagtaggcggagtact

SEQ ID NO: 319986 - DNA, 30 bp, Artificial Sequence
  Synthetic oligonucleotide
agtcgggtcgcaggcaccgacgtgagtact

SEQ ID NO: 319987 - DNA, 30 bp, Artificial Sequence
  Synthetic oligonucleotide
atttacctcgagaagcatcagacacgtact

SEQ ID NO: 319988 - DNA, 30 bp, Artificial Sequence
  Synthetic oligonucleotide
acaagtcgtagcacaagtctaggacgtact

SEQ ID NO: 319989 - DNA, 30 bp, Artificial Sequence
  Synthetic oligonucleotide
acccaggacacttgcgagctggcccgtact

SEQ ID NO: 319990 - DNA, 30 bp, Artificial Sequence
  Synthetic oligonucleotide
ttctgcggtccttataagcctttccgtact

SEQ ID NO: 319991 - DNA, 30 bp, Artificial Sequence
  Synthetic oligonucleotide
atccttcgctaaggactgaagccgcgtact

SEQ ID NO: 319992 - DNA, 30 bp, Artificial Sequence
  Synthetic oligonucleotide
aatgtgtggttcgaagactcgaatcgtact

SEQ ID NO: 319993 - DNA, 30 bp, Artificial Sequence
  Synthetic oligonucleotide
catagattaagtatatgatcgattcgtact

SEQ ID NO: 319994 - DNA, 30 bp, Artificial Sequence
  Synthetic oligonucleotide
acgcgtaacctacagtaacataaaggtact

SEQ ID NO: 319995 - DNA, 30 bp, Artificial Sequence
  Synthetic oligonucleotide
atgtcccgacggcagaccagtaaaggtact

SEQ ID NO: 319996 - DNA, 30 bp, Artificial Sequence
  Synthetic oligonucleotide
gaggactaatacttacgtatctaaggtact

SEQ ID NO: 319997 - DNA, 30 bp, Artificial Sequence
  Synthetic oligonucleotide
tggacgggtcagttcgaacgttacggtact

SEQ ID NO: 319998 - DNA, 30 bp, Artificial Sequence
  Synthetic oligonucleotide
tttttgaaggcggaggtgactgccggtact

SEQ ID NO: 319999 - DNA, 30 bp, Artificial Sequence
  Synthetic oligonucleotide
gcgactcaaccattaggattcctcggtact

SEQ ID NO: 320000 - DNA, 30 bp, Artificial Sequence
  Synthetic oligonucleotide
aaccggccgcataccgggaatcaatgtact

SEQ ID NO: 320001 - DNA, 30 bp, Artificial Sequence
  Synthetic oligonucleotide
atcacaacgagatgtgttaactactgtact

SEQ ID NO: 320002 - DNA, 30 bp, Artificial Sequence
  Synthetic oligonucleotide
gctttacctggctcatgttcgtactgtact

SEQ ID NO: 320003 - DNA, 30 bp, Artificial Sequence
  Synthetic oligonucleotide
cttgatgttcgatagcattagcagtgtact

SEQ ID NO: 320004 - DNA, 30 bp, Artificial Sequence
  Synthetic oligonucleotide
tcagtagtacgttgtcgcgattcaattact

SEQ ID NO: 320005 - DNA, 30 bp, Artificial Sequence
  Synthetic oligonucleotide
atagaactgcgtgagcgcatgctaattact

SEQ ID NO: 320006 - DNA, 30 bp, Artificial Sequence
  Synthetic oligonucleotide
taacgtaattgtagaaccaggtcacttact

SEQ ID NO: 320007 - DNA, 30 bp, Artificial Sequence
  Synthetic oligonucleotide
actacggtaaactcagtctatgaccttact

SEQ ID NO: 320008 - DNA, 30 bp, Artificial Sequence
  Synthetic oligonucleotide
actggaccgcagaggcgcccccgccttact

SEQ ID NO: 320009 - DNA, 30 bp, Artificial Sequence
  Synthetic oligonucleotide
cagggagcatcgcatacggtgtagcttact

SEQ ID NO: 320010 - DNA, 30 bp, Artificial Sequence
  Synthetic oligonucleotide
catcgagtggttaggggaagcattcttact

SEQ ID NO: 320011 - DNA, 30 bp, Artificial Sequence
  Synthetic oligonucleotide
tgtcaagaaactgggcaggtcgcagttact

SEQ ID NO: 320012 - DNA, 30 bp, Artificial Sequence
  Synthetic oligonucleotide
cgtgcacccaaccatgaacgggcagttact

SEQ ID NO: 320013 - DNA, 30 bp, Artificial Sequence
  Synthetic oligonucleotide
aacggacgcatgacttgtcaacgcgttact

SEQ ID NO: 320014 - DNA, 30 bp, Artificial Sequence
  Synthetic oligonucleotide
tagtggaaatattgctgctaagtcgttact

SEQ ID NO: 320015 - DNA, 30 bp, Artificial Sequence
  Synthetic oligonucleotide
atggaaaagccgggcttgaacatggttact

SEQ ID NO: 320016 - DNA, 30 bp, Artificial Sequence
  Synthetic oligonucleotide
gggtcctgcttgactagaacaagtgttact

SEQ ID NO: 320017 - DNA, 30 bp, Artificial Sequence
  Synthetic oligonucleotide
cctcataacttcgagatagcaagatttact

SEQ ID NO: 320018 - DNA, 30 bp, Artificial Sequence
  Synthetic oligonucleotide
gtctggcaacaacgttcctttggctttact

SEQ ID NO: 320019 - DNA, 30 bp, Artificial Sequence
  Synthetic oligonucleotide
catttaatactacggtgaacctgctttact

SEQ ID NO: 320020 - DNA, 30 bp, Artificial Sequence
  Synthetic oligonucleotide
ccatttttacctttccgttgatcgtttact

SEQ ID NO: 320021 - DNA, 30 bp, Artificial Sequence
  Synthetic oligonucleotide
tcggattttcggcgtgcgatctattttact

SEQ ID NO: 320022 - DNA, 30 bp, Artificial Sequence
  Synthetic oligonucleotide
ataggcttacgggtattatgtttttttact

SEQ ID NO: 320023 - DNA, 30 bp, Artificial Sequence
  Synthetic oligonucleotide
gtatggtacttggcgtgaaggaaaaaacct

SEQ ID NO: 320024 - DNA, 30 bp, Artificial Sequence
  Synthetic oligonucleotide
caatcgtagggaccttctattctaaaacct

SEQ ID NO: 320025 - DNA, 30 bp, Artificial Sequence
  Synthetic oligonucleotide
acatggccactggatcaatgatacaaacct

SEQ ID NO: 320026 - DNA, 30 bp, Artificial Sequence
  Synthetic oligonucleotide
tgggagggaggggcagtgtaacccaaacct

SEQ ID NO: 320027 - DNA, 30 bp, Artificial Sequence
  Synthetic oligonucleotide
gagacgggccaactgcaacgcgcgaaacct

SEQ ID NO: 320028 - DNA, 30 bp, Artificial Sequence
  Synthetic oligonucleotide
aatcaccggcgttttagcgtccataaacct

SEQ ID NO: 320029 - DNA, 30 bp, Artificial Sequence
  Synthetic oligonucleotide
gttaaggcttctcaacgcaggcataaacct

SEQ ID NO: 320030 - DNA, 30 bp, Artificial Sequence
  Synthetic oligonucleotide
atctttggcaggggagcgtcctctaaacct

SEQ ID NO: 320031 - DNA, 30 bp, Artificial Sequence
  Synthetic oligonucleotide
ctcgaaatgatccgttttgctattaaacct

SEQ ID NO: 320032 - DNA, 30 bp, Artificial Sequence
  Synthetic oligonucleotide
aatcatccggagtagcccgttgaagaacct

SEQ ID NO: 320033 - DNA, 30 bp, Artificial Sequence
  Synthetic oligonucleotide
gtttagcggcccaacctgcctatcgaacct

SEQ ID NO: 320034 - DNA, 30 bp, Artificial Sequence
  Synthetic oligonucleotide
gcctatgcggcatagtgcgcagttgaacct

SEQ ID NO: 320035 - DNA, 30 bp, Artificial Sequence
  Synthetic oligonucleotide
agaattaccgagtttatgccttttgaacct

SEQ ID NO: 320036 - DNA, 30 bp, Artificial Sequence
  Synthetic oligonucleotide
tggacctttatgacataaggagactaacct

SEQ ID NO: 320037 - DNA, 30 bp, Artificial Sequence
  Synthetic oligonucleotide
tactgggacctcgaccactcaagctaacct

SEQ ID NO: 320038 - DNA, 30 bp, Artificial Sequence
  Synthetic oligonucleotide
ggggaggcgctggcagataagagctaacct

SEQ ID NO: 320039 - DNA, 30 bp, Artificial Sequence
  Synthetic oligonucleotide
catggctcagatccgaggaaaacgtaacct

SEQ ID NO: 320040 - DNA, 30 bp, Artificial Sequence
  Synthetic oligonucleotide
ctatgggcttgttgccggaatgcgtaacct

SEQ ID NO: 320041 - DNA, 30 bp, Artificial Sequence
  Synthetic oligonucleotide
taatgaaatcttgtatgtgcactgtaacct

SEQ ID NO: 320042 - DNA, 30 bp, Artificial Sequence
  Synthetic oligonucleotide
tcattcgttctaaactggactcattaacct

SEQ ID NO: 320043 - DNA, 30 bp, Artificial Sequence
  Synthetic oligonucleotide
aatggttccgacctttgggtaccttaacct

SEQ ID NO: 320044 - DNA, 30 bp, Artificial Sequence
  Synthetic oligonucleotide
gtcacattgaataggtgagaaatttaacct

SEQ ID NO: 320045 - DNA, 30 bp, Artificial Sequence
  Synthetic oligonucleotide
tgtctccgaagttaggcgccggcaacacct

SEQ ID NO: 320046 - DNA, 30 bp, Artificial Sequence
  Synthetic oligonucleotide
ccgttaggttaggatcaacagtccacacct

SEQ ID NO: 320047 - DNA, 30 bp, Artificial Sequence
  Synthetic oligonucleotide
gcgtcccacgacgccgccgtcggcacacct

SEQ ID NO: 320048 - DNA, 30 bp, Artificial Sequence
  Synthetic oligonucleotide
tgtgaagtaacgtgtggaggagtcacacct

SEQ ID NO: 320049 - DNA, 30 bp, Artificial Sequence
  Synthetic oligonucleotide
gcagtggcgattataggtagccagacacct

SEQ ID NO: 320050 - DNA, 30 bp, Artificial Sequence
  Synthetic oligonucleotide
taaaagagttagatcttgctagagacacct

SEQ ID NO: 320051 - DNA, 30 bp, Artificial Sequence
  Synthetic oligonucleotide
gaaacacaatgctaaacgctgcggacacct

SEQ ID NO: 320052 - DNA, 30 bp, Artificial Sequence
  Synthetic oligonucleotide
gctgcaggacagggctcgctagggacacct

SEQ ID NO: 320053 - DNA, 30 bp, Artificial Sequence
  Synthetic oligonucleotide
tcatgggtcgttcgtaattcaactacacct

SEQ ID NO: 320054 - DNA, 30 bp, Artificial Sequence
  Synthetic oligonucleotide
cgttgatcttaaactttagtgtacccacct

SEQ ID NO: 320055 - DNA, 30 bp, Artificial Sequence
  Synthetic oligonucleotide
gtcctcccgtagaaataggttacagcacct

SEQ ID NO: 320056 - DNA, 30 bp, Artificial Sequence
  Synthetic oligonucleotide
tacagctgatgagtaaatccggccgcacct

SEQ ID NO: 320057 - DNA, 30 bp, Artificial Sequence
  Synthetic oligonucleotide
aatgcttcccgtcatcgaaacaaggcacct

SEQ ID NO: 320058 - DNA, 30 bp, Artificial Sequence
  Synthetic oligonucleotide
aatccaacaagttgaaacgcggcggcacct

SEQ ID NO: 320059 - DNA, 30 bp, Artificial Sequence
  Synthetic oligonucleotide
ctaggaacgcgacaagggaattgggcacct

SEQ ID NO: 320060 - DNA, 30 bp, Artificial Sequence
  Synthetic oligonucleotide
gctataccccgtctcgggttccttgcacct

SEQ ID NO: 320061 - DNA, 30 bp, Artificial Sequence
  Synthetic oligonucleotide
gtcgacagatactaaattgttcgatcacct

SEQ ID NO: 320062 - DNA, 30 bp, Artificial Sequence
  Synthetic oligonucleotide
tggaatcctctcgcgagaacctgatcacct

SEQ ID NO: 320063 - DNA, 30 bp, Artificial Sequence
  Synthetic oligonucleotide
cgacgttaggatgcttcgagccactcacct

SEQ ID NO: 320064 - DNA, 30 bp, Artificial Sequence
  Synthetic oligonucleotide
tagtctattcggatcatcggtacctcacct

SEQ ID NO: 320065 - DNA, 30 bp, Artificial Sequence
  Synthetic oligonucleotide
tctaggaggtgacaagaaattggctcacct

SEQ ID NO: 320066 - DNA, 30 bp, Artificial Sequence
  Synthetic oligonucleotide
tgccatgattactagtctagcccaagacct

SEQ ID NO: 320067 - DNA, 30 bp, Artificial Sequence
  Synthetic oligonucleotide
acgggtgtcacaccgaatacatacagacct

SEQ ID NO: 320068 - DNA, 30 bp, Artificial Sequence
  Synthetic oligonucleotide
cctcaagttcatggatggcttaccagacct

SEQ ID NO: 320069 - DNA, 30 bp, Artificial Sequence
  Synthetic oligonucleotide
acgcgtggacaggtgacctgtaatagacct

SEQ ID NO: 320070 - DNA, 30 bp, Artificial Sequence
  Synthetic oligonucleotide
agctgttggccgcactccaccgcacgacct

SEQ ID NO: 320071 - DNA, 30 bp, Artificial Sequence
  Synthetic oligonucleotide
ccgtgataaccctgtctggggcgccgacct

SEQ ID NO: 320072 - DNA, 30 bp, Artificial Sequence
  Synthetic oligonucleotide
ggtatttccctactacggaaatcgcgacct

SEQ ID NO: 320073 - DNA, 30 bp, Artificial Sequence
  Synthetic oligonucleotide
cagctctaactaaatcaaggttatcgacct

SEQ ID NO: 320074 - DNA, 30 bp, Artificial Sequence
  Synthetic oligonucleotide
tgtttacggaaatcagaataacaaggacct

SEQ ID NO: 320075 - DNA, 30 bp, Artificial Sequence
  Synthetic oligonucleotide
acgggacgcagtacgtgtatagtaggacct

SEQ ID NO: 320076 - DNA, 30 bp, Artificial Sequence
  Synthetic oligonucleotide
gaagtataaccctcatcatagaagggacct

SEQ ID NO: 320077 - DNA, 30 bp, Artificial Sequence
  Synthetic oligonucleotide
tcctttgaatctgtggaaactagtggacct

SEQ ID NO: 320078 - DNA, 30 bp, Artificial Sequence
  Synthetic oligonucleotide
tgctgagaacccagacggttgtagtgacct

SEQ ID NO: 320079 - DNA, 30 bp, Artificial Sequence
  Synthetic oligonucleotide
gagaccctacggccaggagggcggtgacct

SEQ ID NO: 320080 - DNA, 30 bp, Artificial Sequence
  Synthetic oligonucleotide
aaggctcttggccgacccataggcatacct

SEQ ID NO: 320081 - DNA, 30 bp, Artificial Sequence
  Synthetic oligonucleotide
caagacgttcaagctagccgtggcatacct

SEQ ID NO: 320082 - DNA, 30 bp, Artificial Sequence
  Synthetic oligonucleotide
aaaagcaagtctgacgcgtaaaagatacct

SEQ ID NO: 320083 - DNA, 30 bp, Artificial Sequence
  Synthetic oligonucleotide
tcgggaaccatcttaaccatctgtatacct

SEQ ID NO: 320084 - DNA, 30 bp, Artificial Sequence
  Synthetic oligonucleotide
atttgtaacagtacgtcagataaactacct

SEQ ID NO: 320085 - DNA, 30 bp, Artificial Sequence
  Synthetic oligonucleotide
gtttgtaggcaatgcacaataagagtacct

SEQ ID NO: 320086 - DNA, 30 bp, Artificial Sequence
  Synthetic oligonucleotide
ggtctattatcgtctgttcattaggtacct

SEQ ID NO: 320087 - DNA, 30 bp, Artificial Sequence
  Synthetic oligonucleotide
aaatgagaaccgactcaaagaacggtacct

SEQ ID NO: 320088 - DNA, 30 bp, Artificial Sequence
  Synthetic oligonucleotide
accaaaccctggacctggtttctggtacct

SEQ ID NO: 320089 - DNA, 30 bp, Artificial Sequence
  Synthetic oligonucleotide
tgaattaacgacgtatatggtgttgtacct

SEQ ID NO: 320090 - DNA, 30 bp, Artificial Sequence
  Synthetic oligonucleotide
gtccacggaatgaatcgttacgaattacct

SEQ ID NO: 320091 - DNA, 30 bp, Artificial Sequence
  Synthetic oligonucleotide
cagggaagaggccgttcactagacttacct

SEQ ID NO: 320092 - DNA, 30 bp, Artificial Sequence
  Synthetic oligonucleotide
cttcaagccatggcacctttgggcttacct

SEQ ID NO: 320093 - DNA, 30 bp, Artificial Sequence
  Synthetic oligonucleotide
ggatttgatatgggttaaggtgggttacct

SEQ ID NO: 320094 - DNA, 30 bp, Artificial Sequence
  Synthetic oligonucleotide
taaaagcgtcggcgtcgaggacccaaccct

SEQ ID NO: 320095 - DNA, 30 bp, Artificial Sequence
  Synthetic oligonucleotide
tcaactttataggaatggatcctgaaccct

SEQ ID NO: 320096 - DNA, 30 bp, Artificial Sequence
  Synthetic oligonucleotide
ccatatataactggctctcgatataaccct

SEQ ID NO: 320097 - DNA, 30 bp, Artificial Sequence
  Synthetic oligonucleotide
tgggaggccaagccggactatttacaccct

SEQ ID NO: 320098 - DNA, 30 bp, Artificial Sequence
  Synthetic oligonucleotide
aaatagtgcggtgaacgacaaaaccaccct

SEQ ID NO: 320099 - DNA, 30 bp, Artificial Sequence
  Synthetic oligonucleotide
aggaatcatatgcggggagtatgggaccct

SEQ ID NO: 320100 - DNA, 30 bp, Artificial Sequence
  Synthetic oligonucleotide
tgagcctattggttaaccgatactgaccct

SEQ ID NO: 320101 - DNA, 30 bp, Artificial Sequence
  Synthetic oligonucleotide
ggtccgaatatcgtaagaggacctgaccct

SEQ ID NO: 320102 - DNA, 30 bp, Artificial Sequence
  Synthetic oligonucleotide
aaggggaaggctttatcttcaagctaccct

SEQ ID NO: 320103 - DNA, 30 bp, Artificial Sequence
  Synthetic oligonucleotide
tgattggtccgcaggacgcctagctaccct

SEQ ID NO: 320104 - DNA, 30 bp, Artificial Sequence
  Synthetic oligonucleotide
tcctgggccgcatataacgcagggtaccct

SEQ ID NO: 320105 - DNA, 31 bp, Artificial Sequence
  Synthetic oligonucleotide
aaagcgcctgattaatacatcgtattaccct

SEQ ID NO: 320106 - DNA, 30 bp, Artificial Sequence
  Synthetic oligonucleotide
aatgtaggcatccacgtgaacacttaccct

SEQ ID NO: 320107 - DNA, 30 bp, Artificial Sequence
  Synthetic oligonucleotide
acggctcctcttttgacttcaatttaccct

SEQ ID NO: 320108 - DNA, 30 bp, Artificial Sequence
  Synthetic oligonucleotide
acccaaggctcacgacaactataaacccct

SEQ ID NO: 320109 - DNA, 30 bp, Artificial Sequence
  Synthetic oligonucleotide
agtggtgtaaaccgatcgtgggcaacccct

SEQ ID NO: 320110 - DNA, 30 bp, Artificial Sequence
  Synthetic oligonucleotide
gccggaacctacgggccccatcgaacccct

SEQ ID NO: 320111 - DNA, 30 bp, Artificial Sequence
  Synthetic oligonucleotide
gcatgtatttcgatcctctggttcacccct

SEQ ID NO: 320112 - DNA, 30 bp, Artificial Sequence
  Synthetic oligonucleotide
ccgggttgactgggacggcctcgtacccct

SEQ ID NO: 320113 - DNA, 30 bp, Artificial Sequence
  Synthetic oligonucleotide
gcgcctccggcctgcattgtaggtacccct

SEQ ID NO: 320114 - DNA, 30 bp, Artificial Sequence
  Synthetic oligonucleotide
gtccccagccattgtgcacgggtagcccct

SEQ ID NO: 320115 - DNA, 30 bp, Artificial Sequence
  Synthetic oligonucleotide
acactcgctggcgtttaagggactgcccct

SEQ ID NO: 320116 - DNA, 30 bp, Artificial Sequence
  Synthetic oligonucleotide
acttaccgaatagacgtgagatactcccct

SEQ ID NO: 320117 - DNA, 30 bp, Artificial Sequence
  Synthetic oligonucleotide
taaactttgacagaaacgcccgtgtcccct

SEQ ID NO: 320118 - DNA, 30 bp, Artificial Sequence
  Synthetic oligonucleotide
ttaaaccccagcctcgtggatccttcccct

SEQ ID NO: 320119 - DNA, 30 bp, Artificial Sequence
  Synthetic oligonucleotide
aggcgcaaaaatatacggttaggaagccct

SEQ ID NO: 320120 - DNA, 30 bp, Artificial Sequence
  Synthetic oligonucleotide
tgtgtatagagaacgctacagcgcagccct

SEQ ID NO: 320121 - DNA, 30 bp, Artificial Sequence
  Synthetic oligonucleotide
ctcacctggtataagccacagggcagccct

SEQ ID NO: 320122 - DNA, 30 bp, Artificial Sequence
  Synthetic oligonucleotide
tgggtttgcatggtcggtaggcctagccct

SEQ ID NO: 320123 - DNA, 30 bp, Artificial Sequence
  Synthetic oligonucleotide
tcatatagtctttcgtcaggacaacgccct

SEQ ID NO: 320124 - DNA, 30 bp, Artificial Sequence
  Synthetic oligonucleotide
tctcgatctttcaagtaacgccaacgccct

SEQ ID NO: 320125 - DNA, 30 bp, Artificial Sequence
  Synthetic oligonucleotide
gtgtaacctctcgactgtggtacacgccct

SEQ ID NO: 320126 - DNA, 30 bp, Artificial Sequence
  Synthetic oligonucleotide
gactttgttactcagtccagcgagcgccct

SEQ ID NO: 320127 - DNA, 30 bp, Artificial Sequence
  Synthetic oligonucleotide
aacggtataagttggcactgttggcgccct

SEQ ID NO: 320128 - DNA, 30 bp, Artificial Sequence
  Synthetic oligonucleotide
gacgtgagtgtgggtgagatttgaggccct

SEQ ID NO: 320129 - DNA, 30 bp, Artificial Sequence
  Synthetic oligonucleotide
tcttgggcgcgtaatattttaggcggccct

SEQ ID NO: 320130 - DNA, 30 bp, Artificial Sequence
  Synthetic oligonucleotide
ggaggtggcctaattgcctcgttgggccct

SEQ ID NO: 320131 - DNA, 30 bp, Artificial Sequence
  Synthetic oligonucleotide
cctctttacctataagaggacgactgccct

SEQ ID NO: 320132 - DNA, 30 bp, Artificial Sequence
  Synthetic oligonucleotide
ggggcgctacattttcagctactctgccct

SEQ ID NO: 320133 - DNA, 30 bp, Artificial Sequence
  Synthetic oligonucleotide
gacctcgggcgtgaagaattcctgtgccct

SEQ ID NO: 320134 - DNA, 29 bp, Artificial Sequence
  Synthetic oligonucleotide
cccctctcgctttctttcctttgtgccct

SEQ ID NO: 320135 - DNA, 29 bp, Artificial Sequence
  Synthetic oligonucleotide
cccctctcgctttctattctttgtgccct

SEQ ID NO: 320136 - DNA, 30 bp, Artificial Sequence
  Synthetic oligonucleotide
tggaactcatgcactacgggccgaatccct

SEQ ID NO: 320137 - DNA, 30 bp, Artificial Sequence
  Synthetic oligonucleotide
acgggacagattagtactactaccatccct

SEQ ID NO: 320138 - DNA, 30 bp, Artificial Sequence
  Synthetic oligonucleotide
cattaagccatgctgatcggaatgatccct

SEQ ID NO: 320139 - DNA, 30 bp, Artificial Sequence
  Synthetic oligonucleotide
acataaacgttcggcacgctgtgtatccct

SEQ ID NO: 320140 - DNA, 30 bp, Artificial Sequence
  Synthetic oligonucleotide
atgttcgagaagttcatccttacgctccct

SEQ ID NO: 320141 - DNA, 30 bp, Artificial Sequence
  Synthetic oligonucleotide
tgtttacgtccacaatccccatcgctccct

SEQ ID NO: 320142 - DNA, 30 bp, Artificial Sequence
  Synthetic oligonucleotide
gatggcaagcctgcacaatctgtagtccct

SEQ ID NO: 320143 - DNA, 30 bp, Artificial Sequence
  Synthetic oligonucleotide
cggcttaggaaggacaggctgatcgtccct

SEQ ID NO: 320144 - DNA, 30 bp, Artificial Sequence
  Synthetic oligonucleotide
tgaaggttgcattacggacaggtggtccct

SEQ ID NO: 320145 - DNA, 30 bp, Artificial Sequence
  Synthetic oligonucleotide
ccatcgtttccgaattgacgtcatgtccct

SEQ ID NO: 320146 - DNA, 30 bp, Artificial Sequence
  Synthetic oligonucleotide
aaggcccagctagacataataggtgtccct

SEQ ID NO: 320147 - DNA, 30 bp, Artificial Sequence
  Synthetic oligonucleotide
gcgattagaagaacgagagattttgtccct

SEQ ID NO: 320148 - DNA, 30 bp, Artificial Sequence
  Synthetic oligonucleotide
tgatctgaatgtgttacacgggcattccct

SEQ ID NO: 320149 - DNA, 30 bp, Artificial Sequence
  Synthetic oligonucleotide
atgattgaatgaggtctctcgtagttccct

SEQ ID NO: 320150 - DNA, 30 bp, Artificial Sequence
  Synthetic oligonucleotide
caaacgaggaaaatggtgctttcgttccct

SEQ ID NO: 320151 - DNA, 30 bp, Artificial Sequence
  Synthetic oligonucleotide
aaccacgtatgtggtcaggcggaaaagcct

SEQ ID NO: 320152 - DNA, 30 bp, Artificial Sequence
  Synthetic oligonucleotide
ttcaatcgcacgacaggggcatcaaagcct

SEQ ID NO: 320153 - DNA, 30 bp, Artificial Sequence
  Synthetic oligonucleotide
ttgccgtccattacgagtatcagcaagcct

SEQ ID NO: 320154 - DNA, 30 bp, Artificial Sequence
  Synthetic oligonucleotide
tagacctgcatgaccgtggtcttgaagcct

SEQ ID NO: 320155 - DNA, 30 bp, Artificial Sequence
  Synthetic oligonucleotide
ggttgcgtctggatagaccgatcacagcct

SEQ ID NO: 320156 - DNA, 30 bp, Artificial Sequence
  Synthetic oligonucleotide
gagactagcacatcttcaaagagacagcct

SEQ ID NO: 320157 - DNA, 30 bp, Artificial Sequence
  Synthetic oligonucleotide
agggatggtccacgaatgcctagccagcct

SEQ ID NO: 320158 - DNA, 30 bp, Artificial Sequence
  Synthetic oligonucleotide
ccctcatgaataaagcaggcatgccagcct

SEQ ID NO: 320159 - DNA, 30 bp, Artificial Sequence
  Synthetic oligonucleotide
acttctagaacgtttgggagagtccagcct

SEQ ID NO: 320160 - DNA, 30 bp, Artificial Sequence
  Synthetic oligonucleotide
ctaggtatcaaatattcagggcggcagcct

SEQ ID NO: 320161 - DNA, 30 bp, Artificial Sequence
  Synthetic oligonucleotide
cgggacagcgcaaatctgacacgtcagcct

SEQ ID NO: 320162 - DNA, 30 bp, Artificial Sequence
  Synthetic oligonucleotide
ttgccgggtagagcataacggcacgagcct

SEQ ID NO: 320163 - DNA, 30 bp, Artificial Sequence
  Synthetic oligonucleotide
ccactccaaagatgaaggagtggggagcct

SEQ ID NO: 320164 - DNA, 30 bp, Artificial Sequence
  Synthetic oligonucleotide
aaaggtcaatttctggtagggttggagcct

SEQ ID NO: 320165 - DNA, 30 bp, Artificial Sequence
  Synthetic oligonucleotide
accccggtaaactgattgttgattgagcct

SEQ ID NO: 320166 - DNA, 30 bp, Artificial Sequence
  Synthetic oligonucleotide
tgtacgaggtttgccagtggttcatagcct

SEQ ID NO: 320167 - DNA, 30 bp, Artificial Sequence
  Synthetic oligonucleotide
aactaagggtgacggttcgctcgatagcct

SEQ ID NO: 320168 - DNA, 30 bp, Artificial Sequence
  Synthetic oligonucleotide
aatcgggcgcagaatatcttaggatagcct

SEQ ID NO: 320169 - DNA, 30 bp, Artificial Sequence
  Synthetic oligonucleotide
aaacgacaatgtattaactagctatagcct

SEQ ID NO: 320170 - DNA, 30 bp, Artificial Sequence
  Synthetic oligonucleotide
tgaggaacagggcgggttcgatactagcct

SEQ ID NO: 320171 - DNA, 30 bp, Artificial Sequence
  Synthetic oligonucleotide
aagtagctctaaaaagaattacgttagcct

SEQ ID NO: 320172 - DNA, 30 bp, Artificial Sequence
  Synthetic oligonucleotide
ccaatcaaagttctgtcggtagtaacgcct

SEQ ID NO: 320173 - DNA, 30 bp, Artificial Sequence
  Synthetic oligonucleotide
agatcctctaaccccggaaatagcacgcct

SEQ ID NO: 320174 - DNA, 30 bp, Artificial Sequence
  Synthetic oligonucleotide
ctctagagcttccgatcaactcgcacgcct

SEQ ID NO: 320175 - DNA, 30 bp, Artificial Sequence
  Synthetic oligonucleotide
tcgattaccagacggggttcaccgacgcct

SEQ ID NO: 320176 - DNA, 30 bp, Artificial Sequence
  Synthetic oligonucleotide
gcgactctaacttaggtagaaggaccgcct

SEQ ID NO: 320177 - DNA, 30 bp, Artificial Sequence
  Synthetic oligonucleotide
gatctggttagtgggctttaaaacccgcct

SEQ ID NO: 320178 - DNA, 30 bp, Artificial Sequence
  Synthetic oligonucleotide
agattgtggtctcgatgtcccgaagcgcct

SEQ ID NO: 320179 - DNA, 30 bp, Artificial Sequence
  Synthetic oligonucleotide
ctgatgttccttagcttatcagcagcgcct

SEQ ID NO: 320180 - DNA, 30 bp, Artificial Sequence
  Synthetic oligonucleotide
aaatgggcacccctcttaaacaacgcgcct

SEQ ID NO: 320181 - DNA, 30 bp, Artificial Sequence
  Synthetic oligonucleotide
gccagaacggtgactcatatttccgcgcct

SEQ ID NO: 320182 - DNA, 30 bp, Artificial Sequence
  Synthetic oligonucleotide
attgagtcttgggaagtttttggcgcgcct

SEQ ID NO: 320183 - DNA, 30 bp, Artificial Sequence
  Synthetic oligonucleotide
aggacatgtagcgggtggtctttcgcgcct

SEQ ID NO: 320184 - DNA, 30 bp, Artificial Sequence
  Synthetic oligonucleotide
aatctcccttaagggaggcaacaggcgcct

SEQ ID NO: 320185 - DNA, 30 bp, Artificial Sequence
  Synthetic oligonucleotide
ttaatactaggtgaccagaaatgggcgcct

SEQ ID NO: 320186 - DNA, 30 bp, Artificial Sequence
  Synthetic oligonucleotide
atgacattatggcagaagaacttggcgcct

SEQ ID NO: 320187 - DNA, 30 bp, Artificial Sequence
  Synthetic oligonucleotide
acacgtaagtttttgtacctgcctgcgcct

SEQ ID NO: 320188 - DNA, 29 bp, Artificial Sequence
  Synthetic oligonucleotide
ataggttattagaatacttctgtgcgcct

SEQ ID NO: 320189 - DNA, 30 bp, Artificial Sequence
  Synthetic oligonucleotide
agagcggcggtagactcctagtgtgcgcct

SEQ ID NO: 320190 - DNA, 30 bp, Artificial Sequence
  Synthetic oligonucleotide
gtctgtggccttctgtttgaacaatcgcct

SEQ ID NO: 320191 - DNA, 30 bp, Artificial Sequence
  Synthetic oligonucleotide
ggtttaaggcaacggcagaaaccctcgcct

SEQ ID NO: 320192 - DNA, 30 bp, Artificial Sequence
  Synthetic oligonucleotide
tgagaaggagattatgggctatcttcgcct

SEQ ID NO: 320193 - DNA, 30 bp, Artificial Sequence
  Synthetic oligonucleotide
agaggaccgcggagcaccgggcgttcgcct

SEQ ID NO: 320194 - DNA, 30 bp, Artificial Sequence
  Synthetic oligonucleotide
aggcaatgggggtcctacgagctttcgcct

SEQ ID NO: 320195 - DNA, 30 bp, Artificial Sequence
  Synthetic oligonucleotide
aacaagcaaagaagtgtcagttgaaggcct

SEQ ID NO: 320196 - DNA, 30 bp, Artificial Sequence
  Synthetic oligonucleotide
cgtcccacacgtctttcaaatgggaggcct

SEQ ID NO: 320197 - DNA, 30 bp, Artificial Sequence
  Synthetic oligonucleotide
ctcagggatacccacggtcaccgacggcct

SEQ ID NO: 320198 - DNA, 30 bp, Artificial Sequence
  Synthetic oligonucleotide
catactgacggagaattagtgcgacggcct

SEQ ID NO: 320199 - DNA, 31 bp, Artificial Sequence
  Synthetic oligonucleotide
gaatgctcacaattgcttcaattatcggcct

SEQ ID NO: 320200 - DNA, 30 bp, Artificial Sequence
  Synthetic oligonucleotide
ggcggacgaaaagcctcagtataagggcct

SEQ ID NO: 320201 - DNA, 30 bp, Artificial Sequence
  Synthetic oligonucleotide
cagagcatttcagaaggctcggacgggcct

SEQ ID NO: 320202 - DNA, 30 bp, Artificial Sequence
  Synthetic oligonucleotide
gcgcccgaaaagacagcaacctccgggcct

SEQ ID NO: 320203 - DNA, 30 bp, Artificial Sequence
  Synthetic oligonucleotide
cctgcggggggcatcagcccggtggggcct

SEQ ID NO: 320204 - DNA, 30 bp, Artificial Sequence
  Synthetic oligonucleotide
gcaagccgagtaccgccacgtcgtgggcct

SEQ ID NO: 320205 - DNA, 30 bp, Artificial Sequence
  Synthetic oligonucleotide
cgtacggccccgtcacgcccgatatggcct

SEQ ID NO: 320206 - DNA, 30 bp, Artificial Sequence
  Synthetic oligonucleotide
actgttacggtgttctactggccaatgcct

SEQ ID NO: 320207 - DNA, 30 bp, Artificial Sequence
  Synthetic oligonucleotide
actagcatgtcatggcctgtaataatgcct

SEQ ID NO: 320208 - DNA, 30 bp, Artificial Sequence
  Synthetic oligonucleotide
aacgcattaagccagtgtggccacatgcct

SEQ ID NO: 320209 - DNA, 30 bp, Artificial Sequence
  Synthetic oligonucleotide
ctacagagacccacggcaattgccatgcct

SEQ ID NO: 320210 - DNA, 30 bp, Artificial Sequence
  Synthetic oligonucleotide
ggcgcggttcacctactatctcgcatgcct

SEQ ID NO: 320211 - DNA, 30 bp, Artificial Sequence
  Synthetic oligonucleotide
actaattttctcaagcggatggggctgcct

SEQ ID NO: 320212 - DNA, 30 bp, Artificial Sequence
  Synthetic oligonucleotide
gcgaggcgacttaagtattgctgtctgcct

SEQ ID NO: 320213 - DNA, 30 bp, Artificial Sequence
  Synthetic oligonucleotide
ctagccttatccttcattcgggtattgcct

SEQ ID NO: 320214 - DNA, 30 bp, Artificial Sequence
  Synthetic oligonucleotide
atcaacgagtagatgttaacttcgttgcct

SEQ ID NO: 320215 - DNA, 30 bp, Artificial Sequence
  Synthetic oligonucleotide
ctcagagcacgttttccgggatatttgcct

SEQ ID NO: 320216 - DNA, 30 bp, Artificial Sequence
  Synthetic oligonucleotide
tacctaagtttggggctaagtaaaaatcct

SEQ ID NO: 320217 - DNA, 30 bp, Artificial Sequence
  Synthetic oligonucleotide
gttaaataggcggtatcgtgaacaaatcct

SEQ ID NO: 320218 - DNA, 30 bp, Artificial Sequence
  Synthetic oligonucleotide
tttactcgatcattgtccggttagaatcct

SEQ ID NO: 320219 - DNA, 30 bp, Artificial Sequence
  Synthetic oligonucleotide
gcagtaaccgcggataagtaaccgaatcct

SEQ ID NO: 320220 - DNA, 30 bp, Artificial Sequence
  Synthetic oligonucleotide
ctaccgcgcgagcagtactatatacatcct

SEQ ID NO: 320221 - DNA, 30 bp, Artificial Sequence
  Synthetic oligonucleotide
ggaaggtagctgtcatgtgcttgccatcct

SEQ ID NO: 320222 - DNA, 30 bp, Artificial Sequence
  Synthetic oligonucleotide
gtaatagggctacgtacttcccctcatcct

SEQ ID NO: 320223 - DNA, 30 bp, Artificial Sequence
  Synthetic oligonucleotide
acccaagtcgtagtgaccatactagatcct

SEQ ID NO: 320224 - DNA, 30 bp, Artificial Sequence
  Synthetic oligonucleotide
gtctccgaccacatgatagcgttcgatcct

SEQ ID NO: 320225 - DNA, 30 bp, Artificial Sequence
  Synthetic oligonucleotide
tcgaattccatagatggaccgctatatcct

SEQ ID NO: 320226 - DNA, 30 bp, Artificial Sequence
  Synthetic oligonucleotide
catttggtccagatgatgtgtcagtatcct

SEQ ID NO: 320227 - DNA, 30 bp, Artificial Sequence
  Synthetic oligonucleotide
caaatgattggccggccagaccgttatcct

SEQ ID NO: 320228 - DNA, 30 bp, Artificial Sequence
  Synthetic oligonucleotide
agggattgcacttctgcgataggttatcct

SEQ ID NO: 320229 - DNA, 30 bp, Artificial Sequence
  Synthetic oligonucleotide
cagctataatacattctcaaaatttatcct

SEQ ID NO: 320230 - DNA, 30 bp, Artificial Sequence
  Synthetic oligonucleotide
aacgtgttctgagcgaagatcctttatcct

SEQ ID NO: 320231 - DNA, 30 bp, Artificial Sequence
  Synthetic oligonucleotide
ctgctccctacgtgaaccgtggaaactcct

SEQ ID NO: 320232 - DNA, 30 bp, Artificial Sequence
  Synthetic oligonucleotide
tgtgcacatgcatagccgccgacaactcct

SEQ ID NO: 320233 - DNA, 30 bp, Artificial Sequence
  Synthetic oligonucleotide
gataagctaatgttgttcaactgaactcct

SEQ ID NO: 320234 - DNA, 30 bp, Artificial Sequence
  Synthetic oligonucleotide
atagttcaagcctgtaagtcgaatactcct

SEQ ID NO: 320235 - DNA, 30 bp, Artificial Sequence
  Synthetic oligonucleotide
cactcaccatcatcgtcctgtgctactcct

SEQ ID NO: 320236 - DNA, 30 bp, Artificial Sequence
  Synthetic oligonucleotide
ggtcgtatcatgcccggtagtaaccctcct

SEQ ID NO: 320237 - DNA, 30 bp, Artificial Sequence
  Synthetic oligonucleotide
cgtagtgagcaaggggctttctagcctcct

SEQ ID NO: 320238 - DNA, 30 bp, Artificial Sequence
  Synthetic oligonucleotide
gtcggatgtggtaactagataccgcctcct

SEQ ID NO: 320239 - DNA, 30 bp, Artificial Sequence
  Synthetic oligonucleotide
ccgacgctctaatgcgctcgcctgcctcct

SEQ ID NO: 320240 - DNA, 30 bp, Artificial Sequence
  Synthetic oligonucleotide
tggtactgaccgctcaacttggatcctcct

SEQ ID NO: 320241 - DNA, 30 bp, Artificial Sequence
  Synthetic oligonucleotide
cgggtcagttgactcctataccgagctcct

SEQ ID NO: 320242 - DNA, 30 bp, Artificial Sequence
  Synthetic oligonucleotide
tggagacccactgaaaagcgaaaggctcct

SEQ ID NO: 320243 - DNA, 30 bp, Artificial Sequence
  Synthetic oligonucleotide
tggcagggggtaacacggggagaggctcct

SEQ ID NO: 320244 - DNA, 30 bp, Artificial Sequence
  Synthetic oligonucleotide
aaactaaccaacgagttatcaagtgctcct

SEQ ID NO: 320245 - DNA, 30 bp, Artificial Sequence
  Synthetic oligonucleotide
ctcagtcgtgcctgagcgcttcaatctcct

SEQ ID NO: 320246 - DNA, 30 bp, Artificial Sequence
  Synthetic oligonucleotide
taacggcttgtggtcgaaatgccgtctcct

SEQ ID NO: 320247 - DNA, 30 bp, Artificial Sequence
  Synthetic oligonucleotide
aagaaggtatgaacattgctagggtctcct

SEQ ID NO: 320248 - DNA, 30 bp, Artificial Sequence
  Synthetic oligonucleotide
tggcgcgctactgcacccaaaacttctcct

SEQ ID NO: 320249 - DNA, 30 bp, Artificial Sequence
  Synthetic oligonucleotide
gacatacggaggtgacagaatacaagtcct

SEQ ID NO: 320250 - DNA, 30 bp, Artificial Sequence
  Synthetic oligonucleotide
cggatcctccctcaagcgccgcatagtcct

SEQ ID NO: 320251 - DNA, 30 bp, Artificial Sequence
  Synthetic oligonucleotide
agtaacaaaggctgcgacgctcgtagtcct

SEQ ID NO: 320252 - DNA, 30 bp, Artificial Sequence
  Synthetic oligonucleotide
catggagttttacatagtagatcacgtcct

SEQ ID NO: 320253 - DNA, 30 bp, Artificial Sequence
  Synthetic oligonucleotide
aaggataccatttcctcacagatacgtcct

SEQ ID NO: 320254 - DNA, 30 bp, Artificial Sequence
  Synthetic oligonucleotide
gccgtattttgattgtggataccccgtcct

SEQ ID NO: 320255 - DNA, 30 bp, Artificial Sequence
  Synthetic oligonucleotide
ccacccttggtggggaacgctcggcgtcct

SEQ ID NO: 320256 - DNA, 30 bp, Artificial Sequence
  Synthetic oligonucleotide
accacagggtattccatggggtatcgtcct

SEQ ID NO: 320257 - DNA, 30 bp, Artificial Sequence
  Synthetic oligonucleotide
cttgtggtcgggctatcggcaattcgtcct

SEQ ID NO: 320258 - DNA, 30 bp, Artificial Sequence
  Synthetic oligonucleotide
tacgtttatagtgactgaggaacaggtcct

SEQ ID NO: 320259 - DNA, 30 bp, Artificial Sequence
  Synthetic oligonucleotide
atggtgcgctgtcattacatcccaggtcct

SEQ ID NO: 320260 - DNA, 30 bp, Artificial Sequence
  Synthetic oligonucleotide
gctacgaggatttccataaaatttggtcct

SEQ ID NO: 320261 - DNA, 30 bp, Artificial Sequence
  Synthetic oligonucleotide
tttcgttgagctaagggttagtttggtcct

SEQ ID NO: 320262 - DNA, 30 bp, Artificial Sequence
  Synthetic oligonucleotide
tgtttctagagttcgtgtacctaatgtcct

SEQ ID NO: 320263 - DNA, 30 bp, Artificial Sequence
  Synthetic oligonucleotide
cggctcaatgatcttctaagtcgctgtcct

SEQ ID NO: 320264 - DNA, 30 bp, Artificial Sequence
  Synthetic oligonucleotide
ttgaagacataaaaggttccaaggtgtcct

SEQ ID NO: 320265 - DNA, 30 bp, Artificial Sequence
  Synthetic oligonucleotide
gtatttacctttgaaagcatctattgtcct

SEQ ID NO: 320266 - DNA, 30 bp, Artificial Sequence
  Synthetic oligonucleotide
taccagatagaaagtagtgccggttgtcct

SEQ ID NO: 320267 - DNA, 30 bp, Artificial Sequence
  Synthetic oligonucleotide
aggggtatcctgacctggggaggaattcct

SEQ ID NO: 320268 - DNA, 30 bp, Artificial Sequence
  Synthetic oligonucleotide
tgatctcgcgctgagagattgcgcattcct

SEQ ID NO: 320269 - DNA, 30 bp, Artificial Sequence
  Synthetic oligonucleotide
tcggtctcacagaaaaggtgttcgattcct

SEQ ID NO: 320270 - DNA, 30 bp, Artificial Sequence
  Synthetic oligonucleotide
gtagcctatagctttaacctagatattcct

SEQ ID NO: 320271 - DNA, 30 bp, Artificial Sequence
  Synthetic oligonucleotide
tgtagtggctcactaatattgactattcct

SEQ ID NO: 320272 - DNA, 30 bp, Artificial Sequence
  Synthetic oligonucleotide
atagggaaatcctagaggtttattattcct

SEQ ID NO: 320273 - DNA, 30 bp, Artificial Sequence
  Synthetic oligonucleotide
acatgcggaattccaatactggttattcct

SEQ ID NO: 320274 - DNA, 30 bp, Artificial Sequence
  Synthetic oligonucleotide
gtgccgcgtggtcatatcagagcacttcct

SEQ ID NO: 320275 - DNA, 30 bp, Artificial Sequence
  Synthetic oligonucleotide
tgttgtaattgttcccgaagataccttcct

SEQ ID NO: 320276 - DNA, 30 bp, Artificial Sequence
  Synthetic oligonucleotide
tacacgcacccagttattcacatccttcct

SEQ ID NO: 320277 - DNA, 30 bp, Artificial Sequence
  Synthetic oligonucleotide
taaattgacagtgctcggcggcggcttcct

SEQ ID NO: 320278 - DNA, 30 bp, Artificial Sequence
  Synthetic oligonucleotide
ttggttagaatgtttttgccatctcttcct

SEQ ID NO: 320279 - DNA, 30 bp, Artificial Sequence
  Synthetic oligonucleotide
ctagttcgctcaaagtaaatgagtcttcct

SEQ ID NO: 320280 - DNA, 30 bp, Artificial Sequence
  Synthetic oligonucleotide
tatgatcagaactcaatcatagtagttcct

SEQ ID NO: 320281 - DNA, 30 bp, Artificial Sequence
  Synthetic oligonucleotide
gagatgatggacactatatgcttcgttcct

SEQ ID NO: 320282 - DNA, 30 bp, Artificial Sequence
  Synthetic oligonucleotide
ttctttcagtatgataaagagtaggttcct

SEQ ID NO: 320283 - DNA, 30 bp, Artificial Sequence
  Synthetic oligonucleotide
gcgacgcgactcaccacggcaacggttcct

SEQ ID NO: 320284 - DNA, 30 bp, Artificial Sequence
  Synthetic oligonucleotide
tagcacactccgttaactcttacctttcct

SEQ ID NO: 320285 - DNA, 30 bp, Artificial Sequence
  Synthetic oligonucleotide
cgggtaaaatggattgtacagatgtttcct

SEQ ID NO: 320286 - DNA, 30 bp, Artificial Sequence
  Synthetic oligonucleotide
atcccaaggacgtttcaatgaccaaaagct

SEQ ID NO: 320287 - DNA, 30 bp, Artificial Sequence
  Synthetic oligonucleotide
cgttcagatagtttggccgccaccaaagct

SEQ ID NO: 320288 - DNA, 30 bp, Artificial Sequence
  Synthetic oligonucleotide
gggttagccggcacgattaaccttaaagct

SEQ ID NO: 320289 - DNA, 30 bp, Artificial Sequence
  Synthetic oligonucleotide
tagacaatcacggcaacagattttaaagct

SEQ ID NO: 320290 - DNA, 30 bp, Artificial Sequence
  Synthetic oligonucleotide
agcaagcgtatgacatcgattcgacaagct

SEQ ID NO: 320291 - DNA, 30 bp, Artificial Sequence
  Synthetic oligonucleotide
gtatagcgtgtagtcggttctgtgcaagct

SEQ ID NO: 320292 - DNA, 30 bp, Artificial Sequence
  Synthetic oligonucleotide
atttaagaaactgtgccatgctgtcaagct

SEQ ID NO: 320293 - DNA, 30 bp, Artificial Sequence
  Synthetic oligonucleotide
gcgtttggacgcaatgcccaagttcaagct

SEQ ID NO: 320294 - DNA, 30 bp, Artificial Sequence
  Synthetic oligonucleotide
gagttacaaagggccatgagctaagaagct

SEQ ID NO: 320295 - DNA, 30 bp, Artificial Sequence
  Synthetic oligonucleotide
gtttatactagatgcctcctactagaagct

SEQ ID NO: 320296 - DNA, 30 bp, Artificial Sequence
  Synthetic oligonucleotide
gaaggttcttggatacacgataccgaagct

SEQ ID NO: 320297 - DNA, 30 bp, Artificial Sequence
  Synthetic oligonucleotide
attaagagtcttaccacaagctccgaagct

SEQ ID NO: 320298 - DNA, 30 bp, Artificial Sequence
  Synthetic oligonucleotide
taagtgaaatttggctgctagaaggaagct

SEQ ID NO: 320299 - DNA, 30 bp, Artificial Sequence
  Synthetic oligonucleotide
agcttgttttcagaattggcaagtgaagct

SEQ ID NO: 320300 - DNA, 30 bp, Artificial Sequence
  Synthetic oligonucleotide
actttccaattggaggcggctatctaagct

SEQ ID NO: 320301 - DNA, 30 bp, Artificial Sequence
  Synthetic oligonucleotide
ggaacaagtctgcccagagggccttaagct

SEQ ID NO: 320302 - DNA, 30 bp, Artificial Sequence
  Synthetic oligonucleotide
tcttttggctggctaagatcaagttaagct

SEQ ID NO: 320303 - DNA, 30 bp, Artificial Sequence
  Synthetic oligonucleotide
cgtctgacctacctagcaaccaaaacagct

SEQ ID NO: 320304 - DNA, 30 bp, Artificial Sequence
  Synthetic oligonucleotide
gtagtattgcaggtactccgggacacagct

SEQ ID NO: 320305 - DNA, 30 bp, Artificial Sequence
  Synthetic oligonucleotide
ccccatcctgaatttgccttacgtacagct

SEQ ID NO: 320306 - DNA, 30 bp, Artificial Sequence
  Synthetic oligonucleotide
aggtttagtaccacgctgggggacccagct

SEQ ID NO: 320307 - DNA, 30 bp, Artificial Sequence
  Synthetic oligonucleotide
tagcccttgggcacatggagatacccagct

SEQ ID NO: 320308 - DNA, 30 bp, Artificial Sequence
  Synthetic oligonucleotide
tttagaaggaacttcttaagtccgccagct

SEQ ID NO: 320309 - DNA, 30 bp, Artificial Sequence
  Synthetic oligonucleotide
tttcatagggggttccgtgacgttccagct

SEQ ID NO: 320310 - DNA, 30 bp, Artificial Sequence
  Synthetic oligonucleotide
aggccgaaccgactcctgaaggaagcagct

SEQ ID NO: 320311 - DNA, 30 bp, Artificial Sequence
  Synthetic oligonucleotide
gtaagaactctctgtggatgcccagcagct

SEQ ID NO: 320312 - DNA, 30 bp, Artificial Sequence
  Synthetic oligonucleotide
gcgaagagtgtcgccctatatggagcagct

SEQ ID NO: 320313 - DNA, 30 bp, Artificial Sequence
  Synthetic oligonucleotide
cttctgtttgtcgggctggccatggcagct

SEQ ID NO: 320314 - DNA, 30 bp, Artificial Sequence
  Synthetic oligonucleotide
cacttcgaatttgaatcgcccactgcagct

SEQ ID NO: 320315 - DNA, 29 bp, Artificial Sequence
  Synthetic oligonucleotide
atgacgtcagtactatgaactgatcagct

SEQ ID NO: 320316 - DNA, 30 bp, Artificial Sequence
  Synthetic oligonucleotide
gctgaagagttgtcactgagagcttcagct

SEQ ID NO: 320317 - DNA, 30 bp, Artificial Sequence
  Synthetic oligonucleotide
taaggttggcgttacaatcctccaagagct

SEQ ID NO: 320318 - DNA, 30 bp, Artificial Sequence
  Synthetic oligonucleotide
tgagacattactttaacgtctataagagct

SEQ ID NO: 320319 - DNA, 30 bp, Artificial Sequence
  Synthetic oligonucleotide
gttctccacgacctaatgcccggcagagct

SEQ ID NO: 320320 - DNA, 30 bp, Artificial Sequence
  Synthetic oligonucleotide
cattgttaaaacatctggagctgcagagct

SEQ ID NO: 320321 - DNA, 30 bp, Artificial Sequence
  Synthetic oligonucleotide
cccacggtgaaccttgacgagacgagagct

SEQ ID NO: 320322 - DNA, 30 bp, Artificial Sequence
  Synthetic oligonucleotide
gcaactgatctttgcattggggatagagct

SEQ ID NO: 320323 - DNA, 30 bp, Artificial Sequence
  Synthetic oligonucleotide
agtactgatccacttctttgttgtagagct

SEQ ID NO: 320324 - DNA, 30 bp, Artificial Sequence
  Synthetic oligonucleotide
aaagcagacgacgctcgtagagttagagct

SEQ ID NO: 320325 - DNA, 30 bp, Artificial Sequence
  Synthetic oligonucleotide
caatggaacagtcccataccatttagagct

SEQ ID NO: 320326 - DNA, 30 bp, Artificial Sequence
  Synthetic oligonucleotide
tacttaatcagcctaactcatgcgcgagct

SEQ ID NO: 320327 - DNA, 30 bp, Artificial Sequence
  Synthetic oligonucleotide
gtaaggccgaaacgcacggtgactcgagct

SEQ ID NO: 320328 - DNA, 30 bp, Artificial Sequence
  Synthetic oligonucleotide
cgcgttacactatgagttcccattcgagct

SEQ ID NO: 320329 - DNA, 30 bp, Artificial Sequence
  Synthetic oligonucleotide
tggcaaatgtgtcccgtcagacgaggagct

SEQ ID NO: 320330 - DNA, 30 bp, Artificial Sequence
  Synthetic oligonucleotide
tggcgtccaattggtgcgccgataggagct

SEQ ID NO: 320331 - DNA, 30 bp, Artificial Sequence
  Synthetic oligonucleotide
atccgcgcgtcacggagtcagaccggagct

SEQ ID NO: 320332 - DNA, 30 bp, Artificial Sequence
  Synthetic oligonucleotide
gcatgaggccgctctctatacgcgggagct

SEQ ID NO: 320333 - DNA, 30 bp, Artificial Sequence
  Synthetic oligonucleotide
atgaactctgactaagacaaggggggagct

SEQ ID NO: 320334 - DNA, 30 bp, Artificial Sequence
  Synthetic oligonucleotide
gtttatttgataacaaaggacactggagct

SEQ ID NO: 320335 - DNA, 30 bp, Artificial Sequence
  Synthetic oligonucleotide
gaagaaactttcagaacaggggaatgagct

SEQ ID NO: 320336 - DNA, 30 bp, Artificial Sequence
  Synthetic oligonucleotide
aattagatcgattagctggaagtatgagct

SEQ ID NO: 320337 - DNA, 30 bp, Artificial Sequence
  Synthetic oligonucleotide
gatgcgtgtggtaagagtctatgctgagct

SEQ ID NO: 320338 - DNA, 30 bp, Artificial Sequence
  Synthetic oligonucleotide
gctagttatggaaaagtgatgccgtgagct

SEQ ID NO: 320339 - DNA, 30 bp, Artificial Sequence
  Synthetic oligonucleotide
taaatcatttggggtgataacgcgtgagct

SEQ ID NO: 320340 - DNA, 30 bp, Artificial Sequence
  Synthetic oligonucleotide
gtaagcttggtattaaggggtaattgagct

SEQ ID NO: 320341 - DNA, 30 bp, Artificial Sequence
  Synthetic oligonucleotide
atgttatctcgggatcccgcatattgagct

SEQ ID NO: 320342 - DNA, 30 bp, Artificial Sequence
  Synthetic oligonucleotide
tgccacccttcccgttaattatattgagct

SEQ ID NO: 320343 - DNA, 30 bp, Artificial Sequence
  Synthetic oligonucleotide
gctgagatattggaattgccggcaatagct

SEQ ID NO: 320344 - DNA, 30 bp, Artificial Sequence
  Synthetic oligonucleotide
taaagttgttaatggactacacgaatagct

SEQ ID NO: 320345 - DNA, 30 bp, Artificial Sequence
  Synthetic oligonucleotide
cattagtgcaggtttaccatactaatagct

SEQ ID NO: 320346 - DNA, 30 bp, Artificial Sequence
  Synthetic oligonucleotide
cttcattctcggactaaacaggtaatagct

SEQ ID NO: 320347 - DNA, 30 bp, Artificial Sequence
  Synthetic oligonucleotide
tcttttctataacggaggtctgtaatagct

SEQ ID NO: 320348 - DNA, 30 bp, Artificial Sequence
  Synthetic oligonucleotide
ctactctgagtataggcaatcttgatagct

SEQ ID NO: 320349 - DNA, 30 bp, Artificial Sequence
  Synthetic oligonucleotide
gagtccgaccacgctcctcacgatatagct

SEQ ID NO: 320350 - DNA, 30 bp, Artificial Sequence
  Synthetic oligonucleotide
ggcacgattatttctaccagcactatagct

SEQ ID NO: 320351 - DNA, 30 bp, Artificial Sequence
  Synthetic oligonucleotide
tctatgcctgaaagatcacgtactatagct

SEQ ID NO: 320352 - DNA, 30 bp, Artificial Sequence
  Synthetic oligonucleotide
gtccctccgccaaatcctcttcctatagct

SEQ ID NO: 320353 - DNA, 30 bp, Artificial Sequence
  Synthetic oligonucleotide
tttaagtgttgtcggctcgatcgtatagct

SEQ ID NO: 320354 - DNA, 30 bp, Artificial Sequence
  Synthetic oligonucleotide
gttatcgtgcaatgcagacgtggcctagct

SEQ ID NO: 320355 - DNA, 30 bp, Artificial Sequence
  Synthetic oligonucleotide
ttagtaatcttcaaccgcccaatagtagct

SEQ ID NO: 320356 - DNA, 30 bp, Artificial Sequence
  Synthetic oligonucleotide
cggtggtgcaggtgtaccactatagtagct

SEQ ID NO: 320357 - DNA, 30 bp, Artificial Sequence
  Synthetic oligonucleotide
gatgtttgaacaccgtctctacctgtagct

SEQ ID NO: 320358 - DNA, 30 bp, Artificial Sequence
  Synthetic oligonucleotide
gaggcatagcgcatcaccaggtctgtagct

SEQ ID NO: 320359 - DNA, 30 bp, Artificial Sequence
  Synthetic oligonucleotide
atcgacctactagtcccgtaggttgtagct

SEQ ID NO: 320360 - DNA, 30 bp, Artificial Sequence
  Synthetic oligonucleotide
ccatgtagtgtattactcggaagattagct

SEQ ID NO: 320361 - DNA, 30 bp, Artificial Sequence
  Synthetic oligonucleotide
ggacgttggtgttgataattcttattagct

SEQ ID NO: 320362 - DNA, 30 bp, Artificial Sequence
  Synthetic oligonucleotide
ccttatgcgcggcaaaatggagtcttagct

SEQ ID NO: 320363 - DNA, 30 bp, Artificial Sequence
  Synthetic oligonucleotide
caaatgtatatgcatcagatgagtttagct

SEQ ID NO: 320364 - DNA, 30 bp, Artificial Sequence
  Synthetic oligonucleotide
cggatcagctacggaattagtaacaacgct

SEQ ID NO: 320365 - DNA, 29 bp, Artificial Sequence
  Synthetic oligonucleotide
acgaaagagtcacagcggtattcaacgct

SEQ ID NO: 320366 - DNA, 30 bp, Artificial Sequence
  Synthetic oligonucleotide
caagacagtaacatatggtttgataacgct

SEQ ID NO: 320367 - DNA, 30 bp, Artificial Sequence
  Synthetic oligonucleotide
tagtactcattcggggggcgatataacgct

SEQ ID NO: 320368 - DNA, 30 bp, Artificial Sequence
  Synthetic oligonucleotide
tggataggtccctctctttggaaacacgct

SEQ ID NO: 320369 - DNA, 30 bp, Artificial Sequence
  Synthetic oligonucleotide
cattcctgtctcacttagtcgccacacgct

SEQ ID NO: 320370 - DNA, 30 bp, Artificial Sequence
  Synthetic oligonucleotide
cctgagtgctggactcagaacagccacgct

SEQ ID NO: 320371 - DNA, 30 bp, Artificial Sequence
  Synthetic oligonucleotide
ccaagtaacaagtccagagcgggccacgct

SEQ ID NO: 320372 - DNA, 30 bp, Artificial Sequence
  Synthetic oligonucleotide
ataaatttatctggaaacgtcgcgcacgct

SEQ ID NO: 320373 - DNA, 30 bp, Artificial Sequence
  Synthetic oligonucleotide
aaagctttcgactgaacggaaaggcacgct

SEQ ID NO: 320374 - DNA, 30 bp, Artificial Sequence
  Synthetic oligonucleotide
caagagacggtcgcgcccgaacggcacgct

SEQ ID NO: 320375 - DNA, 30 bp, Artificial Sequence
  Synthetic oligonucleotide
tcaagcgaatctcacgaaatacgcgacgct

SEQ ID NO: 320376 - DNA, 30 bp, Artificial Sequence
  Synthetic oligonucleotide
tagtctatgagtgtcgcaatcctggacgct

SEQ ID NO: 320377 - DNA, 30 bp, Artificial Sequence
  Synthetic oligonucleotide
agggagattcataaagacgcccatgacgct

SEQ ID NO: 320378 - DNA, 30 bp, Artificial Sequence
  Synthetic oligonucleotide
cgcactagtgtgttaatgaggaaatacgct

SEQ ID NO: 320379 - DNA, 30 bp, Artificial Sequence
  Synthetic oligonucleotide
tggcacgaatcgttaccgggggcatacgct

SEQ ID NO: 320380 - DNA, 30 bp, Artificial Sequence
  Synthetic oligonucleotide
ggaaagagaatgtccttgccccgatacgct

SEQ ID NO: 320381 - DNA, 30 bp, Artificial Sequence
  Synthetic oligonucleotide
tcaggatcagttggcacgtttccttacgct

SEQ ID NO: 320382 - DNA, 30 bp, Artificial Sequence
  Synthetic oligonucleotide
gggtctaagatcaagtaagtacgttacgct

SEQ ID NO: 320383 - DNA, 30 bp, Artificial Sequence
  Synthetic oligonucleotide
tatgacggcaatgctggcacgtgttacgct

SEQ ID NO: 320384 - DNA, 30 bp, Artificial Sequence
  Synthetic oligonucleotide
tcacaatgatagccagggttaagaaccgct

SEQ ID NO: 320385 - DNA, 30 bp, Artificial Sequence
  Synthetic oligonucleotide
tagttgcttgcgagaaccaaacgaaccgct

SEQ ID NO: 320386 - DNA, 30 bp, Artificial Sequence
  Synthetic oligonucleotide
tttaactacaccccgatattaggaaccgct

SEQ ID NO: 320387 - DNA, 30 bp, Artificial Sequence
  Synthetic oligonucleotide
tgcagtagtcgagctgggtcctgaaccgct

SEQ ID NO: 320388 - DNA, 30 bp, Artificial Sequence
  Synthetic oligonucleotide
aagctattatcatggacagcgtccaccgct

SEQ ID NO: 320389 - DNA, 30 bp, Artificial Sequence
  Synthetic oligonucleotide
atcgatgagacccaagcaattgcgaccgct

SEQ ID NO: 320390 - DNA, 30 bp, Artificial Sequence
  Synthetic oligonucleotide
gtagaagtaaagtcagagaccttgaccgct

SEQ ID NO: 320391 - DNA, 30 bp, Artificial Sequence
  Synthetic oligonucleotide
gcctccggcctgttccagtcgtataccgct

SEQ ID NO: 320392 - DNA, 30 bp, Artificial Sequence
  Synthetic oligonucleotide
agtatcaacggggggaggcacccacccgct

SEQ ID NO: 320393 - DNA, 30 bp, Artificial Sequence
  Synthetic oligonucleotide
aggaaaatataacgctaaatatgacccgct

SEQ ID NO: 320394 - DNA, 30 bp, Artificial Sequence
  Synthetic oligonucleotide
atccgcgcagcgccgcatcgtaagcccgct

SEQ ID NO: 320395 - DNA, 30 bp, Artificial Sequence
  Synthetic oligonucleotide
gggaattgagttaaaggtaacattcccgct

SEQ ID NO: 320396 - DNA, 30 bp, Artificial Sequence
  Synthetic oligonucleotide
gagttgggctctatgtccggttaagccgct

SEQ ID NO: 320397 - DNA, 30 bp, Artificial Sequence
  Synthetic oligonucleotide
ccgctacgatgggtgcagcgactagccgct

SEQ ID NO: 320398 - DNA, 30 bp, Artificial Sequence
  Synthetic oligonucleotide
tgtgtaatctgggtctattcaatcgccgct

SEQ ID NO: 320399 - DNA, 30 bp, Artificial Sequence
  Synthetic oligonucleotide
cggcgtctggttcagcgggatcaggccgct

SEQ ID NO: 320400 - DNA, 30 bp, Artificial Sequence
  Synthetic oligonucleotide
atggcagtttctacgtagctttgggccgct

SEQ ID NO: 320401 - DNA, 30 bp, Artificial Sequence
  Synthetic oligonucleotide
ttacggagccgggtacatccgagctccgct

SEQ ID NO: 320402 - DNA, 30 bp, Artificial Sequence
  Synthetic oligonucleotide
ggcatgcagtcggaaccgaacaattccgct

SEQ ID NO: 320403 - DNA, 30 bp, Artificial Sequence
  Synthetic oligonucleotide
cccatctatgatcacagcgcaaacagcgct

SEQ ID NO: 320404 - DNA, 30 bp, Artificial Sequence
  Synthetic oligonucleotide
aaatacagcgataaagtcatacagagcgct

SEQ ID NO: 320405 - DNA, 30 bp, Artificial Sequence
  Synthetic oligonucleotide
aaagtctgcgatgcgtcacttagtagcgct

SEQ ID NO: 320406 - DNA, 30 bp, Artificial Sequence
  Synthetic oligonucleotide
tatcggtcagctacaccctgatgacgcgct

SEQ ID NO: 320407 - DNA, 30 bp, Artificial Sequence
  Synthetic oligonucleotide
cactcgcgtaccctacaagtgttacgcgct

SEQ ID NO: 320408 - DNA, 30 bp, Artificial Sequence
  Synthetic oligonucleotide
caagcacttcttacccgcggtcagcgcgct

SEQ ID NO: 320409 - DNA, 30 bp, Artificial Sequence
  Synthetic oligonucleotide
acggcaaacgacgggccaatccggcgcgct

SEQ ID NO: 320410 - DNA, 30 bp, Artificial Sequence
  Synthetic oligonucleotide
ctcgatctagtgatgcccgcgctgcgcgct

SEQ ID NO: 320411 - DNA, 30 bp, Artificial Sequence
  Synthetic oligonucleotide
ttagttcagggtactcattgcgttcgcgct

SEQ ID NO: 320412 - DNA, 30 bp, Artificial Sequence
  Synthetic oligonucleotide
tgcagaaaatcccttagtgcagaaggcgct

SEQ ID NO: 320413 - DNA, 30 bp, Artificial Sequence
  Synthetic oligonucleotide
ctcgatatctgcgcaggaggatcaggcgct

SEQ ID NO: 320414 - DNA, 30 bp, Artificial Sequence
  Synthetic oligonucleotide
gcgtgttataaaattcataatcggggcgct

SEQ ID NO: 320415 - DNA, 30 bp, Artificial Sequence
  Synthetic oligonucleotide
acattgactgcaagggaccgtaatggcgct

SEQ ID NO: 320416 - DNA, 30 bp, Artificial Sequence
  Synthetic oligonucleotide
gcaggatataggcccccaccagatggcgct

SEQ ID NO: 320417 - DNA, 30 bp, Artificial Sequence
  Synthetic oligonucleotide
gtaaatattccgagtgttagggatggcgct

SEQ ID NO: 320418 - DNA, 30 bp, Artificial Sequence
  Synthetic oligonucleotide
aagccgtcgcatcggcatcttgttggcgct

SEQ ID NO: 320419 - DNA, 30 bp, Artificial Sequence
  Synthetic oligonucleotide
cgcatttatgttgaggtccccttctgcgct

SEQ ID NO: 320420 - DNA, 30 bp, Artificial Sequence
  Synthetic oligonucleotide
ttgataaagcggtcgcttttacggtgcgct

SEQ ID NO: 320421 - DNA, 30 bp, Artificial Sequence
  Synthetic oligonucleotide
caggttacgctggcaaagttcttcatcgct

SEQ ID NO: 320422 - DNA, 30 bp, Artificial Sequence
  Synthetic oligonucleotide
atactgtgcacaccccaggggtcgatcgct

SEQ ID NO: 320423 - DNA, 30 bp, Artificial Sequence
  Synthetic oligonucleotide
agcacaatgagcaagacggaacgtatcgct

SEQ ID NO: 320424 - DNA, 30 bp, Artificial Sequence
  Synthetic oligonucleotide
tgaaaccaatctcgccacatggttatcgct

SEQ ID NO: 320425 - DNA, 30 bp, Artificial Sequence
  Synthetic oligonucleotide
gacgcaggtttaagatagagggcactcgct

SEQ ID NO: 320426 - DNA, 30 bp, Artificial Sequence
  Synthetic oligonucleotide
gctacgcgtactcgtaaatggaccctcgct

SEQ ID NO: 320427 - DNA, 30 bp, Artificial Sequence
  Synthetic oligonucleotide
cctttttatctttatgcgcgtctagtcgct

SEQ ID NO: 320428 - DNA, 30 bp, Artificial Sequence
  Synthetic oligonucleotide
aaatgtattgcgcgtcgattgcgcgtcgct

SEQ ID NO: 320429 - DNA, 30 bp, Artificial Sequence
  Synthetic oligonucleotide
ctccgggtttcgatgtctagtttcgtcgct

SEQ ID NO: 320430 - DNA, 30 bp, Artificial Sequence
  Synthetic oligonucleotide
ctctctacttagtttaggtcatctgtcgct

SEQ ID NO: 320431 - DNA, 30 bp, Artificial Sequence
  Synthetic oligonucleotide
cgaaattaaagcacgggcactagattcgct

SEQ ID NO: 320432 - DNA, 30 bp, Artificial Sequence
  Synthetic oligonucleotide
ttggagtacgctcccaaagcgaagttcgct

SEQ ID NO: 320433 - DNA, 30 bp, Artificial Sequence
  Synthetic oligonucleotide
gcggtgtttaaatccggaaggatgttcgct

SEQ ID NO: 320434 - DNA, 30 bp, Artificial Sequence
  Synthetic oligonucleotide
gcacctgggtcgcgggtgtgcttgttcgct

SEQ ID NO: 320435 - DNA, 30 bp, Artificial Sequence
  Synthetic oligonucleotide
tggtctagccatgggttctagcttttcgct

SEQ ID NO: 320436 - DNA, 30 bp, Artificial Sequence
  Synthetic oligonucleotide
cgctacgaggaggttacggcgcaaaaggct

SEQ ID NO: 320437 - DNA, 30 bp, Artificial Sequence
  Synthetic oligonucleotide
cagacagcactattggctaaccgtaaggct

SEQ ID NO: 320438 - DNA, 30 bp, Artificial Sequence
  Synthetic oligonucleotide
gagctaggcaagcggtaaagttaacaggct

SEQ ID NO: 320439 - DNA, 30 bp, Artificial Sequence
  Synthetic oligonucleotide
gcaaggcggccgtccattcgaattcaggct

SEQ ID NO: 320440 - DNA, 30 bp, Artificial Sequence
  Synthetic oligonucleotide
ggcgaagagtggattcggaatacagaggct

SEQ ID NO: 320441 - DNA, 30 bp, Artificial Sequence
  Synthetic oligonucleotide
atcacaacaacgtccaataggtaggaggct

SEQ ID NO: 320442 - DNA, 30 bp, Artificial Sequence
  Synthetic oligonucleotide
gcggattagtattttggacatggggaggct

SEQ ID NO: 320443 - DNA, 30 bp, Artificial Sequence
  Synthetic oligonucleotide
gatcttaaagaaatacgaggacttgaggct

SEQ ID NO: 320444 - DNA, 30 bp, Artificial Sequence
  Synthetic oligonucleotide
cccttatgggcgagatacgttgactaggct

SEQ ID NO: 320445 - DNA, 30 bp, Artificial Sequence
  Synthetic oligonucleotide
ggacgtacaccgtagcggtagaaaacggct

SEQ ID NO: 320446 - DNA, 30 bp, Artificial Sequence
  Synthetic oligonucleotide
ctgcagtcagggcgcagtgattaaacggct

SEQ ID NO: 320447 - DNA, 30 bp, Artificial Sequence
  Synthetic oligonucleotide
gatcaccgaaaagctatggttaacacggct

SEQ ID NO: 320448 - DNA, 30 bp, Artificial Sequence
  Synthetic oligonucleotide
gctcaccgcacggagtccatatatacggct

SEQ ID NO: 320449 - DNA, 30 bp, Artificial Sequence
  Synthetic oligonucleotide
aacgatggcgcgcaggcacgtagcccggct

SEQ ID NO: 320450 - DNA, 29 bp, Artificial Sequence
  Synthetic oligonucleotide
atgttggggggacggtcctccttccggct

SEQ ID NO: 320451 - DNA, 30 bp, Artificial Sequence
  Synthetic oligonucleotide
catagctcggagccattctttaacgcggct

SEQ ID NO: 320452 - DNA, 30 bp, Artificial Sequence
  Synthetic oligonucleotide
aaggctgtggccttagtggttgtcgcggct

SEQ ID NO: 320453 - DNA, 30 bp, Artificial Sequence
  Synthetic oligonucleotide
cgtcggcagtacccaaacgggcaggcggct

SEQ ID NO: 320454 - DNA, 30 bp, Artificial Sequence
  Synthetic oligonucleotide
aatgaatagtgttggggagatacggcggct

SEQ ID NO: 320455 - DNA, 30 bp, Artificial Sequence
  Synthetic oligonucleotide
tagagattggcaatgtcatctcactcggct

SEQ ID NO: 320456 - DNA, 30 bp, Artificial Sequence
  Synthetic oligonucleotide
gacgaaagtttctagttaaactactcggct

SEQ ID NO: 320457 - DNA, 30 bp, Artificial Sequence
  Synthetic oligonucleotide
cagacacaggcgaccggacgcatctcggct

SEQ ID NO: 320458 - DNA, 30 bp, Artificial Sequence
  Synthetic oligonucleotide
gcggttctctgactaatttttaagtcggct

SEQ ID NO: 320459 - DNA, 30 bp, Artificial Sequence
  Synthetic oligonucleotide
atatgtgtttgtctggttaagggttcggct

SEQ ID NO: 320460 - DNA, 30 bp, Artificial Sequence
  Synthetic oligonucleotide
ccacagggttcatcttaaacgccaagggct

SEQ ID NO: 320461 - DNA, 30 bp, Artificial Sequence
  Synthetic oligonucleotide
tagagtaggttgtacgctaagtcaagggct

SEQ ID NO: 320462 - DNA, 30 bp, Artificial Sequence
  Synthetic oligonucleotide
catctcagacgattacggccccgaagggct

SEQ ID NO: 320463 - DNA, 30 bp, Artificial Sequence
  Synthetic oligonucleotide
attctctgcgcaaatacgatgttaagggct

SEQ ID NO: 320464 - DNA, 30 bp, Artificial Sequence
  Synthetic oligonucleotide
taattatcgctattgaaatacagcagggct

SEQ ID NO: 320465 - DNA, 30 bp, Artificial Sequence
  Synthetic oligonucleotide
aaggcaagtgggttttacgttggcagggct

SEQ ID NO: 320466 - DNA, 30 bp, Artificial Sequence
  Synthetic oligonucleotide
aaaaattccagttgagacgtgtgcagggct

SEQ ID NO: 320467 - DNA, 30 bp, Artificial Sequence
  Synthetic oligonucleotide
gcttcttcgatgctgatgggtcggagggct

SEQ ID NO: 320468 - DNA, 30 bp, Artificial Sequence
  Synthetic oligonucleotide
gaccttggaagcgccatcgtactgagggct

SEQ ID NO: 320469 - DNA, 30 bp, Artificial Sequence
  Synthetic oligonucleotide
caatccgatacacacgggccatatagggct

SEQ ID NO: 320470 - DNA, 30 bp, Artificial Sequence
  Synthetic oligonucleotide
gatacatctgacgagaaatcccctagggct

SEQ ID NO: 320471 - DNA, 30 bp, Artificial Sequence
  Synthetic oligonucleotide
catcggagaaggagtgcaggcacgcgggct

SEQ ID NO: 320472 - DNA, 30 bp, Artificial Sequence
  Synthetic oligonucleotide
cgagacggagggcgccacggtgatcgggct

SEQ ID NO: 320473 - DNA, 30 bp, Artificial Sequence
  Synthetic oligonucleotide
ggcacgcgtaaagggcgctccgctcgggct

SEQ ID NO: 320474 - DNA, 31 bp, Artificial Sequence
  Synthetic oligonucleotide
tgaggcgacgcctgttctgggcgctcgggct

SEQ ID NO: 320475 - DNA, 30 bp, Artificial Sequence
  Synthetic oligonucleotide
ctatgcgttctcggcgataccctcggggct

SEQ ID NO: 320476 - DNA, 30 bp, Artificial Sequence
  Synthetic oligonucleotide
attatatgcctggacgtgataagtggggct

SEQ ID NO: 320477 - DNA, 30 bp, Artificial Sequence
  Synthetic oligonucleotide
gggtggctattcatggagccgtactgggct

SEQ ID NO: 320478 - DNA, 30 bp, Artificial Sequence
  Synthetic oligonucleotide
aacaagaaaggcataatgccgacgtgggct

SEQ ID NO: 320479 - DNA, 30 bp, Artificial Sequence
  Synthetic oligonucleotide
ggcgtttgttagtggtactcgtcttgggct

SEQ ID NO: 320480 - DNA, 30 bp, Artificial Sequence
  Synthetic oligonucleotide
ggggtctgtatcattccactataaatggct

SEQ ID NO: 320481 - DNA, 30 bp, Artificial Sequence
  Synthetic oligonucleotide
tggagaatctgggattattaatcaatggct

SEQ ID NO: 320482 - DNA, 30 bp, Artificial Sequence
  Synthetic oligonucleotide
tagataacaggccttatgtacgacatggct

SEQ ID NO: 320483 - DNA, 30 bp, Artificial Sequence
  Synthetic oligonucleotide
gagtggaagtgggtcggcggcaccatggct

SEQ ID NO: 320484 - DNA, 30 bp, Artificial Sequence
  Synthetic oligonucleotide
gtgcgggtgcttcgacgcctcccgatggct

SEQ ID NO: 320485 - DNA, 30 bp, Artificial Sequence
  Synthetic oligonucleotide
taggccaatccggtataccaggtgatggct

SEQ ID NO: 320486 - DNA, 30 bp, Artificial Sequence
  Synthetic oligonucleotide
taagtgtgaagactgaagttcattatggct

SEQ ID NO: 320487 - DNA, 30 bp, Artificial Sequence
  Synthetic oligonucleotide
aggactggcttaactcgtagttaactggct

SEQ ID NO: 320488 - DNA, 30 bp, Artificial Sequence
  Synthetic oligonucleotide
gtaatcagacgtactaatttgccactggct

SEQ ID NO: 320489 - DNA, 30 bp, Artificial Sequence
  Synthetic oligonucleotide
tgggagaggagcgattgttaagtactggct

SEQ ID NO: 320490 - DNA, 30 bp, Artificial Sequence
  Synthetic oligonucleotide
gagttccatcctaacagagacgatctggct

SEQ ID NO: 320491 - DNA, 30 bp, Artificial Sequence
  Synthetic oligonucleotide
gtataaggtgcctcctagccgagtctggct

SEQ ID NO: 320492 - DNA, 30 bp, Artificial Sequence
  Synthetic oligonucleotide
aaatcagacgcaaataaaagagcagtggct

SEQ ID NO: 320493 - DNA, 30 bp, Artificial Sequence
  Synthetic oligonucleotide
gactatacccgggctttcgacgccgtggct

SEQ ID NO: 320494 - DNA, 30 bp, Artificial Sequence
  Synthetic oligonucleotide
tcaacatggcatatgggaccgagtgtggct

SEQ ID NO: 320495 - DNA, 30 bp, Artificial Sequence
  Synthetic oligonucleotide
ctttaacacccatgcacgtcgcgtgtggct

SEQ ID NO: 320496 - DNA, 30 bp, Artificial Sequence
  Synthetic oligonucleotide
atccgagtagtacgttgccttaccttggct

SEQ ID NO: 320497 - DNA, 30 bp, Artificial Sequence
  Synthetic oligonucleotide
ctggatcacctaaaatgacgaagcttggct

SEQ ID NO: 320498 - DNA, 30 bp, Artificial Sequence
  Synthetic oligonucleotide
atatcagtaacttagcatattgggttggct

SEQ ID NO: 320499 - DNA, 30 bp, Artificial Sequence
  Synthetic oligonucleotide
ttatgcgcaactgcgctgctatggttggct

SEQ ID NO: 320500 - DNA, 30 bp, Artificial Sequence
  Synthetic oligonucleotide
taggctcacaatcaataaccaaatttggct

SEQ ID NO: 320501 - DNA, 30 bp, Artificial Sequence
  Synthetic oligonucleotide
agcatcaccctcttgggtaagtgcaatgct

SEQ ID NO: 320502 - DNA, 30 bp, Artificial Sequence
  Synthetic oligonucleotide
caattcagcagacaatgggatctgaatgct

SEQ ID NO: 320503 - DNA, 30 bp, Artificial Sequence
  Synthetic oligonucleotide
gcacaggtaaccaaaagccctgttaatgct

SEQ ID NO: 320504 - DNA, 30 bp, Artificial Sequence
  Synthetic oligonucleotide
agacatatttgtctaagtatcgagcatgct

SEQ ID NO: 320505 - DNA, 30 bp, Artificial Sequence
  Synthetic oligonucleotide
tgccttttgggctacaccataggcgatgct

SEQ ID NO: 320506 - DNA, 30 bp, Artificial Sequence
  Synthetic oligonucleotide
atgcactcaatagcgcggcactcggatgct

SEQ ID NO: 320507 - DNA, 30 bp, Artificial Sequence
  Synthetic oligonucleotide
gagggagctacatttttcgatggggatgct

SEQ ID NO: 320508 - DNA, 29 bp, Artificial Sequence
  Synthetic oligonucleotide
tatcccacactaggtcgatagatgatgct

SEQ ID NO: 320509 - DNA, 30 bp, Artificial Sequence
  Synthetic oligonucleotide
ggattgcatgtttcaatctggtgtgatgct

SEQ ID NO: 320510 - DNA, 30 bp, Artificial Sequence
  Synthetic oligonucleotide
gtgcaatatatggtagcacaataatatgct

SEQ ID NO: 320511 - DNA, 30 bp, Artificial Sequence
  Synthetic oligonucleotide
taatggtaggaggttactaggaactatgct

SEQ ID NO: 320512 - DNA, 30 bp, Artificial Sequence
  Synthetic oligonucleotide
tcgcaaggttgttgttcacatcactatgct

SEQ ID NO: 320513 - DNA, 30 bp, Artificial Sequence
  Synthetic oligonucleotide
tagagaactggatgtagtcaaggctatgct

SEQ ID NO: 320514 - DNA, 30 bp, Artificial Sequence
  Synthetic oligonucleotide
cttgaaacaattagaacgagttagtatgct

SEQ ID NO: 320515 - DNA, 30 bp, Artificial Sequence
  Synthetic oligonucleotide
actgaaagagggaagaagtgggggtatgct

SEQ ID NO: 320516 - DNA, 30 bp, Artificial Sequence
  Synthetic oligonucleotide
ggaacgcatgaccgggatggtctgtatgct

SEQ ID NO: 320517 - DNA, 30 bp, Artificial Sequence
  Synthetic oligonucleotide
ccgaaaggcactaaggtcgggaaacctgct

SEQ ID NO: 320518 - DNA, 30 bp, Artificial Sequence
  Synthetic oligonucleotide
aactccccctgggtttcagaaatacctgct

SEQ ID NO: 320519 - DNA, 31 bp, Artificial Sequence
  Synthetic oligonucleotide
ctctaccagttggccattttcggagcctgct

SEQ ID NO: 320520 - DNA, 30 bp, Artificial Sequence
  Synthetic oligonucleotide
tgcgggaaagatctacttcactacgctgct

SEQ ID NO: 320521 - DNA, 31 bp, Artificial Sequence
  Synthetic oligonucleotide
taaattctagcggataaattggacggctgct

SEQ ID NO: 320522 - DNA, 30 bp, Artificial Sequence
  Synthetic oligonucleotide
accgtgataactaaatgtgtctttgctgct

SEQ ID NO: 320523 - DNA, 30 bp, Artificial Sequence
  Synthetic oligonucleotide
gcgggaaataaatagttcgaaggatctgct

SEQ ID NO: 320524 - DNA, 30 bp, Artificial Sequence
  Synthetic oligonucleotide
tacacttaagggagttcaatcaactctgct

SEQ ID NO: 320525 - DNA, 30 bp, Artificial Sequence
  Synthetic oligonucleotide
gcagcggggtttaagggggcggaaagtgct

SEQ ID NO: 320526 - DNA, 30 bp, Artificial Sequence
  Synthetic oligonucleotide
gacagattgcgagaaccgggcgcaagtgct

SEQ ID NO: 320527 - DNA, 30 bp, Artificial Sequence
  Synthetic oligonucleotide
gatattctaacattgagcgtcagaagtgct

SEQ ID NO: 320528 - DNA, 30 bp, Artificial Sequence
  Synthetic oligonucleotide
ttaagaacgcccgtatgatgtcccagtgct

SEQ ID NO: 320529 - DNA, 30 bp, Artificial Sequence
  Synthetic oligonucleotide
gagattcattagctaagcttcaagagtgct

SEQ ID NO: 320530 - DNA, 30 bp, Artificial Sequence
  Synthetic oligonucleotide
catcttatacaggtcccgatgttgagtgct

SEQ ID NO: 320531 - DNA, 30 bp, Artificial Sequence
  Synthetic oligonucleotide
aaagtagtcgttggtacctcgccacgtgct

SEQ ID NO: 320532 - DNA, 30 bp, Artificial Sequence
  Synthetic oligonucleotide
tgaaacggtagaatttgaaactatcgtgct

SEQ ID NO: 320533 - DNA, 30 bp, Artificial Sequence
  Synthetic oligonucleotide
tatagacatacaagattcggaccaggtgct

SEQ ID NO: 320534 - DNA, 30 bp, Artificial Sequence
  Synthetic oligonucleotide
tggatcaagcagacttactgagacggtgct

SEQ ID NO: 320535 - DNA, 30 bp, Artificial Sequence
  Synthetic oligonucleotide
gcacacagtaagtgctctcagtacggtgct

SEQ ID NO: 320536 - DNA, 30 bp, Artificial Sequence
  Synthetic oligonucleotide
atgtgggttagagggtagccggagggtgct

SEQ ID NO: 320537 - DNA, 30 bp, Artificial Sequence
  Synthetic oligonucleotide
agcaagccctaatagatctaagctggtgct

SEQ ID NO: 320538 - DNA, 30 bp, Artificial Sequence
  Synthetic oligonucleotide
agttatgagagaggccttacgtctggtgct

SEQ ID NO: 320539 - DNA, 30 bp, Artificial Sequence
  Synthetic oligonucleotide
gacacacggtccgtgttcagggcatgtgct

SEQ ID NO: 320540 - DNA, 29 bp, Artificial Sequence
  Synthetic oligonucleotide
cctacgcgactctatgaacggactgtgct

SEQ ID NO: 320541 - DNA, 30 bp, Artificial Sequence
  Synthetic oligonucleotide
tgcgagtcagccgtttacgtcacctgtgct

SEQ ID NO: 320542 - DNA, 30 bp, Artificial Sequence
  Synthetic oligonucleotide
aaactacggttcgctagttgtagctgtgct

SEQ ID NO: 320543 - DNA, 30 bp, Artificial Sequence
  Synthetic oligonucleotide
gttgacaactcgcgtcctggttattgtgct

SEQ ID NO: 320544 - DNA, 30 bp, Artificial Sequence
  Synthetic oligonucleotide
catcgtggcatgacaactcagcccattgct

SEQ ID NO: 320545 - DNA, 30 bp, Artificial Sequence
  Synthetic oligonucleotide
catgtctagatacggacgacggggattgct

SEQ ID NO: 320546 - DNA, 30 bp, Artificial Sequence
  Synthetic oligonucleotide
taaaggattcgtcgatcgtaaagtattgct

SEQ ID NO: 320547 - DNA, 30 bp, Artificial Sequence
  Synthetic oligonucleotide
cgctctcgtctcgacgccgagtcacttgct

SEQ ID NO: 320548 - DNA, 30 bp, Artificial Sequence
  Synthetic oligonucleotide
tagacactgcgcccggagcagggacttgct

SEQ ID NO: 320549 - DNA, 30 bp, Artificial Sequence
  Synthetic oligonucleotide
atacgaactcggaggctggtacggcttgct

SEQ ID NO: 320550 - DNA, 30 bp, Artificial Sequence
  Synthetic oligonucleotide
agccaactggtattctgtgcggttcttgct

SEQ ID NO: 320551 - DNA, 30 bp, Artificial Sequence
  Synthetic oligonucleotide
actggtgagcgcctagaaattacggttgct

SEQ ID NO: 320552 - DNA, 30 bp, Artificial Sequence
  Synthetic oligonucleotide
gtgtgagaggcttcctttgtgtgggttgct

SEQ ID NO: 320553 - DNA, 30 bp, Artificial Sequence
  Synthetic oligonucleotide
gcctgcttaggaaatcgttcggaatttgct

SEQ ID NO: 320554 - DNA, 30 bp, Artificial Sequence
  Synthetic oligonucleotide
attgaactcgttaaaaacttgacatttgct

SEQ ID NO: 320555 - DNA, 30 bp, Artificial Sequence
  Synthetic oligonucleotide
gtaaccggcctttaggtcccagtatttgct

SEQ ID NO: 320556 - DNA, 30 bp, Artificial Sequence
  Synthetic oligonucleotide
tcaataacatgaaaaatggtcacgtttgct

SEQ ID NO: 320557 - DNA, 30 bp, Artificial Sequence
  Synthetic oligonucleotide
tggacattcccgaagtcgatcatgtttgct

SEQ ID NO: 320558 - DNA, 30 bp, Artificial Sequence
  Synthetic oligonucleotide
accctattcgtgtaggcaacgaattttgct

SEQ ID NO: 320559 - DNA, 30 bp, Artificial Sequence
  Synthetic oligonucleotide
gaagaggagcgaccagaagttgattttgct

SEQ ID NO: 320560 - DNA, 30 bp, Artificial Sequence
  Synthetic oligonucleotide
ctcctcaaggtcagggtgggatcttttgct

SEQ ID NO: 320561 - DNA, 30 bp, Artificial Sequence
  Synthetic oligonucleotide
acatacggcgagtcttatattggttttgct

SEQ ID NO: 320562 - DNA, 30 bp, Artificial Sequence
  Synthetic oligonucleotide
atgtaccatgctcgactgagggacaaatct

SEQ ID NO: 320563 - DNA, 30 bp, Artificial Sequence
  Synthetic oligonucleotide
tttgtgcacccggcggggattatgaaatct

SEQ ID NO: 320564 - DNA, 30 bp, Artificial Sequence
  Synthetic oligonucleotide
ggttggaaggcagatcgaatataacaatct

SEQ ID NO: 320565 - DNA, 30 bp, Artificial Sequence
  Synthetic oligonucleotide
ttgtcggaaaagtgatacctctcgcaatct

SEQ ID NO: 320566 - DNA, 30 bp, Artificial Sequence
  Synthetic oligonucleotide
aagagaaccgaatgatttttagcggaatct

SEQ ID NO: 320567 - DNA, 30 bp, Artificial Sequence
  Synthetic oligonucleotide
gcggatcaatactctatgtatatggaatct

SEQ ID NO: 320568 - DNA, 30 bp, Artificial Sequence
  Synthetic oligonucleotide
aaggaatgatcttaggctatgcgataatct

SEQ ID NO: 320569 - DNA, 30 bp, Artificial Sequence
  Synthetic oligonucleotide
acatgcctagtcagtgcctgttactaatct

SEQ ID NO: 320570 - DNA, 30 bp, Artificial Sequence
  Synthetic oligonucleotide
caaggaaaattcgctgcgaagagctaatct

SEQ ID NO: 320571 - DNA, 30 bp, Artificial Sequence
  Synthetic oligonucleotide
gataaacattctctgaatcagatgtaatct

SEQ ID NO: 320572 - DNA, 30 bp, Artificial Sequence
  Synthetic oligonucleotide
accgccatcctgaattcgcactgcacatct

SEQ ID NO: 320573 - DNA, 30 bp, Artificial Sequence
  Synthetic oligonucleotide
cttccgtacggagaacgacgaacgacatct

SEQ ID NO: 320574 - DNA, 30 bp, Artificial Sequence
  Synthetic oligonucleotide
gcgtcctgagcattataccaaagtacatct

SEQ ID NO: 320575 - DNA, 30 bp, Artificial Sequence
  Synthetic oligonucleotide
gcgtccagaatatacagccacagtacatct

SEQ ID NO: 320576 - DNA, 30 bp, Artificial Sequence
  Synthetic oligonucleotide
acgtgccctacaacggtagtttcaccatct

SEQ ID NO: 320577 - DNA, 30 bp, Artificial Sequence
  Synthetic oligonucleotide
aggcagcaccgggccattaaacggccatct

SEQ ID NO: 320578 - DNA, 30 bp, Artificial Sequence
  Synthetic oligonucleotide
tactctgcctatgaaaagttacggccatct

SEQ ID NO: 320579 - DNA, 30 bp, Artificial Sequence
  Synthetic oligonucleotide
ctccagtccattccaaaggaacatccatct

SEQ ID NO: 320580 - DNA, 30 bp, Artificial Sequence
  Synthetic oligonucleotide
atggcgttgcgccggctgggttatccatct

SEQ ID NO: 320581 - DNA, 30 bp, Artificial Sequence
  Synthetic oligonucleotide
cgcataaatagtgcttcaaagaaagcatct

SEQ ID NO: 320582 - DNA, 30 bp, Artificial Sequence
  Synthetic oligonucleotide
cgtcgttcggcccgagaaggggaagcatct

SEQ ID NO: 320583 - DNA, 30 bp, Artificial Sequence
  Synthetic oligonucleotide
aacaaggtctcgtagaggtgataagcatct

SEQ ID NO: 320584 - DNA, 30 bp, Artificial Sequence
  Synthetic oligonucleotide
aaccggaactattggcacatcgcagcatct

SEQ ID NO: 320585 - DNA, 30 bp, Artificial Sequence
  Synthetic oligonucleotide
atatactgtgacggtacacatggcgcatct

SEQ ID NO: 320586 - DNA, 30 bp, Artificial Sequence
  Synthetic oligonucleotide
cgacattgccagatttaattttcggcatct

SEQ ID NO: 320587 - DNA, 30 bp, Artificial Sequence
  Synthetic oligonucleotide
ctcaagagagaccgcacgcgcgctgcatct

SEQ ID NO: 320588 - DNA, 30 bp, Artificial Sequence
  Synthetic oligonucleotide
gtctagtgtgcctctagactgagtgcatct

SEQ ID NO: 320589 - DNA, 30 bp, Artificial Sequence
  Synthetic oligonucleotide
gtttggagatgtatgaactattgatcatct

SEQ ID NO: 320590 - DNA, 30 bp, Artificial Sequence
  Synthetic oligonucleotide
aacgtatttaaaatgttgaggctatcatct

SEQ ID NO: 320591 - DNA, 30 bp, Artificial Sequence
  Synthetic oligonucleotide
gatgacggtaaaaacttagcactttcatct

SEQ ID NO: 320592 - DNA, 30 bp, Artificial Sequence
  Synthetic oligonucleotide
acatcagcaggtgatgtcacctcaagatct

SEQ ID NO: 320593 - DNA, 30 bp, Artificial Sequence
  Synthetic oligonucleotide
atagacggtcgagtctaccacttaagatct

SEQ ID NO: 320594 - DNA, 30 bp, Artificial Sequence
  Synthetic oligonucleotide
aggtgagtcgcttagaagttttccagatct

SEQ ID NO: 320595 - DNA, 30 bp, Artificial Sequence
  Synthetic oligonucleotide
cactagttgaggacctggagaggcagatct

SEQ ID NO: 320596 - DNA, 30 bp, Artificial Sequence
  Synthetic oligonucleotide
tggtaccttccacgtttgctcgtcagatct

SEQ ID NO: 320597 - DNA, 30 bp, Artificial Sequence
  Synthetic oligonucleotide
gatagatcgtgcatgtcccagcgtagatct

SEQ ID NO: 320598 - DNA, 30 bp, Artificial Sequence
  Synthetic oligonucleotide
gccaaataggtttatgcacgtgttagatct

SEQ ID NO: 320599 - DNA, 30 bp, Artificial Sequence
  Synthetic oligonucleotide
gtccttaccggtattcgtagtcaacgatct

SEQ ID NO: 320600 - DNA, 30 bp, Artificial Sequence
  Synthetic oligonucleotide
cttatgatgaagttttatctagcacgatct

SEQ ID NO: 320601 - DNA, 30 bp, Artificial Sequence
  Synthetic oligonucleotide
tgtataaggacgggccgtacagaccgatct

SEQ ID NO: 320602 - DNA, 30 bp, Artificial Sequence
  Synthetic oligonucleotide
attaagagaatgattgcagctgtccgatct

SEQ ID NO: 320603 - DNA, 30 bp, Artificial Sequence
  Synthetic oligonucleotide
gatcgtagaacgtgatgaacgctgcgatct

SEQ ID NO: 320604 - DNA, 30 bp, Artificial Sequence
  Synthetic oligonucleotide
cttaactactcaggttcgtcttttcgatct

SEQ ID NO: 320605 - DNA, 30 bp, Artificial Sequence
  Synthetic oligonucleotide
actgacgcacgagtggaacatacaggatct

SEQ ID NO: 320606 - DNA, 30 bp, Artificial Sequence
  Synthetic oligonucleotide
catgccaacgtcaagtatcggcccggatct

SEQ ID NO: 320607 - DNA, 30 bp, Artificial Sequence
  Synthetic oligonucleotide
gtctgtaccgacggtccaccacgcggatct

SEQ ID NO: 320608 - DNA, 30 bp, Artificial Sequence
  Synthetic oligonucleotide
agtattgagggtttaaggatcacgggatct

SEQ ID NO: 320609 - DNA, 30 bp, Artificial Sequence
  Synthetic oligonucleotide
gccatcgtattccggcaaattgcgggatct

SEQ ID NO: 320610 - DNA, 30 bp, Artificial Sequence
  Synthetic oligonucleotide
gcgagccggtgactccagaggcgtggatct

SEQ ID NO: 320611 - DNA, 30 bp, Artificial Sequence
  Synthetic oligonucleotide
taaaattctacctcggactcgtgtggatct

SEQ ID NO: 320612 - DNA, 29 bp, Artificial Sequence
  Synthetic oligonucleotide
tagatacgtcagggctggaaatatgatct

SEQ ID NO: 320613 - DNA, 30 bp, Artificial Sequence
  Synthetic oligonucleotide
ggagatgcagcgtgaaattgcatatgatct

SEQ ID NO: 320614 - DNA, 30 bp, Artificial Sequence
  Synthetic oligonucleotide
gaatagggaggtgctgcgccgcagtgatct

SEQ ID NO: 320615 - DNA, 30 bp, Artificial Sequence
  Synthetic oligonucleotide
gccaaaacagaacgttcctgatggtgatct

SEQ ID NO: 320616 - DNA, 30 bp, Artificial Sequence
  Synthetic oligonucleotide
tgtcacctgtcattacgccagttgtgatct

SEQ ID NO: 320617 - DNA, 30 bp, Artificial Sequence
  Synthetic oligonucleotide
tcctgacgttcacgcgtctaaagttgatct

SEQ ID NO: 320618 - DNA, 30 bp, Artificial Sequence
  Synthetic oligonucleotide
agtgaatcttaaccggtgaggggttgatct

SEQ ID NO: 320619 - DNA, 30 bp, Artificial Sequence
  Synthetic oligonucleotide
aagttgggtgcgtccatatatggttgatct

SEQ ID NO: 320620 - DNA, 30 bp, Artificial Sequence
  Synthetic oligonucleotide
gactgaagatattatctccatttttgatct

SEQ ID NO: 320621 - DNA, 30 bp, Artificial Sequence
  Synthetic oligonucleotide
tgaagcccctgtaacggaagggtaatatct

SEQ ID NO: 320622 - DNA, 30 bp, Artificial Sequence
  Synthetic oligonucleotide
gatgcactgatggatctacggtacatatct

SEQ ID NO: 320623 - DNA, 30 bp, Artificial Sequence
  Synthetic oligonucleotide
atgaccggacttccattgttagccatatct

SEQ ID NO: 320624 - DNA, 30 bp, Artificial Sequence
  Synthetic oligonucleotide
aaatacagatcctattccttgtccatatct

SEQ ID NO: 320625 - DNA, 30 bp, Artificial Sequence
  Synthetic oligonucleotide
acgaaatgtctctaggcggcagtcatatct

SEQ ID NO: 320626 - DNA, 30 bp, Artificial Sequence
  Synthetic oligonucleotide
aatctgcgtatcgtttatgtgagtatatct

SEQ ID NO: 320627 - DNA, 30 bp, Artificial Sequence
  Synthetic oligonucleotide
tatgcgtactgtgtgtatcaggaactatct

SEQ ID NO: 320628 - DNA, 30 bp, Artificial Sequence
  Synthetic oligonucleotide
tgatgctacaaaagcgctttttaactatct

SEQ ID NO: 320629 - DNA, 30 bp, Artificial Sequence
  Synthetic oligonucleotide
gtgatcatacacgggtagatttccctatct

SEQ ID NO: 320630 - DNA, 30 bp, Artificial Sequence
  Synthetic oligonucleotide
atcacgatgttgttaggaatagagctatct

SEQ ID NO: 320631 - DNA, 30 bp, Artificial Sequence
  Synthetic oligonucleotide
tatggaaaaagtacatacgcaggagtatct

SEQ ID NO: 320632 - DNA, 30 bp, Artificial Sequence
  Synthetic oligonucleotide
aaataaatgtcctgttatagtttagtatct

SEQ ID NO: 320633 - DNA, 30 bp, Artificial Sequence
  Synthetic oligonucleotide
cagtcctgtgcatttgccatgtacgtatct

SEQ ID NO: 320634 - DNA, 30 bp, Artificial Sequence
  Synthetic oligonucleotide
ggcaggcggtgtgttttttcagccgtatct

SEQ ID NO: 320635 - DNA, 30 bp, Artificial Sequence
  Synthetic oligonucleotide
cttacacgctgatggttatctgcggtatct

SEQ ID NO: 320636 - DNA, 30 bp, Artificial Sequence
  Synthetic oligonucleotide
tcgcgccaaaagatctaaactgtggtatct

SEQ ID NO: 320637 - DNA, 30 bp, Artificial Sequence
  Synthetic oligonucleotide
aggtctgttcctggatcatttacattatct

SEQ ID NO: 320638 - DNA, 30 bp, Artificial Sequence
  Synthetic oligonucleotide
tatgcgaaagggtacttacaggtattatct

SEQ ID NO: 320639 - DNA, 30 bp, Artificial Sequence
  Synthetic oligonucleotide
gcacgggcatcccaaagacagcccttatct

SEQ ID NO: 320640 - DNA, 30 bp, Artificial Sequence
  Synthetic oligonucleotide
tcaggttaccgttggtaacgaacgttatct

SEQ ID NO: 320641 - DNA, 30 bp, Artificial Sequence
  Synthetic oligonucleotide
gaatacttctctgggaatggtgtaaactct

SEQ ID NO: 320642 - DNA, 30 bp, Artificial Sequence
  Synthetic oligonucleotide
acactaagacaatccaacttgaccaactct

SEQ ID NO: 320643 - DNA, 30 bp, Artificial Sequence
  Synthetic oligonucleotide
acgagaggtcctggtcagcatgccaactct

SEQ ID NO: 320644 - DNA, 30 bp, Artificial Sequence
  Synthetic oligonucleotide
ccctgcgcaacggctcatgattccaactct

SEQ ID NO: 320645 - DNA, 30 bp, Artificial Sequence
  Synthetic oligonucleotide
taccgtcttctgtaattatcgggcaactct

SEQ ID NO: 320646 - DNA, 30 bp, Artificial Sequence
  Synthetic oligonucleotide
ccgccttgtagaatggacgtgtgcaactct

SEQ ID NO: 320647 - DNA, 30 bp, Artificial Sequence
  Synthetic oligonucleotide
tataatgcatcatatggtatcctcaactct

SEQ ID NO: 320648 - DNA, 30 bp, Artificial Sequence
  Synthetic oligonucleotide
tacagaactaaccatatcatatctaactct

SEQ ID NO: 320649 - DNA, 30 bp, Artificial Sequence
  Synthetic oligonucleotide
gtgtaatatcggcactgataggaacactct

SEQ ID NO: 320650 - DNA, 30 bp, Artificial Sequence
  Synthetic oligonucleotide
ttctacggctaacctctatccctacactct

SEQ ID NO: 320651 - DNA, 30 bp, Artificial Sequence
  Synthetic oligonucleotide
gagcgggtaacgctcagaagtatgcactct

SEQ ID NO: 320652 - DNA, 30 bp, Artificial Sequence
  Synthetic oligonucleotide
gatttcgactctacgtcttcggaagactct

SEQ ID NO: 320653 - DNA, 30 bp, Artificial Sequence
  Synthetic oligonucleotide
cgactggctatcttgtgggtgggagactct

SEQ ID NO: 320654 - DNA, 30 bp, Artificial Sequence
  Synthetic oligonucleotide
ccgctataaaaaacacgctgaatcgactct

SEQ ID NO: 320655 - DNA, 30 bp, Artificial Sequence
  Synthetic oligonucleotide
acctgaccggggcgcatttctgcggactct

SEQ ID NO: 320656 - DNA, 30 bp, Artificial Sequence
  Synthetic oligonucleotide
gtaaactcttgcatacgtaatatggactct

SEQ ID NO: 320657 - DNA, 30 bp, Artificial Sequence
  Synthetic oligonucleotide
tggttaaaccaagactgttagcctgactct

SEQ ID NO: 320658 - DNA, 30 bp, Artificial Sequence
  Synthetic oligonucleotide
catcctaatatatgcgtccaacgatactct

SEQ ID NO: 320659 - DNA, 30 bp, Artificial Sequence
  Synthetic oligonucleotide
aattcgggcacgagtcgtggatgatactct

SEQ ID NO: 320660 - DNA, 30 bp, Artificial Sequence
  Synthetic oligonucleotide
ctaacctagacgaaaaaccgggtatactct

SEQ ID NO: 320661 - DNA, 30 bp, Artificial Sequence
  Synthetic oligonucleotide
cttctgcgcgtacgtacgcaaaactactct

SEQ ID NO: 320662 - DNA, 30 bp, Artificial Sequence
  Synthetic oligonucleotide
catgactggcaggcgtcttgacagtactct

SEQ ID NO: 320663 - DNA, 30 bp, Artificial Sequence
  Synthetic oligonucleotide
gggtcatggaaagcgtatgtagcgtactct

SEQ ID NO: 320664 - DNA, 30 bp, Artificial Sequence
  Synthetic oligonucleotide
agctcagggttaattgaaaccaggtactct

SEQ ID NO: 320665 - DNA, 30 bp, Artificial Sequence
  Synthetic oligonucleotide
agaacgatccaagcgtacgtggggtactct

SEQ ID NO: 320666 - DNA, 30 bp, Artificial Sequence
  Synthetic oligonucleotide
gtacaaaaagcgtcggcagacacttactct

SEQ ID NO: 320667 - DNA, 30 bp, Artificial Sequence
  Synthetic oligonucleotide
agcaaactgtagtattctgatgcttactct

SEQ ID NO: 320668 - DNA, 30 bp, Artificial Sequence
  Synthetic oligonucleotide
tgtattcatgtggagagagatacaacctct

SEQ ID NO: 320669 - DNA, 30 bp, Artificial Sequence
  Synthetic oligonucleotide
ccggtactagacctacgttaagggacctct

SEQ ID NO: 320670 - DNA, 30 bp, Artificial Sequence
  Synthetic oligonucleotide
ggccaagcaggagtagggatggggacctct

SEQ ID NO: 320671 - DNA, 30 bp, Artificial Sequence
  Synthetic oligonucleotide
ggtcataaaggccgaagcgctatgacctct

SEQ ID NO: 320672 - DNA, 30 bp, Artificial Sequence
  Synthetic oligonucleotide
tagccgaaatatacttgcccttaaccctct

SEQ ID NO: 320673 - DNA, 30 bp, Artificial Sequence
  Synthetic oligonucleotide
tcgttttcaatagttgaaggtgacccctct

SEQ ID NO: 320674 - DNA, 30 bp, Artificial Sequence
  Synthetic oligonucleotide
ggcccacgcagaagaaaatgcggcccctct

SEQ ID NO: 320675 - DNA, 30 bp, Artificial Sequence
  Synthetic oligonucleotide
ccattcatgttagggatgaaccgtccctct

SEQ ID NO: 320676 - DNA, 30 bp, Artificial Sequence
  Synthetic oligonucleotide
gggtgttgtgttttttaacccattccctct

SEQ ID NO: 320677 - DNA, 30 bp, Artificial Sequence
  Synthetic oligonucleotide
aagccgccaaggagcgtcggcgaagcctct

SEQ ID NO: 320678 - DNA, 30 bp, Artificial Sequence
  Synthetic oligonucleotide
gttagggtcagagttcgacctggagcctct

SEQ ID NO: 320679 - DNA, 30 bp, Artificial Sequence
  Synthetic oligonucleotide
cgcgagatgaggatagatcgacacgcctct

SEQ ID NO: 320680 - DNA, 30 bp, Artificial Sequence
  Synthetic oligonucleotide
taagtgtgagggcactggtggcgggcctct

SEQ ID NO: 320681 - DNA, 30 bp, Artificial Sequence
  Synthetic oligonucleotide
gggcgtcccctctcgttttgtgatgcctct

SEQ ID NO: 320682 - DNA, 30 bp, Artificial Sequence
  Synthetic oligonucleotide
gtccggaagggatagcgagtattatcctct

SEQ ID NO: 320683 - DNA, 30 bp, Artificial Sequence
  Synthetic oligonucleotide
ctatctgatacattctgttatgcgtcctct

SEQ ID NO: 320684 - DNA, 30 bp, Artificial Sequence
  Synthetic oligonucleotide
taactcttttcaatatcaaccaagagctct

SEQ ID NO: 320685 - DNA, 30 bp, Artificial Sequence
  Synthetic oligonucleotide
actaatagatattttctaaattcgagctct

SEQ ID NO: 320686 - DNA, 30 bp, Artificial Sequence
  Synthetic oligonucleotide
aatgggcgatcccaacaatgtcggagctct

SEQ ID NO: 320687 - DNA, 30 bp, Artificial Sequence
  Synthetic oligonucleotide
acggtaggattgcctgctgggtatagctct

SEQ ID NO: 320688 - DNA, 30 bp, Artificial Sequence
  Synthetic oligonucleotide
aataggtgacaatataggtccagtagctct

SEQ ID NO: 320689 - DNA, 30 bp, Artificial Sequence
  Synthetic oligonucleotide
tcaagcagctgagatcgtgaggtacgctct

SEQ ID NO: 320690 - DNA, 30 bp, Artificial Sequence
  Synthetic oligonucleotide
gggccttgggcgtgatcatggttacgctct

SEQ ID NO: 320691 - DNA, 30 bp, Artificial Sequence
  Synthetic oligonucleotide
ctcacctgttgaatatgagagaatcgctct

SEQ ID NO: 320692 - DNA, 30 bp, Artificial Sequence
  Synthetic oligonucleotide
ggggggattagtgtactgcggagaggctct

SEQ ID NO: 320693 - DNA, 30 bp, Artificial Sequence
  Synthetic oligonucleotide
ttacgccaagaggaccgtggactaggctct

SEQ ID NO: 320694 - DNA, 30 bp, Artificial Sequence
  Synthetic oligonucleotide
gatgcaacgtgcctatgcatgaacggctct

SEQ ID NO: 320695 - DNA, 30 bp, Artificial Sequence
  Synthetic oligonucleotide
aggtggtgtgtagataattacgacggctct

SEQ ID NO: 320696 - DNA, 30 bp, Artificial Sequence
  Synthetic oligonucleotide
acgcaaactcattaggtcccactgggctct

SEQ ID NO: 320697 - DNA, 30 bp, Artificial Sequence
  Synthetic oligonucleotide
cgtgcaatggggtcctggttggaatgctct

SEQ ID NO: 320698 - DNA, 30 bp, Artificial Sequence
  Synthetic oligonucleotide
attgagccctcggtttgagactgatgctct

SEQ ID NO: 320699 - DNA, 30 bp, Artificial Sequence
  Synthetic oligonucleotide
ggtaatctcacgggttcaaccctctgctct

SEQ ID NO: 320700 - DNA, 30 bp, Artificial Sequence
  Synthetic oligonucleotide
ggcgaatacggtggcatatgcatttgctct

SEQ ID NO: 320701 - DNA, 30 bp, Artificial Sequence
  Synthetic oligonucleotide
gttggcaccgcctggccgtgtataatctct

SEQ ID NO: 320702 - DNA, 30 bp, Artificial Sequence
  Synthetic oligonucleotide
tacgaataccattatctctgtccgatctct

SEQ ID NO: 320703 - DNA, 30 bp, Artificial Sequence
  Synthetic oligonucleotide
tcctcatttgttgatcgtatggggatctct

SEQ ID NO: 320704 - DNA, 30 bp, Artificial Sequence
  Synthetic oligonucleotide
cccgcgtagtgactgccccgtatactctct

SEQ ID NO: 320705 - DNA, 30 bp, Artificial Sequence
  Synthetic oligonucleotide
agggacaacgcggatcaggttggggtctct

SEQ ID NO: 320706 - DNA, 30 bp, Artificial Sequence
  Synthetic oligonucleotide
caaaaggtctgtcagtatcaaaatgtctct

SEQ ID NO: 320707 - DNA, 30 bp, Artificial Sequence
  Synthetic oligonucleotide
tggtattaatggccctcgggacgtgtctct

SEQ ID NO: 320708 - DNA, 30 bp, Artificial Sequence
  Synthetic oligonucleotide
ttaggctgcgggcataaaggggaattctct

SEQ ID NO: 320709 - DNA, 30 bp, Artificial Sequence
  Synthetic oligonucleotide
agcccgtataagactctatttacattctct

SEQ ID NO: 320710 - DNA, 30 bp, Artificial Sequence
  Synthetic oligonucleotide
gtggttgaaatggacatcgagatattctct

SEQ ID NO: 320711 - DNA, 30 bp, Artificial Sequence
  Synthetic oligonucleotide
gtggcaagaagtcgttcggattccttctct

SEQ ID NO: 320712 - DNA, 30 bp, Artificial Sequence
  Synthetic oligonucleotide
gaatctaaaaaacggcgacgtgagttctct

SEQ ID NO: 320713 - DNA, 30 bp, Artificial Sequence
  Synthetic oligonucleotide
cgcgacgtgcacctacgtaacgtaaagtct

SEQ ID NO: 320714 - DNA, 30 bp, Artificial Sequence
  Synthetic oligonucleotide
gagcttgtctagcactatgacatcaagtct

SEQ ID NO: 320715 - DNA, 30 bp, Artificial Sequence
  Synthetic oligonucleotide
ggggtgtggtgtggtttggggaagaagtct

SEQ ID NO: 320716 - DNA, 30 bp, Artificial Sequence
  Synthetic oligonucleotide
aaggttgccttccattcaacgtgacagtct

SEQ ID NO: 320717 - DNA, 30 bp, Artificial Sequence
  Synthetic oligonucleotide
agtaagataagagttatattcaagcagtct

SEQ ID NO: 320718 - DNA, 30 bp, Artificial Sequence
  Synthetic oligonucleotide
cgcacatagcatttgcatattcagcagtct

SEQ ID NO: 320719 - DNA, 30 bp, Artificial Sequence
  Synthetic oligonucleotide
ggataatggtaaacgatgcactctcagtct

SEQ ID NO: 320720 - DNA, 30 bp, Artificial Sequence
  Synthetic oligonucleotide
agtactgtaacagttatctatgaagagtct

SEQ ID NO: 320721 - DNA, 30 bp, Artificial Sequence
  Synthetic oligonucleotide
taaaacctggccgttgagcagtaagagtct

SEQ ID NO: 320722 - DNA, 30 bp, Artificial Sequence
  Synthetic oligonucleotide
tttataagtagggtatgccgttccgagtct

SEQ ID NO: 320723 - DNA, 30 bp, Artificial Sequence
  Synthetic oligonucleotide
ttggcgagcgcttaaggctgggatgagtct

SEQ ID NO: 320724 - DNA, 30 bp, Artificial Sequence
  Synthetic oligonucleotide
ctgaaccaacgtcggcgcaatggtgagtct

SEQ ID NO: 320725 - DNA, 30 bp, Artificial Sequence
  Synthetic oligonucleotide
gcgcattggcgggttcaagctcttgagtct

SEQ ID NO: 320726 - DNA, 30 bp, Artificial Sequence
  Synthetic oligonucleotide
accagaacatactaagagcttgtctagtct

SEQ ID NO: 320727 - DNA, 30 bp, Artificial Sequence
  Synthetic oligonucleotide
gctaggcgtcgcttgaatgttacaacgtct

SEQ ID NO: 320728 - DNA, 30 bp, Artificial Sequence
  Synthetic oligonucleotide
tagcagggggttgattgcagccgaacgtct

SEQ ID NO: 320729 - DNA, 30 bp, Artificial Sequence
  Synthetic oligonucleotide
acgcccggcagtaatagcggaaacacgtct

SEQ ID NO: 320730 - DNA, 30 bp, Artificial Sequence
  Synthetic oligonucleotide
atcaccagtgtcgatatccgtcgcacgtct

SEQ ID NO: 320731 - DNA, 30 bp, Artificial Sequence
  Synthetic oligonucleotide
catggaacggttcgattatattctacgtct

SEQ ID NO: 320732 - DNA, 30 bp, Artificial Sequence
  Synthetic oligonucleotide
acattggcccgtttggcgaatattacgtct

SEQ ID NO: 320733 - DNA, 30 bp, Artificial Sequence
  Synthetic oligonucleotide
gaagaacctgatcgtgagaatcacccgtct

SEQ ID NO: 320734 - DNA, 30 bp, Artificial Sequence
  Synthetic oligonucleotide
tattctatatactaaataccgcgcccgtct

SEQ ID NO: 320735 - DNA, 30 bp, Artificial Sequence
  Synthetic oligonucleotide
ctatggcttctgtgatccttgagagcgtct

SEQ ID NO: 320736 - DNA, 30 bp, Artificial Sequence
  Synthetic oligonucleotide
gattgttaacggacgtatcctggagcgtct

SEQ ID NO: 320737 - DNA, 30 bp, Artificial Sequence
  Synthetic oligonucleotide
cgaagacttgagaaaggcaatgacgcgtct

SEQ ID NO: 320738 - DNA, 30 bp, Artificial Sequence
  Synthetic oligonucleotide
gaaaatagcaaaagagtaactaccgcgtct

SEQ ID NO: 320739 - DNA, 30 bp, Artificial Sequence
  Synthetic oligonucleotide
gaaagagttcagtttactgacgactcgtct

SEQ ID NO: 320740 - DNA, 30 bp, Artificial Sequence
  Synthetic oligonucleotide
ggctacggttcgctcattcacgagtcgtct

SEQ ID NO: 320741 - DNA, 30 bp, Artificial Sequence
  Synthetic oligonucleotide
cgcggggtaatctagtccaacccgtcgtct

SEQ ID NO: 320742 - DNA, 30 bp, Artificial Sequence
  Synthetic oligonucleotide
ccgggaacatgtctatggaggacttcgtct

SEQ ID NO: 320743 - DNA, 30 bp, Artificial Sequence
  Synthetic oligonucleotide
gtactaatagatagaagctgcaaaaggtct

SEQ ID NO: 320744 - DNA, 30 bp, Artificial Sequence
  Synthetic oligonucleotide
tctcgttaagccttggtgtggtacaggtct

SEQ ID NO: 320745 - DNA, 30 bp, Artificial Sequence
  Synthetic oligonucleotide
ggtctccgaagcgcaatacaaggcaggtct

SEQ ID NO: 320746 - DNA, 30 bp, Artificial Sequence
  Synthetic oligonucleotide
gcgtacgattagcatatcggcgcgaggtct

SEQ ID NO: 320747 - DNA, 30 bp, Artificial Sequence
  Synthetic oligonucleotide
acgcggttgactggagggggatctaggtct

SEQ ID NO: 320748 - DNA, 30 bp, Artificial Sequence
  Synthetic oligonucleotide
agcaggggcaggggttagcatatacggtct

SEQ ID NO: 320749 - DNA, 30 bp, Artificial Sequence
  Synthetic oligonucleotide
ccatacattgatttcgttattggccggtct

SEQ ID NO: 320750 - DNA, 31 bp, Artificial Sequence
  Synthetic oligonucleotide
aagtctgaggtaatcgggaaagatgcggtct

SEQ ID NO: 320751 - DNA, 30 bp, Artificial Sequence
  Synthetic oligonucleotide
gatcggcaccatatggcctgaggcgggtct

SEQ ID NO: 320752 - DNA, 30 bp, Artificial Sequence
  Synthetic oligonucleotide
gcattttgttttacaaaaagagaggggtct

SEQ ID NO: 320753 - DNA, 30 bp, Artificial Sequence
  Synthetic oligonucleotide
aagcgtctactggaatccggggaggggtct

SEQ ID NO: 320754 - DNA, 30 bp, Artificial Sequence
  Synthetic oligonucleotide
acacaggacgtgcattgaattaaatggtct

SEQ ID NO: 320755 - DNA, 30 bp, Artificial Sequence
  Synthetic oligonucleotide
gctagttattctttacctgcagaatggtct

SEQ ID NO: 320756 - DNA, 30 bp, Artificial Sequence
  Synthetic oligonucleotide
cgtcgctgcgtctaaagaaagtaatggtct

SEQ ID NO: 320757 - DNA, 30 bp, Artificial Sequence
  Synthetic oligonucleotide
gctaaagggtttgccagaactaactggtct

SEQ ID NO: 320758 - DNA, 30 bp, Artificial Sequence
  Synthetic oligonucleotide
gtaacttcaagtactccaatgcactggtct

SEQ ID NO: 320759 - DNA, 30 bp, Artificial Sequence
  Synthetic oligonucleotide
cgcttaagcatccagtgactggactggtct

SEQ ID NO: 320760 - DNA, 30 bp, Artificial Sequence
  Synthetic oligonucleotide
acccagggagtagagcatacagagtggtct

SEQ ID NO: 320761 - DNA, 30 bp, Artificial Sequence
  Synthetic oligonucleotide
ggcgagatagcccatggagatgggtggtct

SEQ ID NO: 320762 - DNA, 30 bp, Artificial Sequence
  Synthetic oligonucleotide
aactgaggttgatgatgtatctcgatgtct

SEQ ID NO: 320763 - DNA, 30 bp, Artificial Sequence
  Synthetic oligonucleotide
aatctggacttacgaggatgaagactgtct

SEQ ID NO: 320764 - DNA, 30 bp, Artificial Sequence
  Synthetic oligonucleotide
tttgcgctaactgtctgtcggcgactgtct

SEQ ID NO: 320765 - DNA, 30 bp, Artificial Sequence
  Synthetic oligonucleotide
ggtcagagtttcatcagccgccacctgtct

SEQ ID NO: 320766 - DNA, 30 bp, Artificial Sequence
  Synthetic oligonucleotide
ggtttcgaggttgctcgtacgcgcctgtct

SEQ ID NO: 320767 - DNA, 30 bp, Artificial Sequence
  Synthetic oligonucleotide
cgattttgttcagcgcagagttggctgtct

SEQ ID NO: 320768 - DNA, 30 bp, Artificial Sequence
  Synthetic oligonucleotide
gggatccggacatccaggaggactctgtct

SEQ ID NO: 320769 - DNA, 30 bp, Artificial Sequence
  Synthetic oligonucleotide
gacggagcttcagaaggtaggcaagtgtct

SEQ ID NO: 320770 - DNA, 30 bp, Artificial Sequence
  Synthetic oligonucleotide
tcaaagactttgacaatatattaagtgtct

SEQ ID NO: 320771 - DNA, 30 bp, Artificial Sequence
  Synthetic oligonucleotide
aagcggggtgaactccggaactgagtgtct

SEQ ID NO: 320772 - DNA, 30 bp, Artificial Sequence
  Synthetic oligonucleotide
tgaaccaacattacggcattgggcgtgtct

SEQ ID NO: 320773 - DNA, 30 bp, Artificial Sequence
  Synthetic oligonucleotide
cggtctcacaggaacttgtataaggtgtct

SEQ ID NO: 320774 - DNA, 30 bp, Artificial Sequence
  Synthetic oligonucleotide
catctcaccatatgggcgggccgggtgtct

SEQ ID NO: 320775 - DNA, 30 bp, Artificial Sequence
  Synthetic oligonucleotide
ctgcatctggtatttgccgtgcgggtgtct

SEQ ID NO: 320776 - DNA, 30 bp, Artificial Sequence
  Synthetic oligonucleotide
gtcttcggctgatcgtaacttggggtgtct

SEQ ID NO: 320777 - DNA, 30 bp, Artificial Sequence
  Synthetic oligonucleotide
tgaggtatatagcgagagtacttggtgtct

SEQ ID NO: 320778 - DNA, 30 bp, Artificial Sequence
  Synthetic oligonucleotide
caaatggatttggtggccgggacgttgtct

SEQ ID NO: 320779 - DNA, 30 bp, Artificial Sequence
  Synthetic oligonucleotide
ggtccaaatccgacaccgcccaggttgtct

SEQ ID NO: 320780 - DNA, 30 bp, Artificial Sequence
  Synthetic oligonucleotide
gaccaatcataaacgatctttacaaattct

SEQ ID NO: 320781 - DNA, 30 bp, Artificial Sequence
  Synthetic oligonucleotide
gtagggccgcaaagaacctcgcacaattct

SEQ ID NO: 320782 - DNA, 30 bp, Artificial Sequence
  Synthetic oligonucleotide
tccgacctatcaccacccaaccagaattct

SEQ ID NO: 320783 - DNA, 30 bp, Artificial Sequence
  Synthetic oligonucleotide
acgtggtcaatgcagacataagttaattct

SEQ ID NO: 320784 - DNA, 30 bp, Artificial Sequence
  Synthetic oligonucleotide
tgattcccgatgaaccagtaaacacattct

SEQ ID NO: 320785 - DNA, 30 bp, Artificial Sequence
  Synthetic oligonucleotide
tgacacagaaggtcgagtaagcgacattct

SEQ ID NO: 320786 - DNA, 30 bp, Artificial Sequence
  Synthetic oligonucleotide
ttatcagctaccttctttacagtacattct

SEQ ID NO: 320787 - DNA, 30 bp, Artificial Sequence
  Synthetic oligonucleotide
tagttggcaaatacgctaggttatcattct

SEQ ID NO: 320788 - DNA, 30 bp, Artificial Sequence
  Synthetic oligonucleotide
agagtgtattttcacacctagtaagattct

SEQ ID NO: 320789 - DNA, 30 bp, Artificial Sequence
  Synthetic oligonucleotide
gatctatgtggtgcgggatctttggattct

SEQ ID NO: 320790 - DNA, 30 bp, Artificial Sequence
  Synthetic oligonucleotide
attaggaatgctctaatgttcaatgattct

SEQ ID NO: 320791 - DNA, 30 bp, Artificial Sequence
  Synthetic oligonucleotide
tggtgttggtacgaagtcgacggatattct

SEQ ID NO: 320792 - DNA, 30 bp, Artificial Sequence
  Synthetic oligonucleotide
tcttccagttgactggtagtcagctattct

SEQ ID NO: 320793 - DNA, 30 bp, Artificial Sequence
  Synthetic oligonucleotide
agcaaatagagaggacgccataattattct

SEQ ID NO: 320794 - DNA, 30 bp, Artificial Sequence
  Synthetic oligonucleotide
tgctaaatataatatatgtctgattattct

SEQ ID NO: 320795 - DNA, 30 bp, Artificial Sequence
  Synthetic oligonucleotide
tcaaaccgtcgttggtacgttagttattct

SEQ ID NO: 320796 - DNA, 30 bp, Artificial Sequence
  Synthetic oligonucleotide
agaccaactaatcagatgcacgcaacttct

SEQ ID NO: 320797 - DNA, 30 bp, Artificial Sequence
  Synthetic oligonucleotide
tctaaagatagcggactgccggtcacttct

SEQ ID NO: 320798 - DNA, 30 bp, Artificial Sequence
  Synthetic oligonucleotide
accgcacaggcatcctggcggcagacttct

SEQ ID NO: 320799 - DNA, 30 bp, Artificial Sequence
  Synthetic oligonucleotide
tggaatgtctgatggcgacgttcaccttct

SEQ ID NO: 320800 - DNA, 30 bp, Artificial Sequence
  Synthetic oligonucleotide
gggggagggatcaacgcaatattcccttct

SEQ ID NO: 320801 - DNA, 30 bp, Artificial Sequence
  Synthetic oligonucleotide
aatatggagaacctaggatcttttccttct

SEQ ID NO: 320802 - DNA, 30 bp, Artificial Sequence
  Synthetic oligonucleotide
agttgacgtggatttaccattcaagcttct

SEQ ID NO: 320803 - DNA, 30 bp, Artificial Sequence
  Synthetic oligonucleotide
aatgcacatcatttgttccttcaagcttct

SEQ ID NO: 320804 - DNA, 30 bp, Artificial Sequence
  Synthetic oligonucleotide
cgttacaaacgtgttaacccgacagcttct

SEQ ID NO: 320805 - DNA, 30 bp, Artificial Sequence
  Synthetic oligonucleotide
atcaacgtccaacggagcgagggcgcttct

SEQ ID NO: 320806 - DNA, 30 bp, Artificial Sequence
  Synthetic oligonucleotide
acatgtgaatctttggctgaagaggcttct

SEQ ID NO: 320807 - DNA, 30 bp, Artificial Sequence
  Synthetic oligonucleotide
tagccgacaacaaaccgatcaatatcttct

SEQ ID NO: 320808 - DNA, 31 bp, Artificial Sequence
  Synthetic oligonucleotide
aactaatcggtctcaaggccatcccagttct

SEQ ID NO: 320809 - DNA, 30 bp, Artificial Sequence
  Synthetic oligonucleotide
ccaataactcccttgacacatgtgagttct

SEQ ID NO: 320810 - DNA, 30 bp, Artificial Sequence
  Synthetic oligonucleotide
cacaatatatgatctttcgattaacgttct

SEQ ID NO: 320811 - DNA, 30 bp, Artificial Sequence
  Synthetic oligonucleotide
tgccgagtcggaggtcggttagtacgttct

SEQ ID NO: 320812 - DNA, 30 bp, Artificial Sequence
  Synthetic oligonucleotide
caggtatcgattccagatggtttacgttct

SEQ ID NO: 320813 - DNA, 30 bp, Artificial Sequence
  Synthetic oligonucleotide
taggctaggaaataaaattaaccccgttct

SEQ ID NO: 320814 - DNA, 30 bp, Artificial Sequence
  Synthetic oligonucleotide
caagacctcgatctggcggacgggcgttct

SEQ ID NO: 320815 - DNA, 30 bp, Artificial Sequence
  Synthetic oligonucleotide
ctagtcgaggcctacaggaaagatcgttct

SEQ ID NO: 320816 - DNA, 30 bp, Artificial Sequence
  Synthetic oligonucleotide
tttgtaagagtccaagggaattaaggttct

SEQ ID NO: 320817 - DNA, 30 bp, Artificial Sequence
  Synthetic oligonucleotide
gactagctatcatgaagaggccgcggttct

SEQ ID NO: 320818 - DNA, 30 bp, Artificial Sequence
  Synthetic oligonucleotide
caccgacgagcaagcccagggtgcggttct

SEQ ID NO: 320819 - DNA, 30 bp, Artificial Sequence
  Synthetic oligonucleotide
gtcgccgcacagaataggcagagatgttct

SEQ ID NO: 320820 - DNA, 30 bp, Artificial Sequence
  Synthetic oligonucleotide
tgccggtagctaggggtagcaaacatttct

SEQ ID NO: 320821 - DNA, 30 bp, Artificial Sequence
  Synthetic oligonucleotide
caaatcacgctatgtaagggatagatttct

SEQ ID NO: 320822 - DNA, 30 bp, Artificial Sequence
  Synthetic oligonucleotide
tacaatccgtcttatgtgccctaactttct

SEQ ID NO: 320823 - DNA, 30 bp, Artificial Sequence
  Synthetic oligonucleotide
gtagaggctggggaaagtatggaagtttct

SEQ ID NO: 320824 - DNA, 30 bp, Artificial Sequence
  Synthetic oligonucleotide
tctatacctctggcctaagaaaaggtttct

SEQ ID NO: 320825 - DNA, 30 bp, Artificial Sequence
  Synthetic oligonucleotide
ttcagtcttcttggtactcaacaggtttct

SEQ ID NO: 320826 - DNA, 30 bp, Artificial Sequence
  Synthetic oligonucleotide
cgcacttaaaaaagtgggatgcatgtttct

SEQ ID NO: 320827 - DNA, 30 bp, Artificial Sequence
  Synthetic oligonucleotide
tcgcctattgctcatctttcagatgtttct

SEQ ID NO: 320828 - DNA, 30 bp, Artificial Sequence
  Synthetic oligonucleotide
cacgtacgagcttcctacatttatgtttct

SEQ ID NO: 320829 - DNA, 30 bp, Artificial Sequence
  Synthetic oligonucleotide
ccttgcgcaacatgtatccctactgtttct

SEQ ID NO: 320830 - DNA, 30 bp, Artificial Sequence
  Synthetic oligonucleotide
actcccagagcggagccttcatctgtttct

SEQ ID NO: 320831 - DNA, 30 bp, Artificial Sequence
  Synthetic oligonucleotide
gaccgtacacccagtacgcacgttgtttct

SEQ ID NO: 320832 - DNA, 30 bp, Artificial Sequence
  Synthetic oligonucleotide
cgttagccctttacaacatgctcattttct

SEQ ID NO: 320833 - DNA, 30 bp, Artificial Sequence
  Synthetic oligonucleotide
tacgctaagtacataatgagcggcttttct

SEQ ID NO: 320834 - DNA, 30 bp, Artificial Sequence
  Synthetic oligonucleotide
caccagacgatcaccgcatcaaaaaaaagt

SEQ ID NO: 320835 - DNA, 30 bp, Artificial Sequence
  Synthetic oligonucleotide
gtgcctgccgcgcttaagttatggaaaagt

SEQ ID NO: 320836 - DNA, 30 bp, Artificial Sequence
  Synthetic oligonucleotide
tgctatctaggtgatccattaagtaaaagt

SEQ ID NO: 320837 - DNA, 30 bp, Artificial Sequence
  Synthetic oligonucleotide
gtgacttgcaacgcaaaatctggtaaaagt

SEQ ID NO: 320838 - DNA, 30 bp, Artificial Sequence
  Synthetic oligonucleotide
cctccggtacgcgatagggtcattaaaagt

SEQ ID NO: 320839 - DNA, 30 bp, Artificial Sequence
  Synthetic oligonucleotide
agcgaatccaagggtgcaggcacacaaagt

SEQ ID NO: 320840 - DNA, 30 bp, Artificial Sequence
  Synthetic oligonucleotide
ttgaagggaatattgagctcgacacaaagt

SEQ ID NO: 320841 - DNA, 30 bp, Artificial Sequence
  Synthetic oligonucleotide
ttcatttaggatctggactaaggacaaagt

SEQ ID NO: 320842 - DNA, 30 bp, Artificial Sequence
  Synthetic oligonucleotide
cagggcgggggtggaggccggccccaaagt

SEQ ID NO: 320843 - DNA, 30 bp, Artificial Sequence
  Synthetic oligonucleotide
tcaactttggaactgcaaaccgggcaaagt

SEQ ID NO: 320844 - DNA, 30 bp, Artificial Sequence
  Synthetic oligonucleotide
gtggtcatgcgtgcgagaaacatgcaaagt

SEQ ID NO: 320845 - DNA, 30 bp, Artificial Sequence
  Synthetic oligonucleotide
atgaatgttctcacgtctgggctgcaaagt

SEQ ID NO: 320846 - DNA, 30 bp, Artificial Sequence
  Synthetic oligonucleotide
atgtcaacttgaaagatgcgccacgaaagt

SEQ ID NO: 320847 - DNA, 30 bp, Artificial Sequence
  Synthetic oligonucleotide
ataatagggggatacatggaagcggaaagt

SEQ ID NO: 320848 - DNA, 30 bp, Artificial Sequence
  Synthetic oligonucleotide
gtaagtataacttggggggccagggaaagt

SEQ ID NO: 320849 - DNA, 30 bp, Artificial Sequence
  Synthetic oligonucleotide
caatagggcttctaggagcgggtggaaagt

SEQ ID NO: 320850 - DNA, 30 bp, Artificial Sequence
  Synthetic oligonucleotide
ataggggttgtaacgtggggccgtgaaagt

SEQ ID NO: 320851 - DNA, 30 bp, Artificial Sequence
  Synthetic oligonucleotide
gacgacaatggtagcctattcgcataaagt

SEQ ID NO: 320852 - DNA, 30 bp, Artificial Sequence
  Synthetic oligonucleotide
tggtttagtgtattggaaaacgagtaaagt

SEQ ID NO: 320853 - DNA, 30 bp, Artificial Sequence
  Synthetic oligonucleotide
gcactacaagtactcgcggggcggtaaagt

SEQ ID NO: 320854 - DNA, 30 bp, Artificial Sequence
  Synthetic oligonucleotide
cgcacataagactttgctcacgaaacaagt

SEQ ID NO: 320855 - DNA, 30 bp, Artificial Sequence
  Synthetic oligonucleotide
tatctgaaagctgagaagagagcaacaagt

SEQ ID NO: 320856 - DNA, 30 bp, Artificial Sequence
  Synthetic oligonucleotide
gaataaaaactatacataatgaccacaagt

SEQ ID NO: 320857 - DNA, 30 bp, Artificial Sequence
  Synthetic oligonucleotide
ttcgtattgtattaccctgacaggacaagt

SEQ ID NO: 320858 - DNA, 30 bp, Artificial Sequence
  Synthetic oligonucleotide
caagacagggtgagagaccgccctacaagt

SEQ ID NO: 320859 - DNA, 30 bp, Artificial Sequence
  Synthetic oligonucleotide
ggaactgtaccgaagaaatacggtacaagt

SEQ ID NO: 320860 - DNA, 30 bp, Artificial Sequence
  Synthetic oligonucleotide
tagtcctatctcccctcgaacgttacaagt

SEQ ID NO: 320861 - DNA, 30 bp, Artificial Sequence
  Synthetic oligonucleotide
aggcgatcaattgtgcgatcatcaccaagt

SEQ ID NO: 320862 - DNA, 30 bp, Artificial Sequence
  Synthetic oligonucleotide
gtgggctaaacgcgaggcaacgtaccaagt

SEQ ID NO: 320863 - DNA, 30 bp, Artificial Sequence
  Synthetic oligonucleotide
tgcgtccggttaaagcaggttcggccaagt

SEQ ID NO: 320864 - DNA, 30 bp, Artificial Sequence
  Synthetic oligonucleotide
ccggcgttgctttctgggccaattccaagt

SEQ ID NO: 320865 - DNA, 30 bp, Artificial Sequence
  Synthetic oligonucleotide
accaagattcaacaaactgcacttccaagt

SEQ ID NO: 320866 - DNA, 30 bp, Artificial Sequence
  Synthetic oligonucleotide
agacgaagtctaactcctccgggcgcaagt

SEQ ID NO: 320867 - DNA, 29 bp, Artificial Sequence
  Synthetic oligonucleotide
gtggcagcaagagctagtttcgggcaagt

SEQ ID NO: 320868 - DNA, 30 bp, Artificial Sequence
  Synthetic oligonucleotide
tcgaactatttaatgcaatcctgggcaagt

SEQ ID NO: 320869 - DNA, 30 bp, Artificial Sequence
  Synthetic oligonucleotide
attacgatagccgatgtagtaggctcaagt

SEQ ID NO: 320870 - DNA, 30 bp, Artificial Sequence
  Synthetic oligonucleotide
taagtggcaattcttccgacgtgctcaagt

SEQ ID NO: 320871 - DNA, 30 bp, Artificial Sequence
  Synthetic oligonucleotide
gtaagttcggcctatacttgtccgtcaagt

SEQ ID NO: 320872 - DNA, 30 bp, Artificial Sequence
  Synthetic oligonucleotide
tcagaaatcttcaggagatcttaaagaagt

SEQ ID NO: 320873 - DNA, 30 bp, Artificial Sequence
  Synthetic oligonucleotide
tggcaaaagatcacgttctgaacaagaagt

SEQ ID NO: 320874 - DNA, 30 bp, Artificial Sequence
  Synthetic oligonucleotide
aacacgatttgcatatactagacaagaagt

SEQ ID NO: 320875 - DNA, 30 bp, Artificial Sequence
  Synthetic oligonucleotide
cccgattcgactgacgaaagttcaagaagt

SEQ ID NO: 320876 - DNA, 31 bp, Artificial Sequence
  Synthetic oligonucleotide
tggaagccagtgtgggccgcgggtaagaagt

SEQ ID NO: 320877 - DNA, 30 bp, Artificial Sequence
  Synthetic oligonucleotide
tgtgactaccacttctcagtcccgagaagt

SEQ ID NO: 320878 - DNA, 30 bp, Artificial Sequence
  Synthetic oligonucleotide
acgggacgggagcggccattccggagaagt

SEQ ID NO: 320879 - DNA, 30 bp, Artificial Sequence
  Synthetic oligonucleotide
ttagagcgatatccctatacaactagaagt

SEQ ID NO: 320880 - DNA, 30 bp, Artificial Sequence
  Synthetic oligonucleotide
accccattcatataaatccacacacgaagt

SEQ ID NO: 320881 - DNA, 30 bp, Artificial Sequence
  Synthetic oligonucleotide
tgggcgaaacggcctctatacggccgaagt

SEQ ID NO: 320882 - DNA, 30 bp, Artificial Sequence
  Synthetic oligonucleotide
atatcaggaagagcctgaagaatccgaagt

SEQ ID NO: 320883 - DNA, 30 bp, Artificial Sequence
  Synthetic oligonucleotide
ttaagccctgcacctcttgcggcgcgaagt

SEQ ID NO: 320884 - DNA, 30 bp, Artificial Sequence
  Synthetic oligonucleotide
aggttcccttgactatagtgtcggcgaagt

SEQ ID NO: 320885 - DNA, 30 bp, Artificial Sequence
  Synthetic oligonucleotide
aggtaactcgagttctgctgctatcgaagt

SEQ ID NO: 320886 - DNA, 30 bp, Artificial Sequence
  Synthetic oligonucleotide
tgattagttcattttaacgcctgtcgaagt

SEQ ID NO: 320887 - DNA, 30 bp, Artificial Sequence
  Synthetic oligonucleotide
agtatggttgctcagagaacaaaaggaagt

SEQ ID NO: 320888 - DNA, 30 bp, Artificial Sequence
  Synthetic oligonucleotide
tcagcatctgtaacgacgtattacggaagt

SEQ ID NO: 320889 - DNA, 30 bp, Artificial Sequence
  Synthetic oligonucleotide
aaagccccccagttgagggagtagggaagt

SEQ ID NO: 320890 - DNA, 30 bp, Artificial Sequence
  Synthetic oligonucleotide
tcagtggcttccggaggctgacttggaagt

SEQ ID NO: 320891 - DNA, 30 bp, Artificial Sequence
  Synthetic oligonucleotide
cccatgttgatcggatcgtttaaatgaagt

SEQ ID NO: 320892 - DNA, 30 bp, Artificial Sequence
  Synthetic oligonucleotide
aattatcattagggacttaggggatgaagt

SEQ ID NO: 320893 - DNA, 30 bp, Artificial Sequence
  Synthetic oligonucleotide
tacccaagggatcatgatgccgactgaagt

SEQ ID NO: 320894 - DNA, 30 bp, Artificial Sequence
  Synthetic oligonucleotide
gtccacggttgcacagacccaggctgaagt

SEQ ID NO: 320895 - DNA, 30 bp, Artificial Sequence
  Synthetic oligonucleotide
gccgtgaccgataaagggttaacgtgaagt

SEQ ID NO: 320896 - DNA, 30 bp, Artificial Sequence
  Synthetic oligonucleotide
tgccgctgggtaaaggtgagcacgtgaagt

SEQ ID NO: 320897 - DNA, 30 bp, Artificial Sequence
  Synthetic oligonucleotide
atctagtgttgaccttgggactggtgaagt

SEQ ID NO: 320898 - DNA, 30 bp, Artificial Sequence
  Synthetic oligonucleotide
gcgacatctaatggtgagaataaaataagt

SEQ ID NO: 320899 - DNA, 30 bp, Artificial Sequence
  Synthetic oligonucleotide
gttcccaatcattacgaggtcccaataagt

SEQ ID NO: 320900 - DNA, 30 bp, Artificial Sequence
  Synthetic oligonucleotide
atgcagacgggtttggtgcagtcaataagt

SEQ ID NO: 320901 - DNA, 31 bp, Artificial Sequence
  Synthetic oligonucleotide
tgggaaatactggactggttaggtaataagt

SEQ ID NO: 320902 - DNA, 30 bp, Artificial Sequence
  Synthetic oligonucleotide
accaggctagagttagtaattttaataagt

SEQ ID NO: 320903 - DNA, 30 bp, Artificial Sequence
  Synthetic oligonucleotide
cgcagtatcgctcagggtcttggcataagt

SEQ ID NO: 320904 - DNA, 30 bp, Artificial Sequence
  Synthetic oligonucleotide
gtatgtgatatactctagatttagataagt

SEQ ID NO: 320905 - DNA, 30 bp, Artificial Sequence
  Synthetic oligonucleotide
atatatagtcaaactggaaggggtataagt

SEQ ID NO: 320906 - DNA, 30 bp, Artificial Sequence
  Synthetic oligonucleotide
tcgtgccctcactcccatcaggaactaagt

SEQ ID NO: 320907 - DNA, 30 bp, Artificial Sequence
  Synthetic oligonucleotide
gttgtcggaaggttactagcccggctaagt

SEQ ID NO: 320908 - DNA, 30 bp, Artificial Sequence
  Synthetic oligonucleotide
gagctatctagtctatatagggacgtaagt

SEQ ID NO: 320909 - DNA, 30 bp, Artificial Sequence
  Synthetic oligonucleotide
cgtggtccttcgggcacgggattcgtaagt

SEQ ID NO: 320910 - DNA, 30 bp, Artificial Sequence
  Synthetic oligonucleotide
tgtagtcccctgagctgggccgcggtaagt

SEQ ID NO: 320911 - DNA, 30 bp, Artificial Sequence
  Synthetic oligonucleotide
acaatatggggctgggcgcctggggtaagt

SEQ ID NO: 320912 - DNA, 30 bp, Artificial Sequence
  Synthetic oligonucleotide
aatagggcctgaaaccggcgtggggtaagt

SEQ ID NO: 320913 - DNA, 30 bp, Artificial Sequence
  Synthetic oligonucleotide
tgagtagcgggcctgttctacaatgtaagt

SEQ ID NO: 320914 - DNA, 30 bp, Artificial Sequence
  Synthetic oligonucleotide
ttgttggcataatatcaaaatatcttaagt

SEQ ID NO: 320915 - DNA, 30 bp, Artificial Sequence
  Synthetic oligonucleotide
gtgcctttaaactcttcctctcaaaacagt

SEQ ID NO: 320916 - DNA, 30 bp, Artificial Sequence
  Synthetic oligonucleotide
aaataaggagcagcatcaaggataaacagt

SEQ ID NO: 320917 - DNA, 30 bp, Artificial Sequence
  Synthetic oligonucleotide
gcgaaattgagtcaagggcacttaaacagt

SEQ ID NO: 320918 - DNA, 30 bp, Artificial Sequence
  Synthetic oligonucleotide
ctattgctcagaaacagaggtttaaacagt

SEQ ID NO: 320919 - DNA, 30 bp, Artificial Sequence
  Synthetic oligonucleotide
gcaaccatgagataatcccggaacaacagt

SEQ ID NO: 320920 - DNA, 30 bp, Artificial Sequence
  Synthetic oligonucleotide
actaaggattcgcggtggcagttcaacagt

SEQ ID NO: 320921 - DNA, 30 bp, Artificial Sequence
  Synthetic oligonucleotide
gttggcattgtaaatatccgtccgaacagt

SEQ ID NO: 320922 - DNA, 30 bp, Artificial Sequence
  Synthetic oligonucleotide
tatgacgcacgaaactcgtagtcgaacagt

SEQ ID NO: 320923 - DNA, 30 bp, Artificial Sequence
  Synthetic oligonucleotide
acatgtaaaacgttataggtgtcgaacagt

SEQ ID NO: 320924 - DNA, 30 bp, Artificial Sequence
  Synthetic oligonucleotide
gtatcactagtgataacatttgggaacagt

SEQ ID NO: 320925 - DNA, 30 bp, Artificial Sequence
  Synthetic oligonucleotide
tctttgttgggagacgcgtaaatgaacagt

SEQ ID NO: 320926 - DNA, 30 bp, Artificial Sequence
  Synthetic oligonucleotide
aattcgtggacacgagacgttgataacagt

SEQ ID NO: 320927 - DNA, 30 bp, Artificial Sequence
  Synthetic oligonucleotide
ggagcgttcactgtacatttaggccacagt

SEQ ID NO: 320928 - DNA, 30 bp, Artificial Sequence
  Synthetic oligonucleotide
gagacactttgttccagttccggccacagt

SEQ ID NO: 320929 - DNA, 30 bp, Artificial Sequence
  Synthetic oligonucleotide
aactaaacgacctggttatcgctccacagt

SEQ ID NO: 320930 - DNA, 30 bp, Artificial Sequence
  Synthetic oligonucleotide
tcggaattctactgcccgggaaatcacagt

SEQ ID NO: 320931 - DNA, 30 bp, Artificial Sequence
  Synthetic oligonucleotide
gctatctggagggactagacggatcacagt

SEQ ID NO: 320932 - DNA, 30 bp, Artificial Sequence
  Synthetic oligonucleotide
caacggtgattccggattcaaactcacagt

SEQ ID NO: 320933 - DNA, 30 bp, Artificial Sequence
  Synthetic oligonucleotide
gtacaaatcgcaaagctaggtgctcacagt

SEQ ID NO: 320934 - DNA, 30 bp, Artificial Sequence
  Synthetic oligonucleotide
tggggggtcggctttcatagacaagacagt

SEQ ID NO: 320935 - DNA, 30 bp, Artificial Sequence
  Synthetic oligonucleotide
tttcgccttactgtacacgtacaagacagt

SEQ ID NO: 320936 - DNA, 30 bp, Artificial Sequence
  Synthetic oligonucleotide
tcgaatagggggaccaacgaaagagacagt

SEQ ID NO: 320937 - DNA, 30 bp, Artificial Sequence
  Synthetic oligonucleotide
cctagatatatccgtattgctcgagacagt

SEQ ID NO: 320938 - DNA, 30 bp, Artificial Sequence
  Synthetic oligonucleotide
agtatggcaggtctctacccgatagacagt

SEQ ID NO: 320939 - DNA, 30 bp, Artificial Sequence
  Synthetic oligonucleotide
cctggcaataatacaagtcagttagacagt

SEQ ID NO: 320940 - DNA, 30 bp, Artificial Sequence
  Synthetic oligonucleotide
aaacattgaacgggctttatgaacgacagt

SEQ ID NO: 320941 - DNA, 30 bp, Artificial Sequence
  Synthetic oligonucleotide
ggggtagttgggattggcgtgcgcgacagt

SEQ ID NO: 320942 - DNA, 30 bp, Artificial Sequence
  Synthetic oligonucleotide
gcggcgcgatgacggtattgaccggacagt

SEQ ID NO: 320943 - DNA, 30 bp, Artificial Sequence
  Synthetic oligonucleotide
tcgaatagggcatcgcatggactggacagt

SEQ ID NO: 320944 - DNA, 30 bp, Artificial Sequence
  Synthetic oligonucleotide
ttaccacatttcgagtacgtagttgacagt

SEQ ID NO: 320945 - DNA, 30 bp, Artificial Sequence
  Synthetic oligonucleotide
gcactatggactagtgcctcttcatacagt

SEQ ID NO: 320946 - DNA, 30 bp, Artificial Sequence
  Synthetic oligonucleotide
cgattgtcatactagggtttacactacagt

SEQ ID NO: 320947 - DNA, 30 bp, Artificial Sequence
  Synthetic oligonucleotide
cgaactttctcatcttagccatggtacagt

SEQ ID NO: 320948 - DNA, 30 bp, Artificial Sequence
  Synthetic oligonucleotide
acgaccgtaggccttctgagctcttacagt

SEQ ID NO: 320949 - DNA, 30 bp, Artificial Sequence
  Synthetic oligonucleotide
cactctaatgataatgtatagtcttacagt

SEQ ID NO: 320950 - DNA, 30 bp, Artificial Sequence
  Synthetic oligonucleotide
ccgctgggtacaacaggtgacttttacagt

SEQ ID NO: 320951 - DNA, 30 bp, Artificial Sequence
  Synthetic oligonucleotide
ctagaagctggtcttttgacagcaaccagt

SEQ ID NO: 320952 - DNA, 30 bp, Artificial Sequence
  Synthetic oligonucleotide
cggccgattatgtcaaaattctgaaccagt

SEQ ID NO: 320953 - DNA, 30 bp, Artificial Sequence
  Synthetic oligonucleotide
aagaagcactggcactccctggggaccagt

SEQ ID NO: 320954 - DNA, 30 bp, Artificial Sequence
  Synthetic oligonucleotide
tgcctaacgcagcgaggcgaagataccagt

SEQ ID NO: 320955 - DNA, 30 bp, Artificial Sequence
  Synthetic oligonucleotide
caggattgggcgagtactatcagtaccagt

SEQ ID NO: 320956 - DNA, 30 bp, Artificial Sequence
  Synthetic oligonucleotide
cacaaaaggacacgctctgtggcacccagt

SEQ ID NO: 320957 - DNA, 30 bp, Artificial Sequence
  Synthetic oligonucleotide
atcactgatgcgctttgccccgaccccagt

SEQ ID NO: 320958 - DNA, 30 bp, Artificial Sequence
  Synthetic oligonucleotide
ggcccgaagatggggccggtatcgcccagt

SEQ ID NO: 320959 - DNA, 30 bp, Artificial Sequence
  Synthetic oligonucleotide
tcaggttgactctcgggtgtgcatcccagt

SEQ ID NO: 320960 - DNA, 30 bp, Artificial Sequence
  Synthetic oligonucleotide
ctgtttactccttctttctccattcccagt

SEQ ID NO: 320961 - DNA, 30 bp, Artificial Sequence
  Synthetic oligonucleotide
cagtcaacgagccttaatgcagcggccagt

SEQ ID NO: 320962 - DNA, 30 bp, Artificial Sequence
  Synthetic oligonucleotide
atttgacacatcgagtcgccacaatccagt

SEQ ID NO: 320963 - DNA, 30 bp, Artificial Sequence
  Synthetic oligonucleotide
actggtcgggctagctagcaggaatccagt

SEQ ID NO: 320964 - DNA, 30 bp, Artificial Sequence
  Synthetic oligonucleotide
ttgggaattcatcttgtttgcagatccagt

SEQ ID NO: 320965 - DNA, 30 bp, Artificial Sequence
  Synthetic oligonucleotide
ctctcagtgagcgttccccgagtctccagt

SEQ ID NO: 320966 - DNA, 30 bp, Artificial Sequence
  Synthetic oligonucleotide
atcgaggacctggtttcgctagagtccagt

SEQ ID NO: 320967 - DNA, 30 bp, Artificial Sequence
  Synthetic oligonucleotide
ccgtgggacgctgtagtgctgtagtccagt

SEQ ID NO: 320968 - DNA, 30 bp, Artificial Sequence
  Synthetic oligonucleotide
catcttcttatgtaagacaggccgtccagt

SEQ ID NO: 320969 - DNA, 30 bp, Artificial Sequence
  Synthetic oligonucleotide
ttcacgggtgtccagtaagaatagagcagt

SEQ ID NO: 320970 - DNA, 30 bp, Artificial Sequence
  Synthetic oligonucleotide
ctatatggttaaggccaataactgagcagt

SEQ ID NO: 320971 - DNA, 30 bp, Artificial Sequence
  Synthetic oligonucleotide
ctctatggtagaaaggatggattgagcagt

SEQ ID NO: 320972 - DNA, 30 bp, Artificial Sequence
  Synthetic oligonucleotide
ggacatgtccgcttactgaccgatagcagt

SEQ ID NO: 320973 - DNA, 30 bp, Artificial Sequence
  Synthetic oligonucleotide
tcgcaggaatccttacacattccacgcagt

SEQ ID NO: 320974 - DNA, 31 bp, Artificial Sequence
  Synthetic oligonucleotide
attgtatgaggtgcctagtacgtgccgcagt

SEQ ID NO: 320975 - DNA, 30 bp, Artificial Sequence
  Synthetic oligonucleotide
ccgtgctaaccatgttctgtcctccgcagt

SEQ ID NO: 320976 - DNA, 30 bp, Artificial Sequence
  Synthetic oligonucleotide
taattggatcccaagctgcccgatcgcagt

SEQ ID NO: 320977 - DNA, 30 bp, Artificial Sequence
  Synthetic oligonucleotide
aggtacacggaattaaagtcgactcgcagt

SEQ ID NO: 320978 - DNA, 30 bp, Artificial Sequence
  Synthetic oligonucleotide
gggtgtagatttaggctaagtcaaggcagt

SEQ ID NO: 320979 - DNA, 30 bp, Artificial Sequence
  Synthetic oligonucleotide
agtctctatgctcgttaacttagaggcagt

SEQ ID NO: 320980 - DNA, 30 bp, Artificial Sequence
  Synthetic oligonucleotide
tcatataaaacgaaaaaaagacccggcagt

SEQ ID NO: 320981 - DNA, 30 bp, Artificial Sequence
  Synthetic oligonucleotide
tgatccggtatatctgcttgatccggcagt

SEQ ID NO: 320982 - DNA, 30 bp, Artificial Sequence
  Synthetic oligonucleotide
caagtgtcttcgaggagtctaatcggcagt

SEQ ID NO: 320983 - DNA, 30 bp, Artificial Sequence
  Synthetic oligonucleotide
taacggaaatgccttagctagtcgggcagt

SEQ ID NO: 320984 - DNA, 30 bp, Artificial Sequence
  Synthetic oligonucleotide
ttcaacaatgcatatgcacaacatggcagt

SEQ ID NO: 320985 - DNA, 30 bp, Artificial Sequence
  Synthetic oligonucleotide
aacagcgatcatctggttctgtatggcagt

SEQ ID NO: 320986 - DNA, 30 bp, Artificial Sequence
  Synthetic oligonucleotide
atgacacgaggttatagagtccgtggcagt

SEQ ID NO: 320987 - DNA, 30 bp, Artificial Sequence
  Synthetic oligonucleotide
ggggccagataaggcttagtagaatgcagt

SEQ ID NO: 320988 - DNA, 30 bp, Artificial Sequence
  Synthetic oligonucleotide
cgagatgtggctacccgttcctaatgcagt

SEQ ID NO: 320989 - DNA, 30 bp, Artificial Sequence
  Synthetic oligonucleotide
cgggttatgcgcactactccgacgtgcagt

SEQ ID NO: 320990 - DNA, 30 bp, Artificial Sequence
  Synthetic oligonucleotide
tgtcttcattacacggacgtatattgcagt

SEQ ID NO: 320991 - DNA, 30 bp, Artificial Sequence
  Synthetic oligonucleotide
tagacttggaaataaatatgtggttgcagt

SEQ ID NO: 320992 - DNA, 30 bp, Artificial Sequence
  Synthetic oligonucleotide
tgtgcacgcggccataaccttggcatcagt

SEQ ID NO: 320993 - DNA, 30 bp, Artificial Sequence
  Synthetic oligonucleotide
atcattgaagagaatctccagttcatcagt

SEQ ID NO: 320994 - DNA, 30 bp, Artificial Sequence
  Synthetic oligonucleotide
ggcttagtagccctctataggcagatcagt

SEQ ID NO: 320995 - DNA, 30 bp, Artificial Sequence
  Synthetic oligonucleotide
atctccaaataggtatatgaatagatcagt

SEQ ID NO: 320996 - DNA, 30 bp, Artificial Sequence
  Synthetic oligonucleotide
ttatagatacgacccagtagagggatcagt

SEQ ID NO: 320997 - DNA, 30 bp, Artificial Sequence
  Synthetic oligonucleotide
atatgcccctgctttgagcacgtgatcagt

SEQ ID NO: 320998 - DNA, 30 bp, Artificial Sequence
  Synthetic oligonucleotide
tagctggagtccagagacgttcctatcagt

SEQ ID NO: 320999 - DNA, 30 bp, Artificial Sequence
  Synthetic oligonucleotide
gtcaaaccgagccagggaaacggactcagt

SEQ ID NO: 321000 - DNA, 30 bp, Artificial Sequence
  Synthetic oligonucleotide
tctcggttgacatcccgggtagctctcagt

SEQ ID NO: 321001 - DNA, 30 bp, Artificial Sequence
  Synthetic oligonucleotide
gtggtatacttattagtgaatgttctcagt

SEQ ID NO: 321002 - DNA, 30 bp, Artificial Sequence
  Synthetic oligonucleotide
aaacccaagcaattaaataggtcagtcagt

SEQ ID NO: 321003 - DNA, 30 bp, Artificial Sequence
  Synthetic oligonucleotide
tggtggttacagcaggcagaggacgtcagt

SEQ ID NO: 321004 - DNA, 30 bp, Artificial Sequence
  Synthetic oligonucleotide
tgctctgatttgtgtatcacctacgtcagt

SEQ ID NO: 321005 - DNA, 30 bp, Artificial Sequence
  Synthetic oligonucleotide
aaaatttggagaaggaagatggccgtcagt

SEQ ID NO: 321006 - DNA, 30 bp, Artificial Sequence
  Synthetic oligonucleotide
gtggcttcgcgttgaccaaatacggtcagt

SEQ ID NO: 321007 - DNA, 30 bp, Artificial Sequence
  Synthetic oligonucleotide
gcagatagttgagcactctaagtggtcagt

SEQ ID NO: 321008 - DNA, 30 bp, Artificial Sequence
  Synthetic oligonucleotide
aatcgtagactggcgctgtaggttgtcagt

SEQ ID NO: 321009 - DNA, 30 bp, Artificial Sequence
  Synthetic oligonucleotide
ttagggtcgatcatgagatgccaattcagt

SEQ ID NO: 321010 - DNA, 30 bp, Artificial Sequence
  Synthetic oligonucleotide
cgggagcaggcatgcggcaaagtattcagt

SEQ ID NO: 321011 - DNA, 30 bp, Artificial Sequence
  Synthetic oligonucleotide
gccgaccgttagaggatacttcggttcagt

SEQ ID NO: 321012 - DNA, 30 bp, Artificial Sequence
  Synthetic oligonucleotide
gtaacactcttgtttcctaacggtttcagt

SEQ ID NO: 321013 - DNA, 30 bp, Artificial Sequence
  Synthetic oligonucleotide
tcgatcctacgttttttaggggaaaagagt

SEQ ID NO: 321014 - DNA, 30 bp, Artificial Sequence
  Synthetic oligonucleotide
gtttgaatttactggccaggttacaagagt

SEQ ID NO: 321015 - DNA, 30 bp, Artificial Sequence
  Synthetic oligonucleotide
gatgtagcggttatagaggttactaagagt

SEQ ID NO: 321016 - DNA, 30 bp, Artificial Sequence
  Synthetic oligonucleotide
acataactcttccataatctcaaacagagt

SEQ ID NO: 321017 - DNA, 30 bp, Artificial Sequence
  Synthetic oligonucleotide
gattggacccagcgggattattgccagagt

SEQ ID NO: 321018 - DNA, 30 bp, Artificial Sequence
  Synthetic oligonucleotide
aaacggtctagggcaacgcccgtccagagt

SEQ ID NO: 321019 - DNA, 30 bp, Artificial Sequence
  Synthetic oligonucleotide
gtatgttgggtagtcggcgtgtagcagagt

SEQ ID NO: 321020 - DNA, 30 bp, Artificial Sequence
  Synthetic oligonucleotide
acagagagagtatgaggtgtgtagcagagt

SEQ ID NO: 321021 - DNA, 30 bp, Artificial Sequence
  Synthetic oligonucleotide
ggttagaccggacctgctcgtgcagagagt

SEQ ID NO: 321022 - DNA, 30 bp, Artificial Sequence
  Synthetic oligonucleotide
tattaacgaatgactcggatagtagagagt

SEQ ID NO: 321023 - DNA, 30 bp, Artificial Sequence
  Synthetic oligonucleotide
tacaggtaccgatttcgttgtaacgagagt

SEQ ID NO: 321024 - DNA, 30 bp, Artificial Sequence
  Synthetic oligonucleotide
cagatcgctgtatcaaccttgaccgagagt

SEQ ID NO: 321025 - DNA, 30 bp, Artificial Sequence
  Synthetic oligonucleotide
gattctccgcataccatcctcgtcgagagt

SEQ ID NO: 321026 - DNA, 30 bp, Artificial Sequence
  Synthetic oligonucleotide
atgtcgccattaggtttaacggcggagagt

SEQ ID NO: 321027 - DNA, 30 bp, Artificial Sequence
  Synthetic oligonucleotide
agcctgctctcaggctagttgatggagagt

SEQ ID NO: 321028 - DNA, 30 bp, Artificial Sequence
  Synthetic oligonucleotide
ttatagtggaagtaaagactgtgtgagagt

SEQ ID NO: 321029 - DNA, 30 bp, Artificial Sequence
  Synthetic oligonucleotide
gacattaacatcgtaaacattgtatagagt

SEQ ID NO: 321030 - DNA, 30 bp, Artificial Sequence
  Synthetic oligonucleotide
gtaatatagcataggaagcctccctagagt

SEQ ID NO: 321031 - DNA, 30 bp, Artificial Sequence
  Synthetic oligonucleotide
cccaggttcaccaaggggccgatctagagt

SEQ ID NO: 321032 - DNA, 30 bp, Artificial Sequence
  Synthetic oligonucleotide
ggaacgaaaatggggatcttatcttagagt

SEQ ID NO: 321033 - DNA, 30 bp, Artificial Sequence
  Synthetic oligonucleotide
atgttacatcgacttcgagtactttagagt

SEQ ID NO: 321034 - DNA, 30 bp, Artificial Sequence
  Synthetic oligonucleotide
agaacacggcctcatgtcattcaaacgagt

SEQ ID NO: 321035 - DNA, 30 bp, Artificial Sequence
  Synthetic oligonucleotide
cggcgactatcctatgggccggaaacgagt

SEQ ID NO: 321036 - DNA, 30 bp, Artificial Sequence
  Synthetic oligonucleotide
ggtcatgttcatcccacgagggaaacgagt

SEQ ID NO: 321037 - DNA, 30 bp, Artificial Sequence
  Synthetic oligonucleotide
agtgtaggaaaaacaccagcatccacgagt

SEQ ID NO: 321038 - DNA, 30 bp, Artificial Sequence
  Synthetic oligonucleotide
gatcacagtgccactaactgggtcacgagt

SEQ ID NO: 321039 - DNA, 30 bp, Artificial Sequence
  Synthetic oligonucleotide
aacaaacgcttttgccagtcacagacgagt

SEQ ID NO: 321040 - DNA, 30 bp, Artificial Sequence
  Synthetic oligonucleotide
acggtactcaaatagccgattaggacgagt

SEQ ID NO: 321041 - DNA, 30 bp, Artificial Sequence
  Synthetic oligonucleotide
atgtgataacggatccgagactggacgagt

SEQ ID NO: 321042 - DNA, 30 bp, Artificial Sequence
  Synthetic oligonucleotide
ctggaccatctgttgattatcctgacgagt

SEQ ID NO: 321043 - DNA, 30 bp, Artificial Sequence
  Synthetic oligonucleotide
acggtacgaagcactcttgtgagtacgagt

SEQ ID NO: 321044 - DNA, 30 bp, Artificial Sequence
  Synthetic oligonucleotide
aacatttgtactatcccaacgcgtacgagt

SEQ ID NO: 321045 - DNA, 30 bp, Artificial Sequence
  Synthetic oligonucleotide
ggctttctccggcacgtagtgtgtacgagt

SEQ ID NO: 321046 - DNA, 30 bp, Artificial Sequence
  Synthetic oligonucleotide
ttgtagggtattagtttcaatattacgagt

SEQ ID NO: 321047 - DNA, 30 bp, Artificial Sequence
  Synthetic oligonucleotide
tgcgggtgttagcgtctctcttaaccgagt

SEQ ID NO: 321048 - DNA, 30 bp, Artificial Sequence
  Synthetic oligonucleotide
gtggtcctatcacgaaggcagtacccgagt

SEQ ID NO: 321049 - DNA, 30 bp, Artificial Sequence
  Synthetic oligonucleotide
ctctactagggtcggcgacagtatccgagt

SEQ ID NO: 321050 - DNA, 30 bp, Artificial Sequence
  Synthetic oligonucleotide
ccgggtaattcgttctaggcaccagcgagt

SEQ ID NO: 321051 - DNA, 30 bp, Artificial Sequence
  Synthetic oligonucleotide
tgagcaccacaaaaggggcaactagcgagt

SEQ ID NO: 321052 - DNA, 30 bp, Artificial Sequence
  Synthetic oligonucleotide
aagtcaaaatcaatgggaaattacgcgagt

SEQ ID NO: 321053 - DNA, 30 bp, Artificial Sequence
  Synthetic oligonucleotide
cgcgcattactgaggcccgcaaccgcgagt

SEQ ID NO: 321054 - DNA, 30 bp, Artificial Sequence
  Synthetic oligonucleotide
ggctactctacacggctgggatgggcgagt

SEQ ID NO: 321055 - DNA, 30 bp, Artificial Sequence
  Synthetic oligonucleotide
ccatcgagtagttttacgtatcgtgcgagt

SEQ ID NO: 321056 - DNA, 30 bp, Artificial Sequence
  Synthetic oligonucleotide
tcgctctgttatagatactcccgatcgagt

SEQ ID NO: 321057 - DNA, 30 bp, Artificial Sequence
  Synthetic oligonucleotide
gctaagcgataatcgtgtataggctcgagt

SEQ ID NO: 321058 - DNA, 30 bp, Artificial Sequence
  Synthetic oligonucleotide
ggataggcttcggaaattatgctctcgagt

SEQ ID NO: 321059 - DNA, 30 bp, Artificial Sequence
  Synthetic oligonucleotide
ctccatattctacgagagtctcattcgagt

SEQ ID NO: 321060 - DNA, 30 bp, Artificial Sequence
  Synthetic oligonucleotide
cgcgggtggagccgcacattcaaaaggagt

SEQ ID NO: 321061 - DNA, 30 bp, Artificial Sequence
  Synthetic oligonucleotide
tccagtctacagttgaaatcagcaaggagt

SEQ ID NO: 321062 - DNA, 30 bp, Artificial Sequence
  Synthetic oligonucleotide
tagggagagagtgcgccggactcaaggagt

SEQ ID NO: 321063 - DNA, 30 bp, Artificial Sequence
  Synthetic oligonucleotide
cacaaccatgggtcgaatcaccacaggagt

SEQ ID NO: 321064 - DNA, 30 bp, Artificial Sequence
  Synthetic oligonucleotide
cccaaaaccttcgtatgtattatcaggagt

SEQ ID NO: 321065 - DNA, 30 bp, Artificial Sequence
  Synthetic oligonucleotide
gtttatccgtcttttcggatatagaggagt

SEQ ID NO: 321066 - DNA, 30 bp, Artificial Sequence
  Synthetic oligonucleotide
gctttggcgtcaggatcttcggataggagt

SEQ ID NO: 321067 - DNA, 30 bp, Artificial Sequence
  Synthetic oligonucleotide
catatctcactgtgggaacggtctaggagt

SEQ ID NO: 321068 - DNA, 30 bp, Artificial Sequence
  Synthetic oligonucleotide
agagggggtgcgtcggagttataacggagt

SEQ ID NO: 321069 - DNA, 30 bp, Artificial Sequence
  Synthetic oligonucleotide
agtaggtggagctactaccatgcgcggagt

SEQ ID NO: 321070 - DNA, 30 bp, Artificial Sequence
  Synthetic oligonucleotide
gaagactacatgactctcaatgtagggagt

SEQ ID NO: 321071 - DNA, 30 bp, Artificial Sequence
  Synthetic oligonucleotide
tcataaactcagacgctacccctcgggagt

SEQ ID NO: 321072 - DNA, 30 bp, Artificial Sequence
  Synthetic oligonucleotide
actgggggccatcggtcaggtgtcgggagt

SEQ ID NO: 321073 - DNA, 30 bp, Artificial Sequence
  Synthetic oligonucleotide
tcaatacatgcaagacgctaaagggggagt

SEQ ID NO: 321074 - DNA, 30 bp, Artificial Sequence
  Synthetic oligonucleotide
gtaacgcggtcggttctcgacgcctggagt

SEQ ID NO: 321075 - DNA, 30 bp, Artificial Sequence
  Synthetic oligonucleotide
caagcccggggatttaattgtgcgtggagt

SEQ ID NO: 321076 - DNA, 30 bp, Artificial Sequence
  Synthetic oligonucleotide
ttgtggggcacgaggtgaaagcggtggagt

SEQ ID NO: 321077 - DNA, 30 bp, Artificial Sequence
  Synthetic oligonucleotide
ctcgggggctttcagctcgagaacatgagt

SEQ ID NO: 321078 - DNA, 30 bp, Artificial Sequence
  Synthetic oligonucleotide
catataaaacttctccggcaacacatgagt

SEQ ID NO: 321079 - DNA, 30 bp, Artificial Sequence
  Synthetic oligonucleotide
caaagggccgacggggcctcaagcatgagt

SEQ ID NO: 321080 - DNA, 30 bp, Artificial Sequence
  Synthetic oligonucleotide
gtaccaatagtcgagtctctttgcatgagt

SEQ ID NO: 321081 - DNA, 30 bp, Artificial Sequence
  Synthetic oligonucleotide
atctcggtaatcgcgagacaagtcatgagt

SEQ ID NO: 321082 - DNA, 30 bp, Artificial Sequence
  Synthetic oligonucleotide
tccaggttgctaggtggaaaaggtatgagt

SEQ ID NO: 321083 - DNA, 30 bp, Artificial Sequence
  Synthetic oligonucleotide
aaccacctctacaacgccacgggtatgagt

SEQ ID NO: 321084 - DNA, 30 bp, Artificial Sequence
  Synthetic oligonucleotide
cattattagtacttccatctagaactgagt

SEQ ID NO: 321085 - DNA, 30 bp, Artificial Sequence
  Synthetic oligonucleotide
gtgaaggcgggattgacggcaccactgagt

SEQ ID NO: 321086 - DNA, 30 bp, Artificial Sequence
  Synthetic oligonucleotide
ttaggcaggttacgaaccctccgactgagt

SEQ ID NO: 321087 - DNA, 30 bp, Artificial Sequence
  Synthetic oligonucleotide
cccagactgcaatgtaaacaatgcctgagt

SEQ ID NO: 321088 - DNA, 30 bp, Artificial Sequence
  Synthetic oligonucleotide
acatatcccatgcaaggttgaatcctgagt

SEQ ID NO: 321089 - DNA, 30 bp, Artificial Sequence
  Synthetic oligonucleotide
tctgccttttatcgagttaatttgctgagt

SEQ ID NO: 321090 - DNA, 30 bp, Artificial Sequence
  Synthetic oligonucleotide
ttcagaaccgtttggcaacaaaatctgagt

SEQ ID NO: 321091 - DNA, 30 bp, Artificial Sequence
  Synthetic oligonucleotide
tctctaatcgtaaaacgtctctaggtgagt

SEQ ID NO: 321092 - DNA, 30 bp, Artificial Sequence
  Synthetic oligonucleotide
ttgtcgatgccaaaccccatgcgtgtgagt

SEQ ID NO: 321093 - DNA, 30 bp, Artificial Sequence
  Synthetic oligonucleotide
gagaaggtagttatctcctgcgtattgagt

SEQ ID NO: 321094 - DNA, 30 bp, Artificial Sequence
  Synthetic oligonucleotide
gacatacaccttgacgattcgtccttgagt

SEQ ID NO: 321095 - DNA, 30 bp, Artificial Sequence
  Synthetic oligonucleotide
gctgcaaagctatacactccaacaaatagt

SEQ ID NO: 321096 - DNA, 30 bp, Artificial Sequence
  Synthetic oligonucleotide
agggcacacgcttgctaaatcaacaatagt

SEQ ID NO: 321097 - DNA, 30 bp, Artificial Sequence
  Synthetic oligonucleotide
tccgaatcacggtattggtatgtcaatagt

SEQ ID NO: 321098 - DNA, 30 bp, Artificial Sequence
  Synthetic oligonucleotide
taccgaccgccggtgttttgagctaatagt

SEQ ID NO: 321099 - DNA, 30 bp, Artificial Sequence
  Synthetic oligonucleotide
atcgtccgagtccaattgtctgctaatagt

SEQ ID NO: 321100 - DNA, 30 bp, Artificial Sequence
  Synthetic oligonucleotide
ccaaaaagctcttgcactgttcgtaatagt

SEQ ID NO: 321101 - DNA, 30 bp, Artificial Sequence
  Synthetic oligonucleotide
agtgagttcaacatgcaaagcattaatagt

SEQ ID NO: 321102 - DNA, 30 bp, Artificial Sequence
  Synthetic oligonucleotide
taggaatgagacattcctcgtgaacatagt

SEQ ID NO: 321103 - DNA, 30 bp, Artificial Sequence
  Synthetic oligonucleotide
aaagatgttgatgtgcgtgccagacatagt

SEQ ID NO: 321104 - DNA, 30 bp, Artificial Sequence
  Synthetic oligonucleotide
cagggcgaagagcatgatgcttgacatagt

SEQ ID NO: 321105 - DNA, 30 bp, Artificial Sequence
  Synthetic oligonucleotide
ctgtgaaatagccctcagtgggaccatagt

SEQ ID NO: 321106 - DNA, 30 bp, Artificial Sequence
  Synthetic oligonucleotide
ggagaattgattaaggtactaggccatagt

SEQ ID NO: 321107 - DNA, 30 bp, Artificial Sequence
  Synthetic oligonucleotide
gcattagcgtgataaccgggtggccatagt

SEQ ID NO: 321108 - DNA, 30 bp, Artificial Sequence
  Synthetic oligonucleotide
cctctgaaaatgctactctataggcatagt

SEQ ID NO: 321109 - DNA, 30 bp, Artificial Sequence
  Synthetic oligonucleotide
gttaaacagtctggttgcagtgggcatagt

SEQ ID NO: 321110 - DNA, 30 bp, Artificial Sequence
  Synthetic oligonucleotide
ttaactagagaccgtcgaaggaatcatagt

SEQ ID NO: 321111 - DNA, 30 bp, Artificial Sequence
  Synthetic oligonucleotide
gcatgtttcgagttgtccaagggtcatagt

SEQ ID NO: 321112 - DNA, 30 bp, Artificial Sequence
  Synthetic oligonucleotide
tacttgaagtcattctagtagagagatagt

SEQ ID NO: 321113 - DNA, 30 bp, Artificial Sequence
  Synthetic oligonucleotide
gctgtgaacgagttgcggccccgagatagt

SEQ ID NO: 321114 - DNA, 30 bp, Artificial Sequence
  Synthetic oligonucleotide
tttcatagtgatgttgaccggaacgatagt

SEQ ID NO: 321115 - DNA, 30 bp, Artificial Sequence
  Synthetic oligonucleotide
aaatatagggacaagttgctaatcgatagt

SEQ ID NO: 321116 - DNA, 30 bp, Artificial Sequence
  Synthetic oligonucleotide
ttcaagggttgcggcgaaaggaaggatagt

SEQ ID NO: 321117 - DNA, 30 bp, Artificial Sequence
  Synthetic oligonucleotide
gacagggatgcaatgctgatgggggatagt

SEQ ID NO: 321118 - DNA, 30 bp, Artificial Sequence
  Synthetic oligonucleotide
tgcagcggcataattatgggggtggatagt

SEQ ID NO: 321119 - DNA, 30 bp, Artificial Sequence
  Synthetic oligonucleotide
ccagataaaagcttttatgttaatgatagt

SEQ ID NO: 321120 - DNA, 30 bp, Artificial Sequence
  Synthetic oligonucleotide
gtatgtccagctcagtcgcgaggtgatagt

SEQ ID NO: 321121 - DNA, 30 bp, Artificial Sequence
  Synthetic oligonucleotide
atagacttagatgaacgcttgaaatatagt

SEQ ID NO: 321122 - DNA, 30 bp, Artificial Sequence
  Synthetic oligonucleotide
aaaaattcaagataggccagcaagtatagt

SEQ ID NO: 321123 - DNA, 30 bp, Artificial Sequence
  Synthetic oligonucleotide
ctactaaatcttctcaaggtgcagtatagt

SEQ ID NO: 321124 - DNA, 30 bp, Artificial Sequence
  Synthetic oligonucleotide
gattcataacaccagaagcgagtgtatagt

SEQ ID NO: 321125 - DNA, 30 bp, Artificial Sequence
  Synthetic oligonucleotide
aaagaacatccaatacatgtttcttatagt

SEQ ID NO: 321126 - DNA, 30 bp, Artificial Sequence
  Synthetic oligonucleotide
tagggtcaaacgccaatcgagtgttatagt

SEQ ID NO: 321127 - DNA, 30 bp, Artificial Sequence
  Synthetic oligonucleotide
tccggagttagggttggcgtaacaactagt

SEQ ID NO: 321128 - DNA, 30 bp, Artificial Sequence
  Synthetic oligonucleotide
taagtgttgacaggctttgaagtaactagt

SEQ ID NO: 321129 - DNA, 30 bp, Artificial Sequence
  Synthetic oligonucleotide
cctgcgtcacggtgcggtcgagccactagt

SEQ ID NO: 321130 - DNA, 30 bp, Artificial Sequence
  Synthetic oligonucleotide
ggaaaaatatatccgtatattgatactagt

SEQ ID NO: 321131 - DNA, 30 bp, Artificial Sequence
  Synthetic oligonucleotide
gctacggttagattgcataatgctactagt

SEQ ID NO: 321132 - DNA, 30 bp, Artificial Sequence
  Synthetic oligonucleotide
atgtttgagcatcggatgaattgtactagt

SEQ ID NO: 321133 - DNA, 30 bp, Artificial Sequence
  Synthetic oligonucleotide
catcacaagttcatggtgtgacaacctagt

SEQ ID NO: 321134 - DNA, 29 bp, Artificial Sequence
  Synthetic oligonucleotide
cgggaaaaagctaggatctcgtagctagt

SEQ ID NO: 321135 - DNA, 30 bp, Artificial Sequence
  Synthetic oligonucleotide
ccgctgccgaatggggggccgtacgctagt

SEQ ID NO: 321136 - DNA, 30 bp, Artificial Sequence
  Synthetic oligonucleotide
gcttcacacctggcttctaggcaggctagt

SEQ ID NO: 321137 - DNA, 30 bp, Artificial Sequence
  Synthetic oligonucleotide
tcgtcagctaatcgatagttcgcggctagt

SEQ ID NO: 321138 - DNA, 30 bp, Artificial Sequence
  Synthetic oligonucleotide
ctcaaaggagcctacattctttgggctagt

SEQ ID NO: 321139 - DNA, 30 bp, Artificial Sequence
  Synthetic oligonucleotide
ggtgttctccaaattaccagcttggctagt

SEQ ID NO: 321140 - DNA, 30 bp, Artificial Sequence
  Synthetic oligonucleotide
gcatcatccaggacgtgtctctcatctagt

SEQ ID NO: 321141 - DNA, 30 bp, Artificial Sequence
  Synthetic oligonucleotide
gctcggaacattatcggacggggatctagt

SEQ ID NO: 321142 - DNA, 30 bp, Artificial Sequence
  Synthetic oligonucleotide
cattgcttaaaagttagtcgggtatctagt

SEQ ID NO: 321143 - DNA, 30 bp, Artificial Sequence
  Synthetic oligonucleotide
cctatgcctgcttggcgacgagagtctagt

SEQ ID NO: 321144 - DNA, 30 bp, Artificial Sequence
  Synthetic oligonucleotide
tagtgccaccgacgatcatagccgtctagt

SEQ ID NO: 321145 - DNA, 30 bp, Artificial Sequence
  Synthetic oligonucleotide
atatagctcgttttgaggtttgggtctagt

SEQ ID NO: 321146 - DNA, 30 bp, Artificial Sequence
  Synthetic oligonucleotide
tccgttccatgtttgaatcttgtgtctagt

SEQ ID NO: 321147 - DNA, 30 bp, Artificial Sequence
  Synthetic oligonucleotide
cgaagaaattaacgttaggagcgttctagt

SEQ ID NO: 321148 - DNA, 30 bp, Artificial Sequence
  Synthetic oligonucleotide
tgtaagaaagtgcttcgtgtcacaagtagt

SEQ ID NO: 321149 - DNA, 30 bp, Artificial Sequence
  Synthetic oligonucleotide
agaatatcaggtttattaacgtacagtagt

SEQ ID NO: 321150 - DNA, 30 bp, Artificial Sequence
  Synthetic oligonucleotide
gtttctgcacgacggtatccagagagtagt

SEQ ID NO: 321151 - DNA, 30 bp, Artificial Sequence
  Synthetic oligonucleotide
cgggcactccaggtagagtactggagtagt

SEQ ID NO: 321152 - DNA, 30 bp, Artificial Sequence
  Synthetic oligonucleotide
gaggcgtcggaagctctaggactgagtagt

SEQ ID NO: 321153 - DNA, 30 bp, Artificial Sequence
  Synthetic oligonucleotide
aatggcgaaaatgccaccccgttgagtagt

SEQ ID NO: 321154 - DNA, 30 bp, Artificial Sequence
  Synthetic oligonucleotide
tacgccccgaggtttgcgtacaatagtagt

SEQ ID NO: 321155 - DNA, 30 bp, Artificial Sequence
  Synthetic oligonucleotide
gacgctcgtacctgtcatacgtaacgtagt

SEQ ID NO: 321156 - DNA, 30 bp, Artificial Sequence
  Synthetic oligonucleotide
tgcaggtccacaaggtctaggatccgtagt

SEQ ID NO: 321157 - DNA, 30 bp, Artificial Sequence
  Synthetic oligonucleotide
gtcgcaggcaaaacaaattatatccgtagt

SEQ ID NO: 321158 - DNA, 30 bp, Artificial Sequence
  Synthetic oligonucleotide
gtgtgacccatcgttagaatataaggtagt

SEQ ID NO: 321159 - DNA, 30 bp, Artificial Sequence
  Synthetic oligonucleotide
aaaagtatctaaaatgatatcagaggtagt

SEQ ID NO: 321160 - DNA, 30 bp, Artificial Sequence
  Synthetic oligonucleotide
ttttcgcgtaagatagctgtcgtgggtagt

SEQ ID NO: 321161 - DNA, 30 bp, Artificial Sequence
  Synthetic oligonucleotide
tactttgcacttgacttgttcgatggtagt

SEQ ID NO: 321162 - DNA, 30 bp, Artificial Sequence
  Synthetic oligonucleotide
ttaggaaagactttaaggatgaaatgtagt

SEQ ID NO: 321163 - DNA, 30 bp, Artificial Sequence
  Synthetic oligonucleotide
atcgatatgatttgtagtagtgaatgtagt

SEQ ID NO: 321164 - DNA, 30 bp, Artificial Sequence
  Synthetic oligonucleotide
ttgggtgttgggctcaatagatgatgtagt

SEQ ID NO: 321165 - DNA, 30 bp, Artificial Sequence
  Synthetic oligonucleotide
cgacacgcccggctaagggagtgatgtagt

SEQ ID NO: 321166 - DNA, 30 bp, Artificial Sequence
  Synthetic oligonucleotide
ttgcagatgctagcgagtgaagcctgtagt

SEQ ID NO: 321167 - DNA, 30 bp, Artificial Sequence
  Synthetic oligonucleotide
ggcactgattcccgacagaacaagtgtagt

SEQ ID NO: 321168 - DNA, 30 bp, Artificial Sequence
  Synthetic oligonucleotide
aacgccctcatgagcaacaccctgtgtagt

SEQ ID NO: 321169 - DNA, 30 bp, Artificial Sequence
  Synthetic oligonucleotide
aactgccgtgcgtctcggtccgaaattagt

SEQ ID NO: 321170 - DNA, 30 bp, Artificial Sequence
  Synthetic oligonucleotide
tacaccactaaatagcgtcattgaattagt

SEQ ID NO: 321171 - DNA, 30 bp, Artificial Sequence
  Synthetic oligonucleotide
ttcatataccataccggtcctgacattagt

SEQ ID NO: 321172 - DNA, 30 bp, Artificial Sequence
  Synthetic oligonucleotide
acctgtccgcgaaggagcattcccattagt

SEQ ID NO: 321173 - DNA, 30 bp, Artificial Sequence
  Synthetic oligonucleotide
gagggaacgtcgcacatgtaaaagattagt

SEQ ID NO: 321174 - DNA, 30 bp, Artificial Sequence
  Synthetic oligonucleotide
actattcggggaggtgcgccgcagattagt

SEQ ID NO: 321175 - DNA, 30 bp, Artificial Sequence
  Synthetic oligonucleotide
ctccactgaagtgcactcccgacgattagt

SEQ ID NO: 321176 - DNA, 30 bp, Artificial Sequence
  Synthetic oligonucleotide
acatatagttttagcgcgggattgattagt

SEQ ID NO: 321177 - DNA, 30 bp, Artificial Sequence
  Synthetic oligonucleotide
ccaagattccagttagacagtcgtattagt

SEQ ID NO: 321178 - DNA, 30 bp, Artificial Sequence
  Synthetic oligonucleotide
tgtccacataaataaactgtgtcccttagt

SEQ ID NO: 321179 - DNA, 30 bp, Artificial Sequence
  Synthetic oligonucleotide
caatgtgccgtcaagaattgatggcttagt

SEQ ID NO: 321180 - DNA, 30 bp, Artificial Sequence
  Synthetic oligonucleotide
atcgagctattggaatttcgtctgcttagt

SEQ ID NO: 321181 - DNA, 30 bp, Artificial Sequence
  Synthetic oligonucleotide
attgtgcgagagtcctacgaatcagttagt

SEQ ID NO: 321182 - DNA, 30 bp, Artificial Sequence
  Synthetic oligonucleotide
ataggtgataacgtcattcggatagttagt

SEQ ID NO: 321183 - DNA, 30 bp, Artificial Sequence
  Synthetic oligonucleotide
tcaaccgcttcagtgtaaccgaacgttagt

SEQ ID NO: 321184 - DNA, 30 bp, Artificial Sequence
  Synthetic oligonucleotide
accatacaagtcgtgtattaactcgttagt

SEQ ID NO: 321185 - DNA, 30 bp, Artificial Sequence
  Synthetic oligonucleotide
gtctagggttgcaattcctgcggggttagt

SEQ ID NO: 321186 - DNA, 30 bp, Artificial Sequence
  Synthetic oligonucleotide
ggaacaggttgttaggcatacactgttagt

SEQ ID NO: 321187 - DNA, 30 bp, Artificial Sequence
  Synthetic oligonucleotide
aaccggcgtccaaccaggtgacgtgttagt

SEQ ID NO: 321188 - DNA, 30 bp, Artificial Sequence
  Synthetic oligonucleotide
cggatgtacggtaagtgaaaaattgttagt

SEQ ID NO: 321189 - DNA, 30 bp, Artificial Sequence
  Synthetic oligonucleotide
tataataggtttgataggtcagttgttagt

SEQ ID NO: 321190 - DNA, 30 bp, Artificial Sequence
  Synthetic oligonucleotide
tcaacaacggccccgaatattccctttagt

SEQ ID NO: 321191 - DNA, 30 bp, Artificial Sequence
  Synthetic oligonucleotide
ggctcgccttgaataaccacaggctttagt

SEQ ID NO: 321192 - DNA, 30 bp, Artificial Sequence
  Synthetic oligonucleotide
gcaggtttacatctactaaaggtctttagt

SEQ ID NO: 321193 - DNA, 30 bp, Artificial Sequence
  Synthetic oligonucleotide
cgtccgcacctttaggatttctagtttagt

SEQ ID NO: 321194 - DNA, 30 bp, Artificial Sequence
  Synthetic oligonucleotide
tagcgtagaacaagcccgcaagcgtttagt

SEQ ID NO: 321195 - DNA, 30 bp, Artificial Sequence
  Synthetic oligonucleotide
tggcatgtgacgggttttaggatgtttagt

SEQ ID NO: 321196 - DNA, 30 bp, Artificial Sequence
  Synthetic oligonucleotide
ttacgacgacgggttgatctggtttttagt

SEQ ID NO: 321197 - DNA, 30 bp, Artificial Sequence
  Synthetic oligonucleotide
aagatatagatggattactgacgaaaacgt

SEQ ID NO: 321198 - DNA, 30 bp, Artificial Sequence
  Synthetic oligonucleotide
tgagtgtcagatcgcgcttactgaaaacgt

SEQ ID NO: 321199 - DNA, 30 bp, Artificial Sequence
  Synthetic oligonucleotide
gtaggtgtcagtccgtttcggcagaaacgt

SEQ ID NO: 321200 - DNA, 30 bp, Artificial Sequence
  Synthetic oligonucleotide
gtgatcgcgacctgtagtctacaacaacgt

SEQ ID NO: 321201 - DNA, 30 bp, Artificial Sequence
  Synthetic oligonucleotide
ccgtaagggtaggcataaggtacccaacgt

SEQ ID NO: 321202 - DNA, 30 bp, Artificial Sequence
  Synthetic oligonucleotide
gccgggttcgataaatccgtcatgcaacgt

SEQ ID NO: 321203 - DNA, 30 bp, Artificial Sequence
  Synthetic oligonucleotide
gacaaattgcggccctgcaaggctcaacgt

SEQ ID NO: 321204 - DNA, 30 bp, Artificial Sequence
  Synthetic oligonucleotide
tattggcggttctcagagggacttcaacgt

SEQ ID NO: 321205 - DNA, 30 bp, Artificial Sequence
  Synthetic oligonucleotide
atcgtgctatctagattcaaaaaagaacgt

SEQ ID NO: 321206 - DNA, 30 bp, Artificial Sequence
  Synthetic oligonucleotide
ggcccttaagggtctgccgttgaagaacgt

SEQ ID NO: 321207 - DNA, 30 bp, Artificial Sequence
  Synthetic oligonucleotide
gcccatgaagtttattactggcgagaacgt

SEQ ID NO: 321208 - DNA, 30 bp, Artificial Sequence
  Synthetic oligonucleotide
aaggacgccaccgttataacatgagaacgt

SEQ ID NO: 321209 - DNA, 30 bp, Artificial Sequence
  Synthetic oligonucleotide
ctttcttcaaagcaaaaatgtgtagaacgt

SEQ ID NO: 321210 - DNA, 30 bp, Artificial Sequence
  Synthetic oligonucleotide
gctgcgcgtgatagaaaccacgccgaacgt

SEQ ID NO: 321211 - DNA, 30 bp, Artificial Sequence
  Synthetic oligonucleotide
gccgtccgatctgcgcggttctgcgaacgt

SEQ ID NO: 321212 - DNA, 30 bp, Artificial Sequence
  Synthetic oligonucleotide
cttgatctcaattaatcccacccggaacgt

SEQ ID NO: 321213 - DNA, 30 bp, Artificial Sequence
  Synthetic oligonucleotide
cttcttagacagtaaggatctagggaacgt

SEQ ID NO: 321214 - DNA, 30 bp, Artificial Sequence
  Synthetic oligonucleotide
ttcaaacgagcgatccacggcttggaacgt

SEQ ID NO: 321215 - DNA, 30 bp, Artificial Sequence
  Synthetic oligonucleotide
gaatagatgcgcattttaaaatatgaacgt

SEQ ID NO: 321216 - DNA, 30 bp, Artificial Sequence
  Synthetic oligonucleotide
gccaatgaatcttcttagataattgaacgt

SEQ ID NO: 321217 - DNA, 30 bp, Artificial Sequence
  Synthetic oligonucleotide
caatttccgcagtaggtgaacattgaacgt

SEQ ID NO: 321218 - DNA, 30 bp, Artificial Sequence
  Synthetic oligonucleotide
tacgagataaagccgttgctagttgaacgt

SEQ ID NO: 321219 - DNA, 30 bp, Artificial Sequence
  Synthetic oligonucleotide
ttactttggattgtcgtatcataataacgt

SEQ ID NO: 321220 - DNA, 30 bp, Artificial Sequence
  Synthetic oligonucleotide
actggggaaggaacagacttataataacgt

SEQ ID NO: 321221 - DNA, 30 bp, Artificial Sequence
  Synthetic oligonucleotide
gttaactgggccggaggctttgcataacgt

SEQ ID NO: 321222 - DNA, 30 bp, Artificial Sequence
  Synthetic oligonucleotide
gccggtagttgaagcttgcgacagtaacgt

SEQ ID NO: 321223 - DNA, 30 bp, Artificial Sequence
  Synthetic oligonucleotide
cacaatatcgccaatcgaccgtggtaacgt

SEQ ID NO: 321224 - DNA, 30 bp, Artificial Sequence
  Synthetic oligonucleotide
caaacctaatagacggtataagagacacgt

SEQ ID NO: 321225 - DNA, 31 bp, Artificial Sequence
  Synthetic oligonucleotide
acatttcgatgttggtttttgagtgacacgt

SEQ ID NO: 321226 - DNA, 30 bp, Artificial Sequence
  Synthetic oligonucleotide
catgtgagcctatcgctggcgaacccacgt

SEQ ID NO: 321227 - DNA, 30 bp, Artificial Sequence
  Synthetic oligonucleotide
acacgcgctagatccgggtttcacccacgt

SEQ ID NO: 321228 - DNA, 30 bp, Artificial Sequence
  Synthetic oligonucleotide
tagcatatccggtaggggtggtacccacgt

SEQ ID NO: 321229 - DNA, 30 bp, Artificial Sequence
  Synthetic oligonucleotide
attgctgctccattagacctggtcccacgt

SEQ ID NO: 321230 - DNA, 30 bp, Artificial Sequence
  Synthetic oligonucleotide
aatcgaccctaaatcctttgggctccacgt

SEQ ID NO: 321231 - DNA, 30 bp, Artificial Sequence
  Synthetic oligonucleotide
ttaggagttttaagcgcagtgagtccacgt

SEQ ID NO: 321232 - DNA, 30 bp, Artificial Sequence
  Synthetic oligonucleotide
tgatcgacacgtcgcatatcctaagcacgt

SEQ ID NO: 321233 - DNA, 30 bp, Artificial Sequence
  Synthetic oligonucleotide
gtacatcgctgatacgtcagtttagcacgt

SEQ ID NO: 321234 - DNA, 30 bp, Artificial Sequence
  Synthetic oligonucleotide
agacgagagaaacgcgtgcggcccgcacgt

SEQ ID NO: 321235 - DNA, 30 bp, Artificial Sequence
  Synthetic oligonucleotide
tatacaaatgtccgcgagtcactcgcacgt

SEQ ID NO: 321236 - DNA, 30 bp, Artificial Sequence
  Synthetic oligonucleotide
gactcatgatctcttatgtctgaggcacgt

SEQ ID NO: 321237 - DNA, 30 bp, Artificial Sequence
  Synthetic oligonucleotide
catggatggaatggcggtattgaggcacgt

SEQ ID NO: 321238 - DNA, 30 bp, Artificial Sequence
  Synthetic oligonucleotide
agagacggtggagtggggaggctggcacgt

SEQ ID NO: 321239 - DNA, 30 bp, Artificial Sequence
  Synthetic oligonucleotide
tccttcagttctgctcggatctctgcacgt

SEQ ID NO: 321240 - DNA, 30 bp, Artificial Sequence
  Synthetic oligonucleotide
atatccgtagacattagaatccttgcacgt

SEQ ID NO: 321241 - DNA, 30 bp, Artificial Sequence
  Synthetic oligonucleotide
gcaatgggtcgcccgactattagctcacgt

SEQ ID NO: 321242 - DNA, 30 bp, Artificial Sequence
  Synthetic oligonucleotide
atcccgggcatactctatccgccgtcacgt

SEQ ID NO: 321243 - DNA, 30 bp, Artificial Sequence
  Synthetic oligonucleotide
gtaaaacgactagggtagtaattgtcacgt

SEQ ID NO: 321244 - DNA, 30 bp, Artificial Sequence
  Synthetic oligonucleotide
cattgtacgtgctcacagagatcttcacgt

SEQ ID NO: 321245 - DNA, 29 bp, Artificial Sequence
  Synthetic oligonucleotide
tagaagggataggtaaagtcaccagacgt

SEQ ID NO: 321246 - DNA, 30 bp, Artificial Sequence
  Synthetic oligonucleotide
aaaattccagaaagaagcgggaccagacgt

SEQ ID NO: 321247 - DNA, 30 bp, Artificial Sequence
  Synthetic oligonucleotide
cgcgcttagtgcggcgggcagatcagacgt

SEQ ID NO: 321248 - DNA, 30 bp, Artificial Sequence
  Synthetic oligonucleotide
attacataatccagcacctggtagagacgt

SEQ ID NO: 321249 - DNA, 30 bp, Artificial Sequence
  Synthetic oligonucleotide
gatcgtggatgtatccggatgagtagacgt

SEQ ID NO: 321250 - DNA, 30 bp, Artificial Sequence
  Synthetic oligonucleotide
tgatacgtttttaagacagccgcacgacgt

SEQ ID NO: 321251 - DNA, 30 bp, Artificial Sequence
  Synthetic oligonucleotide
cccgggaactctggcatagtaaagcgacgt

SEQ ID NO: 321252 - DNA, 30 bp, Artificial Sequence
  Synthetic oligonucleotide
ctcagaagtttgatgggtcaatttcgacgt

SEQ ID NO: 321253 - DNA, 30 bp, Artificial Sequence
  Synthetic oligonucleotide
atccgtgcttactggttaccttaaggacgt

SEQ ID NO: 321254 - DNA, 30 bp, Artificial Sequence
  Synthetic oligonucleotide
ctcacagctgatggttcaagaacgggacgt

SEQ ID NO: 321255 - DNA, 30 bp, Artificial Sequence
  Synthetic oligonucleotide
gccttacacgaaaatttgtaaatgggacgt

SEQ ID NO: 321256 - DNA, 30 bp, Artificial Sequence
  Synthetic oligonucleotide
taacataaaagtgcagtgcgggatggacgt

SEQ ID NO: 321257 - DNA, 30 bp, Artificial Sequence
  Synthetic oligonucleotide
tacgaagtactcatatcgagttttggacgt

SEQ ID NO: 321258 - DNA, 30 bp, Artificial Sequence
  Synthetic oligonucleotide
aatagtcgaagtgcaagatgttttggacgt

SEQ ID NO: 321259 - DNA, 30 bp, Artificial Sequence
  Synthetic oligonucleotide
agatttgatatagaattctttggatgacgt

SEQ ID NO: 321260 - DNA, 30 bp, Artificial Sequence
  Synthetic oligonucleotide
gagtagggcttaagctaaggggtatgacgt

SEQ ID NO: 321261 - DNA, 30 bp, Artificial Sequence
  Synthetic oligonucleotide
aaggattaagaatactttgtctactgacgt

SEQ ID NO: 321262 - DNA, 30 bp, Artificial Sequence
  Synthetic oligonucleotide
aggcactctgtggtaccgcatagctgacgt

SEQ ID NO: 321263 - DNA, 30 bp, Artificial Sequence
  Synthetic oligonucleotide
gacagtcgtataggggctaacttctgacgt

SEQ ID NO: 321264 - DNA, 30 bp, Artificial Sequence
  Synthetic oligonucleotide
gcgggcaggttttgggcatgtacgtgacgt

SEQ ID NO: 321265 - DNA, 30 bp, Artificial Sequence
  Synthetic oligonucleotide
taagtaggaaaattacagaatccttgacgt

SEQ ID NO: 321266 - DNA, 30 bp, Artificial Sequence
  Synthetic oligonucleotide
acatctttcaaaggatacgttatttgacgt

SEQ ID NO: 321267 - DNA, 30 bp, Artificial Sequence
  Synthetic oligonucleotide
aagtaggggattctattacatgaaatacgt

SEQ ID NO: 321268 - DNA, 30 bp, Artificial Sequence
  Synthetic oligonucleotide
acacagccccccaacggatacacaatacgt

SEQ ID NO: 321269 - DNA, 30 bp, Artificial Sequence
  Synthetic oligonucleotide
ggaccatagctgggtagtcatgtaatacgt

SEQ ID NO: 321270 - DNA, 30 bp, Artificial Sequence
  Synthetic oligonucleotide
atatattgcgaaagggccgtcaccatacgt

SEQ ID NO: 321271 - DNA, 30 bp, Artificial Sequence
  Synthetic oligonucleotide
atgtaggtagtagtagggcgcccgatacgt

SEQ ID NO: 321272 - DNA, 30 bp, Artificial Sequence
  Synthetic oligonucleotide
ccactttggtataactgggtacggatacgt

SEQ ID NO: 321273 - DNA, 30 bp, Artificial Sequence
  Synthetic oligonucleotide
actgaaatcttaacattttaggggatacgt

SEQ ID NO: 321274 - DNA, 30 bp, Artificial Sequence
  Synthetic oligonucleotide
tttctcctaaaatgtatggcaactatacgt

SEQ ID NO: 321275 - DNA, 31 bp, Artificial Sequence
  Synthetic oligonucleotide
tgtcttgacaattcattctaatattatacgt

SEQ ID NO: 321276 - DNA, 30 bp, Artificial Sequence
  Synthetic oligonucleotide
atggcgagcataggtgtatatttactacgt

SEQ ID NO: 321277 - DNA, 30 bp, Artificial Sequence
  Synthetic oligonucleotide
atcgcgccgcagtccctccaaaacctacgt

SEQ ID NO: 321278 - DNA, 30 bp, Artificial Sequence
  Synthetic oligonucleotide
cgcatgcatacaaccacggtcctcctacgt

SEQ ID NO: 321279 - DNA, 30 bp, Artificial Sequence
  Synthetic oligonucleotide
gacgcgattcggggcttactgaatctacgt

SEQ ID NO: 321280 - DNA, 30 bp, Artificial Sequence
  Synthetic oligonucleotide
aaaaaataaacgagccagcagcctctacgt

SEQ ID NO: 321281 - DNA, 30 bp, Artificial Sequence
  Synthetic oligonucleotide
caagactccgccatcagctacgctctacgt

SEQ ID NO: 321282 - DNA, 30 bp, Artificial Sequence
  Synthetic oligonucleotide
agttcttcttcaggagtgttatgagtacgt

SEQ ID NO: 321283 - DNA, 30 bp, Artificial Sequence
  Synthetic oligonucleotide
ttccgttatgaggtctcacccgaggtacgt

SEQ ID NO: 321284 - DNA, 30 bp, Artificial Sequence
  Synthetic oligonucleotide
tagtcggggggactccagtctaatgtacgt

SEQ ID NO: 321285 - DNA, 30 bp, Artificial Sequence
  Synthetic oligonucleotide
agagcgcgcctaatactataacctgtacgt

SEQ ID NO: 321286 - DNA, 30 bp, Artificial Sequence
  Synthetic oligonucleotide
cactagggaaacaacgtgctggaattacgt

SEQ ID NO: 321287 - DNA, 30 bp, Artificial Sequence
  Synthetic oligonucleotide
ttaaacgcccccaacctatgaacattacgt

SEQ ID NO: 321288 - DNA, 30 bp, Artificial Sequence
  Synthetic oligonucleotide
tctcgggaggtataaccccacggattacgt

SEQ ID NO: 321289 - DNA, 29 bp, Artificial Sequence
  Synthetic oligonucleotide
tacccgcggttcaggccaatatcttacgt

SEQ ID NO: 321290 - DNA, 30 bp, Artificial Sequence
  Synthetic oligonucleotide
caaggcgcacagcactgtgggtggttacgt

SEQ ID NO: 321291 - DNA, 30 bp, Artificial Sequence
  Synthetic oligonucleotide
ctgccaggaaccggccctacttatttacgt

SEQ ID NO: 321292 - DNA, 30 bp, Artificial Sequence
  Synthetic oligonucleotide
aagtattggtagaatctatgccgtttacgt

SEQ ID NO: 321293 - DNA, 30 bp, Artificial Sequence
  Synthetic oligonucleotide
gataagtcagcaaacctcaagcaaaaccgt

SEQ ID NO: 321294 - DNA, 30 bp, Artificial Sequence
  Synthetic oligonucleotide
atgtggtcgtggaggagctcgctcaaccgt

SEQ ID NO: 321295 - DNA, 30 bp, Artificial Sequence
  Synthetic oligonucleotide
gttctaagtgcgctgcttagggctaaccgt

SEQ ID NO: 321296 - DNA, 30 bp, Artificial Sequence
  Synthetic oligonucleotide
ggccgttcaagagtgggttaaggacaccgt

SEQ ID NO: 321297 - DNA, 30 bp, Artificial Sequence
  Synthetic oligonucleotide
gggcatcgaggataggacgtctgacaccgt

SEQ ID NO: 321298 - DNA, 30 bp, Artificial Sequence
  Synthetic oligonucleotide
ggaggaccacgggtggtccaaatacaccgt

SEQ ID NO: 321299 - DNA, 30 bp, Artificial Sequence
  Synthetic oligonucleotide
aaaagacggcgtacgtccttcgttcaccgt

SEQ ID NO: 321300 - DNA, 30 bp, Artificial Sequence
  Synthetic oligonucleotide
tattgacagtgacctggatataaagaccgt

SEQ ID NO: 321301 - DNA, 29 bp, Artificial Sequence
  Synthetic oligonucleotide
aagtagccggtaagtaaccatcagaccgt

SEQ ID NO: 321302 - DNA, 29 bp, Artificial Sequence
  Synthetic oligonucleotide
tcggacattgacaacgggaaatcgaccgt

SEQ ID NO: 321303 - DNA, 30 bp, Artificial Sequence
  Synthetic oligonucleotide
ggaccgaagttattgcaaagtagataccgt

SEQ ID NO: 321304 - DNA, 30 bp, Artificial Sequence
  Synthetic oligonucleotide
aacgttggggtttagcagcataactaccgt

SEQ ID NO: 321305 - DNA, 30 bp, Artificial Sequence
  Synthetic oligonucleotide
ccactttctgttagatggattgactaccgt

SEQ ID NO: 321306 - DNA, 30 bp, Artificial Sequence
  Synthetic oligonucleotide
tcgcggcactccgttgggtcgagctaccgt

SEQ ID NO: 321307 - DNA, 30 bp, Artificial Sequence
  Synthetic oligonucleotide
agccttccgcttatggatccgaattaccgt

SEQ ID NO: 321308 - DNA, 30 bp, Artificial Sequence
  Synthetic oligonucleotide
caagggttatgtcgtgcgaaacattaccgt

SEQ ID NO: 321309 - DNA, 30 bp, Artificial Sequence
  Synthetic oligonucleotide
agctacatacacacatatatgcagacccgt

SEQ ID NO: 321310 - DNA, 30 bp, Artificial Sequence
  Synthetic oligonucleotide
gtgcgttaccaacgtccttaatttacccgt

SEQ ID NO: 321311 - DNA, 30 bp, Artificial Sequence
  Synthetic oligonucleotide
ggtaatccactacccgaaaagcaaccccgt

SEQ ID NO: 321312 - DNA, 30 bp, Artificial Sequence
  Synthetic oligonucleotide
ttgagaggggaggcgagacgacgaccccgt

SEQ ID NO: 321313 - DNA, 30 bp, Artificial Sequence
  Synthetic oligonucleotide
agaaacgaatgggacagtttcgatccccgt

SEQ ID NO: 321314 - DNA, 30 bp, Artificial Sequence
  Synthetic oligonucleotide
ggcctgaaatttccgacatttatcgcccgt

SEQ ID NO: 321315 - DNA, 30 bp, Artificial Sequence
  Synthetic oligonucleotide
aataaacacgaggataggatttaggcccgt

SEQ ID NO: 321316 - DNA, 30 bp, Artificial Sequence
  Synthetic oligonucleotide
ggttcgaatactgcgcagcgaagggcccgt

SEQ ID NO: 321317 - DNA, 30 bp, Artificial Sequence
  Synthetic oligonucleotide
ggatttgtaactttctattcaagtgcccgt

SEQ ID NO: 321318 - DNA, 30 bp, Artificial Sequence
  Synthetic oligonucleotide
gtatactacaaagccatgcactaatcccgt

SEQ ID NO: 321319 - DNA, 30 bp, Artificial Sequence
  Synthetic oligonucleotide
tgtacgggattcattaaggctgtatcccgt

SEQ ID NO: 321320 - DNA, 30 bp, Artificial Sequence
  Synthetic oligonucleotide
acacccggacatggtgcatttcactcccgt

SEQ ID NO: 321321 - DNA, 30 bp, Artificial Sequence
  Synthetic oligonucleotide
cgttcccgtaacagctaattaggcagccgt

SEQ ID NO: 321322 - DNA, 30 bp, Artificial Sequence
  Synthetic oligonucleotide
cggtcaaagtctctaaagtattagagccgt

SEQ ID NO: 321323 - DNA, 30 bp, Artificial Sequence
  Synthetic oligonucleotide
tggactgactgatacgcctcatggagccgt

SEQ ID NO: 321324 - DNA, 30 bp, Artificial Sequence
  Synthetic oligonucleotide
caagtgacgatagcgacagctatgagccgt

SEQ ID NO: 321325 - DNA, 30 bp, Artificial Sequence
  Synthetic oligonucleotide
tttccacggaagtgtatactaacccgccgt

SEQ ID NO: 321326 - DNA, 30 bp, Artificial Sequence
  Synthetic oligonucleotide
cgtgaggctcatgtagacgcattgcgccgt

SEQ ID NO: 321327 - DNA, 30 bp, Artificial Sequence
  Synthetic oligonucleotide
cgaccccgcgcctcagactagagaggccgt

SEQ ID NO: 321328 - DNA, 30 bp, Artificial Sequence
  Synthetic oligonucleotide
tgaaggcctaattttcagctactaggccgt

SEQ ID NO: 321329 - DNA, 31 bp, Artificial Sequence
  Synthetic oligonucleotide
tagacaagtatgcagagcctataatggccgt

SEQ ID NO: 321330 - DNA, 30 bp, Artificial Sequence
  Synthetic oligonucleotide
gcgcatgttcttttttgagttactggccgt

SEQ ID NO: 321331 - DNA, 30 bp, Artificial Sequence
  Synthetic oligonucleotide
gccagccccgtgtcgtacccgatatgccgt

SEQ ID NO: 321332 - DNA, 30 bp, Artificial Sequence
  Synthetic oligonucleotide
gactgccgaggtaacgagcgattatgccgt

SEQ ID NO: 321333 - DNA, 30 bp, Artificial Sequence
  Synthetic oligonucleotide
gctatctcgttcgacttgaccgggtgccgt

SEQ ID NO: 321334 - DNA, 30 bp, Artificial Sequence
  Synthetic oligonucleotide
cgcggcgcacggtctagaaaaatgtgccgt

SEQ ID NO: 321335 - DNA, 30 bp, Artificial Sequence
  Synthetic oligonucleotide
acaagggctagcactaccttgctgtgccgt

SEQ ID NO: 321336 - DNA, 30 bp, Artificial Sequence
  Synthetic oligonucleotide
agagtcgcagctttgtatccaaaaatccgt

SEQ ID NO: 321337 - DNA, 30 bp, Artificial Sequence
  Synthetic oligonucleotide
gtacgccaccctcatgccagggcaatccgt

SEQ ID NO: 321338 - DNA, 30 bp, Artificial Sequence
  Synthetic oligonucleotide
ggctacggtaattacttcgtactaatccgt

SEQ ID NO: 321339 - DNA, 30 bp, Artificial Sequence
  Synthetic oligonucleotide
cttgatacgagggataaatgatctatccgt

SEQ ID NO: 321340 - DNA, 30 bp, Artificial Sequence
  Synthetic oligonucleotide
caactcagggtgctatcttccagtatccgt

SEQ ID NO: 321341 - DNA, 30 bp, Artificial Sequence
  Synthetic oligonucleotide
tctttcgctccaggcctgatctgtatccgt

SEQ ID NO: 321342 - DNA, 30 bp, Artificial Sequence
  Synthetic oligonucleotide
aaagtcatgcggacaaggagagcactccgt

SEQ ID NO: 321343 - DNA, 30 bp, Artificial Sequence
  Synthetic oligonucleotide
tcgctcggcgcacgaccggaaaacctccgt

SEQ ID NO: 321344 - DNA, 30 bp, Artificial Sequence
  Synthetic oligonucleotide
ctcgtgctatggtcacgtaaatccctccgt

SEQ ID NO: 321345 - DNA, 28 bp, Artificial Sequence
  Synthetic oligonucleotide
acggggcgcaggggtttcgctgctccgt

SEQ ID NO: 321346 - DNA, 30 bp, Artificial Sequence
  Synthetic oligonucleotide
acaatgacgccattgacagggactctccgt

SEQ ID NO: 321347 - DNA, 30 bp, Artificial Sequence
  Synthetic oligonucleotide
attaccatttggggttaaaaattagtccgt

SEQ ID NO: 321348 - DNA, 30 bp, Artificial Sequence
  Synthetic oligonucleotide
accttatcctcccgggtgggccgcgtccgt

SEQ ID NO: 321349 - DNA, 30 bp, Artificial Sequence
  Synthetic oligonucleotide
tatgtgggtcgttgcgcggtaaatgtccgt

SEQ ID NO: 321350 - DNA, 30 bp, Artificial Sequence
  Synthetic oligonucleotide
aactggagagaattgcgggcgcaattccgt

SEQ ID NO: 321351 - DNA, 30 bp, Artificial Sequence
  Synthetic oligonucleotide
tcagatgcgatgtttgattcacgattccgt

SEQ ID NO: 321352 - DNA, 30 bp, Artificial Sequence
  Synthetic oligonucleotide
atgcgcctgaacagtagacggtgattccgt

SEQ ID NO: 321353 - DNA, 30 bp, Artificial Sequence
  Synthetic oligonucleotide
ctgcagttcgtagttcctgacaacttccgt

SEQ ID NO: 321354 - DNA, 30 bp, Artificial Sequence
  Synthetic oligonucleotide
aggggtagctcgtgcatgccagacttccgt

SEQ ID NO: 321355 - DNA, 30 bp, Artificial Sequence
  Synthetic oligonucleotide
caaaagtggtctatccgggaacgcttccgt

SEQ ID NO: 321356 - DNA, 30 bp, Artificial Sequence
  Synthetic oligonucleotide
ccggtgtctaacccccagatacacaagcgt

SEQ ID NO: 321357 - DNA, 30 bp, Artificial Sequence
  Synthetic oligonucleotide
cttctagacacaatatgaaacattaagcgt

SEQ ID NO: 321358 - DNA, 30 bp, Artificial Sequence
  Synthetic oligonucleotide
aagtacgtctgggcctctaatcaacagcgt

SEQ ID NO: 321359 - DNA, 29 bp, Artificial Sequence
  Synthetic oligonucleotide
ggtcgtggggcggtcgggcttaacagcgt

SEQ ID NO: 321360 - DNA, 30 bp, Artificial Sequence
  Synthetic oligonucleotide
atcttgaatcaaaaatgcaatggacagcgt

SEQ ID NO: 321361 - DNA, 30 bp, Artificial Sequence
  Synthetic oligonucleotide
gtcaatgtgttatttggtttcttacagcgt

SEQ ID NO: 321362 - DNA, 30 bp, Artificial Sequence
  Synthetic oligonucleotide
cattaacaaatcccgtaagacttccagcgt

SEQ ID NO: 321363 - DNA, 30 bp, Artificial Sequence
  Synthetic oligonucleotide
agaaattcaagcctagcgtgcattcagcgt

SEQ ID NO: 321364 - DNA, 30 bp, Artificial Sequence
  Synthetic oligonucleotide
attctaagtgcacggggttttattcagcgt

SEQ ID NO: 321365 - DNA, 30 bp, Artificial Sequence
  Synthetic oligonucleotide
caatttctatacctggcagatcgcgagcgt

SEQ ID NO: 321366 - DNA, 30 bp, Artificial Sequence
  Synthetic oligonucleotide
agagggctccatgaatcgggaagggagcgt

SEQ ID NO: 321367 - DNA, 30 bp, Artificial Sequence
  Synthetic oligonucleotide
aaaaagaccgacggggatgtgagggagcgt

SEQ ID NO: 321368 - DNA, 30 bp, Artificial Sequence
  Synthetic oligonucleotide
gccaaataggaggttggctgatgggagcgt

SEQ ID NO: 321369 - DNA, 30 bp, Artificial Sequence
  Synthetic oligonucleotide
ctcccaagtacgtaagtaatccttgagcgt

SEQ ID NO: 321370 - DNA, 30 bp, Artificial Sequence
  Synthetic oligonucleotide
gtctcggttggcatctgggtcccatagcgt

SEQ ID NO: 321371 - DNA, 30 bp, Artificial Sequence
  Synthetic oligonucleotide
ccataaccgggacccggttgtagctagcgt

SEQ ID NO: 321372 - DNA, 30 bp, Artificial Sequence
  Synthetic oligonucleotide
ctccggatcgcgtactggaattcgtagcgt

SEQ ID NO: 321373 - DNA, 30 bp, Artificial Sequence
  Synthetic oligonucleotide
agtgctcagtacagtgccgagtggtagcgt

SEQ ID NO: 321374 - DNA, 30 bp, Artificial Sequence
  Synthetic oligonucleotide
acgatttccgtaatgtaacattgttagcgt

SEQ ID NO: 321375 - DNA, 30 bp, Artificial Sequence
  Synthetic oligonucleotide
cctaaataatgttctgagactgtttagcgt

SEQ ID NO: 321376 - DNA, 31 bp, Artificial Sequence
  Synthetic oligonucleotide
acatcatatgtgggtctgtgcccaaacgcgt

SEQ ID NO: 321377 - DNA, 30 bp, Artificial Sequence
  Synthetic oligonucleotide
tcacggggggtgtctccaataggcacgcgt

SEQ ID NO: 321378 - DNA, 30 bp, Artificial Sequence
  Synthetic oligonucleotide
acctacgacgtggacctaactcagacgcgt

SEQ ID NO: 321379 - DNA, 30 bp, Artificial Sequence
  Synthetic oligonucleotide
ggcattcccacaagaactggtacaccgcgt

SEQ ID NO: 321380 - DNA, 30 bp, Artificial Sequence
  Synthetic oligonucleotide
ggctgtctattcacactcatagcaccgcgt

SEQ ID NO: 321381 - DNA, 30 bp, Artificial Sequence
  Synthetic oligonucleotide
attcaaacgtcaatgttgtacgagccgcgt

SEQ ID NO: 321382 - DNA, 30 bp, Artificial Sequence
  Synthetic oligonucleotide
tgcctgaaaatgactatgtaaactccgcgt

SEQ ID NO: 321383 - DNA, 30 bp, Artificial Sequence
  Synthetic oligonucleotide
gtctttcgtgcgcgatagctgagtccgcgt

SEQ ID NO: 321384 - DNA, 30 bp, Artificial Sequence
  Synthetic oligonucleotide
cacggattctcgacagcacagtttccgcgt

SEQ ID NO: 321385 - DNA, 30 bp, Artificial Sequence
  Synthetic oligonucleotide
tcgtgtgttaggtgttatgaagcagcgcgt

SEQ ID NO: 321386 - DNA, 30 bp, Artificial Sequence
  Synthetic oligonucleotide
agttagggctctcgagccgaggcagcgcgt

SEQ ID NO: 321387 - DNA, 30 bp, Artificial Sequence
  Synthetic oligonucleotide
gagcctgaacaaggatgtacccaggcgcgt

SEQ ID NO: 321388 - DNA, 30 bp, Artificial Sequence
  Synthetic oligonucleotide
agcaatctggggaccgatcttcgggcgcgt

SEQ ID NO: 321389 - DNA, 30 bp, Artificial Sequence
  Synthetic oligonucleotide
acaatcaaattcggattcatagctgcgcgt

SEQ ID NO: 321390 - DNA, 29 bp, Artificial Sequence
  Synthetic oligonucleotide
ggccctccgaggagcaagggcgatcgcgt

SEQ ID NO: 321391 - DNA, 30 bp, Artificial Sequence
  Synthetic oligonucleotide
ttcgcgtttcgcaaaagagatcgatcgcgt

SEQ ID NO: 321392 - DNA, 30 bp, Artificial Sequence
  Synthetic oligonucleotide
agtcacagtcagttttgaagtacgtcgcgt

SEQ ID NO: 321393 - DNA, 30 bp, Artificial Sequence
  Synthetic oligonucleotide
cgaggtcttggccgtggcggcgtgtcgcgt

SEQ ID NO: 321394 - DNA, 30 bp, Artificial Sequence
  Synthetic oligonucleotide
aactacactgataaagaccgctgttcgcgt

SEQ ID NO: 321395 - DNA, 30 bp, Artificial Sequence
  Synthetic oligonucleotide
tatgctatgtgataatgtgttgtttcgcgt

SEQ ID NO: 321396 - DNA, 30 bp, Artificial Sequence
  Synthetic oligonucleotide
catcgatctagagctctgcgtgaaaggcgt

SEQ ID NO: 321397 - DNA, 30 bp, Artificial Sequence
  Synthetic oligonucleotide
gtaatcagcctatactggtggggaaggcgt

SEQ ID NO: 321398 - DNA, 30 bp, Artificial Sequence
  Synthetic oligonucleotide
cacttccgctttgctcgaggctccaggcgt

SEQ ID NO: 321399 - DNA, 30 bp, Artificial Sequence
  Synthetic oligonucleotide
ttaacggtaaaacttgcgcgaaagaggcgt

SEQ ID NO: 321400 - DNA, 30 bp, Artificial Sequence
  Synthetic oligonucleotide
tggtaatgggggggggaatgggtgaggcgt

SEQ ID NO: 321401 - DNA, 30 bp, Artificial Sequence
  Synthetic oligonucleotide
gacctaattcggctgtcagacttgaggcgt

SEQ ID NO: 321402 - DNA, 30 bp, Artificial Sequence
  Synthetic oligonucleotide
aggtcagccgtgggctctaggtataggcgt

SEQ ID NO: 321403 - DNA, 30 bp, Artificial Sequence
  Synthetic oligonucleotide
gcgttagactgagacgaattatctaggcgt

SEQ ID NO: 321404 - DNA, 30 bp, Artificial Sequence
  Synthetic oligonucleotide
gtgtgggaattgttcaagcgtacacggcgt

SEQ ID NO: 321405 - DNA, 30 bp, Artificial Sequence
  Synthetic oligonucleotide
gcacacaacttacctagggttagggggcgt

SEQ ID NO: 321406 - DNA, 30 bp, Artificial Sequence
  Synthetic oligonucleotide
gcccataatacgtcgaccgttggggggcgt

SEQ ID NO: 321407 - DNA, 30 bp, Artificial Sequence
  Synthetic oligonucleotide
ggaaggtacatctcgcggcgttcatggcgt

SEQ ID NO: 321408 - DNA, 30 bp, Artificial Sequence
  Synthetic oligonucleotide
tgcatgcgttactttaaataatgatggcgt

SEQ ID NO: 321409 - DNA, 30 bp, Artificial Sequence
  Synthetic oligonucleotide
cttaatctctaccagatactactatggcgt

SEQ ID NO: 321410 - DNA, 30 bp, Artificial Sequence
  Synthetic oligonucleotide
tctggtgaaaaggtggaatacgcgtggcgt

SEQ ID NO: 321411 - DNA, 30 bp, Artificial Sequence
  Synthetic oligonucleotide
tctgacggaccatagggaaggtcgtggcgt

SEQ ID NO: 321412 - DNA, 30 bp, Artificial Sequence
  Synthetic oligonucleotide
tataatggcaggagtggggtgtattggcgt

SEQ ID NO: 321413 - DNA, 30 bp, Artificial Sequence
  Synthetic oligonucleotide
atgcgggtgcctacccactttatttggcgt

SEQ ID NO: 321414 - DNA, 30 bp, Artificial Sequence
  Synthetic oligonucleotide
cagcggggccggccggtcagcaaaatgcgt

SEQ ID NO: 321415 - DNA, 29 bp, Artificial Sequence
  Synthetic oligonucleotide
ctagtcacctatagcttttcaacatgcgt

SEQ ID NO: 321416 - DNA, 30 bp, Artificial Sequence
  Synthetic oligonucleotide
tgagtgtgtatacgtcaggcggccatgcgt

SEQ ID NO: 321417 - DNA, 30 bp, Artificial Sequence
  Synthetic oligonucleotide
gctcacaaagtcctatgataagcgatgcgt

SEQ ID NO: 321418 - DNA, 30 bp, Artificial Sequence
  Synthetic oligonucleotide
attaaaaaagcgcggcgttgcaggatgcgt

SEQ ID NO: 321419 - DNA, 30 bp, Artificial Sequence
  Synthetic oligonucleotide
gagacaaagatgtccaagttattgatgcgt

SEQ ID NO: 321420 - DNA, 30 bp, Artificial Sequence
  Synthetic oligonucleotide
gtcgcgctatagtcgcctactcatatgcgt

SEQ ID NO: 321421 - DNA, 30 bp, Artificial Sequence
  Synthetic oligonucleotide
gcgtacacctggcacgcatgcagtatgcgt

SEQ ID NO: 321422 - DNA, 30 bp, Artificial Sequence
  Synthetic oligonucleotide
ccggcggacagccgccctagaacactgcgt

SEQ ID NO: 321423 - DNA, 30 bp, Artificial Sequence
  Synthetic oligonucleotide
ccgttattccttcggttcaatgtcctgcgt

SEQ ID NO: 321424 - DNA, 30 bp, Artificial Sequence
  Synthetic oligonucleotide
gttgagttagttggatgtgggcaagtgcgt

SEQ ID NO: 321425 - DNA, 30 bp, Artificial Sequence
  Synthetic oligonucleotide
gagccggttagatggggtagtcaggtgcgt

SEQ ID NO: 321426 - DNA, 30 bp, Artificial Sequence
  Synthetic oligonucleotide
gagccaacgctcggataggaaccggtgcgt

SEQ ID NO: 321427 - DNA, 30 bp, Artificial Sequence
  Synthetic oligonucleotide
cgcccaagccgcgcagccaaagttgtgcgt

SEQ ID NO: 321428 - DNA, 30 bp, Artificial Sequence
  Synthetic oligonucleotide
caaacttcgacttaggcggggtccttgcgt

SEQ ID NO: 321429 - DNA, 30 bp, Artificial Sequence
  Synthetic oligonucleotide
agaagaactgatgttcgacaattgttgcgt

SEQ ID NO: 321430 - DNA, 30 bp, Artificial Sequence
  Synthetic oligonucleotide
gtgccatgattgctgtactgtactttgcgt

SEQ ID NO: 321431 - DNA, 30 bp, Artificial Sequence
  Synthetic oligonucleotide
agaagcattgcccgcttaccgggtttgcgt

SEQ ID NO: 321432 - DNA, 30 bp, Artificial Sequence
  Synthetic oligonucleotide
ttgtgttcgtaccgccggataaaaaatcgt

SEQ ID NO: 321433 - DNA, 30 bp, Artificial Sequence
  Synthetic oligonucleotide
gcgtttggtcagatatccacccataatcgt

SEQ ID NO: 321434 - DNA, 30 bp, Artificial Sequence
  Synthetic oligonucleotide
agagcgccccaagcttccacatgtaatcgt

SEQ ID NO: 321435 - DNA, 30 bp, Artificial Sequence
  Synthetic oligonucleotide
cggttgcggcgggaatgtgtgcaacatcgt

SEQ ID NO: 321436 - DNA, 30 bp, Artificial Sequence
  Synthetic oligonucleotide
agacaatatgcctcactggtttgacatcgt

SEQ ID NO: 321437 - DNA, 30 bp, Artificial Sequence
  Synthetic oligonucleotide
aggtactgcatgttgcacctgagccatcgt

SEQ ID NO: 321438 - DNA, 30 bp, Artificial Sequence
  Synthetic oligonucleotide
tagggcggttttttgcgggtaaggcatcgt

SEQ ID NO: 321439 - DNA, 30 bp, Artificial Sequence
  Synthetic oligonucleotide
cacaaaagtgataacagatggcctcatcgt

SEQ ID NO: 321440 - DNA, 30 bp, Artificial Sequence
  Synthetic oligonucleotide
tgcaggacgacatcgggcttgggagatcgt

SEQ ID NO: 321441 - DNA, 30 bp, Artificial Sequence
  Synthetic oligonucleotide
tatggcaattgggtgtccctccgcgatcgt

SEQ ID NO: 321442 - DNA, 30 bp, Artificial Sequence
  Synthetic oligonucleotide
cgacgtaaggaagggtaagcggtggatcgt

SEQ ID NO: 321443 - DNA, 30 bp, Artificial Sequence
  Synthetic oligonucleotide
gcatggtgtgtatttggaggacatgatcgt

SEQ ID NO: 321444 - DNA, 30 bp, Artificial Sequence
  Synthetic oligonucleotide
tactctaagttggaatgggattactatcgt

SEQ ID NO: 321445 - DNA, 30 bp, Artificial Sequence
  Synthetic oligonucleotide
tcttctgcatttgaggtaatatggtatcgt

SEQ ID NO: 321446 - DNA, 30 bp, Artificial Sequence
  Synthetic oligonucleotide
gaatcagtaaactacgtatgtcgttatcgt

SEQ ID NO: 321447 - DNA, 30 bp, Artificial Sequence
  Synthetic oligonucleotide
aatcgtatctctgtcgttaatgtttatcgt

SEQ ID NO: 321448 - DNA, 30 bp, Artificial Sequence
  Synthetic oligonucleotide
aaggtcattcagccggttcatgacactcgt

SEQ ID NO: 321449 - DNA, 27 bp, Artificial Sequence
  Synthetic oligonucleotide
ccagtccgtaaatcattatctactcgt

SEQ ID NO: 321450 - DNA, 30 bp, Artificial Sequence
  Synthetic oligonucleotide
tgcaaccgcagattgtagtggacacctcgt

SEQ ID NO: 321451 - DNA, 30 bp, Artificial Sequence
  Synthetic oligonucleotide
tcattaaacttcttacatgccccacctcgt

SEQ ID NO: 321452 - DNA, 30 bp, Artificial Sequence
  Synthetic oligonucleotide
gtcccgtcgttcaccaaaatgaaagctcgt

SEQ ID NO: 321453 - DNA, 30 bp, Artificial Sequence
  Synthetic oligonucleotide
tcgttgatcctccctatcaacgctgctcgt

SEQ ID NO: 321454 - DNA, 30 bp, Artificial Sequence
  Synthetic oligonucleotide
accctcgctgcctccagaactggtgctcgt

SEQ ID NO: 321455 - DNA, 30 bp, Artificial Sequence
  Synthetic oligonucleotide
accatacccattttatatgcctcatctcgt

SEQ ID NO: 321456 - DNA, 30 bp, Artificial Sequence
  Synthetic oligonucleotide
aggtaccagaactatcccgttggatctcgt

SEQ ID NO: 321457 - DNA, 30 bp, Artificial Sequence
  Synthetic oligonucleotide
ccgtacctaggccgcgaagtgatgtctcgt

SEQ ID NO: 321458 - DNA, 30 bp, Artificial Sequence
  Synthetic oligonucleotide
ggttattaggcctgcattacacggagtcgt

SEQ ID NO: 321459 - DNA, 30 bp, Artificial Sequence
  Synthetic oligonucleotide
gttgcaaagcagtctacaaaaggtagtcgt

SEQ ID NO: 321460 - DNA, 30 bp, Artificial Sequence
  Synthetic oligonucleotide
gatcctcgctgtgagggagcttaccgtcgt

SEQ ID NO: 321461 - DNA, 30 bp, Artificial Sequence
  Synthetic oligonucleotide
gagagtcgagtacatgcaaagacccgtcgt

SEQ ID NO: 321462 - DNA, 30 bp, Artificial Sequence
  Synthetic oligonucleotide
aaacctaacgttggcaatgatttccgtcgt

SEQ ID NO: 321463 - DNA, 30 bp, Artificial Sequence
  Synthetic oligonucleotide
gacgactttgccataggcgacattcgtcgt

SEQ ID NO: 321464 - DNA, 30 bp, Artificial Sequence
  Synthetic oligonucleotide
atgaaagaaccttactgcggatacggtcgt

SEQ ID NO: 321465 - DNA, 30 bp, Artificial Sequence
  Synthetic oligonucleotide
ctgatgtcttataacaagaacaccggtcgt

SEQ ID NO: 321466 - DNA, 30 bp, Artificial Sequence
  Synthetic oligonucleotide
caagtcttgtcgccaatcaaaggcggtcgt

SEQ ID NO: 321467 - DNA, 30 bp, Artificial Sequence
  Synthetic oligonucleotide
gcgcttgagacatatagttcgcagggtcgt

SEQ ID NO: 321468 - DNA, 30 bp, Artificial Sequence
  Synthetic oligonucleotide
atttggcggcttctcttcgggccgggtcgt

SEQ ID NO: 321469 - DNA, 30 bp, Artificial Sequence
  Synthetic oligonucleotide
gtccgataggctcattctgggatgggtcgt

SEQ ID NO: 321470 - DNA, 30 bp, Artificial Sequence
  Synthetic oligonucleotide
aaaccgtatggctatacaatacgtggtcgt

SEQ ID NO: 321471 - DNA, 31 bp, Artificial Sequence
  Synthetic oligonucleotide
tgtagggcgggtaacggcaaggcgtggtcgt

SEQ ID NO: 321472 - DNA, 30 bp, Artificial Sequence
  Synthetic oligonucleotide
agaccgccatagatgtaaagttaatgtcgt

SEQ ID NO: 321473 - DNA, 30 bp, Artificial Sequence
  Synthetic oligonucleotide
aaattagccgcccccactgctggatgtcgt

SEQ ID NO: 321474 - DNA, 28 bp, Artificial Sequence
  Synthetic oligonucleotide
ttgatgtcaagactggccaatatgtcgt

SEQ ID NO: 321475 - DNA, 30 bp, Artificial Sequence
  Synthetic oligonucleotide
catgtgtactaatttcatcaatgctgtcgt

SEQ ID NO: 321476 - DNA, 30 bp, Artificial Sequence
  Synthetic oligonucleotide
tcggtttcaaggttgctgcttaggtgtcgt

SEQ ID NO: 321477 - DNA, 30 bp, Artificial Sequence
  Synthetic oligonucleotide
atgcaaactggtggcgattagtggtgtcgt

SEQ ID NO: 321478 - DNA, 30 bp, Artificial Sequence
  Synthetic oligonucleotide
gccgactatatttccgactgatgttgtcgt

SEQ ID NO: 321479 - DNA, 30 bp, Artificial Sequence
  Synthetic oligonucleotide
atcagaccaaattgaatagaggtttgtcgt

SEQ ID NO: 321480 - DNA, 30 bp, Artificial Sequence
  Synthetic oligonucleotide
tgcagccacagagactctggataaattcgt

SEQ ID NO: 321481 - DNA, 30 bp, Artificial Sequence
  Synthetic oligonucleotide
tacagatagctacgggacacaaacattcgt

SEQ ID NO: 321482 - DNA, 30 bp, Artificial Sequence
  Synthetic oligonucleotide
taggggcgatacttagactgcctcattcgt

SEQ ID NO: 321483 - DNA, 30 bp, Artificial Sequence
  Synthetic oligonucleotide
agtcactacttaagacgataccttattcgt

SEQ ID NO: 321484 - DNA, 30 bp, Artificial Sequence
  Synthetic oligonucleotide
gctcggtccccagaagttacgctacttcgt

SEQ ID NO: 321485 - DNA, 30 bp, Artificial Sequence
  Synthetic oligonucleotide
gggatttggggattatagtgcaagcttcgt

SEQ ID NO: 321486 - DNA, 30 bp, Artificial Sequence
  Synthetic oligonucleotide
atgtcgttgacaattagttgagagcttcgt

SEQ ID NO: 321487 - DNA, 30 bp, Artificial Sequence
  Synthetic oligonucleotide
taacaccaacccgtccatttataagttcgt

SEQ ID NO: 321488 - DNA, 30 bp, Artificial Sequence
  Synthetic oligonucleotide
tacagttggtaatttgtacgacgcgttcgt

SEQ ID NO: 321489 - DNA, 31 bp, Artificial Sequence
  Synthetic oligonucleotide
ataagttgatataatttggtagaaggttcgt

SEQ ID NO: 321490 - DNA, 30 bp, Artificial Sequence
  Synthetic oligonucleotide
ttggcaaagtctgttaatctgtaggttcgt

SEQ ID NO: 321491 - DNA, 30 bp, Artificial Sequence
  Synthetic oligonucleotide
aaccacacctcttggcaaatattggttcgt

SEQ ID NO: 321492 - DNA, 30 bp, Artificial Sequence
  Synthetic oligonucleotide
gcaatactgatggtgtaaatcttggttcgt

SEQ ID NO: 321493 - DNA, 30 bp, Artificial Sequence
  Synthetic oligonucleotide
taagggtatgcacgcttcggcggtgttcgt

SEQ ID NO: 321494 - DNA, 30 bp, Artificial Sequence
  Synthetic oligonucleotide
ggctttacgtatcgcctccggtttgttcgt

SEQ ID NO: 321495 - DNA, 30 bp, Artificial Sequence
  Synthetic oligonucleotide
aaagacatgactaattcgacgacctttcgt

SEQ ID NO: 321496 - DNA, 30 bp, Artificial Sequence
  Synthetic oligonucleotide
cgccaagtgaatcgaaaccttccctttcgt

SEQ ID NO: 321497 - DNA, 30 bp, Artificial Sequence
  Synthetic oligonucleotide
cagaggctctctgggtcccgttgctttcgt

SEQ ID NO: 321498 - DNA, 30 bp, Artificial Sequence
  Synthetic oligonucleotide
aaccggtctaaggtaccgataaagtttcgt

SEQ ID NO: 321499 - DNA, 30 bp, Artificial Sequence
  Synthetic oligonucleotide
agtgcgctcgttacattccggaagtttcgt

SEQ ID NO: 321500 - DNA, 30 bp, Artificial Sequence
  Synthetic oligonucleotide
gttcaccggttagggcaggtggggtttcgt

SEQ ID NO: 321501 - DNA, 30 bp, Artificial Sequence
  Synthetic oligonucleotide
gttacgtccaaatgaagaggtccttttcgt

SEQ ID NO: 321502 - DNA, 30 bp, Artificial Sequence
  Synthetic oligonucleotide
cacactggggagtctacggactaaaaaggt

SEQ ID NO: 321503 - DNA, 30 bp, Artificial Sequence
  Synthetic oligonucleotide
caatacaagacctagtctcttttcaaaggt

SEQ ID NO: 321504 - DNA, 30 bp, Artificial Sequence
  Synthetic oligonucleotide
taattattctacccgggcattaggaaaggt

SEQ ID NO: 321505 - DNA, 30 bp, Artificial Sequence
  Synthetic oligonucleotide
acaaacaagaggcaggtgttacggaaaggt

SEQ ID NO: 321506 - DNA, 30 bp, Artificial Sequence
  Synthetic oligonucleotide
aaagacctatccacatttttatataaaggt

SEQ ID NO: 321507 - DNA, 30 bp, Artificial Sequence
  Synthetic oligonucleotide
gggcttctaattgtgcatcagcgtaaaggt

SEQ ID NO: 321508 - DNA, 30 bp, Artificial Sequence
  Synthetic oligonucleotide
gactacggccctgcatataccacacaaggt

SEQ ID NO: 321509 - DNA, 30 bp, Artificial Sequence
  Synthetic oligonucleotide
ttcaagcgtaagagttcttcggaccaaggt

SEQ ID NO: 321510 - DNA, 30 bp, Artificial Sequence
  Synthetic oligonucleotide
ccatcatggttttcaaggtgcattcaaggt

SEQ ID NO: 321511 - DNA, 30 bp, Artificial Sequence
  Synthetic oligonucleotide
acccgggggcgtggttgagcagacgaaggt

SEQ ID NO: 321512 - DNA, 30 bp, Artificial Sequence
  Synthetic oligonucleotide
aacccttccgccgacgtgagtgccgaaggt

SEQ ID NO: 321513 - DNA, 30 bp, Artificial Sequence
  Synthetic oligonucleotide
gttctcagactctgaatgctatgcgaaggt

SEQ ID NO: 321514 - DNA, 30 bp, Artificial Sequence
  Synthetic oligonucleotide
aggggtgtaaaatcatgttcttgggaaggt

SEQ ID NO: 321515 - DNA, 30 bp, Artificial Sequence
  Synthetic oligonucleotide
cctgattgaatcctgccaactgtataaggt

SEQ ID NO: 321516 - DNA, 30 bp, Artificial Sequence
  Synthetic oligonucleotide
tgagaatggctacagttgagtttataaggt

SEQ ID NO: 321517 - DNA, 30 bp, Artificial Sequence
  Synthetic oligonucleotide
ctcctacataagctgcgaagggagtaaggt

SEQ ID NO: 321518 - DNA, 30 bp, Artificial Sequence
  Synthetic oligonucleotide
ggtccggttggatacgtagtggattaaggt

SEQ ID NO: 321519 - DNA, 30 bp, Artificial Sequence
  Synthetic oligonucleotide
caacaacattaagtaggtagttgttaaggt

SEQ ID NO: 321520 - DNA, 30 bp, Artificial Sequence
  Synthetic oligonucleotide
cgctcgcgtacgcttctgtcactcacaggt

SEQ ID NO: 321521 - DNA, 30 bp, Artificial Sequence
  Synthetic oligonucleotide
agcgcaaaattatgacgtggggtcacaggt

SEQ ID NO: 321522 - DNA, 30 bp, Artificial Sequence
  Synthetic oligonucleotide
agccggtgaacgtctagttttcagacaggt

SEQ ID NO: 321523 - DNA, 30 bp, Artificial Sequence
  Synthetic oligonucleotide
ggaaatggagactgttattcgaatacaggt

SEQ ID NO: 321524 - DNA, 30 bp, Artificial Sequence
  Synthetic oligonucleotide
gcctcgccgatctcagtgagagatacaggt

SEQ ID NO: 321525 - DNA, 30 bp, Artificial Sequence
  Synthetic oligonucleotide
ctccgagattggtacgttaatgatacaggt

SEQ ID NO: 321526 - DNA, 30 bp, Artificial Sequence
  Synthetic oligonucleotide
agtggggtgttgctcctcctaaaaccaggt

SEQ ID NO: 321527 - DNA, 30 bp, Artificial Sequence
  Synthetic oligonucleotide
tgtgccgtcggactactagagtcaccaggt

SEQ ID NO: 321528 - DNA, 30 bp, Artificial Sequence
  Synthetic oligonucleotide
ccaaagctgtgtgatgtccgggcgccaggt

SEQ ID NO: 321529 - DNA, 30 bp, Artificial Sequence
  Synthetic oligonucleotide
gggtgcatacaataatggcgggcgccaggt

SEQ ID NO: 321530 - DNA, 30 bp, Artificial Sequence
  Synthetic oligonucleotide
tggacgctggtagacgagctgaatccaggt

SEQ ID NO: 321531 - DNA, 30 bp, Artificial Sequence
  Synthetic oligonucleotide
aggtttgcatcgaatggctggtgtccaggt

SEQ ID NO: 321532 - DNA, 30 bp, Artificial Sequence
  Synthetic oligonucleotide
attagcagcccggatcctcgggaagcaggt

SEQ ID NO: 321533 - DNA, 30 bp, Artificial Sequence
  Synthetic oligonucleotide
ctgtggaatgtagccgcgcattccgcaggt

SEQ ID NO: 321534 - DNA, 30 bp, Artificial Sequence
  Synthetic oligonucleotide
gtcttttaacataattaggcaagggcaggt

SEQ ID NO: 321535 - DNA, 30 bp, Artificial Sequence
  Synthetic oligonucleotide
ctattatacttaggtaagaccgtggcaggt

SEQ ID NO: 321536 - DNA, 30 bp, Artificial Sequence
  Synthetic oligonucleotide
gtcaacatcattaggattcgtaatgcaggt

SEQ ID NO: 321537 - DNA, 30 bp, Artificial Sequence
  Synthetic oligonucleotide
ttgctgtgaggttccgctgacagtgcaggt

SEQ ID NO: 321538 - DNA, 30 bp, Artificial Sequence
  Synthetic oligonucleotide
caacaggatttattcagcggacgatcaggt

SEQ ID NO: 321539 - DNA, 30 bp, Artificial Sequence
  Synthetic oligonucleotide
ttgcgatgtgatatgtacgggttctcaggt

SEQ ID NO: 321540 - DNA, 30 bp, Artificial Sequence
  Synthetic oligonucleotide
cgctgacaagcccgtacaatagtgtcaggt

SEQ ID NO: 321541 - DNA, 30 bp, Artificial Sequence
  Synthetic oligonucleotide
gtcttactgagactcaaaacagattcaggt

SEQ ID NO: 321542 - DNA, 30 bp, Artificial Sequence
  Synthetic oligonucleotide
gcacactcgacaacgaggtggtcttcaggt

SEQ ID NO: 321543 - DNA, 30 bp, Artificial Sequence
  Synthetic oligonucleotide
tctagggctatttcatatcaatgttcaggt

SEQ ID NO: 321544 - DNA, 30 bp, Artificial Sequence
  Synthetic oligonucleotide
ttacgaggcatatttatgctcgtttcaggt

SEQ ID NO: 321545 - DNA, 30 bp, Artificial Sequence
  Synthetic oligonucleotide
atgtaggagatgtattagggatgcagaggt

SEQ ID NO: 321546 - DNA, 30 bp, Artificial Sequence
  Synthetic oligonucleotide
ggtaaacgatcaacctcatccctcagaggt

SEQ ID NO: 321547 - DNA, 30 bp, Artificial Sequence
  Synthetic oligonucleotide
acgaggcatcgtcttacagacgtcagaggt

SEQ ID NO: 321548 - DNA, 30 bp, Artificial Sequence
  Synthetic oligonucleotide
tgcattttggtcgtgaactgtgtcagaggt

SEQ ID NO: 321549 - DNA, 30 bp, Artificial Sequence
  Synthetic oligonucleotide
ctcccctatgcagtggagaagaagagaggt

SEQ ID NO: 321550 - DNA, 30 bp, Artificial Sequence
  Synthetic oligonucleotide
gaagctggttatactggagcctatagaggt

SEQ ID NO: 321551 - DNA, 30 bp, Artificial Sequence
  Synthetic oligonucleotide
cactatataattgggctagccactagaggt

SEQ ID NO: 321552 - DNA, 30 bp, Artificial Sequence
  Synthetic oligonucleotide
agacctgtagtgaggacaagaagtagaggt

SEQ ID NO: 321553 - DNA, 30 bp, Artificial Sequence
  Synthetic oligonucleotide
gccccacttgatgagtgtagaccccgaggt

SEQ ID NO: 321554 - DNA, 30 bp, Artificial Sequence
  Synthetic oligonucleotide
gagcactccattgctcacgatccccgaggt

SEQ ID NO: 321555 - DNA, 30 bp, Artificial Sequence
  Synthetic oligonucleotide
ttaaacaatcggtaacctattggcggaggt

SEQ ID NO: 321556 - DNA, 30 bp, Artificial Sequence
  Synthetic oligonucleotide
tcgaccgtaggatcgaccgcggagggaggt

SEQ ID NO: 321557 - DNA, 30 bp, Artificial Sequence
  Synthetic oligonucleotide
ttactgaggggcgcattcagggtgggaggt

SEQ ID NO: 321558 - DNA, 30 bp, Artificial Sequence
  Synthetic oligonucleotide
acaggaggggagcaccatgtagatggaggt

SEQ ID NO: 321559 - DNA, 30 bp, Artificial Sequence
  Synthetic oligonucleotide
ggaatgatcgtacccggtgtagcgtgaggt

SEQ ID NO: 321560 - DNA, 30 bp, Artificial Sequence
  Synthetic oligonucleotide
ttatttcgagaggtttggtattcgtgaggt

SEQ ID NO: 321561 - DNA, 30 bp, Artificial Sequence
  Synthetic oligonucleotide
gcgctactattaagatccatcatgtgaggt

SEQ ID NO: 321562 - DNA, 30 bp, Artificial Sequence
  Synthetic oligonucleotide
ttcgttactagccgcgatcaggtgtgaggt

SEQ ID NO: 321563 - DNA, 30 bp, Artificial Sequence
  Synthetic oligonucleotide
tcaacaagcagctccccaggttgttgaggt

SEQ ID NO: 321564 - DNA, 30 bp, Artificial Sequence
  Synthetic oligonucleotide
ctcggccgattatagaacaccgtttgaggt

SEQ ID NO: 321565 - DNA, 30 bp, Artificial Sequence
  Synthetic oligonucleotide
ctgagtggtcgggatacacgctaaataggt

SEQ ID NO: 321566 - DNA, 30 bp, Artificial Sequence
  Synthetic oligonucleotide
ccaacggccaacccggcaaggccaataggt

SEQ ID NO: 321567 - DNA, 30 bp, Artificial Sequence
  Synthetic oligonucleotide
ccgcgcccggcctcagcatacagaataggt

SEQ ID NO: 321568 - DNA, 30 bp, Artificial Sequence
  Synthetic oligonucleotide
cgcagcggcaaaactcgaaaaggaataggt

SEQ ID NO: 321569 - DNA, 30 bp, Artificial Sequence
  Synthetic oligonucleotide
ggaacccgcacggctaaccgcaccataggt

SEQ ID NO: 321570 - DNA, 30 bp, Artificial Sequence
  Synthetic oligonucleotide
gaattatcgagtctaacatagggcataggt

SEQ ID NO: 321571 - DNA, 30 bp, Artificial Sequence
  Synthetic oligonucleotide
cgaacgctacgaaagatagtcgtcataggt

SEQ ID NO: 321572 - DNA, 30 bp, Artificial Sequence
  Synthetic oligonucleotide
aactagaggcgctaacggaattagataggt

SEQ ID NO: 321573 - DNA, 30 bp, Artificial Sequence
  Synthetic oligonucleotide
agaaacgaagactatatctccaatataggt

SEQ ID NO: 321574 - DNA, 30 bp, Artificial Sequence
  Synthetic oligonucleotide
ggcgtccagtaagcacgggtacgactaggt

SEQ ID NO: 321575 - DNA, 30 bp, Artificial Sequence
  Synthetic oligonucleotide
acgcaatgttatgagccagcaatactaggt

SEQ ID NO: 321576 - DNA, 30 bp, Artificial Sequence
  Synthetic oligonucleotide
gtgaaacccgctgcccagaagtatctaggt

SEQ ID NO: 321577 - DNA, 30 bp, Artificial Sequence
  Synthetic oligonucleotide
tgactatgttcaaggacggttacagtaggt

SEQ ID NO: 321578 - DNA, 30 bp, Artificial Sequence
  Synthetic oligonucleotide
cgtgatcgtttcacgaaactgagagtaggt

SEQ ID NO: 321579 - DNA, 30 bp, Artificial Sequence
  Synthetic oligonucleotide
accactctgttagctacggtccgagtaggt

SEQ ID NO: 321580 - DNA, 30 bp, Artificial Sequence
  Synthetic oligonucleotide
gcgagtcgatattctaaagacccattaggt

SEQ ID NO: 321581 - DNA, 30 bp, Artificial Sequence
  Synthetic oligonucleotide
ctgcataatcgataaccattttgattaggt

SEQ ID NO: 321582 - DNA, 30 bp, Artificial Sequence
  Synthetic oligonucleotide
aaagtatgacgcactctcgtaaacttaggt

SEQ ID NO: 321583 - DNA, 30 bp, Artificial Sequence
  Synthetic oligonucleotide
tagaatgatctcggaatttattgcttaggt

SEQ ID NO: 321584 - DNA, 30 bp, Artificial Sequence
  Synthetic oligonucleotide
gtaggtcgggctggccacaatactttaggt

SEQ ID NO: 321585 - DNA, 31 bp, Artificial Sequence
  Synthetic oligonucleotide
gataacactgcctctgctgacatctttaggt

SEQ ID NO: 321586 - DNA, 30 bp, Artificial Sequence
  Synthetic oligonucleotide
tgcgcgattcgcgtaaagatccttttaggt

SEQ ID NO: 321587 - DNA, 30 bp, Artificial Sequence
  Synthetic oligonucleotide
gagagcgtttcaagcggagactttttaggt

SEQ ID NO: 321588 - DNA, 26 bp, Artificial Sequence
  Synthetic oligonucleotide
ggggaacgtttacgcttcaaaacggt

SEQ ID NO: 321589 - DNA, 30 bp, Artificial Sequence
  Synthetic oligonucleotide
gatccgccagattagatttatcgcaacggt

SEQ ID NO: 321590 - DNA, 30 bp, Artificial Sequence
  Synthetic oligonucleotide
tgaagacaataatcggaggttctcaacggt

SEQ ID NO: 321591 - DNA, 30 bp, Artificial Sequence
  Synthetic oligonucleotide
tgcacaaagctttagacgaagtcgaacggt

SEQ ID NO: 321592 - DNA, 30 bp, Artificial Sequence
  Synthetic oligonucleotide
cgggccgtctgcttgggctcgctgaacggt

SEQ ID NO: 321593 - DNA, 30 bp, Artificial Sequence
  Synthetic oligonucleotide
gggcaaggaggttggccttagcataacggt

SEQ ID NO: 321594 - DNA, 30 bp, Artificial Sequence
  Synthetic oligonucleotide
ggggacccgcaggaattttgggctaacggt

SEQ ID NO: 321595 - DNA, 30 bp, Artificial Sequence
  Synthetic oligonucleotide
caaagcctcgccacgtagcgtttacacggt

SEQ ID NO: 321596 - DNA, 30 bp, Artificial Sequence
  Synthetic oligonucleotide
gtcgaaactatgaacgtactaagccacggt

SEQ ID NO: 321597 - DNA, 30 bp, Artificial Sequence
  Synthetic oligonucleotide
caaagcactgtcaacctgaggagccacggt

SEQ ID NO: 321598 - DNA, 30 bp, Artificial Sequence
  Synthetic oligonucleotide
agagcatttaaattatggcaaacgcacggt

SEQ ID NO: 321599 - DNA, 30 bp, Artificial Sequence
  Synthetic oligonucleotide
gggtgaggcatgaacgttcacacgcacggt

SEQ ID NO: 321600 - DNA, 30 bp, Artificial Sequence
  Synthetic oligonucleotide
ataaatccaatatccatggcgctgcacggt

SEQ ID NO: 321601 - DNA, 30 bp, Artificial Sequence
  Synthetic oligonucleotide
tattgctagaaaaacgagcaagtgcacggt

SEQ ID NO: 321602 - DNA, 30 bp, Artificial Sequence
  Synthetic oligonucleotide
gtaaacgaatagcgttgaggttctcacggt

SEQ ID NO: 321603 - DNA, 30 bp, Artificial Sequence
  Synthetic oligonucleotide
cggctgacagatctccctaaacaagacggt

SEQ ID NO: 321604 - DNA, 30 bp, Artificial Sequence
  Synthetic oligonucleotide
ttgatctggtttggcctaggagaagacggt

SEQ ID NO: 321605 - DNA, 30 bp, Artificial Sequence
  Synthetic oligonucleotide
tgcattgattaagaggaaattgaagacggt

SEQ ID NO: 321606 - DNA, 30 bp, Artificial Sequence
  Synthetic oligonucleotide
acggaacgcacacagccttattatgacggt

SEQ ID NO: 321607 - DNA, 30 bp, Artificial Sequence
  Synthetic oligonucleotide
cgtaactgcccttgagcatatactgacggt

SEQ ID NO: 321608 - DNA, 30 bp, Artificial Sequence
  Synthetic oligonucleotide
tagtttagtcgtttcactgtgcgtgacggt

SEQ ID NO: 321609 - DNA, 30 bp, Artificial Sequence
  Synthetic oligonucleotide
agatcgccggagtctggtttttgtgacggt

SEQ ID NO: 321610 - DNA, 30 bp, Artificial Sequence
  Synthetic oligonucleotide
taaaagatcgtcgggttgcgggcatacggt

SEQ ID NO: 321611 - DNA, 30 bp, Artificial Sequence
  Synthetic oligonucleotide
tagggcgtttttctagggagccccaccggt

SEQ ID NO: 321612 - DNA, 30 bp, Artificial Sequence
  Synthetic oligonucleotide
gaccttgaaaagacggtgggctaacccggt

SEQ ID NO: 321613 - DNA, 30 bp, Artificial Sequence
  Synthetic oligonucleotide
gttgatctccataataaaagtatacccggt

SEQ ID NO: 321614 - DNA, 30 bp, Artificial Sequence
  Synthetic oligonucleotide
ggacgaaggtggggaagaatgaaccccggt

SEQ ID NO: 321615 - DNA, 30 bp, Artificial Sequence
  Synthetic oligonucleotide
ccgtgccgcctgaatgaaagttgccccggt

SEQ ID NO: 321616 - DNA, 30 bp, Artificial Sequence
  Synthetic oligonucleotide
agccagcagtgttcaaaaatgctccccggt

SEQ ID NO: 321617 - DNA, 30 bp, Artificial Sequence
  Synthetic oligonucleotide
gccatccatgtgaaaagataggagcccggt

SEQ ID NO: 321618 - DNA, 30 bp, Artificial Sequence
  Synthetic oligonucleotide
gtttaatgtggccttgggagcatgcccggt

SEQ ID NO: 321619 - DNA, 30 bp, Artificial Sequence
  Synthetic oligonucleotide
tatcatacccgcaggatatgatcagccggt

SEQ ID NO: 321620 - DNA, 30 bp, Artificial Sequence
  Synthetic oligonucleotide
tttagcagatgtggtaacttatgcgccggt

SEQ ID NO: 321621 - DNA, 30 bp, Artificial Sequence
  Synthetic oligonucleotide
gtctcaccgtaaaactccttgtgcgccggt

SEQ ID NO: 321622 - DNA, 30 bp, Artificial Sequence
  Synthetic oligonucleotide
aggtatgcaacttatgtactatgtgccggt

SEQ ID NO: 321623 - DNA, 30 bp, Artificial Sequence
  Synthetic oligonucleotide
caaaaaaaccgatcgtcgcttcgatccggt

SEQ ID NO: 321624 - DNA, 30 bp, Artificial Sequence
  Synthetic oligonucleotide
gcgggatataaattttgtgccgtatccggt

SEQ ID NO: 321625 - DNA, 30 bp, Artificial Sequence
  Synthetic oligonucleotide
tcctggcaactaataaacaatccctccggt

SEQ ID NO: 321626 - DNA, 30 bp, Artificial Sequence
  Synthetic oligonucleotide
tgtttgcaagacatggtagactggtccggt

SEQ ID NO: 321627 - DNA, 30 bp, Artificial Sequence
  Synthetic oligonucleotide
ggggcaactgctcgggcggttaattccggt

SEQ ID NO: 321628 - DNA, 30 bp, Artificial Sequence
  Synthetic oligonucleotide
ttaatgcggtaataggattaacattccggt

SEQ ID NO: 321629 - DNA, 30 bp, Artificial Sequence
  Synthetic oligonucleotide
ttaagacaaacgagcgtctgagcttccggt

SEQ ID NO: 321630 - DNA, 30 bp, Artificial Sequence
  Synthetic oligonucleotide
gcgtgatagcgcatcaattcatgttccggt

SEQ ID NO: 321631 - DNA, 30 bp, Artificial Sequence
  Synthetic oligonucleotide
tatcctgcgtatgtcttcggtgaaagcggt

SEQ ID NO: 321632 - DNA, 30 bp, Artificial Sequence
  Synthetic oligonucleotide
ccgtgatgcggggtatttccaaatagcggt

SEQ ID NO: 321633 - DNA, 30 bp, Artificial Sequence
  Synthetic oligonucleotide
ttattcgcattgtacatcacaccgcgcggt

SEQ ID NO: 321634 - DNA, 30 bp, Artificial Sequence
  Synthetic oligonucleotide
cgcctcccacagtacagaggttggcgcggt

SEQ ID NO: 321635 - DNA, 30 bp, Artificial Sequence
  Synthetic oligonucleotide
tccggcaaatcggcctacggtgatcgcggt

SEQ ID NO: 321636 - DNA, 30 bp, Artificial Sequence
  Synthetic oligonucleotide
gaatcctcttcattcgcgaggggtcgcggt

SEQ ID NO: 321637 - DNA, 30 bp, Artificial Sequence
  Synthetic oligonucleotide
acacaaatccgaacctataatattcgcggt

SEQ ID NO: 321638 - DNA, 30 bp, Artificial Sequence
  Synthetic oligonucleotide
agtgcaggtgaaaagctgcactttcgcggt

SEQ ID NO: 321639 - DNA, 30 bp, Artificial Sequence
  Synthetic oligonucleotide
acggaacgggcaagcgtaacggcaggcggt

SEQ ID NO: 321640 - DNA, 30 bp, Artificial Sequence
  Synthetic oligonucleotide
actgcccacgagtaaagaaaattaggcggt

SEQ ID NO: 321641 - DNA, 30 bp, Artificial Sequence
  Synthetic oligonucleotide
gacatggccggactcgcatgcaacggcggt

SEQ ID NO: 321642 - DNA, 30 bp, Artificial Sequence
  Synthetic oligonucleotide
gcgcaggtcaattttgatcaaaatggcggt

SEQ ID NO: 321643 - DNA, 30 bp, Artificial Sequence
  Synthetic oligonucleotide
aagatataacgtccacgtgtccaatgcggt

SEQ ID NO: 321644 - DNA, 30 bp, Artificial Sequence
  Synthetic oligonucleotide
cattatcagctgggtcccaaaccatgcggt

SEQ ID NO: 321645 - DNA, 30 bp, Artificial Sequence
  Synthetic oligonucleotide
gtgcgtgtttcaaaataaccacgatgcggt

SEQ ID NO: 321646 - DNA, 30 bp, Artificial Sequence
  Synthetic oligonucleotide
tggtatatactaaggcccgcgaactgcggt

SEQ ID NO: 321647 - DNA, 30 bp, Artificial Sequence
  Synthetic oligonucleotide
cgtgcactagtggaacgctccccctgcggt

SEQ ID NO: 321648 - DNA, 30 bp, Artificial Sequence
  Synthetic oligonucleotide
ccctatggttccgtcacggttcagtgcggt

SEQ ID NO: 321649 - DNA, 30 bp, Artificial Sequence
  Synthetic oligonucleotide
tggtaacaagtattcgattaaccttgcggt

SEQ ID NO: 321650 - DNA, 30 bp, Artificial Sequence
  Synthetic oligonucleotide
tgtgtacgttgcctagacggaccttgcggt

SEQ ID NO: 321651 - DNA, 30 bp, Artificial Sequence
  Synthetic oligonucleotide
tgaccgaggaaaacaagatgctgaatcggt

SEQ ID NO: 321652 - DNA, 30 bp, Artificial Sequence
  Synthetic oligonucleotide
aagaccgaggtggggtggtcgtgaatcggt

SEQ ID NO: 321653 - DNA, 30 bp, Artificial Sequence
  Synthetic oligonucleotide
gcacgaacgtgcgtaacgaacgttatcggt

SEQ ID NO: 321654 - DNA, 30 bp, Artificial Sequence
  Synthetic oligonucleotide
tacatagacactatcctgcgggaactcggt

SEQ ID NO: 321655 - DNA, 30 bp, Artificial Sequence
  Synthetic oligonucleotide
ggagtattcagtcttggatacgcactcggt

SEQ ID NO: 321656 - DNA, 30 bp, Artificial Sequence
  Synthetic oligonucleotide
gatgtgacctaagtgcccgaccgactcggt

SEQ ID NO: 321657 - DNA, 30 bp, Artificial Sequence
  Synthetic oligonucleotide
gggtcctacgtctgtatctctgtactcggt

SEQ ID NO: 321658 - DNA, 31 bp, Artificial Sequence
  Synthetic oligonucleotide
gatagggagcccggcaaaaaagcttctcggt

SEQ ID NO: 321659 - DNA, 30 bp, Artificial Sequence
  Synthetic oligonucleotide
gccccagcagcgagcagatgtccagtcggt

SEQ ID NO: 321660 - DNA, 30 bp, Artificial Sequence
  Synthetic oligonucleotide
gcagacacggcttgacttgaacgggtcggt

SEQ ID NO: 321661 - DNA, 30 bp, Artificial Sequence
  Synthetic oligonucleotide
taattagggaggcagagtgttcatgtcggt

SEQ ID NO: 321662 - DNA, 30 bp, Artificial Sequence
  Synthetic oligonucleotide
gtttgtgacatgggacaaagaactgtcggt

SEQ ID NO: 321663 - DNA, 30 bp, Artificial Sequence
  Synthetic oligonucleotide
ccctaaaaccggagaaggacctctgtcggt

SEQ ID NO: 321664 - DNA, 30 bp, Artificial Sequence
  Synthetic oligonucleotide
ctgacgagtcaacactagatgaaattcggt

SEQ ID NO: 321665 - DNA, 30 bp, Artificial Sequence
  Synthetic oligonucleotide
cgacaagcttctgacgcgaagaacttcggt

SEQ ID NO: 321666 - DNA, 30 bp, Artificial Sequence
  Synthetic oligonucleotide
ggaacaacgtctgtttggtacaaaaagggt

SEQ ID NO: 321667 - DNA, 30 bp, Artificial Sequence
  Synthetic oligonucleotide
cctggaagaggttacggaatggaaaagggt

SEQ ID NO: 321668 - DNA, 30 bp, Artificial Sequence
  Synthetic oligonucleotide
attagcatagctagtggaagcggaaagggt

SEQ ID NO: 321669 - DNA, 30 bp, Artificial Sequence
  Synthetic oligonucleotide
ggcacatcgggtacgattgtgatcaagggt

SEQ ID NO: 321670 - DNA, 30 bp, Artificial Sequence
  Synthetic oligonucleotide
tcctcaaaggggatgctagcaaataagggt

SEQ ID NO: 321671 - DNA, 30 bp, Artificial Sequence
  Synthetic oligonucleotide
gtagtgggcttaccttgaattaataagggt

SEQ ID NO: 321672 - DNA, 30 bp, Artificial Sequence
  Synthetic oligonucleotide
ggttccatggtgggttataccactaagggt

SEQ ID NO: 321673 - DNA, 30 bp, Artificial Sequence
  Synthetic oligonucleotide
cgcttgcggccgaacggggaccctaagggt

SEQ ID NO: 321674 - DNA, 30 bp, Artificial Sequence
  Synthetic oligonucleotide
ctgggttatggaactaccaagtctaagggt

SEQ ID NO: 321675 - DNA, 30 bp, Artificial Sequence
  Synthetic oligonucleotide
gtaaagacttaatggaaagtacgtaagggt

SEQ ID NO: 321676 - DNA, 30 bp, Artificial Sequence
  Synthetic oligonucleotide
agcccaaaacgcggttataaccggcagggt

SEQ ID NO: 321677 - DNA, 30 bp, Artificial Sequence
  Synthetic oligonucleotide
gggtcggtcctccacaagtaagggcagggt

SEQ ID NO: 321678 - DNA, 30 bp, Artificial Sequence
  Synthetic oligonucleotide
gatgcttttggagttcaggaaagtcagggt

SEQ ID NO: 321679 - DNA, 30 bp, Artificial Sequence
  Synthetic oligonucleotide
ccgtggcgtcgccactggtaaagtcagggt

SEQ ID NO: 321680 - DNA, 30 bp, Artificial Sequence
  Synthetic oligonucleotide
atgactcgtgagacttgctacagtcagggt

SEQ ID NO: 321681 - DNA, 30 bp, Artificial Sequence
  Synthetic oligonucleotide
gagctgcacataccccataggggtcagggt

SEQ ID NO: 321682 - DNA, 30 bp, Artificial Sequence
  Synthetic oligonucleotide
catatgcatcgaggtatcttgcttcagggt

SEQ ID NO: 321683 - DNA, 30 bp, Artificial Sequence
  Synthetic oligonucleotide
gtggaataagcgggcaaatggatagagggt

SEQ ID NO: 321684 - DNA, 30 bp, Artificial Sequence
  Synthetic oligonucleotide
atctctgctagccttgaattgatagagggt

SEQ ID NO: 321685 - DNA, 30 bp, Artificial Sequence
  Synthetic oligonucleotide
ccgattttggactagtttccatacgagggt

SEQ ID NO: 321686 - DNA, 30 bp, Artificial Sequence
  Synthetic oligonucleotide
ttcgagggagtcagagtaccgcccgagggt

SEQ ID NO: 321687 - DNA, 30 bp, Artificial Sequence
  Synthetic oligonucleotide
acgcgtagaggggacacgcttgaggagggt

SEQ ID NO: 321688 - DNA, 30 bp, Artificial Sequence
  Synthetic oligonucleotide
gatcaaatgatgtagaggtcggcggagggt

SEQ ID NO: 321689 - DNA, 30 bp, Artificial Sequence
  Synthetic oligonucleotide
gagaacgtttcttgtaattcttctgagggt

SEQ ID NO: 321690 - DNA, 30 bp, Artificial Sequence
  Synthetic oligonucleotide
tcgcacctgaggggatattgctcatagggt

SEQ ID NO: 321691 - DNA, 30 bp, Artificial Sequence
  Synthetic oligonucleotide
ccataggatccgatttcatggggatagggt

SEQ ID NO: 321692 - DNA, 30 bp, Artificial Sequence
  Synthetic oligonucleotide
gaggcctaagtggcattaagtctatagggt

SEQ ID NO: 321693 - DNA, 30 bp, Artificial Sequence
  Synthetic oligonucleotide
tttttgccccccataatggaaagctagggt

SEQ ID NO: 321694 - DNA, 30 bp, Artificial Sequence
  Synthetic oligonucleotide
gctctctcggaagtgctataaagctagggt

SEQ ID NO: 321695 - DNA, 30 bp, Artificial Sequence
  Synthetic oligonucleotide
aactacgcgtatcctgcttgcgggtagggt

SEQ ID NO: 321696 - DNA, 30 bp, Artificial Sequence
  Synthetic oligonucleotide
ttggagggatggaattgctctgggtagggt

SEQ ID NO: 321697 - DNA, 30 bp, Artificial Sequence
  Synthetic oligonucleotide
atgtggaatccgttggcagtctggtagggt

SEQ ID NO: 321698 - DNA, 30 bp, Artificial Sequence
  Synthetic oligonucleotide
atcagacagggcacgtaacgtatttagggt

SEQ ID NO: 321699 - DNA, 30 bp, Artificial Sequence
  Synthetic oligonucleotide
tgaagctacgtaatacagttgttttagggt

SEQ ID NO: 321700 - DNA, 30 bp, Artificial Sequence
  Synthetic oligonucleotide
ccaaagcgtaccttaaacatcataacgggt

SEQ ID NO: 321701 - DNA, 30 bp, Artificial Sequence
  Synthetic oligonucleotide
acggcccccggttaggagattctcacgggt

SEQ ID NO: 321702 - DNA, 30 bp, Artificial Sequence
  Synthetic oligonucleotide
gggtcgggggggaatggatcatcgacgggt

SEQ ID NO: 321703 - DNA, 30 bp, Artificial Sequence
  Synthetic oligonucleotide
acgctccttgctttaggctggtcgacgggt

SEQ ID NO: 321704 - DNA, 30 bp, Artificial Sequence
  Synthetic oligonucleotide
tatcacggatcgctcctgtctgttacgggt

SEQ ID NO: 321705 - DNA, 30 bp, Artificial Sequence
  Synthetic oligonucleotide
atcagggctatccggattattcgaccgggt

SEQ ID NO: 321706 - DNA, 30 bp, Artificial Sequence
  Synthetic oligonucleotide
cggataaattctgctctgcggtacccgggt

SEQ ID NO: 321707 - DNA, 30 bp, Artificial Sequence
  Synthetic oligonucleotide
ttcgggaagtagaattatgtaagcccgggt

SEQ ID NO: 321708 - DNA, 30 bp, Artificial Sequence
  Synthetic oligonucleotide
gtcattaagcctgttatagggttcccgggt

SEQ ID NO: 321709 - DNA, 30 bp, Artificial Sequence
  Synthetic oligonucleotide
ggggcgccagaggggaagggtcctccgggt

SEQ ID NO: 321710 - DNA, 30 bp, Artificial Sequence
  Synthetic oligonucleotide
atccgtaggggtacgaatgaccttccgggt

SEQ ID NO: 321711 - DNA, 30 bp, Artificial Sequence
  Synthetic oligonucleotide
ttaagggtccggtataagctataagcgggt

SEQ ID NO: 321712 - DNA, 30 bp, Artificial Sequence
  Synthetic oligonucleotide
tcgcgtgtttagagggggccggaggcgggt

SEQ ID NO: 321713 - DNA, 30 bp, Artificial Sequence
  Synthetic oligonucleotide
ttcctgtgcgggggcactcgtacggcgggt

SEQ ID NO: 321714 - DNA, 30 bp, Artificial Sequence
  Synthetic oligonucleotide
tgtcccaggcagagttttataggggcgggt

SEQ ID NO: 321715 - DNA, 30 bp, Artificial Sequence
  Synthetic oligonucleotide
cgattttgatctgtccgtggaggtgcgggt

SEQ ID NO: 321716 - DNA, 30 bp, Artificial Sequence
  Synthetic oligonucleotide
aggggctctatgtcaggggagattgcgggt

SEQ ID NO: 321717 - DNA, 30 bp, Artificial Sequence
  Synthetic oligonucleotide
caactcataaacgtcggaatacaatcgggt

SEQ ID NO: 321718 - DNA, 30 bp, Artificial Sequence
  Synthetic oligonucleotide
ttaggatagtggcagactgggcgatcgggt

SEQ ID NO: 321719 - DNA, 30 bp, Artificial Sequence
  Synthetic oligonucleotide
caacatggatgatacaaatttagctcgggt

SEQ ID NO: 321720 - DNA, 30 bp, Artificial Sequence
  Synthetic oligonucleotide
caaggatactgacccagctagccgtcgggt

SEQ ID NO: 321721 - DNA, 30 bp, Artificial Sequence
  Synthetic oligonucleotide
ccgcttcttgaagttatagctaggtcgggt

SEQ ID NO: 321722 - DNA, 30 bp, Artificial Sequence
  Synthetic oligonucleotide
gtatcaaattagaagctgctagggtcgggt

SEQ ID NO: 321723 - DNA, 31 bp, Artificial Sequence
  Synthetic oligonucleotide
tccacagtaataaatggaatatgggtcgggt

SEQ ID NO: 321724 - DNA, 30 bp, Artificial Sequence
  Synthetic oligonucleotide
gccgactattgtgatgaattcaattcgggt

SEQ ID NO: 321725 - DNA, 30 bp, Artificial Sequence
  Synthetic oligonucleotide
cttgctcctcaaaatatacattaaaggggt

SEQ ID NO: 321726 - DNA, 30 bp, Artificial Sequence
  Synthetic oligonucleotide
aaaggagcatgtagcagtccgtgcaggggt

SEQ ID NO: 321727 - DNA, 30 bp, Artificial Sequence
  Synthetic oligonucleotide
ttcacgggtgtggcctatgttaagaggggt

SEQ ID NO: 321728 - DNA, 30 bp, Artificial Sequence
  Synthetic oligonucleotide
taaagccggggagattgtgttaataggggt

SEQ ID NO: 321729 - DNA, 30 bp, Artificial Sequence
  Synthetic oligonucleotide
gctaagggtttagctgtgaggttccggggt

SEQ ID NO: 321730 - DNA, 30 bp, Artificial Sequence
  Synthetic oligonucleotide
cctcgcgcgctctagccacgggatcggggt

SEQ ID NO: 321731 - DNA, 30 bp, Artificial Sequence
  Synthetic oligonucleotide
acgtcttctttggggacagctcttcggggt

SEQ ID NO: 321732 - DNA, 30 bp, Artificial Sequence
  Synthetic oligonucleotide
tttcgagatggggcttaaggtgaagggggt

SEQ ID NO: 321733 - DNA, 30 bp, Artificial Sequence
  Synthetic oligonucleotide
atgtacgggccggcaactaatgcagggggt

SEQ ID NO: 321734 - DNA, 30 bp, Artificial Sequence
  Synthetic oligonucleotide
agtcccagtatgagcggcaagcgagggggt

SEQ ID NO: 321735 - DNA, 30 bp, Artificial Sequence
  Synthetic oligonucleotide
ctatatctatgggtaaaagtcaccgggggt

SEQ ID NO: 321736 - DNA, 30 bp, Artificial Sequence
  Synthetic oligonucleotide
gcccaagggagcgcgacatactcggggggt

SEQ ID NO: 321737 - DNA, 30 bp, Artificial Sequence
  Synthetic oligonucleotide
gccgcgtcaaagtcgcaatatagggggggt

SEQ ID NO: 321738 - DNA, 30 bp, Artificial Sequence
  Synthetic oligonucleotide
ccgaggagtgggttaacactctgggggggt

SEQ ID NO: 321739 - DNA, 30 bp, Artificial Sequence
  Synthetic oligonucleotide
ttgatcaacgtcgggtcggcattggggggt

SEQ ID NO: 321740 - DNA, 30 bp, Artificial Sequence
  Synthetic oligonucleotide
acgacacgggtcttgttggctgatgggggt

SEQ ID NO: 321741 - DNA, 30 bp, Artificial Sequence
  Synthetic oligonucleotide
actaagttagcgccttaaacaagtgggggt

SEQ ID NO: 321742 - DNA, 30 bp, Artificial Sequence
  Synthetic oligonucleotide
caaccccgacctaacgctagacgtgggggt

SEQ ID NO: 321743 - DNA, 30 bp, Artificial Sequence
  Synthetic oligonucleotide
atatccgacgccctccacatgcgtgggggt

SEQ ID NO: 321744 - DNA, 30 bp, Artificial Sequence
  Synthetic oligonucleotide
ttcgcgatcgtacccggcgttaaatggggt

SEQ ID NO: 321745 - DNA, 30 bp, Artificial Sequence
  Synthetic oligonucleotide
ttatccaaaagaggatgcatgaactggggt

SEQ ID NO: 321746 - DNA, 30 bp, Artificial Sequence
  Synthetic oligonucleotide
acacagtcattcgaccactaaaagtggggt

SEQ ID NO: 321747 - DNA, 30 bp, Artificial Sequence
  Synthetic oligonucleotide
gaggacggactgtgcgcggtgccgtggggt

SEQ ID NO: 321748 - DNA, 30 bp, Artificial Sequence
  Synthetic oligonucleotide
cctacactaaagactacagaaacaatgggt

SEQ ID NO: 321749 - DNA, 30 bp, Artificial Sequence
  Synthetic oligonucleotide
tgccagagtgccacttcgtagacaatgggt

SEQ ID NO: 321750 - DNA, 30 bp, Artificial Sequence
  Synthetic oligonucleotide
agacatggggcgcaacttggcagaatgggt

SEQ ID NO: 321751 - DNA, 30 bp, Artificial Sequence
  Synthetic oligonucleotide
aacgatcgcacgtcaacgcgacccatgggt

SEQ ID NO: 321752 - DNA, 30 bp, Artificial Sequence
  Synthetic oligonucleotide
ccttcggcaacgccggactaatccatgggt

SEQ ID NO: 321753 - DNA, 30 bp, Artificial Sequence
  Synthetic oligonucleotide
ctgaacgtggtgagcgtcattaggatgggt

SEQ ID NO: 321754 - DNA, 30 bp, Artificial Sequence
  Synthetic oligonucleotide
gttaagaacttacaaagcttctccctgggt

SEQ ID NO: 321755 - DNA, 30 bp, Artificial Sequence
  Synthetic oligonucleotide
gtattgttatcgaactcatcgtggctgggt

SEQ ID NO: 321756 - DNA, 30 bp, Artificial Sequence
  Synthetic oligonucleotide
tgtggtctaccgcttggaccgaatctgggt

SEQ ID NO: 321757 - DNA, 30 bp, Artificial Sequence
  Synthetic oligonucleotide
tcgcaatcatggtaggttagcaccgtgggt

SEQ ID NO: 321758 - DNA, 30 bp, Artificial Sequence
  Synthetic oligonucleotide
acgtgaacttagaattaaatatccgtgggt

SEQ ID NO: 321759 - DNA, 30 bp, Artificial Sequence
  Synthetic oligonucleotide
gtaagggctcaccaaaactgtactttgggt

SEQ ID NO: 321760 - DNA, 30 bp, Artificial Sequence
  Synthetic oligonucleotide
cctatgactcgttcaaagttgcttttgggt

SEQ ID NO: 321761 - DNA, 30 bp, Artificial Sequence
  Synthetic oligonucleotide
tcgctatagcaatccaatgctgtcaatggt

SEQ ID NO: 321762 - DNA, 30 bp, Artificial Sequence
  Synthetic oligonucleotide
cttccacataattaggaatcttagaatggt

SEQ ID NO: 321763 - DNA, 30 bp, Artificial Sequence
  Synthetic oligonucleotide
cccttacggctatggcacttattgaatggt

SEQ ID NO: 321764 - DNA, 30 bp, Artificial Sequence
  Synthetic oligonucleotide
tttcgataggccatctagatcactaatggt

SEQ ID NO: 321765 - DNA, 30 bp, Artificial Sequence
  Synthetic oligonucleotide
gattcaaatcgtcagtttcaatctaatggt

SEQ ID NO: 321766 - DNA, 30 bp, Artificial Sequence
  Synthetic oligonucleotide
ttaggtaccatgtgtgggagaagtaatggt

SEQ ID NO: 321767 - DNA, 30 bp, Artificial Sequence
  Synthetic oligonucleotide
ggcctcagtcaggaatgtacgggtaatggt

SEQ ID NO: 321768 - DNA, 30 bp, Artificial Sequence
  Synthetic oligonucleotide
gcattgaggacataggtccaagtacatggt

SEQ ID NO: 321769 - DNA, 30 bp, Artificial Sequence
  Synthetic oligonucleotide
gagttgttaagccttaatataccgcatggt

SEQ ID NO: 321770 - DNA, 30 bp, Artificial Sequence
  Synthetic oligonucleotide
cattacaatgatatcggcatactgcatggt

SEQ ID NO: 321771 - DNA, 30 bp, Artificial Sequence
  Synthetic oligonucleotide
aggggtaccccggttaagtgcaatcatggt

SEQ ID NO: 321772 - DNA, 30 bp, Artificial Sequence
  Synthetic oligonucleotide
acaagtgtgagtgaggattcaactcatggt

SEQ ID NO: 321773 - DNA, 30 bp, Artificial Sequence
  Synthetic oligonucleotide
tcatatcagtcatcttcttgacgagatggt

SEQ ID NO: 321774 - DNA, 30 bp, Artificial Sequence
  Synthetic oligonucleotide
ctaatgtttacgaaaatgatgttagatggt

SEQ ID NO: 321775 - DNA, 30 bp, Artificial Sequence
  Synthetic oligonucleotide
acgtgtggctttgaccgtcaaatggatggt

SEQ ID NO: 321776 - DNA, 30 bp, Artificial Sequence
  Synthetic oligonucleotide
aactacaatctagaatattcttgtgatggt

SEQ ID NO: 321777 - DNA, 30 bp, Artificial Sequence
  Synthetic oligonucleotide
aaggtgtagatatagtacaccgcatatggt

SEQ ID NO: 321778 - DNA, 30 bp, Artificial Sequence
  Synthetic oligonucleotide
tggcggtataccccgatatcgtactatggt

SEQ ID NO: 321779 - DNA, 30 bp, Artificial Sequence
  Synthetic oligonucleotide
gcccatttagcatgaacaccattctatggt

SEQ ID NO: 321780 - DNA, 30 bp, Artificial Sequence
  Synthetic oligonucleotide
aaacatccggtcgtatgggagcattatggt

SEQ ID NO: 321781 - DNA, 30 bp, Artificial Sequence
  Synthetic oligonucleotide
aagtcggatatgtacggtcaatattatggt

SEQ ID NO: 321782 - DNA, 30 bp, Artificial Sequence
  Synthetic oligonucleotide
tgtagactatacaacgtgggctgttatggt

SEQ ID NO: 321783 - DNA, 30 bp, Artificial Sequence
  Synthetic oligonucleotide
tgttgcggtggggaaagacccgtttatggt

SEQ ID NO: 321784 - DNA, 30 bp, Artificial Sequence
  Synthetic oligonucleotide
atgatctcgggcgcgtcggtaccaactggt

SEQ ID NO: 321785 - DNA, 30 bp, Artificial Sequence
  Synthetic oligonucleotide
gacttgatggaggggagttaaagaactggt

SEQ ID NO: 321786 - DNA, 30 bp, Artificial Sequence
  Synthetic oligonucleotide
cttcagcggacagtacagaaagtcactggt

SEQ ID NO: 321787 - DNA, 30 bp, Artificial Sequence
  Synthetic oligonucleotide
gggtctagattattcgagtcccagactggt

SEQ ID NO: 321788 - DNA, 30 bp, Artificial Sequence
  Synthetic oligonucleotide
tctcatccgttgtgattggataggactggt

SEQ ID NO: 321789 - DNA, 30 bp, Artificial Sequence
  Synthetic oligonucleotide
gctaaaagtgcgattaaccgcactactggt

SEQ ID NO: 321790 - DNA, 30 bp, Artificial Sequence
  Synthetic oligonucleotide
cattcaagctaaactatggggggacctggt

SEQ ID NO: 321791 - DNA, 30 bp, Artificial Sequence
  Synthetic oligonucleotide
gcggcacggaagaacccgggagtccctggt

SEQ ID NO: 321792 - DNA, 30 bp, Artificial Sequence
  Synthetic oligonucleotide
tcctaggtgacagtcgtctgtaagcctggt

SEQ ID NO: 321793 - DNA, 30 bp, Artificial Sequence
  Synthetic oligonucleotide
cgatacccgtctttggcggtggctcctggt

SEQ ID NO: 321794 - DNA, 30 bp, Artificial Sequence
  Synthetic oligonucleotide
gtagccagacactattggcaacaagctggt

SEQ ID NO: 321795 - DNA, 30 bp, Artificial Sequence
  Synthetic oligonucleotide
atgatgaaacggaacttctcttaagctggt

SEQ ID NO: 321796 - DNA, 30 bp, Artificial Sequence
  Synthetic oligonucleotide
gcaactttcgtaccgagcattagagctggt

SEQ ID NO: 321797 - DNA, 30 bp, Artificial Sequence
  Synthetic oligonucleotide
gttattacgaaccaatgttcattagctggt

SEQ ID NO: 321798 - DNA, 30 bp, Artificial Sequence
  Synthetic oligonucleotide
gaaaggagagcgtggcggctggtggctggt

SEQ ID NO: 321799 - DNA, 30 bp, Artificial Sequence
  Synthetic oligonucleotide
tcaatcaatcaccaggtcgagagtgctggt

SEQ ID NO: 321800 - DNA, 30 bp, Artificial Sequence
  Synthetic oligonucleotide
tcgtgccggcccagagtatgcattgctggt

SEQ ID NO: 321801 - DNA, 30 bp, Artificial Sequence
  Synthetic oligonucleotide
gggtacgtcgcgcaatactggcgctctggt

SEQ ID NO: 321802 - DNA, 30 bp, Artificial Sequence
  Synthetic oligonucleotide
aagttgcgtcggaatcccggaggctctggt

SEQ ID NO: 321803 - DNA, 30 bp, Artificial Sequence
  Synthetic oligonucleotide
aagttaatgcagaaccatgagggctctggt

SEQ ID NO: 321804 - DNA, 30 bp, Artificial Sequence
  Synthetic oligonucleotide
gtcatttgtttagggcgtccgatgtctggt

SEQ ID NO: 321805 - DNA, 30 bp, Artificial Sequence
  Synthetic oligonucleotide
agcaaaatgcatttactctaacgttctggt

SEQ ID NO: 321806 - DNA, 30 bp, Artificial Sequence
  Synthetic oligonucleotide
tttggcacgtcaccaaatgaactttctggt

SEQ ID NO: 321807 - DNA, 30 bp, Artificial Sequence
  Synthetic oligonucleotide
tttgtcgccgttaggtgactgtccagtggt

SEQ ID NO: 321808 - DNA, 30 bp, Artificial Sequence
  Synthetic oligonucleotide
actggggttgagtgaccagttgtcagtggt

SEQ ID NO: 321809 - DNA, 30 bp, Artificial Sequence
  Synthetic oligonucleotide
aactgggcctccaaacgatatctgagtggt

SEQ ID NO: 321810 - DNA, 30 bp, Artificial Sequence
  Synthetic oligonucleotide
ttgtgacggtacgggataacggcacgtggt

SEQ ID NO: 321811 - DNA, 30 bp, Artificial Sequence
  Synthetic oligonucleotide
tcaagcgattgtgataacgtacaccgtggt

SEQ ID NO: 321812 - DNA, 30 bp, Artificial Sequence
  Synthetic oligonucleotide
acgccttttgcgttatggataaggcgtggt

SEQ ID NO: 321813 - DNA, 30 bp, Artificial Sequence
  Synthetic oligonucleotide
ggaaaaacaattaatgacgcattgcgtggt

SEQ ID NO: 321814 - DNA, 30 bp, Artificial Sequence
  Synthetic oligonucleotide
gccatgtacctagcgggtcgtaatcgtggt

SEQ ID NO: 321815 - DNA, 25 bp, Artificial Sequence
  Synthetic oligonucleotide
cggcaaattacttttgcctcgtggt

SEQ ID NO: 321816 - DNA, 30 bp, Artificial Sequence
  Synthetic oligonucleotide
tgtacctgtagggcttcctgtggtcgtggt

SEQ ID NO: 321817 - DNA, 30 bp, Artificial Sequence
  Synthetic oligonucleotide
tagtgttagagtgtcggagatataggtggt

SEQ ID NO: 321818 - DNA, 30 bp, Artificial Sequence
  Synthetic oligonucleotide
tttaaacggtttgagatgacagtaggtggt

SEQ ID NO: 321819 - DNA, 30 bp, Artificial Sequence
  Synthetic oligonucleotide
gcattgtcagctagagcctgttacggtggt

SEQ ID NO: 321820 - DNA, 30 bp, Artificial Sequence
  Synthetic oligonucleotide
agaaatgtcggacggacagtgacgggtggt

SEQ ID NO: 321821 - DNA, 30 bp, Artificial Sequence
  Synthetic oligonucleotide
aacgggttatatcaagtgctcgactgtggt

SEQ ID NO: 321822 - DNA, 30 bp, Artificial Sequence
  Synthetic oligonucleotide
caagcccggagtcataccgcgtagtgtggt

SEQ ID NO: 321823 - DNA, 30 bp, Artificial Sequence
  Synthetic oligonucleotide
tcatgggcttcttctagaaatacgtgtggt

SEQ ID NO: 321824 - DNA, 30 bp, Artificial Sequence
  Synthetic oligonucleotide
aagcaatcaggtgcgtgtgatccgtgtggt

SEQ ID NO: 321825 - DNA, 30 bp, Artificial Sequence
  Synthetic oligonucleotide
tcatccatacgtcgagccaccgattgtggt

SEQ ID NO: 321826 - DNA, 30 bp, Artificial Sequence
  Synthetic oligonucleotide
aacgagacttagaaacaattataaattggt

SEQ ID NO: 321827 - DNA, 30 bp, Artificial Sequence
  Synthetic oligonucleotide
tagcataccccgaagtaaggtataattggt

SEQ ID NO: 321828 - DNA, 30 bp, Artificial Sequence
  Synthetic oligonucleotide
gtttgagatcctggcgcgtcaaggattggt

SEQ ID NO: 321829 - DNA, 30 bp, Artificial Sequence
  Synthetic oligonucleotide
taatgaaattgaacgtctcttttgattggt

SEQ ID NO: 321830 - DNA, 30 bp, Artificial Sequence
  Synthetic oligonucleotide
aaaatggctcccgtggcaaatgatattggt

SEQ ID NO: 321831 - DNA, 30 bp, Artificial Sequence
  Synthetic oligonucleotide
tcaggcggaaaatagtatccgttccttggt

SEQ ID NO: 321832 - DNA, 30 bp, Artificial Sequence
  Synthetic oligonucleotide
acgaaataagatgcgttattcgggcttggt

SEQ ID NO: 321833 - DNA, 30 bp, Artificial Sequence
  Synthetic oligonucleotide
cggcgtgcccgggcatgcgatgggcttggt

SEQ ID NO: 321834 - DNA, 30 bp, Artificial Sequence
  Synthetic oligonucleotide
cccaactgatcggtccgatatgaagttggt

SEQ ID NO: 321835 - DNA, 30 bp, Artificial Sequence
  Synthetic oligonucleotide
atcgaaaaaacaggtatgtagggagttggt

SEQ ID NO: 321836 - DNA, 30 bp, Artificial Sequence
  Synthetic oligonucleotide
ccaccgttattagtgaacaggaacgttggt

SEQ ID NO: 321837 - DNA, 30 bp, Artificial Sequence
  Synthetic oligonucleotide
tggatgctcacagtcccaaacaaggttggt

SEQ ID NO: 321838 - DNA, 30 bp, Artificial Sequence
  Synthetic oligonucleotide
gcaggcgatgaggtgattcgataggttggt

SEQ ID NO: 321839 - DNA, 30 bp, Artificial Sequence
  Synthetic oligonucleotide
catccattttaaggtacccggacggttggt

SEQ ID NO: 321840 - DNA, 30 bp, Artificial Sequence
  Synthetic oligonucleotide
ttttcagactggggatggacttcggttggt

SEQ ID NO: 321841 - DNA, 30 bp, Artificial Sequence
  Synthetic oligonucleotide
atgttccgccacactcgtgacatggttggt

SEQ ID NO: 321842 - DNA, 30 bp, Artificial Sequence
  Synthetic oligonucleotide
ctaccgacaagtgagaatcaaactgttggt

SEQ ID NO: 321843 - DNA, 30 bp, Artificial Sequence
  Synthetic oligonucleotide
ggcggaggaaatgccagccgaactgttggt

SEQ ID NO: 321844 - DNA, 30 bp, Artificial Sequence
  Synthetic oligonucleotide
agcagccaaagcgggtgtaaggttgttggt

SEQ ID NO: 321845 - DNA, 30 bp, Artificial Sequence
  Synthetic oligonucleotide
ttaaggtcggccaatccttagcactttggt

SEQ ID NO: 321846 - DNA, 30 bp, Artificial Sequence
  Synthetic oligonucleotide
aaagtatcttacgtaaaaagtgagtttggt

SEQ ID NO: 321847 - DNA, 30 bp, Artificial Sequence
  Synthetic oligonucleotide
ttgtgaaacgagaatgaatcgttgtttggt

SEQ ID NO: 321848 - DNA, 30 bp, Artificial Sequence
  Synthetic oligonucleotide
aaccgcctttcaggggacggacaaaaatgt

SEQ ID NO: 321849 - DNA, 30 bp, Artificial Sequence
  Synthetic oligonucleotide
gtgggacttcggtgtggaggactaaaatgt

SEQ ID NO: 321850 - DNA, 30 bp, Artificial Sequence
  Synthetic oligonucleotide
gtccaggactaattaccccgttgcaaatgt

SEQ ID NO: 321851 - DNA, 30 bp, Artificial Sequence
  Synthetic oligonucleotide
tcgtgacagctagctcacaggtataaatgt

SEQ ID NO: 321852 - DNA, 30 bp, Artificial Sequence
  Synthetic oligonucleotide
tccagtcaagggttattgacggttaaatgt

SEQ ID NO: 321853 - DNA, 30 bp, Artificial Sequence
  Synthetic oligonucleotide
atggacttggtaatgtggttagcacaatgt

SEQ ID NO: 321854 - DNA, 30 bp, Artificial Sequence
  Synthetic oligonucleotide
ggctagtcccgatatgcgcgacgacaatgt

SEQ ID NO: 321855 - DNA, 30 bp, Artificial Sequence
  Synthetic oligonucleotide
agggatcacaccccttgcttgatacaatgt

SEQ ID NO: 321856 - DNA, 30 bp, Artificial Sequence
  Synthetic oligonucleotide
ggcgatcgtgagggccttacatcccaatgt

SEQ ID NO: 321857 - DNA, 30 bp, Artificial Sequence
  Synthetic oligonucleotide
ggcgcccgtgaggccagatttttccaatgt

SEQ ID NO: 321858 - DNA, 30 bp, Artificial Sequence
  Synthetic oligonucleotide
tggtacatgctctcttgatagctgcaatgt

SEQ ID NO: 321859 - DNA, 30 bp, Artificial Sequence
  Synthetic oligonucleotide
aaggcctctcgggttatgctgtaagaatgt

SEQ ID NO: 321860 - DNA, 30 bp, Artificial Sequence
  Synthetic oligonucleotide
ttcggcgaaacggattttaagacagaatgt

SEQ ID NO: 321861 - DNA, 30 bp, Artificial Sequence
  Synthetic oligonucleotide
acctgagcggttcgaacagggacagaatgt

SEQ ID NO: 321862 - DNA, 30 bp, Artificial Sequence
  Synthetic oligonucleotide
gcacattgtattgttgagtgaggagaatgt

SEQ ID NO: 321863 - DNA, 30 bp, Artificial Sequence
  Synthetic oligonucleotide
gagaatcactaccgtttggtaggagaatgt

SEQ ID NO: 321864 - DNA, 30 bp, Artificial Sequence
  Synthetic oligonucleotide
gtgatattacagtgtacctgtaacgaatgt

SEQ ID NO: 321865 - DNA, 30 bp, Artificial Sequence
  Synthetic oligonucleotide
tttcttggtacccgctactccagggaatgt

SEQ ID NO: 321866 - DNA, 30 bp, Artificial Sequence
  Synthetic oligonucleotide
gatgcgttatccgcattcataactgaatgt

SEQ ID NO: 321867 - DNA, 30 bp, Artificial Sequence
  Synthetic oligonucleotide
gtgctgttaggttgatgttgtggtgaatgt

SEQ ID NO: 321868 - DNA, 30 bp, Artificial Sequence
  Synthetic oligonucleotide
gaccatacctgtacgtgtgttatataatgt

SEQ ID NO: 321869 - DNA, 30 bp, Artificial Sequence
  Synthetic oligonucleotide
tgtatctctctctcggcataaacctaatgt

SEQ ID NO: 321870 - DNA, 30 bp, Artificial Sequence
  Synthetic oligonucleotide
cctgacaagtattggggggccaggtaatgt

SEQ ID NO: 321871 - DNA, 30 bp, Artificial Sequence
  Synthetic oligonucleotide
atgcgtatatgatcggaggtggggtaatgt

SEQ ID NO: 321872 - DNA, 30 bp, Artificial Sequence
  Synthetic oligonucleotide
aagaggtacgcactctctgaatgttaatgt

SEQ ID NO: 321873 - DNA, 30 bp, Artificial Sequence
  Synthetic oligonucleotide
tagagaacgtttaccccggctataacatgt

SEQ ID NO: 321874 - DNA, 30 bp, Artificial Sequence
  Synthetic oligonucleotide
agctgagcttcgctcacgcgtataacatgt

SEQ ID NO: 321875 - DNA, 30 bp, Artificial Sequence
  Synthetic oligonucleotide
ggtaaattgaccaatgtgcagggcacatgt

SEQ ID NO: 321876 - DNA, 30 bp, Artificial Sequence
  Synthetic oligonucleotide
taaccaacatcaagctgaataccgacatgt

SEQ ID NO: 321877 - DNA, 30 bp, Artificial Sequence
  Synthetic oligonucleotide
aagtgcggacatggccgcaaccatacatgt

SEQ ID NO: 321878 - DNA, 30 bp, Artificial Sequence
  Synthetic oligonucleotide
gacaaatagcggggccctgttggtacatgt

SEQ ID NO: 321879 - DNA, 30 bp, Artificial Sequence
  Synthetic oligonucleotide
tttaggaggaacggttccgagctcccatgt

SEQ ID NO: 321880 - DNA, 30 bp, Artificial Sequence
  Synthetic oligonucleotide
ctccggcggtcacacggcgatgtcccatgt

SEQ ID NO: 321881 - DNA, 30 bp, Artificial Sequence
  Synthetic oligonucleotide
ccataattgaattagcattttaagccatgt

SEQ ID NO: 321882 - DNA, 30 bp, Artificial Sequence
  Synthetic oligonucleotide
gcgcagtggcttgacagccacaatccatgt

SEQ ID NO: 321883 - DNA, 30 bp, Artificial Sequence
  Synthetic oligonucleotide
gtaaatcaatttggcgatagtcttccatgt

SEQ ID NO: 321884 - DNA, 30 bp, Artificial Sequence
  Synthetic oligonucleotide
gaatagggcgattgtgagggtgttccatgt

SEQ ID NO: 321885 - DNA, 30 bp, Artificial Sequence
  Synthetic oligonucleotide
gtacaaaaggcctaggatcaaggagcatgt

SEQ ID NO: 321886 - DNA, 30 bp, Artificial Sequence
  Synthetic oligonucleotide
agatcgtcggaggctttaggactagcatgt

SEQ ID NO: 321887 - DNA, 30 bp, Artificial Sequence
  Synthetic oligonucleotide
cagtcgtgcacatctagcactgaggcatgt

SEQ ID NO: 321888 - DNA, 30 bp, Artificial Sequence
  Synthetic oligonucleotide
tctttgtcacaagaagaatagtaggcatgt

SEQ ID NO: 321889 - DNA, 30 bp, Artificial Sequence
  Synthetic oligonucleotide
gccaagcttgacagaaagattcgtgcatgt

SEQ ID NO: 321890 - DNA, 30 bp, Artificial Sequence
  Synthetic oligonucleotide
attgtgccgggagtcggcttaatatcatgt

SEQ ID NO: 321891 - DNA, 30 bp, Artificial Sequence
  Synthetic oligonucleotide
tgtctaattctaaagtattaggagtcatgt

SEQ ID NO: 321892 - DNA, 30 bp, Artificial Sequence
  Synthetic oligonucleotide
gaggctctaaacgcgatggataggtcatgt

SEQ ID NO: 321893 - DNA, 30 bp, Artificial Sequence
  Synthetic oligonucleotide
ctagagtctggttaccgtaagccttcatgt

SEQ ID NO: 321894 - DNA, 30 bp, Artificial Sequence
  Synthetic oligonucleotide
gaatctgcgtcgacaaaacaattaagatgt

SEQ ID NO: 321895 - DNA, 30 bp, Artificial Sequence
  Synthetic oligonucleotide
tccagaatccccgcaaagggccgcagatgt

SEQ ID NO: 321896 - DNA, 30 bp, Artificial Sequence
  Synthetic oligonucleotide
tcatctttggtttgcactatcggcagatgt

SEQ ID NO: 321897 - DNA, 30 bp, Artificial Sequence
  Synthetic oligonucleotide
aaaatggagtcatcttgaggtgcgagatgt

SEQ ID NO: 321898 - DNA, 30 bp, Artificial Sequence
  Synthetic oligonucleotide
cctagctacgggtgtcattcaaatagatgt

SEQ ID NO: 321899 - DNA, 30 bp, Artificial Sequence
  Synthetic oligonucleotide
ggaacgttcgtgcttagatcagatagatgt

SEQ ID NO: 321900 - DNA, 30 bp, Artificial Sequence
  Synthetic oligonucleotide
ttttcgccgaaatggcaggggcctagatgt

SEQ ID NO: 321901 - DNA, 30 bp, Artificial Sequence
  Synthetic oligonucleotide
cagctctttattaagaagaaatgtagatgt

SEQ ID NO: 321902 - DNA, 30 bp, Artificial Sequence
  Synthetic oligonucleotide
cttgggtctaggtgttaggctatacgatgt

SEQ ID NO: 321903 - DNA, 30 bp, Artificial Sequence
  Synthetic oligonucleotide
cccgcacttttaatgtgtctgccgcgatgt

SEQ ID NO: 321904 - DNA, 30 bp, Artificial Sequence
  Synthetic oligonucleotide
tcagtgttatccggtccttagtatcgatgt

SEQ ID NO: 321905 - DNA, 30 bp, Artificial Sequence
  Synthetic oligonucleotide
gcggatcagattctatgtgcgtaaggatgt

SEQ ID NO: 321906 - DNA, 30 bp, Artificial Sequence
  Synthetic oligonucleotide
agcgtaacatgaagtgttatggtcggatgt

SEQ ID NO: 321907 - DNA, 30 bp, Artificial Sequence
  Synthetic oligonucleotide
aagacctcagttgacgatctagtatgatgt

SEQ ID NO: 321908 - DNA, 30 bp, Artificial Sequence
  Synthetic oligonucleotide
ctatattaccaggctatctatgtatgatgt

SEQ ID NO: 321909 - DNA, 30 bp, Artificial Sequence
  Synthetic oligonucleotide
ttcgacccacgtcaaaatcaccattgatgt

SEQ ID NO: 321910 - DNA, 30 bp, Artificial Sequence
  Synthetic oligonucleotide
agccttgctgctatggctaggtgcatatgt

SEQ ID NO: 321911 - DNA, 30 bp, Artificial Sequence
  Synthetic oligonucleotide
gacagccatgggccggtaacgaagatatgt

SEQ ID NO: 321912 - DNA, 30 bp, Artificial Sequence
  Synthetic oligonucleotide
agcaaagctcttccagcgcttaagatatgt

SEQ ID NO: 321913 - DNA, 30 bp, Artificial Sequence
  Synthetic oligonucleotide
cgtcagagtaggcccgggactccgatatgt

SEQ ID NO: 321914 - DNA, 30 bp, Artificial Sequence
  Synthetic oligonucleotide
ctagccgcggacacaataagagggatatgt

SEQ ID NO: 321915 - DNA, 30 bp, Artificial Sequence
  Synthetic oligonucleotide
aaacccatgcttgctggaaaagtgatatgt

SEQ ID NO: 321916 - DNA, 30 bp, Artificial Sequence
  Synthetic oligonucleotide
atacattgtctctacttttaaggtatatgt

SEQ ID NO: 321917 - DNA, 30 bp, Artificial Sequence
  Synthetic oligonucleotide
agtaattgcaagcctacgatctgtatatgt

SEQ ID NO: 321918 - DNA, 30 bp, Artificial Sequence
  Synthetic oligonucleotide
ttacagcgggtaattctataaaaactatgt

SEQ ID NO: 321919 - DNA, 30 bp, Artificial Sequence
  Synthetic oligonucleotide
agttgagaacgtagccaggatcaactatgt

SEQ ID NO: 321920 - DNA, 30 bp, Artificial Sequence
  Synthetic oligonucleotide
tgcttgtaacgcttaaactcagaactatgt

SEQ ID NO: 321921 - DNA, 30 bp, Artificial Sequence
  Synthetic oligonucleotide
gtaaggcccgaggtgttatgtccactatgt

SEQ ID NO: 321922 - DNA, 30 bp, Artificial Sequence
  Synthetic oligonucleotide
ttccacgttcccgatgagggtcgactatgt

SEQ ID NO: 321923 - DNA, 30 bp, Artificial Sequence
  Synthetic oligonucleotide
tcgccaaagtagatgatcggcaacctatgt

SEQ ID NO: 321924 - DNA, 30 bp, Artificial Sequence
  Synthetic oligonucleotide
ctgtgccaagaggcaaaaggccacctatgt

SEQ ID NO: 321925 - DNA, 30 bp, Artificial Sequence
  Synthetic oligonucleotide
ctgtcactaccagcgtacggccagctatgt

SEQ ID NO: 321926 - DNA, 30 bp, Artificial Sequence
  Synthetic oligonucleotide
agtggggactctgatctggagcggctatgt

SEQ ID NO: 321927 - DNA, 30 bp, Artificial Sequence
  Synthetic oligonucleotide
gcttgattaccgcttagtcgtctgctatgt

SEQ ID NO: 321928 - DNA, 30 bp, Artificial Sequence
  Synthetic oligonucleotide
tgatgtaagggatcaaccccttctctatgt

SEQ ID NO: 321929 - DNA, 30 bp, Artificial Sequence
  Synthetic oligonucleotide
cagaaaaaacgtcttgagatcggagtatgt

SEQ ID NO: 321930 - DNA, 30 bp, Artificial Sequence
  Synthetic oligonucleotide
gtgatgggcttcatgtggtagcacgtatgt

SEQ ID NO: 321931 - DNA, 30 bp, Artificial Sequence
  Synthetic oligonucleotide
taaaggctcagatgttaacggcacgtatgt

SEQ ID NO: 321932 - DNA, 30 bp, Artificial Sequence
  Synthetic oligonucleotide
cttcataactaggtgccgtgaaaggtatgt

SEQ ID NO: 321933 - DNA, 30 bp, Artificial Sequence
  Synthetic oligonucleotide
aaagggctccgtaccactgcgtcggtatgt

SEQ ID NO: 321934 - DNA, 30 bp, Artificial Sequence
  Synthetic oligonucleotide
aaaggtttgcggctaatggtgagtgtatgt

SEQ ID NO: 321935 - DNA, 30 bp, Artificial Sequence
  Synthetic oligonucleotide
acagtattgttgccgcgatagcgtgtatgt

SEQ ID NO: 321936 - DNA, 30 bp, Artificial Sequence
  Synthetic oligonucleotide
tcggattgccaggagggcaaaaaattatgt

SEQ ID NO: 321937 - DNA, 30 bp, Artificial Sequence
  Synthetic oligonucleotide
tagattgaccaacggttgggcaccttatgt

SEQ ID NO: 321938 - DNA, 30 bp, Artificial Sequence
  Synthetic oligonucleotide
cgagtctctacatactgcaagatcttatgt

SEQ ID NO: 321939 - DNA, 30 bp, Artificial Sequence
  Synthetic oligonucleotide
cgcgtcggctacatgacgtgagtgttatgt

SEQ ID NO: 321940 - DNA, 30 bp, Artificial Sequence
  Synthetic oligonucleotide
gcatgtagattatcgaggtgtggtttatgt

SEQ ID NO: 321941 - DNA, 30 bp, Artificial Sequence
  Synthetic oligonucleotide
agcattcccgaaaatccgccctgtttatgt

SEQ ID NO: 321942 - DNA, 30 bp, Artificial Sequence
  Synthetic oligonucleotide
atccactattgctcttgtccttgtttatgt

SEQ ID NO: 321943 - DNA, 30 bp, Artificial Sequence
  Synthetic oligonucleotide
gctaaattttgctggttcaactgaaactgt

SEQ ID NO: 321944 - DNA, 30 bp, Artificial Sequence
  Synthetic oligonucleotide
gagaaccctgttttgctcaagatcaactgt

SEQ ID NO: 321945 - DNA, 30 bp, Artificial Sequence
  Synthetic oligonucleotide
attataagtgtccccgcgtggaagaactgt

SEQ ID NO: 321946 - DNA, 30 bp, Artificial Sequence
  Synthetic oligonucleotide
gcgcctagctggtagcattaagctaactgt

SEQ ID NO: 321947 - DNA, 30 bp, Artificial Sequence
  Synthetic oligonucleotide
tgatccatcgggcataagaatccacactgt

SEQ ID NO: 321948 - DNA, 30 bp, Artificial Sequence
  Synthetic oligonucleotide
tagagattagcatgggtctatcgccactgt

SEQ ID NO: 321949 - DNA, 30 bp, Artificial Sequence
  Synthetic oligonucleotide
caggcttcgtttgataaatatccgcactgt

SEQ ID NO: 321950 - DNA, 31 bp, Artificial Sequence
  Synthetic oligonucleotide
ctcctgggaaccggggtagccagatcactgt

SEQ ID NO: 321951 - DNA, 30 bp, Artificial Sequence
  Synthetic oligonucleotide
cctaaatgtctgctagggaagcctcactgt

SEQ ID NO: 321952 - DNA, 30 bp, Artificial Sequence
  Synthetic oligonucleotide
ttgcatacccacgatcgtcacatagactgt

SEQ ID NO: 321953 - DNA, 30 bp, Artificial Sequence
  Synthetic oligonucleotide
tatgctgttaaatatacccctctggactgt

SEQ ID NO: 321954 - DNA, 30 bp, Artificial Sequence
  Synthetic oligonucleotide
agcgaatacatctagtcacaggctgactgt

SEQ ID NO: 321955 - DNA, 30 bp, Artificial Sequence
  Synthetic oligonucleotide
acgacgtctatgatcgtcgtctgtgactgt

SEQ ID NO: 321956 - DNA, 30 bp, Artificial Sequence
  Synthetic oligonucleotide
tagatttgagaataaggctgctaatactgt

SEQ ID NO: 321957 - DNA, 30 bp, Artificial Sequence
  Synthetic oligonucleotide
tggaccccagtacagaccggtgactactgt

SEQ ID NO: 321958 - DNA, 30 bp, Artificial Sequence
  Synthetic oligonucleotide
attgtcttgttgtacttgggctacacctgt

SEQ ID NO: 321959 - DNA, 30 bp, Artificial Sequence
  Synthetic oligonucleotide
ttgcattctctcgcgaaatatagcacctgt

SEQ ID NO: 321960 - DNA, 30 bp, Artificial Sequence
  Synthetic oligonucleotide
tgttcttcgagaaataggaatatgacctgt

SEQ ID NO: 321961 - DNA, 30 bp, Artificial Sequence
  Synthetic oligonucleotide
atgtaccttagtaggttgtggactacctgt

SEQ ID NO: 321962 - DNA, 30 bp, Artificial Sequence
  Synthetic oligonucleotide
tcttacagatacacagcgttatgaccctgt

SEQ ID NO: 321963 - DNA, 30 bp, Artificial Sequence
  Synthetic oligonucleotide
tgacgggcgccgtatacttgtatgccctgt

SEQ ID NO: 321964 - DNA, 30 bp, Artificial Sequence
  Synthetic oligonucleotide
acattgaatttacatgccataagtccctgt

SEQ ID NO: 321965 - DNA, 30 bp, Artificial Sequence
  Synthetic oligonucleotide
caccccctgcgcaatctagtagcagcctgt

SEQ ID NO: 321966 - DNA, 30 bp, Artificial Sequence
  Synthetic oligonucleotide
cagttcgctcataggttgagaggagcctgt

SEQ ID NO: 321967 - DNA, 30 bp, Artificial Sequence
  Synthetic oligonucleotide
ccccccgagattatacgaccactggcctgt

SEQ ID NO: 321968 - DNA, 30 bp, Artificial Sequence
  Synthetic oligonucleotide
tgatggtaagggtaccatcgaaatgcctgt

SEQ ID NO: 321969 - DNA, 30 bp, Artificial Sequence
  Synthetic oligonucleotide
gcctatgaactggtagaccacgatgcctgt

SEQ ID NO: 321970 - DNA, 30 bp, Artificial Sequence
  Synthetic oligonucleotide
gggtcaggaatgaacagaagttgtgcctgt

SEQ ID NO: 321971 - DNA, 30 bp, Artificial Sequence
  Synthetic oligonucleotide
gattacaaggaacattgttcgcgatcctgt

SEQ ID NO: 321972 - DNA, 30 bp, Artificial Sequence
  Synthetic oligonucleotide
gacagtaaggatgtcctgctcatatcctgt

SEQ ID NO: 321973 - DNA, 30 bp, Artificial Sequence
  Synthetic oligonucleotide
tgaccgttagtctcaaccttcaactcctgt

SEQ ID NO: 321974 - DNA, 30 bp, Artificial Sequence
  Synthetic oligonucleotide
gtaaattttgtacatgacagatagtcctgt

SEQ ID NO: 321975 - DNA, 30 bp, Artificial Sequence
  Synthetic oligonucleotide
gatgactcctattattgtcttctgtcctgt

SEQ ID NO: 321976 - DNA, 30 bp, Artificial Sequence
  Synthetic oligonucleotide
gataatgtagtccgtgctggttgttcctgt

SEQ ID NO: 321977 - DNA, 30 bp, Artificial Sequence
  Synthetic oligonucleotide
acgctgcccctaatgtaatacgcaagctgt

SEQ ID NO: 321978 - DNA, 30 bp, Artificial Sequence
  Synthetic oligonucleotide
gctcaattggtcggtcgtaataacagctgt

SEQ ID NO: 321979 - DNA, 30 bp, Artificial Sequence
  Synthetic oligonucleotide
tctggtaagaatgtccttaccaccagctgt

SEQ ID NO: 321980 - DNA, 30 bp, Artificial Sequence
  Synthetic oligonucleotide
gcagtaaacactcaatctgtctccagctgt

SEQ ID NO: 321981 - DNA, 30 bp, Artificial Sequence
  Synthetic oligonucleotide
ttataaaccggagtacaccggtagagctgt

SEQ ID NO: 321982 - DNA, 30 bp, Artificial Sequence
  Synthetic oligonucleotide
tgttgttagaacggggccctctcgagctgt

SEQ ID NO: 321983 - DNA, 30 bp, Artificial Sequence
  Synthetic oligonucleotide
ctcatcttcaatagggaaccggggagctgt

SEQ ID NO: 321984 - DNA, 30 bp, Artificial Sequence
  Synthetic oligonucleotide
tgtacacgtgagcttgtcagggctagctgt

SEQ ID NO: 321985 - DNA, 30 bp, Artificial Sequence
  Synthetic oligonucleotide
atgtcgcaaccgtgcggataagttagctgt

SEQ ID NO: 321986 - DNA, 30 bp, Artificial Sequence
  Synthetic oligonucleotide
gcggatagcagctagcatagttcacgctgt

SEQ ID NO: 321987 - DNA, 30 bp, Artificial Sequence
  Synthetic oligonucleotide
gcgatacgatacgagtcatacgtacgctgt

SEQ ID NO: 321988 - DNA, 30 bp, Artificial Sequence
  Synthetic oligonucleotide
atgcttctagaaaactggaagacccgctgt

SEQ ID NO: 321989 - DNA, 30 bp, Artificial Sequence
  Synthetic oligonucleotide
ggaagtcgtaccgcgcatatgagccgctgt

SEQ ID NO: 321990 - DNA, 30 bp, Artificial Sequence
  Synthetic oligonucleotide
tctctaggctcttatctgccttgccgctgt

SEQ ID NO: 321991 - DNA, 30 bp, Artificial Sequence
  Synthetic oligonucleotide
aatgcatcgttacccgatgtacggcgctgt

SEQ ID NO: 321992 - DNA, 30 bp, Artificial Sequence
  Synthetic oligonucleotide
tcaactatgattagacactaagggcgctgt

SEQ ID NO: 321993 - DNA, 30 bp, Artificial Sequence
  Synthetic oligonucleotide
ggtatttcagttgccgggagaggtcgctgt

SEQ ID NO: 321994 - DNA, 30 bp, Artificial Sequence
  Synthetic oligonucleotide
tggcgccgtacaagacacaattaaggctgt

SEQ ID NO: 321995 - DNA, 30 bp, Artificial Sequence
  Synthetic oligonucleotide
tttggatcaagtgacgacgggaacggctgt

SEQ ID NO: 321996 - DNA, 30 bp, Artificial Sequence
  Synthetic oligonucleotide
gggtaaccagacctcttccgttgcggctgt

SEQ ID NO: 321997 - DNA, 30 bp, Artificial Sequence
  Synthetic oligonucleotide
gcacgggcaaaggagtagcgacatggctgt

SEQ ID NO: 321998 - DNA, 30 bp, Artificial Sequence
  Synthetic oligonucleotide
aagtgacgcggaggaactaaataatgctgt

SEQ ID NO: 321999 - DNA, 30 bp, Artificial Sequence
  Synthetic oligonucleotide
gttcgggcatgtgtagcctattagtgctgt

SEQ ID NO: 322000 - DNA, 30 bp, Artificial Sequence
  Synthetic oligonucleotide
gagggctaaatgttcccgtcacattgctgt

SEQ ID NO: 322001 - DNA, 30 bp, Artificial Sequence
  Synthetic oligonucleotide
accattatgcgtcgatacttttattgctgt

SEQ ID NO: 322002 - DNA, 30 bp, Artificial Sequence
  Synthetic oligonucleotide
gggacactaatcgtgctccggtgaatctgt

SEQ ID NO: 322003 - DNA, 30 bp, Artificial Sequence
  Synthetic oligonucleotide
acacgaaaccagtggttacccggcatctgt

SEQ ID NO: 322004 - DNA, 30 bp, Artificial Sequence
  Synthetic oligonucleotide
atgccgcgtggcgtagacttgtcgatctgt

SEQ ID NO: 322005 - DNA, 30 bp, Artificial Sequence
  Synthetic oligonucleotide
attggccgggctgaaacagcttgtatctgt

SEQ ID NO: 322006 - DNA, 30 bp, Artificial Sequence
  Synthetic oligonucleotide
gcttacggatcatagttatcatttatctgt

SEQ ID NO: 322007 - DNA, 30 bp, Artificial Sequence
  Synthetic oligonucleotide
gcgtattacatggttagtacataactctgt

SEQ ID NO: 322008 - DNA, 30 bp, Artificial Sequence
  Synthetic oligonucleotide
tcttggggtagcagatttgtctgtctctgt

SEQ ID NO: 322009 - DNA, 30 bp, Artificial Sequence
  Synthetic oligonucleotide
acaatatacagcagggaaagttttctctgt

SEQ ID NO: 322010 - DNA, 30 bp, Artificial Sequence
  Synthetic oligonucleotide
tactgcaagcgtcggctctggtcagtctgt

SEQ ID NO: 322011 - DNA, 30 bp, Artificial Sequence
  Synthetic oligonucleotide
tgtaccttatatgcgtcactacgagtctgt

SEQ ID NO: 322012 - DNA, 30 bp, Artificial Sequence
  Synthetic oligonucleotide
tgactacactgttaaagtgaattagtctgt

SEQ ID NO: 322013 - DNA, 30 bp, Artificial Sequence
  Synthetic oligonucleotide
cgagagatgattttgttgggattcgtctgt

SEQ ID NO: 322014 - DNA, 30 bp, Artificial Sequence
  Synthetic oligonucleotide
ggttagaagtcgggcatatcaccggtctgt

SEQ ID NO: 322015 - DNA, 30 bp, Artificial Sequence
  Synthetic oligonucleotide
agaccttgtactgcgcagggcccggtctgt

SEQ ID NO: 322016 - DNA, 30 bp, Artificial Sequence
  Synthetic oligonucleotide
acaggggacaacaactagcacggggtctgt

SEQ ID NO: 322017 - DNA, 30 bp, Artificial Sequence
  Synthetic oligonucleotide
gacgcgaaacagctctattgtgtggtctgt

SEQ ID NO: 322018 - DNA, 30 bp, Artificial Sequence
  Synthetic oligonucleotide
ctacgcggggttcatagacaatctgtctgt

SEQ ID NO: 322019 - DNA, 30 bp, Artificial Sequence
  Synthetic oligonucleotide
caagatttagcatggacgattagtgtctgt

SEQ ID NO: 322020 - DNA, 30 bp, Artificial Sequence
  Synthetic oligonucleotide
acaagtgcgcgctacattaggtcattctgt

SEQ ID NO: 322021 - DNA, 30 bp, Artificial Sequence
  Synthetic oligonucleotide
cgggaacggatcggaagaatatggttctgt

SEQ ID NO: 322022 - DNA, 30 bp, Artificial Sequence
  Synthetic oligonucleotide
tgatttcgacgtgggagcctccctttctgt

SEQ ID NO: 322023 - DNA, 30 bp, Artificial Sequence
  Synthetic oligonucleotide
ggcacgtcgcagttaccaagtaggaagtgt

SEQ ID NO: 322024 - DNA, 30 bp, Artificial Sequence
  Synthetic oligonucleotide
gagatggtcttaattcccattgctaagtgt

SEQ ID NO: 322025 - DNA, 31 bp, Artificial Sequence
  Synthetic oligonucleotide
ttcttgggggtacccaggaggccaacagtgt

SEQ ID NO: 322026 - DNA, 30 bp, Artificial Sequence
  Synthetic oligonucleotide
tacctaaaagcggtgattgcttaacagtgt

SEQ ID NO: 322027 - DNA, 30 bp, Artificial Sequence
  Synthetic oligonucleotide
ggagtttcgctactttttatctatcagtgt

SEQ ID NO: 322028 - DNA, 30 bp, Artificial Sequence
  Synthetic oligonucleotide
attcgtaattatcctggcgctactcagtgt

SEQ ID NO: 322029 - DNA, 30 bp, Artificial Sequence
  Synthetic oligonucleotide
tttcgcaggggcggacagcagatagagtgt

SEQ ID NO: 322030 - DNA, 30 bp, Artificial Sequence
  Synthetic oligonucleotide
tccccacggagtttacccccaggcgagtgt

SEQ ID NO: 322031 - DNA, 30 bp, Artificial Sequence
  Synthetic oligonucleotide
gatataccgtgagcactccgtaaggagtgt

SEQ ID NO: 322032 - DNA, 30 bp, Artificial Sequence
  Synthetic oligonucleotide
acagcggcattggatatttcacatgagtgt

SEQ ID NO: 322033 - DNA, 30 bp, Artificial Sequence
  Synthetic oligonucleotide
agataaaatgggtagtgcacaagtgagtgt

SEQ ID NO: 322034 - DNA, 30 bp, Artificial Sequence
  Synthetic oligonucleotide
cccggactccacggaaggccacgtgagtgt

SEQ ID NO: 322035 - DNA, 30 bp, Artificial Sequence
  Synthetic oligonucleotide
tagtgggaatcattaggtcttattgagtgt

SEQ ID NO: 322036 - DNA, 30 bp, Artificial Sequence
  Synthetic oligonucleotide
atcgctcgtaagatgcatccgcaatagtgt

SEQ ID NO: 322037 - DNA, 30 bp, Artificial Sequence
  Synthetic oligonucleotide
ggaaggcggcaattccccaactaatagtgt

SEQ ID NO: 322038 - DNA, 30 bp, Artificial Sequence
  Synthetic oligonucleotide
ctccattggagggcataagtgccatagtgt

SEQ ID NO: 322039 - DNA, 30 bp, Artificial Sequence
  Synthetic oligonucleotide
gcagttttcacccgttcgtaccgatagtgt

SEQ ID NO: 322040 - DNA, 30 bp, Artificial Sequence
  Synthetic oligonucleotide
tcgctgtgaccacatactcaactctagtgt

SEQ ID NO: 322041 - DNA, 30 bp, Artificial Sequence
  Synthetic oligonucleotide
ttatcaatagttctaactcaatcgtagtgt

SEQ ID NO: 322042 - DNA, 30 bp, Artificial Sequence
  Synthetic oligonucleotide
caaaccggaaatgggtccggcaggtagtgt

SEQ ID NO: 322043 - DNA, 30 bp, Artificial Sequence
  Synthetic oligonucleotide
catggagcgttatttcaaggaaattagtgt

SEQ ID NO: 322044 - DNA, 30 bp, Artificial Sequence
  Synthetic oligonucleotide
ttgcagaggatgtaaagtagtgcttagtgt

SEQ ID NO: 322045 - DNA, 30 bp, Artificial Sequence
  Synthetic oligonucleotide
gtcctgttatctgtttcacatcgaacgtgt

SEQ ID NO: 322046 - DNA, 30 bp, Artificial Sequence
  Synthetic oligonucleotide
gtataacgctggcaataccgacacacgtgt

SEQ ID NO: 322047 - DNA, 30 bp, Artificial Sequence
  Synthetic oligonucleotide
gtccaagggtacggaagcgactgcacgtgt

SEQ ID NO: 322048 - DNA, 30 bp, Artificial Sequence
  Synthetic oligonucleotide
tgcagtatgcgctgtgatatcctcacgtgt

SEQ ID NO: 322049 - DNA, 30 bp, Artificial Sequence
  Synthetic oligonucleotide
tcgatcctcagacccttttgttagacgtgt

SEQ ID NO: 322050 - DNA, 30 bp, Artificial Sequence
  Synthetic oligonucleotide
aaccacctacagttgaggctaataccgtgt

SEQ ID NO: 322051 - DNA, 30 bp, Artificial Sequence
  Synthetic oligonucleotide
tatcaaaataacaaactctttctaccgtgt

SEQ ID NO: 322052 - DNA, 30 bp, Artificial Sequence
  Synthetic oligonucleotide
aattcacgaaaatacggagtggccccgtgt

SEQ ID NO: 322053 - DNA, 30 bp, Artificial Sequence
  Synthetic oligonucleotide
gacgggtaagtaacactccggcagccgtgt

SEQ ID NO: 322054 - DNA, 30 bp, Artificial Sequence
  Synthetic oligonucleotide
taggccaggactcctgcttctcagccgtgt

SEQ ID NO: 322055 - DNA, 30 bp, Artificial Sequence
  Synthetic oligonucleotide
ttgtcaactatccggatggtgcggccgtgt

SEQ ID NO: 322056 - DNA, 30 bp, Artificial Sequence
  Synthetic oligonucleotide
gcactgttcagtcttacatgctgtccgtgt

SEQ ID NO: 322057 - DNA, 30 bp, Artificial Sequence
  Synthetic oligonucleotide
ttgaattgtctgttaggaaagccagcgtgt

SEQ ID NO: 322058 - DNA, 29 bp, Artificial Sequence
  Synthetic oligonucleotide
atagccgcgacgcgtatgtacatgcgtgt

SEQ ID NO: 322059 - DNA, 30 bp, Artificial Sequence
  Synthetic oligonucleotide
tcgggcatccttgtgtcagctcatgcgtgt

SEQ ID NO: 322060 - DNA, 30 bp, Artificial Sequence
  Synthetic oligonucleotide
gcaaacctttacgttcgaccatatgcgtgt

SEQ ID NO: 322061 - DNA, 30 bp, Artificial Sequence
  Synthetic oligonucleotide
agtctgggcctagactgccttcaatcgtgt

SEQ ID NO: 322062 - DNA, 30 bp, Artificial Sequence
  Synthetic oligonucleotide
gcgtaattacgtaagatcacaacatcgtgt

SEQ ID NO: 322063 - DNA, 30 bp, Artificial Sequence
  Synthetic oligonucleotide
cgtcgtgatagaacgcggccgagatcgtgt

SEQ ID NO: 322064 - DNA, 30 bp, Artificial Sequence
  Synthetic oligonucleotide
gaataggcttcagggacactgccgtcgtgt

SEQ ID NO: 322065 - DNA, 30 bp, Artificial Sequence
  Synthetic oligonucleotide
gtagtccactcgttgagaactccgtcgtgt

SEQ ID NO: 322066 - DNA, 30 bp, Artificial Sequence
  Synthetic oligonucleotide
gccccaagtgatcgggccatcgattcgtgt

SEQ ID NO: 322067 - DNA, 30 bp, Artificial Sequence
  Synthetic oligonucleotide
gctaaagtacatatctttacgacttcgtgt

SEQ ID NO: 322068 - DNA, 30 bp, Artificial Sequence
  Synthetic oligonucleotide
tagcgagccgcatccgaatctgaaaggtgt

SEQ ID NO: 322069 - DNA, 30 bp, Artificial Sequence
  Synthetic oligonucleotide
ggttggtaatctccaacacccggaaggtgt

SEQ ID NO: 322070 - DNA, 30 bp, Artificial Sequence
  Synthetic oligonucleotide
gtggttacggttgttcggctatgaaggtgt

SEQ ID NO: 322071 - DNA, 30 bp, Artificial Sequence
  Synthetic oligonucleotide
gtattacgcagatgtggtaatagcaggtgt

SEQ ID NO: 322072 - DNA, 30 bp, Artificial Sequence
  Synthetic oligonucleotide
gggccgtatgtctatgagacaaggaggtgt

SEQ ID NO: 322073 - DNA, 30 bp, Artificial Sequence
  Synthetic oligonucleotide
ccaatgcggcaagcgcaatggaggaggtgt

SEQ ID NO: 322074 - DNA, 30 bp, Artificial Sequence
  Synthetic oligonucleotide
atgcactcgttcccgttaagtatgaggtgt

SEQ ID NO: 322075 - DNA, 30 bp, Artificial Sequence
  Synthetic oligonucleotide
atgagggatcttgtgtcggcgagtaggtgt

SEQ ID NO: 322076 - DNA, 30 bp, Artificial Sequence
  Synthetic oligonucleotide
tctgaatgacttctctcgcccattaggtgt

SEQ ID NO: 322077 - DNA, 30 bp, Artificial Sequence
  Synthetic oligonucleotide
gccagacacaagttagaacaccgacggtgt

SEQ ID NO: 322078 - DNA, 30 bp, Artificial Sequence
  Synthetic oligonucleotide
ccggcagctgcccggcggcgaaaagggtgt

SEQ ID NO: 322079 - DNA, 30 bp, Artificial Sequence
  Synthetic oligonucleotide
ctccacaacgcctactacaggaacgggtgt

SEQ ID NO: 322080 - DNA, 30 bp, Artificial Sequence
  Synthetic oligonucleotide
ctgtggttcaagtaatcatcgacggggtgt

SEQ ID NO: 322081 - DNA, 30 bp, Artificial Sequence
  Synthetic oligonucleotide
tgtcctcgcttttcttaactccatgggtgt

SEQ ID NO: 322082 - DNA, 30 bp, Artificial Sequence
  Synthetic oligonucleotide
catcatatgaaccagagctggcctgggtgt

SEQ ID NO: 322083 - DNA, 30 bp, Artificial Sequence
  Synthetic oligonucleotide
cggtctctaaagtagatctttgctgggtgt

SEQ ID NO: 322084 - DNA, 30 bp, Artificial Sequence
  Synthetic oligonucleotide
ctggctcaagcgttgtcctaaattgggtgt

SEQ ID NO: 322085 - DNA, 30 bp, Artificial Sequence
  Synthetic oligonucleotide
tcgcgcatatggagaatgtagtaatggtgt

SEQ ID NO: 322086 - DNA, 30 bp, Artificial Sequence
  Synthetic oligonucleotide
gccggactggctctgtgaagcaattggtgt

SEQ ID NO: 322087 - DNA, 30 bp, Artificial Sequence
  Synthetic oligonucleotide
gttggcgcagtgcatccgttcgattggtgt

SEQ ID NO: 322088 - DNA, 30 bp, Artificial Sequence
  Synthetic oligonucleotide
atcgacacggccctcggcggacaaatgtgt

SEQ ID NO: 322089 - DNA, 30 bp, Artificial Sequence
  Synthetic oligonucleotide
cgtctgtgcatcggacaatgatgaatgtgt

SEQ ID NO: 322090 - DNA, 30 bp, Artificial Sequence
  Synthetic oligonucleotide
ggtcaattaggtatggggatctgaatgtgt

SEQ ID NO: 322091 - DNA, 31 bp, Artificial Sequence
  Synthetic oligonucleotide
catcaggactggacggcgctgatacatgtgt

SEQ ID NO: 322092 - DNA, 30 bp, Artificial Sequence
  Synthetic oligonucleotide
cgatacgcataatatcacttgtacatgtgt

SEQ ID NO: 322093 - DNA, 30 bp, Artificial Sequence
  Synthetic oligonucleotide
tggaccaggcaatatcggctatgcatgtgt

SEQ ID NO: 322094 - DNA, 30 bp, Artificial Sequence
  Synthetic oligonucleotide
aagaaaagcacctacgtggaaatcatgtgt

SEQ ID NO: 322095 - DNA, 30 bp, Artificial Sequence
  Synthetic oligonucleotide
atacacggttcatatcctgcactcatgtgt

SEQ ID NO: 322096 - DNA, 30 bp, Artificial Sequence
  Synthetic oligonucleotide
tttcgaacttggcggggtagtgtgatgtgt

SEQ ID NO: 322097 - DNA, 30 bp, Artificial Sequence
  Synthetic oligonucleotide
gagcgaaagccggtggcacgttatatgtgt

SEQ ID NO: 322098 - DNA, 30 bp, Artificial Sequence
  Synthetic oligonucleotide
aaaaaagtcctgcacacccttcctatgtgt

SEQ ID NO: 322099 - DNA, 30 bp, Artificial Sequence
  Synthetic oligonucleotide
actgaagttcttcgaacattgggactgtgt

SEQ ID NO: 322100 - DNA, 30 bp, Artificial Sequence
  Synthetic oligonucleotide
atctagtcattatagcctctgtccctgtgt

SEQ ID NO: 322101 - DNA, 30 bp, Artificial Sequence
  Synthetic oligonucleotide
caaagcttggctcgccaatcattcctgtgt

SEQ ID NO: 322102 - DNA, 30 bp, Artificial Sequence
  Synthetic oligonucleotide
attgcgggcgtacgtggaacttagctgtgt

SEQ ID NO: 322103 - DNA, 30 bp, Artificial Sequence
  Synthetic oligonucleotide
accgctcacttagggacagcaaatctgtgt

SEQ ID NO: 322104 - DNA, 30 bp, Artificial Sequence
  Synthetic oligonucleotide
catatttctcgtgctctccgatctctgtgt

SEQ ID NO: 322105 - DNA, 30 bp, Artificial Sequence
  Synthetic oligonucleotide
cctaacgcttaatgccctaagcttctgtgt

SEQ ID NO: 322106 - DNA, 30 bp, Artificial Sequence
  Synthetic oligonucleotide
tattctgtttgtgagttcctggttctgtgt

SEQ ID NO: 322107 - DNA, 30 bp, Artificial Sequence
  Synthetic oligonucleotide
ctggcgggacgtgacattttgacagtgtgt

SEQ ID NO: 322108 - DNA, 30 bp, Artificial Sequence
  Synthetic oligonucleotide
gtgaccatgtaataatgttgtggagtgtgt

SEQ ID NO: 322109 - DNA, 30 bp, Artificial Sequence
  Synthetic oligonucleotide
acaccatgctagccacttacgaacgtgtgt

SEQ ID NO: 322110 - DNA, 30 bp, Artificial Sequence
  Synthetic oligonucleotide
tgacgtacgcttgcaagtattgtcgtgtgt

SEQ ID NO: 322111 - DNA, 30 bp, Artificial Sequence
  Synthetic oligonucleotide
gcccgaaacgaaaatgttacaagggtgtgt

SEQ ID NO: 322112 - DNA, 30 bp, Artificial Sequence
  Synthetic oligonucleotide
gtctggggttgactcgcgggctatgtgtgt

SEQ ID NO: 322113 - DNA, 30 bp, Artificial Sequence
  Synthetic oligonucleotide
gagaccggcaatcaagcttgtcctgtgtgt

SEQ ID NO: 322114 - DNA, 30 bp, Artificial Sequence
  Synthetic oligonucleotide
gtgctatacttctcattgctgagtgtgtgt

SEQ ID NO: 322115 - DNA, 30 bp, Artificial Sequence
  Synthetic oligonucleotide
aaagtccattcaaacaactgccaattgtgt

SEQ ID NO: 322116 - DNA, 30 bp, Artificial Sequence
  Synthetic oligonucleotide
gggggcttcgagataaacgcctgattgtgt

SEQ ID NO: 322117 - DNA, 30 bp, Artificial Sequence
  Synthetic oligonucleotide
caaatgaagacggtagggtacctattgtgt

SEQ ID NO: 322118 - DNA, 30 bp, Artificial Sequence
  Synthetic oligonucleotide
ataagaatgtgcgtcacttaccacttgtgt

SEQ ID NO: 322119 - DNA, 30 bp, Artificial Sequence
  Synthetic oligonucleotide
aggctctcatgcgcaagggtattcttgtgt

SEQ ID NO: 322120 - DNA, 30 bp, Artificial Sequence
  Synthetic oligonucleotide
atctacacatgtctcccttctgagttgtgt

SEQ ID NO: 322121 - DNA, 30 bp, Artificial Sequence
  Synthetic oligonucleotide
gacctgtacgcgcgccgacgaacgttgtgt

SEQ ID NO: 322122 - DNA, 30 bp, Artificial Sequence
  Synthetic oligonucleotide
cagttatgctcggtccgtttaatgttgtgt

SEQ ID NO: 322123 - DNA, 30 bp, Artificial Sequence
  Synthetic oligonucleotide
cagtctatctcactacattgactgttgtgt

SEQ ID NO: 322124 - DNA, 30 bp, Artificial Sequence
  Synthetic oligonucleotide
tgccaactacttgcttcagccagtttgtgt

SEQ ID NO: 322125 - DNA, 30 bp, Artificial Sequence
  Synthetic oligonucleotide
tgggaacgcttgcccacgtgcgcaaattgt

SEQ ID NO: 322126 - DNA, 30 bp, Artificial Sequence
  Synthetic oligonucleotide
gcatattcctctcatcaagactcaaattgt

SEQ ID NO: 322127 - DNA, 30 bp, Artificial Sequence
  Synthetic oligonucleotide
ctatgccacattacgagacacgtaaattgt

SEQ ID NO: 322128 - DNA, 30 bp, Artificial Sequence
  Synthetic oligonucleotide
gctcgcgccgacttagctatgtgcaattgt

SEQ ID NO: 322129 - DNA, 30 bp, Artificial Sequence
  Synthetic oligonucleotide
aaaatgatgtccacgaaatggcagaattgt

SEQ ID NO: 322130 - DNA, 30 bp, Artificial Sequence
  Synthetic oligonucleotide
cttaaatgctttttgaaaagaaataattgt

SEQ ID NO: 322131 - DNA, 30 bp, Artificial Sequence
  Synthetic oligonucleotide
gaagaccggctaaagccaaaggctaattgt

SEQ ID NO: 322132 - DNA, 30 bp, Artificial Sequence
  Synthetic oligonucleotide
ccggcgctgcaaacaccttttcgtaattgt

SEQ ID NO: 322133 - DNA, 30 bp, Artificial Sequence
  Synthetic oligonucleotide
tgtatgtacgtcgtatgtcgatgtaattgt

SEQ ID NO: 322134 - DNA, 30 bp, Artificial Sequence
  Synthetic oligonucleotide
taggcatagatgtagttcttgacacattgt

SEQ ID NO: 322135 - DNA, 30 bp, Artificial Sequence
  Synthetic oligonucleotide
gagaaggaggggacttgccttcggcattgt

SEQ ID NO: 322136 - DNA, 30 bp, Artificial Sequence
  Synthetic oligonucleotide
gtattgatggtacacttacgttcagattgt

SEQ ID NO: 322137 - DNA, 30 bp, Artificial Sequence
  Synthetic oligonucleotide
ctcgacctagtcttgcttttcttagattgt

SEQ ID NO: 322138 - DNA, 30 bp, Artificial Sequence
  Synthetic oligonucleotide
ccgcagggcaatctatggtgttccgattgt

SEQ ID NO: 322139 - DNA, 30 bp, Artificial Sequence
  Synthetic oligonucleotide
gacgaagctaccgggtcattcaaggattgt

SEQ ID NO: 322140 - DNA, 30 bp, Artificial Sequence
  Synthetic oligonucleotide
cttgaaaagacttagtccaaacaggattgt

SEQ ID NO: 322141 - DNA, 30 bp, Artificial Sequence
  Synthetic oligonucleotide
caggacgactctaaggctgaatgtgattgt

SEQ ID NO: 322142 - DNA, 30 bp, Artificial Sequence
  Synthetic oligonucleotide
ctccgatggcaggggttcatgcagtattgt

SEQ ID NO: 322143 - DNA, 30 bp, Artificial Sequence
  Synthetic oligonucleotide
gagtgtgtaatacatgttgattagtattgt

SEQ ID NO: 322144 - DNA, 30 bp, Artificial Sequence
  Synthetic oligonucleotide
acatctggtttagagcgaagtaggtattgt

SEQ ID NO: 322145 - DNA, 30 bp, Artificial Sequence
  Synthetic oligonucleotide
atgtagcgggaattagaacggctgtattgt

SEQ ID NO: 322146 - DNA, 30 bp, Artificial Sequence
  Synthetic oligonucleotide
aggcaaattctcgcctgtatcacttattgt

SEQ ID NO: 322147 - DNA, 30 bp, Artificial Sequence
  Synthetic oligonucleotide
cagtcgtttgaatcctagaatctttattgt

SEQ ID NO: 322148 - DNA, 30 bp, Artificial Sequence
  Synthetic oligonucleotide
gagcacttgggaacgtgtctaacaacttgt

SEQ ID NO: 322149 - DNA, 30 bp, Artificial Sequence
  Synthetic oligonucleotide
cattaggtggtcaccttcacgcacacttgt

SEQ ID NO: 322150 - DNA, 30 bp, Artificial Sequence
  Synthetic oligonucleotide
aataggggagtaagcccagcacagacttgt

SEQ ID NO: 322151 - DNA, 30 bp, Artificial Sequence
  Synthetic oligonucleotide
ctacgcggtttgtattccataataccttgt

SEQ ID NO: 322152 - DNA, 30 bp, Artificial Sequence
  Synthetic oligonucleotide
agtgatcaaaactcgacgaggaggccttgt

SEQ ID NO: 322153 - DNA, 30 bp, Artificial Sequence
  Synthetic oligonucleotide
ggacaagacagttacacggtggggccttgt

SEQ ID NO: 322154 - DNA, 29 bp, Artificial Sequence
  Synthetic oligonucleotide
tgccgcgtgactctcacccgttgccttgt

SEQ ID NO: 322155 - DNA, 30 bp, Artificial Sequence
  Synthetic oligonucleotide
tcgatgattgccataggaactaatccttgt

SEQ ID NO: 322156 - DNA, 30 bp, Artificial Sequence
  Synthetic oligonucleotide
aacctgcgagtgtgcagtgtctgtccttgt

SEQ ID NO: 322157 - DNA, 30 bp, Artificial Sequence
  Synthetic oligonucleotide
caagcacgtattacctactgtaaagcttgt

SEQ ID NO: 322158 - DNA, 30 bp, Artificial Sequence
  Synthetic oligonucleotide
attttgtaatccgcgacgtgcgtagcttgt

SEQ ID NO: 322159 - DNA, 30 bp, Artificial Sequence
  Synthetic oligonucleotide
tttatgatggaacactagccgcacgcttgt

SEQ ID NO: 322160 - DNA, 30 bp, Artificial Sequence
  Synthetic oligonucleotide
tccaaagatctctctccacacacggcttgt

SEQ ID NO: 322161 - DNA, 30 bp, Artificial Sequence
  Synthetic oligonucleotide
ggataggtaggctcaccacaaggtgcttgt

SEQ ID NO: 322162 - DNA, 30 bp, Artificial Sequence
  Synthetic oligonucleotide
gatagagttatgttgattttatgtgcttgt

SEQ ID NO: 322163 - DNA, 30 bp, Artificial Sequence
  Synthetic oligonucleotide
gcaaacaaacgtactggtgctattgcttgt

SEQ ID NO: 322164 - DNA, 30 bp, Artificial Sequence
  Synthetic oligonucleotide
cccaccaccgagccaagcataaaatcttgt

SEQ ID NO: 322165 - DNA, 30 bp, Artificial Sequence
  Synthetic oligonucleotide
tataactcgaccaaccagggtcgctcttgt

SEQ ID NO: 322166 - DNA, 30 bp, Artificial Sequence
  Synthetic oligonucleotide
tgaccccgtcgcaggcagtacgggtcttgt

SEQ ID NO: 322167 - DNA, 30 bp, Artificial Sequence
  Synthetic oligonucleotide
ttgcacttaggttacacgggtgcaagttgt

SEQ ID NO: 322168 - DNA, 30 bp, Artificial Sequence
  Synthetic oligonucleotide
tgcagggaatacagacaacatttaagttgt

SEQ ID NO: 322169 - DNA, 30 bp, Artificial Sequence
  Synthetic oligonucleotide
gtagttattaagggtccgtgcgcgagttgt

SEQ ID NO: 322170 - DNA, 30 bp, Artificial Sequence
  Synthetic oligonucleotide
ggggacttcctgggctccaacactcgttgt

SEQ ID NO: 322171 - DNA, 30 bp, Artificial Sequence
  Synthetic oligonucleotide
caggtataacggcacacagatcgaggttgt

SEQ ID NO: 322172 - DNA, 30 bp, Artificial Sequence
  Synthetic oligonucleotide
ctggtcgggggttagcagggctacggttgt

SEQ ID NO: 322173 - DNA, 30 bp, Artificial Sequence
  Synthetic oligonucleotide
ttagtgtcatagactacagccctgggttgt

SEQ ID NO: 322174 - DNA, 30 bp, Artificial Sequence
  Synthetic oligonucleotide
tccgatatttttcagcgcacgcgtggttgt

SEQ ID NO: 322175 - DNA, 30 bp, Artificial Sequence
  Synthetic oligonucleotide
gtagattcatggggagtcgaaattggttgt

SEQ ID NO: 322176 - DNA, 30 bp, Artificial Sequence
  Synthetic oligonucleotide
tttccggtttcttaaattccgtggtgttgt

SEQ ID NO: 322177 - DNA, 30 bp, Artificial Sequence
  Synthetic oligonucleotide
cgggcgaaggggttcttagacgattgttgt

SEQ ID NO: 322178 - DNA, 30 bp, Artificial Sequence
  Synthetic oligonucleotide
gtatacggcgtagaaaggtcggattgttgt

SEQ ID NO: 322179 - DNA, 30 bp, Artificial Sequence
  Synthetic oligonucleotide
gtagtgcccgagaaatgctatcaaatttgt

SEQ ID NO: 322180 - DNA, 30 bp, Artificial Sequence
  Synthetic oligonucleotide
tctcggacgtggcgtcttgatggtatttgt

SEQ ID NO: 322181 - DNA, 30 bp, Artificial Sequence
  Synthetic oligonucleotide
ggcaattatccgtccacaaacctactttgt

SEQ ID NO: 322182 - DNA, 30 bp, Artificial Sequence
  Synthetic oligonucleotide
actcaaagcgttataagtacactgctttgt

SEQ ID NO: 322183 - DNA, 30 bp, Artificial Sequence
  Synthetic oligonucleotide
cccatatagcctgtaaaagcatctctttgt

SEQ ID NO: 322184 - DNA, 30 bp, Artificial Sequence
  Synthetic oligonucleotide
ttaatttatatgtcaggtgagtaagtttgt

SEQ ID NO: 322185 - DNA, 31 bp, Artificial Sequence
  Synthetic oligonucleotide
aaagacttgtcaacgtcatggcagagtttgt

SEQ ID NO: 322186 - DNA, 30 bp, Artificial Sequence
  Synthetic oligonucleotide
aagtcaattgtggattagggcggcgtttgt

SEQ ID NO: 322187 - DNA, 30 bp, Artificial Sequence
  Synthetic oligonucleotide
gcaagtctttaggatttagccgaggtttgt

SEQ ID NO: 322188 - DNA, 30 bp, Artificial Sequence
  Synthetic oligonucleotide
aacggctagactccaatacgtttggtttgt

SEQ ID NO: 322189 - DNA, 30 bp, Artificial Sequence
  Synthetic oligonucleotide
cttacaggcgagaatatacctgctgtttgt

SEQ ID NO: 322190 - DNA, 30 bp, Artificial Sequence
  Synthetic oligonucleotide
caggtataatcaatcttcagtcaattttgt

SEQ ID NO: 322191 - DNA, 30 bp, Artificial Sequence
  Synthetic oligonucleotide
gcgtctcgctcccgatttcgggcattttgt

SEQ ID NO: 322192 - DNA, 30 bp, Artificial Sequence
  Synthetic oligonucleotide
ttctgacattatgcaggagtcagattttgt

SEQ ID NO: 322193 - DNA, 30 bp, Artificial Sequence
  Synthetic oligonucleotide
tggagtgtcggaacagcagggggattttgt

SEQ ID NO: 322194 - DNA, 30 bp, Artificial Sequence
  Synthetic oligonucleotide
ggacgagtcacaatgtgacgccggttttgt

SEQ ID NO: 322195 - DNA, 30 bp, Artificial Sequence
  Synthetic oligonucleotide
agccagtataggcgagttacgtttttttgt

SEQ ID NO: 322196 - DNA, 30 bp, Artificial Sequence
  Synthetic oligonucleotide
ttagtacgactattaccggatagaaaaatt

SEQ ID NO: 322197 - DNA, 30 bp, Artificial Sequence
  Synthetic oligonucleotide
gaaagggctcgtattgtacggaacaaaatt

SEQ ID NO: 322198 - DNA, 30 bp, Artificial Sequence
  Synthetic oligonucleotide
tgctcctagccggctcagcccgccaaaatt

SEQ ID NO: 322199 - DNA, 30 bp, Artificial Sequence
  Synthetic oligonucleotide
tgacatattacggcttcgtataagaaaatt

SEQ ID NO: 322200 - DNA, 30 bp, Artificial Sequence
  Synthetic oligonucleotide
aacgtttctctaatgcacttcgagaaaatt

SEQ ID NO: 322201 - DNA, 30 bp, Artificial Sequence
  Synthetic oligonucleotide
tgatggaactaattctatcattagaaaatt

SEQ ID NO: 322202 - DNA, 30 bp, Artificial Sequence
  Synthetic oligonucleotide
tacagatcgagcatcgcatgctggaaaatt

SEQ ID NO: 322203 - DNA, 30 bp, Artificial Sequence
  Synthetic oligonucleotide
gcgagtctccggtgtttaacagataaaatt

SEQ ID NO: 322204 - DNA, 30 bp, Artificial Sequence
  Synthetic oligonucleotide
ttacttgtagatttggggccggctaaaatt

SEQ ID NO: 322205 - DNA, 30 bp, Artificial Sequence
  Synthetic oligonucleotide
ctcgaaggtgtgtcagtacacagtaaaatt

SEQ ID NO: 322206 - DNA, 30 bp, Artificial Sequence
  Synthetic oligonucleotide
atgatcccgtctaagtgtcgcggacaaatt

SEQ ID NO: 322207 - DNA, 30 bp, Artificial Sequence
  Synthetic oligonucleotide
ggggggacaacggtagccttcttacaaatt

SEQ ID NO: 322208 - DNA, 30 bp, Artificial Sequence
  Synthetic oligonucleotide
aaatacgtggttgaggtaagccaccaaatt

SEQ ID NO: 322209 - DNA, 30 bp, Artificial Sequence
  Synthetic oligonucleotide
ctactaaagccgtagtgtactatgcaaatt

SEQ ID NO: 322210 - DNA, 30 bp, Artificial Sequence
  Synthetic oligonucleotide
aatgcgggatctcaccaacccaatcaaatt

SEQ ID NO: 322211 - DNA, 30 bp, Artificial Sequence
  Synthetic oligonucleotide
tgtatagcgcatcaggccaaatctcaaatt

SEQ ID NO: 322212 - DNA, 30 bp, Artificial Sequence
  Synthetic oligonucleotide
gtaaacagtatagatccttactgtcaaatt

SEQ ID NO: 322213 - DNA, 30 bp, Artificial Sequence
  Synthetic oligonucleotide
cttatcatagttagggcatcagcagaaatt

SEQ ID NO: 322214 - DNA, 30 bp, Artificial Sequence
  Synthetic oligonucleotide
taggaaacgacacctcaggtatcagaaatt

SEQ ID NO: 322215 - DNA, 30 bp, Artificial Sequence
  Synthetic oligonucleotide
tcgattggctggtgtgggcattgagaaatt

SEQ ID NO: 322216 - DNA, 30 bp, Artificial Sequence
  Synthetic oligonucleotide
agtgtaactgtcgggcgctcatacgaaatt

SEQ ID NO: 322217 - DNA, 30 bp, Artificial Sequence
  Synthetic oligonucleotide
tgccaggacgtatgcgtgcgcaaggaaatt

SEQ ID NO: 322218 - DNA, 30 bp, Artificial Sequence
  Synthetic oligonucleotide
acgtaaataaaacattacgctgcggaaatt

SEQ ID NO: 322219 - DNA, 30 bp, Artificial Sequence
  Synthetic oligonucleotide
ttaatggttcagcaaagcgataggtaaatt

SEQ ID NO: 322220 - DNA, 30 bp, Artificial Sequence
  Synthetic oligonucleotide
gtgatgcatctacttcgtggagggtaaatt

SEQ ID NO: 322221 - DNA, 30 bp, Artificial Sequence
  Synthetic oligonucleotide
aatctacgaacagaaccactcacttaaatt

SEQ ID NO: 322222 - DNA, 30 bp, Artificial Sequence
  Synthetic oligonucleotide
tgaaaacgccatattctggatcgttaaatt

SEQ ID NO: 322223 - DNA, 30 bp, Artificial Sequence
  Synthetic oligonucleotide
ggctccaccaatgagcggagaacaacaatt

SEQ ID NO: 322224 - DNA, 30 bp, Artificial Sequence
  Synthetic oligonucleotide
gctgtctagtcaagcactccacgaacaatt

SEQ ID NO: 322225 - DNA, 30 bp, Artificial Sequence
  Synthetic oligonucleotide
gaaacgaatccccattaataatagacaatt

SEQ ID NO: 322226 - DNA, 30 bp, Artificial Sequence
  Synthetic oligonucleotide
ttatctagagacaatacctaaactacaatt

SEQ ID NO: 322227 - DNA, 30 bp, Artificial Sequence
  Synthetic oligonucleotide
aacgtgagaagtgtgtatcgacgtacaatt

SEQ ID NO: 322228 - DNA, 30 bp, Artificial Sequence
  Synthetic oligonucleotide
agtcaatgatgatcaacgtaggttacaatt

SEQ ID NO: 322229 - DNA, 30 bp, Artificial Sequence
  Synthetic oligonucleotide
ctcggctgtacgttacagaaaaggccaatt

SEQ ID NO: 322230 - DNA, 30 bp, Artificial Sequence
  Synthetic oligonucleotide
acaagttctgaaagccctcatcaagcaatt

SEQ ID NO: 322231 - DNA, 30 bp, Artificial Sequence
  Synthetic oligonucleotide
tctaggccaatccatatgctagcagcaatt

SEQ ID NO: 322232 - DNA, 30 bp, Artificial Sequence
  Synthetic oligonucleotide
tcttcggcacgtatccccatacgagcaatt

SEQ ID NO: 322233 - DNA, 30 bp, Artificial Sequence
  Synthetic oligonucleotide
tagggtattgcatcgttacaactagcaatt

SEQ ID NO: 322234 - DNA, 30 bp, Artificial Sequence
  Synthetic oligonucleotide
ggagtaagaataactccgtgggacgcaatt

SEQ ID NO: 322235 - DNA, 30 bp, Artificial Sequence
  Synthetic oligonucleotide
tttagaaaatggcacaaacttgaggcaatt

SEQ ID NO: 322236 - DNA, 30 bp, Artificial Sequence
  Synthetic oligonucleotide
tttaacccaagagattactcgggggcaatt

SEQ ID NO: 322237 - DNA, 30 bp, Artificial Sequence
  Synthetic oligonucleotide
gttgaagctgaataacacacctgggcaatt

SEQ ID NO: 322238 - DNA, 30 bp, Artificial Sequence
  Synthetic oligonucleotide
tctttctcgcacgagcttaggaatgcaatt

SEQ ID NO: 322239 - DNA, 30 bp, Artificial Sequence
  Synthetic oligonucleotide
tactagctgttgatcggcggatatgcaatt

SEQ ID NO: 322240 - DNA, 30 bp, Artificial Sequence
  Synthetic oligonucleotide
ctcttatctgagggagggggatctgcaatt

SEQ ID NO: 322241 - DNA, 30 bp, Artificial Sequence
  Synthetic oligonucleotide
tcaactgcgcacatgcatgcacaatcaatt

SEQ ID NO: 322242 - DNA, 30 bp, Artificial Sequence
  Synthetic oligonucleotide
ggaaatgtgtataaaatattagactcaatt

SEQ ID NO: 322243 - DNA, 30 bp, Artificial Sequence
  Synthetic oligonucleotide
aacgggagggacctgatttagtcctcaatt

SEQ ID NO: 322244 - DNA, 30 bp, Artificial Sequence
  Synthetic oligonucleotide
ctggatacggtcgtgacaaacaggtcaatt

SEQ ID NO: 322245 - DNA, 30 bp, Artificial Sequence
  Synthetic oligonucleotide
gggttaattcctttcgaatttcattcaatt

SEQ ID NO: 322246 - DNA, 30 bp, Artificial Sequence
  Synthetic oligonucleotide
gcttccggcaactcattgaaacgttcaatt

SEQ ID NO: 322247 - DNA, 30 bp, Artificial Sequence
  Synthetic oligonucleotide
agggatgggtcaccaaaacttatttcaatt

SEQ ID NO: 322248 - DNA, 30 bp, Artificial Sequence
  Synthetic oligonucleotide
ccctggtacaaccttgtatagttttcaatt

SEQ ID NO: 322249 - DNA, 30 bp, Artificial Sequence
  Synthetic oligonucleotide
tcgaatgtttgcatcaatggatacagaatt

SEQ ID NO: 322250 - DNA, 30 bp, Artificial Sequence
  Synthetic oligonucleotide
atcccccacaggattaaaccgagcagaatt

SEQ ID NO: 322251 - DNA, 30 bp, Artificial Sequence
  Synthetic oligonucleotide
agtgtgaccacatagtagagttgcagaatt

SEQ ID NO: 322252 - DNA, 30 bp, Artificial Sequence
  Synthetic oligonucleotide
actgtatgactagatgaaggtttcagaatt

SEQ ID NO: 322253 - DNA, 30 bp, Artificial Sequence
  Synthetic oligonucleotide
ccatatcttccattcggagagtggagaatt

SEQ ID NO: 322254 - DNA, 30 bp, Artificial Sequence
  Synthetic oligonucleotide
agtgaaccgttcgaaggatctcttagaatt

SEQ ID NO: 322255 - DNA, 30 bp, Artificial Sequence
  Synthetic oligonucleotide
gctgggctatatcgggcctggttccgaatt

SEQ ID NO: 322256 - DNA, 30 bp, Artificial Sequence
  Synthetic oligonucleotide
tttgggtcccttaatcgtcaaagaggaatt

SEQ ID NO: 322257 - DNA, 30 bp, Artificial Sequence
  Synthetic oligonucleotide
attttacattagtggaggtgcgagggaatt

SEQ ID NO: 322258 - DNA, 30 bp, Artificial Sequence
  Synthetic oligonucleotide
tgtatgcatcacgaggccctaaggggaatt

SEQ ID NO: 322259 - DNA, 30 bp, Artificial Sequence
  Synthetic oligonucleotide
gactatcggtgagcaatacccaggggaatt

SEQ ID NO: 322260 - DNA, 30 bp, Artificial Sequence
  Synthetic oligonucleotide
tggggtctgatggtccaacgtgggggaatt

SEQ ID NO: 322261 - DNA, 30 bp, Artificial Sequence
  Synthetic oligonucleotide
atcagtatcacgattcaagacttgggaatt

SEQ ID NO: 322262 - DNA, 30 bp, Artificial Sequence
  Synthetic oligonucleotide
gtgtaaatgcgggtcgcaggtcatggaatt

SEQ ID NO: 322263 - DNA, 30 bp, Artificial Sequence
  Synthetic oligonucleotide
tgaaatgaatcgcgagcgaatgcctgaatt

SEQ ID NO: 322264 - DNA, 30 bp, Artificial Sequence
  Synthetic oligonucleotide
tccttgtctactcaatacaagctctgaatt

SEQ ID NO: 322265 - DNA, 30 bp, Artificial Sequence
  Synthetic oligonucleotide
cggcctctaatagcatgtccgacgtgaatt

SEQ ID NO: 322266 - DNA, 30 bp, Artificial Sequence
  Synthetic oligonucleotide
accgtacctagaaattaaaaaaggtgaatt

SEQ ID NO: 322267 - DNA, 30 bp, Artificial Sequence
  Synthetic oligonucleotide
agagtgcgagtttttttaatgtattgaatt

SEQ ID NO: 322268 - DNA, 30 bp, Artificial Sequence
  Synthetic oligonucleotide
gccagtagttcgaaatttttcgcttgaatt

SEQ ID NO: 322269 - DNA, 30 bp, Artificial Sequence
  Synthetic oligonucleotide
gaagcaatggagccttgcaggcaaataatt

SEQ ID NO: 322270 - DNA, 30 bp, Artificial Sequence
  Synthetic oligonucleotide
gacaagtaaggcagatgaaatcgaataatt

SEQ ID NO: 322271 - DNA, 30 bp, Artificial Sequence
  Synthetic oligonucleotide
actcaaaacgagtatgggccttgaataatt

SEQ ID NO: 322272 - DNA, 30 bp, Artificial Sequence
  Synthetic oligonucleotide
tagcgcatgaaggtataatgatccataatt

SEQ ID NO: 322273 - DNA, 30 bp, Artificial Sequence
  Synthetic oligonucleotide
cctggtacgaactctcgaccaagcataatt

SEQ ID NO: 322274 - DNA, 30 bp, Artificial Sequence
  Synthetic oligonucleotide
tggaagctgcacagtgcagttggcataatt

SEQ ID NO: 322275 - DNA, 30 bp, Artificial Sequence
  Synthetic oligonucleotide
ggtccccgcgctgacaccccagagataatt

SEQ ID NO: 322276 - DNA, 30 bp, Artificial Sequence
  Synthetic oligonucleotide
ctcgttcaggtcaatgggcatccgataatt

SEQ ID NO: 322277 - DNA, 30 bp, Artificial Sequence
  Synthetic oligonucleotide
accctcgtcggaacgtgccgagcgataatt

SEQ ID NO: 322278 - DNA, 30 bp, Artificial Sequence
  Synthetic oligonucleotide
gtaagtgtccgttctttgtcaaggataatt

SEQ ID NO: 322279 - DNA, 30 bp, Artificial Sequence
  Synthetic oligonucleotide
tatcggctagtacagaagtaagatataatt

SEQ ID NO: 322280 - DNA, 30 bp, Artificial Sequence
  Synthetic oligonucleotide
gtttaagcaaagcgccaaactcgtataatt

SEQ ID NO: 322281 - DNA, 30 bp, Artificial Sequence
  Synthetic oligonucleotide
gatacgatgaggctatctcgaattataatt

SEQ ID NO: 322282 - DNA, 30 bp, Artificial Sequence
  Synthetic oligonucleotide
actatcagtggtgggtcactagttataatt

SEQ ID NO: 322283 - DNA, 30 bp, Artificial Sequence
  Synthetic oligonucleotide
gagtatttatatagttaatagtagctaatt

SEQ ID NO: 322284 - DNA, 30 bp, Artificial Sequence
  Synthetic oligonucleotide
gcggtccgtctgcctacatgcattctaatt

SEQ ID NO: 322285 - DNA, 30 bp, Artificial Sequence
  Synthetic oligonucleotide
gagagctgggaagtacttagtaccgtaatt

SEQ ID NO: 322286 - DNA, 30 bp, Artificial Sequence
  Synthetic oligonucleotide
atacaagattagcttcgatgggtcgtaatt

SEQ ID NO: 322287 - DNA, 30 bp, Artificial Sequence
  Synthetic oligonucleotide
cgggggaagatgggtcgaactcgggtaatt

SEQ ID NO: 322288 - DNA, 30 bp, Artificial Sequence
  Synthetic oligonucleotide
ggcggttggacgggagggcgttatgtaatt

SEQ ID NO: 322289 - DNA, 30 bp, Artificial Sequence
  Synthetic oligonucleotide
atagaaactagttcgtggtactaattaatt

SEQ ID NO: 322290 - DNA, 30 bp, Artificial Sequence
  Synthetic oligonucleotide
aagtaaaaatatatataacatttgttaatt

SEQ ID NO: 322291 - DNA, 30 bp, Artificial Sequence
  Synthetic oligonucleotide
gatgcgggccttggtaggttgcttttaatt

SEQ ID NO: 322292 - DNA, 30 bp, Artificial Sequence
  Synthetic oligonucleotide
gcttgatgcatgcgaattttatttttaatt

SEQ ID NO: 322293 - DNA, 30 bp, Artificial Sequence
  Synthetic oligonucleotide
cagttgcctgtcgaggtaggggaaaacatt

SEQ ID NO: 322294 - DNA, 30 bp, Artificial Sequence
  Synthetic oligonucleotide
gctataattcaaacgctagttcgaaacatt

SEQ ID NO: 322295 - DNA, 30 bp, Artificial Sequence
  Synthetic oligonucleotide
ttacacattgagtaaaaccggggaaacatt

SEQ ID NO: 322296 - DNA, 30 bp, Artificial Sequence
  Synthetic oligonucleotide
gtcgccgtacgatcgctgtctagcaacatt

SEQ ID NO: 322297 - DNA, 30 bp, Artificial Sequence
  Synthetic oligonucleotide
ggtgcgctgaccgtttcttggcgcaacatt

SEQ ID NO: 322298 - DNA, 30 bp, Artificial Sequence
  Synthetic oligonucleotide
cctcaacaatccccataggggtggaacatt

SEQ ID NO: 322299 - DNA, 30 bp, Artificial Sequence
  Synthetic oligonucleotide
aaggagataccaggcatagggtctaacatt

SEQ ID NO: 322300 - DNA, 30 bp, Artificial Sequence
  Synthetic oligonucleotide
tacacaaggctacagtcctgtgttaacatt

SEQ ID NO: 322301 - DNA, 30 bp, Artificial Sequence
  Synthetic oligonucleotide
aatgggggcgtactctagttgaaacacatt

SEQ ID NO: 322302 - DNA, 30 bp, Artificial Sequence
  Synthetic oligonucleotide
ccatagtgctcaaatcttattttccacatt

SEQ ID NO: 322303 - DNA, 30 bp, Artificial Sequence
  Synthetic oligonucleotide
aatacacagacttttccattgaagcacatt

SEQ ID NO: 322304 - DNA, 30 bp, Artificial Sequence
  Synthetic oligonucleotide
attcgtacactttcacggaaaacgcacatt

SEQ ID NO: 322305 - DNA, 30 bp, Artificial Sequence
  Synthetic oligonucleotide
tccctcatcatgaaaggcgggctgcacatt

SEQ ID NO: 322306 - DNA, 30 bp, Artificial Sequence
  Synthetic oligonucleotide
tagtagaagagagccaatgaggtgcacatt

SEQ ID NO: 322307 - DNA, 30 bp, Artificial Sequence
  Synthetic oligonucleotide
aatgggcggctttcaatgaaacatcacatt

SEQ ID NO: 322308 - DNA, 30 bp, Artificial Sequence
  Synthetic oligonucleotide
aaggataataatctttgtagtcgtcacatt

SEQ ID NO: 322309 - DNA, 30 bp, Artificial Sequence
  Synthetic oligonucleotide
atatcagatcgtggctacgccgcagacatt

SEQ ID NO: 322310 - DNA, 30 bp, Artificial Sequence
  Synthetic oligonucleotide
agagtacattaactcctcgcacacgacatt

SEQ ID NO: 322311 - DNA, 30 bp, Artificial Sequence
  Synthetic oligonucleotide
tagcatgtgaaacgctcaatgatggacatt

SEQ ID NO: 322312 - DNA, 30 bp, Artificial Sequence
  Synthetic oligonucleotide
agcttcttccgtcgttattaagttgacatt

SEQ ID NO: 322313 - DNA, 30 bp, Artificial Sequence
  Synthetic oligonucleotide
ataacagcacttacggtaatttcatacatt

SEQ ID NO: 322314 - DNA, 30 bp, Artificial Sequence
  Synthetic oligonucleotide
gccccgttgtgcacgatgcgcggatacatt

SEQ ID NO: 322315 - DNA, 30 bp, Artificial Sequence
  Synthetic oligonucleotide
ggaccaataccctctcaattcgcctacatt

SEQ ID NO: 322316 - DNA, 30 bp, Artificial Sequence
  Synthetic oligonucleotide
tatcgtcagatatgctgtaacagctacatt

SEQ ID NO: 322317 - DNA, 29 bp, Artificial Sequence
  Synthetic oligonucleotide
aaggagtgcgcttgtcgaatgagtacatt

SEQ ID NO: 322318 - DNA, 30 bp, Artificial Sequence
  Synthetic oligonucleotide
tgtccgagaccgtataaagaaaggtacatt

SEQ ID NO: 322319 - DNA, 30 bp, Artificial Sequence
  Synthetic oligonucleotide
cctaacatcttttcagaaaccaggtacatt

SEQ ID NO: 322320 - DNA, 30 bp, Artificial Sequence
  Synthetic oligonucleotide
cggcgctcgacgtaaccgaccagttacatt

SEQ ID NO: 322321 - DNA, 30 bp, Artificial Sequence
  Synthetic oligonucleotide
ataccgggacaaaacagtattaccaccatt

SEQ ID NO: 322322 - DNA, 30 bp, Artificial Sequence
  Synthetic oligonucleotide
ttaggtacatttgatggcatgtccaccatt

SEQ ID NO: 322323 - DNA, 31 bp, Artificial Sequence
  Synthetic oligonucleotide
tagtattgcgcgtcaggctcaagagaccatt

SEQ ID NO: 322324 - DNA, 30 bp, Artificial Sequence
  Synthetic oligonucleotide
ttggcaactgtggattatacgtggaccatt

SEQ ID NO: 322325 - DNA, 30 bp, Artificial Sequence
  Synthetic oligonucleotide
ttagtataacagtaaaggcctagtaccatt

SEQ ID NO: 322326 - DNA, 30 bp, Artificial Sequence
  Synthetic oligonucleotide
acaacggggtgggcgtaagcgcaacccatt

SEQ ID NO: 322327 - DNA, 30 bp, Artificial Sequence
  Synthetic oligonucleotide
gctttgggcaagtcagggggagcacccatt

SEQ ID NO: 322328 - DNA, 30 bp, Artificial Sequence
  Synthetic oligonucleotide
aaaccgaaatcaggtgggttgggacccatt

SEQ ID NO: 322329 - DNA, 30 bp, Artificial Sequence
  Synthetic oligonucleotide
atccttacagtgctaacacagaagcccatt

SEQ ID NO: 322330 - DNA, 30 bp, Artificial Sequence
  Synthetic oligonucleotide
agaagctatatgtgatccacgaggcccatt

SEQ ID NO: 322331 - DNA, 30 bp, Artificial Sequence
  Synthetic oligonucleotide
gctgctaactgactgttccataaagccatt

SEQ ID NO: 322332 - DNA, 29 bp, Artificial Sequence
  Synthetic oligonucleotide
actggattcattttctacgtgtagccatt

SEQ ID NO: 322333 - DNA, 30 bp, Artificial Sequence
  Synthetic oligonucleotide
tgatgaatgggctttaacaaccaggccatt

SEQ ID NO: 322334 - DNA, 30 bp, Artificial Sequence
  Synthetic oligonucleotide
attagagatgttacgatacccgtatccatt

SEQ ID NO: 322335 - DNA, 30 bp, Artificial Sequence
  Synthetic oligonucleotide
acacaatttcatacatgtaagacctccatt

SEQ ID NO: 322336 - DNA, 30 bp, Artificial Sequence
  Synthetic oligonucleotide
acataggggcgtcggcacagacggtccatt

SEQ ID NO: 322337 - DNA, 30 bp, Artificial Sequence
  Synthetic oligonucleotide
ctttcaaggagggtatttaaggtgtccatt

SEQ ID NO: 322338 - DNA, 30 bp, Artificial Sequence
  Synthetic oligonucleotide
aacatccagcagggtttttcagattccatt

SEQ ID NO: 322339 - DNA, 31 bp, Artificial Sequence
  Synthetic oligonucleotide
aaacaactatcagggccgtggtgaaagcatt

SEQ ID NO: 322340 - DNA, 30 bp, Artificial Sequence
  Synthetic oligonucleotide
gtgtcaatttataatctcaggccaagcatt

SEQ ID NO: 322341 - DNA, 30 bp, Artificial Sequence
  Synthetic oligonucleotide
gaagttggggtactcgccccaagtagcatt

SEQ ID NO: 322342 - DNA, 30 bp, Artificial Sequence
  Synthetic oligonucleotide
cacccccgaattggcgcgctataacgcatt

SEQ ID NO: 322343 - DNA, 30 bp, Artificial Sequence
  Synthetic oligonucleotide
aacaaatttagcgagagccacaatcgcatt

SEQ ID NO: 322344 - DNA, 30 bp, Artificial Sequence
  Synthetic oligonucleotide
agaaagttacagaaacccggtgaaggcatt

SEQ ID NO: 322345 - DNA, 30 bp, Artificial Sequence
  Synthetic oligonucleotide
aaagaatgtacttcctgcgctacaggcatt

SEQ ID NO: 322346 - DNA, 30 bp, Artificial Sequence
  Synthetic oligonucleotide
ttatcgacgtaaggactcttttcaggcatt

SEQ ID NO: 322347 - DNA, 30 bp, Artificial Sequence
  Synthetic oligonucleotide
aaaatcccgcgcgtctagcggcgaggcatt

SEQ ID NO: 322348 - DNA, 30 bp, Artificial Sequence
  Synthetic oligonucleotide
gaaagccggaaatcaacgtttataggcatt

SEQ ID NO: 322349 - DNA, 30 bp, Artificial Sequence
  Synthetic oligonucleotide
tctgagtaaaacatgtagctcaggggcatt

SEQ ID NO: 322350 - DNA, 30 bp, Artificial Sequence
  Synthetic oligonucleotide
gtcccatagacatctgactgatggggcatt

SEQ ID NO: 322351 - DNA, 30 bp, Artificial Sequence
  Synthetic oligonucleotide
ggtacccgaatagaaattttactgggcatt

SEQ ID NO: 322352 - DNA, 30 bp, Artificial Sequence
  Synthetic oligonucleotide
aaccagaggggtaacggcggcgttggcatt

SEQ ID NO: 322353 - DNA, 30 bp, Artificial Sequence
  Synthetic oligonucleotide
ctgggtacacaggtatacgtggaatgcatt

SEQ ID NO: 322354 - DNA, 30 bp, Artificial Sequence
  Synthetic oligonucleotide
aacgtatttttccagtctgggaactgcatt

SEQ ID NO: 322355 - DNA, 30 bp, Artificial Sequence
  Synthetic oligonucleotide
ttcagcacaggccagacgtggtactgcatt

SEQ ID NO: 322356 - DNA, 30 bp, Artificial Sequence
  Synthetic oligonucleotide
acagacagaaacctaagagtcttctgcatt

SEQ ID NO: 322357 - DNA, 29 bp, Artificial Sequence
  Synthetic oligonucleotide
attgggacattcggcttataaggtgcatt

SEQ ID NO: 322358 - DNA, 30 bp, Artificial Sequence
  Synthetic oligonucleotide
agttcgtagatggagggttgtctttgcatt

SEQ ID NO: 322359 - DNA, 30 bp, Artificial Sequence
  Synthetic oligonucleotide
ttctgaggttacgtaaaatttaccatcatt

SEQ ID NO: 322360 - DNA, 30 bp, Artificial Sequence
  Synthetic oligonucleotide
acaaatgaccatcgaaacacggccatcatt

SEQ ID NO: 322361 - DNA, 30 bp, Artificial Sequence
  Synthetic oligonucleotide
ggacataccagctaggtttatgagatcatt

SEQ ID NO: 322362 - DNA, 30 bp, Artificial Sequence
  Synthetic oligonucleotide
acgagagtcttgctcaaagggaggatcatt

SEQ ID NO: 322363 - DNA, 30 bp, Artificial Sequence
  Synthetic oligonucleotide
gatgtgaactagtgtttattaagactcatt

SEQ ID NO: 322364 - DNA, 30 bp, Artificial Sequence
  Synthetic oligonucleotide
cttactgacctacccgcctacatgctcatt

SEQ ID NO: 322365 - DNA, 30 bp, Artificial Sequence
  Synthetic oligonucleotide
gctcccatggcgctaggccgcggagtcatt

SEQ ID NO: 322366 - DNA, 30 bp, Artificial Sequence
  Synthetic oligonucleotide
gtattgctcatggtattaccggtagtcatt

SEQ ID NO: 322367 - DNA, 30 bp, Artificial Sequence
  Synthetic oligonucleotide
gacaagtttggaaccagatctatcgtcatt

SEQ ID NO: 322368 - DNA, 30 bp, Artificial Sequence
  Synthetic oligonucleotide
ttgaccgggtggtactttacttcggtcatt

SEQ ID NO: 322369 - DNA, 30 bp, Artificial Sequence
  Synthetic oligonucleotide
tcttttgaacagcactggatgcgggtcatt

SEQ ID NO: 322370 - DNA, 30 bp, Artificial Sequence
  Synthetic oligonucleotide
gacttatttctcgagtgtcagctggtcatt

SEQ ID NO: 322371 - DNA, 30 bp, Artificial Sequence
  Synthetic oligonucleotide
ggagagctcaggggtattactgtggtcatt

SEQ ID NO: 322372 - DNA, 30 bp, Artificial Sequence
  Synthetic oligonucleotide
tcacggaggaatgtagaaactgctgtcatt

SEQ ID NO: 322373 - DNA, 30 bp, Artificial Sequence
  Synthetic oligonucleotide
aagcctaaactgtaagggatacaattcatt

SEQ ID NO: 322374 - DNA, 30 bp, Artificial Sequence
  Synthetic oligonucleotide
gagggctagccacgcctaagggaattcatt

SEQ ID NO: 322375 - DNA, 30 bp, Artificial Sequence
  Synthetic oligonucleotide
tctcaggtttgttcactacgctgattcatt

SEQ ID NO: 322376 - DNA, 30 bp, Artificial Sequence
  Synthetic oligonucleotide
gcccgcggcattagccaggaccagttcatt

SEQ ID NO: 322377 - DNA, 30 bp, Artificial Sequence
  Synthetic oligonucleotide
ccgacaaagcagctacttgccacgttcatt

SEQ ID NO: 322378 - DNA, 30 bp, Artificial Sequence
  Synthetic oligonucleotide
gcttctttattattacacgtaccgttcatt

SEQ ID NO: 322379 - DNA, 30 bp, Artificial Sequence
  Synthetic oligonucleotide
cgcaagtgtttatttctctgcaggttcatt

SEQ ID NO: 322380 - DNA, 30 bp, Artificial Sequence
  Synthetic oligonucleotide
ggttagaggggcacatcggaagggttcatt

SEQ ID NO: 322381 - DNA, 30 bp, Artificial Sequence
  Synthetic oligonucleotide
ggggttgcatcctgaatttcatggttcatt

SEQ ID NO: 322382 - DNA, 30 bp, Artificial Sequence
  Synthetic oligonucleotide
gtgtgtttctcgttgccctgtgttttcatt

SEQ ID NO: 322383 - DNA, 30 bp, Artificial Sequence
  Synthetic oligonucleotide
gggtcactccgcccatatataaacaagatt

SEQ ID NO: 322384 - DNA, 30 bp, Artificial Sequence
  Synthetic oligonucleotide
agaacctgagattgttacgagttcaagatt

SEQ ID NO: 322385 - DNA, 30 bp, Artificial Sequence
  Synthetic oligonucleotide
acggactatgccatggttaataggaagatt

SEQ ID NO: 322386 - DNA, 30 bp, Artificial Sequence
  Synthetic oligonucleotide
caaaggaccagttgtcctgaccggaagatt

SEQ ID NO: 322387 - DNA, 30 bp, Artificial Sequence
  Synthetic oligonucleotide
aggaaacaaaagcccggactcgggaagatt

SEQ ID NO: 322388 - DNA, 30 bp, Artificial Sequence
  Synthetic oligonucleotide
tatataataggacttggcgttgtgaagatt

SEQ ID NO: 322389 - DNA, 30 bp, Artificial Sequence
  Synthetic oligonucleotide
aattgttcccgaatcgaaaagtctaagatt

SEQ ID NO: 322390 - DNA, 30 bp, Artificial Sequence
  Synthetic oligonucleotide
gtggttgaagtcttgcctgtaaaacagatt

SEQ ID NO: 322391 - DNA, 30 bp, Artificial Sequence
  Synthetic oligonucleotide
aaacattgtaaccattggtttaaacagatt

SEQ ID NO: 322392 - DNA, 30 bp, Artificial Sequence
  Synthetic oligonucleotide
agtgttagacacggggagggttggcagatt

SEQ ID NO: 322393 - DNA, 30 bp, Artificial Sequence
  Synthetic oligonucleotide
gtagtttgcgtaagaatacggtcagagatt

SEQ ID NO: 322394 - DNA, 30 bp, Artificial Sequence
  Synthetic oligonucleotide
gtcggttgtccacgtagggcacgcgagatt

SEQ ID NO: 322395 - DNA, 30 bp, Artificial Sequence
  Synthetic oligonucleotide
cccttttggccgatgggagtcttggagatt

SEQ ID NO: 322396 - DNA, 30 bp, Artificial Sequence
  Synthetic oligonucleotide
tcgcttttggaagcgtaaagcaatgagatt

SEQ ID NO: 322397 - DNA, 30 bp, Artificial Sequence
  Synthetic oligonucleotide
gtggagatatattgtgttggcgttgagatt

SEQ ID NO: 322398 - DNA, 30 bp, Artificial Sequence
  Synthetic oligonucleotide
gcaccgtagctgaggaatatacgatagatt

SEQ ID NO: 322399 - DNA, 30 bp, Artificial Sequence
  Synthetic oligonucleotide
cggcgctggggaaacgatagagtatagatt

SEQ ID NO: 322400 - DNA, 30 bp, Artificial Sequence
  Synthetic oligonucleotide
caagtcgatgtcttaaagcgcgggtagatt

SEQ ID NO: 322401 - DNA, 30 bp, Artificial Sequence
  Synthetic oligonucleotide
ggtaaatgtggcaaataaaggagttagatt

SEQ ID NO: 322402 - DNA, 30 bp, Artificial Sequence
  Synthetic oligonucleotide
gcgtctactctcaatacgagccgttagatt

SEQ ID NO: 322403 - DNA, 30 bp, Artificial Sequence
  Synthetic oligonucleotide
aagcataggtaattaccccttttttagatt

SEQ ID NO: 322404 - DNA, 30 bp, Artificial Sequence
  Synthetic oligonucleotide
gttcttcaaagaaccctgtaatcaacgatt

SEQ ID NO: 322405 - DNA, 30 bp, Artificial Sequence
  Synthetic oligonucleotide
agttgctgcaattgggcctgatgaacgatt

SEQ ID NO: 322406 - DNA, 30 bp, Artificial Sequence
  Synthetic oligonucleotide
caaactaatcaggaacgatgacacacgatt

SEQ ID NO: 322407 - DNA, 30 bp, Artificial Sequence
  Synthetic oligonucleotide
gactaaatctactatttcagggccacgatt

SEQ ID NO: 322408 - DNA, 30 bp, Artificial Sequence
  Synthetic oligonucleotide
taaccgtctggaaagggcactcgcacgatt

SEQ ID NO: 322409 - DNA, 30 bp, Artificial Sequence
  Synthetic oligonucleotide
aagcacgaggtaatcccgatttcgacgatt

SEQ ID NO: 322410 - DNA, 30 bp, Artificial Sequence
  Synthetic oligonucleotide
tacatgtatgacggaagtaatttgacgatt

SEQ ID NO: 322411 - DNA, 30 bp, Artificial Sequence
  Synthetic oligonucleotide
ggaccccctggatgagttcgctatacgatt

SEQ ID NO: 322412 - DNA, 30 bp, Artificial Sequence
  Synthetic oligonucleotide
cgtacttgcgcctcctgagaccgtacgatt

SEQ ID NO: 322413 - DNA, 30 bp, Artificial Sequence
  Synthetic oligonucleotide
atgcgagtgacgagggtgttagttacgatt

SEQ ID NO: 322414 - DNA, 30 bp, Artificial Sequence
  Synthetic oligonucleotide
agtagtgagatataggtattcgacccgatt

SEQ ID NO: 322415 - DNA, 30 bp, Artificial Sequence
  Synthetic oligonucleotide
gtgtatgagggtatttacttgctcccgatt

SEQ ID NO: 322416 - DNA, 30 bp, Artificial Sequence
  Synthetic oligonucleotide
aaccattcttaaaatgctgatctcccgatt

SEQ ID NO: 322417 - DNA, 30 bp, Artificial Sequence
  Synthetic oligonucleotide
gcgtctgggggtaccccggacgtcccgatt

SEQ ID NO: 322418 - DNA, 30 bp, Artificial Sequence
  Synthetic oligonucleotide
tcagcatagagggtgtctctgtagccgatt

SEQ ID NO: 322419 - DNA, 31 bp, Artificial Sequence
  Synthetic oligonucleotide
agactgctgcgaagtacaaactaggccgatt

SEQ ID NO: 322420 - DNA, 30 bp, Artificial Sequence
  Synthetic oligonucleotide
ggatcaagatcgaccgtatgactgccgatt

SEQ ID NO: 322421 - DNA, 30 bp, Artificial Sequence
  Synthetic oligonucleotide
ggcctagtcgcgcatggccgaattccgatt

SEQ ID NO: 322422 - DNA, 30 bp, Artificial Sequence
  Synthetic oligonucleotide
ccgcagtcgtcttaacaatcggttccgatt

SEQ ID NO: 322423 - DNA, 30 bp, Artificial Sequence
  Synthetic oligonucleotide
atcgtatgttgcaggaagcatcaagcgatt

SEQ ID NO: 322424 - DNA, 30 bp, Artificial Sequence
  Synthetic oligonucleotide
gcaaaacggggcacccttaaataggcgatt

SEQ ID NO: 322425 - DNA, 30 bp, Artificial Sequence
  Synthetic oligonucleotide
cgttattgggaagctgggaaaaatgcgatt

SEQ ID NO: 322426 - DNA, 30 bp, Artificial Sequence
  Synthetic oligonucleotide
accgtgtaaggtgatttgattggtgcgatt

SEQ ID NO: 322427 - DNA, 30 bp, Artificial Sequence
  Synthetic oligonucleotide
tgtaacatatgacctggaagtcaatcgatt

SEQ ID NO: 322428 - DNA, 30 bp, Artificial Sequence
  Synthetic oligonucleotide
acgagtatatacgaaagcggttaatcgatt

SEQ ID NO: 322429 - DNA, 30 bp, Artificial Sequence
  Synthetic oligonucleotide
gtattggaatgggcctccttacgatcgatt

SEQ ID NO: 322430 - DNA, 30 bp, Artificial Sequence
  Synthetic oligonucleotide
atgaatgtaggataaactctaatatcgatt

SEQ ID NO: 322431 - DNA, 30 bp, Artificial Sequence
  Synthetic oligonucleotide
atggacggtggaaaccccgttctctcgatt

SEQ ID NO: 322432 - DNA, 30 bp, Artificial Sequence
  Synthetic oligonucleotide
gttgtgcatagagcgtcacgacattcgatt

SEQ ID NO: 322433 - DNA, 30 bp, Artificial Sequence
  Synthetic oligonucleotide
agatccgtacgtaagaagcctgtttcgatt

SEQ ID NO: 322434 - DNA, 30 bp, Artificial Sequence
  Synthetic oligonucleotide
tgaattgcacggctcaaagcgttttcgatt

SEQ ID NO: 322435 - DNA, 30 bp, Artificial Sequence
  Synthetic oligonucleotide
caccggctataatggtgtagggcaaggatt

SEQ ID NO: 322436 - DNA, 31 bp, Artificial Sequence
  Synthetic oligonucleotide
atcgcaggcaaaactcactacaagaaggatt

SEQ ID NO: 322437 - DNA, 30 bp, Artificial Sequence
  Synthetic oligonucleotide
gtcaaccatggtgcccgacgcctaaggatt

SEQ ID NO: 322438 - DNA, 30 bp, Artificial Sequence
  Synthetic oligonucleotide
tgactcacggtttgccccgactccaggatt

SEQ ID NO: 322439 - DNA, 30 bp, Artificial Sequence
  Synthetic oligonucleotide
gggataagggggtgcggaaagtagaggatt

SEQ ID NO: 322440 - DNA, 30 bp, Artificial Sequence
  Synthetic oligonucleotide
tgtacaaacgctgaacgactcacgaggatt

SEQ ID NO: 322441 - DNA, 30 bp, Artificial Sequence
  Synthetic oligonucleotide
tggacgaagtctattgtgcataggaggatt

SEQ ID NO: 322442 - DNA, 30 bp, Artificial Sequence
  Synthetic oligonucleotide
gcctgctagctttcgtcttataggaggatt

SEQ ID NO: 322443 - DNA, 30 bp, Artificial Sequence
  Synthetic oligonucleotide
ttggagctccatcatcccaggattaggatt

SEQ ID NO: 322444 - DNA, 30 bp, Artificial Sequence
  Synthetic oligonucleotide
gtgccggcaaaataagaattgtttaggatt

SEQ ID NO: 322445 - DNA, 30 bp, Artificial Sequence
  Synthetic oligonucleotide
gaatggcacgtcacaccggcacaacggatt

SEQ ID NO: 322446 - DNA, 30 bp, Artificial Sequence
  Synthetic oligonucleotide
cttctcgataattacgagcctgcccggatt

SEQ ID NO: 322447 - DNA, 30 bp, Artificial Sequence
  Synthetic oligonucleotide
gaaagggtaaggtaaggcatttggcggatt

SEQ ID NO: 322448 - DNA, 30 bp, Artificial Sequence
  Synthetic oligonucleotide
cggactccggcagatgtgcttcgtcggatt

SEQ ID NO: 322449 - DNA, 30 bp, Artificial Sequence
  Synthetic oligonucleotide
gatcgtgggagtaccgcagtaccagggatt

SEQ ID NO: 322450 - DNA, 30 bp, Artificial Sequence
  Synthetic oligonucleotide
agcaattagaatatcctccaatgagggatt

SEQ ID NO: 322451 - DNA, 30 bp, Artificial Sequence
  Synthetic oligonucleotide
tcttgctcggtatgtccgcctatagggatt

SEQ ID NO: 322452 - DNA, 30 bp, Artificial Sequence
  Synthetic oligonucleotide
aggccgcatattccatgccttctagggatt

SEQ ID NO: 322453 - DNA, 30 bp, Artificial Sequence
  Synthetic oligonucleotide
aacgggccttgaaacgccgggcgcgggatt

SEQ ID NO: 322454 - DNA, 30 bp, Artificial Sequence
  Synthetic oligonucleotide
taatcaaacgtgtatagcgcttgcgggatt

SEQ ID NO: 322455 - DNA, 30 bp, Artificial Sequence
  Synthetic oligonucleotide
gaccgaaggttcgcacattgtatcgggatt

SEQ ID NO: 322456 - DNA, 30 bp, Artificial Sequence
  Synthetic oligonucleotide
gcttagctaaaaaggacgcatgatgggatt

SEQ ID NO: 322457 - DNA, 30 bp, Artificial Sequence
  Synthetic oligonucleotide
ggcgtcgttatcgtaccttcatctgggatt

SEQ ID NO: 322458 - DNA, 30 bp, Artificial Sequence
  Synthetic oligonucleotide
tatgggttttgggtttgcccaagtgggatt

SEQ ID NO: 322459 - DNA, 30 bp, Artificial Sequence
  Synthetic oligonucleotide
taaaggagagcaccttttgttgttgggatt

SEQ ID NO: 322460 - DNA, 30 bp, Artificial Sequence
  Synthetic oligonucleotide
tatgaggctgcgttacgaaaataatggatt

SEQ ID NO: 322461 - DNA, 30 bp, Artificial Sequence
  Synthetic oligonucleotide
gacaaggcagcaaagctagggagatggatt

SEQ ID NO: 322462 - DNA, 30 bp, Artificial Sequence
  Synthetic oligonucleotide
agattgatatattgaatcagccgctggatt

SEQ ID NO: 322463 - DNA, 30 bp, Artificial Sequence
  Synthetic oligonucleotide
tagtttgcgtggtcaagtcacacgtggatt

SEQ ID NO: 322464 - DNA, 30 bp, Artificial Sequence
  Synthetic oligonucleotide
cacttactgagccacagccagccgtggatt

SEQ ID NO: 322465 - DNA, 30 bp, Artificial Sequence
  Synthetic oligonucleotide
ccttggacgctagggcaaatgcattggatt

SEQ ID NO: 322466 - DNA, 30 bp, Artificial Sequence
  Synthetic oligonucleotide
ccaggaggtctgatagcaccgtgttggatt

SEQ ID NO: 322467 - DNA, 30 bp, Artificial Sequence
  Synthetic oligonucleotide
ggactgggggatcgccggcaaaaaatgatt

SEQ ID NO: 322468 - DNA, 30 bp, Artificial Sequence
  Synthetic oligonucleotide
gaactcacttggagtggacaacaaatgatt

SEQ ID NO: 322469 - DNA, 30 bp, Artificial Sequence
  Synthetic oligonucleotide
ggcgcggatccgtctggcggttaaatgatt

SEQ ID NO: 322470 - DNA, 30 bp, Artificial Sequence
  Synthetic oligonucleotide
agacaggttctccaagcgaagagaatgatt

SEQ ID NO: 322471 - DNA, 30 bp, Artificial Sequence
  Synthetic oligonucleotide
ctcgaaaaagtaacaatccgggacatgatt

SEQ ID NO: 322472 - DNA, 30 bp, Artificial Sequence
  Synthetic oligonucleotide
tcttcaacaggtctggtaataccgatgatt

SEQ ID NO: 322473 - DNA, 30 bp, Artificial Sequence
  Synthetic oligonucleotide
aaaagagaaagaatctgtgctcggatgatt

SEQ ID NO: 322474 - DNA, 30 bp, Artificial Sequence
  Synthetic oligonucleotide
aactgtccgagcatcattcctcatatgatt

SEQ ID NO: 322475 - DNA, 30 bp, Artificial Sequence
  Synthetic oligonucleotide
catcacgcggtaacgcggcgacttatgatt

SEQ ID NO: 322476 - DNA, 30 bp, Artificial Sequence
  Synthetic oligonucleotide
ctttagtcgcgaaggatagaagaactgatt

SEQ ID NO: 322477 - DNA, 30 bp, Artificial Sequence
  Synthetic oligonucleotide
ataggtatagccctacccagagtactgatt

SEQ ID NO: 322478 - DNA, 30 bp, Artificial Sequence
  Synthetic oligonucleotide
tttcaatgcctacggaaaacccggctgatt

SEQ ID NO: 322479 - DNA, 30 bp, Artificial Sequence
  Synthetic oligonucleotide
gggagatacgactgtgcggcgtggctgatt

SEQ ID NO: 322480 - DNA, 30 bp, Artificial Sequence
  Synthetic oligonucleotide
cccgtggaagttgcgttgtgtcacgtgatt

SEQ ID NO: 322481 - DNA, 30 bp, Artificial Sequence
  Synthetic oligonucleotide
tgtttggatcgggggcaagccctcgtgatt

SEQ ID NO: 322482 - DNA, 30 bp, Artificial Sequence
  Synthetic oligonucleotide
agtagtgttgtctacgtgggatcggtgatt

SEQ ID NO: 322483 - DNA, 30 bp, Artificial Sequence
  Synthetic oligonucleotide
ccaactacattgcagctagatggtgtgatt

SEQ ID NO: 322484 - DNA, 30 bp, Artificial Sequence
  Synthetic oligonucleotide
aagaaaggtttttattgtatgtgtgtgatt

SEQ ID NO: 322485 - DNA, 30 bp, Artificial Sequence
  Synthetic oligonucleotide
ttacgaagtattcgtcaaatgtgattgatt

SEQ ID NO: 322486 - DNA, 30 bp, Artificial Sequence
  Synthetic oligonucleotide
gtcttggatacaacgtgcataagcttgatt

SEQ ID NO: 322487 - DNA, 30 bp, Artificial Sequence
  Synthetic oligonucleotide
gcctgtgggatattagccgtgaatttgatt

SEQ ID NO: 322488 - DNA, 30 bp, Artificial Sequence
  Synthetic oligonucleotide
actgcgtatgacgggtatgattttttgatt

SEQ ID NO: 322489 - DNA, 30 bp, Artificial Sequence
  Synthetic oligonucleotide
gcccggaagattaccgcttagaaaaatatt

SEQ ID NO: 322490 - DNA, 30 bp, Artificial Sequence
  Synthetic oligonucleotide
tcacacaactcatcttgcctgcgcaatatt

SEQ ID NO: 322491 - DNA, 30 bp, Artificial Sequence
  Synthetic oligonucleotide
gtagttcgccaaccaagccgttcgaatatt

SEQ ID NO: 322492 - DNA, 30 bp, Artificial Sequence
  Synthetic oligonucleotide
atgacgagttcgcttctgttaatgaatatt

SEQ ID NO: 322493 - DNA, 30 bp, Artificial Sequence
  Synthetic oligonucleotide
accgctcctgatcggttgatggataatatt

SEQ ID NO: 322494 - DNA, 30 bp, Artificial Sequence
  Synthetic oligonucleotide
acgcggtgtgcggtgtaagttgataatatt

SEQ ID NO: 322495 - DNA, 30 bp, Artificial Sequence
  Synthetic oligonucleotide
ctggtcttgacaccttagtatgctaatatt

SEQ ID NO: 322496 - DNA, 30 bp, Artificial Sequence
  Synthetic oligonucleotide
tgtaatgtctgtgtgagtagttgtaatatt

SEQ ID NO: 322497 - DNA, 30 bp, Artificial Sequence
  Synthetic oligonucleotide
aagatgaagaccagaatatgtaaacatatt

SEQ ID NO: 322498 - DNA, 30 bp, Artificial Sequence
  Synthetic oligonucleotide
atattagtgccacggtacagaagacatatt

SEQ ID NO: 322499 - DNA, 30 bp, Artificial Sequence
  Synthetic oligonucleotide
tgttaagagacggacataataatacatatt

SEQ ID NO: 322500 - DNA, 30 bp, Artificial Sequence
  Synthetic oligonucleotide
gtgtagacttcttagagggcggtacatatt

SEQ ID NO: 322501 - DNA, 30 bp, Artificial Sequence
  Synthetic oligonucleotide
gcacctgagttgaatcgaccaccccatatt

SEQ ID NO: 322502 - DNA, 30 bp, Artificial Sequence
  Synthetic oligonucleotide
tctatgctccgtaataaaacattccatatt

SEQ ID NO: 322503 - DNA, 30 bp, Artificial Sequence
  Synthetic oligonucleotide
catagaccaaaggatgactgaatgcatatt

SEQ ID NO: 322504 - DNA, 30 bp, Artificial Sequence
  Synthetic oligonucleotide
tgactacagttctctcttaatatgcatatt

SEQ ID NO: 322505 - DNA, 30 bp, Artificial Sequence
  Synthetic oligonucleotide
ctaggtccaaaggaacccctaggtcatatt

SEQ ID NO: 322506 - DNA, 31 bp, Artificial Sequence
  Synthetic oligonucleotide
tcatcttaccggggaaggaccgcaagatatt

SEQ ID NO: 322507 - DNA, 30 bp, Artificial Sequence
  Synthetic oligonucleotide
ggctgaggcaattccttcggagcggatatt

SEQ ID NO: 322508 - DNA, 30 bp, Artificial Sequence
  Synthetic oligonucleotide
cgacctttacaaataagcacatgggatatt

SEQ ID NO: 322509 - DNA, 30 bp, Artificial Sequence
  Synthetic oligonucleotide
tccgccgagttgcgtttcgtaatggatatt

SEQ ID NO: 322510 - DNA, 30 bp, Artificial Sequence
  Synthetic oligonucleotide
caggaaggttatccaggataacgtgatatt

SEQ ID NO: 322511 - DNA, 30 bp, Artificial Sequence
  Synthetic oligonucleotide
tcaaaattggccagagcaagtaaatatatt

SEQ ID NO: 322512 - DNA, 30 bp, Artificial Sequence
  Synthetic oligonucleotide
gagaatgcaactagcaggaaaagatatatt

SEQ ID NO: 322513 - DNA, 30 bp, Artificial Sequence
  Synthetic oligonucleotide
gaaccaaggtctaaagattgatgatatatt

SEQ ID NO: 322514 - DNA, 30 bp, Artificial Sequence
  Synthetic oligonucleotide
acaaataataccaagggaacagtatatatt

SEQ ID NO: 322515 - DNA, 30 bp, Artificial Sequence
  Synthetic oligonucleotide
acatgaccgtcaactccgcagttatatatt

SEQ ID NO: 322516 - DNA, 30 bp, Artificial Sequence
  Synthetic oligonucleotide
tcttcatcctgcgagagttttcactatatt

SEQ ID NO: 322517 - DNA, 30 bp, Artificial Sequence
  Synthetic oligonucleotide
acggggtctggaggaaccctaccctatatt

SEQ ID NO: 322518 - DNA, 30 bp, Artificial Sequence
  Synthetic oligonucleotide
gtccttttatcggtatctgggagctatatt

SEQ ID NO: 322519 - DNA, 30 bp, Artificial Sequence
  Synthetic oligonucleotide
ttaggacgcgcaatcctggtgtggtatatt

SEQ ID NO: 322520 - DNA, 30 bp, Artificial Sequence
  Synthetic oligonucleotide
ctgcaagtgctgggtctaatcttgtatatt

SEQ ID NO: 322521 - DNA, 30 bp, Artificial Sequence
  Synthetic oligonucleotide
tagggtagggtctaagccatatcttatatt

SEQ ID NO: 322522 - DNA, 30 bp, Artificial Sequence
  Synthetic oligonucleotide
ggctcctggattagagacggtatttatatt

SEQ ID NO: 322523 - DNA, 30 bp, Artificial Sequence
  Synthetic oligonucleotide
cataatctcgccaggaatggactttatatt

SEQ ID NO: 322524 - DNA, 30 bp, Artificial Sequence
  Synthetic oligonucleotide
cacgtacaaacgccccacatgcgaactatt

SEQ ID NO: 322525 - DNA, 30 bp, Artificial Sequence
  Synthetic oligonucleotide
tcttgggaaagcaagataaaaggaactatt

SEQ ID NO: 322526 - DNA, 30 bp, Artificial Sequence
  Synthetic oligonucleotide
gtcgataacaagggacagggcataactatt

SEQ ID NO: 322527 - DNA, 30 bp, Artificial Sequence
  Synthetic oligonucleotide
cacggcaagctaagttaatagcccactatt

SEQ ID NO: 322528 - DNA, 30 bp, Artificial Sequence
  Synthetic oligonucleotide
gatggacagcaaagactacgtttcactatt

SEQ ID NO: 322529 - DNA, 30 bp, Artificial Sequence
  Synthetic oligonucleotide
gggttcccggacacgaaaccgaggactatt

SEQ ID NO: 322530 - DNA, 30 bp, Artificial Sequence
  Synthetic oligonucleotide
aggcaggcgggtagccatctaatgactatt

SEQ ID NO: 322531 - DNA, 30 bp, Artificial Sequence
  Synthetic oligonucleotide
aaagctcggatatgaggaagcattactatt

SEQ ID NO: 322532 - DNA, 30 bp, Artificial Sequence
  Synthetic oligonucleotide
atgcatactaggcttctagcctaacctatt

SEQ ID NO: 322533 - DNA, 30 bp, Artificial Sequence
  Synthetic oligonucleotide
atctgtcccgtgcgcaggttcaagcctatt

SEQ ID NO: 322534 - DNA, 30 bp, Artificial Sequence
  Synthetic oligonucleotide
ctgccagtatcgctctcatgccggcctatt

SEQ ID NO: 322535 - DNA, 30 bp, Artificial Sequence
  Synthetic oligonucleotide
acgtgatgcagttacctataaaaagctatt

SEQ ID NO: 322536 - DNA, 30 bp, Artificial Sequence
  Synthetic oligonucleotide
aatggcaagggcgtctgaaagaacgctatt

SEQ ID NO: 322537 - DNA, 30 bp, Artificial Sequence
  Synthetic oligonucleotide
cacgtgctcggtggtgagagttcggctatt

SEQ ID NO: 322538 - DNA, 30 bp, Artificial Sequence
  Synthetic oligonucleotide
cgtgcccgcatgcattcttcgttggctatt

SEQ ID NO: 322539 - DNA, 30 bp, Artificial Sequence
  Synthetic oligonucleotide
agcgctgtcgtgcgctgttactaaagtatt

SEQ ID NO: 322540 - DNA, 30 bp, Artificial Sequence
  Synthetic oligonucleotide
tttgcgcccggccatgtagggataagtatt

SEQ ID NO: 322541 - DNA, 30 bp, Artificial Sequence
  Synthetic oligonucleotide
ggggcttgtaattttagtgcactaagtatt

SEQ ID NO: 322542 - DNA, 30 bp, Artificial Sequence
  Synthetic oligonucleotide
ttgaataagggataatatgacgacagtatt

SEQ ID NO: 322543 - DNA, 30 bp, Artificial Sequence
  Synthetic oligonucleotide
tttattacataacgtactaaaaggagtatt

SEQ ID NO: 322544 - DNA, 30 bp, Artificial Sequence
  Synthetic oligonucleotide
tacgccatatgcttaacggcacggagtatt

SEQ ID NO: 322545 - DNA, 30 bp, Artificial Sequence
  Synthetic oligonucleotide
gaagccgcaatcgcgacgcgcgggagtatt

SEQ ID NO: 322546 - DNA, 30 bp, Artificial Sequence
  Synthetic oligonucleotide
gggctacatgccatgggttaggggagtatt

SEQ ID NO: 322547 - DNA, 30 bp, Artificial Sequence
  Synthetic oligonucleotide
ccgggccgtggggctttgtcatctagtatt

SEQ ID NO: 322548 - DNA, 30 bp, Artificial Sequence
  Synthetic oligonucleotide
catgaacatcatatgaatggctttagtatt

SEQ ID NO: 322549 - DNA, 30 bp, Artificial Sequence
  Synthetic oligonucleotide
acggttattggaagcaccacgaaacgtatt

SEQ ID NO: 322550 - DNA, 30 bp, Artificial Sequence
  Synthetic oligonucleotide
gactgcaaactcgaccttatttaacgtatt

SEQ ID NO: 322551 - DNA, 30 bp, Artificial Sequence
  Synthetic oligonucleotide
ggataataagaattccgtgggcgacgtatt

SEQ ID NO: 322552 - DNA, 30 bp, Artificial Sequence
  Synthetic oligonucleotide
attgacgtatgggcagcaggtgtacgtatt

SEQ ID NO: 322553 - DNA, 30 bp, Artificial Sequence
  Synthetic oligonucleotide
agtcctataaacaaaacttcgacccgtatt

SEQ ID NO: 322554 - DNA, 30 bp, Artificial Sequence
  Synthetic oligonucleotide
ggggtggacgttaggagtattgcgcgtatt

SEQ ID NO: 322555 - DNA, 30 bp, Artificial Sequence
  Synthetic oligonucleotide
ataggcagtaaaagccctgactcgcgtatt

SEQ ID NO: 322556 - DNA, 30 bp, Artificial Sequence
  Synthetic oligonucleotide
gcaaccataatttagaattactcgcgtatt

SEQ ID NO: 322557 - DNA, 30 bp, Artificial Sequence
  Synthetic oligonucleotide
tgcagtacgctgaacgatattgtgcgtatt

SEQ ID NO: 322558 - DNA, 30 bp, Artificial Sequence
  Synthetic oligonucleotide
aacatacttgtcttaatctgtaatcgtatt

SEQ ID NO: 322559 - DNA, 30 bp, Artificial Sequence
  Synthetic oligonucleotide
tatcgcatttagacactgtgagatcgtatt

SEQ ID NO: 322560 - DNA, 30 bp, Artificial Sequence
  Synthetic oligonucleotide
gggcatgacactcgggtagggagaggtatt

SEQ ID NO: 322561 - DNA, 30 bp, Artificial Sequence
  Synthetic oligonucleotide
gacgctccgacggcctcacaccgcggtatt

SEQ ID NO: 322562 - DNA, 30 bp, Artificial Sequence
  Synthetic oligonucleotide
agtgaatcagtaagtaaccacttcggtatt

SEQ ID NO: 322563 - DNA, 30 bp, Artificial Sequence
  Synthetic oligonucleotide
cataatagggtggctacagttaggggtatt

SEQ ID NO: 322564 - DNA, 30 bp, Artificial Sequence
  Synthetic oligonucleotide
taccttcacacctggcgatgcggtggtatt

SEQ ID NO: 322565 - DNA, 30 bp, Artificial Sequence
  Synthetic oligonucleotide
tccgaaccgatctaatgtggataatgtatt

SEQ ID NO: 322566 - DNA, 30 bp, Artificial Sequence
  Synthetic oligonucleotide
gtaaggttagcagttggccgttaatgtatt

SEQ ID NO: 322567 - DNA, 30 bp, Artificial Sequence
  Synthetic oligonucleotide
gcgacaagcggaacggtggtactatgtatt

SEQ ID NO: 322568 - DNA, 30 bp, Artificial Sequence
  Synthetic oligonucleotide
agcaagtcaatcaaggcccgcttctgtatt

SEQ ID NO: 322569 - DNA, 30 bp, Artificial Sequence
  Synthetic oligonucleotide
ctcggaggagatacgatcttgttctgtatt

SEQ ID NO: 322570 - DNA, 30 bp, Artificial Sequence
  Synthetic oligonucleotide
cacacgctcttctacgagtactagtgtatt

SEQ ID NO: 322571 - DNA, 30 bp, Artificial Sequence
  Synthetic oligonucleotide
acgtaggtagcaatttcgtgctcgtgtatt

SEQ ID NO: 322572 - DNA, 30 bp, Artificial Sequence
  Synthetic oligonucleotide
gaaacacacgacttcggaaataggtgtatt

SEQ ID NO: 322573 - DNA, 30 bp, Artificial Sequence
  Synthetic oligonucleotide
taactttaggtatgcccagatttgtgtatt

SEQ ID NO: 322574 - DNA, 30 bp, Artificial Sequence
  Synthetic oligonucleotide
actcggcatgtgtatcattagtattgtatt

SEQ ID NO: 322575 - DNA, 30 bp, Artificial Sequence
  Synthetic oligonucleotide
agaatgagacgttggcagactagttgtatt

SEQ ID NO: 322576 - DNA, 30 bp, Artificial Sequence
  Synthetic oligonucleotide
aagctaattacccctatacctagttgtatt

SEQ ID NO: 322577 - DNA, 30 bp, Artificial Sequence
  Synthetic oligonucleotide
gcgtagcgatgggcgcagtagatttgtatt

SEQ ID NO: 322578 - DNA, 30 bp, Artificial Sequence
  Synthetic oligonucleotide
cacatagccccgccattatccaagattatt

SEQ ID NO: 322579 - DNA, 30 bp, Artificial Sequence
  Synthetic oligonucleotide
acaaaacttggtaggggaggcactattatt

SEQ ID NO: 322580 - DNA, 30 bp, Artificial Sequence
  Synthetic oligonucleotide
catataactgtttcccttgagactattatt

SEQ ID NO: 322581 - DNA, 30 bp, Artificial Sequence
  Synthetic oligonucleotide
agggacgcaataataatcgagtgtattatt

SEQ ID NO: 322582 - DNA, 30 bp, Artificial Sequence
  Synthetic oligonucleotide
ttggggctctggtcccggcacaaacttatt

SEQ ID NO: 322583 - DNA, 30 bp, Artificial Sequence
  Synthetic oligonucleotide
agaataggagagggggccggcagacttatt

SEQ ID NO: 322584 - DNA, 30 bp, Artificial Sequence
  Synthetic oligonucleotide
tccatcataaccgcgtcgcatccccttatt

SEQ ID NO: 322585 - DNA, 30 bp, Artificial Sequence
  Synthetic oligonucleotide
atcaaggataagaatctcgagtcgcttatt

SEQ ID NO: 322586 - DNA, 30 bp, Artificial Sequence
  Synthetic oligonucleotide
gaagggtaggaagtaaaggtgtggcttatt

SEQ ID NO: 322587 - DNA, 30 bp, Artificial Sequence
  Synthetic oligonucleotide
tagacacctcgtgtagaagctcatcttatt

SEQ ID NO: 322588 - DNA, 30 bp, Artificial Sequence
  Synthetic oligonucleotide
gcttgttatcgtgaggagatttgtcttatt

SEQ ID NO: 322589 - DNA, 30 bp, Artificial Sequence
  Synthetic oligonucleotide
gcacgcaacttgccttctttgccagttatt

SEQ ID NO: 322590 - DNA, 30 bp, Artificial Sequence
  Synthetic oligonucleotide
tatacgagtctcataaatggatcagttatt

SEQ ID NO: 322591 - DNA, 30 bp, Artificial Sequence
  Synthetic oligonucleotide
gcgaaaacaccgatctgacagtcagttatt

SEQ ID NO: 322592 - DNA, 30 bp, Artificial Sequence
  Synthetic oligonucleotide
agatacatcatatcctggaaggtagttatt

SEQ ID NO: 322593 - DNA, 30 bp, Artificial Sequence
  Synthetic oligonucleotide
aaacgaatggtaccgaaaattttcgttatt

SEQ ID NO: 322594 - DNA, 30 bp, Artificial Sequence
  Synthetic oligonucleotide
gctacagtagtaggccgaataatggttatt

SEQ ID NO: 322595 - DNA, 30 bp, Artificial Sequence
  Synthetic oligonucleotide
cgttggaccccgggccggagggatgttatt

SEQ ID NO: 322596 - DNA, 30 bp, Artificial Sequence
  Synthetic oligonucleotide
gtggagtcattaaacgtagatgaatttatt

SEQ ID NO: 322597 - DNA, 30 bp, Artificial Sequence
  Synthetic oligonucleotide
ttcaaacaacgccagatccggtaatttatt

SEQ ID NO: 322598 - DNA, 30 bp, Artificial Sequence
  Synthetic oligonucleotide
cgcaccagggtaaattttagggcatttatt

SEQ ID NO: 322599 - DNA, 30 bp, Artificial Sequence
  Synthetic oligonucleotide
gtaagcgagatccatcccggtatatttatt

SEQ ID NO: 322600 - DNA, 30 bp, Artificial Sequence
  Synthetic oligonucleotide
tttaggtgcggggtaaaccgtgtatttatt

SEQ ID NO: 322601 - DNA, 30 bp, Artificial Sequence
  Synthetic oligonucleotide
aacaaccgagcatccgtctgacagtttatt

SEQ ID NO: 322602 - DNA, 30 bp, Artificial Sequence
  Synthetic oligonucleotide
acgcaatggtttaaatacattccgtttatt

SEQ ID NO: 322603 - DNA, 30 bp, Artificial Sequence
  Synthetic oligonucleotide
accaataaagataaatttattgtgtttatt

SEQ ID NO: 322604 - DNA, 30 bp, Artificial Sequence
  Synthetic oligonucleotide
cgccgacacaggttcgaattattgtttatt

SEQ ID NO: 322605 - DNA, 30 bp, Artificial Sequence
  Synthetic oligonucleotide
gtctgatcataagtagcgcgcgtcaaactt

SEQ ID NO: 322606 - DNA, 30 bp, Artificial Sequence
  Synthetic oligonucleotide
cccaaggcctgaagtgcggttgagaaactt

SEQ ID NO: 322607 - DNA, 30 bp, Artificial Sequence
  Synthetic oligonucleotide
agtactacctgagtccactgtggtaaactt

SEQ ID NO: 322608 - DNA, 30 bp, Artificial Sequence
  Synthetic oligonucleotide
gtaacgcaaagaaacacgtgatgtaaactt

SEQ ID NO: 322609 - DNA, 30 bp, Artificial Sequence
  Synthetic oligonucleotide
accccaagctcgagatagtgtcaacaactt

SEQ ID NO: 322610 - DNA, 30 bp, Artificial Sequence
  Synthetic oligonucleotide
ctacaggtaaaagattaagcctaccaactt

SEQ ID NO: 322611 - DNA, 30 bp, Artificial Sequence
  Synthetic oligonucleotide
tagcaagaacgcaacaccgcctggcaactt

SEQ ID NO: 322612 - DNA, 30 bp, Artificial Sequence
  Synthetic oligonucleotide
taataatgggtacggccccttgtgcaactt

SEQ ID NO: 322613 - DNA, 30 bp, Artificial Sequence
  Synthetic oligonucleotide
agaggggtaattatttttgcataagaactt

SEQ ID NO: 322614 - DNA, 30 bp, Artificial Sequence
  Synthetic oligonucleotide
gctcaagaaaattattcgttacaggaactt

SEQ ID NO: 322615 - DNA, 30 bp, Artificial Sequence
  Synthetic oligonucleotide
attaggtagtataagagcaaaccggaactt

SEQ ID NO: 322616 - DNA, 30 bp, Artificial Sequence
  Synthetic oligonucleotide
cactgtgtaggcgtaattagacatgaactt

SEQ ID NO: 322617 - DNA, 30 bp, Artificial Sequence
  Synthetic oligonucleotide
gagcaggaactactacggctaagtgaactt

SEQ ID NO: 322618 - DNA, 30 bp, Artificial Sequence
  Synthetic oligonucleotide
aagaatttaagcaatgaggctcaataactt

SEQ ID NO: 322619 - DNA, 30 bp, Artificial Sequence
  Synthetic oligonucleotide
aggacagtgcctaagtgggcgctataactt

SEQ ID NO: 322620 - DNA, 30 bp, Artificial Sequence
  Synthetic oligonucleotide
gccttagatgcgtccacaattgactaactt

SEQ ID NO: 322621 - DNA, 30 bp, Artificial Sequence
  Synthetic oligonucleotide
gtggagtcagtctaccagttgccgtaactt

SEQ ID NO: 322622 - DNA, 30 bp, Artificial Sequence
  Synthetic oligonucleotide
ataccgaggagtccatatccccggtaactt

SEQ ID NO: 322623 - DNA, 30 bp, Artificial Sequence
  Synthetic oligonucleotide
agtacttggctcgggaactgcgtgtaactt

SEQ ID NO: 322624 - DNA, 30 bp, Artificial Sequence
  Synthetic oligonucleotide
gactgccgtcgcgagacataccgttaactt

SEQ ID NO: 322625 - DNA, 30 bp, Artificial Sequence
  Synthetic oligonucleotide
ataatttctacacagctagaaagaacactt

SEQ ID NO: 322626 - DNA, 30 bp, Artificial Sequence
  Synthetic oligonucleotide
gtcgcggccgtatcgtgaggcggaacactt

SEQ ID NO: 322627 - DNA, 30 bp, Artificial Sequence
  Synthetic oligonucleotide
acccagagccagtcaggcccactaacactt

SEQ ID NO: 322628 - DNA, 30 bp, Artificial Sequence
  Synthetic oligonucleotide
gtcagaccacagggatagtctgtaacactt

SEQ ID NO: 322629 - DNA, 30 bp, Artificial Sequence
  Synthetic oligonucleotide
cgtttttaggacttttgacattgcacactt

SEQ ID NO: 322630 - DNA, 30 bp, Artificial Sequence
  Synthetic oligonucleotide
tgagacggatcaatgccaaggtctacactt

SEQ ID NO: 322631 - DNA, 30 bp, Artificial Sequence
  Synthetic oligonucleotide
tgaattgcgtcctaaaccttggaaccactt

SEQ ID NO: 322632 - DNA, 30 bp, Artificial Sequence
  Synthetic oligonucleotide
ggtcgtgtgtactttaccgtaagtccactt

SEQ ID NO: 322633 - DNA, 30 bp, Artificial Sequence
  Synthetic oligonucleotide
tcattggaagtcgtagttgcgacagcactt

SEQ ID NO: 322634 - DNA, 30 bp, Artificial Sequence
  Synthetic oligonucleotide
agatctcgatagagtctttaagtggcactt

SEQ ID NO: 322635 - DNA, 30 bp, Artificial Sequence
  Synthetic oligonucleotide
aatgacaagacgacgttcctaagtgcactt

SEQ ID NO: 322636 - DNA, 30 bp, Artificial Sequence
  Synthetic oligonucleotide
ctcgtggccataggagtgggcagatcactt

SEQ ID NO: 322637 - DNA, 30 bp, Artificial Sequence
  Synthetic oligonucleotide
tataggacaatttctcaactatgatcactt

SEQ ID NO: 322638 - DNA, 30 bp, Artificial Sequence
  Synthetic oligonucleotide
acctaactcgctcgtggcggaccctcactt

SEQ ID NO: 322639 - DNA, 30 bp, Artificial Sequence
  Synthetic oligonucleotide
aaatgactcggagagtactagcagtcactt

SEQ ID NO: 322640 - DNA, 30 bp, Artificial Sequence
  Synthetic oligonucleotide
aaagaacgtaccactgattgactgtcactt

SEQ ID NO: 322641 - DNA, 30 bp, Artificial Sequence
  Synthetic oligonucleotide
cattcagtcaccccagaaaccaggagactt

SEQ ID NO: 322642 - DNA, 30 bp, Artificial Sequence
  Synthetic oligonucleotide
tcttgtttgagccattgtaactctagactt

SEQ ID NO: 322643 - DNA, 30 bp, Artificial Sequence
  Synthetic oligonucleotide
ctactccagaccggactgttcattagactt

SEQ ID NO: 322644 - DNA, 30 bp, Artificial Sequence
  Synthetic oligonucleotide
catcagaatctgagtatgagggttagactt

SEQ ID NO: 322645 - DNA, 30 bp, Artificial Sequence
  Synthetic oligonucleotide
ccaggggtacaaacctccactcgacgactt

SEQ ID NO: 322646 - DNA, 30 bp, Artificial Sequence
  Synthetic oligonucleotide
atggagtcgtgtactcggcagttacgactt

SEQ ID NO: 322647 - DNA, 30 bp, Artificial Sequence
  Synthetic oligonucleotide
tatattatacatatacacagcccccgactt

SEQ ID NO: 322648 - DNA, 30 bp, Artificial Sequence
  Synthetic oligonucleotide
aaccacttacacgcaccgaccgatcgactt

SEQ ID NO: 322649 - DNA, 30 bp, Artificial Sequence
  Synthetic oligonucleotide
ctatatcccggtgagccacatgatcgactt

SEQ ID NO: 322650 - DNA, 30 bp, Artificial Sequence
  Synthetic oligonucleotide
ccttgctccatttagattgattgtcgactt

SEQ ID NO: 322651 - DNA, 30 bp, Artificial Sequence
  Synthetic oligonucleotide
cttatatcagcgtgacaccaatacggactt

SEQ ID NO: 322652 - DNA, 30 bp, Artificial Sequence
  Synthetic oligonucleotide
gagacgctccggaaacaacaaagcggactt

SEQ ID NO: 322653 - DNA, 30 bp, Artificial Sequence
  Synthetic oligonucleotide
ggtgaatgtttgtgattggcccgcggactt

SEQ ID NO: 322654 - DNA, 30 bp, Artificial Sequence
  Synthetic oligonucleotide
ttatcaggcaagctacgtgtatggggactt

SEQ ID NO: 322655 - DNA, 30 bp, Artificial Sequence
  Synthetic oligonucleotide
taataggtattgcaatctacatatggactt

SEQ ID NO: 322656 - DNA, 30 bp, Artificial Sequence
  Synthetic oligonucleotide
caaagggatactggtgagccgtatggactt

SEQ ID NO: 322657 - DNA, 30 bp, Artificial Sequence
  Synthetic oligonucleotide
cagtcgacccgcgtcgctccaaaatgactt

SEQ ID NO: 322658 - DNA, 30 bp, Artificial Sequence
  Synthetic oligonucleotide
aactgatggcgagcagaggatcgatgactt

SEQ ID NO: 322659 - DNA, 30 bp, Artificial Sequence
  Synthetic oligonucleotide
ctgtttccaaagtcgtcggtatggtgactt

SEQ ID NO: 322660 - DNA, 30 bp, Artificial Sequence
  Synthetic oligonucleotide
agaggatcgggatgttaaaattggtgactt

SEQ ID NO: 322661 - DNA, 30 bp, Artificial Sequence
  Synthetic oligonucleotide
accgtcgtcgtcatctattaaacaatactt

SEQ ID NO: 322662 - DNA, 30 bp, Artificial Sequence
  Synthetic oligonucleotide
taagcagaccctagggttcaatcaatactt

SEQ ID NO: 322663 - DNA, 30 bp, Artificial Sequence
  Synthetic oligonucleotide
aaactagaaaccaccacactcgtaatactt

SEQ ID NO: 322664 - DNA, 30 bp, Artificial Sequence
  Synthetic oligonucleotide
cgcgagtaggtctcgttgtcgttgatactt

SEQ ID NO: 322665 - DNA, 30 bp, Artificial Sequence
  Synthetic oligonucleotide
ttaatgggatcacgccgttcatatatactt

SEQ ID NO: 322666 - DNA, 30 bp, Artificial Sequence
  Synthetic oligonucleotide
tctccgtattggatgaaagatagactactt

SEQ ID NO: 322667 - DNA, 30 bp, Artificial Sequence
  Synthetic oligonucleotide
tattcgagacggttgcatcacaacctactt

SEQ ID NO: 322668 - DNA, 30 bp, Artificial Sequence
  Synthetic oligonucleotide
ttaaacaccgtgccaaaagaagtcctactt

SEQ ID NO: 322669 - DNA, 30 bp, Artificial Sequence
  Synthetic oligonucleotide
ctagggtttaaagcaccggaggtcctactt

SEQ ID NO: 322670 - DNA, 30 bp, Artificial Sequence
  Synthetic oligonucleotide
catcctagtggcaacaaattcacgctactt

SEQ ID NO: 322671 - DNA, 30 bp, Artificial Sequence
  Synthetic oligonucleotide
taaacgagtgggtacttcaatagtgtactt

SEQ ID NO: 322672 - DNA, 30 bp, Artificial Sequence
  Synthetic oligonucleotide
aaactggtcaacatgttgtacacattactt

SEQ ID NO: 322673 - DNA, 30 bp, Artificial Sequence
  Synthetic oligonucleotide
tagacgctgtatgacatatatgcattactt

SEQ ID NO: 322674 - DNA, 30 bp, Artificial Sequence
  Synthetic oligonucleotide
gcaaaaacacagctcttatggtcattactt

SEQ ID NO: 322675 - DNA, 30 bp, Artificial Sequence
  Synthetic oligonucleotide
aacgccttttgccccggtgtatgattactt

SEQ ID NO: 322676 - DNA, 30 bp, Artificial Sequence
  Synthetic oligonucleotide
ttgagggtttgccaataattgtgcttactt

SEQ ID NO: 322677 - DNA, 30 bp, Artificial Sequence
  Synthetic oligonucleotide
tggcgggtcgaactcagggtcatcttactt

SEQ ID NO: 322678 - DNA, 30 bp, Artificial Sequence
  Synthetic oligonucleotide
tgcttgctaaggtcgtcttacaagttactt

SEQ ID NO: 322679 - DNA, 30 bp, Artificial Sequence
  Synthetic oligonucleotide
ggtaagttggaccgaaattataagttactt

SEQ ID NO: 322680 - DNA, 30 bp, Artificial Sequence
  Synthetic oligonucleotide
acatgcaatcccaaagtgcttaaaaacctt

SEQ ID NO: 322681 - DNA, 30 bp, Artificial Sequence
  Synthetic oligonucleotide
ggtggaagctcagactgttgttggaacctt

SEQ ID NO: 322682 - DNA, 30 bp, Artificial Sequence
  Synthetic oligonucleotide
caccaccgaaaatccgagcttggacacctt

SEQ ID NO: 322683 - DNA, 30 bp, Artificial Sequence
  Synthetic oligonucleotide
cagtgacacggcatccaacgtgtgcacctt

SEQ ID NO: 322684 - DNA, 30 bp, Artificial Sequence
  Synthetic oligonucleotide
tcacgggacaagacttaacggttgcacctt

SEQ ID NO: 322685 - DNA, 30 bp, Artificial Sequence
  Synthetic oligonucleotide
ctttgttagtaatcatgcaattcggacctt

SEQ ID NO: 322686 - DNA, 30 bp, Artificial Sequence
  Synthetic oligonucleotide
tgagctgtcatacacatacgccggtacctt

SEQ ID NO: 322687 - DNA, 30 bp, Artificial Sequence
  Synthetic oligonucleotide
cgggtactatattcaaattttatgtacctt

SEQ ID NO: 322688 - DNA, 30 bp, Artificial Sequence
  Synthetic oligonucleotide
cttagcgtgccttgttggtttttttacctt

SEQ ID NO: 322689 - DNA, 30 bp, Artificial Sequence
  Synthetic oligonucleotide
gcatttgtttccgaggccaagtaaaccctt

SEQ ID NO: 322690 - DNA, 30 bp, Artificial Sequence
  Synthetic oligonucleotide
taaattgactccaagttgtcgtaaaccctt

SEQ ID NO: 322691 - DNA, 30 bp, Artificial Sequence
  Synthetic oligonucleotide
tatcacaggcattagacatgaggcaccctt

SEQ ID NO: 322692 - DNA, 30 bp, Artificial Sequence
  Synthetic oligonucleotide
ttcttaagcaacggtccggggctacccctt

SEQ ID NO: 322693 - DNA, 30 bp, Artificial Sequence
  Synthetic oligonucleotide
accgagctgagacaactgcccgtacccctt

SEQ ID NO: 322694 - DNA, 30 bp, Artificial Sequence
  Synthetic oligonucleotide
catagaatttaaccgttcgtgccccccctt

SEQ ID NO: 322695 - DNA, 30 bp, Artificial Sequence
  Synthetic oligonucleotide
gggtctgctggggtagatatattccccctt

SEQ ID NO: 322696 - DNA, 30 bp, Artificial Sequence
  Synthetic oligonucleotide
ttagagaacagctcgtgcgaaaagcccctt

SEQ ID NO: 322697 - DNA, 30 bp, Artificial Sequence
  Synthetic oligonucleotide
caattgccgtaaccaatgggtcggcccctt

SEQ ID NO: 322698 - DNA, 30 bp, Artificial Sequence
  Synthetic oligonucleotide
tagcagaaccagtggaacgtttgtcccctt

SEQ ID NO: 322699 - DNA, 30 bp, Artificial Sequence
  Synthetic oligonucleotide
gtcggaacatatgcaaaaatcgcagccctt

SEQ ID NO: 322700 - DNA, 31 bp, Artificial Sequence
  Synthetic oligonucleotide
tagtgcagtgggctaaaaagacggagccctt

SEQ ID NO: 322701 - DNA, 30 bp, Artificial Sequence
  Synthetic oligonucleotide
caatcttgtgatacagtagttatcgccctt

SEQ ID NO: 322702 - DNA, 30 bp, Artificial Sequence
  Synthetic oligonucleotide
gacaagcagagtctatagataaaggccctt

SEQ ID NO: 322703 - DNA, 30 bp, Artificial Sequence
  Synthetic oligonucleotide
aacggccttacaggattactggatgccctt

SEQ ID NO: 322704 - DNA, 30 bp, Artificial Sequence
  Synthetic oligonucleotide
cacaatgcagtaatcccatcacttgccctt

SEQ ID NO: 322705 - DNA, 30 bp, Artificial Sequence
  Synthetic oligonucleotide
tacctgcgagctgatcgtgagtagtccctt

SEQ ID NO: 322706 - DNA, 30 bp, Artificial Sequence
  Synthetic oligonucleotide
cgtcaccttttacatcgggcatggtccctt

SEQ ID NO: 322707 - DNA, 30 bp, Artificial Sequence
  Synthetic oligonucleotide
gcttgctcaccctcgtggatctattccctt

SEQ ID NO: 322708 - DNA, 30 bp, Artificial Sequence
  Synthetic oligonucleotide
agcggctaccaatagatagatatttccctt

SEQ ID NO: 322709 - DNA, 30 bp, Artificial Sequence
  Synthetic oligonucleotide
gctacccaagttaaggattgggaaagcctt

SEQ ID NO: 322710 - DNA, 30 bp, Artificial Sequence
  Synthetic oligonucleotide
ccgtgggagtgcgtagatgctcgaagcctt

SEQ ID NO: 322711 - DNA, 30 bp, Artificial Sequence
  Synthetic oligonucleotide
ctcgtatgtaggtgggtttcgaggagcctt

SEQ ID NO: 322712 - DNA, 30 bp, Artificial Sequence
  Synthetic oligonucleotide
agattttcccaagatacgaataaccgcctt

SEQ ID NO: 322713 - DNA, 30 bp, Artificial Sequence
  Synthetic oligonucleotide
cagagccgcaccccacccgcgttccgcctt

SEQ ID NO: 322714 - DNA, 30 bp, Artificial Sequence
  Synthetic oligonucleotide
tgtcaggtccaaccggggaaacgtcgcctt

SEQ ID NO: 322715 - DNA, 30 bp, Artificial Sequence
  Synthetic oligonucleotide
aaggtcagagcacgagacagtgctggcctt

SEQ ID NO: 322716 - DNA, 30 bp, Artificial Sequence
  Synthetic oligonucleotide
tagcacgcagaacatattgacattggcctt

SEQ ID NO: 322717 - DNA, 30 bp, Artificial Sequence
  Synthetic oligonucleotide
tacaccgcgtcacatatacttgttggcctt

SEQ ID NO: 322718 - DNA, 30 bp, Artificial Sequence
  Synthetic oligonucleotide
ataaaacttcaattagtttaaaaatgcctt

SEQ ID NO: 322719 - DNA, 30 bp, Artificial Sequence
  Synthetic oligonucleotide
gtttcgagactattggaagtataatgcctt

SEQ ID NO: 322720 - DNA, 30 bp, Artificial Sequence
  Synthetic oligonucleotide
cagaccagaattgtcgcattaaactgcctt

SEQ ID NO: 322721 - DNA, 30 bp, Artificial Sequence
  Synthetic oligonucleotide
agatacagtagtggtaactagtggtgcctt

SEQ ID NO: 322722 - DNA, 30 bp, Artificial Sequence
  Synthetic oligonucleotide
ccgcaaagcaccgtaaaaggtttgtgcctt

SEQ ID NO: 322723 - DNA, 30 bp, Artificial Sequence
  Synthetic oligonucleotide
gttggagatccttcgactacgcacatcctt

SEQ ID NO: 322724 - DNA, 30 bp, Artificial Sequence
  Synthetic oligonucleotide
tgcttaagctctacactaactaggatcctt

SEQ ID NO: 322725 - DNA, 30 bp, Artificial Sequence
  Synthetic oligonucleotide
ttatggtgtgtgtgttcagctctgatcctt

SEQ ID NO: 322726 - DNA, 30 bp, Artificial Sequence
  Synthetic oligonucleotide
agtagtactatctataagaaggtgatcctt

SEQ ID NO: 322727 - DNA, 30 bp, Artificial Sequence
  Synthetic oligonucleotide
atgtactgggcttgatcaatggtgatcctt

SEQ ID NO: 322728 - DNA, 30 bp, Artificial Sequence
  Synthetic oligonucleotide
aagctttatgaatcgcaagaacgggtcctt

SEQ ID NO: 322729 - DNA, 30 bp, Artificial Sequence
  Synthetic oligonucleotide
tactaccaacgcgcacatatagctgtcctt

SEQ ID NO: 322730 - DNA, 30 bp, Artificial Sequence
  Synthetic oligonucleotide
agtctaaagtcagaatgtaagtaattcctt

SEQ ID NO: 322731 - DNA, 30 bp, Artificial Sequence
  Synthetic oligonucleotide
cacagcactatcaactatcatatattcctt

SEQ ID NO: 322732 - DNA, 30 bp, Artificial Sequence
  Synthetic oligonucleotide
atcatcgcgttatgttctaagtgcttcctt

SEQ ID NO: 322733 - DNA, 30 bp, Artificial Sequence
  Synthetic oligonucleotide
gtgaggataattcgtccctacaaaaagctt

SEQ ID NO: 322734 - DNA, 30 bp, Artificial Sequence
  Synthetic oligonucleotide
tgggcatgcatgcacctaccagcaaagctt

SEQ ID NO: 322735 - DNA, 30 bp, Artificial Sequence
  Synthetic oligonucleotide
gcatgttactggtaaacgccaagaaagctt

SEQ ID NO: 322736 - DNA, 30 bp, Artificial Sequence
  Synthetic oligonucleotide
acgcattttgtcgcaatggacctaaagctt

SEQ ID NO: 322737 - DNA, 30 bp, Artificial Sequence
  Synthetic oligonucleotide
caggcggtgtaatgtgtacgattaaagctt

SEQ ID NO: 322738 - DNA, 30 bp, Artificial Sequence
  Synthetic oligonucleotide
aaggcaaagtggccattctgatgcaagctt

SEQ ID NO: 322739 - DNA, 30 bp, Artificial Sequence
  Synthetic oligonucleotide
ggaagcggcctgactcgttaaatgaagctt

SEQ ID NO: 322740 - DNA, 30 bp, Artificial Sequence
  Synthetic oligonucleotide
catgtatcattcctgtatctcgtgaagctt

SEQ ID NO: 322741 - DNA, 30 bp, Artificial Sequence
  Synthetic oligonucleotide
acaaggcgtctgcctaattgtactaagctt

SEQ ID NO: 322742 - DNA, 30 bp, Artificial Sequence
  Synthetic oligonucleotide
attaaactaagtcccgcagttcgtaagctt

SEQ ID NO: 322743 - DNA, 30 bp, Artificial Sequence
  Synthetic oligonucleotide
ttcgggaacgctgacaggaccgaccagctt

SEQ ID NO: 322744 - DNA, 30 bp, Artificial Sequence
  Synthetic oligonucleotide
ccctcacatcggtcgcgatgaaagcagctt

SEQ ID NO: 322745 - DNA, 30 bp, Artificial Sequence
  Synthetic oligonucleotide
gattatttgctagaccctacgtggcagctt

SEQ ID NO: 322746 - DNA, 30 bp, Artificial Sequence
  Synthetic oligonucleotide
ataggtacgaacctactctggtatcagctt

SEQ ID NO: 322747 - DNA, 30 bp, Artificial Sequence
  Synthetic oligonucleotide
tcggttattattgcttatattcctcagctt

SEQ ID NO: 322748 - DNA, 30 bp, Artificial Sequence
  Synthetic oligonucleotide
ttctgctagacagtctcgggggctcagctt

SEQ ID NO: 322749 - DNA, 30 bp, Artificial Sequence
  Synthetic oligonucleotide
tcgcgtaagctctcggcgatttaagagctt

SEQ ID NO: 322750 - DNA, 30 bp, Artificial Sequence
  Synthetic oligonucleotide
gaacaaggaccatagtgacttggagagctt

SEQ ID NO: 322751 - DNA, 30 bp, Artificial Sequence
  Synthetic oligonucleotide
gcctgcgagtgggtatgttaccgcgagctt

SEQ ID NO: 322752 - DNA, 30 bp, Artificial Sequence
  Synthetic oligonucleotide
ggcgacgtgtcattcaaaagtggcgagctt

SEQ ID NO: 322753 - DNA, 30 bp, Artificial Sequence
  Synthetic oligonucleotide
gagtaacaagatgtatcggccaaggagctt

SEQ ID NO: 322754 - DNA, 30 bp, Artificial Sequence
  Synthetic oligonucleotide
tcaccctgctacgttacaaaccgggagctt

SEQ ID NO: 322755 - DNA, 30 bp, Artificial Sequence
  Synthetic oligonucleotide
acaccgccgagctttgaggccttggagctt

SEQ ID NO: 322756 - DNA, 30 bp, Artificial Sequence
  Synthetic oligonucleotide
taggtctaagcgcggggaccaggatagctt

SEQ ID NO: 322757 - DNA, 30 bp, Artificial Sequence
  Synthetic oligonucleotide
gaatagttgggggcttgccgtctatagctt

SEQ ID NO: 322758 - DNA, 30 bp, Artificial Sequence
  Synthetic oligonucleotide
aaagtggctcggcattgatacaactagctt

SEQ ID NO: 322759 - DNA, 30 bp, Artificial Sequence
  Synthetic oligonucleotide
tcggtcgcaatgctggcattaaagtagctt

SEQ ID NO: 322760 - DNA, 30 bp, Artificial Sequence
  Synthetic oligonucleotide
agggggcgttagagagatgcagcttagctt

SEQ ID NO: 322761 - DNA, 30 bp, Artificial Sequence
  Synthetic oligonucleotide
agaggttgtgtccgggggttgcgttagctt

SEQ ID NO: 322762 - DNA, 30 bp, Artificial Sequence
  Synthetic oligonucleotide
gcgaaagcccttgacaagatactttagctt

SEQ ID NO: 322763 - DNA, 30 bp, Artificial Sequence
  Synthetic oligonucleotide
gaaaataggtcaatgagatgcccaacgctt

SEQ ID NO: 322764 - DNA, 30 bp, Artificial Sequence
  Synthetic oligonucleotide
tgggaatcaagttattaaacttccacgctt

SEQ ID NO: 322765 - DNA, 30 bp, Artificial Sequence
  Synthetic oligonucleotide
agcgtacgcgtagagacatgttccacgctt

SEQ ID NO: 322766 - DNA, 30 bp, Artificial Sequence
  Synthetic oligonucleotide
cagtgctgaagtcatagtaatgcgacgctt

SEQ ID NO: 322767 - DNA, 30 bp, Artificial Sequence
  Synthetic oligonucleotide
ggaatcagtgggtaggcgaatgggacgctt

SEQ ID NO: 322768 - DNA, 30 bp, Artificial Sequence
  Synthetic oligonucleotide
gcttaaccggcagttatcaacgatacgctt

SEQ ID NO: 322769 - DNA, 30 bp, Artificial Sequence
  Synthetic oligonucleotide
ccgcaccgggtggtccggcttgatccgctt

SEQ ID NO: 322770 - DNA, 30 bp, Artificial Sequence
  Synthetic oligonucleotide
cgcagaacaatcattagacacggtccgctt

SEQ ID NO: 322771 - DNA, 30 bp, Artificial Sequence
  Synthetic oligonucleotide
aagcactgcgcagacaccctaggagcgctt

SEQ ID NO: 322772 - DNA, 30 bp, Artificial Sequence
  Synthetic oligonucleotide
gttggactacaatcagggacctgagcgctt

SEQ ID NO: 322773 - DNA, 30 bp, Artificial Sequence
  Synthetic oligonucleotide
taatgttcatggcataccgccgccgcgctt

SEQ ID NO: 322774 - DNA, 30 bp, Artificial Sequence
  Synthetic oligonucleotide
cgtgtagaaaactacctatatttggcgctt

SEQ ID NO: 322775 - DNA, 30 bp, Artificial Sequence
  Synthetic oligonucleotide
ttatacagccattcggatcttttgtcgctt

SEQ ID NO: 322776 - DNA, 30 bp, Artificial Sequence
  Synthetic oligonucleotide
ctactgtactaatagaaacgatcttcgctt

SEQ ID NO: 322777 - DNA, 30 bp, Artificial Sequence
  Synthetic oligonucleotide
tggttgtagaagcgagcgtaaacaaggctt

SEQ ID NO: 322778 - DNA, 30 bp, Artificial Sequence
  Synthetic oligonucleotide
attcgttgtcggtctgcatagagaaggctt

SEQ ID NO: 322779 - DNA, 30 bp, Artificial Sequence
  Synthetic oligonucleotide
atgccactgcgaacttctaactgcaggctt

SEQ ID NO: 322780 - DNA, 30 bp, Artificial Sequence
  Synthetic oligonucleotide
gaggagctggagagttacccgttcaggctt

SEQ ID NO: 322781 - DNA, 30 bp, Artificial Sequence
  Synthetic oligonucleotide
tcttgctgtggagtacgctgtttcaggctt

SEQ ID NO: 322782 - DNA, 30 bp, Artificial Sequence
  Synthetic oligonucleotide
gtatagttacctgagccaaagtggaggctt

SEQ ID NO: 322783 - DNA, 30 bp, Artificial Sequence
  Synthetic oligonucleotide
gattcaacgactgtggcgatgggtaggctt

SEQ ID NO: 322784 - DNA, 30 bp, Artificial Sequence
  Synthetic oligonucleotide
agaatgaatttgggaacgtgtatacggctt

SEQ ID NO: 322785 - DNA, 30 bp, Artificial Sequence
  Synthetic oligonucleotide
tctgtaacggtgcttccggggctacggctt

SEQ ID NO: 322786 - DNA, 30 bp, Artificial Sequence
  Synthetic oligonucleotide
tgccgcgtcgacgattgaaataaccggctt

SEQ ID NO: 322787 - DNA, 30 bp, Artificial Sequence
  Synthetic oligonucleotide
tacctttaataaaccaaccatgaccggctt

SEQ ID NO: 322788 - DNA, 30 bp, Artificial Sequence
  Synthetic oligonucleotide
tagcgggctggtctctatccatcccggctt

SEQ ID NO: 322789 - DNA, 30 bp, Artificial Sequence
  Synthetic oligonucleotide
gcgaatgctgaccgcagggacttgcggctt

SEQ ID NO: 322790 - DNA, 30 bp, Artificial Sequence
  Synthetic oligonucleotide
atttggcactaactagtcgaagatcggctt

SEQ ID NO: 322791 - DNA, 30 bp, Artificial Sequence
  Synthetic oligonucleotide
cgcgcgaagcgagaactggacagtcggctt

SEQ ID NO: 322792 - DNA, 30 bp, Artificial Sequence
  Synthetic oligonucleotide
ctgtccagggcctcctgcggcagtcggctt

SEQ ID NO: 322793 - DNA, 30 bp, Artificial Sequence
  Synthetic oligonucleotide
gggacaagcggaccatctcggacagggctt

SEQ ID NO: 322794 - DNA, 30 bp, Artificial Sequence
  Synthetic oligonucleotide
ttacacttccaagccggcctacgagggctt

SEQ ID NO: 322795 - DNA, 30 bp, Artificial Sequence
  Synthetic oligonucleotide
gtccaatctggacctttaaaaatagggctt

SEQ ID NO: 322796 - DNA, 30 bp, Artificial Sequence
  Synthetic oligonucleotide
cacatcactgcgtcctgcgtacaggggctt

SEQ ID NO: 322797 - DNA, 30 bp, Artificial Sequence
  Synthetic oligonucleotide
atgatcttgtgctcggaataaagggggctt

SEQ ID NO: 322798 - DNA, 30 bp, Artificial Sequence
  Synthetic oligonucleotide
attacagtcaaaccccaaggttatgggctt

SEQ ID NO: 322799 - DNA, 30 bp, Artificial Sequence
  Synthetic oligonucleotide
ctacgcaagcagagcgaactaggatggctt

SEQ ID NO: 322800 - DNA, 30 bp, Artificial Sequence
  Synthetic oligonucleotide
attaagtcacgttcgaggttgagctggctt

SEQ ID NO: 322801 - DNA, 30 bp, Artificial Sequence
  Synthetic oligonucleotide
tgcccagctcaaatttcagcttagtggctt

SEQ ID NO: 322802 - DNA, 30 bp, Artificial Sequence
  Synthetic oligonucleotide
aaacgcatatggtcgtacatgtggtggctt

SEQ ID NO: 322803 - DNA, 30 bp, Artificial Sequence
  Synthetic oligonucleotide
gtacctcacagtgttcagggattgtggctt

SEQ ID NO: 322804 - DNA, 30 bp, Artificial Sequence
  Synthetic oligonucleotide
tttctggaccaacttcatattggttggctt

SEQ ID NO: 322805 - DNA, 30 bp, Artificial Sequence
  Synthetic oligonucleotide
gaacgatcagctgaggaacgcgtttggctt

SEQ ID NO: 322806 - DNA, 30 bp, Artificial Sequence
  Synthetic oligonucleotide
cggtgatggacaggagtgccttagatgctt

SEQ ID NO: 322807 - DNA, 29 bp, Artificial Sequence
  Synthetic oligonucleotide
taatcaaagccaaccttagtgcgatgctt

SEQ ID NO: 322808 - DNA, 30 bp, Artificial Sequence
  Synthetic oligonucleotide
taccggacgggtttttcgtatcctatgctt

SEQ ID NO: 322809 - DNA, 30 bp, Artificial Sequence
  Synthetic oligonucleotide
aaaacatggttaagacgagccgctatgctt

SEQ ID NO: 322810 - DNA, 30 bp, Artificial Sequence
  Synthetic oligonucleotide
gtcgaagacggccaattttgtgtactgctt

SEQ ID NO: 322811 - DNA, 30 bp, Artificial Sequence
  Synthetic oligonucleotide
tattatcgtacccagtgtgatttactgctt

SEQ ID NO: 322812 - DNA, 30 bp, Artificial Sequence
  Synthetic oligonucleotide
aggtcttaggtcgggatccatttgctgctt

SEQ ID NO: 322813 - DNA, 30 bp, Artificial Sequence
  Synthetic oligonucleotide
acccaaagtgattcatagcagacagtgctt

SEQ ID NO: 322814 - DNA, 30 bp, Artificial Sequence
  Synthetic oligonucleotide
gtccttcgggtaaacccagggatattgctt

SEQ ID NO: 322815 - DNA, 30 bp, Artificial Sequence
  Synthetic oligonucleotide
ttcataataaggtattttccgaccttgctt

SEQ ID NO: 322816 - DNA, 30 bp, Artificial Sequence
  Synthetic oligonucleotide
gacgcagactctcgctcgtctccgttgctt

SEQ ID NO: 322817 - DNA, 30 bp, Artificial Sequence
  Synthetic oligonucleotide
gaagcagttggcttaaacggccatttgctt

SEQ ID NO: 322818 - DNA, 30 bp, Artificial Sequence
  Synthetic oligonucleotide
gacaggtccaacgcggctcatataaatctt

SEQ ID NO: 322819 - DNA, 30 bp, Artificial Sequence
  Synthetic oligonucleotide
accgcgcacggcggggccgcatccaatctt

SEQ ID NO: 322820 - DNA, 30 bp, Artificial Sequence
  Synthetic oligonucleotide
acgctcatcgtacgatatggaaagaatctt

SEQ ID NO: 322821 - DNA, 30 bp, Artificial Sequence
  Synthetic oligonucleotide
tctgcaggttttacggggctcccacatctt

SEQ ID NO: 322822 - DNA, 30 bp, Artificial Sequence
  Synthetic oligonucleotide
aaacacatttagggctgtggactccatctt

SEQ ID NO: 322823 - DNA, 30 bp, Artificial Sequence
  Synthetic oligonucleotide
tcaagcctggtggaagtcaccgctcatctt

SEQ ID NO: 322824 - DNA, 30 bp, Artificial Sequence
  Synthetic oligonucleotide
tgacattcgtggtaagcccagcttcatctt

SEQ ID NO: 322825 - DNA, 30 bp, Artificial Sequence
  Synthetic oligonucleotide
gttgaattattgtctatcctgatagatctt

SEQ ID NO: 322826 - DNA, 31 bp, Artificial Sequence
  Synthetic oligonucleotide
agcagccgactttgcggcatcaagcgatctt

SEQ ID NO: 322827 - DNA, 30 bp, Artificial Sequence
  Synthetic oligonucleotide
ctgaatcggcatcgttgtatgagcgatctt

SEQ ID NO: 322828 - DNA, 30 bp, Artificial Sequence
  Synthetic oligonucleotide
tcacgggtctatgtcgcgatgatctatctt

SEQ ID NO: 322829 - DNA, 30 bp, Artificial Sequence
  Synthetic oligonucleotide
tgtggggaccgtccaggccatttctatctt

SEQ ID NO: 322830 - DNA, 30 bp, Artificial Sequence
  Synthetic oligonucleotide
cgaagacattatttacagtgacagtatctt

SEQ ID NO: 322831 - DNA, 30 bp, Artificial Sequence
  Synthetic oligonucleotide
gtcctccgtctggggctatctcggtatctt

SEQ ID NO: 322832 - DNA, 30 bp, Artificial Sequence
  Synthetic oligonucleotide
tagactcccggaccgcaacttcggtatctt

SEQ ID NO: 322833 - DNA, 30 bp, Artificial Sequence
  Synthetic oligonucleotide
gtacttggcatcaggataggcatgtatctt

SEQ ID NO: 322834 - DNA, 30 bp, Artificial Sequence
  Synthetic oligonucleotide
aggaataatatagtgttatacgtgtatctt

SEQ ID NO: 322835 - DNA, 30 bp, Artificial Sequence
  Synthetic oligonucleotide
tataccctaggggctgcctacgtaactctt

SEQ ID NO: 322836 - DNA, 30 bp, Artificial Sequence
  Synthetic oligonucleotide
gctgactcacgaatgcagatacgcactctt

SEQ ID NO: 322837 - DNA, 30 bp, Artificial Sequence
  Synthetic oligonucleotide
ggggcatggcagtatatactgcgcactctt

SEQ ID NO: 322838 - DNA, 30 bp, Artificial Sequence
  Synthetic oligonucleotide
atatgagcaataaataaagtactcactctt

SEQ ID NO: 322839 - DNA, 30 bp, Artificial Sequence
  Synthetic oligonucleotide
tatggtgcaaacacacaagaggagactctt

SEQ ID NO: 322840 - DNA, 30 bp, Artificial Sequence
  Synthetic oligonucleotide
ttgtcttgtaatatagctatgaggactctt

SEQ ID NO: 322841 - DNA, 30 bp, Artificial Sequence
  Synthetic oligonucleotide
aggtcacttgaactctcatatcggactctt

SEQ ID NO: 322842 - DNA, 30 bp, Artificial Sequence
  Synthetic oligonucleotide
acagtggttatcctgatcgtgggtactctt

SEQ ID NO: 322843 - DNA, 30 bp, Artificial Sequence
  Synthetic oligonucleotide
tgcggacggctatggattttacttactctt

SEQ ID NO: 322844 - DNA, 30 bp, Artificial Sequence
  Synthetic oligonucleotide
gaaacttgattcattcctgagatccctctt

SEQ ID NO: 322845 - DNA, 30 bp, Artificial Sequence
  Synthetic oligonucleotide
caggcacgacagagcgtgtgggagcctctt

SEQ ID NO: 322846 - DNA, 30 bp, Artificial Sequence
  Synthetic oligonucleotide
gcttaacacgaaaccaaacgaactcctctt

SEQ ID NO: 322847 - DNA, 30 bp, Artificial Sequence
  Synthetic oligonucleotide
atccgggcagatatgtaaagtccagctctt

SEQ ID NO: 322848 - DNA, 30 bp, Artificial Sequence
  Synthetic oligonucleotide
aggaccaggggggccgtattgtacgctctt

SEQ ID NO: 322849 - DNA, 30 bp, Artificial Sequence
  Synthetic oligonucleotide
ttaatagactccgaagcagatgccgctctt

SEQ ID NO: 322850 - DNA, 30 bp, Artificial Sequence
  Synthetic oligonucleotide
ctaaaatagtaagttcaccaccgcgctctt

SEQ ID NO: 322851 - DNA, 30 bp, Artificial Sequence
  Synthetic oligonucleotide
gaacggcggcctggccctcaaatggctctt

SEQ ID NO: 322852 - DNA, 30 bp, Artificial Sequence
  Synthetic oligonucleotide
ggtggctcgtagcagggtacggctgctctt

SEQ ID NO: 322853 - DNA, 30 bp, Artificial Sequence
  Synthetic oligonucleotide
acggcaatagtctttaagcgcttatctctt

SEQ ID NO: 322854 - DNA, 30 bp, Artificial Sequence
  Synthetic oligonucleotide
acaagctatgagggtaagtcggtctctctt

SEQ ID NO: 322855 - DNA, 30 bp, Artificial Sequence
  Synthetic oligonucleotide
tcttaacttgtcaggtagcgtccgtctctt

SEQ ID NO: 322856 - DNA, 30 bp, Artificial Sequence
  Synthetic oligonucleotide
agtcagtttccggtgacttaaaggtctctt

SEQ ID NO: 322857 - DNA, 30 bp, Artificial Sequence
  Synthetic oligonucleotide
tgaggctcatttcgatcgattttttctctt

SEQ ID NO: 322858 - DNA, 30 bp, Artificial Sequence
  Synthetic oligonucleotide
aacttgagcaaacgacacaaaggaagtctt

SEQ ID NO: 322859 - DNA, 31 bp, Artificial Sequence
  Synthetic oligonucleotide
gtttaagggagtcctgaaggaaaacagtctt

SEQ ID NO: 322860 - DNA, 30 bp, Artificial Sequence
  Synthetic oligonucleotide
actgtgcggtacagccccaggcccagtctt

SEQ ID NO: 322861 - DNA, 30 bp, Artificial Sequence
  Synthetic oligonucleotide
tctagctcaggtggatctcgcggcagtctt

SEQ ID NO: 322862 - DNA, 30 bp, Artificial Sequence
  Synthetic oligonucleotide
ccgcgcgggtggtagggcaaattgagtctt

SEQ ID NO: 322863 - DNA, 30 bp, Artificial Sequence
  Synthetic oligonucleotide
agaggcgacacgccggacggcgctagtctt

SEQ ID NO: 322864 - DNA, 30 bp, Artificial Sequence
  Synthetic oligonucleotide
agatgtacgagcagagctcccaaacgtctt

SEQ ID NO: 322865 - DNA, 30 bp, Artificial Sequence
  Synthetic oligonucleotide
tgaaagtgcgtatatgtaatcggccgtctt

SEQ ID NO: 322866 - DNA, 30 bp, Artificial Sequence
  Synthetic oligonucleotide
atggctctgttcccacgacttgcgcgtctt

SEQ ID NO: 322867 - DNA, 30 bp, Artificial Sequence
  Synthetic oligonucleotide
gattaaacgataatatgttaaaggcgtctt

SEQ ID NO: 322868 - DNA, 30 bp, Artificial Sequence
  Synthetic oligonucleotide
aaaatgcatttgcaattcgctcaaggtctt

SEQ ID NO: 322869 - DNA, 30 bp, Artificial Sequence
  Synthetic oligonucleotide
tccttggatcgcgctcatcagtcaggtctt

SEQ ID NO: 322870 - DNA, 30 bp, Artificial Sequence
  Synthetic oligonucleotide
tgactgtttgcccaaatggctggaggtctt

SEQ ID NO: 322871 - DNA, 30 bp, Artificial Sequence
  Synthetic oligonucleotide
gcaagacatatccaacaggtctacggtctt

SEQ ID NO: 322872 - DNA, 30 bp, Artificial Sequence
  Synthetic oligonucleotide
catggactaagtgttcgtcatcagggtctt

SEQ ID NO: 322873 - DNA, 30 bp, Artificial Sequence
  Synthetic oligonucleotide
taagatctgggagcttctcgatggggtctt

SEQ ID NO: 322874 - DNA, 30 bp, Artificial Sequence
  Synthetic oligonucleotide
taaacttaaggggaggatagcctgggtctt

SEQ ID NO: 322875 - DNA, 30 bp, Artificial Sequence
  Synthetic oligonucleotide
ctgtaattgaccaagagttctgtatgtctt

SEQ ID NO: 322876 - DNA, 30 bp, Artificial Sequence
  Synthetic oligonucleotide
ccagagaacatacgcgttgcaaactgtctt

SEQ ID NO: 322877 - DNA, 30 bp, Artificial Sequence
  Synthetic oligonucleotide
aaggtacctcccacctagatgtactgtctt

SEQ ID NO: 322878 - DNA, 30 bp, Artificial Sequence
  Synthetic oligonucleotide
ggtacctccagtgctagctgcaagtgtctt

SEQ ID NO: 322879 - DNA, 30 bp, Artificial Sequence
  Synthetic oligonucleotide
ttaaaccgtggatcggtgtacctgtgtctt

SEQ ID NO: 322880 - DNA, 30 bp, Artificial Sequence
  Synthetic oligonucleotide
gtcatatgctcaaagcggctacattgtctt

SEQ ID NO: 322881 - DNA, 30 bp, Artificial Sequence
  Synthetic oligonucleotide
cagcgcgttcattccttggattaaattctt

SEQ ID NO: 322882 - DNA, 30 bp, Artificial Sequence
  Synthetic oligonucleotide
atgcgcgtactgccggtaaagcttattctt

SEQ ID NO: 322883 - DNA, 30 bp, Artificial Sequence
  Synthetic oligonucleotide
cctgtataagatggccaatgataccttctt

SEQ ID NO: 322884 - DNA, 30 bp, Artificial Sequence
  Synthetic oligonucleotide
cggataggaaaggtatcactgtaccttctt

SEQ ID NO: 322885 - DNA, 30 bp, Artificial Sequence
  Synthetic oligonucleotide
agtaacacgtccacgcaacctatccttctt

SEQ ID NO: 322886 - DNA, 30 bp, Artificial Sequence
  Synthetic oligonucleotide
catgcaagcgaatgcgttctttagcttctt

SEQ ID NO: 322887 - DNA, 30 bp, Artificial Sequence
  Synthetic oligonucleotide
gcatggatcatgctttcgcacttagttctt

SEQ ID NO: 322888 - DNA, 30 bp, Artificial Sequence
  Synthetic oligonucleotide
ggcgggactgatgtgcccgagaaggttctt

SEQ ID NO: 322889 - DNA, 30 bp, Artificial Sequence
  Synthetic oligonucleotide
gatcggacccgtcccaccagacaggttctt

SEQ ID NO: 322890 - DNA, 30 bp, Artificial Sequence
  Synthetic oligonucleotide
gacatgtcgttcatagcaacatcggttctt

SEQ ID NO: 322891 - DNA, 30 bp, Artificial Sequence
  Synthetic oligonucleotide
actaccgagtcaaattcgttacaatttctt

SEQ ID NO: 322892 - DNA, 30 bp, Artificial Sequence
  Synthetic oligonucleotide
ggggtccaacagggcgtggggcactttctt

SEQ ID NO: 322893 - DNA, 30 bp, Artificial Sequence
  Synthetic oligonucleotide
tgatggccgagcctttgcgtagcgtttctt

SEQ ID NO: 322894 - DNA, 30 bp, Artificial Sequence
  Synthetic oligonucleotide
ctcgtcgctcaagaagggcaaaaaaaagtt

SEQ ID NO: 322895 - DNA, 30 bp, Artificial Sequence
  Synthetic oligonucleotide
gagggtaaaagatatttctgactaaaagtt

SEQ ID NO: 322896 - DNA, 30 bp, Artificial Sequence
  Synthetic oligonucleotide
aatatagcattctaacgcataaccaaagtt

SEQ ID NO: 322897 - DNA, 30 bp, Artificial Sequence
  Synthetic oligonucleotide
tttaggtacactagggggctaaggaaagtt

SEQ ID NO: 322898 - DNA, 30 bp, Artificial Sequence
  Synthetic oligonucleotide
gatatcacaagtcttagcatggggaaagtt

SEQ ID NO: 322899 - DNA, 30 bp, Artificial Sequence
  Synthetic oligonucleotide
gacttctaccatgtgttctcctataaagtt

SEQ ID NO: 322900 - DNA, 30 bp, Artificial Sequence
  Synthetic oligonucleotide
gtgtacatctgcagtgaaatagttaaagtt

SEQ ID NO: 322901 - DNA, 30 bp, Artificial Sequence
  Synthetic oligonucleotide
ttatccgttaccaagccgaaaggacaagtt

SEQ ID NO: 322902 - DNA, 30 bp, Artificial Sequence
  Synthetic oligonucleotide
tacccatgaagttatcggcttggacaagtt

SEQ ID NO: 322903 - DNA, 30 bp, Artificial Sequence
  Synthetic oligonucleotide
ggcccggttaaaactccattttaccaagtt

SEQ ID NO: 322904 - DNA, 30 bp, Artificial Sequence
  Synthetic oligonucleotide
gagtaacaaatattttctactaatcaagtt

SEQ ID NO: 322905 - DNA, 30 bp, Artificial Sequence
  Synthetic oligonucleotide
caatgattcgtcagtatggtgggagaagtt

SEQ ID NO: 322906 - DNA, 30 bp, Artificial Sequence
  Synthetic oligonucleotide
acaaggatgctagatcaaaatttagaagtt

SEQ ID NO: 322907 - DNA, 30 bp, Artificial Sequence
  Synthetic oligonucleotide
cacggatccacacgatccacaattgaagtt

SEQ ID NO: 322908 - DNA, 30 bp, Artificial Sequence
  Synthetic oligonucleotide
taacactcggcggaacgattgacataagtt

SEQ ID NO: 322909 - DNA, 30 bp, Artificial Sequence
  Synthetic oligonucleotide
gggctagattgtcatgccaggcgctaagtt

SEQ ID NO: 322910 - DNA, 30 bp, Artificial Sequence
  Synthetic oligonucleotide
acatgtccaatttaccaacccaagtaagtt

SEQ ID NO: 322911 - DNA, 30 bp, Artificial Sequence
  Synthetic oligonucleotide
ggtgctctccgattatgtgtgaagtaagtt

SEQ ID NO: 322912 - DNA, 30 bp, Artificial Sequence
  Synthetic oligonucleotide
taccaacttagctcgtacgcccagtaagtt

SEQ ID NO: 322913 - DNA, 30 bp, Artificial Sequence
  Synthetic oligonucleotide
gtagtcaccaaagcttagaactcttaagtt

SEQ ID NO: 322914 - DNA, 30 bp, Artificial Sequence
  Synthetic oligonucleotide
cccacagaactcgggggacagcgttaagtt

SEQ ID NO: 322915 - DNA, 30 bp, Artificial Sequence
  Synthetic oligonucleotide
tggtgtgcaatcgctgaggcgcgttaagtt

SEQ ID NO: 322916 - DNA, 30 bp, Artificial Sequence
  Synthetic oligonucleotide
gttgtaagcgaagtagttccctaaacagtt

SEQ ID NO: 322917 - DNA, 30 bp, Artificial Sequence
  Synthetic oligonucleotide
aattctagcgacagctacacgtcaacagtt

SEQ ID NO: 322918 - DNA, 30 bp, Artificial Sequence
  Synthetic oligonucleotide
gagaccgcaccgaggttctagtgaacagtt

SEQ ID NO: 322919 - DNA, 31 bp, Artificial Sequence
  Synthetic oligonucleotide
atcgacttgctctctcgtgagtttaacagtt

SEQ ID NO: 322920 - DNA, 30 bp, Artificial Sequence
  Synthetic oligonucleotide
cctggtagttctagcccctccacgacagtt

SEQ ID NO: 322921 - DNA, 30 bp, Artificial Sequence
  Synthetic oligonucleotide
tagagggagtacaacggctacgtgacagtt

SEQ ID NO: 322922 - DNA, 30 bp, Artificial Sequence
  Synthetic oligonucleotide
cggctgttgacttgaaggagcgtgacagtt

SEQ ID NO: 322923 - DNA, 30 bp, Artificial Sequence
  Synthetic oligonucleotide
gagcctagggatgttgtagtattgacagtt

SEQ ID NO: 322924 - DNA, 30 bp, Artificial Sequence
  Synthetic oligonucleotide
gagacaacatgtgctagatacttgacagtt

SEQ ID NO: 322925 - DNA, 30 bp, Artificial Sequence
  Synthetic oligonucleotide
gggtcgggtcctataggaccaactacagtt

SEQ ID NO: 322926 - DNA, 30 bp, Artificial Sequence
  Synthetic oligonucleotide
cgtaacttgcttgttaattgcagaccagtt

SEQ ID NO: 322927 - DNA, 30 bp, Artificial Sequence
  Synthetic oligonucleotide
ccaatcatcgcttacgacaggttgccagtt

SEQ ID NO: 322928 - DNA, 30 bp, Artificial Sequence
  Synthetic oligonucleotide
gtaaagagtaagggggaaggttctccagtt

SEQ ID NO: 322929 - DNA, 30 bp, Artificial Sequence
  Synthetic oligonucleotide
cgcctccttctgtgcgagtacgttccagtt

SEQ ID NO: 322930 - DNA, 30 bp, Artificial Sequence
  Synthetic oligonucleotide
atggcttcagtatgtgcggaatttccagtt

SEQ ID NO: 322931 - DNA, 30 bp, Artificial Sequence
  Synthetic oligonucleotide
cacccctgaaatgtgggcacgcgagcagtt

SEQ ID NO: 322932 - DNA, 30 bp, Artificial Sequence
  Synthetic oligonucleotide
caggctgtaaattccggtcgaccggcagtt

SEQ ID NO: 322933 - DNA, 30 bp, Artificial Sequence
  Synthetic oligonucleotide
cgtggtcgcagatctttagactatgcagtt

SEQ ID NO: 322934 - DNA, 30 bp, Artificial Sequence
  Synthetic oligonucleotide
cgaccagtcgtgggcctcgtcagtgcagtt

SEQ ID NO: 322935 - DNA, 30 bp, Artificial Sequence
  Synthetic oligonucleotide
aaaggtagtccgagcacccatggtgcagtt

SEQ ID NO: 322936 - DNA, 30 bp, Artificial Sequence
  Synthetic oligonucleotide
aaaatgaccgtaccgtggactacatcagtt

SEQ ID NO: 322937 - DNA, 30 bp, Artificial Sequence
  Synthetic oligonucleotide
tggatataaggctttcatggccgatcagtt

SEQ ID NO: 322938 - DNA, 30 bp, Artificial Sequence
  Synthetic oligonucleotide
ggactcgacttgcaagcgtgtgtatcagtt

SEQ ID NO: 322939 - DNA, 30 bp, Artificial Sequence
  Synthetic oligonucleotide
acggtatttacgtaaagttcgttgtcagtt

SEQ ID NO: 322940 - DNA, 30 bp, Artificial Sequence
  Synthetic oligonucleotide
aaacgttctcttcgtcccccgccttcagtt

SEQ ID NO: 322941 - DNA, 30 bp, Artificial Sequence
  Synthetic oligonucleotide
agtcagggcctggatccagtatgttcagtt

SEQ ID NO: 322942 - DNA, 30 bp, Artificial Sequence
  Synthetic oligonucleotide
aaaagctggcccttgacctgctaaagagtt

SEQ ID NO: 322943 - DNA, 30 bp, Artificial Sequence
  Synthetic oligonucleotide
acggtcggtaatccttgcactacaagagtt

SEQ ID NO: 322944 - DNA, 30 bp, Artificial Sequence
  Synthetic oligonucleotide
cttattcatcacagaaatcacccaagagtt

SEQ ID NO: 322945 - DNA, 30 bp, Artificial Sequence
  Synthetic oligonucleotide
gccggatttcaaaattcgattgcaagagtt

SEQ ID NO: 322946 - DNA, 30 bp, Artificial Sequence
  Synthetic oligonucleotide
gatactatgtccaaataggattccagagtt

SEQ ID NO: 322947 - DNA, 30 bp, Artificial Sequence
  Synthetic oligonucleotide
gggcagaccattatgcatgccgcacgagtt

SEQ ID NO: 322948 - DNA, 30 bp, Artificial Sequence
  Synthetic oligonucleotide
gagattggggagcttaagtcttgacgagtt

SEQ ID NO: 322949 - DNA, 30 bp, Artificial Sequence
  Synthetic oligonucleotide
gttatagaccagatgcaaatccgccgagtt

SEQ ID NO: 322950 - DNA, 30 bp, Artificial Sequence
  Synthetic oligonucleotide
gccactcggaaactagtcgctctccgagtt

SEQ ID NO: 322951 - DNA, 30 bp, Artificial Sequence
  Synthetic oligonucleotide
agacgcgcccgtatcccgaataatcgagtt

SEQ ID NO: 322952 - DNA, 30 bp, Artificial Sequence
  Synthetic oligonucleotide
tactgtcaggaatcttgcggatgtcgagtt

SEQ ID NO: 322953 - DNA, 30 bp, Artificial Sequence
  Synthetic oligonucleotide
ttcatgaaaacaaggttaatgattcgagtt

SEQ ID NO: 322954 - DNA, 30 bp, Artificial Sequence
  Synthetic oligonucleotide
acgcgtacggtttgaggtgatgcaggagtt

SEQ ID NO: 322955 - DNA, 30 bp, Artificial Sequence
  Synthetic oligonucleotide
cgtatgtgtgaagcctagcattgaggagtt

SEQ ID NO: 322956 - DNA, 30 bp, Artificial Sequence
  Synthetic oligonucleotide
cggactactcgcaacgctaggtagggagtt

SEQ ID NO: 322957 - DNA, 30 bp, Artificial Sequence
  Synthetic oligonucleotide
tagacgaggataagaacacgtatatgagtt

SEQ ID NO: 322958 - DNA, 30 bp, Artificial Sequence
  Synthetic oligonucleotide
actgtatgttaaggcacatttagctgagtt

SEQ ID NO: 322959 - DNA, 30 bp, Artificial Sequence
  Synthetic oligonucleotide
caggtccttgacattttgtgccggtgagtt

SEQ ID NO: 322960 - DNA, 30 bp, Artificial Sequence
  Synthetic oligonucleotide
tgctgggtcatggtatggatggcttgagtt

SEQ ID NO: 322961 - DNA, 30 bp, Artificial Sequence
  Synthetic oligonucleotide
ataagactctaaaaaaagacaggttgagtt

SEQ ID NO: 322962 - DNA, 30 bp, Artificial Sequence
  Synthetic oligonucleotide
atatgtacaagttcaagtcgagtttgagtt

SEQ ID NO: 322963 - DNA, 30 bp, Artificial Sequence
  Synthetic oligonucleotide
ttgcctagcttatgttttcgtttttgagtt

SEQ ID NO: 322964 - DNA, 30 bp, Artificial Sequence
  Synthetic oligonucleotide
agaatcgaagcatggagtttccgaatagtt

SEQ ID NO: 322965 - DNA, 31 bp, Artificial Sequence
  Synthetic oligonucleotide
gcacctaggcgtctggggttgactcatagtt

SEQ ID NO: 322966 - DNA, 30 bp, Artificial Sequence
  Synthetic oligonucleotide
taagtacgttaacatactataaagatagtt

SEQ ID NO: 322967 - DNA, 30 bp, Artificial Sequence
  Synthetic oligonucleotide
cgccctccaggcggccagcgacagatagtt

SEQ ID NO: 322968 - DNA, 30 bp, Artificial Sequence
  Synthetic oligonucleotide
ctggcgtagttttacgcaacctggatagtt

SEQ ID NO: 322969 - DNA, 30 bp, Artificial Sequence
  Synthetic oligonucleotide
agccctactggacattgcaattggatagtt

SEQ ID NO: 322970 - DNA, 30 bp, Artificial Sequence
  Synthetic oligonucleotide
gtgagagctcccgaaaggccccgtatagtt

SEQ ID NO: 322971 - DNA, 30 bp, Artificial Sequence
  Synthetic oligonucleotide
tctcgcgctcccaccagacgtcttatagtt

SEQ ID NO: 322972 - DNA, 30 bp, Artificial Sequence
  Synthetic oligonucleotide
caaacgacgtgggacacttcaaccctagtt

SEQ ID NO: 322973 - DNA, 30 bp, Artificial Sequence
  Synthetic oligonucleotide
gtttatctgtaggtcaatatctccctagtt

SEQ ID NO: 322974 - DNA, 30 bp, Artificial Sequence
  Synthetic oligonucleotide
tcgcagtatttatgccttttaaagctagtt

SEQ ID NO: 322975 - DNA, 30 bp, Artificial Sequence
  Synthetic oligonucleotide
tgtaacacgaaagcacaagtactgctagtt

SEQ ID NO: 322976 - DNA, 30 bp, Artificial Sequence
  Synthetic oligonucleotide
tcacccgatctggttcaggtgtatctagtt

SEQ ID NO: 322977 - DNA, 30 bp, Artificial Sequence
  Synthetic oligonucleotide
atcaagaaacggccaaagggtccagtagtt

SEQ ID NO: 322978 - DNA, 30 bp, Artificial Sequence
  Synthetic oligonucleotide
ggaacggagttaaccgaccatttagtagtt

SEQ ID NO: 322979 - DNA, 30 bp, Artificial Sequence
  Synthetic oligonucleotide
gttcacaaattagatcgtctggacgtagtt

SEQ ID NO: 322980 - DNA, 30 bp, Artificial Sequence
  Synthetic oligonucleotide
tgataattatttaatgaaggcggcgtagtt

SEQ ID NO: 322981 - DNA, 30 bp, Artificial Sequence
  Synthetic oligonucleotide
cctgttgtaccgagtacaaatagggtagtt

SEQ ID NO: 322982 - DNA, 30 bp, Artificial Sequence
  Synthetic oligonucleotide
ggacacggatagtaaatctcttagttagtt

SEQ ID NO: 322983 - DNA, 30 bp, Artificial Sequence
  Synthetic oligonucleotide
gtccgactagcacgagataaaatgttagtt

SEQ ID NO: 322984 - DNA, 30 bp, Artificial Sequence
  Synthetic oligonucleotide
tagataaccgcgacgggaagcgctttagtt

SEQ ID NO: 322985 - DNA, 30 bp, Artificial Sequence
  Synthetic oligonucleotide
tcaaggtgctttgacgtgttgcaaaacgtt

SEQ ID NO: 322986 - DNA, 30 bp, Artificial Sequence
  Synthetic oligonucleotide
tccgcataatcagggatgtcgacaaacgtt

SEQ ID NO: 322987 - DNA, 30 bp, Artificial Sequence
  Synthetic oligonucleotide
gctgcagagtctctcacaccgagaaacgtt

SEQ ID NO: 322988 - DNA, 30 bp, Artificial Sequence
  Synthetic oligonucleotide
ttgcatccgtatacgcgatccggaaacgtt

SEQ ID NO: 322989 - DNA, 31 bp, Artificial Sequence
  Synthetic oligonucleotide
ccgaaatggccgtacactatggttaaacgtt

SEQ ID NO: 322990 - DNA, 30 bp, Artificial Sequence
  Synthetic oligonucleotide
cggaagtggtaatcttgaatccccaacgtt

SEQ ID NO: 322991 - DNA, 30 bp, Artificial Sequence
  Synthetic oligonucleotide
acggttatgggaatacgggaccgcaacgtt

SEQ ID NO: 322992 - DNA, 30 bp, Artificial Sequence
  Synthetic oligonucleotide
aacaataggtataagtgtcggcggaacgtt

SEQ ID NO: 322993 - DNA, 30 bp, Artificial Sequence
  Synthetic oligonucleotide
gcgtgggttcccatcccacagtataacgtt

SEQ ID NO: 322994 - DNA, 30 bp, Artificial Sequence
  Synthetic oligonucleotide
acgtgtattgaaacattccgacaacacgtt

SEQ ID NO: 322995 - DNA, 30 bp, Artificial Sequence
  Synthetic oligonucleotide
taaatagagaaagttagaggaacgcacgtt

SEQ ID NO: 322996 - DNA, 30 bp, Artificial Sequence
  Synthetic oligonucleotide
ggaccgctacggtctggccaatcgcacgtt

SEQ ID NO: 322997 - DNA, 30 bp, Artificial Sequence
  Synthetic oligonucleotide
gtcgaaacctgatacgctcgattgcacgtt

SEQ ID NO: 322998 - DNA, 30 bp, Artificial Sequence
  Synthetic oligonucleotide
aacgacacgtaactctaactaggtcacgtt

SEQ ID NO: 322999 - DNA, 30 bp, Artificial Sequence
  Synthetic oligonucleotide
agtgctaggtcagtcgtggacccagacgtt

SEQ ID NO: 323000 - DNA, 30 bp, Artificial Sequence
  Synthetic oligonucleotide
atattgaagcatttggtgggcccagacgtt

SEQ ID NO: 323001 - DNA, 30 bp, Artificial Sequence
  Synthetic oligonucleotide
tgaaaatcgacgtcagtgtcgatagacgtt

SEQ ID NO: 323002 - DNA, 30 bp, Artificial Sequence
  Synthetic oligonucleotide
cgactacattctacagatatatgcgacgtt

SEQ ID NO: 323003 - DNA, 30 bp, Artificial Sequence
  Synthetic oligonucleotide
gcgtgcattgataagcacgcgacggacgtt

SEQ ID NO: 323004 - DNA, 30 bp, Artificial Sequence
  Synthetic oligonucleotide
aggatgagttgtgttaacatattggacgtt

SEQ ID NO: 323005 - DNA, 30 bp, Artificial Sequence
  Synthetic oligonucleotide
aggagacctactttgctggaagcatacgtt

SEQ ID NO: 323006 - DNA, 30 bp, Artificial Sequence
  Synthetic oligonucleotide
cgtgacgtacacttatgtccaagatacgtt

SEQ ID NO: 323007 - DNA, 30 bp, Artificial Sequence
  Synthetic oligonucleotide
acgagttcatatatctcaggtagctacgtt

SEQ ID NO: 323008 - DNA, 30 bp, Artificial Sequence
  Synthetic oligonucleotide
tcttatcgagtacgcatgattagctacgtt

SEQ ID NO: 323009 - DNA, 30 bp, Artificial Sequence
  Synthetic oligonucleotide
attgaaacggttatcaggtgcctttacgtt

SEQ ID NO: 323010 - DNA, 30 bp, Artificial Sequence
  Synthetic oligonucleotide
aaaagatcatttgcaaattgaggaaccgtt

SEQ ID NO: 323011 - DNA, 30 bp, Artificial Sequence
  Synthetic oligonucleotide
tcggttcatttggcatgtaggaacaccgtt

SEQ ID NO: 323012 - DNA, 30 bp, Artificial Sequence
  Synthetic oligonucleotide
tcctcagtactatcagtagagaccaccgtt

SEQ ID NO: 323013 - DNA, 30 bp, Artificial Sequence
  Synthetic oligonucleotide
cgttaaactcatgatatagggccgaccgtt

SEQ ID NO: 323014 - DNA, 30 bp, Artificial Sequence
  Synthetic oligonucleotide
ttataacattatcatcagccctttaccgtt

SEQ ID NO: 323015 - DNA, 30 bp, Artificial Sequence
  Synthetic oligonucleotide
tatgtgatgcgctggtatgccttccccgtt

SEQ ID NO: 323016 - DNA, 30 bp, Artificial Sequence
  Synthetic oligonucleotide
tgtgtaatggaattgcccggacatcccgtt

SEQ ID NO: 323017 - DNA, 30 bp, Artificial Sequence
  Synthetic oligonucleotide
ttggatagagagtatttagaagttcccgtt

SEQ ID NO: 323018 - DNA, 30 bp, Artificial Sequence
  Synthetic oligonucleotide
ggaactatggccagcccacaccgcgccgtt

SEQ ID NO: 323019 - DNA, 30 bp, Artificial Sequence
  Synthetic oligonucleotide
atgtcataaggtctcaataagtgcgccgtt

SEQ ID NO: 323020 - DNA, 30 bp, Artificial Sequence
  Synthetic oligonucleotide
ccacagctgtcacacagtccgtgcgccgtt

SEQ ID NO: 323021 - DNA, 30 bp, Artificial Sequence
  Synthetic oligonucleotide
ctgactgatacgatgaacgttaatgccgtt

SEQ ID NO: 323022 - DNA, 30 bp, Artificial Sequence
  Synthetic oligonucleotide
tgacctaatacgcagagaggtcgtgccgtt

SEQ ID NO: 323023 - DNA, 30 bp, Artificial Sequence
  Synthetic oligonucleotide
catattaggaatgcctggagcgttgccgtt

SEQ ID NO: 323024 - DNA, 30 bp, Artificial Sequence
  Synthetic oligonucleotide
caccgccacctcgatcgagaatcatccgtt

SEQ ID NO: 323025 - DNA, 30 bp, Artificial Sequence
  Synthetic oligonucleotide
tgcgaacgaattgcttgccaaatatccgtt

SEQ ID NO: 323026 - DNA, 30 bp, Artificial Sequence
  Synthetic oligonucleotide
gtaaacttgattcggttaactgcttccgtt

SEQ ID NO: 323027 - DNA, 30 bp, Artificial Sequence
  Synthetic oligonucleotide
atggtccttccttctaagccaagttccgtt

SEQ ID NO: 323028 - DNA, 30 bp, Artificial Sequence
  Synthetic oligonucleotide
gggtctgtgtcacgcgatcgtttttccgtt

SEQ ID NO: 323029 - DNA, 30 bp, Artificial Sequence
  Synthetic oligonucleotide
gagggcgtacagggataggcgctaagcgtt

SEQ ID NO: 323030 - DNA, 30 bp, Artificial Sequence
  Synthetic oligonucleotide
agacggtttcatgtttattggatcagcgtt

SEQ ID NO: 323031 - DNA, 30 bp, Artificial Sequence
  Synthetic oligonucleotide
tcacaggtcgggttcatttttctcagcgtt

SEQ ID NO: 323032 - DNA, 30 bp, Artificial Sequence
  Synthetic oligonucleotide
gcttatgtcgagactcgataggtgagcgtt

SEQ ID NO: 323033 - DNA, 30 bp, Artificial Sequence
  Synthetic oligonucleotide
ccctagccggtataggtaacgggtagcgtt

SEQ ID NO: 323034 - DNA, 30 bp, Artificial Sequence
  Synthetic oligonucleotide
gtgcgcagcggcatgactgtcattagcgtt

SEQ ID NO: 323035 - DNA, 30 bp, Artificial Sequence
  Synthetic oligonucleotide
cttactgacggtacgcacctggttagcgtt

SEQ ID NO: 323036 - DNA, 30 bp, Artificial Sequence
  Synthetic oligonucleotide
tgcacattgagcattccaacataacgcgtt

SEQ ID NO: 323037 - DNA, 30 bp, Artificial Sequence
  Synthetic oligonucleotide
gtttgctttgtaaaaaggggtcgccgcgtt

SEQ ID NO: 323038 - DNA, 30 bp, Artificial Sequence
  Synthetic oligonucleotide
tgtgactaaggcgaggtgtctttccgcgtt

SEQ ID NO: 323039 - DNA, 30 bp, Artificial Sequence
  Synthetic oligonucleotide
cggcaatgacttcaagagggtaagcgcgtt

SEQ ID NO: 323040 - DNA, 30 bp, Artificial Sequence
  Synthetic oligonucleotide
ctaattgtttatccggagatcgctcgcgtt

SEQ ID NO: 323041 - DNA, 30 bp, Artificial Sequence
  Synthetic oligonucleotide
ctgccaattgggcttgaacaaccgggcgtt

SEQ ID NO: 323042 - DNA, 30 bp, Artificial Sequence
  Synthetic oligonucleotide
agtagcaataattggaaccaaatgggcgtt

SEQ ID NO: 323043 - DNA, 30 bp, Artificial Sequence
  Synthetic oligonucleotide
gtaagttgttgacgagcatcagtgggcgtt

SEQ ID NO: 323044 - DNA, 30 bp, Artificial Sequence
  Synthetic oligonucleotide
gtagattgtcaggtggcatcagactgcgtt

SEQ ID NO: 323045 - DNA, 30 bp, Artificial Sequence
  Synthetic oligonucleotide
atacccgaattgagctctcaaccctgcgtt

SEQ ID NO: 323046 - DNA, 30 bp, Artificial Sequence
  Synthetic oligonucleotide
gtgtcaagccgttattaggttcggtgcgtt

SEQ ID NO: 323047 - DNA, 30 bp, Artificial Sequence
  Synthetic oligonucleotide
accaatctataaagatattcaaaaatcgtt

SEQ ID NO: 323048 - DNA, 30 bp, Artificial Sequence
  Synthetic oligonucleotide
agataaagtacacctcgattattaatcgtt

SEQ ID NO: 323049 - DNA, 30 bp, Artificial Sequence
  Synthetic oligonucleotide
gcgcagtaggtaagactccactctatcgtt

SEQ ID NO: 323050 - DNA, 30 bp, Artificial Sequence
  Synthetic oligonucleotide
ccactaaggcaggaagctcgatttatcgtt

SEQ ID NO: 323051 - DNA, 30 bp, Artificial Sequence
  Synthetic oligonucleotide
gcgaataaactgggcgctgcaatactcgtt

SEQ ID NO: 323052 - DNA, 30 bp, Artificial Sequence
  Synthetic oligonucleotide
gcaggaaagtaacggggtctgatactcgtt

SEQ ID NO: 323053 - DNA, 30 bp, Artificial Sequence
  Synthetic oligonucleotide
aaactctgccagaaggtgtggttcctcgtt

SEQ ID NO: 323054 - DNA, 30 bp, Artificial Sequence
  Synthetic oligonucleotide
tatacagtacatctctaaaatgtgctcgtt

SEQ ID NO: 323055 - DNA, 30 bp, Artificial Sequence
  Synthetic oligonucleotide
ccggtggattcatgtcgggccgttctcgtt

SEQ ID NO: 323056 - DNA, 30 bp, Artificial Sequence
  Synthetic oligonucleotide
gagaaacacgcggacggtaacctagtcgtt

SEQ ID NO: 323057 - DNA, 30 bp, Artificial Sequence
  Synthetic oligonucleotide
aggtactgtaaaaggggctcgtacgtcgtt

SEQ ID NO: 323058 - DNA, 30 bp, Artificial Sequence
  Synthetic oligonucleotide
gcagggtccgttagcttcatgctcgtcgtt

SEQ ID NO: 323059 - DNA, 30 bp, Artificial Sequence
  Synthetic oligonucleotide
caatgcaaatcccgagtatgttcggtcgtt

SEQ ID NO: 323060 - DNA, 30 bp, Artificial Sequence
  Synthetic oligonucleotide
ttctgccgtcataagaaagagcatgtcgtt

SEQ ID NO: 323061 - DNA, 30 bp, Artificial Sequence
  Synthetic oligonucleotide
tgaacactaacgaaccaataaggtgtcgtt

SEQ ID NO: 323062 - DNA, 30 bp, Artificial Sequence
  Synthetic oligonucleotide
aggggttagttcatagtacgctgtgtcgtt

SEQ ID NO: 323063 - DNA, 30 bp, Artificial Sequence
  Synthetic oligonucleotide
cttggagacattgtctgagagagcttcgtt

SEQ ID NO: 323064 - DNA, 30 bp, Artificial Sequence
  Synthetic oligonucleotide
agatggaaatgtagttgaattctcttcgtt

SEQ ID NO: 323065 - DNA, 30 bp, Artificial Sequence
  Synthetic oligonucleotide
gcagccaagtagcactcgcgaccgttcgtt

SEQ ID NO: 323066 - DNA, 30 bp, Artificial Sequence
  Synthetic oligonucleotide
gttaacgggtcaggcgagtttgtgttcgtt

SEQ ID NO: 323067 - DNA, 30 bp, Artificial Sequence
  Synthetic oligonucleotide
cgttggtaaaccgcgcggacccaaaaggtt

SEQ ID NO: 323068 - DNA, 30 bp, Artificial Sequence
  Synthetic oligonucleotide
atcgcagtctgcgcgggcatctcaaaggtt

SEQ ID NO: 323069 - DNA, 30 bp, Artificial Sequence
  Synthetic oligonucleotide
acatcgcggtctgcccagccaggaaaggtt

SEQ ID NO: 323070 - DNA, 30 bp, Artificial Sequence
  Synthetic oligonucleotide
gaacgcggcaacatagggggattaaaggtt

SEQ ID NO: 323071 - DNA, 30 bp, Artificial Sequence
  Synthetic oligonucleotide
aagggtggtgattttttttggaccaaggtt

SEQ ID NO: 323072 - DNA, 30 bp, Artificial Sequence
  Synthetic oligonucleotide
gacgcggactgtcgttggagtcccaaggtt

SEQ ID NO: 323073 - DNA, 30 bp, Artificial Sequence
  Synthetic oligonucleotide
aaaaaggaagataatcgattactcaaggtt

SEQ ID NO: 323074 - DNA, 30 bp, Artificial Sequence
  Synthetic oligonucleotide
gttgggatcacggccaggtacacgaaggtt

SEQ ID NO: 323075 - DNA, 30 bp, Artificial Sequence
  Synthetic oligonucleotide
gcgacatagaaccgtaatggcgcgaaggtt

SEQ ID NO: 323076 - DNA, 30 bp, Artificial Sequence
  Synthetic oligonucleotide
tgtatactagcgtattcatcatggaaggtt

SEQ ID NO: 323077 - DNA, 30 bp, Artificial Sequence
  Synthetic oligonucleotide
ttctcaatagtaaggtaaactcgtaaggtt

SEQ ID NO: 323078 - DNA, 30 bp, Artificial Sequence
  Synthetic oligonucleotide
tgcgtgctagggggagccctccttaaggtt

SEQ ID NO: 323079 - DNA, 31 bp, Artificial Sequence
  Synthetic oligonucleotide
ctattccatctattggctgttcgttaaggtt

SEQ ID NO: 323080 - DNA, 30 bp, Artificial Sequence
  Synthetic oligonucleotide
acactcgatttggataggttgtaacaggtt

SEQ ID NO: 323081 - DNA, 30 bp, Artificial Sequence
  Synthetic oligonucleotide
gtttgctttggagggaggcgcgaccaggtt

SEQ ID NO: 323082 - DNA, 30 bp, Artificial Sequence
  Synthetic oligonucleotide
ccatgggcgggaacagcgagtggccaggtt

SEQ ID NO: 323083 - DNA, 30 bp, Artificial Sequence
  Synthetic oligonucleotide
caggtctgggcaaggccgacagatcaggtt

SEQ ID NO: 323084 - DNA, 30 bp, Artificial Sequence
  Synthetic oligonucleotide
acgaacacacagatgcgtggttttcaggtt

SEQ ID NO: 323085 - DNA, 30 bp, Artificial Sequence
  Synthetic oligonucleotide
aagctaagtgttcgctgatattgggaggtt

SEQ ID NO: 323086 - DNA, 30 bp, Artificial Sequence
  Synthetic oligonucleotide
acaagcctcttagcgtctttcaatgaggtt

SEQ ID NO: 323087 - DNA, 30 bp, Artificial Sequence
  Synthetic oligonucleotide
atattaaactgatcctgttgacatgaggtt

SEQ ID NO: 323088 - DNA, 30 bp, Artificial Sequence
  Synthetic oligonucleotide
ccggtattaagaaaaggttcatgtgaggtt

SEQ ID NO: 323089 - DNA, 30 bp, Artificial Sequence
  Synthetic oligonucleotide
gatcagtcagtgttaatgcaatgataggtt

SEQ ID NO: 323090 - DNA, 30 bp, Artificial Sequence
  Synthetic oligonucleotide
taggaccaggatgattaacatttataggtt

SEQ ID NO: 323091 - DNA, 30 bp, Artificial Sequence
  Synthetic oligonucleotide
aaactgcgacatatttgcctacgctaggtt

SEQ ID NO: 323092 - DNA, 30 bp, Artificial Sequence
  Synthetic oligonucleotide
tgtggcaaattagtaagtgtgtgctaggtt

SEQ ID NO: 323093 - DNA, 30 bp, Artificial Sequence
  Synthetic oligonucleotide
gcaacttgttgagtgagcggtgcgtaggtt

SEQ ID NO: 323094 - DNA, 30 bp, Artificial Sequence
  Synthetic oligonucleotide
ttatcctctcggatctgtgtcttgtaggtt

SEQ ID NO: 323095 - DNA, 30 bp, Artificial Sequence
  Synthetic oligonucleotide
tcgggccaaacttcagcaacgtattaggtt

SEQ ID NO: 323096 - DNA, 30 bp, Artificial Sequence
  Synthetic oligonucleotide
ggcactctataaagcgtgagatgttaggtt

SEQ ID NO: 323097 - DNA, 30 bp, Artificial Sequence
  Synthetic oligonucleotide
catgggaggttcctggggtatatttaggtt

SEQ ID NO: 323098 - DNA, 30 bp, Artificial Sequence
  Synthetic oligonucleotide
attgcgttcggatggcacagaagaacggtt

SEQ ID NO: 323099 - DNA, 30 bp, Artificial Sequence
  Synthetic oligonucleotide
cgatttggtgctatgcggggatgaacggtt

SEQ ID NO: 323100 - DNA, 30 bp, Artificial Sequence
  Synthetic oligonucleotide
cacattgactcatacccgatgtgcacggtt

SEQ ID NO: 323101 - DNA, 31 bp, Artificial Sequence
  Synthetic oligonucleotide
agcgggctggctagggaatggactcacggtt

SEQ ID NO: 323102 - DNA, 30 bp, Artificial Sequence
  Synthetic oligonucleotide
ggacgcaccgcactagataggcatacggtt

SEQ ID NO: 323103 - DNA, 30 bp, Artificial Sequence
  Synthetic oligonucleotide
atgccccggcaagcctatcaggatacggtt

SEQ ID NO: 323104 - DNA, 30 bp, Artificial Sequence
  Synthetic oligonucleotide
ccatgacggcggaaacccaagtttacggtt

SEQ ID NO: 323105 - DNA, 30 bp, Artificial Sequence
  Synthetic oligonucleotide
acgcttacgatcacatgatgtgaaccggtt

SEQ ID NO: 323106 - DNA, 30 bp, Artificial Sequence
  Synthetic oligonucleotide
agggtctggatactgtctgagatcccggtt

SEQ ID NO: 323107 - DNA, 30 bp, Artificial Sequence
  Synthetic oligonucleotide
ttctgatgcgtaagagcatgcgcgccggtt

SEQ ID NO: 323108 - DNA, 30 bp, Artificial Sequence
  Synthetic oligonucleotide
gctggccgcacacacaaaggtgaagcggtt

SEQ ID NO: 323109 - DNA, 30 bp, Artificial Sequence
  Synthetic oligonucleotide
ttgtcctgaacggatagaacaatagcggtt

SEQ ID NO: 323110 - DNA, 30 bp, Artificial Sequence
  Synthetic oligonucleotide
tcccaagcatgggtaaccacaaaggcggtt

SEQ ID NO: 323111 - DNA, 30 bp, Artificial Sequence
  Synthetic oligonucleotide
tggagagtttcccccgtacgctcggcggtt

SEQ ID NO: 323112 - DNA, 30 bp, Artificial Sequence
  Synthetic oligonucleotide
ttctacgtcggacaattgaccatatcggtt

SEQ ID NO: 323113 - DNA, 30 bp, Artificial Sequence
  Synthetic oligonucleotide
aactagacgtcgtaacgccttccctcggtt

SEQ ID NO: 323114 - DNA, 30 bp, Artificial Sequence
  Synthetic oligonucleotide
tccgttgttagcgagtatgttctctcggtt

SEQ ID NO: 323115 - DNA, 30 bp, Artificial Sequence
  Synthetic oligonucleotide
tgccagcggtagggacccggatcgtcggtt

SEQ ID NO: 323116 - DNA, 30 bp, Artificial Sequence
  Synthetic oligonucleotide
tattatcatcgagtgctacgttgttcggtt

SEQ ID NO: 323117 - DNA, 30 bp, Artificial Sequence
  Synthetic oligonucleotide
catcagaatataaacttgacactttcggtt

SEQ ID NO: 323118 - DNA, 30 bp, Artificial Sequence
  Synthetic oligonucleotide
tggagctcccgattggcagcaaaaagggtt

SEQ ID NO: 323119 - DNA, 30 bp, Artificial Sequence
  Synthetic oligonucleotide
caggaagcccaatcgggtttgcaaagggtt

SEQ ID NO: 323120 - DNA, 30 bp, Artificial Sequence
  Synthetic oligonucleotide
cgagcaagatctcattgtgtcttaagggtt

SEQ ID NO: 323121 - DNA, 30 bp, Artificial Sequence
  Synthetic oligonucleotide
gttgtgagagttgaacggtgttacagggtt

SEQ ID NO: 323122 - DNA, 30 bp, Artificial Sequence
  Synthetic oligonucleotide
gttgataatataccagtcactaccagggtt

SEQ ID NO: 323123 - DNA, 30 bp, Artificial Sequence
  Synthetic oligonucleotide
ccggggttttttgtctataaaacgagggtt

SEQ ID NO: 323124 - DNA, 30 bp, Artificial Sequence
  Synthetic oligonucleotide
gccttacgtacaagtaaatctgggagggtt

SEQ ID NO: 323125 - DNA, 30 bp, Artificial Sequence
  Synthetic oligonucleotide
cgtcattcgccgtctggcgaaaatagggtt

SEQ ID NO: 323126 - DNA, 30 bp, Artificial Sequence
  Synthetic oligonucleotide
tacatctttccgggaattcaacctagggtt

SEQ ID NO: 323127 - DNA, 30 bp, Artificial Sequence
  Synthetic oligonucleotide
tccctcgacagtgcactaaaaattagggtt

SEQ ID NO: 323128 - DNA, 30 bp, Artificial Sequence
  Synthetic oligonucleotide
ccatataatgatgcatataactttagggtt

SEQ ID NO: 323129 - DNA, 30 bp, Artificial Sequence
  Synthetic oligonucleotide
gaaactgtgtgtatatccccggaacgggtt

SEQ ID NO: 323130 - DNA, 30 bp, Artificial Sequence
  Synthetic oligonucleotide
tttcaggacgacttgagacttgaacgggtt

SEQ ID NO: 323131 - DNA, 30 bp, Artificial Sequence
  Synthetic oligonucleotide
agacatccggtcagtccgtggccacgggtt

SEQ ID NO: 323132 - DNA, 30 bp, Artificial Sequence
  Synthetic oligonucleotide
catttctgacactatatctttccacgggtt

SEQ ID NO: 323133 - DNA, 30 bp, Artificial Sequence
  Synthetic oligonucleotide
gtatttgcgcagagtatcacggcacgggtt

SEQ ID NO: 323134 - DNA, 29 bp, Artificial Sequence
  Synthetic oligonucleotide
tatggtccgcaatctttctagctcgggtt

SEQ ID NO: 323135 - DNA, 30 bp, Artificial Sequence
  Synthetic oligonucleotide
ggacccattttcgcttgccttgacggggtt

SEQ ID NO: 323136 - DNA, 30 bp, Artificial Sequence
  Synthetic oligonucleotide
gggtcatcccaagatttgggttccggggtt

SEQ ID NO: 323137 - DNA, 30 bp, Artificial Sequence
  Synthetic oligonucleotide
caaactcaaaccttttaggtgtcgggggtt

SEQ ID NO: 323138 - DNA, 30 bp, Artificial Sequence
  Synthetic oligonucleotide
gcagacgaatgggtctgtttagtgggggtt

SEQ ID NO: 323139 - DNA, 30 bp, Artificial Sequence
  Synthetic oligonucleotide
tgccagttagttatagcacatgtgggggtt

SEQ ID NO: 323140 - DNA, 30 bp, Artificial Sequence
  Synthetic oligonucleotide
ctaaggccgtgcgaggacacatttggggtt

SEQ ID NO: 323141 - DNA, 30 bp, Artificial Sequence
  Synthetic oligonucleotide
aggagcgctagtccgatcaagtttggggtt

SEQ ID NO: 323142 - DNA, 30 bp, Artificial Sequence
  Synthetic oligonucleotide
acatcctcgcaaaatatcgctttctgggtt

SEQ ID NO: 323143 - DNA, 30 bp, Artificial Sequence
  Synthetic oligonucleotide
cgcgaacccagggatgtaatatcgtgggtt

SEQ ID NO: 323144 - DNA, 30 bp, Artificial Sequence
  Synthetic oligonucleotide
agggtggtagagagggtgactgggtgggtt

SEQ ID NO: 323145 - DNA, 30 bp, Artificial Sequence
  Synthetic oligonucleotide
aacgactagtaaattaccgggtattgggtt

SEQ ID NO: 323146 - DNA, 30 bp, Artificial Sequence
  Synthetic oligonucleotide
gagttctctaagcgtatcctccaaatggtt

SEQ ID NO: 323147 - DNA, 30 bp, Artificial Sequence
  Synthetic oligonucleotide
gaggacgtaaacgcaaggataaacatggtt

SEQ ID NO: 323148 - DNA, 30 bp, Artificial Sequence
  Synthetic oligonucleotide
tacagcgggtgcggataccaagcgatggtt

SEQ ID NO: 323149 - DNA, 30 bp, Artificial Sequence
  Synthetic oligonucleotide
ctctggtatttgtgaacctctctgatggtt

SEQ ID NO: 323150 - DNA, 29 bp, Artificial Sequence
  Synthetic oligonucleotide
gctcggtaatttcgtcgacgattatggtt

SEQ ID NO: 323151 - DNA, 30 bp, Artificial Sequence
  Synthetic oligonucleotide
catgagtgcacttggtcgacacgcctggtt

SEQ ID NO: 323152 - DNA, 30 bp, Artificial Sequence
  Synthetic oligonucleotide
caaccaagggcgaaacctcagcctctggtt

SEQ ID NO: 323153 - DNA, 30 bp, Artificial Sequence
  Synthetic oligonucleotide
caaggaatggtttttctttatggagtggtt

SEQ ID NO: 323154 - DNA, 30 bp, Artificial Sequence
  Synthetic oligonucleotide
aaggtacaatccccacgaatccgggtggtt

SEQ ID NO: 323155 - DNA, 30 bp, Artificial Sequence
  Synthetic oligonucleotide
atgatgaatgcgtggtttaactttgtggtt

SEQ ID NO: 323156 - DNA, 30 bp, Artificial Sequence
  Synthetic oligonucleotide
ttggtagggtaactgtgcttacaattggtt

SEQ ID NO: 323157 - DNA, 30 bp, Artificial Sequence
  Synthetic oligonucleotide
agtgttatggcgcctgtataaacattggtt

SEQ ID NO: 323158 - DNA, 30 bp, Artificial Sequence
  Synthetic oligonucleotide
ttgggaaatttggatccgaggccattggtt

SEQ ID NO: 323159 - DNA, 30 bp, Artificial Sequence
  Synthetic oligonucleotide
gagtaccacgcaaggacgggtgcgttggtt

SEQ ID NO: 323160 - DNA, 30 bp, Artificial Sequence
  Synthetic oligonucleotide
caaattaacgacctgcacacctggttggtt

SEQ ID NO: 323161 - DNA, 30 bp, Artificial Sequence
  Synthetic oligonucleotide
atcagattggagggaaccgagaaaaatgtt

SEQ ID NO: 323162 - DNA, 30 bp, Artificial Sequence
  Synthetic oligonucleotide
caacggcattcctgtttacgggcaaatgtt

SEQ ID NO: 323163 - DNA, 30 bp, Artificial Sequence
  Synthetic oligonucleotide
cagtggcttcccgcgcccagaataaatgtt

SEQ ID NO: 323164 - DNA, 30 bp, Artificial Sequence
  Synthetic oligonucleotide
cctcagattttaacgaacgatcgcaatgtt

SEQ ID NO: 323165 - DNA, 30 bp, Artificial Sequence
  Synthetic oligonucleotide
ttgcaggcccatgagtcagaactcaatgtt

SEQ ID NO: 323166 - DNA, 30 bp, Artificial Sequence
  Synthetic oligonucleotide
gaatcgattgcccgatgagtactcaatgtt

SEQ ID NO: 323167 - DNA, 30 bp, Artificial Sequence
  Synthetic oligonucleotide
atacttacaatggtgcttacttctaatgtt

SEQ ID NO: 323168 - DNA, 30 bp, Artificial Sequence
  Synthetic oligonucleotide
ccccgttagcgtcgtagcaggggtaatgtt

SEQ ID NO: 323169 - DNA, 30 bp, Artificial Sequence
  Synthetic oligonucleotide
ggcatttctccggaagtgctggttaatgtt

SEQ ID NO: 323170 - DNA, 30 bp, Artificial Sequence
  Synthetic oligonucleotide
cagtaggtcgattcatgggggcgacatgtt

SEQ ID NO: 323171 - DNA, 30 bp, Artificial Sequence
  Synthetic oligonucleotide
agtacccaccgtgcagtcaatccccatgtt

SEQ ID NO: 323172 - DNA, 30 bp, Artificial Sequence
  Synthetic oligonucleotide
cccattaggctcagatagccttgccatgtt

SEQ ID NO: 323173 - DNA, 30 bp, Artificial Sequence
  Synthetic oligonucleotide
tttgcacgattgccggattaactgcatgtt

SEQ ID NO: 323174 - DNA, 30 bp, Artificial Sequence
  Synthetic oligonucleotide
gtttcgaacatgtaaccccagcctcatgtt

SEQ ID NO: 323175 - DNA, 31 bp, Artificial Sequence
  Synthetic oligonucleotide
accatccctaacgcaatgtgcggaagatgtt

SEQ ID NO: 323176 - DNA, 30 bp, Artificial Sequence
  Synthetic oligonucleotide
tgcgttgtgcaaaatttacgcacagatgtt

SEQ ID NO: 323177 - DNA, 30 bp, Artificial Sequence
  Synthetic oligonucleotide
acaaatgggggaaaacccttgacagatgtt

SEQ ID NO: 323178 - DNA, 30 bp, Artificial Sequence
  Synthetic oligonucleotide
ccttacttcatccaattaagtatagatgtt

SEQ ID NO: 323179 - DNA, 30 bp, Artificial Sequence
  Synthetic oligonucleotide
tgtcaatcaattgccgaactgttagatgtt

SEQ ID NO: 323180 - DNA, 30 bp, Artificial Sequence
  Synthetic oligonucleotide
taactgttttgactaaatgaatacgatgtt

SEQ ID NO: 323181 - DNA, 30 bp, Artificial Sequence
  Synthetic oligonucleotide
tctcggataacgcttgcgcgcagcgatgtt

SEQ ID NO: 323182 - DNA, 30 bp, Artificial Sequence
  Synthetic oligonucleotide
gggaatggctaccgggacccccgtgatgtt

SEQ ID NO: 323183 - DNA, 30 bp, Artificial Sequence
  Synthetic oligonucleotide
gtctgtcgtggattgtgatgttattatgtt

SEQ ID NO: 323184 - DNA, 30 bp, Artificial Sequence
  Synthetic oligonucleotide
ttaaaaagataatcgttgtatggaactgtt

SEQ ID NO: 323185 - DNA, 30 bp, Artificial Sequence
  Synthetic oligonucleotide
gcgacgagcacgcgcccgcgccggactgtt

SEQ ID NO: 323186 - DNA, 30 bp, Artificial Sequence
  Synthetic oligonucleotide
gagtctgagacaggttgaagggggactgtt

SEQ ID NO: 323187 - DNA, 30 bp, Artificial Sequence
  Synthetic oligonucleotide
aattgacaaccgcaaagctgccgtactgtt

SEQ ID NO: 323188 - DNA, 30 bp, Artificial Sequence
  Synthetic oligonucleotide
cccctgtagcgaatatcgctctgtactgtt

SEQ ID NO: 323189 - DNA, 30 bp, Artificial Sequence
  Synthetic oligonucleotide
ccccgcaaggaaagatttgtagaacctgtt

SEQ ID NO: 323190 - DNA, 30 bp, Artificial Sequence
  Synthetic oligonucleotide
gaggggtctgagccagaccgcccacctgtt

SEQ ID NO: 323191 - DNA, 30 bp, Artificial Sequence
  Synthetic oligonucleotide
taaaggaggcagggctttgggtcccctgtt

SEQ ID NO: 323192 - DNA, 30 bp, Artificial Sequence
  Synthetic oligonucleotide
acaaaacaaagggcggccctgtaagctgtt

SEQ ID NO: 323193 - DNA, 30 bp, Artificial Sequence
  Synthetic oligonucleotide
caggggttcaaccaatcgataggagctgtt

SEQ ID NO: 323194 - DNA, 30 bp, Artificial Sequence
  Synthetic oligonucleotide
gggtacttaatcagtcatccgttagctgtt

SEQ ID NO: 323195 - DNA, 30 bp, Artificial Sequence
  Synthetic oligonucleotide
actctatagccacgcatgtaccatgctgtt

SEQ ID NO: 323196 - DNA, 30 bp, Artificial Sequence
  Synthetic oligonucleotide
cgctgcgtagggactgttttctgtgctgtt

SEQ ID NO: 323197 - DNA, 30 bp, Artificial Sequence
  Synthetic oligonucleotide
tgactggtgcaacgcgtcaagcttgctgtt

SEQ ID NO: 323198 - DNA, 30 bp, Artificial Sequence
  Synthetic oligonucleotide
ataggaaccgttcattgtggtcaatctgtt

SEQ ID NO: 323199 - DNA, 30 bp, Artificial Sequence
  Synthetic oligonucleotide
gatcatggcttactaatgagtggatctgtt

SEQ ID NO: 323200 - DNA, 30 bp, Artificial Sequence
  Synthetic oligonucleotide
atctagttacagactagattactatctgtt

SEQ ID NO: 323201 - DNA, 30 bp, Artificial Sequence
  Synthetic oligonucleotide
tacggtaggccgtgtgagtcatactctgtt

SEQ ID NO: 323202 - DNA, 30 bp, Artificial Sequence
  Synthetic oligonucleotide
ttacagttgggtggaggaccttactctgtt

SEQ ID NO: 323203 - DNA, 30 bp, Artificial Sequence
  Synthetic oligonucleotide
catttcgagaacgggtagatgtcctctgtt

SEQ ID NO: 323204 - DNA, 30 bp, Artificial Sequence
  Synthetic oligonucleotide
tacagttgggcgcgtaggtcgagctctgtt

SEQ ID NO: 323205 - DNA, 30 bp, Artificial Sequence
  Synthetic oligonucleotide
tacgtgctggacttcattgactattctgtt

SEQ ID NO: 323206 - DNA, 30 bp, Artificial Sequence
  Synthetic oligonucleotide
atcgcagaactagacgagtcacgaagtgtt

SEQ ID NO: 323207 - DNA, 30 bp, Artificial Sequence
  Synthetic oligonucleotide
gcgctgatctaattcgttaggtgaagtgtt

SEQ ID NO: 323208 - DNA, 30 bp, Artificial Sequence
  Synthetic oligonucleotide
ttggtgtagctccgccatttcaagagtgtt

SEQ ID NO: 323209 - DNA, 30 bp, Artificial Sequence
  Synthetic oligonucleotide
acatcttcgtaatggttagttgggagtgtt

SEQ ID NO: 323210 - DNA, 30 bp, Artificial Sequence
  Synthetic oligonucleotide
taggagcaagtcagacgactgaatagtgtt

SEQ ID NO: 323211 - DNA, 30 bp, Artificial Sequence
  Synthetic oligonucleotide
gtgcatgactggtattcacttaatagtgtt

SEQ ID NO: 323212 - DNA, 30 bp, Artificial Sequence
  Synthetic oligonucleotide
tactagaatactcggggatgagctagtgtt

SEQ ID NO: 323213 - DNA, 30 bp, Artificial Sequence
  Synthetic oligonucleotide
ttcaggggggctcatgactggtctagtgtt

SEQ ID NO: 323214 - DNA, 30 bp, Artificial Sequence
  Synthetic oligonucleotide
acatttcccggtaccaacttcagccgtgtt

SEQ ID NO: 323215 - DNA, 30 bp, Artificial Sequence
  Synthetic oligonucleotide
tgacacttgggttgcgttggcatccgtgtt

SEQ ID NO: 323216 - DNA, 30 bp, Artificial Sequence
  Synthetic oligonucleotide
tgtagtgtagactcccgtgtcctccgtgtt

SEQ ID NO: 323217 - DNA, 30 bp, Artificial Sequence
  Synthetic oligonucleotide
tacggcggtagagaagttggacggcgtgtt

SEQ ID NO: 323218 - DNA, 30 bp, Artificial Sequence
  Synthetic oligonucleotide
ctttccgtccattctagtgtcgtgcgtgtt

SEQ ID NO: 323219 - DNA, 30 bp, Artificial Sequence
  Synthetic oligonucleotide
aagtttgcggactttccaggccatcgtgtt

SEQ ID NO: 323220 - DNA, 30 bp, Artificial Sequence
  Synthetic oligonucleotide
ctctaattgtccttgcgaaaaataggtgtt

SEQ ID NO: 323221 - DNA, 30 bp, Artificial Sequence
  Synthetic oligonucleotide
tatcatatgtattttcgtcgactaggtgtt

SEQ ID NO: 323222 - DNA, 30 bp, Artificial Sequence
  Synthetic oligonucleotide
tgtggataagcctatctgaataagggtgtt

SEQ ID NO: 323223 - DNA, 30 bp, Artificial Sequence
  Synthetic oligonucleotide
cggggaaaattcaaagcggacggctgtgtt

SEQ ID NO: 323224 - DNA, 30 bp, Artificial Sequence
  Synthetic oligonucleotide
cataccctaaggtggggtcctgagtgtgtt

SEQ ID NO: 323225 - DNA, 28 bp, Artificial Sequence
  Synthetic oligonucleotide
cttagtggtgtcagggtattattgtgtt

SEQ ID NO: 323226 - DNA, 30 bp, Artificial Sequence
  Synthetic oligonucleotide
aagggcccagtctcatactaaatttgtgtt

SEQ ID NO: 323227 - DNA, 30 bp, Artificial Sequence
  Synthetic oligonucleotide
cactagggtcatatcactgctgtttgtgtt

SEQ ID NO: 323228 - DNA, 30 bp, Artificial Sequence
  Synthetic oligonucleotide
cggaaaaatttaattgttgtaatcattgtt

SEQ ID NO: 323229 - DNA, 30 bp, Artificial Sequence
  Synthetic oligonucleotide
acagggaagatcttgcctagtatgattgtt

SEQ ID NO: 323230 - DNA, 30 bp, Artificial Sequence
  Synthetic oligonucleotide
accacgcacacgtcgatgtggctgattgtt

SEQ ID NO: 323231 - DNA, 30 bp, Artificial Sequence
  Synthetic oligonucleotide
aggactgactatgtgaccacagaacttgtt

SEQ ID NO: 323232 - DNA, 30 bp, Artificial Sequence
  Synthetic oligonucleotide
aaatgaaaaaaacccaaagacgtccttgtt

SEQ ID NO: 323233 - DNA, 30 bp, Artificial Sequence
  Synthetic oligonucleotide
actccgcggatggctacataacatcttgtt

SEQ ID NO: 323234 - DNA, 30 bp, Artificial Sequence
  Synthetic oligonucleotide
cagcgcactgaatcgcacgtaattcttgtt

SEQ ID NO: 323235 - DNA, 30 bp, Artificial Sequence
  Synthetic oligonucleotide
accccagggcattcgatgtcccaagttgtt

SEQ ID NO: 323236 - DNA, 30 bp, Artificial Sequence
  Synthetic oligonucleotide
ctactgtgactcagtaatagtcacgttgtt

SEQ ID NO: 323237 - DNA, 30 bp, Artificial Sequence
  Synthetic oligonucleotide
ctcatcacgattacggcacttgtcgttgtt

SEQ ID NO: 323238 - DNA, 30 bp, Artificial Sequence
  Synthetic oligonucleotide
tgatcgtcagctataatctgctaggttgtt

SEQ ID NO: 323239 - DNA, 30 bp, Artificial Sequence
  Synthetic oligonucleotide
acctacgacaaattgtaggagccggttgtt

SEQ ID NO: 323240 - DNA, 30 bp, Artificial Sequence
  Synthetic oligonucleotide
ctcagtcgcccgcactggtgcacatttgtt

SEQ ID NO: 323241 - DNA, 30 bp, Artificial Sequence
  Synthetic oligonucleotide
gacgagaaacctatttaatggacatttgtt

SEQ ID NO: 323242 - DNA, 30 bp, Artificial Sequence
  Synthetic oligonucleotide
taatacaaatgtgtataagatgactttgtt

SEQ ID NO: 323243 - DNA, 30 bp, Artificial Sequence
  Synthetic oligonucleotide
agtgaagttggccatggtatacagtttgtt

SEQ ID NO: 323244 - DNA, 30 bp, Artificial Sequence
  Synthetic oligonucleotide
gaactgaaggatgacactaggacttttgtt

SEQ ID NO: 323245 - DNA, 30 bp, Artificial Sequence
  Synthetic oligonucleotide
gcatccaagggtaccaactcgtgttttgtt

SEQ ID NO: 323246 - DNA, 30 bp, Artificial Sequence
  Synthetic oligonucleotide
ggttagattcgagcggagaagttttttgtt

SEQ ID NO: 323247 - DNA, 30 bp, Artificial Sequence
  Synthetic oligonucleotide
tcaacaaaagacgagtcccgaaaaaaattt

SEQ ID NO: 323248 - DNA, 31 bp, Artificial Sequence
  Synthetic oligonucleotide
gcaacgttgttcaaagaggggcaaaaaattt

SEQ ID NO: 323249 - DNA, 30 bp, Artificial Sequence
  Synthetic oligonucleotide
gtgcgttcggtgagtgctgccgtgaaattt

SEQ ID NO: 323250 - DNA, 30 bp, Artificial Sequence
  Synthetic oligonucleotide
ccgcatcaacgagcgcatgctaataaattt

SEQ ID NO: 323251 - DNA, 30 bp, Artificial Sequence
  Synthetic oligonucleotide
ccagtgggattccacacggttcctaaattt

SEQ ID NO: 323252 - DNA, 30 bp, Artificial Sequence
  Synthetic oligonucleotide
tggataaaaagaggactttgcgttaaattt

SEQ ID NO: 323253 - DNA, 30 bp, Artificial Sequence
  Synthetic oligonucleotide
agaactcggtaaaggtgacaattccaattt

SEQ ID NO: 323254 - DNA, 30 bp, Artificial Sequence
  Synthetic oligonucleotide
aacggaatttcgcttgatgagatgcaattt

SEQ ID NO: 323255 - DNA, 30 bp, Artificial Sequence
  Synthetic oligonucleotide
ccagagaaccctaaatggaaagttcaattt

SEQ ID NO: 323256 - DNA, 30 bp, Artificial Sequence
  Synthetic oligonucleotide
gggaagtgcgttacacgctatcgcgaattt

SEQ ID NO: 323257 - DNA, 30 bp, Artificial Sequence
  Synthetic oligonucleotide
tcataaatcactcaaacgatcatcgaattt

SEQ ID NO: 323258 - DNA, 30 bp, Artificial Sequence
  Synthetic oligonucleotide
agctagactacaccaatatgaccggaattt

SEQ ID NO: 323259 - DNA, 30 bp, Artificial Sequence
  Synthetic oligonucleotide
ttcgcgcgcactattaggggcaatgaattt

SEQ ID NO: 323260 - DNA, 30 bp, Artificial Sequence
  Synthetic oligonucleotide
attcaaaatgggaagaccgtaagtgaattt

SEQ ID NO: 323261 - DNA, 30 bp, Artificial Sequence
  Synthetic oligonucleotide
aactatggcgagaaaacggcggcataattt

SEQ ID NO: 323262 - DNA, 30 bp, Artificial Sequence
  Synthetic oligonucleotide
gctaggccggccgaccatcagagataattt

SEQ ID NO: 323263 - DNA, 30 bp, Artificial Sequence
  Synthetic oligonucleotide
ctactcagattggtaccggtagagtaattt

SEQ ID NO: 323264 - DNA, 30 bp, Artificial Sequence
  Synthetic oligonucleotide
taatgccacttcaagtcggtagagtaattt

SEQ ID NO: 323265 - DNA, 30 bp, Artificial Sequence
  Synthetic oligonucleotide
gtacacccgagaggccacaaagggtaattt

SEQ ID NO: 323266 - DNA, 30 bp, Artificial Sequence
  Synthetic oligonucleotide
atttagaggaaagccagcattgggtaattt

SEQ ID NO: 323267 - DNA, 30 bp, Artificial Sequence
  Synthetic oligonucleotide
aatcccatggtctcagaggggatgtaattt

SEQ ID NO: 323268 - DNA, 30 bp, Artificial Sequence
  Synthetic oligonucleotide
agaaacacccatagagggagtgtgtaattt

SEQ ID NO: 323269 - DNA, 30 bp, Artificial Sequence
  Synthetic oligonucleotide
gtaagatcaaaccaggcgccactttaattt

SEQ ID NO: 323270 - DNA, 30 bp, Artificial Sequence
  Synthetic oligonucleotide
atatttcacatgtccggtcccgtttaattt

SEQ ID NO: 323271 - DNA, 30 bp, Artificial Sequence
  Synthetic oligonucleotide
atggcgcctgcgctacatctgcaaacattt

SEQ ID NO: 323272 - DNA, 30 bp, Artificial Sequence
  Synthetic oligonucleotide
cataatcgtcgaaggggtctccgaacattt

SEQ ID NO: 323273 - DNA, 30 bp, Artificial Sequence
  Synthetic oligonucleotide
tagggttacattccggggctcaacacattt

SEQ ID NO: 323274 - DNA, 30 bp, Artificial Sequence
  Synthetic oligonucleotide
ggagagttaataaccattcttctcacattt

SEQ ID NO: 323275 - DNA, 30 bp, Artificial Sequence
  Synthetic oligonucleotide
cgtaggttcacaaacttagtgaagacattt

SEQ ID NO: 323276 - DNA, 30 bp, Artificial Sequence
  Synthetic oligonucleotide
tcctgacctatggacataagccagacattt

SEQ ID NO: 323277 - DNA, 30 bp, Artificial Sequence
  Synthetic oligonucleotide
aaatgcttggaaatagtaatcgggacattt

SEQ ID NO: 323278 - DNA, 30 bp, Artificial Sequence
  Synthetic oligonucleotide
atgccatctttacacctaaattggacattt

SEQ ID NO: 323279 - DNA, 30 bp, Artificial Sequence
  Synthetic oligonucleotide
atgaggcccataccttaggctagtacattt

SEQ ID NO: 323280 - DNA, 30 bp, Artificial Sequence
  Synthetic oligonucleotide
tgacaatccggaactacgaagggtacattt

SEQ ID NO: 323281 - DNA, 30 bp, Artificial Sequence
  Synthetic oligonucleotide
gttgcgaaagctattaggggtcttacattt

SEQ ID NO: 323282 - DNA, 30 bp, Artificial Sequence
  Synthetic oligonucleotide
cggtcggatcgacggccgcactcaccattt

SEQ ID NO: 323283 - DNA, 30 bp, Artificial Sequence
  Synthetic oligonucleotide
tgcttggtatggagactattcagaccattt

SEQ ID NO: 323284 - DNA, 29 bp, Artificial Sequence
  Synthetic oligonucleotide
tccccgtatagagggctgcgttaccattt

SEQ ID NO: 323285 - DNA, 30 bp, Artificial Sequence
  Synthetic oligonucleotide
attaaagctagtaggccctttatcccattt

SEQ ID NO: 323286 - DNA, 30 bp, Artificial Sequence
  Synthetic oligonucleotide
tcttagcctaaagagtggctgaagccattt

SEQ ID NO: 323287 - DNA, 30 bp, Artificial Sequence
  Synthetic oligonucleotide
aaaagagagaattctagaaggatgccattt

SEQ ID NO: 323288 - DNA, 30 bp, Artificial Sequence
  Synthetic oligonucleotide
acacacagccaggtagattattaagcattt

SEQ ID NO: 323289 - DNA, 30 bp, Artificial Sequence
  Synthetic oligonucleotide
ggtgtcacagctagggtggagcgagcattt

SEQ ID NO: 323290 - DNA, 30 bp, Artificial Sequence
  Synthetic oligonucleotide
cctcataggaacgccagtaaactagcattt

SEQ ID NO: 323291 - DNA, 30 bp, Artificial Sequence
  Synthetic oligonucleotide
ccctttcacgtacaaagcatcagcgcattt

SEQ ID NO: 323292 - DNA, 30 bp, Artificial Sequence
  Synthetic oligonucleotide
tcggagggaggtcctattgggagcgcattt

SEQ ID NO: 323293 - DNA, 30 bp, Artificial Sequence
  Synthetic oligonucleotide
gactgtccgggacataccaatacggcattt

SEQ ID NO: 323294 - DNA, 30 bp, Artificial Sequence
  Synthetic oligonucleotide
tccaaggggtttctctagttccgggcattt

SEQ ID NO: 323295 - DNA, 30 bp, Artificial Sequence
  Synthetic oligonucleotide
ctcaaaggcgtacgggtccgcggtgcattt

SEQ ID NO: 323296 - DNA, 30 bp, Artificial Sequence
  Synthetic oligonucleotide
gtcggggcacatgtgttactgtaatcattt

SEQ ID NO: 323297 - DNA, 30 bp, Artificial Sequence
  Synthetic oligonucleotide
gtccaatcgtttcggagtggggcatcattt

SEQ ID NO: 323298 - DNA, 30 bp, Artificial Sequence
  Synthetic oligonucleotide
tagcaacatatgagcaactgatcatcattt

SEQ ID NO: 323299 - DNA, 30 bp, Artificial Sequence
  Synthetic oligonucleotide
tgtaatggctgattcaataaaagatcattt

SEQ ID NO: 323300 - DNA, 30 bp, Artificial Sequence
  Synthetic oligonucleotide
gactgaactctgcgcagtattgtatcattt

SEQ ID NO: 323301 - DNA, 30 bp, Artificial Sequence
  Synthetic oligonucleotide
gaatggatcctgaaagcacattcctcattt

SEQ ID NO: 323302 - DNA, 30 bp, Artificial Sequence
  Synthetic oligonucleotide
atggtactattggggaggcctttgtcattt

SEQ ID NO: 323303 - DNA, 30 bp, Artificial Sequence
  Synthetic oligonucleotide
accctgcacggatcacacttcacttcattt

SEQ ID NO: 323304 - DNA, 30 bp, Artificial Sequence
  Synthetic oligonucleotide
cgcgcttatagaatatgacatgcaagattt

SEQ ID NO: 323305 - DNA, 30 bp, Artificial Sequence
  Synthetic oligonucleotide
gataaatattggtctatgcgaataagattt

SEQ ID NO: 323306 - DNA, 30 bp, Artificial Sequence
  Synthetic oligonucleotide
taactagtgggtcgaaaggacaacagattt

SEQ ID NO: 323307 - DNA, 30 bp, Artificial Sequence
  Synthetic oligonucleotide
ttaaagaagcgtctcggccggtacagattt

SEQ ID NO: 323308 - DNA, 30 bp, Artificial Sequence
  Synthetic oligonucleotide
aacaggccatgctgatgtacgcgcagattt

SEQ ID NO: 323309 - DNA, 30 bp, Artificial Sequence
  Synthetic oligonucleotide
cattagcgtacatgacagtcgggcagattt

SEQ ID NO: 323310 - DNA, 30 bp, Artificial Sequence
  Synthetic oligonucleotide
cgacctctagttcgagagaaatggagattt

SEQ ID NO: 323311 - DNA, 30 bp, Artificial Sequence
  Synthetic oligonucleotide
aactggaaataaatttcataacgtagattt

SEQ ID NO: 323312 - DNA, 30 bp, Artificial Sequence
  Synthetic oligonucleotide
ggtgtctgttaataacgtgaacaacgattt

SEQ ID NO: 323313 - DNA, 30 bp, Artificial Sequence
  Synthetic oligonucleotide
gactcgaacagatggctgtatccccgattt

SEQ ID NO: 323314 - DNA, 30 bp, Artificial Sequence
  Synthetic oligonucleotide
ggacatatcctgtctacctgaatccgattt

SEQ ID NO: 323315 - DNA, 30 bp, Artificial Sequence
  Synthetic oligonucleotide
acccgggtggagatcacacgctggcgattt

SEQ ID NO: 323316 - DNA, 30 bp, Artificial Sequence
  Synthetic oligonucleotide
ccggcgtacgccaatagcttatatcgattt

SEQ ID NO: 323317 - DNA, 30 bp, Artificial Sequence
  Synthetic oligonucleotide
gtgcttacacgtcgtggtcgtggtcgattt

SEQ ID NO: 323318 - DNA, 30 bp, Artificial Sequence
  Synthetic oligonucleotide
agatcgtttaccagcttttattgtcgattt

SEQ ID NO: 323319 - DNA, 30 bp, Artificial Sequence
  Synthetic oligonucleotide
gcagacgacagtgattgagctcagggattt

SEQ ID NO: 323320 - DNA, 30 bp, Artificial Sequence
  Synthetic oligonucleotide
cagcattgctcgaaatcagtgtatggattt

SEQ ID NO: 323321 - DNA, 30 bp, Artificial Sequence
  Synthetic oligonucleotide
gtctcagcaggagcgcaatgtactggattt

SEQ ID NO: 323322 - DNA, 30 bp, Artificial Sequence
  Synthetic oligonucleotide
gtcactcggaacgccctacctcttggattt

SEQ ID NO: 323323 - DNA, 30 bp, Artificial Sequence
  Synthetic oligonucleotide
acagctccagagggtattcaaaagtgattt

SEQ ID NO: 323324 - DNA, 30 bp, Artificial Sequence
  Synthetic oligonucleotide
gtcctgcgtggttagagaaaggcttgattt

SEQ ID NO: 323325 - DNA, 30 bp, Artificial Sequence
  Synthetic oligonucleotide
gagctcggaagaaaatattggatttgattt

SEQ ID NO: 323326 - DNA, 30 bp, Artificial Sequence
  Synthetic oligonucleotide
cctatcaatagggatagtaatagaatattt

SEQ ID NO: 323327 - DNA, 30 bp, Artificial Sequence
  Synthetic oligonucleotide
accgggcgaaatgtgccaatttccatattt

SEQ ID NO: 323328 - DNA, 30 bp, Artificial Sequence
  Synthetic oligonucleotide
gtttgaaaagagtaggcaaaatgcatattt

SEQ ID NO: 323329 - DNA, 30 bp, Artificial Sequence
  Synthetic oligonucleotide
cccgcgtaaagcagtacagccgagatattt

SEQ ID NO: 323330 - DNA, 30 bp, Artificial Sequence
  Synthetic oligonucleotide
tacataattgtgataaatctcacgatattt

SEQ ID NO: 323331 - DNA, 30 bp, Artificial Sequence
  Synthetic oligonucleotide
tcacgaaattgctaagactgcttgatattt

SEQ ID NO: 323332 - DNA, 30 bp, Artificial Sequence
  Synthetic oligonucleotide
cggcgggaggtctgggactcgtaactattt

SEQ ID NO: 323333 - DNA, 30 bp, Artificial Sequence
  Synthetic oligonucleotide
gtggtttaatcgaggtcgtgacggctattt

SEQ ID NO: 323334 - DNA, 30 bp, Artificial Sequence
  Synthetic oligonucleotide
caacaccattaactggatgcaactctattt

SEQ ID NO: 323335 - DNA, 30 bp, Artificial Sequence
  Synthetic oligonucleotide
aatcctgtccggcaacgggtgcctctattt

SEQ ID NO: 323336 - DNA, 30 bp, Artificial Sequence
  Synthetic oligonucleotide
gtaagacagtacgattctctgtaagtattt

SEQ ID NO: 323337 - DNA, 30 bp, Artificial Sequence
  Synthetic oligonucleotide
acagtgccatacgaggtatcaggagtattt

SEQ ID NO: 323338 - DNA, 30 bp, Artificial Sequence
  Synthetic oligonucleotide
ctgtttacgggggcacttggaggagtattt

SEQ ID NO: 323339 - DNA, 30 bp, Artificial Sequence
  Synthetic oligonucleotide
gcggccatagtctgtattgacatggtattt

SEQ ID NO: 323340 - DNA, 30 bp, Artificial Sequence
  Synthetic oligonucleotide
acgtgctcacccagtcgcgtatttgtattt

SEQ ID NO: 323341 - DNA, 30 bp, Artificial Sequence
  Synthetic oligonucleotide
gcgggcaggatctcggtgtagtgattattt

SEQ ID NO: 323342 - DNA, 30 bp, Artificial Sequence
  Synthetic oligonucleotide
gcgaataggccttagagtctagccttattt

SEQ ID NO: 323343 - DNA, 30 bp, Artificial Sequence
  Synthetic oligonucleotide
tgttactaggaacatcggctccggttattt

SEQ ID NO: 323344 - DNA, 30 bp, Artificial Sequence
  Synthetic oligonucleotide
ttcactgtgacacgtttcccagggttattt

SEQ ID NO: 323345 - DNA, 30 bp, Artificial Sequence
  Synthetic oligonucleotide
tggaggtagaccggcgtgtggttgttattt

SEQ ID NO: 323346 - DNA, 30 bp, Artificial Sequence
  Synthetic oligonucleotide
cagtagtaggaaacatgaggcggtttattt

SEQ ID NO: 323347 - DNA, 30 bp, Artificial Sequence
  Synthetic oligonucleotide
tttaggacggctggacacatgacaaacttt

SEQ ID NO: 323348 - DNA, 30 bp, Artificial Sequence
  Synthetic oligonucleotide
ggttcggacctgcattcgcaagcaaacttt

SEQ ID NO: 323349 - DNA, 30 bp, Artificial Sequence
  Synthetic oligonucleotide
gtattcttggaaaggattagaggaaacttt

SEQ ID NO: 323350 - DNA, 30 bp, Artificial Sequence
  Synthetic oligonucleotide
tacacccctcagcttgacatcataaacttt

SEQ ID NO: 323351 - DNA, 30 bp, Artificial Sequence
  Synthetic oligonucleotide
caagggtcttaatcccctcgcttaaacttt

SEQ ID NO: 323352 - DNA, 30 bp, Artificial Sequence
  Synthetic oligonucleotide
gtggggccgataaggcgggatttaaacttt

SEQ ID NO: 323353 - DNA, 30 bp, Artificial Sequence
  Synthetic oligonucleotide
cagtgggacgggctattatgcgagaacttt

SEQ ID NO: 323354 - DNA, 27 bp, Artificial Sequence
  Synthetic oligonucleotide
tgatacgagcccacaaccggtaacttt

SEQ ID NO: 323355 - DNA, 30 bp, Artificial Sequence
  Synthetic oligonucleotide
aattgactggagaaggaatatattaacttt

SEQ ID NO: 323356 - DNA, 30 bp, Artificial Sequence
  Synthetic oligonucleotide
gtgcgcgtacaggtggctatacgacacttt

SEQ ID NO: 323357 - DNA, 30 bp, Artificial Sequence
  Synthetic oligonucleotide
gggattgtccaagggacttgtttacacttt

SEQ ID NO: 323358 - DNA, 30 bp, Artificial Sequence
  Synthetic oligonucleotide
agaataagcaggggttgtagtacccacttt

SEQ ID NO: 323359 - DNA, 30 bp, Artificial Sequence
  Synthetic oligonucleotide
agcttcgtctgggatcgttgctcgcacttt

SEQ ID NO: 323360 - DNA, 30 bp, Artificial Sequence
  Synthetic oligonucleotide
ctatgccggagcgctgtcaagcacgacttt

SEQ ID NO: 323361 - DNA, 30 bp, Artificial Sequence
  Synthetic oligonucleotide
tactcagttgatacggtgtggatcgacttt

SEQ ID NO: 323362 - DNA, 30 bp, Artificial Sequence
  Synthetic oligonucleotide
cctcaaaactctgagcacttcgtggacttt

SEQ ID NO: 323363 - DNA, 30 bp, Artificial Sequence
  Synthetic oligonucleotide
gtgcttgctaaggctcaggattatgacttt

SEQ ID NO: 323364 - DNA, 30 bp, Artificial Sequence
  Synthetic oligonucleotide
actatttcagtgagaggttcataatacttt

SEQ ID NO: 323365 - DNA, 30 bp, Artificial Sequence
  Synthetic oligonucleotide
attcatcaacgtaaaggttaagcatacttt

SEQ ID NO: 323366 - DNA, 30 bp, Artificial Sequence
  Synthetic oligonucleotide
tggatcaactggctccatttcttctacttt

SEQ ID NO: 323367 - DNA, 30 bp, Artificial Sequence
  Synthetic oligonucleotide
gacgtgaaggacatacgtaataagtacttt

SEQ ID NO: 323368 - DNA, 30 bp, Artificial Sequence
  Synthetic oligonucleotide
tcattggtaccgacctcctacaggtacttt

SEQ ID NO: 323369 - DNA, 30 bp, Artificial Sequence
  Synthetic oligonucleotide
ctttatccggtaatgtggtaaaattacttt

SEQ ID NO: 323370 - DNA, 30 bp, Artificial Sequence
  Synthetic oligonucleotide
tacagtggcttttcagctgctgattacttt

SEQ ID NO: 323371 - DNA, 30 bp, Artificial Sequence
  Synthetic oligonucleotide
agtgtgtcagtatatatctcgctttacttt

SEQ ID NO: 323372 - DNA, 30 bp, Artificial Sequence
  Synthetic oligonucleotide
ggatgggggatatcggatggatcaaccttt

SEQ ID NO: 323373 - DNA, 30 bp, Artificial Sequence
  Synthetic oligonucleotide
gaagttgtcttttcctgagcatgcaccttt

SEQ ID NO: 323374 - DNA, 30 bp, Artificial Sequence
  Synthetic oligonucleotide
agatcgacggtccgaaacccgctcaccttt

SEQ ID NO: 323375 - DNA, 30 bp, Artificial Sequence
  Synthetic oligonucleotide
catataagccttttagtgttcaagaccttt

SEQ ID NO: 323376 - DNA, 30 bp, Artificial Sequence
  Synthetic oligonucleotide
taggaaacgatttcaaagtgggagaccttt

SEQ ID NO: 323377 - DNA, 30 bp, Artificial Sequence
  Synthetic oligonucleotide
cttcttagatcagagcaaggacataccttt

SEQ ID NO: 323378 - DNA, 30 bp, Artificial Sequence
  Synthetic oligonucleotide
tttcttagcaaacacatcccgactaccttt

SEQ ID NO: 323379 - DNA, 30 bp, Artificial Sequence
  Synthetic oligonucleotide
gaagtaagatcctttatttgcgaacccttt

SEQ ID NO: 323380 - DNA, 30 bp, Artificial Sequence
  Synthetic oligonucleotide
caagcagaacacttgccccatgaccccttt

SEQ ID NO: 323381 - DNA, 30 bp, Artificial Sequence
  Synthetic oligonucleotide
agcttttgttacccctaacgcaagcccttt

SEQ ID NO: 323382 - DNA, 30 bp, Artificial Sequence
  Synthetic oligonucleotide
aactgggtccggtatgaggttatgcccttt

SEQ ID NO: 323383 - DNA, 30 bp, Artificial Sequence
  Synthetic oligonucleotide
gctcatgttaggcgcgggcacaatcccttt

SEQ ID NO: 323384 - DNA, 30 bp, Artificial Sequence
  Synthetic oligonucleotide
tccattcaagcttgcagagacattcccttt

SEQ ID NO: 323385 - DNA, 30 bp, Artificial Sequence
  Synthetic oligonucleotide
ggtgcggatagatcccctccagcagccttt

SEQ ID NO: 323386 - DNA, 30 bp, Artificial Sequence
  Synthetic oligonucleotide
attcacgtgaggtcgtgcggttcagccttt

SEQ ID NO: 323387 - DNA, 30 bp, Artificial Sequence
  Synthetic oligonucleotide
tggtccccttgcaaaatcggactagccttt

SEQ ID NO: 323388 - DNA, 30 bp, Artificial Sequence
  Synthetic oligonucleotide
aaaggtattcatttccgccgtaacgccttt

SEQ ID NO: 323389 - DNA, 30 bp, Artificial Sequence
  Synthetic oligonucleotide
gtgatgtgcggagcctcaccgatggccttt

SEQ ID NO: 323390 - DNA, 30 bp, Artificial Sequence
  Synthetic oligonucleotide
accagactttcgtgtcggctttctgccttt

SEQ ID NO: 323391 - DNA, 30 bp, Artificial Sequence
  Synthetic oligonucleotide
acttgaacactttgtattacaagatccttt

SEQ ID NO: 323392 - DNA, 30 bp, Artificial Sequence
  Synthetic oligonucleotide
gattgctcattggattaagcaatatccttt

SEQ ID NO: 323393 - DNA, 30 bp, Artificial Sequence
  Synthetic oligonucleotide
aagaaaggagagtcacgctcatattccttt

SEQ ID NO: 323394 - DNA, 30 bp, Artificial Sequence
  Synthetic oligonucleotide
gacgaactagggtggaactcggcttccttt

SEQ ID NO: 323395 - DNA, 30 bp, Artificial Sequence
  Synthetic oligonucleotide
tgattcaaacctcctcgtctcgaaagcttt

SEQ ID NO: 323396 - DNA, 30 bp, Artificial Sequence
  Synthetic oligonucleotide
gccgggggcgcccaatccccagcaagcttt

SEQ ID NO: 323397 - DNA, 30 bp, Artificial Sequence
  Synthetic oligonucleotide
acccagcccgcgccctatatagacagcttt

SEQ ID NO: 323398 - DNA, 30 bp, Artificial Sequence
  Synthetic oligonucleotide
tttttgaagagctaaacgataaccagcttt

SEQ ID NO: 323399 - DNA, 30 bp, Artificial Sequence
  Synthetic oligonucleotide
aatctggttacgcggtggtttaagagcttt

SEQ ID NO: 323400 - DNA, 30 bp, Artificial Sequence
  Synthetic oligonucleotide
tcaggcttactgcctgaatatctgagcttt

SEQ ID NO: 323401 - DNA, 30 bp, Artificial Sequence
  Synthetic oligonucleotide
taacacaatcctgtttgatactatagcttt

SEQ ID NO: 323402 - DNA, 30 bp, Artificial Sequence
  Synthetic oligonucleotide
ggcggcgttccaaaatgacattctagcttt

SEQ ID NO: 323403 - DNA, 30 bp, Artificial Sequence
  Synthetic oligonucleotide
ctggaattggatatatgcgtttgtagcttt

SEQ ID NO: 323404 - DNA, 30 bp, Artificial Sequence
  Synthetic oligonucleotide
tcgtcgtagcccccaaatacgggacgcttt

SEQ ID NO: 323405 - DNA, 30 bp, Artificial Sequence
  Synthetic oligonucleotide
ttagctagtctggcttcctcactacgcttt

SEQ ID NO: 323406 - DNA, 30 bp, Artificial Sequence
  Synthetic oligonucleotide
ctaaaaggtttttacatcgcaccccgcttt

SEQ ID NO: 323407 - DNA, 30 bp, Artificial Sequence
  Synthetic oligonucleotide
aatgtgttacagcagtgaagatagcgcttt

SEQ ID NO: 323408 - DNA, 30 bp, Artificial Sequence
  Synthetic oligonucleotide
aacactaggtaggagagggtgcgtcgcttt

SEQ ID NO: 323409 - DNA, 30 bp, Artificial Sequence
  Synthetic oligonucleotide
caaatgggtagtgtcgcaattaaaggcttt

SEQ ID NO: 323410 - DNA, 30 bp, Artificial Sequence
  Synthetic oligonucleotide
tgcgaatctgtggtcttagcagcaggcttt

SEQ ID NO: 323411 - DNA, 30 bp, Artificial Sequence
  Synthetic oligonucleotide
gggcgaaggtgaaagatgtttagaggcttt

SEQ ID NO: 323412 - DNA, 30 bp, Artificial Sequence
  Synthetic oligonucleotide
cagggggcctgaagggttaagaccggcttt

SEQ ID NO: 323413 - DNA, 30 bp, Artificial Sequence
  Synthetic oligonucleotide
tcaaggagtcgccattattaatggggcttt

SEQ ID NO: 323414 - DNA, 30 bp, Artificial Sequence
  Synthetic oligonucleotide
gtataaactagcgagtcgagccgtggcttt

SEQ ID NO: 323415 - DNA, 30 bp, Artificial Sequence
  Synthetic oligonucleotide
ggccatgatatacagcttctaacatgcttt

SEQ ID NO: 323416 - DNA, 30 bp, Artificial Sequence
  Synthetic oligonucleotide
agaagttgcggccaatatcgaagatgcttt

SEQ ID NO: 323417 - DNA, 30 bp, Artificial Sequence
  Synthetic oligonucleotide
actgccggtttatcaatgtggatatgcttt

SEQ ID NO: 323418 - DNA, 30 bp, Artificial Sequence
  Synthetic oligonucleotide
tgggatacatgccgcacgaaactctgcttt

SEQ ID NO: 323419 - DNA, 30 bp, Artificial Sequence
  Synthetic oligonucleotide
gtcacacacgcgagcaattctaggtgcttt

SEQ ID NO: 323420 - DNA, 30 bp, Artificial Sequence
  Synthetic oligonucleotide
gcttcggcatttggagaggctctaatcttt

SEQ ID NO: 323421 - DNA, 30 bp, Artificial Sequence
  Synthetic oligonucleotide
aggattggcagcagctcactaaacatcttt

SEQ ID NO: 323422 - DNA, 30 bp, Artificial Sequence
  Synthetic oligonucleotide
ccggcgtgccggaacgcatccgacatcttt

SEQ ID NO: 323423 - DNA, 30 bp, Artificial Sequence
  Synthetic oligonucleotide
agtggagaagttccttccttatacatcttt

SEQ ID NO: 323424 - DNA, 29 bp, Artificial Sequence
  Synthetic oligonucleotide
agttccagatttttaccgcagtgatcttt

SEQ ID NO: 323425 - DNA, 30 bp, Artificial Sequence
  Synthetic oligonucleotide
ggaactctatagagggacttgactatcttt

SEQ ID NO: 323426 - DNA, 30 bp, Artificial Sequence
  Synthetic oligonucleotide
agcacatgtggtgtacgaacacacctcttt

SEQ ID NO: 323427 - DNA, 30 bp, Artificial Sequence
  Synthetic oligonucleotide
gactattggacccgggacgaaagcctcttt

SEQ ID NO: 323428 - DNA, 30 bp, Artificial Sequence
  Synthetic oligonucleotide
gcgggtgggctctccgcctctcgtctcttt

SEQ ID NO: 323429 - DNA, 30 bp, Artificial Sequence
  Synthetic oligonucleotide
cgtataatgttaatatattcatttctcttt

SEQ ID NO: 323430 - DNA, 30 bp, Artificial Sequence
  Synthetic oligonucleotide
caattcccgggtcatttagaacgagtcttt

SEQ ID NO: 323431 - DNA, 30 bp, Artificial Sequence
  Synthetic oligonucleotide
tgacaagcacttccattttactaggtcttt

SEQ ID NO: 323432 - DNA, 30 bp, Artificial Sequence
  Synthetic oligonucleotide
ctgacttggagccttacaggggctgtcttt

SEQ ID NO: 323433 - DNA, 30 bp, Artificial Sequence
  Synthetic oligonucleotide
gcaacagtaaaagtgagagtataattcttt

SEQ ID NO: 323434 - DNA, 30 bp, Artificial Sequence
  Synthetic oligonucleotide
tgtgataacctatttcactgtaccttcttt

SEQ ID NO: 323435 - DNA, 30 bp, Artificial Sequence
  Synthetic oligonucleotide
tcaggaagcgattatcaggaactcttcttt

SEQ ID NO: 323436 - DNA, 30 bp, Artificial Sequence
  Synthetic oligonucleotide
gggcgcttcgtattccgacacacgttcttt

SEQ ID NO: 323437 - DNA, 30 bp, Artificial Sequence
  Synthetic oligonucleotide
acgtctgaatagaagagagtggtgttcttt

SEQ ID NO: 323438 - DNA, 30 bp, Artificial Sequence
  Synthetic oligonucleotide
ccgcaaatagtcctcccaatgtaaaagttt

SEQ ID NO: 323439 - DNA, 30 bp, Artificial Sequence
  Synthetic oligonucleotide
aacatactatctgctgacgtgccaaagttt

SEQ ID NO: 323440 - DNA, 30 bp, Artificial Sequence
  Synthetic oligonucleotide
tatcaggctacacgtggtagttcaaagttt

SEQ ID NO: 323441 - DNA, 30 bp, Artificial Sequence
  Synthetic oligonucleotide
aaggcttgaaacctgtctaccttaaagttt

SEQ ID NO: 323442 - DNA, 30 bp, Artificial Sequence
  Synthetic oligonucleotide
cgatgtctgagattggatccctccaagttt

SEQ ID NO: 323443 - DNA, 30 bp, Artificial Sequence
  Synthetic oligonucleotide
acgcagattacttggaaggaaagcaagttt

SEQ ID NO: 323444 - DNA, 30 bp, Artificial Sequence
  Synthetic oligonucleotide
agcgcgcacaatgcactgaaagcgaagttt

SEQ ID NO: 323445 - DNA, 30 bp, Artificial Sequence
  Synthetic oligonucleotide
gttatgcgcttagaaacggctattaagttt

SEQ ID NO: 323446 - DNA, 30 bp, Artificial Sequence
  Synthetic oligonucleotide
cgttaatacaaagacggaggtattaagttt

SEQ ID NO: 323447 - DNA, 30 bp, Artificial Sequence
  Synthetic oligonucleotide
ttttcgattcaggggagatggtaacagttt

SEQ ID NO: 323448 - DNA, 30 bp, Artificial Sequence
  Synthetic oligonucleotide
tgagggtgcctatgccgcatatcacagttt

SEQ ID NO: 323449 - DNA, 30 bp, Artificial Sequence
  Synthetic oligonucleotide
acgttcctgcaggctggatacccccagttt

SEQ ID NO: 323450 - DNA, 30 bp, Artificial Sequence
  Synthetic oligonucleotide
taggcgtagtacatgtcaaccctccagttt

SEQ ID NO: 323451 - DNA, 30 bp, Artificial Sequence
  Synthetic oligonucleotide
ggggaagcgggaaaacgatggtctcagttt

SEQ ID NO: 323452 - DNA, 30 bp, Artificial Sequence
  Synthetic oligonucleotide
gaaaggcggtccgccaagctcattcagttt

SEQ ID NO: 323453 - DNA, 30 bp, Artificial Sequence
  Synthetic oligonucleotide
gttcgcatatgacatgtcggcagagagttt

SEQ ID NO: 323454 - DNA, 30 bp, Artificial Sequence
  Synthetic oligonucleotide
gatgagtaagatgtggcgaacggagagttt

SEQ ID NO: 323455 - DNA, 30 bp, Artificial Sequence
  Synthetic oligonucleotide
acgggcgcaagaaacagcgcaccggagttt

SEQ ID NO: 323456 - DNA, 30 bp, Artificial Sequence
  Synthetic oligonucleotide
cccggtagtcggtttccaatcggtgagttt

SEQ ID NO: 323457 - DNA, 30 bp, Artificial Sequence
  Synthetic oligonucleotide
gcgagctggcaatactgtttttttgagttt

SEQ ID NO: 323458 - DNA, 30 bp, Artificial Sequence
  Synthetic oligonucleotide
tgtgttaatctgcctttaggataatagttt

SEQ ID NO: 323459 - DNA, 30 bp, Artificial Sequence
  Synthetic oligonucleotide
ccacccgcaatcgttagcggggcatagttt

SEQ ID NO: 323460 - DNA, 30 bp, Artificial Sequence
  Synthetic oligonucleotide
atgcggaccaatatattaatcctatagttt

SEQ ID NO: 323461 - DNA, 30 bp, Artificial Sequence
  Synthetic oligonucleotide
gtaacgattgcgggaggtaaagtatagttt

SEQ ID NO: 323462 - DNA, 30 bp, Artificial Sequence
  Synthetic oligonucleotide
agttgcagcgatatagttaggttatagttt

SEQ ID NO: 323463 - DNA, 30 bp, Artificial Sequence
  Synthetic oligonucleotide
gcagcggtggtaatataatgtcagtagttt

SEQ ID NO: 323464 - DNA, 30 bp, Artificial Sequence
  Synthetic oligonucleotide
gcagtaatacttgtgacgtcacggtagttt

SEQ ID NO: 323465 - DNA, 30 bp, Artificial Sequence
  Synthetic oligonucleotide
cgattcggaccacatcggatctggtagttt

SEQ ID NO: 323466 - DNA, 30 bp, Artificial Sequence
  Synthetic oligonucleotide
tagtttcatcacttttattcgagttagttt

SEQ ID NO: 323467 - DNA, 31 bp, Artificial Sequence
  Synthetic oligonucleotide
tgctcccggggaaaggaattttctttagttt

SEQ ID NO: 323468 - DNA, 30 bp, Artificial Sequence
  Synthetic oligonucleotide
cagttagacggccggactatcgtttagttt

SEQ ID NO: 323469 - DNA, 30 bp, Artificial Sequence
  Synthetic oligonucleotide
tgttgactaaatcggtgctgttacacgttt

SEQ ID NO: 323470 - DNA, 30 bp, Artificial Sequence
  Synthetic oligonucleotide
gggtcaatgcccttcgtatacgccacgttt

SEQ ID NO: 323471 - DNA, 30 bp, Artificial Sequence
  Synthetic oligonucleotide
ccgccggataacaataacgatacgacgttt

SEQ ID NO: 323472 - DNA, 30 bp, Artificial Sequence
  Synthetic oligonucleotide
aaagcggaggcgaaagaactctggacgttt

SEQ ID NO: 323473 - DNA, 30 bp, Artificial Sequence
  Synthetic oligonucleotide
tctgagtccggaattactacactgacgttt

SEQ ID NO: 323474 - DNA, 30 bp, Artificial Sequence
  Synthetic oligonucleotide
gtttcgacgaaagccctcttcaaaccgttt

SEQ ID NO: 323475 - DNA, 30 bp, Artificial Sequence
  Synthetic oligonucleotide
tgctatcagtaacagtagacaacaccgttt

SEQ ID NO: 323476 - DNA, 30 bp, Artificial Sequence
  Synthetic oligonucleotide
gataacgaaagccgttgggacgtaccgttt

SEQ ID NO: 323477 - DNA, 30 bp, Artificial Sequence
  Synthetic oligonucleotide
ttgttgtcctaacacccgcatgtcccgttt

SEQ ID NO: 323478 - DNA, 30 bp, Artificial Sequence
  Synthetic oligonucleotide
catcagacggataatacataagggccgttt

SEQ ID NO: 323479 - DNA, 30 bp, Artificial Sequence
  Synthetic oligonucleotide
attataacgtggcgtacaaggtatccgttt

SEQ ID NO: 323480 - DNA, 30 bp, Artificial Sequence
  Synthetic oligonucleotide
gaagaatgtatctcaagtatggttccgttt

SEQ ID NO: 323481 - DNA, 30 bp, Artificial Sequence
  Synthetic oligonucleotide
ttaacgtggtgtctctagatagaagcgttt

SEQ ID NO: 323482 - DNA, 30 bp, Artificial Sequence
  Synthetic oligonucleotide
accccatgcgtgaatggttcggaagcgttt

SEQ ID NO: 323483 - DNA, 30 bp, Artificial Sequence
  Synthetic oligonucleotide
gcagcggtacctatcattatgtgcgcgttt

SEQ ID NO: 323484 - DNA, 30 bp, Artificial Sequence
  Synthetic oligonucleotide
tgaggataaggttgggtatgtgatgcgttt

SEQ ID NO: 323485 - DNA, 30 bp, Artificial Sequence
  Synthetic oligonucleotide
cattacaggtagggagagttggaatcgttt

SEQ ID NO: 323486 - DNA, 29 bp, Artificial Sequence
  Synthetic oligonucleotide
ctagcagaggtcgaatagccttatcgttt

SEQ ID NO: 323487 - DNA, 30 bp, Artificial Sequence
  Synthetic oligonucleotide
tgttgagccttccccagtatttcctcgttt

SEQ ID NO: 323488 - DNA, 30 bp, Artificial Sequence
  Synthetic oligonucleotide
gactgggacagtcggcctcgtgtctcgttt

SEQ ID NO: 323489 - DNA, 30 bp, Artificial Sequence
  Synthetic oligonucleotide
tggtctatacgccggaaatgtaagtcgttt

SEQ ID NO: 323490 - DNA, 30 bp, Artificial Sequence
  Synthetic oligonucleotide
atcggtcgactcatcctagtgcagtcgttt

SEQ ID NO: 323491 - DNA, 30 bp, Artificial Sequence
  Synthetic oligonucleotide
acttgccagctgggatggagatcttcgttt

SEQ ID NO: 323492 - DNA, 30 bp, Artificial Sequence
  Synthetic oligonucleotide
gccaatttctcttatttagctctttcgttt

SEQ ID NO: 323493 - DNA, 30 bp, Artificial Sequence
  Synthetic oligonucleotide
ctgattaagcaaaggcaatggcgaaggttt

SEQ ID NO: 323494 - DNA, 31 bp, Artificial Sequence
  Synthetic oligonucleotide
cagggggtctgcaccatcttatgacaggttt

SEQ ID NO: 323495 - DNA, 30 bp, Artificial Sequence
  Synthetic oligonucleotide
ctccaggatggtagtacgagctacaggttt

SEQ ID NO: 323496 - DNA, 30 bp, Artificial Sequence
  Synthetic oligonucleotide
gagtgttagccggttccaattgccaggttt

SEQ ID NO: 323497 - DNA, 30 bp, Artificial Sequence
  Synthetic oligonucleotide
gaatagttaatcactacagagcgcaggttt

SEQ ID NO: 323498 - DNA, 30 bp, Artificial Sequence
  Synthetic oligonucleotide
gtatgagagcccatagataagggcaggttt

SEQ ID NO: 323499 - DNA, 30 bp, Artificial Sequence
  Synthetic oligonucleotide
caagcaaggtaaactccggtcccgaggttt

SEQ ID NO: 323500 - DNA, 30 bp, Artificial Sequence
  Synthetic oligonucleotide
tgacggcatattcggaacaaatcgaggttt

SEQ ID NO: 323501 - DNA, 30 bp, Artificial Sequence
  Synthetic oligonucleotide
tagccgggcagcctggcctccaggaggttt

SEQ ID NO: 323502 - DNA, 30 bp, Artificial Sequence
  Synthetic oligonucleotide
tagtgcgtgacacattgggccattaggttt

SEQ ID NO: 323503 - DNA, 30 bp, Artificial Sequence
  Synthetic oligonucleotide
aggggcttggaatcgtaatatcttaggttt

SEQ ID NO: 323504 - DNA, 30 bp, Artificial Sequence
  Synthetic oligonucleotide
aatattactgggtagagccaatcacggttt

SEQ ID NO: 323505 - DNA, 30 bp, Artificial Sequence
  Synthetic oligonucleotide
aatcggttgaggtatggtggctcacggttt

SEQ ID NO: 323506 - DNA, 30 bp, Artificial Sequence
  Synthetic oligonucleotide
catactttagaggacatactctcacggttt

SEQ ID NO: 323507 - DNA, 30 bp, Artificial Sequence
  Synthetic oligonucleotide
ttggcataaacgctctcaacaacccggttt

SEQ ID NO: 323508 - DNA, 30 bp, Artificial Sequence
  Synthetic oligonucleotide
ccgttcgcttgacgaacaaccgagcggttt

SEQ ID NO: 323509 - DNA, 30 bp, Artificial Sequence
  Synthetic oligonucleotide
gccggtagtaggacgttattccggcggttt

SEQ ID NO: 323510 - DNA, 30 bp, Artificial Sequence
  Synthetic oligonucleotide
tagtttttctacgcggatgagtatcggttt

SEQ ID NO: 323511 - DNA, 30 bp, Artificial Sequence
  Synthetic oligonucleotide
cccaagcgagcgtttaaaaggcgcgggttt

SEQ ID NO: 323512 - DNA, 30 bp, Artificial Sequence
  Synthetic oligonucleotide
gtagttggtgcatataaggcagaggggttt

SEQ ID NO: 323513 - DNA, 30 bp, Artificial Sequence
  Synthetic oligonucleotide
tccaagggcccccctgattccgaggggttt

SEQ ID NO: 323514 - DNA, 30 bp, Artificial Sequence
  Synthetic oligonucleotide
gattcagcaggtactatcggaaactggttt

SEQ ID NO: 323515 - DNA, 30 bp, Artificial Sequence
  Synthetic oligonucleotide
tgatgatccgctatcttcattaactggttt

SEQ ID NO: 323516 - DNA, 30 bp, Artificial Sequence
  Synthetic oligonucleotide
gaccatggcacagcgatgatttcaatgttt

SEQ ID NO: 323517 - DNA, 30 bp, Artificial Sequence
  Synthetic oligonucleotide
cactcgaggtccctcagccgccgaatgttt

SEQ ID NO: 323518 - DNA, 30 bp, Artificial Sequence
  Synthetic oligonucleotide
tgctggggatttcccgcattaagcatgttt

SEQ ID NO: 323519 - DNA, 30 bp, Artificial Sequence
  Synthetic oligonucleotide
gcgggagtaatactaaacgggagcatgttt

SEQ ID NO: 323520 - DNA, 30 bp, Artificial Sequence
  Synthetic oligonucleotide
ttgaaactatcgtgtaataagcagatgttt

SEQ ID NO: 323521 - DNA, 30 bp, Artificial Sequence
  Synthetic oligonucleotide
tatgtagtaaaggaagtatcacgactgttt

SEQ ID NO: 323522 - DNA, 30 bp, Artificial Sequence
  Synthetic oligonucleotide
aatgccttctccgcagtgtattatctgttt

SEQ ID NO: 323523 - DNA, 30 bp, Artificial Sequence
  Synthetic oligonucleotide
gttgattctgtggacataaaacttctgttt

SEQ ID NO: 323524 - DNA, 30 bp, Artificial Sequence
  Synthetic oligonucleotide
aagaagtgatggcggatcccagttctgttt

SEQ ID NO: 323525 - DNA, 30 bp, Artificial Sequence
  Synthetic oligonucleotide
agataggcgaatgcaaactttgaagtgttt

SEQ ID NO: 323526 - DNA, 30 bp, Artificial Sequence
  Synthetic oligonucleotide
cgctgtccaggcattcttgcatcagtgttt

SEQ ID NO: 323527 - DNA, 30 bp, Artificial Sequence
  Synthetic oligonucleotide
tgagaaacttatcagaaaggatcagtgttt

SEQ ID NO: 323528 - DNA, 30 bp, Artificial Sequence
  Synthetic oligonucleotide
cggagggagccactaaatttaggagtgttt

SEQ ID NO: 323529 - DNA, 30 bp, Artificial Sequence
  Synthetic oligonucleotide
acctcggggtcagggtaaagcctagtgttt

SEQ ID NO: 323530 - DNA, 30 bp, Artificial Sequence
  Synthetic oligonucleotide
gggtatccgcattgcagaacaaccgtgttt

SEQ ID NO: 323531 - DNA, 30 bp, Artificial Sequence
  Synthetic oligonucleotide
gggggcggcgggctcaatataagcgtgttt

SEQ ID NO: 323532 - DNA, 30 bp, Artificial Sequence
  Synthetic oligonucleotide
gtagctcaagtcgtcggagtaggattgttt

SEQ ID NO: 323533 - DNA, 30 bp, Artificial Sequence
  Synthetic oligonucleotide
aacgccacccgtaccgtgctccccttgttt

SEQ ID NO: 323534 - DNA, 30 bp, Artificial Sequence
  Synthetic oligonucleotide
ttcatacgttacatgagaaggggtttgttt

SEQ ID NO: 323535 - DNA, 30 bp, Artificial Sequence
  Synthetic oligonucleotide
cgctcccgaaatgtcatatttgcaaatttt

SEQ ID NO: 323536 - DNA, 30 bp, Artificial Sequence
  Synthetic oligonucleotide
cccagtgtttctacgagcgttataaatttt

SEQ ID NO: 323537 - DNA, 30 bp, Artificial Sequence
  Synthetic oligonucleotide
gaggtattacgccctccgtggttcaatttt

SEQ ID NO: 323538 - DNA, 30 bp, Artificial Sequence
  Synthetic oligonucleotide
gaagaattaggaaaaccgtgtgggaatttt

SEQ ID NO: 323539 - DNA, 30 bp, Artificial Sequence
  Synthetic oligonucleotide
ctaataagtgagacttttccgcgtaatttt

SEQ ID NO: 323540 - DNA, 30 bp, Artificial Sequence
  Synthetic oligonucleotide
cagaatggatccgtagaagacaaacatttt

SEQ ID NO: 323541 - DNA, 30 bp, Artificial Sequence
  Synthetic oligonucleotide
gcggggaggggactccaagagcaacatttt

SEQ ID NO: 323542 - DNA, 30 bp, Artificial Sequence
  Synthetic oligonucleotide
cagtttgtctaattgtcgatagcacatttt

SEQ ID NO: 323543 - DNA, 30 bp, Artificial Sequence
  Synthetic oligonucleotide
aatgattgcatgggactagttcgccatttt

SEQ ID NO: 323544 - DNA, 30 bp, Artificial Sequence
  Synthetic oligonucleotide
aacaccgcgggaatttccagctatcatttt

SEQ ID NO: 323545 - DNA, 30 bp, Artificial Sequence
  Synthetic oligonucleotide
acacaagctaataaaaaaggaacagatttt

SEQ ID NO: 323546 - DNA, 30 bp, Artificial Sequence
  Synthetic oligonucleotide
atgggaatggtagtatcgacagacgatttt

SEQ ID NO: 323547 - DNA, 30 bp, Artificial Sequence
  Synthetic oligonucleotide
gcggacgtggtagcaggaagcagcgatttt

SEQ ID NO: 323548 - DNA, 30 bp, Artificial Sequence
  Synthetic oligonucleotide
tctataaaagaaacgggagccttcgatttt

SEQ ID NO: 323549 - DNA, 30 bp, Artificial Sequence
  Synthetic oligonucleotide
tgcaatcaataggtgaagtctaaggatttt

SEQ ID NO: 323550 - DNA, 30 bp, Artificial Sequence
  Synthetic oligonucleotide
aacagtccgaacttcggtgtatgggatttt

SEQ ID NO: 323551 - DNA, 30 bp, Artificial Sequence
  Synthetic oligonucleotide
ccaacgggaaggtcggaatgtattgatttt

SEQ ID NO: 323552 - DNA, 30 bp, Artificial Sequence
  Synthetic oligonucleotide
atgggcgctcacaaaatggtggttgatttt

SEQ ID NO: 323553 - DNA, 30 bp, Artificial Sequence
  Synthetic oligonucleotide
tggtctctacactcaacggtaaactatttt

SEQ ID NO: 323554 - DNA, 30 bp, Artificial Sequence
  Synthetic oligonucleotide
gtactgatctgtacgggagattgctatttt

SEQ ID NO: 323555 - DNA, 30 bp, Artificial Sequence
  Synthetic oligonucleotide
attgatggtagttattcattgccgtatttt

SEQ ID NO: 323556 - DNA, 30 bp, Artificial Sequence
  Synthetic oligonucleotide
atggacaccttatagctaggagattatttt

SEQ ID NO: 323557 - DNA, 30 bp, Artificial Sequence
  Synthetic oligonucleotide
taggtggctcggcgcgggtccagcactttt

SEQ ID NO: 323558 - DNA, 30 bp, Artificial Sequence
  Synthetic oligonucleotide
tgcccgcaaagaagggtcccgagtactttt

SEQ ID NO: 323559 - DNA, 30 bp, Artificial Sequence
  Synthetic oligonucleotide
tgaagcaatacatgagaacatgttactttt

SEQ ID NO: 323560 - DNA, 30 bp, Artificial Sequence
  Synthetic oligonucleotide
gccaacaaatcaatcctaagttcacctttt

SEQ ID NO: 323561 - DNA, 30 bp, Artificial Sequence
  Synthetic oligonucleotide
cttgttctgcggagatgaatggcgcctttt

SEQ ID NO: 323562 - DNA, 30 bp, Artificial Sequence
  Synthetic oligonucleotide
accatattgcgtgggcaccagatgcctttt

SEQ ID NO: 323563 - DNA, 30 bp, Artificial Sequence
  Synthetic oligonucleotide
gacagcatacttcttaggctccatcctttt

SEQ ID NO: 323564 - DNA, 30 bp, Artificial Sequence
  Synthetic oligonucleotide
taagcactcgaaaaccgacgaacagctttt

SEQ ID NO: 323565 - DNA, 30 bp, Artificial Sequence
  Synthetic oligonucleotide
agttgtagagcagactcgagctgagctttt

SEQ ID NO: 323566 - DNA, 30 bp, Artificial Sequence
  Synthetic oligonucleotide
aagagcgctatcgagggtgcctgcgctttt

SEQ ID NO: 323567 - DNA, 30 bp, Artificial Sequence
  Synthetic oligonucleotide
ttacagttggaacaaaattaaatgtctttt

SEQ ID NO: 323568 - DNA, 30 bp, Artificial Sequence
  Synthetic oligonucleotide
cataacgggactacgggtatcaaaagtttt

SEQ ID NO: 323569 - DNA, 30 bp, Artificial Sequence
  Synthetic oligonucleotide
tgtagggcatccataggccgacaaagtttt

SEQ ID NO: 323570 - DNA, 30 bp, Artificial Sequence
  Synthetic oligonucleotide
acatccggattcggagcggtgcaaagtttt

SEQ ID NO: 323571 - DNA, 30 bp, Artificial Sequence
  Synthetic oligonucleotide
gaggtcgcaactcccgaatctcaaagtttt

SEQ ID NO: 323572 - DNA, 30 bp, Artificial Sequence
  Synthetic oligonucleotide
aacatcattcacacaatcgatcacagtttt

SEQ ID NO: 323573 - DNA, 30 bp, Artificial Sequence
  Synthetic oligonucleotide
ccccaccatgtaggaaaagctgacagtttt

SEQ ID NO: 323574 - DNA, 30 bp, Artificial Sequence
  Synthetic oligonucleotide
tgccgctcggaaaagatagtggagagtttt

SEQ ID NO: 323575 - DNA, 30 bp, Artificial Sequence
  Synthetic oligonucleotide
catctttactagccaccaatcttgagtttt

SEQ ID NO: 323576 - DNA, 30 bp, Artificial Sequence
  Synthetic oligonucleotide
taacagagtctagtaggcgtcgatagtttt

SEQ ID NO: 323577 - DNA, 30 bp, Artificial Sequence
  Synthetic oligonucleotide
tggtgagtacgaatattcaacgctagtttt

SEQ ID NO: 323578 - DNA, 30 bp, Artificial Sequence
  Synthetic oligonucleotide
cccaatgactataccgatataacacgtttt

SEQ ID NO: 323579 - DNA, 30 bp, Artificial Sequence
  Synthetic oligonucleotide
gcgagacgcgattaacgttgttcccgtttt

SEQ ID NO: 323580 - DNA, 30 bp, Artificial Sequence
  Synthetic oligonucleotide
gtgcattgcaccgtgtgtcccaagcgtttt

SEQ ID NO: 323581 - DNA, 30 bp, Artificial Sequence
  Synthetic oligonucleotide
ccgcgttaagaaacattttgcatgcgtttt

SEQ ID NO: 323582 - DNA, 30 bp, Artificial Sequence
  Synthetic oligonucleotide
ttaggtaatgtggaaccgctaaacggtttt

SEQ ID NO: 323583 - DNA, 30 bp, Artificial Sequence
  Synthetic oligonucleotide
gtgaccctaagcaagggtcccaccggtttt

SEQ ID NO: 323584 - DNA, 30 bp, Artificial Sequence
  Synthetic oligonucleotide
acgactatcatggtccaccttaccggtttt

SEQ ID NO: 323585 - DNA, 30 bp, Artificial Sequence
  Synthetic oligonucleotide
taatgattcgctcctcagggctcgggtttt

SEQ ID NO: 323586 - DNA, 30 bp, Artificial Sequence
  Synthetic oligonucleotide
acgtttacttgagaatgagcgtttggtttt

SEQ ID NO: 323587 - DNA, 30 bp, Artificial Sequence
  Synthetic oligonucleotide
cgaggtggatatatcaggagcctatgtttt

SEQ ID NO: 323588 - DNA, 30 bp, Artificial Sequence
  Synthetic oligonucleotide
gccttcgtgcggagttcgaatctatgtttt

SEQ ID NO: 323589 - DNA, 30 bp, Artificial Sequence
  Synthetic oligonucleotide
agcgatcttagaactgcttggccctgtttt

SEQ ID NO: 323590 - DNA, 30 bp, Artificial Sequence
  Synthetic oligonucleotide
ggaagggatgcccgttcctaatcctgtttt

SEQ ID NO: 323591 - DNA, 30 bp, Artificial Sequence
  Synthetic oligonucleotide
taactggtgaacgactacttgggctgtttt

SEQ ID NO: 323592 - DNA, 30 bp, Artificial Sequence
  Synthetic oligonucleotide
aaccgagcacggggcagtgtttagtgtttt

SEQ ID NO: 323593 - DNA, 30 bp, Artificial Sequence
  Synthetic oligonucleotide
ttcaggacgacttaggtacaagcttgtttt

SEQ ID NO: 323594 - DNA, 30 bp, Artificial Sequence
  Synthetic oligonucleotide
ggaaatggcaggttgatgtgagaaattttt

SEQ ID NO: 323595 - DNA, 30 bp, Artificial Sequence
  Synthetic oligonucleotide
tggaaaactggcaataggaagataattttt

SEQ ID NO: 323596 - DNA, 30 bp, Artificial Sequence
  Synthetic oligonucleotide
ctgggatggaaagcacggtgtgtaattttt

SEQ ID NO: 323597 - DNA, 30 bp, Artificial Sequence
  Synthetic oligonucleotide
ataaccaaggctcatttatagttcattttt

SEQ ID NO: 323598 - DNA, 30 bp, Artificial Sequence
  Synthetic oligonucleotide
acctgcactgttcccaccaaaaatattttt

SEQ ID NO: 323599 - DNA, 30 bp, Artificial Sequence
  Synthetic oligonucleotide
tgcaactaatcgtctcccacccctattttt

SEQ ID NO: 323600 - DNA, 30 bp, Artificial Sequence
  Synthetic oligonucleotide
taataccgtcatagtacgaagtctattttt

SEQ ID NO: 323601 - DNA, 30 bp, Artificial Sequence
  Synthetic oligonucleotide
gcacagagccgcgcatttgtcattattttt

SEQ ID NO: 323602 - DNA, 30 bp, Artificial Sequence
  Synthetic oligonucleotide
catctccaagactagcctcgataacttttt

SEQ ID NO: 323603 - DNA, 30 bp, Artificial Sequence
  Synthetic oligonucleotide
cgaatcgcaacaatggtcaatccccttttt

SEQ ID NO: 323604 - DNA, 30 bp, Artificial Sequence
  Synthetic oligonucleotide
agcatagcttagactgctaggacgcttttt

SEQ ID NO: 323605 - DNA, 30 bp, Artificial Sequence
  Synthetic oligonucleotide
taacatagaacgcaactagggatgcttttt

SEQ ID NO: 323606 - DNA, 30 bp, Artificial Sequence
  Synthetic oligonucleotide
cgacaaagataccgaaaaagacttcttttt

SEQ ID NO: 323607 - DNA, 30 bp, Artificial Sequence
  Synthetic oligonucleotide
tttacacttatcctacttacagacgttttt

SEQ ID NO: 323608 - DNA, 30 bp, Artificial Sequence
  Synthetic oligonucleotide
tcggcatgcggtgctacttgcggcgttttt

SEQ ID NO: 323609 - DNA, 30 bp, Artificial Sequence
  Synthetic oligonucleotide
ggtacggaaggtcgatgggttgtggttttt

SEQ ID NO: 323610 - DNA, 30 bp, Artificial Sequence
  Synthetic oligonucleotide
cgtgtaagatcagtcccatgacctgttttt

SEQ ID NO: 323611 - DNA, 30 bp, Artificial Sequence
  Synthetic oligonucleotide
accagagagatgtgctggctgtttgttttt

SEQ ID NO: 323612 - DNA, 30 bp, Artificial Sequence
  Synthetic oligonucleotide
ctgggctgatattaggaaccccaatttttt

SEQ ID NO: 323613 - DNA, 30 bp, Artificial Sequence
  Synthetic oligonucleotide
cacatgcggagggagacttggagatttttt

SEQ ID NO: 323614 - DNA, 30 bp, Artificial Sequence
  Synthetic oligonucleotide
taatcgcagtgcagctgtttatgctttttt

SEQ ID NO: 323615 - DNA, 30 bp, Artificial Sequence
  Synthetic oligonucleotide
cgaacgttgcattttaaggatgtctttttt

SEQ ID NO: 323616 - DNA, 30 bp, Artificial Sequence
  Synthetic oligonucleotide
aatagtcaatagcgttaagacaagtttttt

SEQ ID NO: 323617 - DNA, 30 bp, Artificial Sequence
  Synthetic oligonucleotide
ggattacgtaatactagagcccggtttttt

SEQ ID NO: 323618 - DNA, 31 bp, Artificial Sequence
  Synthetic oligonucleotide
cttctcatcgccctctgtatatgggtttttt

SEQ ID NO: 323619 - DNA, 30 bp, Artificial Sequence
  Synthetic oligonucleotide
tggccgacggtcaacgtacctgggtttttt

SEQ ID NO: 323620 - DNA, 30 bp, Artificial Sequence
  Synthetic oligonucleotide
atatgtacgagaaccgtcatctgttttttt

SEQ ID NO: 323621 - DNA, 30 bp, Artificial Sequence
  Synthetic oligonucleotide
gcatatgaaatcaggagttgtctttttttt

SEQ ID NO: 323622 - DNA, 30 bp, Artificial Sequence
  Synthetic oligonucleotide
gaatggggacctgtgctcatgccaaaaaaa

SEQ ID NO: 323623 - DNA, 30 bp, Artificial Sequence
  Synthetic oligonucleotide
tggatctacaccgtgtgtcatttaaaaaaa

SEQ ID NO: 323624 - DNA, 30 bp, Artificial Sequence
  Synthetic oligonucleotide
ttagctaataggaccaataacgacaaaaaa

SEQ ID NO: 323625 - DNA, 30 bp, Artificial Sequence
  Synthetic oligonucleotide
ggactctgtgtaggccggcgctccaaaaaa

SEQ ID NO: 323626 - DNA, 30 bp, Artificial Sequence
  Synthetic oligonucleotide
agctcgatgaattacttttacgagaaaaaa

SEQ ID NO: 323627 - DNA, 30 bp, Artificial Sequence
  Synthetic oligonucleotide
tacaggcaattaaatcgactttataaaaaa

SEQ ID NO: 323628 - DNA, 30 bp, Artificial Sequence
  Synthetic oligonucleotide
cgcttcactacccgcacgtaaccacaaaaa

SEQ ID NO: 323629 - DNA, 31 bp, Artificial Sequence
  Synthetic oligonucleotide
tggagaaatacaggactgtgctccacaaaaa

SEQ ID NO: 323630 - DNA, 30 bp, Artificial Sequence
  Synthetic oligonucleotide
ggtgattcatcaaccatcgtagcacaaaaa

SEQ ID NO: 323631 - DNA, 30 bp, Artificial Sequence
  Synthetic oligonucleotide
ccaaacccctgcaacattctgttacaaaaa

SEQ ID NO: 323632 - DNA, 30 bp, Artificial Sequence
  Synthetic oligonucleotide
tgcattaccgagggcttacaggcccaaaaa

SEQ ID NO: 323633 - DNA, 30 bp, Artificial Sequence
  Synthetic oligonucleotide
tggacgccccttcgacatccgagccaaaaa

SEQ ID NO: 323634 - DNA, 30 bp, Artificial Sequence
  Synthetic oligonucleotide
caccttgatacatacgggttacagcaaaaa

SEQ ID NO: 323635 - DNA, 30 bp, Artificial Sequence
  Synthetic oligonucleotide
attctaatcggtaagaaatcaaggcaaaaa

SEQ ID NO: 323636 - DNA, 30 bp, Artificial Sequence
  Synthetic oligonucleotide
tggattcgttggaagagtactaatcaaaaa

SEQ ID NO: 323637 - DNA, 30 bp, Artificial Sequence
  Synthetic oligonucleotide
agttcggtggatttgcgaatgtaagaaaaa

SEQ ID NO: 323638 - DNA, 30 bp, Artificial Sequence
  Synthetic oligonucleotide
attgctgtggacattccgtcttaagaaaaa

SEQ ID NO: 323639 - DNA, 30 bp, Artificial Sequence
  Synthetic oligonucleotide
acggacggccactctcctattgccgaaaaa

SEQ ID NO: 323640 - DNA, 30 bp, Artificial Sequence
  Synthetic oligonucleotide
aattgaggtaagaagaaccgattggaaaaa

SEQ ID NO: 323641 - DNA, 30 bp, Artificial Sequence
  Synthetic oligonucleotide
cgatgctcgatatacctttaatctgaaaaa

SEQ ID NO: 323642 - DNA, 30 bp, Artificial Sequence
  Synthetic oligonucleotide
ggtgtttgatccaactgcgaatgataaaaa

SEQ ID NO: 323643 - DNA, 30 bp, Artificial Sequence
  Synthetic oligonucleotide
gtatactaatcggagctccgagactaaaaa

SEQ ID NO: 323644 - DNA, 30 bp, Artificial Sequence
  Synthetic oligonucleotide
tccgaatttagtgaggcatgtatctaaaaa

SEQ ID NO: 323645 - DNA, 30 bp, Artificial Sequence
  Synthetic oligonucleotide
ggcgcatagagcacgtattgtttctaaaaa

SEQ ID NO: 323646 - DNA, 30 bp, Artificial Sequence
  Synthetic oligonucleotide
agcgggcagatatgtgcttttaagtaaaaa

SEQ ID NO: 323647 - DNA, 30 bp, Artificial Sequence
  Synthetic oligonucleotide
agtaaaactgcaagggtctctatgtaaaaa

SEQ ID NO: 323648 - DNA, 30 bp, Artificial Sequence
  Synthetic oligonucleotide
caggggcagcaggcttgtgacccttaaaaa

SEQ ID NO: 323649 - DNA, 30 bp, Artificial Sequence
  Synthetic oligonucleotide
gcactggtttgcaccaatagtagaacaaaa

SEQ ID NO: 323650 - DNA, 30 bp, Artificial Sequence
  Synthetic oligonucleotide
aacctttagaccacgccccgaaccacaaaa

SEQ ID NO: 323651 - DNA, 30 bp, Artificial Sequence
  Synthetic oligonucleotide
cctgcggcctccaccgaacgattaccaaaa

SEQ ID NO: 323652 - DNA, 30 bp, Artificial Sequence
  Synthetic oligonucleotide
tatttcgccaatcgccctcaacatccaaaa

SEQ ID NO: 323653 - DNA, 30 bp, Artificial Sequence
  Synthetic oligonucleotide
aagcgggcctccaataagtgtcctccaaaa

SEQ ID NO: 323654 - DNA, 30 bp, Artificial Sequence
  Synthetic oligonucleotide
gtagaactatcgtgtatgtaggcagcaaaa

SEQ ID NO: 323655 - DNA, 30 bp, Artificial Sequence
  Synthetic oligonucleotide
atatcatttggcgggactttggcagcaaaa

SEQ ID NO: 323656 - DNA, 30 bp, Artificial Sequence
  Synthetic oligonucleotide
aaaggctgagccttggacctggacgcaaaa

SEQ ID NO: 323657 - DNA, 31 bp, Artificial Sequence
  Synthetic oligonucleotide
tcgccctgcgaacagcgctcgcacggcaaaa

SEQ ID NO: 323658 - DNA, 30 bp, Artificial Sequence
  Synthetic oligonucleotide
gttgttgcctgcggtgtaacaggggcaaaa

SEQ ID NO: 323659 - DNA, 30 bp, Artificial Sequence
  Synthetic oligonucleotide
ggtatggtagaaccgtgttcggtggcaaaa

SEQ ID NO: 323660 - DNA, 30 bp, Artificial Sequence
  Synthetic oligonucleotide
accagctatggatgaccctggagtgcaaaa

SEQ ID NO: 323661 - DNA, 30 bp, Artificial Sequence
  Synthetic oligonucleotide
ggcgattaagcatcctcccgtagatcaaaa

SEQ ID NO: 323662 - DNA, 30 bp, Artificial Sequence
  Synthetic oligonucleotide
acaggtacgctgactttttagcactcaaaa

SEQ ID NO: 323663 - DNA, 30 bp, Artificial Sequence
  Synthetic oligonucleotide
aaaaattcctggagtgcgcacagctcaaaa

SEQ ID NO: 323664 - DNA, 30 bp, Artificial Sequence
  Synthetic oligonucleotide
actatcaggacacagaaatcattgtcaaaa

SEQ ID NO: 323665 - DNA, 30 bp, Artificial Sequence
  Synthetic oligonucleotide
gtgtggtcttagttactcgacagttcaaaa

SEQ ID NO: 323666 - DNA, 30 bp, Artificial Sequence
  Synthetic oligonucleotide
ccattcgcatgctgccttcggcaaagaaaa

SEQ ID NO: 323667 - DNA, 31 bp, Artificial Sequence
  Synthetic oligonucleotide
ttgcacaggtaaccgtatagaagaaagaaaa

SEQ ID NO: 323668 - DNA, 30 bp, Artificial Sequence
  Synthetic oligonucleotide
agttgtttagacctactcatgtaaagaaaa

SEQ ID NO: 323669 - DNA, 30 bp, Artificial Sequence
  Synthetic oligonucleotide
aatttgtcaagctcggcacggtcaagaaaa

SEQ ID NO: 323670 - DNA, 30 bp, Artificial Sequence
  Synthetic oligonucleotide
cctaaattttcgcataggcctcgaagaaaa

SEQ ID NO: 323671 - DNA, 30 bp, Artificial Sequence
  Synthetic oligonucleotide
tggggcagtgcggaacacactgtaagaaaa

SEQ ID NO: 323672 - DNA, 30 bp, Artificial Sequence
  Synthetic oligonucleotide
tgagttgggatttctttcctacagagaaaa

SEQ ID NO: 323673 - DNA, 30 bp, Artificial Sequence
  Synthetic oligonucleotide
tacacttcctaggaagaatctcagagaaaa

SEQ ID NO: 323674 - DNA, 30 bp, Artificial Sequence
  Synthetic oligonucleotide
ggtaggtgccgggggttaacttagagaaaa

SEQ ID NO: 323675 - DNA, 30 bp, Artificial Sequence
  Synthetic oligonucleotide
tcatcaaaagatcatgtcatgacgagaaaa

SEQ ID NO: 323676 - DNA, 30 bp, Artificial Sequence
  Synthetic oligonucleotide
tcgtccgtttatgtgaataaattgagaaaa

SEQ ID NO: 323677 - DNA, 30 bp, Artificial Sequence
  Synthetic oligonucleotide
agagtccgcgcttcaccttgtactagaaaa

SEQ ID NO: 323678 - DNA, 30 bp, Artificial Sequence
  Synthetic oligonucleotide
tcaatggttctaaaatgtttaaaacgaaaa

SEQ ID NO: 323679 - DNA, 30 bp, Artificial Sequence
  Synthetic oligonucleotide
tgaccaattaatgtgagtccgttacgaaaa

SEQ ID NO: 323680 - DNA, 30 bp, Artificial Sequence
  Synthetic oligonucleotide
tgcttatgttactgttgaggatcccgaaaa

SEQ ID NO: 323681 - DNA, 30 bp, Artificial Sequence
  Synthetic oligonucleotide
ctatagtcgggacaaattcttatccgaaaa

SEQ ID NO: 323682 - DNA, 30 bp, Artificial Sequence
  Synthetic oligonucleotide
cggttgggctagggagtgactaagcgaaaa

SEQ ID NO: 323683 - DNA, 30 bp, Artificial Sequence
  Synthetic oligonucleotide
gtcaggtatggaatctttagcacgcgaaaa

SEQ ID NO: 323684 - DNA, 30 bp, Artificial Sequence
  Synthetic oligonucleotide
tcacccaggggcttatacatatttcgaaaa

SEQ ID NO: 323685 - DNA, 30 bp, Artificial Sequence
  Synthetic oligonucleotide
tgtactaaagatatcgacctatttcgaaaa

SEQ ID NO: 323686 - DNA, 30 bp, Artificial Sequence
  Synthetic oligonucleotide
gtaccgggctgctgggtaaggaaaggaaaa

SEQ ID NO: 323687 - DNA, 30 bp, Artificial Sequence
  Synthetic oligonucleotide
ggaaggatcaagggcgcttggagaggaaaa

SEQ ID NO: 323688 - DNA, 30 bp, Artificial Sequence
  Synthetic oligonucleotide
gcattagcgagcgtaatgcgccgaggaaaa

SEQ ID NO: 323689 - DNA, 30 bp, Artificial Sequence
  Synthetic oligonucleotide
cgttagtacttggttggggacgtaggaaaa

SEQ ID NO: 323690 - DNA, 30 bp, Artificial Sequence
  Synthetic oligonucleotide
ccttatgcggttaccatatggttaggaaaa

SEQ ID NO: 323691 - DNA, 30 bp, Artificial Sequence
  Synthetic oligonucleotide
gagatttatttactgtttactctcggaaaa

SEQ ID NO: 323692 - DNA, 30 bp, Artificial Sequence
  Synthetic oligonucleotide
ttacccggtcgtcaagcttgtccgggaaaa

SEQ ID NO: 323693 - DNA, 30 bp, Artificial Sequence
  Synthetic oligonucleotide
tatgtgtatgtgtgcggatgtgggggaaaa

SEQ ID NO: 323694 - DNA, 30 bp, Artificial Sequence
  Synthetic oligonucleotide
ctcattggacctgttagcacagtgggaaaa

SEQ ID NO: 323695 - DNA, 30 bp, Artificial Sequence
  Synthetic oligonucleotide
tgtccggtacctaatgtggtgtttggaaaa

SEQ ID NO: 323696 - DNA, 30 bp, Artificial Sequence
  Synthetic oligonucleotide
gagctgcaatagtctgaggttcgctgaaaa

SEQ ID NO: 323697 - DNA, 30 bp, Artificial Sequence
  Synthetic oligonucleotide
aataagagtactacgatcaatttctgaaaa

SEQ ID NO: 323698 - DNA, 30 bp, Artificial Sequence
  Synthetic oligonucleotide
cggcggttctacgctcaggaaaggtgaaaa

SEQ ID NO: 323699 - DNA, 30 bp, Artificial Sequence
  Synthetic oligonucleotide
ccgacttgtcgttcgtcggtccggtgaaaa

SEQ ID NO: 323700 - DNA, 30 bp, Artificial Sequence
  Synthetic oligonucleotide
tgaagtactctattataccatatgtgaaaa

SEQ ID NO: 323701 - DNA, 30 bp, Artificial Sequence
  Synthetic oligonucleotide
aacgatgagtacattatttgcacttgaaaa

SEQ ID NO: 323702 - DNA, 30 bp, Artificial Sequence
  Synthetic oligonucleotide
gtaccatgatgtccaggcatcagaataaaa

SEQ ID NO: 323703 - DNA, 30 bp, Artificial Sequence
  Synthetic oligonucleotide
attgagtgaactcgtaaaagaggcataaaa

SEQ ID NO: 323704 - DNA, 30 bp, Artificial Sequence
  Synthetic oligonucleotide
ccggcacggatatgaatgccctgcataaaa

SEQ ID NO: 323705 - DNA, 30 bp, Artificial Sequence
  Synthetic oligonucleotide
taaccagctatacgccctcacctgataaaa

SEQ ID NO: 323706 - DNA, 30 bp, Artificial Sequence
  Synthetic oligonucleotide
cactctgggcggacacagtctaatataaaa

SEQ ID NO: 323707 - DNA, 30 bp, Artificial Sequence
  Synthetic oligonucleotide
cggctcattattcgcgtcgaagctataaaa

SEQ ID NO: 323708 - DNA, 30 bp, Artificial Sequence
  Synthetic oligonucleotide
tgatgacatgtattatgttactctataaaa

SEQ ID NO: 323709 - DNA, 30 bp, Artificial Sequence
  Synthetic oligonucleotide
gcccgaagcgtagaactctgttgtataaaa

SEQ ID NO: 323710 - DNA, 30 bp, Artificial Sequence
  Synthetic oligonucleotide
cagattacaggtcatgtatgacttataaaa

SEQ ID NO: 323711 - DNA, 30 bp, Artificial Sequence
  Synthetic oligonucleotide
ctcccaagggtcgcggcccacagactaaaa

SEQ ID NO: 323712 - DNA, 30 bp, Artificial Sequence
  Synthetic oligonucleotide
cgagtgtacacgtctaacggtcgactaaaa

SEQ ID NO: 323713 - DNA, 30 bp, Artificial Sequence
  Synthetic oligonucleotide
cacgggtccagtttagcatggcccctaaaa

SEQ ID NO: 323714 - DNA, 30 bp, Artificial Sequence
  Synthetic oligonucleotide
taaggtagtcaagagtttgggacgctaaaa

SEQ ID NO: 323715 - DNA, 30 bp, Artificial Sequence
  Synthetic oligonucleotide
gtccacaagatgggattggcgctgctaaaa

SEQ ID NO: 323716 - DNA, 30 bp, Artificial Sequence
  Synthetic oligonucleotide
agacatttaacgaagacttcggctctaaaa

SEQ ID NO: 323717 - DNA, 30 bp, Artificial Sequence
  Synthetic oligonucleotide
gaggtattactaacgtcggcgggtctaaaa

SEQ ID NO: 323718 - DNA, 30 bp, Artificial Sequence
  Synthetic oligonucleotide
tctataatcgtcttcgacagctgtctaaaa

SEQ ID NO: 323719 - DNA, 30 bp, Artificial Sequence
  Synthetic oligonucleotide
tgcgggaactagcgtccggttattctaaaa

SEQ ID NO: 323720 - DNA, 30 bp, Artificial Sequence
  Synthetic oligonucleotide
aattcgtgacaactatctttgcttctaaaa

SEQ ID NO: 323721 - DNA, 30 bp, Artificial Sequence
  Synthetic oligonucleotide
gtttgtcgtattaagacgatgttcgtaaaa

SEQ ID NO: 323722 - DNA, 30 bp, Artificial Sequence
  Synthetic oligonucleotide
aaggatttataatatccaagataggtaaaa

SEQ ID NO: 323723 - DNA, 30 bp, Artificial Sequence
  Synthetic oligonucleotide
catgtgtacgcggctttggaacgggtaaaa

SEQ ID NO: 323724 - DNA, 30 bp, Artificial Sequence
  Synthetic oligonucleotide
cgcatgatatgattaaatctaaatgtaaaa

SEQ ID NO: 323725 - DNA, 30 bp, Artificial Sequence
  Synthetic oligonucleotide
gaacgtcgggggaggacaaattctgtaaaa

SEQ ID NO: 323726 - DNA, 30 bp, Artificial Sequence
  Synthetic oligonucleotide
cattccgacattagtactcggtttgtaaaa

SEQ ID NO: 323727 - DNA, 30 bp, Artificial Sequence
  Synthetic oligonucleotide
ggctgatccttcaagacgttacaattaaaa

SEQ ID NO: 323728 - DNA, 30 bp, Artificial Sequence
  Synthetic oligonucleotide
tgtggacactgtttcgcgaatgacttaaaa

SEQ ID NO: 323729 - DNA, 30 bp, Artificial Sequence
  Synthetic oligonucleotide
ctagatggtgaagagatttttacgttaaaa

SEQ ID NO: 323730 - DNA, 30 bp, Artificial Sequence
  Synthetic oligonucleotide
ggtcgggcggcttcatcgtagctgttaaaa

SEQ ID NO: 323731 - DNA, 30 bp, Artificial Sequence
  Synthetic oligonucleotide
caccatgagcgcgttgtcagacatttaaaa

SEQ ID NO: 323732 - DNA, 30 bp, Artificial Sequence
  Synthetic oligonucleotide
cataatgagtgcttatcaaattctttaaaa

SEQ ID NO: 323733 - DNA, 30 bp, Artificial Sequence
  Synthetic oligonucleotide
gcgcaaccgtcactgggaataagtttaaaa

SEQ ID NO: 323734 - DNA, 30 bp, Artificial Sequence
  Synthetic oligonucleotide
acgggagatatttgcctcgagccaaacaaa

SEQ ID NO: 323735 - DNA, 30 bp, Artificial Sequence
  Synthetic oligonucleotide
aagacaacacgggcaatttgctgaaacaaa

SEQ ID NO: 323736 - DNA, 30 bp, Artificial Sequence
  Synthetic oligonucleotide
tgaaactcacccggaatgttattaaacaaa

SEQ ID NO: 323737 - DNA, 30 bp, Artificial Sequence
  Synthetic oligonucleotide
tatgcttatatgagcaacagcgggaacaaa

SEQ ID NO: 323738 - DNA, 30 bp, Artificial Sequence
  Synthetic oligonucleotide
ggaaagaactcaagatctcccaataacaaa

SEQ ID NO: 323739 - DNA, 30 bp, Artificial Sequence
  Synthetic oligonucleotide
gaatccctaagcaatgtaccgaataacaaa

SEQ ID NO: 323740 - DNA, 30 bp, Artificial Sequence
  Synthetic oligonucleotide
gttcgcgtactatacgggccatttaacaaa

SEQ ID NO: 323741 - DNA, 30 bp, Artificial Sequence
  Synthetic oligonucleotide
gtagtttgttgaaaataaactacacacaaa

SEQ ID NO: 323742 - DNA, 30 bp, Artificial Sequence
  Synthetic oligonucleotide
cacaaagccgctcgaagcataggacacaaa

SEQ ID NO: 323743 - DNA, 30 bp, Artificial Sequence
  Synthetic oligonucleotide
tcaagtaagtctcttatcttaggacacaaa

SEQ ID NO: 323744 - DNA, 30 bp, Artificial Sequence
  Synthetic oligonucleotide
cccattattagaagatagattgtacacaaa

SEQ ID NO: 323745 - DNA, 30 bp, Artificial Sequence
  Synthetic oligonucleotide
aaggaccctcatttagagtctcagcacaaa

SEQ ID NO: 323746 - DNA, 30 bp, Artificial Sequence
  Synthetic oligonucleotide
gattatcagcaggataaatggaggcacaaa

SEQ ID NO: 323747 - DNA, 30 bp, Artificial Sequence
  Synthetic oligonucleotide
tctctggaaatagggattttacatcacaaa

SEQ ID NO: 323748 - DNA, 30 bp, Artificial Sequence
  Synthetic oligonucleotide
gtttttactgcaaggcaaggaatagacaaa

SEQ ID NO: 323749 - DNA, 30 bp, Artificial Sequence
  Synthetic oligonucleotide
cgctccttcggtagttcacagctagacaaa

SEQ ID NO: 323750 - DNA, 30 bp, Artificial Sequence
  Synthetic oligonucleotide
tccccgcgtgaattgccggttatggacaaa

SEQ ID NO: 323751 - DNA, 30 bp, Artificial Sequence
  Synthetic oligonucleotide
tggtgctataccgctaacttggtggacaaa

SEQ ID NO: 323752 - DNA, 30 bp, Artificial Sequence
  Synthetic oligonucleotide
gccggcgctgcaggtagcgcacttgacaaa

SEQ ID NO: 323753 - DNA, 30 bp, Artificial Sequence
  Synthetic oligonucleotide
ctctatccttgagatatgccaagatacaaa

SEQ ID NO: 323754 - DNA, 30 bp, Artificial Sequence
  Synthetic oligonucleotide
gtaagatatggtgccttaactttatacaaa

SEQ ID NO: 323755 - DNA, 30 bp, Artificial Sequence
  Synthetic oligonucleotide
aatcgtgcaatgtatccaccacgctacaaa

SEQ ID NO: 323756 - DNA, 30 bp, Artificial Sequence
  Synthetic oligonucleotide
gagagctgtttcatggaatcttattacaaa

SEQ ID NO: 323757 - DNA, 30 bp, Artificial Sequence
  Synthetic oligonucleotide
taacgatggattggtttctgtccttacaaa

SEQ ID NO: 323758 - DNA, 30 bp, Artificial Sequence
  Synthetic oligonucleotide
gatccgagcgaacagttaagtgtttacaaa

SEQ ID NO: 323759 - DNA, 30 bp, Artificial Sequence
  Synthetic oligonucleotide
ggatcttttcaggtaagctacaaaaccaaa

SEQ ID NO: 323760 - DNA, 30 bp, Artificial Sequence
  Synthetic oligonucleotide
ggtaaggagttgccggaggttagaaccaaa

SEQ ID NO: 323761 - DNA, 30 bp, Artificial Sequence
  Synthetic oligonucleotide
catcctttgtttgaactacgttgaaccaaa

SEQ ID NO: 323762 - DNA, 30 bp, Artificial Sequence
  Synthetic oligonucleotide
gtcctagcttagtttacttgagccaccaaa

SEQ ID NO: 323763 - DNA, 30 bp, Artificial Sequence
  Synthetic oligonucleotide
gaggcgatacgtttcggaacacgcaccaaa

SEQ ID NO: 323764 - DNA, 30 bp, Artificial Sequence
  Synthetic oligonucleotide
gtccgacagattgggaggcataagaccaaa

SEQ ID NO: 323765 - DNA, 30 bp, Artificial Sequence
  Synthetic oligonucleotide
ccaacttcacaatgatagcccatgaccaaa

SEQ ID NO: 323766 - DNA, 30 bp, Artificial Sequence
  Synthetic oligonucleotide
ggctcagcatgagccttttccgataccaaa

SEQ ID NO: 323767 - DNA, 30 bp, Artificial Sequence
  Synthetic oligonucleotide
cgtcatctatatgctttccagcgtaccaaa

SEQ ID NO: 323768 - DNA, 30 bp, Artificial Sequence
  Synthetic oligonucleotide
cgagtttcatggaggcacagttgtaccaaa

SEQ ID NO: 323769 - DNA, 30 bp, Artificial Sequence
  Synthetic oligonucleotide
gggttggtctgaattgccagaattaccaaa

SEQ ID NO: 323770 - DNA, 30 bp, Artificial Sequence
  Synthetic oligonucleotide
agttcagtggacactggggggcttaccaaa

SEQ ID NO: 323771 - DNA, 30 bp, Artificial Sequence
  Synthetic oligonucleotide
ggaggcctgtaacgacttgaggttaccaaa

SEQ ID NO: 323772 - DNA, 30 bp, Artificial Sequence
  Synthetic oligonucleotide
aagatggctctatgacagattacacccaaa

SEQ ID NO: 323773 - DNA, 30 bp, Artificial Sequence
  Synthetic oligonucleotide
gcgacgggcctcagcacgatcaggcccaaa

SEQ ID NO: 323774 - DNA, 29 bp, Artificial Sequence
  Synthetic oligonucleotide
atcctatagggacgtcgaggggagccaaa

SEQ ID NO: 323775 - DNA, 30 bp, Artificial Sequence
  Synthetic oligonucleotide
tacgtcgtcatatcattaattttagccaaa

SEQ ID NO: 323776 - DNA, 31 bp, Artificial Sequence
  Synthetic oligonucleotide
gcatatatctgtctcagtccatcacgccaaa

SEQ ID NO: 323777 - DNA, 30 bp, Artificial Sequence
  Synthetic oligonucleotide
agtttcttcatggaaattggtgacgccaaa

SEQ ID NO: 323778 - DNA, 30 bp, Artificial Sequence
  Synthetic oligonucleotide
tggccagcatggaatgcccgtgccgccaaa

SEQ ID NO: 323779 - DNA, 30 bp, Artificial Sequence
  Synthetic oligonucleotide
cctactctttcgtgattcgaccgcgccaaa

SEQ ID NO: 323780 - DNA, 30 bp, Artificial Sequence
  Synthetic oligonucleotide
atatagggatcacacagtagactcgccaaa

SEQ ID NO: 323781 - DNA, 30 bp, Artificial Sequence
  Synthetic oligonucleotide
atacgtggggactaacttcgtaaggccaaa

SEQ ID NO: 323782 - DNA, 30 bp, Artificial Sequence
  Synthetic oligonucleotide
ctaataccggactcgttatgacaggccaaa

SEQ ID NO: 323783 - DNA, 31 bp, Artificial Sequence
  Synthetic oligonucleotide
tgcccccaattttaatgtatacgaggccaaa

SEQ ID NO: 323784 - DNA, 30 bp, Artificial Sequence
  Synthetic oligonucleotide
atgtctataatcctcgcttatgtggccaaa

SEQ ID NO: 323785 - DNA, 30 bp, Artificial Sequence
  Synthetic oligonucleotide
tgtcgatagtgagactgtgaatatgccaaa

SEQ ID NO: 323786 - DNA, 30 bp, Artificial Sequence
  Synthetic oligonucleotide
gatggtgttaacatgcctttctatgccaaa

SEQ ID NO: 323787 - DNA, 30 bp, Artificial Sequence
  Synthetic oligonucleotide
acatccgacccttgatcaggcagctccaaa

SEQ ID NO: 323788 - DNA, 30 bp, Artificial Sequence
  Synthetic oligonucleotide
cacttggaataacataattatggctccaaa

SEQ ID NO: 323789 - DNA, 30 bp, Artificial Sequence
  Synthetic oligonucleotide
gggtctgtactgtacctattcacgtccaaa

SEQ ID NO: 323790 - DNA, 30 bp, Artificial Sequence
  Synthetic oligonucleotide
gggagtgggacggtgcccttctggtccaaa

SEQ ID NO: 323791 - DNA, 30 bp, Artificial Sequence
  Synthetic oligonucleotide
agggagtattattcctaaaggccttccaaa

SEQ ID NO: 323792 - DNA, 30 bp, Artificial Sequence
  Synthetic oligonucleotide
caaaatacggaagatttctccagttccaaa

SEQ ID NO: 323793 - DNA, 30 bp, Artificial Sequence
  Synthetic oligonucleotide
acattaacacaggaacatgcgtcaagcaaa

SEQ ID NO: 323794 - DNA, 30 bp, Artificial Sequence
  Synthetic oligonucleotide
cgccactgagtttccagggcgcacagcaaa

SEQ ID NO: 323795 - DNA, 30 bp, Artificial Sequence
  Synthetic oligonucleotide
tagaatcattccttggtgagctacagcaaa

SEQ ID NO: 323796 - DNA, 30 bp, Artificial Sequence
  Synthetic oligonucleotide
tattgtcattcgacatagacttccagcaaa

SEQ ID NO: 323797 - DNA, 30 bp, Artificial Sequence
  Synthetic oligonucleotide
caagtcttgtggagactgactcgcagcaaa

SEQ ID NO: 323798 - DNA, 30 bp, Artificial Sequence
  Synthetic oligonucleotide
atacgacgtttatgtccagggtagagcaaa

SEQ ID NO: 323799 - DNA, 30 bp, Artificial Sequence
  Synthetic oligonucleotide
gctaatgcagtagggacatatactagcaaa

SEQ ID NO: 323800 - DNA, 30 bp, Artificial Sequence
  Synthetic oligonucleotide
gctagcgtttagtaatcagttgctagcaaa

SEQ ID NO: 323801 - DNA, 30 bp, Artificial Sequence
  Synthetic oligonucleotide
tactaacgcttgatgggcgcggaacgcaaa

SEQ ID NO: 323802 - DNA, 30 bp, Artificial Sequence
  Synthetic oligonucleotide
tttgaaaaagatatgtctagaggacgcaaa

SEQ ID NO: 323803 - DNA, 30 bp, Artificial Sequence
  Synthetic oligonucleotide
actgtcttgggcgaaattcaattacgcaaa

SEQ ID NO: 323804 - DNA, 30 bp, Artificial Sequence
  Synthetic oligonucleotide
catgctggggggccaatatcacgccgcaaa

SEQ ID NO: 323805 - DNA, 30 bp, Artificial Sequence
  Synthetic oligonucleotide
gaaccaatcctatagtattttcggcgcaaa

SEQ ID NO: 323806 - DNA, 30 bp, Artificial Sequence
  Synthetic oligonucleotide
ctgataatgcttgctgggaggatgcgcaaa

SEQ ID NO: 323807 - DNA, 30 bp, Artificial Sequence
  Synthetic oligonucleotide
ttcgtgctgcgaaacgattggcatcgcaaa

SEQ ID NO: 323808 - DNA, 30 bp, Artificial Sequence
  Synthetic oligonucleotide
cttatagtcgttgtatctgccattcgcaaa

SEQ ID NO: 323809 - DNA, 30 bp, Artificial Sequence
  Synthetic oligonucleotide
actgggatcacttttgagctcgttcgcaaa

SEQ ID NO: 323810 - DNA, 30 bp, Artificial Sequence
  Synthetic oligonucleotide
ctagagaatactctaatggatcctggcaaa

SEQ ID NO: 323811 - DNA, 30 bp, Artificial Sequence
  Synthetic oligonucleotide
catggaccggtgtttaatcagtgtggcaaa

SEQ ID NO: 323812 - DNA, 30 bp, Artificial Sequence
  Synthetic oligonucleotide
ttatcctcgctttattacacccgatgcaaa

SEQ ID NO: 323813 - DNA, 30 bp, Artificial Sequence
  Synthetic oligonucleotide
gcctatgtcgttaagagcctgcgatgcaaa

SEQ ID NO: 323814 - DNA, 30 bp, Artificial Sequence
  Synthetic oligonucleotide
gtccatggtaaagtcagactaatatgcaaa

SEQ ID NO: 323815 - DNA, 30 bp, Artificial Sequence
  Synthetic oligonucleotide
tccataccatgtcaaccatccaagtgcaaa

SEQ ID NO: 323816 - DNA, 30 bp, Artificial Sequence
  Synthetic oligonucleotide
ctcgtatagcctaataattatctgtgcaaa

SEQ ID NO: 323817 - DNA, 30 bp, Artificial Sequence
  Synthetic oligonucleotide
cttttctcaaactatgggatacattgcaaa

SEQ ID NO: 323818 - DNA, 30 bp, Artificial Sequence
  Synthetic oligonucleotide
ttgaaagactgaaagtcattccattgcaaa

SEQ ID NO: 323819 - DNA, 30 bp, Artificial Sequence
  Synthetic oligonucleotide
tcagattccaacgattcacactattgcaaa

SEQ ID NO: 323820 - DNA, 30 bp, Artificial Sequence
  Synthetic oligonucleotide
tggatggcatccggtgttacgatttgcaaa

SEQ ID NO: 323821 - DNA, 30 bp, Artificial Sequence
  Synthetic oligonucleotide
cttctcgagtcactttggagccaaatcaaa

SEQ ID NO: 323822 - DNA, 30 bp, Artificial Sequence
  Synthetic oligonucleotide
tatacggggacatgtagctcggacatcaaa

SEQ ID NO: 323823 - DNA, 30 bp, Artificial Sequence
  Synthetic oligonucleotide
agatatgcatagcgaccgttatcgatcaaa

SEQ ID NO: 323824 - DNA, 30 bp, Artificial Sequence
  Synthetic oligonucleotide
caaataatttgcctgctgtaatatatcaaa

SEQ ID NO: 323825 - DNA, 30 bp, Artificial Sequence
  Synthetic oligonucleotide
ggttcatagggtcacctggcggctatcaaa

SEQ ID NO: 323826 - DNA, 30 bp, Artificial Sequence
  Synthetic oligonucleotide
tacgactccaccacatgcctatctatcaaa

SEQ ID NO: 323827 - DNA, 30 bp, Artificial Sequence
  Synthetic oligonucleotide
ccctttgataaaagcacagaagttatcaaa

SEQ ID NO: 323828 - DNA, 30 bp, Artificial Sequence
  Synthetic oligonucleotide
cagtacgttcaaatttagacggttatcaaa

SEQ ID NO: 323829 - DNA, 30 bp, Artificial Sequence
  Synthetic oligonucleotide
tatgcgggtaacgctccattaacactcaaa

SEQ ID NO: 323830 - DNA, 30 bp, Artificial Sequence
  Synthetic oligonucleotide
gtatatagcaattatccgaacacactcaaa

SEQ ID NO: 323831 - DNA, 30 bp, Artificial Sequence
  Synthetic oligonucleotide
gctaggtgtggtcagccactgacactcaaa

SEQ ID NO: 323832 - DNA, 30 bp, Artificial Sequence
  Synthetic oligonucleotide
tgttccgccagtacggcgtcagtactcaaa

SEQ ID NO: 323833 - DNA, 30 bp, Artificial Sequence
  Synthetic oligonucleotide
tgaatattccctccaaaatgaggcctcaaa

SEQ ID NO: 323834 - DNA, 30 bp, Artificial Sequence
  Synthetic oligonucleotide
ttcacattaacggcacaacgcccgctcaaa

SEQ ID NO: 323835 - DNA, 30 bp, Artificial Sequence
  Synthetic oligonucleotide
agttaagacccttttacttcactgctcaaa

SEQ ID NO: 323836 - DNA, 30 bp, Artificial Sequence
  Synthetic oligonucleotide
aagctagatcagcaaactttacaagtcaaa

SEQ ID NO: 323837 - DNA, 30 bp, Artificial Sequence
  Synthetic oligonucleotide
tagcttctaggaatgccggctcccgtcaaa

SEQ ID NO: 323838 - DNA, 30 bp, Artificial Sequence
  Synthetic oligonucleotide
aggacgtagctccaggactgtcccgtcaaa

SEQ ID NO: 323839 - DNA, 30 bp, Artificial Sequence
  Synthetic oligonucleotide
ggttatttagtccagccttaccgcgtcaaa

SEQ ID NO: 323840 - DNA, 30 bp, Artificial Sequence
  Synthetic oligonucleotide
cgcagtactggtcgggaaaccggggtcaaa

SEQ ID NO: 323841 - DNA, 30 bp, Artificial Sequence
  Synthetic oligonucleotide
cttcaatgagatcactacagagtggtcaaa

SEQ ID NO: 323842 - DNA, 30 bp, Artificial Sequence
  Synthetic oligonucleotide
ctccttgggaaaaacgtttttattgtcaaa

SEQ ID NO: 323843 - DNA, 30 bp, Artificial Sequence
  Synthetic oligonucleotide
aagctagcgttgctaagcaatgttgtcaaa

SEQ ID NO: 323844 - DNA, 30 bp, Artificial Sequence
  Synthetic oligonucleotide
gaggcgattttcaaaagacatgttgtcaaa

SEQ ID NO: 323845 - DNA, 30 bp, Artificial Sequence
  Synthetic oligonucleotide
agaggggtgcaatgtgccatgtaattcaaa

SEQ ID NO: 323846 - DNA, 30 bp, Artificial Sequence
  Synthetic oligonucleotide
ttgtacatggaaaggggccatgcattcaaa

SEQ ID NO: 323847 - DNA, 30 bp, Artificial Sequence
  Synthetic oligonucleotide
taaggcttaggcgcctcgcgcaccttcaaa

SEQ ID NO: 323848 - DNA, 30 bp, Artificial Sequence
  Synthetic oligonucleotide
ttacaaggagttccctgtgcgagcttcaaa

SEQ ID NO: 323849 - DNA, 30 bp, Artificial Sequence
  Synthetic oligonucleotide
gacctttacgaaggtcaggagcagttcaaa

SEQ ID NO: 323850 - DNA, 30 bp, Artificial Sequence
  Synthetic oligonucleotide
gccttcttcaggcacttaagctcgttcaaa

SEQ ID NO: 323851 - DNA, 30 bp, Artificial Sequence
  Synthetic oligonucleotide
gttgtaaaagtcgtgtgcgacgggttcaaa

SEQ ID NO: 323852 - DNA, 30 bp, Artificial Sequence
  Synthetic oligonucleotide
gtgcggtaatactaattggttggtttcaaa

SEQ ID NO: 323853 - DNA, 30 bp, Artificial Sequence
  Synthetic oligonucleotide
tgaaatgtagtaagagcaagctttttcaaa

SEQ ID NO: 323854 - DNA, 30 bp, Artificial Sequence
  Synthetic oligonucleotide
ggaagtcttggtcctagtattcaaaagaaa

SEQ ID NO: 323855 - DNA, 30 bp, Artificial Sequence
  Synthetic oligonucleotide
ggagtccgccaataacgcctataaaagaaa

SEQ ID NO: 323856 - DNA, 30 bp, Artificial Sequence
  Synthetic oligonucleotide
tcggtagtggagccgaccggcgcaaagaaa

SEQ ID NO: 323857 - DNA, 30 bp, Artificial Sequence
  Synthetic oligonucleotide
ttcgacttagttagttatgagtacaagaaa

SEQ ID NO: 323858 - DNA, 30 bp, Artificial Sequence
  Synthetic oligonucleotide
gggctgttgggtcatggggtcagcaagaaa

SEQ ID NO: 323859 - DNA, 30 bp, Artificial Sequence
  Synthetic oligonucleotide
ttatcttaatgataatagagctagaagaaa

SEQ ID NO: 323860 - DNA, 30 bp, Artificial Sequence
  Synthetic oligonucleotide
tacgtgatcgcttgtggtcatctgaagaaa

SEQ ID NO: 323861 - DNA, 30 bp, Artificial Sequence
  Synthetic oligonucleotide
aatttactgctctgatcaaaacataagaaa

SEQ ID NO: 323862 - DNA, 30 bp, Artificial Sequence
  Synthetic oligonucleotide
agccattgttgtcatttcggggcacagaaa

SEQ ID NO: 323863 - DNA, 30 bp, Artificial Sequence
  Synthetic oligonucleotide
attccggtggccgaaaggaatatacagaaa

SEQ ID NO: 323864 - DNA, 30 bp, Artificial Sequence
  Synthetic oligonucleotide
gactataaaggtccccgtgttacccagaaa

SEQ ID NO: 323865 - DNA, 30 bp, Artificial Sequence
  Synthetic oligonucleotide
gtatttagagcgctccatcagagccagaaa

SEQ ID NO: 323866 - DNA, 30 bp, Artificial Sequence
  Synthetic oligonucleotide
cgattaacggcaccctttatgcatcagaaa

SEQ ID NO: 323867 - DNA, 30 bp, Artificial Sequence
  Synthetic oligonucleotide
ctagcaaataagccccatattgatcagaaa

SEQ ID NO: 323868 - DNA, 30 bp, Artificial Sequence
  Synthetic oligonucleotide
cctggtacctatcaaggggttcctcagaaa

SEQ ID NO: 323869 - DNA, 30 bp, Artificial Sequence
  Synthetic oligonucleotide
actataggtttggttttctcttaagagaaa

SEQ ID NO: 323870 - DNA, 30 bp, Artificial Sequence
  Synthetic oligonucleotide
acctattatgactatagcggtacagagaaa

SEQ ID NO: 323871 - DNA, 30 bp, Artificial Sequence
  Synthetic oligonucleotide
gctacctgacgcctactgattggagagaaa

SEQ ID NO: 323872 - DNA, 30 bp, Artificial Sequence
  Synthetic oligonucleotide
aacatgaggtacggagtcacgcacgagaaa

SEQ ID NO: 323873 - DNA, 30 bp, Artificial Sequence
  Synthetic oligonucleotide
cggaaacgggcctcggggggacgcgagaaa

SEQ ID NO: 323874 - DNA, 30 bp, Artificial Sequence
  Synthetic oligonucleotide
tgtgacgctcggtccatgttacgcgagaaa

SEQ ID NO: 323875 - DNA, 30 bp, Artificial Sequence
  Synthetic oligonucleotide
ttccatgtgaaggttgtacaagaggagaaa

SEQ ID NO: 323876 - DNA, 30 bp, Artificial Sequence
  Synthetic oligonucleotide
tatttagcagctcctggagtagaggagaaa

SEQ ID NO: 323877 - DNA, 30 bp, Artificial Sequence
  Synthetic oligonucleotide
cttcaacttacatcattaaaaacggagaaa

SEQ ID NO: 323878 - DNA, 30 bp, Artificial Sequence
  Synthetic oligonucleotide
tcgagtcgtgctcgctttacgaatgagaaa

SEQ ID NO: 323879 - DNA, 30 bp, Artificial Sequence
  Synthetic oligonucleotide
aaggagcatgacgcaatcgaaactgagaaa

SEQ ID NO: 323880 - DNA, 30 bp, Artificial Sequence
  Synthetic oligonucleotide
ccacgtgtcggagaatctgacagtgagaaa

SEQ ID NO: 323881 - DNA, 30 bp, Artificial Sequence
  Synthetic oligonucleotide
tctatcaagacgacatcaccaattgagaaa

SEQ ID NO: 323882 - DNA, 30 bp, Artificial Sequence
  Synthetic oligonucleotide
aaggtagtcgttgggaaatatcttgagaaa

SEQ ID NO: 323883 - DNA, 30 bp, Artificial Sequence
  Synthetic oligonucleotide
gacgtaacgtcctttcatgtgaaatagaaa

SEQ ID NO: 323884 - DNA, 30 bp, Artificial Sequence
  Synthetic oligonucleotide
gagccaaagggggagatcacagcatagaaa

SEQ ID NO: 323885 - DNA, 30 bp, Artificial Sequence
  Synthetic oligonucleotide
cttcggtcaatgctttcatacagatagaaa

SEQ ID NO: 323886 - DNA, 30 bp, Artificial Sequence
  Synthetic oligonucleotide
aactcacacccgtcgggcactggatagaaa

SEQ ID NO: 323887 - DNA, 30 bp, Artificial Sequence
  Synthetic oligonucleotide
gatagagatgagacgacgggcctatagaaa

SEQ ID NO: 323888 - DNA, 30 bp, Artificial Sequence
  Synthetic oligonucleotide
tcaaccgcaccataccgagtcctatagaaa

SEQ ID NO: 323889 - DNA, 30 bp, Artificial Sequence
  Synthetic oligonucleotide
ctgttatctggcgcgtaatttgtatagaaa

SEQ ID NO: 323890 - DNA, 30 bp, Artificial Sequence
  Synthetic oligonucleotide
ttgtgtgacctggggacgtgcaactagaaa

SEQ ID NO: 323891 - DNA, 30 bp, Artificial Sequence
  Synthetic oligonucleotide
catggctaggtgtctttgttgtcctagaaa

SEQ ID NO: 323892 - DNA, 30 bp, Artificial Sequence
  Synthetic oligonucleotide
tcaactcatatgcttcgcatgctctagaaa

SEQ ID NO: 323893 - DNA, 30 bp, Artificial Sequence
  Synthetic oligonucleotide
tgctttcgctccggcacccggaggtagaaa

SEQ ID NO: 323894 - DNA, 30 bp, Artificial Sequence
  Synthetic oligonucleotide
ccggagcacgattctacgacgtggtagaaa

SEQ ID NO: 323895 - DNA, 30 bp, Artificial Sequence
  Synthetic oligonucleotide
aaccccgatttgaagcgcgaaaattagaaa

SEQ ID NO: 323896 - DNA, 30 bp, Artificial Sequence
  Synthetic oligonucleotide
gacggagatgtcatagtctttagttagaaa

SEQ ID NO: 323897 - DNA, 30 bp, Artificial Sequence
  Synthetic oligonucleotide
ccgacgaaggcctctagacgcacaacgaaa

SEQ ID NO: 323898 - DNA, 30 bp, Artificial Sequence
  Synthetic oligonucleotide
cagtagataacaattgtttttccaacgaaa

SEQ ID NO: 323899 - DNA, 30 bp, Artificial Sequence
  Synthetic oligonucleotide
aaactagcatgatattcatctataacgaaa

SEQ ID NO: 323900 - DNA, 30 bp, Artificial Sequence
  Synthetic oligonucleotide
cacagattccggccaaacgtggtaacgaaa

SEQ ID NO: 323901 - DNA, 30 bp, Artificial Sequence
  Synthetic oligonucleotide
accgagtatatgaaaccgctgttaacgaaa

SEQ ID NO: 323902 - DNA, 30 bp, Artificial Sequence
  Synthetic oligonucleotide
tctgctagcttgaactatcgctgcacgaaa

SEQ ID NO: 323903 - DNA, 30 bp, Artificial Sequence
  Synthetic oligonucleotide
cactctgcgacattgccaacattcacgaaa

SEQ ID NO: 323904 - DNA, 30 bp, Artificial Sequence
  Synthetic oligonucleotide
gaacatctactgtttgcagtggttacgaaa

SEQ ID NO: 323905 - DNA, 30 bp, Artificial Sequence
  Synthetic oligonucleotide
actgcgcttcacgtattgtagtgaccgaaa

SEQ ID NO: 323906 - DNA, 30 bp, Artificial Sequence
  Synthetic oligonucleotide
ataatctcgatcgcaaaagatgccccgaaa

SEQ ID NO: 323907 - DNA, 30 bp, Artificial Sequence
  Synthetic oligonucleotide
agaacctgtgtcaatgtatattccccgaaa

SEQ ID NO: 323908 - DNA, 30 bp, Artificial Sequence
  Synthetic oligonucleotide
aacggtggtttcggtcatcggtgcccgaaa

SEQ ID NO: 323909 - DNA, 30 bp, Artificial Sequence
  Synthetic oligonucleotide
tcgtgaataatggcaataaccgtcccgaaa

SEQ ID NO: 323910 - DNA, 30 bp, Artificial Sequence
  Synthetic oligonucleotide
acccaaacccgtttgtgttggcctccgaaa

SEQ ID NO: 323911 - DNA, 30 bp, Artificial Sequence
  Synthetic oligonucleotide
gctatctcgatggcgtgatcatgtccgaaa

SEQ ID NO: 323912 - DNA, 30 bp, Artificial Sequence
  Synthetic oligonucleotide
gcaagtcaagacattactgacattccgaaa

SEQ ID NO: 323913 - DNA, 30 bp, Artificial Sequence
  Synthetic oligonucleotide
gaatcaataacgtggccgtttacagcgaaa

SEQ ID NO: 323914 - DNA, 30 bp, Artificial Sequence
  Synthetic oligonucleotide
gatttcactatggcgcattacagagcgaaa

SEQ ID NO: 323915 - DNA, 30 bp, Artificial Sequence
  Synthetic oligonucleotide
gttctattggacagaaccgccatagcgaaa

SEQ ID NO: 323916 - DNA, 30 bp, Artificial Sequence
  Synthetic oligonucleotide
gggcagcaggagtccccataattagcgaaa

SEQ ID NO: 323917 - DNA, 30 bp, Artificial Sequence
  Synthetic oligonucleotide
tgggggaattaccccgtggtggacgcgaaa

SEQ ID NO: 323918 - DNA, 30 bp, Artificial Sequence
  Synthetic oligonucleotide
gatagacgtgttagtccacgaagcgcgaaa

SEQ ID NO: 323919 - DNA, 30 bp, Artificial Sequence
  Synthetic oligonucleotide
tttagatggcggggggcgtgaacggcgaaa

SEQ ID NO: 323920 - DNA, 30 bp, Artificial Sequence
  Synthetic oligonucleotide
aatgtgagtaagcgcccgtgctcatcgaaa

SEQ ID NO: 323921 - DNA, 30 bp, Artificial Sequence
  Synthetic oligonucleotide
tgtatcgttggaagggaacggcgatcgaaa

SEQ ID NO: 323922 - DNA, 30 bp, Artificial Sequence
  Synthetic oligonucleotide
gcctgaccccctgtcacgtgtgtatcgaaa

SEQ ID NO: 323923 - DNA, 30 bp, Artificial Sequence
  Synthetic oligonucleotide
aatgcacacggagcgaataggttatcgaaa

SEQ ID NO: 323924 - DNA, 30 bp, Artificial Sequence
  Synthetic oligonucleotide
attacaagtcggttgttaggctactcgaaa

SEQ ID NO: 323925 - DNA, 30 bp, Artificial Sequence
  Synthetic oligonucleotide
cctaatcccggctatgtgtccaggtcgaaa

SEQ ID NO: 323926 - DNA, 30 bp, Artificial Sequence
  Synthetic oligonucleotide
acttgtcaggagcttggattgtggtcgaaa

SEQ ID NO: 323927 - DNA, 30 bp, Artificial Sequence
  Synthetic oligonucleotide
attctgcttacatatcctacgctgtcgaaa

SEQ ID NO: 323928 - DNA, 30 bp, Artificial Sequence
  Synthetic oligonucleotide
gaaattatgaacggggagtcggaaaggaaa

SEQ ID NO: 323929 - DNA, 30 bp, Artificial Sequence
  Synthetic oligonucleotide
ctggtccaaattttcggttgtgaaaggaaa

SEQ ID NO: 323930 - DNA, 30 bp, Artificial Sequence
  Synthetic oligonucleotide
gtctcgggataatggcgcaggtgaaggaaa

SEQ ID NO: 323931 - DNA, 30 bp, Artificial Sequence
  Synthetic oligonucleotide
agagtcaatatctcctttcctgacaggaaa

SEQ ID NO: 323932 - DNA, 30 bp, Artificial Sequence
  Synthetic oligonucleotide
gtttaaaagagtacgattagatccaggaaa

SEQ ID NO: 323933 - DNA, 30 bp, Artificial Sequence
  Synthetic oligonucleotide
cgtatgtttggctacacattcacgaggaaa

SEQ ID NO: 323934 - DNA, 30 bp, Artificial Sequence
  Synthetic oligonucleotide
tatcacctttctggaagattaccgaggaaa

SEQ ID NO: 323935 - DNA, 30 bp, Artificial Sequence
  Synthetic oligonucleotide
tttgatacgcgcgccgagttccctaggaaa

SEQ ID NO: 323936 - DNA, 30 bp, Artificial Sequence
  Synthetic oligonucleotide
taatcgggcgactaattactggctaggaaa

SEQ ID NO: 323937 - DNA, 30 bp, Artificial Sequence
  Synthetic oligonucleotide
atacaagcccgtcattccgtgagtaggaaa

SEQ ID NO: 323938 - DNA, 30 bp, Artificial Sequence
  Synthetic oligonucleotide
acggcgggtttaccccgtttgcttaggaaa

SEQ ID NO: 323939 - DNA, 30 bp, Artificial Sequence
  Synthetic oligonucleotide
ctcgtgaccggattccatctgtgacggaaa

SEQ ID NO: 323940 - DNA, 30 bp, Artificial Sequence
  Synthetic oligonucleotide
gtagctgccgcttcaattaacacccggaaa

SEQ ID NO: 323941 - DNA, 30 bp, Artificial Sequence
  Synthetic oligonucleotide
cccctcacgtatgcctgttaaaggcggaaa

SEQ ID NO: 323942 - DNA, 30 bp, Artificial Sequence
  Synthetic oligonucleotide
gggactagcattgtaatgggacatcggaaa

SEQ ID NO: 323943 - DNA, 30 bp, Artificial Sequence
  Synthetic oligonucleotide
atgcgctaagctgtacgttggtttcggaaa

SEQ ID NO: 323944 - DNA, 30 bp, Artificial Sequence
  Synthetic oligonucleotide
ggacttaacggctcagcttggacagggaaa

SEQ ID NO: 323945 - DNA, 30 bp, Artificial Sequence
  Synthetic oligonucleotide
tgaaagttaaaaggtttgaagtcagggaaa

SEQ ID NO: 323946 - DNA, 30 bp, Artificial Sequence
  Synthetic oligonucleotide
ggatactgtcgagagctcataagagggaaa

SEQ ID NO: 323947 - DNA, 30 bp, Artificial Sequence
  Synthetic oligonucleotide
cctcgtttcgtgggggacggtatcgggaaa

SEQ ID NO: 323948 - DNA, 30 bp, Artificial Sequence
  Synthetic oligonucleotide
tggcgtagatggaattttgagctcgggaaa

SEQ ID NO: 323949 - DNA, 30 bp, Artificial Sequence
  Synthetic oligonucleotide
gccggcgcgtcagctaagatttgggggaaa

SEQ ID NO: 323950 - DNA, 30 bp, Artificial Sequence
  Synthetic oligonucleotide
gggagtggactgtcatactgagatgggaaa

SEQ ID NO: 323951 - DNA, 30 bp, Artificial Sequence
  Synthetic oligonucleotide
gcattaggtttccgtcgttgaactgggaaa

SEQ ID NO: 323952 - DNA, 30 bp, Artificial Sequence
  Synthetic oligonucleotide
gtaacaaataccgtggtaaatactgggaaa

SEQ ID NO: 323953 - DNA, 30 bp, Artificial Sequence
  Synthetic oligonucleotide
tgtcgccaagtcaccagtccggaatggaaa

SEQ ID NO: 323954 - DNA, 30 bp, Artificial Sequence
  Synthetic oligonucleotide
cttgcgcttccgtggaaacatgactggaaa

SEQ ID NO: 323955 - DNA, 30 bp, Artificial Sequence
  Synthetic oligonucleotide
ctgtgcgaggatcagaccggtatctggaaa

SEQ ID NO: 323956 - DNA, 30 bp, Artificial Sequence
  Synthetic oligonucleotide
cgctatatatcgagcaggcccttctggaaa

SEQ ID NO: 323957 - DNA, 30 bp, Artificial Sequence
  Synthetic oligonucleotide
ctagcgcccggcagggaatgtccgtggaaa

SEQ ID NO: 323958 - DNA, 30 bp, Artificial Sequence
  Synthetic oligonucleotide
tatgatccggctttgcacctagcgtggaaa

SEQ ID NO: 323959 - DNA, 30 bp, Artificial Sequence
  Synthetic oligonucleotide
ctggtctaagcaataggtgctaggtggaaa

SEQ ID NO: 323960 - DNA, 30 bp, Artificial Sequence
  Synthetic oligonucleotide
ccatcctagatctcgcggtccgtgtggaaa

SEQ ID NO: 323961 - DNA, 30 bp, Artificial Sequence
  Synthetic oligonucleotide
cgtgcactagggatgagcccgcattggaaa

SEQ ID NO: 323962 - DNA, 30 bp, Artificial Sequence
  Synthetic oligonucleotide
ctaaactatttaacagacttcttcatgaaa

SEQ ID NO: 323963 - DNA, 30 bp, Artificial Sequence
  Synthetic oligonucleotide
atcgtacgctgcagagcccctaagatgaaa

SEQ ID NO: 323964 - DNA, 30 bp, Artificial Sequence
  Synthetic oligonucleotide
aatgacaactggtcattcgaggggatgaaa

SEQ ID NO: 323965 - DNA, 30 bp, Artificial Sequence
  Synthetic oligonucleotide
cgccacaactcacatataggaaatatgaaa

SEQ ID NO: 323966 - DNA, 30 bp, Artificial Sequence
  Synthetic oligonucleotide
ttccttagaagcagaagcctacaactgaaa

SEQ ID NO: 323967 - DNA, 30 bp, Artificial Sequence
  Synthetic oligonucleotide
tttcttcttggaaggcatgatacactgaaa

SEQ ID NO: 323968 - DNA, 30 bp, Artificial Sequence
  Synthetic oligonucleotide
aataaacaatgccgcaggtcgccactgaaa

SEQ ID NO: 323969 - DNA, 30 bp, Artificial Sequence
  Synthetic oligonucleotide
gcctatcgcgatgcgtaggatcatctgaaa

SEQ ID NO: 323970 - DNA, 30 bp, Artificial Sequence
  Synthetic oligonucleotide
tataagctgaatactacagacagagtgaaa

SEQ ID NO: 323971 - DNA, 30 bp, Artificial Sequence
  Synthetic oligonucleotide
taatggcctgtcgagtggtttagagtgaaa

SEQ ID NO: 323972 - DNA, 30 bp, Artificial Sequence
  Synthetic oligonucleotide
gactacaaagttcggaccgcacacgtgaaa

SEQ ID NO: 323973 - DNA, 30 bp, Artificial Sequence
  Synthetic oligonucleotide
actgccggcagaataccgattagcgtgaaa

SEQ ID NO: 323974 - DNA, 30 bp, Artificial Sequence
  Synthetic oligonucleotide
tgtcacgtaccatatttggaactcgtgaaa

SEQ ID NO: 323975 - DNA, 30 bp, Artificial Sequence
  Synthetic oligonucleotide
aaatgtgaacgtagcgaactgtaggtgaaa

SEQ ID NO: 323976 - DNA, 30 bp, Artificial Sequence
  Synthetic oligonucleotide
ctgaaaatgaacccagttattattgtgaaa

SEQ ID NO: 323977 - DNA, 30 bp, Artificial Sequence
  Synthetic oligonucleotide
cgttagatggcgcagttccggggcttgaaa

SEQ ID NO: 323978 - DNA, 30 bp, Artificial Sequence
  Synthetic oligonucleotide
gagtactgaggatctggtggccagttgaaa

SEQ ID NO: 323979 - DNA, 30 bp, Artificial Sequence
  Synthetic oligonucleotide
tggtatggatttcaccgcgtcaatttgaaa

SEQ ID NO: 323980 - DNA, 30 bp, Artificial Sequence
  Synthetic oligonucleotide
gtagtctataaagtgttgagagctttgaaa

SEQ ID NO: 323981 - DNA, 30 bp, Artificial Sequence
  Synthetic oligonucleotide
tatatcttctatcattagcttagtttgaaa

SEQ ID NO: 323982 - DNA, 30 bp, Artificial Sequence
  Synthetic oligonucleotide
ggcggatgaacactcccgcataaaaataaa

SEQ ID NO: 323983 - DNA, 30 bp, Artificial Sequence
  Synthetic oligonucleotide
ggtagtatttcgtgactacagtaaaataaa

SEQ ID NO: 323984 - DNA, 30 bp, Artificial Sequence
  Synthetic oligonucleotide
taaacctcgtacaactcgattacaaataaa

SEQ ID NO: 323985 - DNA, 30 bp, Artificial Sequence
  Synthetic oligonucleotide
ggcggttcctgggttgggctttcaaataaa

SEQ ID NO: 323986 - DNA, 31 bp, Artificial Sequence
  Synthetic oligonucleotide
tattctccgtcggcaaacatgtctaaataaa

SEQ ID NO: 323987 - DNA, 30 bp, Artificial Sequence
  Synthetic oligonucleotide
gctgaaacttcagccacaatggtaaataaa

SEQ ID NO: 323988 - DNA, 30 bp, Artificial Sequence
  Synthetic oligonucleotide
aaagactctaaagaggtttatggcaataaa

SEQ ID NO: 323989 - DNA, 30 bp, Artificial Sequence
  Synthetic oligonucleotide
acatccgatgccggagagaagttcaataaa

SEQ ID NO: 323990 - DNA, 30 bp, Artificial Sequence
  Synthetic oligonucleotide
gttcaacagcagggtaaaatcaagaataaa

SEQ ID NO: 323991 - DNA, 30 bp, Artificial Sequence
  Synthetic oligonucleotide
actcgggcgatgtccggctagcagaataaa

SEQ ID NO: 323992 - DNA, 30 bp, Artificial Sequence
  Synthetic oligonucleotide
tgctatcgctcctcataagaaaggaataaa

SEQ ID NO: 323993 - DNA, 30 bp, Artificial Sequence
  Synthetic oligonucleotide
tcctgcttttatcgccagtgtactaataaa

SEQ ID NO: 323994 - DNA, 30 bp, Artificial Sequence
  Synthetic oligonucleotide
agacgagtcatgaatgtcctaaaacataaa

SEQ ID NO: 323995 - DNA, 30 bp, Artificial Sequence
  Synthetic oligonucleotide
taatcattcctataacgtattacacataaa

SEQ ID NO: 323996 - DNA, 30 bp, Artificial Sequence
  Synthetic oligonucleotide
tgggattaatgcagggctggcgcacataaa

SEQ ID NO: 323997 - DNA, 30 bp, Artificial Sequence
  Synthetic oligonucleotide
cgtttatctagggggcttgaggcccataaa

SEQ ID NO: 323998 - DNA, 30 bp, Artificial Sequence
  Synthetic oligonucleotide
ggccagaggccgatcagttaggcccataaa

SEQ ID NO: 323999 - DNA, 30 bp, Artificial Sequence
  Synthetic oligonucleotide
cacggacggaacaggatggactcccataaa

SEQ ID NO: 324000 - DNA, 30 bp, Artificial Sequence
  Synthetic oligonucleotide
ctgactatacgtagcttgcgattccataaa

SEQ ID NO: 324001 - DNA, 30 bp, Artificial Sequence
  Synthetic oligonucleotide
ccataggcatatcaatcattccagcataaa

SEQ ID NO: 324002 - DNA, 30 bp, Artificial Sequence
  Synthetic oligonucleotide
aaatgacctatgagtctagctctagataaa

SEQ ID NO: 324003 - DNA, 30 bp, Artificial Sequence
  Synthetic oligonucleotide
gcaatcatgtgcggcctgcacgtagataaa

SEQ ID NO: 324004 - DNA, 30 bp, Artificial Sequence
  Synthetic oligonucleotide
gtattggtgataacttttggaaccgataaa

SEQ ID NO: 324005 - DNA, 30 bp, Artificial Sequence
  Synthetic oligonucleotide
agtgactgctcaaggaacgagtccgataaa

SEQ ID NO: 324006 - DNA, 30 bp, Artificial Sequence
  Synthetic oligonucleotide
tctttagttgcaacccgacaccgcgataaa

SEQ ID NO: 324007 - DNA, 30 bp, Artificial Sequence
  Synthetic oligonucleotide
atcgaccgcccgtgacattgcgtcgataaa

SEQ ID NO: 324008 - DNA, 30 bp, Artificial Sequence
  Synthetic oligonucleotide
gattaaaaatagcgacttccggatgataaa

SEQ ID NO: 324009 - DNA, 30 bp, Artificial Sequence
  Synthetic oligonucleotide
gattaggttaacgccgacaagtatgataaa

SEQ ID NO: 324010 - DNA, 30 bp, Artificial Sequence
  Synthetic oligonucleotide
tccaaattgtagatttcgaacgctgataaa

SEQ ID NO: 324011 - DNA, 30 bp, Artificial Sequence
  Synthetic oligonucleotide
gcaattgaaaagagctcgtcggctgataaa

SEQ ID NO: 324012 - DNA, 30 bp, Artificial Sequence
  Synthetic oligonucleotide
gtctataggacaacggatacctgtgataaa

SEQ ID NO: 324013 - DNA, 30 bp, Artificial Sequence
  Synthetic oligonucleotide
gctgcgagaaagcgcactattctatataaa

SEQ ID NO: 324014 - DNA, 30 bp, Artificial Sequence
  Synthetic oligonucleotide
ggctgactagcacattaagaagtatataaa

SEQ ID NO: 324015 - DNA, 30 bp, Artificial Sequence
  Synthetic oligonucleotide
cgaactgacatggtacgctgctagtataaa

SEQ ID NO: 324016 - DNA, 30 bp, Artificial Sequence
  Synthetic oligonucleotide
agtttcaccgagtgcaaggtctggtataaa

SEQ ID NO: 324017 - DNA, 30 bp, Artificial Sequence
  Synthetic oligonucleotide
ctcccgaatagtctgactgatgtgtataaa

SEQ ID NO: 324018 - DNA, 30 bp, Artificial Sequence
  Synthetic oligonucleotide
aggtcgttcctaccgtctccacgttataaa

SEQ ID NO: 324019 - DNA, 30 bp, Artificial Sequence
  Synthetic oligonucleotide
ctgtcacaacaaccgatcactaaaactaaa

SEQ ID NO: 324020 - DNA, 30 bp, Artificial Sequence
  Synthetic oligonucleotide
ggctttttatgagagaactggagaactaaa

SEQ ID NO: 324021 - DNA, 30 bp, Artificial Sequence
  Synthetic oligonucleotide
taagcgcctactagctaataacgaactaaa

SEQ ID NO: 324022 - DNA, 30 bp, Artificial Sequence
  Synthetic oligonucleotide
ctggccttgctcgttacaatggtgactaaa

SEQ ID NO: 324023 - DNA, 30 bp, Artificial Sequence
  Synthetic oligonucleotide
gtcgattgggggttggcgtgtttgactaaa

SEQ ID NO: 324024 - DNA, 31 bp, Artificial Sequence
  Synthetic oligonucleotide
taggacacctggtctgcttacaaatactaaa

SEQ ID NO: 324025 - DNA, 30 bp, Artificial Sequence
  Synthetic oligonucleotide
tcctgaaaaggagacgtgactgttactaaa

SEQ ID NO: 324026 - DNA, 30 bp, Artificial Sequence
  Synthetic oligonucleotide
agtgcaggcaaaaacttagaatttactaaa

SEQ ID NO: 324027 - DNA, 30 bp, Artificial Sequence
  Synthetic oligonucleotide
cgattcggctcttcatgatacaaacctaaa

SEQ ID NO: 324028 - DNA, 30 bp, Artificial Sequence
  Synthetic oligonucleotide
cagttagcccctatccgaaactctcctaaa

SEQ ID NO: 324029 - DNA, 30 bp, Artificial Sequence
  Synthetic oligonucleotide
tcggtagcaacgcttaattggtttcctaaa

SEQ ID NO: 324030 - DNA, 30 bp, Artificial Sequence
  Synthetic oligonucleotide
ggttcaaagtattatctttgtaaagctaaa

SEQ ID NO: 324031 - DNA, 30 bp, Artificial Sequence
  Synthetic oligonucleotide
ccgacgctgcagcgccaattgagagctaaa

SEQ ID NO: 324032 - DNA, 30 bp, Artificial Sequence
  Synthetic oligonucleotide
caacttcaaatcattgacgcgaaggctaaa

SEQ ID NO: 324033 - DNA, 30 bp, Artificial Sequence
  Synthetic oligonucleotide
acggtcctggtaaagcgcaaggtggctaaa

SEQ ID NO: 324034 - DNA, 30 bp, Artificial Sequence
  Synthetic oligonucleotide
atggctcgccgcggtaggtactgtgctaaa

SEQ ID NO: 324035 - DNA, 30 bp, Artificial Sequence
  Synthetic oligonucleotide
attgcacagcaattcgaagttcttgctaaa

SEQ ID NO: 324036 - DNA, 30 bp, Artificial Sequence
  Synthetic oligonucleotide
agtaccatcggtaggacgggacaatctaaa

SEQ ID NO: 324037 - DNA, 30 bp, Artificial Sequence
  Synthetic oligonucleotide
cgctccgtcgtgtgcaatttgacatctaaa

SEQ ID NO: 324038 - DNA, 30 bp, Artificial Sequence
  Synthetic oligonucleotide
caagcatattttaaccgtgtgtcctctaaa

SEQ ID NO: 324039 - DNA, 30 bp, Artificial Sequence
  Synthetic oligonucleotide
gcacttgtacctatccttctcaagtctaaa

SEQ ID NO: 324040 - DNA, 30 bp, Artificial Sequence
  Synthetic oligonucleotide
cacaaaagggttgacggatgtaagtctaaa

SEQ ID NO: 324041 - DNA, 30 bp, Artificial Sequence
  Synthetic oligonucleotide
cctcagcgagaggacgttgaggcgtctaaa

SEQ ID NO: 324042 - DNA, 30 bp, Artificial Sequence
  Synthetic oligonucleotide
acacgggtatcgagtaaaatcatgtctaaa

SEQ ID NO: 324043 - DNA, 30 bp, Artificial Sequence
  Synthetic oligonucleotide
gcctaaagggacataaaaagtaattctaaa

SEQ ID NO: 324044 - DNA, 30 bp, Artificial Sequence
  Synthetic oligonucleotide
ttgtacctgaactcggcgagcggttctaaa

SEQ ID NO: 324045 - DNA, 30 bp, Artificial Sequence
  Synthetic oligonucleotide
cacgtcggaaagcttcagtgaaaaagtaaa

SEQ ID NO: 324046 - DNA, 30 bp, Artificial Sequence
  Synthetic oligonucleotide
tgagggagcgtttccaaatgtacaagtaaa

SEQ ID NO: 324047 - DNA, 30 bp, Artificial Sequence
  Synthetic oligonucleotide
ggggttacacgattatgggttacaagtaaa

SEQ ID NO: 324048 - DNA, 30 bp, Artificial Sequence
  Synthetic oligonucleotide
agattctggccaaaggggaggcccagtaaa

SEQ ID NO: 324049 - DNA, 28 bp, Artificial Sequence
  Synthetic oligonucleotide
gcacggttcatataacgatgccagtaaa

SEQ ID NO: 324050 - DNA, 30 bp, Artificial Sequence
  Synthetic oligonucleotide
ctgaaaggaagcagcagtacaggcagtaaa

SEQ ID NO: 324051 - DNA, 30 bp, Artificial Sequence
  Synthetic oligonucleotide
tagtatggccattggcgccacttcagtaaa

SEQ ID NO: 324052 - DNA, 30 bp, Artificial Sequence
  Synthetic oligonucleotide
cggcgagatgcggcaccacgttcgagtaaa

SEQ ID NO: 324053 - DNA, 30 bp, Artificial Sequence
  Synthetic oligonucleotide
ggattaccacccgccttggcgaggagtaaa

SEQ ID NO: 324054 - DNA, 30 bp, Artificial Sequence
  Synthetic oligonucleotide
ccggcccccgtttatgtgtacgatagtaaa

SEQ ID NO: 324055 - DNA, 30 bp, Artificial Sequence
  Synthetic oligonucleotide
gcagctctgaagggtaatttgggtagtaaa

SEQ ID NO: 324056 - DNA, 30 bp, Artificial Sequence
  Synthetic oligonucleotide
ctgtggtgatggcgtgcgaagtgacgtaaa

SEQ ID NO: 324057 - DNA, 31 bp, Artificial Sequence
  Synthetic oligonucleotide
gcgaataatatcctatatcataaaccgtaaa

SEQ ID NO: 324058 - DNA, 30 bp, Artificial Sequence
  Synthetic oligonucleotide
agcttgagtgagccatcacgaatccgtaaa

SEQ ID NO: 324059 - DNA, 31 bp, Artificial Sequence
  Synthetic oligonucleotide
tgccgcgctagtgaatgacctcttccgtaaa

SEQ ID NO: 324060 - DNA, 30 bp, Artificial Sequence
  Synthetic oligonucleotide
gtaaaggtagtctcagccttgtaaggtaaa

SEQ ID NO: 324061 - DNA, 30 bp, Artificial Sequence
  Synthetic oligonucleotide
atacagcactgcgggccggattaaggtaaa

SEQ ID NO: 324062 - DNA, 30 bp, Artificial Sequence
  Synthetic oligonucleotide
gattgacttgcgtgacaggtcacaggtaaa

SEQ ID NO: 324063 - DNA, 30 bp, Artificial Sequence
  Synthetic oligonucleotide
gactatgtcatctctttcaaaataggtaaa

SEQ ID NO: 324064 - DNA, 30 bp, Artificial Sequence
  Synthetic oligonucleotide
cactaagtgtcggtcctgccgcacggtaaa

SEQ ID NO: 324065 - DNA, 30 bp, Artificial Sequence
  Synthetic oligonucleotide
actatttaacatcgatgtttcgtcggtaaa

SEQ ID NO: 324066 - DNA, 30 bp, Artificial Sequence
  Synthetic oligonucleotide
tacgttagtctgggctgtaaaacgggtaaa

SEQ ID NO: 324067 - DNA, 30 bp, Artificial Sequence
  Synthetic oligonucleotide
ttccataatcctgaaagtgacccgggtaaa

SEQ ID NO: 324068 - DNA, 30 bp, Artificial Sequence
  Synthetic oligonucleotide
gaaagcctgttacgggggacctcgggtaaa

SEQ ID NO: 324069 - DNA, 30 bp, Artificial Sequence
  Synthetic oligonucleotide
agtgcgtgaaagtcgtctaccctgggtaaa

SEQ ID NO: 324070 - DNA, 31 bp, Artificial Sequence
  Synthetic oligonucleotide
tgtcctagcgacccctcgagtattgggtaaa

SEQ ID NO: 324071 - DNA, 30 bp, Artificial Sequence
  Synthetic oligonucleotide
atatttaaagcaccatagactaatggtaaa

SEQ ID NO: 324072 - DNA, 30 bp, Artificial Sequence
  Synthetic oligonucleotide
gatacaaaattcggtatgtaacctggtaaa

SEQ ID NO: 324073 - DNA, 30 bp, Artificial Sequence
  Synthetic oligonucleotide
caaacgcggctgattgcaaagcctggtaaa

SEQ ID NO: 324074 - DNA, 30 bp, Artificial Sequence
  Synthetic oligonucleotide
tcgtgggctggattctttaaaattggtaaa

SEQ ID NO: 324075 - DNA, 31 bp, Artificial Sequence
  Synthetic oligonucleotide
cggacacaagtaactttctgctacatgtaaa

SEQ ID NO: 324076 - DNA, 29 bp, Artificial Sequence
  Synthetic oligonucleotide
aaatccggtagtaaggtgaaggatgtaaa

SEQ ID NO: 324077 - DNA, 30 bp, Artificial Sequence
  Synthetic oligonucleotide
agtatctaggcccaggactgtttatgtaaa

SEQ ID NO: 324078 - DNA, 30 bp, Artificial Sequence
  Synthetic oligonucleotide
ttcgtgcggagttatttatcgaactgtaaa

SEQ ID NO: 324079 - DNA, 30 bp, Artificial Sequence
  Synthetic oligonucleotide
taggggccctttgtaaaatctgcctgtaaa

SEQ ID NO: 324080 - DNA, 30 bp, Artificial Sequence
  Synthetic oligonucleotide
cctacatggtgttaaccctaaaagtgtaaa

SEQ ID NO: 324081 - DNA, 30 bp, Artificial Sequence
  Synthetic oligonucleotide
tccggtcaaatcactatctcggtgtgtaaa

SEQ ID NO: 324082 - DNA, 30 bp, Artificial Sequence
  Synthetic oligonucleotide
gagctacaacaccagaggtaaagttgtaaa

SEQ ID NO: 324083 - DNA, 30 bp, Artificial Sequence
  Synthetic oligonucleotide
caacatattgctgtcggatcacaaattaaa

SEQ ID NO: 324084 - DNA, 30 bp, Artificial Sequence
  Synthetic oligonucleotide
acgtggacttgaaagagaacaccaattaaa

SEQ ID NO: 324085 - DNA, 30 bp, Artificial Sequence
  Synthetic oligonucleotide
cagccatacggtatgagtaagagaattaaa

SEQ ID NO: 324086 - DNA, 30 bp, Artificial Sequence
  Synthetic oligonucleotide
cagtcaattattaggtgatgatgaattaaa

SEQ ID NO: 324087 - DNA, 30 bp, Artificial Sequence
  Synthetic oligonucleotide
actagaggtcctctgcgacttataattaaa

SEQ ID NO: 324088 - DNA, 30 bp, Artificial Sequence
  Synthetic oligonucleotide
tagatttccataactgctcgactaattaaa

SEQ ID NO: 324089 - DNA, 30 bp, Artificial Sequence
  Synthetic oligonucleotide
catccccgggtatacataaatgtaattaaa

SEQ ID NO: 324090 - DNA, 30 bp, Artificial Sequence
  Synthetic oligonucleotide
gctgtttgcacttagcgaacagacattaaa

SEQ ID NO: 324091 - DNA, 30 bp, Artificial Sequence
  Synthetic oligonucleotide
tatgctaacccggcgagacttggcattaaa

SEQ ID NO: 324092 - DNA, 30 bp, Artificial Sequence
  Synthetic oligonucleotide
aaggaagttgggctggatggatgcattaaa

SEQ ID NO: 324093 - DNA, 30 bp, Artificial Sequence
  Synthetic oligonucleotide
agggctgtcaatgcatgcaaggtcattaaa

SEQ ID NO: 324094 - DNA, 30 bp, Artificial Sequence
  Synthetic oligonucleotide
tttaataaaatgtagtttagcgcacttaaa

SEQ ID NO: 324095 - DNA, 30 bp, Artificial Sequence
  Synthetic oligonucleotide
tgagtatccggccgactaataggacttaaa

SEQ ID NO: 324096 - DNA, 30 bp, Artificial Sequence
  Synthetic oligonucleotide
tagtcgtaaggagggttaaaaacccttaaa

SEQ ID NO: 324097 - DNA, 30 bp, Artificial Sequence
  Synthetic oligonucleotide
aatagaagtagacacagatattgccttaaa

SEQ ID NO: 324098 - DNA, 30 bp, Artificial Sequence
  Synthetic oligonucleotide
acggaaagtggcattgaagacccgcttaaa

SEQ ID NO: 324099 - DNA, 30 bp, Artificial Sequence
  Synthetic oligonucleotide
caagtgatgaattgggatgagctgcttaaa

SEQ ID NO: 324100 - DNA, 30 bp, Artificial Sequence
  Synthetic oligonucleotide
gccggaaattaacttgcacgccatcttaaa

SEQ ID NO: 324101 - DNA, 27 bp, Artificial Sequence
  Synthetic oligonucleotide
atacatctaaaacgtcagtatcttaaa

SEQ ID NO: 324102 - DNA, 30 bp, Artificial Sequence
  Synthetic oligonucleotide
gaagggacgcgtcgcatatttgtcgttaaa

SEQ ID NO: 324103 - DNA, 31 bp, Artificial Sequence
  Synthetic oligonucleotide
gataggttatgatcaccggccaggggttaaa

SEQ ID NO: 324104 - DNA, 30 bp, Artificial Sequence
  Synthetic oligonucleotide
gtgcgaaagattccgcgcctgtgggttaaa

SEQ ID NO: 324105 - DNA, 30 bp, Artificial Sequence
  Synthetic oligonucleotide
gctggcggtggaagcatccgctttgttaaa

SEQ ID NO: 324106 - DNA, 30 bp, Artificial Sequence
  Synthetic oligonucleotide
gcggacccagtacatggtgtaccatttaaa

SEQ ID NO: 324107 - DNA, 30 bp, Artificial Sequence
  Synthetic oligonucleotide
tgcggccctattggttcgggtgactttaaa

SEQ ID NO: 324108 - DNA, 30 bp, Artificial Sequence
  Synthetic oligonucleotide
gcttgatagacacccggtagtcagtttaaa

SEQ ID NO: 324109 - DNA, 30 bp, Artificial Sequence
  Synthetic oligonucleotide
actattgaaagtaaggacgacccgtttaaa

SEQ ID NO: 324110 - DNA, 30 bp, Artificial Sequence
  Synthetic oligonucleotide
aactggtcggtagtagacatggggtttaaa

SEQ ID NO: 324111 - DNA, 30 bp, Artificial Sequence
  Synthetic oligonucleotide
gcgcttaggtacaatttaggttggtttaaa

SEQ ID NO: 324112 - DNA, 30 bp, Artificial Sequence
  Synthetic oligonucleotide
ccaccacaagattctcccttctgttttaaa

SEQ ID NO: 324113 - DNA, 30 bp, Artificial Sequence
  Synthetic oligonucleotide
cggacgtcgggatattaagcgctttttaaa

SEQ ID NO: 324114 - DNA, 30 bp, Artificial Sequence
  Synthetic oligonucleotide
tgtccactccgctgatatatcaaaaaacaa

SEQ ID NO: 324115 - DNA, 30 bp, Artificial Sequence
  Synthetic oligonucleotide
aatatcaagattgacacggctgcaaaacaa

SEQ ID NO: 324116 - DNA, 30 bp, Artificial Sequence
  Synthetic oligonucleotide
gagggaaagctggtcggcggcaccaaacaa

SEQ ID NO: 324117 - DNA, 30 bp, Artificial Sequence
  Synthetic oligonucleotide
ctacgcggctagggtgattgctgcaaacaa

SEQ ID NO: 324118 - DNA, 30 bp, Artificial Sequence
  Synthetic oligonucleotide
ctccacccgacgcggtttgcagagaaacaa

SEQ ID NO: 324119 - DNA, 30 bp, Artificial Sequence
  Synthetic oligonucleotide
cggaatttaatagtcacgtgtcgacaacaa

SEQ ID NO: 324120 - DNA, 30 bp, Artificial Sequence
  Synthetic oligonucleotide
ataaaagaagggcacccggatgggcaacaa

SEQ ID NO: 324121 - DNA, 30 bp, Artificial Sequence
  Synthetic oligonucleotide
ccacgagggaacgtccgccagatgcaacaa

SEQ ID NO: 324122 - DNA, 30 bp, Artificial Sequence
  Synthetic oligonucleotide
ttccttcaggtggttgcgacatttcaacaa

SEQ ID NO: 324123 - DNA, 30 bp, Artificial Sequence
  Synthetic oligonucleotide
tacctgcgaaacgatactgtcgaagaacaa

SEQ ID NO: 324124 - DNA, 30 bp, Artificial Sequence
  Synthetic oligonucleotide
gagagttgactaagatcttctagagaacaa

SEQ ID NO: 324125 - DNA, 30 bp, Artificial Sequence
  Synthetic oligonucleotide
aaaaagtaacaaggacactcctgagaacaa

SEQ ID NO: 324126 - DNA, 30 bp, Artificial Sequence
  Synthetic oligonucleotide
ttataggatttaagcatggggtgagaacaa

SEQ ID NO: 324127 - DNA, 30 bp, Artificial Sequence
  Synthetic oligonucleotide
tattgttgattattgacatgactcgaacaa

SEQ ID NO: 324128 - DNA, 30 bp, Artificial Sequence
  Synthetic oligonucleotide
atggcttatgcgggcataaacgcggaacaa

SEQ ID NO: 324129 - DNA, 30 bp, Artificial Sequence
  Synthetic oligonucleotide
ttcggagagacattgcttttatgggaacaa

SEQ ID NO: 324130 - DNA, 30 bp, Artificial Sequence
  Synthetic oligonucleotide
ttcaagtcaccaagaggtgagcatgaacaa

SEQ ID NO: 324131 - DNA, 30 bp, Artificial Sequence
  Synthetic oligonucleotide
aaatcagaattaaattaaggatctgaacaa

SEQ ID NO: 324132 - DNA, 30 bp, Artificial Sequence
  Synthetic oligonucleotide
atggggacacacggggattaccgtgaacaa

SEQ ID NO: 324133 - DNA, 30 bp, Artificial Sequence
  Synthetic oligonucleotide
aagccccgcaggcttacgtcggaataacaa

SEQ ID NO: 324134 - DNA, 30 bp, Artificial Sequence
  Synthetic oligonucleotide
tttcgtgggaacaacttgcgttcctaacaa

SEQ ID NO: 324135 - DNA, 30 bp, Artificial Sequence
  Synthetic oligonucleotide
agttgtcacggacgtatgaccggctaacaa

SEQ ID NO: 324136 - DNA, 30 bp, Artificial Sequence
  Synthetic oligonucleotide
tctgcaatgtgcagagcacactgctaacaa

SEQ ID NO: 324137 - DNA, 30 bp, Artificial Sequence
  Synthetic oligonucleotide
tggtttgattttggcatttaggtctaacaa

SEQ ID NO: 324138 - DNA, 30 bp, Artificial Sequence
  Synthetic oligonucleotide
ataactcatgacatcagcttaccgtaacaa

SEQ ID NO: 324139 - DNA, 30 bp, Artificial Sequence
  Synthetic oligonucleotide
ggagactagtcctgtgagctaatgtaacaa

SEQ ID NO: 324140 - DNA, 30 bp, Artificial Sequence
  Synthetic oligonucleotide
taatggtaggtacggaactcgcattaacaa

SEQ ID NO: 324141 - DNA, 30 bp, Artificial Sequence
  Synthetic oligonucleotide
accgatacccgcaaagcaggatgttaacaa

SEQ ID NO: 324142 - DNA, 30 bp, Artificial Sequence
  Synthetic oligonucleotide
accggattttgcgtatgctgtatttaacaa

SEQ ID NO: 324143 - DNA, 30 bp, Artificial Sequence
  Synthetic oligonucleotide
cacttgcaatccccaggtcgtgtttaacaa

SEQ ID NO: 324144 - DNA, 30 bp, Artificial Sequence
  Synthetic oligonucleotide
gcgatggaaagttcgagtgcattttaacaa

SEQ ID NO: 324145 - DNA, 30 bp, Artificial Sequence
  Synthetic oligonucleotide
ttgttgatgaaaccaatgcagttaacacaa

SEQ ID NO: 324146 - DNA, 30 bp, Artificial Sequence
  Synthetic oligonucleotide
cctaaccttagtctggaaaatgccacacaa

SEQ ID NO: 324147 - DNA, 30 bp, Artificial Sequence
  Synthetic oligonucleotide
tgcagtacttacgtatgtacttccacacaa

SEQ ID NO: 324148 - DNA, 30 bp, Artificial Sequence
  Synthetic oligonucleotide
atctcgcttttcgccaaggaacgcacacaa

SEQ ID NO: 324149 - DNA, 30 bp, Artificial Sequence
  Synthetic oligonucleotide
gttggaagcttcccgctgaggacgacacaa

SEQ ID NO: 324150 - DNA, 30 bp, Artificial Sequence
  Synthetic oligonucleotide
gtcttaggaactcttgacaaaccgacacaa

SEQ ID NO: 324151 - DNA, 30 bp, Artificial Sequence
  Synthetic oligonucleotide
tcacgaggggcagccattagtcctacacaa

SEQ ID NO: 324152 - DNA, 30 bp, Artificial Sequence
  Synthetic oligonucleotide
atgtaaatcattactgattagagtacacaa

SEQ ID NO: 324153 - DNA, 30 bp, Artificial Sequence
  Synthetic oligonucleotide
cttcgtggtacgaccagcgcggttacacaa

SEQ ID NO: 324154 - DNA, 30 bp, Artificial Sequence
  Synthetic oligonucleotide
gggtagttttcttgagctgtatacccacaa

SEQ ID NO: 324155 - DNA, 30 bp, Artificial Sequence
  Synthetic oligonucleotide
taatagaaatcgttctgaggtacgccacaa

SEQ ID NO: 324156 - DNA, 30 bp, Artificial Sequence
  Synthetic oligonucleotide
tttctcatagtagatccgccgaggccacaa

SEQ ID NO: 324157 - DNA, 30 bp, Artificial Sequence
  Synthetic oligonucleotide
aaccgctagatttggaatagtgggccacaa

SEQ ID NO: 324158 - DNA, 30 bp, Artificial Sequence
  Synthetic oligonucleotide
ttagtgttgtggcgcagaacaggcgcacaa

SEQ ID NO: 324159 - DNA, 30 bp, Artificial Sequence
  Synthetic oligonucleotide
ttacaccccatacggtccgcaccggcacaa

SEQ ID NO: 324160 - DNA, 30 bp, Artificial Sequence
  Synthetic oligonucleotide
ttccactgcccaagagtcattcaatcacaa

SEQ ID NO: 324161 - DNA, 30 bp, Artificial Sequence
  Synthetic oligonucleotide
aaccaaaggctgcatcctgcagcatcacaa

SEQ ID NO: 324162 - DNA, 30 bp, Artificial Sequence
  Synthetic oligonucleotide
gaagtcgtcttagacacggggaagtcacaa

SEQ ID NO: 324163 - DNA, 30 bp, Artificial Sequence
  Synthetic oligonucleotide
gcgataaaattcattgagctcatttcacaa

SEQ ID NO: 324164 - DNA, 30 bp, Artificial Sequence
  Synthetic oligonucleotide
gattcgctttgtgtggatctaaaaagacaa

SEQ ID NO: 324165 - DNA, 30 bp, Artificial Sequence
  Synthetic oligonucleotide
agcattcccctagacaccttagaaagacaa

SEQ ID NO: 324166 - DNA, 30 bp, Artificial Sequence
  Synthetic oligonucleotide
tctcacctttacgttctaactgcaagacaa

SEQ ID NO: 324167 - DNA, 30 bp, Artificial Sequence
  Synthetic oligonucleotide
tagaatcacattatgcaggatggaagacaa

SEQ ID NO: 324168 - DNA, 30 bp, Artificial Sequence
  Synthetic oligonucleotide
tactgttcattagagaatgatataagacaa

SEQ ID NO: 324169 - DNA, 30 bp, Artificial Sequence
  Synthetic oligonucleotide
gacagccgggctgtcgccttactaagacaa

SEQ ID NO: 324170 - DNA, 30 bp, Artificial Sequence
  Synthetic oligonucleotide
aagggggaaaccttgtggaaatacagacaa

SEQ ID NO: 324171 - DNA, 30 bp, Artificial Sequence
  Synthetic oligonucleotide
cgcgtagtggttagccttattcccagacaa

SEQ ID NO: 324172 - DNA, 30 bp, Artificial Sequence
  Synthetic oligonucleotide
catcccggcgaagccatccgccggagacaa

SEQ ID NO: 324173 - DNA, 30 bp, Artificial Sequence
  Synthetic oligonucleotide
cgtgtacaggattaacagtgtagacgacaa

SEQ ID NO: 324174 - DNA, 30 bp, Artificial Sequence
  Synthetic oligonucleotide
gttttctgtggcaacaccgtgctgcgacaa

SEQ ID NO: 324175 - DNA, 30 bp, Artificial Sequence
  Synthetic oligonucleotide
gtgtattgagtacgttcaatcggtcgacaa

SEQ ID NO: 324176 - DNA, 30 bp, Artificial Sequence
  Synthetic oligonucleotide
tgcagtttttattatacagggaaaggacaa

SEQ ID NO: 324177 - DNA, 30 bp, Artificial Sequence
  Synthetic oligonucleotide
aaatacccacgcaactaatactgaggacaa

SEQ ID NO: 324178 - DNA, 30 bp, Artificial Sequence
  Synthetic oligonucleotide
ggatccgtagatatttcatgaagcggacaa

SEQ ID NO: 324179 - DNA, 30 bp, Artificial Sequence
  Synthetic oligonucleotide
gccaaggtatgcaagacgtcctctggacaa

SEQ ID NO: 324180 - DNA, 30 bp, Artificial Sequence
  Synthetic oligonucleotide
aatatccgtctggtatggatcagtggacaa

SEQ ID NO: 324181 - DNA, 30 bp, Artificial Sequence
  Synthetic oligonucleotide
ttttagaggtgattgtattacccatgacaa

SEQ ID NO: 324182 - DNA, 30 bp, Artificial Sequence
  Synthetic oligonucleotide
cgcccaatgacgaggtcccaaccctgacaa

SEQ ID NO: 324183 - DNA, 30 bp, Artificial Sequence
  Synthetic oligonucleotide
tgggatctgtttgtgtattcgccgtgacaa

SEQ ID NO: 324184 - DNA, 30 bp, Artificial Sequence
  Synthetic oligonucleotide
ggattggtctatctggattcgtggtgacaa

SEQ ID NO: 324185 - DNA, 30 bp, Artificial Sequence
  Synthetic oligonucleotide
agctctcgaggcctcgttgtacattgacaa

SEQ ID NO: 324186 - DNA, 30 bp, Artificial Sequence
  Synthetic oligonucleotide
tgcacagcgcagaagatgacaagaatacaa

SEQ ID NO: 324187 - DNA, 30 bp, Artificial Sequence
  Synthetic oligonucleotide
tagagcatagctttaggataccacatacaa

SEQ ID NO: 324188 - DNA, 30 bp, Artificial Sequence
  Synthetic oligonucleotide
aaattttatccttgaaacgtgaccatacaa

SEQ ID NO: 324189 - DNA, 30 bp, Artificial Sequence
  Synthetic oligonucleotide
tgtgggctctcactcaggtctaggatacaa

SEQ ID NO: 324190 - DNA, 30 bp, Artificial Sequence
  Synthetic oligonucleotide
cgcggcacaggagtgacgttagggatacaa

SEQ ID NO: 324191 - DNA, 30 bp, Artificial Sequence
  Synthetic oligonucleotide
gtattaagcccttgcattgcaacactacaa

SEQ ID NO: 324192 - DNA, 30 bp, Artificial Sequence
  Synthetic oligonucleotide
tgtacctatttccggaaggaaccactacaa

SEQ ID NO: 324193 - DNA, 30 bp, Artificial Sequence
  Synthetic oligonucleotide
tgtgtgctctccagtactgatggactacaa

SEQ ID NO: 324194 - DNA, 30 bp, Artificial Sequence
  Synthetic oligonucleotide
ggatcattgaatgccgagaccggcctacaa

SEQ ID NO: 324195 - DNA, 30 bp, Artificial Sequence
  Synthetic oligonucleotide
tagagatcaccgtagaaacggactctacaa

SEQ ID NO: 324196 - DNA, 30 bp, Artificial Sequence
  Synthetic oligonucleotide
tactagccgctttcatgtgtgcgtctacaa

SEQ ID NO: 324197 - DNA, 30 bp, Artificial Sequence
  Synthetic oligonucleotide
agtgggaaacatcactgcctcgttctacaa

SEQ ID NO: 324198 - DNA, 30 bp, Artificial Sequence
  Synthetic oligonucleotide
ttggacatccgacatcatagaaaagtacaa

SEQ ID NO: 324199 - DNA, 30 bp, Artificial Sequence
  Synthetic oligonucleotide
gctcactgtggtagtccattaccagtacaa

SEQ ID NO: 324200 - DNA, 28 bp, Artificial Sequence
  Synthetic oligonucleotide
acagattcgcacgggacgtgcagtacaa

SEQ ID NO: 324201 - DNA, 30 bp, Artificial Sequence
  Synthetic oligonucleotide
gatcgtcacagtttttctattggagtacaa

SEQ ID NO: 324202 - DNA, 30 bp, Artificial Sequence
  Synthetic oligonucleotide
atgacgcaatattagtcgtagagcgtacaa

SEQ ID NO: 324203 - DNA, 30 bp, Artificial Sequence
  Synthetic oligonucleotide
gagacattggtatgaggtggttatgtacaa

SEQ ID NO: 324204 - DNA, 30 bp, Artificial Sequence
  Synthetic oligonucleotide
tcgcagagtggttcaagccgtgctgtacaa

SEQ ID NO: 324205 - DNA, 30 bp, Artificial Sequence
  Synthetic oligonucleotide
gtacgtttttcggggggggattttgtacaa

SEQ ID NO: 324206 - DNA, 30 bp, Artificial Sequence
  Synthetic oligonucleotide
actagcatactgagcttcgtctcattacaa

SEQ ID NO: 324207 - DNA, 30 bp, Artificial Sequence
  Synthetic oligonucleotide
gcattttgcgggatttcataccgattacaa

SEQ ID NO: 324208 - DNA, 30 bp, Artificial Sequence
  Synthetic oligonucleotide
tatgatgatacagaatagctagacttacaa

SEQ ID NO: 324209 - DNA, 30 bp, Artificial Sequence
  Synthetic oligonucleotide
gggggacactaacgtgaacctcagttacaa

SEQ ID NO: 324210 - DNA, 30 bp, Artificial Sequence
  Synthetic oligonucleotide
aagcgggtgttgaagagcccgctgttacaa

SEQ ID NO: 324211 - DNA, 30 bp, Artificial Sequence
  Synthetic oligonucleotide
agccttgcaagggtgaggtgttttttacaa

SEQ ID NO: 324212 - DNA, 30 bp, Artificial Sequence
  Synthetic oligonucleotide
ccaaagtcgcaataagtcccaaaaaaccaa

SEQ ID NO: 324213 - DNA, 30 bp, Artificial Sequence
  Synthetic oligonucleotide
cgcgtttaggctcttagcccttgcaaccaa

SEQ ID NO: 324214 - DNA, 30 bp, Artificial Sequence
  Synthetic oligonucleotide
agtttaagtcccaccgtgtcatgccaccaa

SEQ ID NO: 324215 - DNA, 30 bp, Artificial Sequence
  Synthetic oligonucleotide
caaggtccctgcctgggtatctgtcaccaa

SEQ ID NO: 324216 - DNA, 30 bp, Artificial Sequence
  Synthetic oligonucleotide
tcaactctaaaaaaaaacaagtgagaccaa

SEQ ID NO: 324217 - DNA, 30 bp, Artificial Sequence
  Synthetic oligonucleotide
attgtcaaaggtgcttttactgtagaccaa

SEQ ID NO: 324218 - DNA, 30 bp, Artificial Sequence
  Synthetic oligonucleotide
tgcatgggctgcctactaatggccgaccaa

SEQ ID NO: 324219 - DNA, 30 bp, Artificial Sequence
  Synthetic oligonucleotide
tcaagaaaattcaacgttgcgtatgaccaa

SEQ ID NO: 324220 - DNA, 30 bp, Artificial Sequence
  Synthetic oligonucleotide
tcttcaggggtcatgaaggtattataccaa

SEQ ID NO: 324221 - DNA, 30 bp, Artificial Sequence
  Synthetic oligonucleotide
taaactcggcgtataaagcgcaattaccaa

SEQ ID NO: 324222 - DNA, 30 bp, Artificial Sequence
  Synthetic oligonucleotide
gttgtcaacttcgaacacgagaaaacccaa

SEQ ID NO: 324223 - DNA, 30 bp, Artificial Sequence
  Synthetic oligonucleotide
cccagattctggatgtaccaatgaacccaa

SEQ ID NO: 324224 - DNA, 30 bp, Artificial Sequence
  Synthetic oligonucleotide
aaccattacaagataacattttggacccaa

SEQ ID NO: 324225 - DNA, 30 bp, Artificial Sequence
  Synthetic oligonucleotide
agtactcctggatttactgtgtaaccccaa

SEQ ID NO: 324226 - DNA, 30 bp, Artificial Sequence
  Synthetic oligonucleotide
tggaatttggcgtgttggcgtcacccccaa

SEQ ID NO: 324227 - DNA, 30 bp, Artificial Sequence
  Synthetic oligonucleotide
agcacctcacctggtctcgactagccccaa

SEQ ID NO: 324228 - DNA, 30 bp, Artificial Sequence
  Synthetic oligonucleotide
atatgttacccctacggactaacgccccaa

SEQ ID NO: 324229 - DNA, 30 bp, Artificial Sequence
  Synthetic oligonucleotide
tgctctactccatccagtcagcgtccccaa

SEQ ID NO: 324230 - DNA, 30 bp, Artificial Sequence
  Synthetic oligonucleotide
actactcaggtccacacggggagagcccaa

SEQ ID NO: 324231 - DNA, 30 bp, Artificial Sequence
  Synthetic oligonucleotide
gtggttaggtggattattacccaggcccaa

SEQ ID NO: 324232 - DNA, 30 bp, Artificial Sequence
  Synthetic oligonucleotide
agacggtctcaaaagtgtctttcgtcccaa

SEQ ID NO: 324233 - DNA, 30 bp, Artificial Sequence
  Synthetic oligonucleotide
agtacccggaccctgggtttacaaagccaa

SEQ ID NO: 324234 - DNA, 30 bp, Artificial Sequence
  Synthetic oligonucleotide
caatttaaagtgcattttgcttaaagccaa

SEQ ID NO: 324235 - DNA, 30 bp, Artificial Sequence
  Synthetic oligonucleotide
gcgtgacttagtttaccagaggcaagccaa

SEQ ID NO: 324236 - DNA, 30 bp, Artificial Sequence
  Synthetic oligonucleotide
cggcttggaggaggaactccgcacagccaa

SEQ ID NO: 324237 - DNA, 31 bp, Artificial Sequence
  Synthetic oligonucleotide
ggcctaatgtttttaactccgttccagccaa

SEQ ID NO: 324238 - DNA, 30 bp, Artificial Sequence
  Synthetic oligonucleotide
atttggtaaagtcgcggaatcggcagccaa

SEQ ID NO: 324239 - DNA, 30 bp, Artificial Sequence
  Synthetic oligonucleotide
gcgggtgcatctgcattcgcgatcagccaa

SEQ ID NO: 324240 - DNA, 30 bp, Artificial Sequence
  Synthetic oligonucleotide
atcatcattgtccctataccgttcagccaa

SEQ ID NO: 324241 - DNA, 30 bp, Artificial Sequence
  Synthetic oligonucleotide
ccgatcaaacaacttaacgcttttagccaa

SEQ ID NO: 324242 - DNA, 30 bp, Artificial Sequence
  Synthetic oligonucleotide
aaagcaggtcccaaccccttggcacgccaa

SEQ ID NO: 324243 - DNA, 30 bp, Artificial Sequence
  Synthetic oligonucleotide
tagtgatccgtaaggtcctctagacgccaa

SEQ ID NO: 324244 - DNA, 31 bp, Artificial Sequence
  Synthetic oligonucleotide
tggggcctgtaggatgtatattacccgccaa

SEQ ID NO: 324245 - DNA, 30 bp, Artificial Sequence
  Synthetic oligonucleotide
atgaagttcgccgccatgcgtccccgccaa

SEQ ID NO: 324246 - DNA, 30 bp, Artificial Sequence
  Synthetic oligonucleotide
tggagtacctaatagctagctaatcgccaa

SEQ ID NO: 324247 - DNA, 30 bp, Artificial Sequence
  Synthetic oligonucleotide
agtcgatgctttcaattgaggtatcgccaa

SEQ ID NO: 324248 - DNA, 30 bp, Artificial Sequence
  Synthetic oligonucleotide
tagtcaattcagggggcagaccttcgccaa

SEQ ID NO: 324249 - DNA, 30 bp, Artificial Sequence
  Synthetic oligonucleotide
tttgtcagggagatggtggggcaaggccaa

SEQ ID NO: 324250 - DNA, 30 bp, Artificial Sequence
  Synthetic oligonucleotide
accccttttatgtcagggggacccggccaa

SEQ ID NO: 324251 - DNA, 30 bp, Artificial Sequence
  Synthetic oligonucleotide
aagtcgggtttgtctagtactggcggccaa

SEQ ID NO: 324252 - DNA, 30 bp, Artificial Sequence
  Synthetic oligonucleotide
gtaggcagtggggtgaggtggctgggccaa

SEQ ID NO: 324253 - DNA, 30 bp, Artificial Sequence
  Synthetic oligonucleotide
cctctctgccgttaaggccagactggccaa

SEQ ID NO: 324254 - DNA, 30 bp, Artificial Sequence
  Synthetic oligonucleotide
ccaattgttgagacacagtgcagtggccaa

SEQ ID NO: 324255 - DNA, 30 bp, Artificial Sequence
  Synthetic oligonucleotide
aatccaagccagtatcctcatcttggccaa

SEQ ID NO: 324256 - DNA, 30 bp, Artificial Sequence
  Synthetic oligonucleotide
ccgcgacattaggagacattataatgccaa

SEQ ID NO: 324257 - DNA, 30 bp, Artificial Sequence
  Synthetic oligonucleotide
ttcaacaggaacgctgaaggaagttgccaa

SEQ ID NO: 324258 - DNA, 30 bp, Artificial Sequence
  Synthetic oligonucleotide
gttcacttcaacaagttgtaccgttgccaa

SEQ ID NO: 324259 - DNA, 30 bp, Artificial Sequence
  Synthetic oligonucleotide
atccagtctaagttaagcgtggcaatccaa

SEQ ID NO: 324260 - DNA, 30 bp, Artificial Sequence
  Synthetic oligonucleotide
agatccgggaacggcataggcctcatccaa

SEQ ID NO: 324261 - DNA, 31 bp, Artificial Sequence
  Synthetic oligonucleotide
gggctaaggatgctagtaaagctcgatccaa

SEQ ID NO: 324262 - DNA, 30 bp, Artificial Sequence
  Synthetic oligonucleotide
tgttggcacgtcgaccagcttaggatccaa

SEQ ID NO: 324263 - DNA, 30 bp, Artificial Sequence
  Synthetic oligonucleotide
tcaaatcaaatagcgtgccttagtatccaa

SEQ ID NO: 324264 - DNA, 30 bp, Artificial Sequence
  Synthetic oligonucleotide
ccagcctgggccgttatagtcggtatccaa

SEQ ID NO: 324265 - DNA, 30 bp, Artificial Sequence
  Synthetic oligonucleotide
aatcctgttttcaactattcctaactccaa

SEQ ID NO: 324266 - DNA, 30 bp, Artificial Sequence
  Synthetic oligonucleotide
ggcaaggctttcactgtgcggagcctccaa

SEQ ID NO: 324267 - DNA, 30 bp, Artificial Sequence
  Synthetic oligonucleotide
tatagagtacaaagcgcattgcgcctccaa

SEQ ID NO: 324268 - DNA, 30 bp, Artificial Sequence
  Synthetic oligonucleotide
aagtgtacgaagccctatgggcggctccaa

SEQ ID NO: 324269 - DNA, 30 bp, Artificial Sequence
  Synthetic oligonucleotide
agatgagatcgaaccgaacctcatctccaa

SEQ ID NO: 324270 - DNA, 30 bp, Artificial Sequence
  Synthetic oligonucleotide
tccacctgtgaagaaaacgcaggcgtccaa

SEQ ID NO: 324271 - DNA, 30 bp, Artificial Sequence
  Synthetic oligonucleotide
cgtcggtagaaggttctggtgggcgtccaa

SEQ ID NO: 324272 - DNA, 30 bp, Artificial Sequence
  Synthetic oligonucleotide
acagttcgtaatagaaccagttgcgtccaa

SEQ ID NO: 324273 - DNA, 30 bp, Artificial Sequence
  Synthetic oligonucleotide
ggtgctgtgaattattttggcaaattccaa

SEQ ID NO: 324274 - DNA, 30 bp, Artificial Sequence
  Synthetic oligonucleotide
ccgtgggactggtccctgtttacattccaa

SEQ ID NO: 324275 - DNA, 30 bp, Artificial Sequence
  Synthetic oligonucleotide
ggaagtcttagtttggggggcggcttccaa

SEQ ID NO: 324276 - DNA, 30 bp, Artificial Sequence
  Synthetic oligonucleotide
gttccctatgcattcctgcgcgtcttccaa

SEQ ID NO: 324277 - DNA, 30 bp, Artificial Sequence
  Synthetic oligonucleotide
cgcgcccaaaacgactacgtaacgttccaa

SEQ ID NO: 324278 - DNA, 30 bp, Artificial Sequence
  Synthetic oligonucleotide
ctcaggaactcattgtgcagcgtgttccaa

SEQ ID NO: 324279 - DNA, 30 bp, Artificial Sequence
  Synthetic oligonucleotide
cttggataggtgactgtatactatttccaa

SEQ ID NO: 324280 - DNA, 30 bp, Artificial Sequence
  Synthetic oligonucleotide
gtcgactactttcggcgcgccgctttccaa

SEQ ID NO: 324281 - DNA, 29 bp, Artificial Sequence
  Synthetic oligonucleotide
ctacacacggaaacgggttttgaaagcaa

SEQ ID NO: 324282 - DNA, 30 bp, Artificial Sequence
  Synthetic oligonucleotide
aaataggggcagtcggctgggctaaagcaa

SEQ ID NO: 324283 - DNA, 30 bp, Artificial Sequence
  Synthetic oligonucleotide
ggggacggagcgaatgggcacttaaagcaa

SEQ ID NO: 324284 - DNA, 30 bp, Artificial Sequence
  Synthetic oligonucleotide
ggccttgtagcccgtccgtcgcccaagcaa

SEQ ID NO: 324285 - DNA, 30 bp, Artificial Sequence
  Synthetic oligonucleotide
tttcgtgccccactttcgttctgtaagcaa

SEQ ID NO: 324286 - DNA, 30 bp, Artificial Sequence
  Synthetic oligonucleotide
tagaggtagttacagggagcgctacagcaa

SEQ ID NO: 324287 - DNA, 30 bp, Artificial Sequence
  Synthetic oligonucleotide
agttcatcgatcggtgaccatgtacagcaa

SEQ ID NO: 324288 - DNA, 30 bp, Artificial Sequence
  Synthetic oligonucleotide
agtatttttcacggacgcgagttacagcaa

SEQ ID NO: 324289 - DNA, 30 bp, Artificial Sequence
  Synthetic oligonucleotide
ggtccacaatatggttgtaacggccagcaa

SEQ ID NO: 324290 - DNA, 30 bp, Artificial Sequence
  Synthetic oligonucleotide
taaagggcttgcttctatagggtccagcaa

SEQ ID NO: 324291 - DNA, 30 bp, Artificial Sequence
  Synthetic oligonucleotide
tacgggaatggcttaggctactggcagcaa

SEQ ID NO: 324292 - DNA, 30 bp, Artificial Sequence
  Synthetic oligonucleotide
cggtcaatctccttcgggtcgtggcagcaa

SEQ ID NO: 324293 - DNA, 30 bp, Artificial Sequence
  Synthetic oligonucleotide
tcttttgtggactacgaactgtggcagcaa

SEQ ID NO: 324294 - DNA, 30 bp, Artificial Sequence
  Synthetic oligonucleotide
ctactgcttaatttcgaagattggcagcaa

SEQ ID NO: 324295 - DNA, 30 bp, Artificial Sequence
  Synthetic oligonucleotide
tatattatagctacagttaaaatgcagcaa

SEQ ID NO: 324296 - DNA, 30 bp, Artificial Sequence
  Synthetic oligonucleotide
tctcatagggtaaacttgttatatcagcaa

SEQ ID NO: 324297 - DNA, 30 bp, Artificial Sequence
  Synthetic oligonucleotide
cttaattgccgttgtattcgtattcagcaa

SEQ ID NO: 324298 - DNA, 30 bp, Artificial Sequence
  Synthetic oligonucleotide
tgattaatgggcagttatgttcccgagcaa

SEQ ID NO: 324299 - DNA, 30 bp, Artificial Sequence
  Synthetic oligonucleotide
ctcggtcatgggggctaagcaagcgagcaa

SEQ ID NO: 324300 - DNA, 30 bp, Artificial Sequence
  Synthetic oligonucleotide
tgtcctgacgcggagtaacatcaggagcaa

SEQ ID NO: 324301 - DNA, 30 bp, Artificial Sequence
  Synthetic oligonucleotide
gcttcccggtaaacgatggagccggagcaa

SEQ ID NO: 324302 - DNA, 30 bp, Artificial Sequence
  Synthetic oligonucleotide
ttgggtacattgcgctcacgggcggagcaa

SEQ ID NO: 324303 - DNA, 30 bp, Artificial Sequence
  Synthetic oligonucleotide
gacgccctgattatgtataaaagggagcaa

SEQ ID NO: 324304 - DNA, 30 bp, Artificial Sequence
  Synthetic oligonucleotide
gccctacggaaactgatggcgtatgagcaa

SEQ ID NO: 324305 - DNA, 30 bp, Artificial Sequence
  Synthetic oligonucleotide
ttgtcagcgcctgtcgtccgtgctgagcaa

SEQ ID NO: 324306 - DNA, 30 bp, Artificial Sequence
  Synthetic oligonucleotide
cgtaccgtttcacgactcggtagtgagcaa

SEQ ID NO: 324307 - DNA, 30 bp, Artificial Sequence
  Synthetic oligonucleotide
tagccacatcgtttgcgtttggcctagcaa

SEQ ID NO: 324308 - DNA, 30 bp, Artificial Sequence
  Synthetic oligonucleotide
gaatgtccaaaccgctggattgtgtagcaa

SEQ ID NO: 324309 - DNA, 30 bp, Artificial Sequence
  Synthetic oligonucleotide
ttagagaagtggctttgcacattgtagcaa

SEQ ID NO: 324310 - DNA, 30 bp, Artificial Sequence
  Synthetic oligonucleotide
atagcagaagtttcaaatcatggttagcaa

SEQ ID NO: 324311 - DNA, 30 bp, Artificial Sequence
  Synthetic oligonucleotide
tacccggcctctagtgatgctccaacgcaa

SEQ ID NO: 324312 - DNA, 30 bp, Artificial Sequence
  Synthetic oligonucleotide
aacggttaacaaagccgcccgcgaacgcaa

SEQ ID NO: 324313 - DNA, 30 bp, Artificial Sequence
  Synthetic oligonucleotide
tgaataatcattcactggatcataacgcaa

SEQ ID NO: 324314 - DNA, 30 bp, Artificial Sequence
  Synthetic oligonucleotide
aggtacgcgcttacttcgggtgtaacgcaa

SEQ ID NO: 324315 - DNA, 30 bp, Artificial Sequence
  Synthetic oligonucleotide
gagttttcgaccgggacaggcaacacgcaa

SEQ ID NO: 324316 - DNA, 30 bp, Artificial Sequence
  Synthetic oligonucleotide
gcatggcccttcgacaccgctactacgcaa

SEQ ID NO: 324317 - DNA, 30 bp, Artificial Sequence
  Synthetic oligonucleotide
tttaccgcgaggttttcccagacaccgcaa

SEQ ID NO: 324318 - DNA, 30 bp, Artificial Sequence
  Synthetic oligonucleotide
gctggatcacaacgtgaatgatgaccgcaa

SEQ ID NO: 324319 - DNA, 30 bp, Artificial Sequence
  Synthetic oligonucleotide
catgcgccaggtacgcgagaccatccgcaa

SEQ ID NO: 324320 - DNA, 30 bp, Artificial Sequence
  Synthetic oligonucleotide
acttcggggtgaagctacaggagagcgcaa

SEQ ID NO: 324321 - DNA, 30 bp, Artificial Sequence
  Synthetic oligonucleotide
caattaatatttggcatcagtctagcgcaa

SEQ ID NO: 324322 - DNA, 31 bp, Artificial Sequence
  Synthetic oligonucleotide
tttgccatgagaaggtgggcctcacgcgcaa

SEQ ID NO: 324323 - DNA, 30 bp, Artificial Sequence
  Synthetic oligonucleotide
ggtactagttctcccccgtatagcgcgcaa

SEQ ID NO: 324324 - DNA, 30 bp, Artificial Sequence
  Synthetic oligonucleotide
tatcgtcctcggaccggcaaaccggcgcaa

SEQ ID NO: 324325 - DNA, 30 bp, Artificial Sequence
  Synthetic oligonucleotide
aaagaggacgtcaatatatgaccggcgcaa

SEQ ID NO: 324326 - DNA, 30 bp, Artificial Sequence
  Synthetic oligonucleotide
actggtctcaatcatccactatcggcgcaa

SEQ ID NO: 324327 - DNA, 30 bp, Artificial Sequence
  Synthetic oligonucleotide
aaacgcccaaaattcccgatccaatcgcaa

SEQ ID NO: 324328 - DNA, 30 bp, Artificial Sequence
  Synthetic oligonucleotide
aatgtgttgaaatgctggttgaactcgcaa

SEQ ID NO: 324329 - DNA, 30 bp, Artificial Sequence
  Synthetic oligonucleotide
tatgtatatagcctgagtgctgagtcgcaa

SEQ ID NO: 324330 - DNA, 30 bp, Artificial Sequence
  Synthetic oligonucleotide
gacacgcgcgtccaggtaatcacgtcgcaa

SEQ ID NO: 324331 - DNA, 30 bp, Artificial Sequence
  Synthetic oligonucleotide
gggtgtcagggaaatgtcggagggtcgcaa

SEQ ID NO: 324332 - DNA, 30 bp, Artificial Sequence
  Synthetic oligonucleotide
cagagcggcaggttcgcgggggggtcgcaa

SEQ ID NO: 324333 - DNA, 30 bp, Artificial Sequence
  Synthetic oligonucleotide
ccgtgtctaagttaatgatggaattcgcaa

SEQ ID NO: 324334 - DNA, 30 bp, Artificial Sequence
  Synthetic oligonucleotide
cggaagctaatgtgttaggggacttcgcaa

SEQ ID NO: 324335 - DNA, 35 bp, Artificial Sequence
  Synthetic oligonucleotide
atagtggtaccgcgccatagcaaattggttcgcaa

SEQ ID NO: 324336 - DNA, 30 bp, Artificial Sequence
  Synthetic oligonucleotide
atagtatgcgttatgacaaccgtttcgcaa

SEQ ID NO: 324337 - DNA, 30 bp, Artificial Sequence
  Synthetic oligonucleotide
tattctgcagtgaagggatgcataaggcaa

SEQ ID NO: 324338 - DNA, 30 bp, Artificial Sequence
  Synthetic oligonucleotide
gaagatgtccgcgaatgcagacacaggcaa

SEQ ID NO: 324339 - DNA, 30 bp, Artificial Sequence
  Synthetic oligonucleotide
cctatatcatttccgaagacatgcaggcaa

SEQ ID NO: 324340 - DNA, 30 bp, Artificial Sequence
  Synthetic oligonucleotide
ggtacgtactcgcatacttcgacgaggcaa

SEQ ID NO: 324341 - DNA, 30 bp, Artificial Sequence
  Synthetic oligonucleotide
atagaggctcaactgacggtagtgaggcaa

SEQ ID NO: 324342 - DNA, 30 bp, Artificial Sequence
  Synthetic oligonucleotide
atgcggcagtcgacatatgcttgtaggcaa

SEQ ID NO: 324343 - DNA, 30 bp, Artificial Sequence
  Synthetic oligonucleotide
gatgagttcccgatgcatgaagtacggcaa

SEQ ID NO: 324344 - DNA, 30 bp, Artificial Sequence
  Synthetic oligonucleotide
ttcgcgcgtatgcacatcttctcccggcaa

SEQ ID NO: 324345 - DNA, 30 bp, Artificial Sequence
  Synthetic oligonucleotide
caagagcgccctcagagttctcagcggcaa

SEQ ID NO: 324346 - DNA, 30 bp, Artificial Sequence
  Synthetic oligonucleotide
gtacgcaaggagtgggtacggtggcggcaa

SEQ ID NO: 324347 - DNA, 30 bp, Artificial Sequence
  Synthetic oligonucleotide
gttacggatctggtctgctccctgcggcaa

SEQ ID NO: 324348 - DNA, 30 bp, Artificial Sequence
  Synthetic oligonucleotide
cagtagcaaagatgatgcagttttcggcaa

SEQ ID NO: 324349 - DNA, 30 bp, Artificial Sequence
  Synthetic oligonucleotide
tagcagtaaaaacttgcgataccagggcaa

SEQ ID NO: 324350 - DNA, 30 bp, Artificial Sequence
  Synthetic oligonucleotide
tcttgactttgcaaccatctatcagggcaa

SEQ ID NO: 324351 - DNA, 30 bp, Artificial Sequence
  Synthetic oligonucleotide
gtaccctagcagacatctgggatagggcaa

SEQ ID NO: 324352 - DNA, 30 bp, Artificial Sequence
  Synthetic oligonucleotide
tccttgctgatagatcgcacctacgggcaa

SEQ ID NO: 324353 - DNA, 30 bp, Artificial Sequence
  Synthetic oligonucleotide
cggatgcgggtcaacatggtccaggggcaa

SEQ ID NO: 324354 - DNA, 30 bp, Artificial Sequence
  Synthetic oligonucleotide
tggcatagcctctagcggtaagcggggcaa

SEQ ID NO: 324355 - DNA, 30 bp, Artificial Sequence
  Synthetic oligonucleotide
atcatcggatggttatcgacatcggggcaa

SEQ ID NO: 324356 - DNA, 30 bp, Artificial Sequence
  Synthetic oligonucleotide
tgaggcatttctcccgaagtgtgggggcaa

SEQ ID NO: 324357 - DNA, 30 bp, Artificial Sequence
  Synthetic oligonucleotide
gcgcgtcagcaagatgccccgtatgggcaa

SEQ ID NO: 324358 - DNA, 30 bp, Artificial Sequence
  Synthetic oligonucleotide
gcaaccacttatcgctcacagcttgggcaa

SEQ ID NO: 324359 - DNA, 30 bp, Artificial Sequence
  Synthetic oligonucleotide
ttacgaatgaagcgctggtatcactggcaa

SEQ ID NO: 324360 - DNA, 30 bp, Artificial Sequence
  Synthetic oligonucleotide
actttgtgtgagcggcgttccgactggcaa

SEQ ID NO: 324361 - DNA, 30 bp, Artificial Sequence
  Synthetic oligonucleotide
gaatgtgccaatctaacgaaccggtggcaa

SEQ ID NO: 324362 - DNA, 30 bp, Artificial Sequence
  Synthetic oligonucleotide
aaagtcacagggagacagttaaattggcaa

SEQ ID NO: 324363 - DNA, 30 bp, Artificial Sequence
  Synthetic oligonucleotide
ataggcaggcccacccgcgcgcattggcaa

SEQ ID NO: 324364 - DNA, 30 bp, Artificial Sequence
  Synthetic oligonucleotide
agactcggtattattgggggggtttggcaa

SEQ ID NO: 324365 - DNA, 30 bp, Artificial Sequence
  Synthetic oligonucleotide
agtggaagcattaggtagtggttttggcaa

SEQ ID NO: 324366 - DNA, 30 bp, Artificial Sequence
  Synthetic oligonucleotide
ctgatcgtgcagacctttaatttaatgcaa

SEQ ID NO: 324367 - DNA, 30 bp, Artificial Sequence
  Synthetic oligonucleotide
attcgagtcatggataccctatccatgcaa

SEQ ID NO: 324368 - DNA, 30 bp, Artificial Sequence
  Synthetic oligonucleotide
aatagggggttgcgacgtatgcgcatgcaa

SEQ ID NO: 324369 - DNA, 30 bp, Artificial Sequence
  Synthetic oligonucleotide
ttagcttagataatcaccgggaagatgcaa

SEQ ID NO: 324370 - DNA, 30 bp, Artificial Sequence
  Synthetic oligonucleotide
agacaatgtaacgctaaatgtatgatgcaa

SEQ ID NO: 324371 - DNA, 30 bp, Artificial Sequence
  Synthetic oligonucleotide
attgtccagtcacagctcggatgtatgcaa

SEQ ID NO: 324372 - DNA, 30 bp, Artificial Sequence
  Synthetic oligonucleotide
gtgagaagactgtgtcccaaaattatgcaa

SEQ ID NO: 324373 - DNA, 30 bp, Artificial Sequence
  Synthetic oligonucleotide
tctaggtaaatttccccatggggactgcaa

SEQ ID NO: 324374 - DNA, 30 bp, Artificial Sequence
  Synthetic oligonucleotide
atttcacttagatccggagttctactgcaa

SEQ ID NO: 324375 - DNA, 30 bp, Artificial Sequence
  Synthetic oligonucleotide
ggtcagcgcagcaaattacccttactgcaa

SEQ ID NO: 324376 - DNA, 30 bp, Artificial Sequence
  Synthetic oligonucleotide
ctccggtgacgtgatatacggttactgcaa

SEQ ID NO: 324377 - DNA, 30 bp, Artificial Sequence
  Synthetic oligonucleotide
tcggtcgtggtgttcgctgtactcctgcaa

SEQ ID NO: 324378 - DNA, 30 bp, Artificial Sequence
  Synthetic oligonucleotide
caaagcgatcatattgggatgtgtctgcaa

SEQ ID NO: 324379 - DNA, 30 bp, Artificial Sequence
  Synthetic oligonucleotide
tataaagttcggtgatacctggttctgcaa

SEQ ID NO: 324380 - DNA, 30 bp, Artificial Sequence
  Synthetic oligonucleotide
ttaacccattgctcttccgagaaagtgcaa

SEQ ID NO: 324381 - DNA, 30 bp, Artificial Sequence
  Synthetic oligonucleotide
attctaggtatggaaggggcggcagtgcaa

SEQ ID NO: 324382 - DNA, 30 bp, Artificial Sequence
  Synthetic oligonucleotide
atcttgtctgtccccagactgtgagtgcaa

SEQ ID NO: 324383 - DNA, 30 bp, Artificial Sequence
  Synthetic oligonucleotide
acattatctatttaatgtcagaaggtgcaa

SEQ ID NO: 324384 - DNA, 30 bp, Artificial Sequence
  Synthetic oligonucleotide
cggtcagcaaggggcaggctgtaggtgcaa

SEQ ID NO: 324385 - DNA, 30 bp, Artificial Sequence
  Synthetic oligonucleotide
atggtcggcgggtgcgcaggagcggtgcaa

SEQ ID NO: 324386 - DNA, 30 bp, Artificial Sequence
  Synthetic oligonucleotide
ctgtgagggaaggatgccattggtgtgcaa

SEQ ID NO: 324387 - DNA, 30 bp, Artificial Sequence
  Synthetic oligonucleotide
agagaacgaaagtattaccatccattgcaa

SEQ ID NO: 324388 - DNA, 30 bp, Artificial Sequence
  Synthetic oligonucleotide
gagacgtcacactcaaatgcattattgcaa

SEQ ID NO: 324389 - DNA, 30 bp, Artificial Sequence
  Synthetic oligonucleotide
tggactagtgccttgcgcaacgacttgcaa

SEQ ID NO: 324390 - DNA, 30 bp, Artificial Sequence
  Synthetic oligonucleotide
atgagcccacccaccgcacgattcttgcaa

SEQ ID NO: 324391 - DNA, 30 bp, Artificial Sequence
  Synthetic oligonucleotide
cataaggctggtgcccaataagcgttgcaa

SEQ ID NO: 324392 - DNA, 30 bp, Artificial Sequence
  Synthetic oligonucleotide
tgttcgaaccaggtataatcatcgttgcaa

SEQ ID NO: 324393 - DNA, 31 bp, Artificial Sequence
  Synthetic oligonucleotide
tcttaaatgaaggaccggtcacttgttgcaa

SEQ ID NO: 324394 - DNA, 30 bp, Artificial Sequence
  Synthetic oligonucleotide
aaacacataggagtgtctctggctttgcaa

SEQ ID NO: 324395 - DNA, 30 bp, Artificial Sequence
  Synthetic oligonucleotide
gacttcgtacatgggggcgataaaaatcaa

SEQ ID NO: 324396 - DNA, 30 bp, Artificial Sequence
  Synthetic oligonucleotide
tcacttatgccaaataacagttaaaatcaa

SEQ ID NO: 324397 - DNA, 30 bp, Artificial Sequence
  Synthetic oligonucleotide
gcgtagttgtgtatataccataacaatcaa

SEQ ID NO: 324398 - DNA, 30 bp, Artificial Sequence
  Synthetic oligonucleotide
agcagcctctaggcagtggctgacaatcaa

SEQ ID NO: 324399 - DNA, 30 bp, Artificial Sequence
  Synthetic oligonucleotide
ggtacaacgtgtaaaaatattgccaatcaa

SEQ ID NO: 324400 - DNA, 30 bp, Artificial Sequence
  Synthetic oligonucleotide
ttgacagctgttgtctgatttggcaatcaa

SEQ ID NO: 324401 - DNA, 30 bp, Artificial Sequence
  Synthetic oligonucleotide
gcgggtgttgtttacaggctatagaatcaa

SEQ ID NO: 324402 - DNA, 30 bp, Artificial Sequence
  Synthetic oligonucleotide
ggatcgtgtgggatctgcttgtagaatcaa

SEQ ID NO: 324403 - DNA, 30 bp, Artificial Sequence
  Synthetic oligonucleotide
aatcctattgcatcggggaatacgaatcaa

SEQ ID NO: 324404 - DNA, 30 bp, Artificial Sequence
  Synthetic oligonucleotide
tgtgatacctgactcgtcaaggcgaatcaa

SEQ ID NO: 324405 - DNA, 30 bp, Artificial Sequence
  Synthetic oligonucleotide
gctggtatccccagctaggtattgaatcaa

SEQ ID NO: 324406 - DNA, 30 bp, Artificial Sequence
  Synthetic oligonucleotide
atggaaactaatttagtactgaaccatcaa

SEQ ID NO: 324407 - DNA, 30 bp, Artificial Sequence
  Synthetic oligonucleotide
agtgccgcaaattttagattttaccatcaa

SEQ ID NO: 324408 - DNA, 30 bp, Artificial Sequence
  Synthetic oligonucleotide
cggactcttccgagtaagagaatccatcaa

SEQ ID NO: 324409 - DNA, 30 bp, Artificial Sequence
  Synthetic oligonucleotide
gacagcaggttttgtggacttttccatcaa

SEQ ID NO: 324410 - DNA, 30 bp, Artificial Sequence
  Synthetic oligonucleotide
gaataggtttaaagcgagagggagcatcaa

SEQ ID NO: 324411 - DNA, 30 bp, Artificial Sequence
  Synthetic oligonucleotide
gacacgacagcctcacccgtagggcatcaa

SEQ ID NO: 324412 - DNA, 30 bp, Artificial Sequence
  Synthetic oligonucleotide
ctgtgttaaggattggagggtttgcatcaa

SEQ ID NO: 324413 - DNA, 30 bp, Artificial Sequence
  Synthetic oligonucleotide
attaacggttcgatacagacgtatcatcaa

SEQ ID NO: 324414 - DNA, 30 bp, Artificial Sequence
  Synthetic oligonucleotide
acattgagtgagaacctaaatgctcatcaa

SEQ ID NO: 324415 - DNA, 30 bp, Artificial Sequence
  Synthetic oligonucleotide
ggggggaaggacctgatcgtaattcatcaa

SEQ ID NO: 324416 - DNA, 30 bp, Artificial Sequence
  Synthetic oligonucleotide
aacacgttttggaagtgttcgagagatcaa

SEQ ID NO: 324417 - DNA, 30 bp, Artificial Sequence
  Synthetic oligonucleotide
tgcggaaaacggacttcgtatcgagatcaa

SEQ ID NO: 324418 - DNA, 30 bp, Artificial Sequence
  Synthetic oligonucleotide
ccacccgcaccttctgtgggtcacgatcaa

SEQ ID NO: 324419 - DNA, 30 bp, Artificial Sequence
  Synthetic oligonucleotide
acgtggacatcctgaaattccgacgatcaa

SEQ ID NO: 324420 - DNA, 30 bp, Artificial Sequence
  Synthetic oligonucleotide
tataagggtctaggaatggtttacgatcaa

SEQ ID NO: 324421 - DNA, 30 bp, Artificial Sequence
  Synthetic oligonucleotide
atccatccgttatacttttgcttcgatcaa

SEQ ID NO: 324422 - DNA, 30 bp, Artificial Sequence
  Synthetic oligonucleotide
tgtttggcacacttgcttccctatgatcaa

SEQ ID NO: 324423 - DNA, 30 bp, Artificial Sequence
  Synthetic oligonucleotide
catccgatttcctggaggtcatgtgatcaa

SEQ ID NO: 324424 - DNA, 30 bp, Artificial Sequence
  Synthetic oligonucleotide
catcttgggacgcgcccaacaagatatcaa

SEQ ID NO: 324425 - DNA, 30 bp, Artificial Sequence
  Synthetic oligonucleotide
tacacaaagttttactgaacaatatatcaa

SEQ ID NO: 324426 - DNA, 30 bp, Artificial Sequence
  Synthetic oligonucleotide
tacattacagcaggtgtttgcatatatcaa

SEQ ID NO: 324427 - DNA, 30 bp, Artificial Sequence
  Synthetic oligonucleotide
cgaaatttcctgttgggagacgcgtatcaa

SEQ ID NO: 324428 - DNA, 30 bp, Artificial Sequence
  Synthetic oligonucleotide
atcaaatccgtttcatctccttcttatcaa

SEQ ID NO: 324429 - DNA, 30 bp, Artificial Sequence
  Synthetic oligonucleotide
tggcatgctcaggcctttacctgttatcaa

SEQ ID NO: 324430 - DNA, 30 bp, Artificial Sequence
  Synthetic oligonucleotide
gcaatagcattcagctaattgttttatcaa

SEQ ID NO: 324431 - DNA, 30 bp, Artificial Sequence
  Synthetic oligonucleotide
gccagtggaggcttgtagtcattaactcaa

SEQ ID NO: 324432 - DNA, 30 bp, Artificial Sequence
  Synthetic oligonucleotide
aaataatcgaaggatcgaagacgcactcaa

SEQ ID NO: 324433 - DNA, 30 bp, Artificial Sequence
  Synthetic oligonucleotide
tgctacctgtatgctataacgctcactcaa

SEQ ID NO: 324434 - DNA, 30 bp, Artificial Sequence
  Synthetic oligonucleotide
gccagagggaccttcatacggcagactcaa

SEQ ID NO: 324435 - DNA, 30 bp, Artificial Sequence
  Synthetic oligonucleotide
ataatctttctagctttgagcatgactcaa

SEQ ID NO: 324436 - DNA, 30 bp, Artificial Sequence
  Synthetic oligonucleotide
acctccggacgatgaattgaaattactcaa

SEQ ID NO: 324437 - DNA, 30 bp, Artificial Sequence
  Synthetic oligonucleotide
actctctagtagcatcgataatttactcaa

SEQ ID NO: 324438 - DNA, 30 bp, Artificial Sequence
  Synthetic oligonucleotide
gccattacacgacggcgcgggaaacctcaa

SEQ ID NO: 324439 - DNA, 30 bp, Artificial Sequence
  Synthetic oligonucleotide
ggaacgtttgaggcaacgttaggacctcaa

SEQ ID NO: 324440 - DNA, 30 bp, Artificial Sequence
  Synthetic oligonucleotide
catcgccttacaactctgctctgacctcaa

SEQ ID NO: 324441 - DNA, 30 bp, Artificial Sequence
  Synthetic oligonucleotide
gaagcggtggcgggataactgcgccctcaa

SEQ ID NO: 324442 - DNA, 30 bp, Artificial Sequence
  Synthetic oligonucleotide
ctctcttttcgccgaacaaaggggcctcaa

SEQ ID NO: 324443 - DNA, 30 bp, Artificial Sequence
  Synthetic oligonucleotide
acttttcttgttattcccgaagttcctcaa

SEQ ID NO: 324444 - DNA, 30 bp, Artificial Sequence
  Synthetic oligonucleotide
tggatggcatggtaggcattggaagctcaa

SEQ ID NO: 324445 - DNA, 30 bp, Artificial Sequence
  Synthetic oligonucleotide
cagtaaagggcgattttgggtatagctcaa

SEQ ID NO: 324446 - DNA, 30 bp, Artificial Sequence
  Synthetic oligonucleotide
acccatggaaggtgcgaagccgacgctcaa

SEQ ID NO: 324447 - DNA, 30 bp, Artificial Sequence
  Synthetic oligonucleotide
ctagaggggttagtgttgtaaatggctcaa

SEQ ID NO: 324448 - DNA, 30 bp, Artificial Sequence
  Synthetic oligonucleotide
ttagcccttgtggatccggtacgtgctcaa

SEQ ID NO: 324449 - DNA, 30 bp, Artificial Sequence
  Synthetic oligonucleotide
atttcaagccgccaagggatgccatctcaa

SEQ ID NO: 324450 - DNA, 30 bp, Artificial Sequence
  Synthetic oligonucleotide
tagcaactcccttcccagataaagtctcaa

SEQ ID NO: 324451 - DNA, 30 bp, Artificial Sequence
  Synthetic oligonucleotide
cgtctgtaacccagcacaccacagtctcaa

SEQ ID NO: 324452 - DNA, 30 bp, Artificial Sequence
  Synthetic oligonucleotide
catgcgatcgcaagtatgggcccaagtcaa

SEQ ID NO: 324453 - DNA, 30 bp, Artificial Sequence
  Synthetic oligonucleotide
ggtagaaggccgcctcttcatagaagtcaa

SEQ ID NO: 324454 - DNA, 30 bp, Artificial Sequence
  Synthetic oligonucleotide
catcctacgggtactagtttgcccagtcaa

SEQ ID NO: 324455 - DNA, 30 bp, Artificial Sequence
  Synthetic oligonucleotide
ctcgtaatcctgcatgctcagaagagtcaa

SEQ ID NO: 324456 - DNA, 30 bp, Artificial Sequence
  Synthetic oligonucleotide
aatgcaacttcacgggcttatcagagtcaa

SEQ ID NO: 324457 - DNA, 30 bp, Artificial Sequence
  Synthetic oligonucleotide
taacgttccgacgctaacaaacggagtcaa

SEQ ID NO: 324458 - DNA, 30 bp, Artificial Sequence
  Synthetic oligonucleotide
tttgaagaaggttaaatagaacggagtcaa

SEQ ID NO: 324459 - DNA, 30 bp, Artificial Sequence
  Synthetic oligonucleotide
tcgccctggaggcgccgggcatctagtcaa

SEQ ID NO: 324460 - DNA, 30 bp, Artificial Sequence
  Synthetic oligonucleotide
ccaatctaatatagagtgtggtttagtcaa

SEQ ID NO: 324461 - DNA, 30 bp, Artificial Sequence
  Synthetic oligonucleotide
tggactctgatcacagtccattaaggtcaa

SEQ ID NO: 324462 - DNA, 30 bp, Artificial Sequence
  Synthetic oligonucleotide
accaatgatgcctagacactgggaggtcaa

SEQ ID NO: 324463 - DNA, 30 bp, Artificial Sequence
  Synthetic oligonucleotide
cgcgaaatactgccggggaattgaggtcaa

SEQ ID NO: 324464 - DNA, 30 bp, Artificial Sequence
  Synthetic oligonucleotide
tatgcttggcaatctgggacactaggtcaa

SEQ ID NO: 324465 - DNA, 30 bp, Artificial Sequence
  Synthetic oligonucleotide
ccagccaaccgttaactttaggtaggtcaa

SEQ ID NO: 324466 - DNA, 30 bp, Artificial Sequence
  Synthetic oligonucleotide
aaatacctcaacggattcccgaacggtcaa

SEQ ID NO: 324467 - DNA, 30 bp, Artificial Sequence
  Synthetic oligonucleotide
ctagatcgcctaattttctaaaagggtcaa

SEQ ID NO: 324468 - DNA, 30 bp, Artificial Sequence
  Synthetic oligonucleotide
aggcgtaatagcgcccgtatattgggtcaa

SEQ ID NO: 324469 - DNA, 30 bp, Artificial Sequence
  Synthetic oligonucleotide
tgaacgtatgtatacttccaaagtggtcaa

SEQ ID NO: 324470 - DNA, 30 bp, Artificial Sequence
  Synthetic oligonucleotide
atggctaggtagggagtcgctacatgtcaa

SEQ ID NO: 324471 - DNA, 30 bp, Artificial Sequence
  Synthetic oligonucleotide
cagcctcaataactttagcacatatgtcaa

SEQ ID NO: 324472 - DNA, 30 bp, Artificial Sequence
  Synthetic oligonucleotide
tgatatgtgtcttggaccgagaactgtcaa

SEQ ID NO: 324473 - DNA, 30 bp, Artificial Sequence
  Synthetic oligonucleotide
acccccattcggcgaatttaaccctgtcaa

SEQ ID NO: 324474 - DNA, 30 bp, Artificial Sequence
  Synthetic oligonucleotide
aatcgctacgtcaaacggagaccttgtcaa

SEQ ID NO: 324475 - DNA, 30 bp, Artificial Sequence
  Synthetic oligonucleotide
ggtgtagattgggaggcttcgacaattcaa

SEQ ID NO: 324476 - DNA, 30 bp, Artificial Sequence
  Synthetic oligonucleotide
cttagaaacatagcttttaacccaattcaa

SEQ ID NO: 324477 - DNA, 30 bp, Artificial Sequence
  Synthetic oligonucleotide
tggtactcactaaccatagatgcaattcaa

SEQ ID NO: 324478 - DNA, 30 bp, Artificial Sequence
  Synthetic oligonucleotide
atacgcgctactgtttgggagcagattcaa

SEQ ID NO: 324479 - DNA, 30 bp, Artificial Sequence
  Synthetic oligonucleotide
gggtgggtgggtaaatgactgtagattcaa

SEQ ID NO: 324480 - DNA, 30 bp, Artificial Sequence
  Synthetic oligonucleotide
tgctatagggccgaatgcattaggattcaa

SEQ ID NO: 324481 - DNA, 30 bp, Artificial Sequence
  Synthetic oligonucleotide
ctatgcaggtgccttaggcaagatattcaa

SEQ ID NO: 324482 - DNA, 30 bp, Artificial Sequence
  Synthetic oligonucleotide
cataattggcgcacagccagcgatattcaa

SEQ ID NO: 324483 - DNA, 30 bp, Artificial Sequence
  Synthetic oligonucleotide
tgaagggtttagaccaggggaggtattcaa

SEQ ID NO: 324484 - DNA, 30 bp, Artificial Sequence
  Synthetic oligonucleotide
cggtatggtccggcaaggtgccttattcaa

SEQ ID NO: 324485 - DNA, 30 bp, Artificial Sequence
  Synthetic oligonucleotide
atttaggaagagcgccgcgacagacttcaa

SEQ ID NO: 324486 - DNA, 30 bp, Artificial Sequence
  Synthetic oligonucleotide
tattcataaattattccaggaacccttcaa

SEQ ID NO: 324487 - DNA, 31 bp, Artificial Sequence
  Synthetic oligonucleotide
ctggctggggtaagcaagtataacccttcaa

SEQ ID NO: 324488 - DNA, 30 bp, Artificial Sequence
  Synthetic oligonucleotide
gtctaatagcttcaccatacggtccttcaa

SEQ ID NO: 324489 - DNA, 30 bp, Artificial Sequence
  Synthetic oligonucleotide
cgaccctaaactgggcccaaactgcttcaa

SEQ ID NO: 324490 - DNA, 30 bp, Artificial Sequence
  Synthetic oligonucleotide
ttatgccacttggcaatttactgtcttcaa

SEQ ID NO: 324491 - DNA, 30 bp, Artificial Sequence
  Synthetic oligonucleotide
gagtcgtgcagcgactccttcaaagttcaa

SEQ ID NO: 324492 - DNA, 30 bp, Artificial Sequence
  Synthetic oligonucleotide
cttaagcgttcgtctagtaggccagttcaa

SEQ ID NO: 324493 - DNA, 30 bp, Artificial Sequence
  Synthetic oligonucleotide
taagatattctactccgtacttccgttcaa

SEQ ID NO: 324494 - DNA, 30 bp, Artificial Sequence
  Synthetic oligonucleotide
gatggagacaaataccccacgagcgttcaa

SEQ ID NO: 324495 - DNA, 30 bp, Artificial Sequence
  Synthetic oligonucleotide
ataccaacgcagtcctaacacctggttcaa

SEQ ID NO: 324496 - DNA, 30 bp, Artificial Sequence
  Synthetic oligonucleotide
ggcgagctgtaggatcccgacttggttcaa

SEQ ID NO: 324497 - DNA, 30 bp, Artificial Sequence
  Synthetic oligonucleotide
gcattgttattaacctgaaggttggttcaa

SEQ ID NO: 324498 - DNA, 30 bp, Artificial Sequence
  Synthetic oligonucleotide
gccgggaattcggtttgtagcgaatttcaa

SEQ ID NO: 324499 - DNA, 30 bp, Artificial Sequence
  Synthetic oligonucleotide
agtcatgtgcaatttgcggcgctatttcaa

SEQ ID NO: 324500 - DNA, 30 bp, Artificial Sequence
  Synthetic oligonucleotide
ctactaagcatctagatttagaactttcaa

SEQ ID NO: 324501 - DNA, 30 bp, Artificial Sequence
  Synthetic oligonucleotide
cattgtcttgatcccgatcagccgtttcaa

SEQ ID NO: 324502 - DNA, 30 bp, Artificial Sequence
  Synthetic oligonucleotide
gagtatccgaatacagcatcatcgtttcaa

SEQ ID NO: 324503 - DNA, 30 bp, Artificial Sequence
  Synthetic oligonucleotide
cggtgcgacgttccgggtgcgtcgtttcaa

SEQ ID NO: 324504 - DNA, 30 bp, Artificial Sequence
  Synthetic oligonucleotide
acggcggggggtaggaaagtagcttttcaa

SEQ ID NO: 324505 - DNA, 30 bp, Artificial Sequence
  Synthetic oligonucleotide
ttaccccgggatttccgggcggcttttcaa

SEQ ID NO: 324506 - DNA, 30 bp, Artificial Sequence
  Synthetic oligonucleotide
tgagatgatttgagctcttagcaaaaagaa

SEQ ID NO: 324507 - DNA, 30 bp, Artificial Sequence
  Synthetic oligonucleotide
aagcccgcttcaaaatttggtgaaaaagaa

SEQ ID NO: 324508 - DNA, 30 bp, Artificial Sequence
  Synthetic oligonucleotide
gatacgctgagtatacgttactcaaaagaa

SEQ ID NO: 324509 - DNA, 30 bp, Artificial Sequence
  Synthetic oligonucleotide
gtgcaaaacccttacgttctgctaaaagaa

SEQ ID NO: 324510 - DNA, 30 bp, Artificial Sequence
  Synthetic oligonucleotide
ctatttgtggggcacgaagtgaacaaagaa

SEQ ID NO: 324511 - DNA, 30 bp, Artificial Sequence
  Synthetic oligonucleotide
gtctcgccgttccgttcccttgccaaagaa

SEQ ID NO: 324512 - DNA, 30 bp, Artificial Sequence
  Synthetic oligonucleotide
cgaagggtattcgtgctccgttccaaagaa

SEQ ID NO: 324513 - DNA, 30 bp, Artificial Sequence
  Synthetic oligonucleotide
acctgtatgctatgtagctatagcaaagaa

SEQ ID NO: 324514 - DNA, 30 bp, Artificial Sequence
  Synthetic oligonucleotide
cgtgggcagtgagcccctccacgcaaagaa

SEQ ID NO: 324515 - DNA, 30 bp, Artificial Sequence
  Synthetic oligonucleotide
tagagtatcctgcttggaatttcgaaagaa

SEQ ID NO: 324516 - DNA, 30 bp, Artificial Sequence
  Synthetic oligonucleotide
aaccaggtaggcatgggagttgggaaagaa

SEQ ID NO: 324517 - DNA, 30 bp, Artificial Sequence
  Synthetic oligonucleotide
gtgtatttccgaatggccccgtggaaagaa

SEQ ID NO: 324518 - DNA, 31 bp, Artificial Sequence
  Synthetic oligonucleotide
ttggggcccaaggatccgttttatgaaagaa

SEQ ID NO: 324519 - DNA, 31 bp, Artificial Sequence
  Synthetic oligonucleotide
tgaactgctttccagtcaaacctgtaaagaa

SEQ ID NO: 324520 - DNA, 30 bp, Artificial Sequence
  Synthetic oligonucleotide
ttcaatcacatagtcgaaagtattaaagaa

SEQ ID NO: 324521 - DNA, 30 bp, Artificial Sequence
  Synthetic oligonucleotide
tataagaatcagtatgcgtcgtcacaagaa

SEQ ID NO: 324522 - DNA, 30 bp, Artificial Sequence
  Synthetic oligonucleotide
cacgggcctgtagcctttaagaggcaagaa

SEQ ID NO: 324523 - DNA, 30 bp, Artificial Sequence
  Synthetic oligonucleotide
gcatcatcagcgttagtatgtttgcaagaa

SEQ ID NO: 324524 - DNA, 30 bp, Artificial Sequence
  Synthetic oligonucleotide
gtgtcaatgcacggtttcagtcctcaagaa

SEQ ID NO: 324525 - DNA, 30 bp, Artificial Sequence
  Synthetic oligonucleotide
tacggaaggcgacgaaaccaatctcaagaa

SEQ ID NO: 324526 - DNA, 30 bp, Artificial Sequence
  Synthetic oligonucleotide
ctaaggggcaggcctttcaagtttcaagaa

SEQ ID NO: 324527 - DNA, 30 bp, Artificial Sequence
  Synthetic oligonucleotide
gttcttaaaacttcaggtcccacagaagaa

SEQ ID NO: 324528 - DNA, 31 bp, Artificial Sequence
  Synthetic oligonucleotide
cggtgctccttcccatggtacaccggaagaa

SEQ ID NO: 324529 - DNA, 30 bp, Artificial Sequence
  Synthetic oligonucleotide
gaatgaggcccgtccagaattgcggaagaa

SEQ ID NO: 324530 - DNA, 30 bp, Artificial Sequence
  Synthetic oligonucleotide
aattttatactgccaacatcaggggaagaa

SEQ ID NO: 324531 - DNA, 30 bp, Artificial Sequence
  Synthetic oligonucleotide
ctaccgtgtccccagaaccgttatgaagaa

SEQ ID NO: 324532 - DNA, 30 bp, Artificial Sequence
  Synthetic oligonucleotide
tggcatgaattgcagaggcctcttgaagaa

SEQ ID NO: 324533 - DNA, 30 bp, Artificial Sequence
  Synthetic oligonucleotide
tgtcaaactagccctagcactggctaagaa

SEQ ID NO: 324534 - DNA, 30 bp, Artificial Sequence
  Synthetic oligonucleotide
tacgctgtcagattctctgattcgtaagaa

SEQ ID NO: 324535 - DNA, 30 bp, Artificial Sequence
  Synthetic oligonucleotide
gcggcgccactcctggggcacacttaagaa

SEQ ID NO: 324536 - DNA, 30 bp, Artificial Sequence
  Synthetic oligonucleotide
cgacttatggttctattccaccgttaagaa

SEQ ID NO: 324537 - DNA, 30 bp, Artificial Sequence
  Synthetic oligonucleotide
gcgccaggatcgtgcgccgcattttaagaa

SEQ ID NO: 324538 - DNA, 30 bp, Artificial Sequence
  Synthetic oligonucleotide
gcctaatggactttctaggacgaaacagaa

SEQ ID NO: 324539 - DNA, 30 bp, Artificial Sequence
  Synthetic oligonucleotide
catataaatttccgccctcccggcacagaa

SEQ ID NO: 324540 - DNA, 30 bp, Artificial Sequence
  Synthetic oligonucleotide
ctccatgtatcatcctatgcgttcacagaa

SEQ ID NO: 324541 - DNA, 30 bp, Artificial Sequence
  Synthetic oligonucleotide
ggttgtatgtcccccatttacacgacagaa

SEQ ID NO: 324542 - DNA, 30 bp, Artificial Sequence
  Synthetic oligonucleotide
tgtctgcgcgctccgagatggccgacagaa

SEQ ID NO: 324543 - DNA, 30 bp, Artificial Sequence
  Synthetic oligonucleotide
cccgcacatatgtaaaccatcaggacagaa

SEQ ID NO: 324544 - DNA, 30 bp, Artificial Sequence
  Synthetic oligonucleotide
tattgatagaattcggaactaaatacagaa

SEQ ID NO: 324545 - DNA, 30 bp, Artificial Sequence
  Synthetic oligonucleotide
gacttgagtccgcgactccatagtacagaa

SEQ ID NO: 324546 - DNA, 30 bp, Artificial Sequence
  Synthetic oligonucleotide
ccttttgtcggtctaaatcggtgtacagaa

SEQ ID NO: 324547 - DNA, 30 bp, Artificial Sequence
  Synthetic oligonucleotide
acgcgcggttccgaaacacttgttacagaa

SEQ ID NO: 324548 - DNA, 30 bp, Artificial Sequence
  Synthetic oligonucleotide
aacctattagtggcccgatcgtcaccagaa

SEQ ID NO: 324549 - DNA, 30 bp, Artificial Sequence
  Synthetic oligonucleotide
gccatgtgtccacacgtagccataccagaa

SEQ ID NO: 324550 - DNA, 30 bp, Artificial Sequence
  Synthetic oligonucleotide
ccggattgacacgccgaggtacagccagaa

SEQ ID NO: 324551 - DNA, 30 bp, Artificial Sequence
  Synthetic oligonucleotide
aagaaatactttaaacaattggcgccagaa

SEQ ID NO: 324552 - DNA, 30 bp, Artificial Sequence
  Synthetic oligonucleotide
taaaatgataatgtctatggagctccagaa

SEQ ID NO: 324553 - DNA, 30 bp, Artificial Sequence
  Synthetic oligonucleotide
ctatcggatggcgccctcgctcgagcagaa

SEQ ID NO: 324554 - DNA, 30 bp, Artificial Sequence
  Synthetic oligonucleotide
tttaagccgtaacttgaggtaaccgcagaa

SEQ ID NO: 324555 - DNA, 31 bp, Artificial Sequence
  Synthetic oligonucleotide
acacagttctgtccgacagcattaggcagaa

SEQ ID NO: 324556 - DNA, 30 bp, Artificial Sequence
  Synthetic oligonucleotide
agttctcactattaaatcatcgctgcagaa

SEQ ID NO: 324557 - DNA, 30 bp, Artificial Sequence
  Synthetic oligonucleotide
tatatctagcccgcaacgaaacgtgcagaa

SEQ ID NO: 324558 - DNA, 30 bp, Artificial Sequence
  Synthetic oligonucleotide
taagtcaaccaaatagtacacgttgcagaa

SEQ ID NO: 324559 - DNA, 30 bp, Artificial Sequence
  Synthetic oligonucleotide
cttgataaattcgtattacctatatcagaa

SEQ ID NO: 324560 - DNA, 30 bp, Artificial Sequence
  Synthetic oligonucleotide
cagtgaagaaagatgatgggttcctcagaa

SEQ ID NO: 324561 - DNA, 30 bp, Artificial Sequence
  Synthetic oligonucleotide
ggtagatcagttacagtggcccgctcagaa

SEQ ID NO: 324562 - DNA, 30 bp, Artificial Sequence
  Synthetic oligonucleotide
gataatactaagtcagacgcgacgtcagaa

SEQ ID NO: 324563 - DNA, 30 bp, Artificial Sequence
  Synthetic oligonucleotide
aactgtactaaattgcagcgcctttcagaa

SEQ ID NO: 324564 - DNA, 30 bp, Artificial Sequence
  Synthetic oligonucleotide
gtcggttttcaggggcagcacagaagagaa

SEQ ID NO: 324565 - DNA, 30 bp, Artificial Sequence
  Synthetic oligonucleotide
tgaatgcaggatggaattttgttaagagaa

SEQ ID NO: 324566 - DNA, 30 bp, Artificial Sequence
  Synthetic oligonucleotide
catgtagatagcattaacggtcggagagaa

SEQ ID NO: 324567 - DNA, 30 bp, Artificial Sequence
  Synthetic oligonucleotide
tattgctccttcggatagttcttgagagaa

SEQ ID NO: 324568 - DNA, 30 bp, Artificial Sequence
  Synthetic oligonucleotide
tctccggtgctaaggtcccagacacgagaa

SEQ ID NO: 324569 - DNA, 30 bp, Artificial Sequence
  Synthetic oligonucleotide
tgtgatctttactaatgtgcaatacgagaa

SEQ ID NO: 324570 - DNA, 30 bp, Artificial Sequence
  Synthetic oligonucleotide
aatataatgaacattgattccatacgagaa

SEQ ID NO: 324571 - DNA, 30 bp, Artificial Sequence
  Synthetic oligonucleotide
gctcgcttatttccggagaaaacccgagaa

SEQ ID NO: 324572 - DNA, 30 bp, Artificial Sequence
  Synthetic oligonucleotide
ggacgcggcttggcgcaaaagacgcgagaa

SEQ ID NO: 324573 - DNA, 30 bp, Artificial Sequence
  Synthetic oligonucleotide
ggttcatagctagactggtcacggcgagaa

SEQ ID NO: 324574 - DNA, 30 bp, Artificial Sequence
  Synthetic oligonucleotide
taacctcttaatgaagtactcggtcgagaa

SEQ ID NO: 324575 - DNA, 30 bp, Artificial Sequence
  Synthetic oligonucleotide
gtccatgctgctaagactgcctcaggagaa

SEQ ID NO: 324576 - DNA, 30 bp, Artificial Sequence
  Synthetic oligonucleotide
ggagcggtattccccataactataggagaa

SEQ ID NO: 324577 - DNA, 30 bp, Artificial Sequence
  Synthetic oligonucleotide
gtcgttggaattgttagttgtggcggagaa

SEQ ID NO: 324578 - DNA, 30 bp, Artificial Sequence
  Synthetic oligonucleotide
tgacttaacgaatggtacggaaagggagaa

SEQ ID NO: 324579 - DNA, 30 bp, Artificial Sequence
  Synthetic oligonucleotide
taagagctttctcagatgctatcgggagaa

SEQ ID NO: 324580 - DNA, 30 bp, Artificial Sequence
  Synthetic oligonucleotide
cgggagctcccactacaactgttgggagaa

SEQ ID NO: 324581 - DNA, 30 bp, Artificial Sequence
  Synthetic oligonucleotide
gaacattagcactaccccctatcatgagaa

SEQ ID NO: 324582 - DNA, 30 bp, Artificial Sequence
  Synthetic oligonucleotide
tcgggcatcacaatttttttacgatgagaa

SEQ ID NO: 324583 - DNA, 30 bp, Artificial Sequence
  Synthetic oligonucleotide
actataggaagcggcggtcaaacctgagaa

SEQ ID NO: 324584 - DNA, 30 bp, Artificial Sequence
  Synthetic oligonucleotide
agaatagtcccaataacgccgggctgagaa

SEQ ID NO: 324585 - DNA, 30 bp, Artificial Sequence
  Synthetic oligonucleotide
ttggactgtagagtggagcgacggtgagaa

SEQ ID NO: 324586 - DNA, 30 bp, Artificial Sequence
  Synthetic oligonucleotide
tcaggtcgtgtaaatgcgggtcgaatagaa

SEQ ID NO: 324587 - DNA, 30 bp, Artificial Sequence
  Synthetic oligonucleotide
agcaatactcgtgggataacggacatagaa

SEQ ID NO: 324588 - DNA, 30 bp, Artificial Sequence
  Synthetic oligonucleotide
gatggcaacactgcctgttaaggcatagaa

SEQ ID NO: 324589 - DNA, 30 bp, Artificial Sequence
  Synthetic oligonucleotide
gggcttttgagtgaacgggacgcgatagaa

SEQ ID NO: 324590 - DNA, 30 bp, Artificial Sequence
  Synthetic oligonucleotide
ggtcatgtaaagaggtatacgttgatagaa

SEQ ID NO: 324591 - DNA, 30 bp, Artificial Sequence
  Synthetic oligonucleotide
ataaagcgcagtatgcttccatctatagaa

SEQ ID NO: 324592 - DNA, 30 bp, Artificial Sequence
  Synthetic oligonucleotide
tattggctgccgtgaaacatgcaactagaa

SEQ ID NO: 324593 - DNA, 30 bp, Artificial Sequence
  Synthetic oligonucleotide
tcggtcctcagagtgcgcaaaacactagaa

SEQ ID NO: 324594 - DNA, 30 bp, Artificial Sequence
  Synthetic oligonucleotide
cacggtgcaatgcccggccattgcctagaa

SEQ ID NO: 324595 - DNA, 30 bp, Artificial Sequence
  Synthetic oligonucleotide
gacttagttgcgtatacccttgagctagaa

SEQ ID NO: 324596 - DNA, 30 bp, Artificial Sequence
  Synthetic oligonucleotide
gtttatccctaagtcatacaagtgctagaa

SEQ ID NO: 324597 - DNA, 30 bp, Artificial Sequence
  Synthetic oligonucleotide
cctgtaggttgtgtgcctctccatctagaa

SEQ ID NO: 324598 - DNA, 30 bp, Artificial Sequence
  Synthetic oligonucleotide
ctgcggcagtataatccacatcatctagaa

SEQ ID NO: 324599 - DNA, 30 bp, Artificial Sequence
  Synthetic oligonucleotide
gatacgggcatgaacagcacgggtctagaa

SEQ ID NO: 324600 - DNA, 30 bp, Artificial Sequence
  Synthetic oligonucleotide
attatctcattcgcgggacctggtctagaa

SEQ ID NO: 324601 - DNA, 30 bp, Artificial Sequence
  Synthetic oligonucleotide
tagcccggatggtcggctactctagtagaa

SEQ ID NO: 324602 - DNA, 30 bp, Artificial Sequence
  Synthetic oligonucleotide
caccctgaagctggtcgatttctagtagaa

SEQ ID NO: 324603 - DNA, 30 bp, Artificial Sequence
  Synthetic oligonucleotide
ctctgttagtagcgaatatggaccgtagaa

SEQ ID NO: 324604 - DNA, 30 bp, Artificial Sequence
  Synthetic oligonucleotide
acattctgtactaaacgaccgatcgtagaa

SEQ ID NO: 324605 - DNA, 30 bp, Artificial Sequence
  Synthetic oligonucleotide
gcagacttcgctaacatagctccggtagaa

SEQ ID NO: 324606 - DNA, 30 bp, Artificial Sequence
  Synthetic oligonucleotide
tttgcttctattaatggactctgggtagaa

SEQ ID NO: 324607 - DNA, 30 bp, Artificial Sequence
  Synthetic oligonucleotide
agtttggaccaagagtggtcttgggtagaa

SEQ ID NO: 324608 - DNA, 30 bp, Artificial Sequence
  Synthetic oligonucleotide
aaacaagccttgaaatcgttattggtagaa

SEQ ID NO: 324609 - DNA, 30 bp, Artificial Sequence
  Synthetic oligonucleotide
ttgtgcgcgtcataggtggttactgtagaa

SEQ ID NO: 324610 - DNA, 30 bp, Artificial Sequence
  Synthetic oligonucleotide
tacatttggcttccaaaagaataattagaa

SEQ ID NO: 324611 - DNA, 30 bp, Artificial Sequence
  Synthetic oligonucleotide
gcgcaatgttggtccaaacccatattagaa

SEQ ID NO: 324612 - DNA, 30 bp, Artificial Sequence
  Synthetic oligonucleotide
tggttgattgacattagtaccaacttagaa

SEQ ID NO: 324613 - DNA, 30 bp, Artificial Sequence
  Synthetic oligonucleotide
ataccagggcaagccgcgcaatagttagaa

SEQ ID NO: 324614 - DNA, 30 bp, Artificial Sequence
  Synthetic oligonucleotide
atcacagtaccatcagccccgctgttagaa

SEQ ID NO: 324615 - DNA, 30 bp, Artificial Sequence
  Synthetic oligonucleotide
cgggatacatcacgcatggaaactttagaa

SEQ ID NO: 324616 - DNA, 30 bp, Artificial Sequence
  Synthetic oligonucleotide
ggctcattaatccggcgacgaaaaaacgaa

SEQ ID NO: 324617 - DNA, 30 bp, Artificial Sequence
  Synthetic oligonucleotide
gggatagacagtctcaaggagacaaacgaa

SEQ ID NO: 324618 - DNA, 31 bp, Artificial Sequence
  Synthetic oligonucleotide
gccgccacatcacttgggcttgggaaacgaa

SEQ ID NO: 324619 - DNA, 30 bp, Artificial Sequence
  Synthetic oligonucleotide
tctcaccattgagggtttggtttaaacgaa

SEQ ID NO: 324620 - DNA, 30 bp, Artificial Sequence
  Synthetic oligonucleotide
acagcccgtagcttgtattgggacaacgaa

SEQ ID NO: 324621 - DNA, 30 bp, Artificial Sequence
  Synthetic oligonucleotide
gttgagaacacgcttacttttgtcaacgaa

SEQ ID NO: 324622 - DNA, 30 bp, Artificial Sequence
  Synthetic oligonucleotide
ggtttttaacctatccaccagctgaacgaa

SEQ ID NO: 324623 - DNA, 30 bp, Artificial Sequence
  Synthetic oligonucleotide
tgaaccagacttaatgtctagattaacgaa

SEQ ID NO: 324624 - DNA, 30 bp, Artificial Sequence
  Synthetic oligonucleotide
cgattaaactctcaagttgacgaacacgaa

SEQ ID NO: 324625 - DNA, 30 bp, Artificial Sequence
  Synthetic oligonucleotide
caaaagagacacggcaatggtctacacgaa

SEQ ID NO: 324626 - DNA, 30 bp, Artificial Sequence
  Synthetic oligonucleotide
ccgtcttgatagacaccggttcagcacgaa

SEQ ID NO: 324627 - DNA, 30 bp, Artificial Sequence
  Synthetic oligonucleotide
aaacgtgacactccttgtctccgtcacgaa

SEQ ID NO: 324628 - DNA, 30 bp, Artificial Sequence
  Synthetic oligonucleotide
cccgtttttacaggcttatatcacgacgaa

SEQ ID NO: 324629 - DNA, 30 bp, Artificial Sequence
  Synthetic oligonucleotide
gagaaacctcatcacgcggatactgacgaa

SEQ ID NO: 324630 - DNA, 30 bp, Artificial Sequence
  Synthetic oligonucleotide
accatggctcatcttttgggacctgacgaa

SEQ ID NO: 324631 - DNA, 30 bp, Artificial Sequence
  Synthetic oligonucleotide
caagagtggcagcggcccgaatgtgacgaa

SEQ ID NO: 324632 - DNA, 30 bp, Artificial Sequence
  Synthetic oligonucleotide
tccatctgtcaatcagggacccttgacgaa

SEQ ID NO: 324633 - DNA, 30 bp, Artificial Sequence
  Synthetic oligonucleotide
taacacagtgaatgaccgttgcttgacgaa

SEQ ID NO: 324634 - DNA, 30 bp, Artificial Sequence
  Synthetic oligonucleotide
agaaagtctagatgggtcacgttatacgaa

SEQ ID NO: 324635 - DNA, 30 bp, Artificial Sequence
  Synthetic oligonucleotide
gtttcggtacccatgggcctgttatacgaa

SEQ ID NO: 324636 - DNA, 30 bp, Artificial Sequence
  Synthetic oligonucleotide
tcggtctcacatgtaatgattaactacgaa

SEQ ID NO: 324637 - DNA, 30 bp, Artificial Sequence
  Synthetic oligonucleotide
atccgtcctacaggtgacgttggctacgaa

SEQ ID NO: 324638 - DNA, 30 bp, Artificial Sequence
  Synthetic oligonucleotide
ccgaattggtcataggccatggggtacgaa

SEQ ID NO: 324639 - DNA, 30 bp, Artificial Sequence
  Synthetic oligonucleotide
gctcaataggaagtaactaatatttacgaa

SEQ ID NO: 324640 - DNA, 30 bp, Artificial Sequence
  Synthetic oligonucleotide
attccacccactaattccgcactttacgaa

SEQ ID NO: 324641 - DNA, 30 bp, Artificial Sequence
  Synthetic oligonucleotide
aacgtagaccgtacgagagccctttacgaa

SEQ ID NO: 324642 - DNA, 30 bp, Artificial Sequence
  Synthetic oligonucleotide
tgcattgtgatgagggagtcctaaaccgaa

SEQ ID NO: 324643 - DNA, 30 bp, Artificial Sequence
  Synthetic oligonucleotide
ggcctaatgcaggatttggtgacaaccgaa

SEQ ID NO: 324644 - DNA, 30 bp, Artificial Sequence
  Synthetic oligonucleotide
ctttatgcaatacaccgtaagccaaccgaa

SEQ ID NO: 324645 - DNA, 30 bp, Artificial Sequence
  Synthetic oligonucleotide
ctaggtgagcgctacctcgtacgaaccgaa

SEQ ID NO: 324646 - DNA, 30 bp, Artificial Sequence
  Synthetic oligonucleotide
acttcctatatgggaggtcacagcaccgaa

SEQ ID NO: 324647 - DNA, 30 bp, Artificial Sequence
  Synthetic oligonucleotide
acggccccccaatggtggctatgcaccgaa

SEQ ID NO: 324648 - DNA, 30 bp, Artificial Sequence
  Synthetic oligonucleotide
taataggttgaccgtatggctgcacccgaa

SEQ ID NO: 324649 - DNA, 30 bp, Artificial Sequence
  Synthetic oligonucleotide
gacgatgcaaaaatgcctgctagacccgaa

SEQ ID NO: 324650 - DNA, 30 bp, Artificial Sequence
  Synthetic oligonucleotide
gccagattttggccgtgatgtccccccgaa

SEQ ID NO: 324651 - DNA, 31 bp, Artificial Sequence
  Synthetic oligonucleotide
accacagcgaaattatgtgcgacgccccgaa

SEQ ID NO: 324652 - DNA, 30 bp, Artificial Sequence
  Synthetic oligonucleotide
aaagccctttgtcgtaattaatatcccgaa

SEQ ID NO: 324653 - DNA, 30 bp, Artificial Sequence
  Synthetic oligonucleotide
ggggccgttagggttgcacatcctcccgaa

SEQ ID NO: 324654 - DNA, 30 bp, Artificial Sequence
  Synthetic oligonucleotide
aagtgaacgggtcatgcccaaagtcccgaa

SEQ ID NO: 324655 - DNA, 30 bp, Artificial Sequence
  Synthetic oligonucleotide
tataaacttcacctggggcgcagtcccgaa

SEQ ID NO: 324656 - DNA, 30 bp, Artificial Sequence
  Synthetic oligonucleotide
gccgtactttagcgggacaggtgagccgaa

SEQ ID NO: 324657 - DNA, 30 bp, Artificial Sequence
  Synthetic oligonucleotide
aaggcggatggatggtcaacggtagccgaa

SEQ ID NO: 324658 - DNA, 30 bp, Artificial Sequence
  Synthetic oligonucleotide
ttagatcgtgcctccagcactttagccgaa

SEQ ID NO: 324659 - DNA, 30 bp, Artificial Sequence
  Synthetic oligonucleotide
ttaattattgaccctcagcggccggccgaa

SEQ ID NO: 324660 - DNA, 30 bp, Artificial Sequence
  Synthetic oligonucleotide
gttcacttctgcaacaagaacctggccgaa

SEQ ID NO: 324661 - DNA, 30 bp, Artificial Sequence
  Synthetic oligonucleotide
taggcggaaaacgtctgctgacttgccgaa

SEQ ID NO: 324662 - DNA, 30 bp, Artificial Sequence
  Synthetic oligonucleotide
ctcgagctttcgccgttacgaagctccgaa

SEQ ID NO: 324663 - DNA, 30 bp, Artificial Sequence
  Synthetic oligonucleotide
aaagaccttctcgcagaaacgtgctccgaa

SEQ ID NO: 324664 - DNA, 30 bp, Artificial Sequence
  Synthetic oligonucleotide
ctgactgcattaagaccaggtgagtccgaa

SEQ ID NO: 324665 - DNA, 30 bp, Artificial Sequence
  Synthetic oligonucleotide
tgtctcgctcttgtagcggattggtccgaa

SEQ ID NO: 324666 - DNA, 30 bp, Artificial Sequence
  Synthetic oligonucleotide
aagtgtgaagatgttcttcaagtttccgaa

SEQ ID NO: 324667 - DNA, 30 bp, Artificial Sequence
  Synthetic oligonucleotide
ggtagatcatgtcagaaaatggtttccgaa

SEQ ID NO: 324668 - DNA, 30 bp, Artificial Sequence
  Synthetic oligonucleotide
ggtattcactcaggattggtttccagcgaa

SEQ ID NO: 324669 - DNA, 30 bp, Artificial Sequence
  Synthetic oligonucleotide
gtccgcgcatctttctaaatgagcagcgaa

SEQ ID NO: 324670 - DNA, 30 bp, Artificial Sequence
  Synthetic oligonucleotide
acatatcgcttaaatcttgtcatgagcgaa

SEQ ID NO: 324671 - DNA, 30 bp, Artificial Sequence
  Synthetic oligonucleotide
tttttttgcgtcgggcaatccttgagcgaa

SEQ ID NO: 324672 - DNA, 30 bp, Artificial Sequence
  Synthetic oligonucleotide
atgcaccccaatgattcgaccaatagcgaa

SEQ ID NO: 324673 - DNA, 30 bp, Artificial Sequence
  Synthetic oligonucleotide
ctccgtaagagcaccgcattccatagcgaa

SEQ ID NO: 324674 - DNA, 30 bp, Artificial Sequence
  Synthetic oligonucleotide
aactactaggttagcgattatcctagcgaa

SEQ ID NO: 324675 - DNA, 30 bp, Artificial Sequence
  Synthetic oligonucleotide
ttcacgctgtaacaaataggggaccgcgaa

SEQ ID NO: 324676 - DNA, 30 bp, Artificial Sequence
  Synthetic oligonucleotide
aatccgtctggaggaagtgagaggcgcgaa

SEQ ID NO: 324677 - DNA, 30 bp, Artificial Sequence
  Synthetic oligonucleotide
taatactaagattcaactggtagaggcgaa

SEQ ID NO: 324678 - DNA, 30 bp, Artificial Sequence
  Synthetic oligonucleotide
gtcgaattgtatggtcgtaaacgcggcgaa

SEQ ID NO: 324679 - DNA, 30 bp, Artificial Sequence
  Synthetic oligonucleotide
gaagaggtaccattgttgatgatcggcgaa

SEQ ID NO: 324680 - DNA, 30 bp, Artificial Sequence
  Synthetic oligonucleotide
gtgggactgggaaattattcgccgggcgaa

SEQ ID NO: 324681 - DNA, 30 bp, Artificial Sequence
  Synthetic oligonucleotide
tgccaaataccgcattgcgacaatggcgaa

SEQ ID NO: 324682 - DNA, 30 bp, Artificial Sequence
  Synthetic oligonucleotide
ggtatactgagggtcatcggatctggcgaa

SEQ ID NO: 324683 - DNA, 30 bp, Artificial Sequence
  Synthetic oligonucleotide
gccatgggcagaactgtatagcgtggcgaa

SEQ ID NO: 324684 - DNA, 30 bp, Artificial Sequence
  Synthetic oligonucleotide
agtccagagtgtgtcccactttaatgcgaa

SEQ ID NO: 324685 - DNA, 30 bp, Artificial Sequence
  Synthetic oligonucleotide
gcctgagtagaccgatcatcgccatgcgaa

SEQ ID NO: 324686 - DNA, 30 bp, Artificial Sequence
  Synthetic oligonucleotide
aaagcaggagcagtatactccgcatgcgaa

SEQ ID NO: 324687 - DNA, 30 bp, Artificial Sequence
  Synthetic oligonucleotide
cagctcttgcgtttaggagatgtatgcgaa

SEQ ID NO: 324688 - DNA, 30 bp, Artificial Sequence
  Synthetic oligonucleotide
gtgattataaatcctttaaaggagtgcgaa

SEQ ID NO: 324689 - DNA, 30 bp, Artificial Sequence
  Synthetic oligonucleotide
aatgaatttgcctggacgatagtaatcgaa

SEQ ID NO: 324690 - DNA, 30 bp, Artificial Sequence
  Synthetic oligonucleotide
ccggaacgctgtaaaggcgcacacatcgaa

SEQ ID NO: 324691 - DNA, 30 bp, Artificial Sequence
  Synthetic oligonucleotide
tgtccgtgttaaggttcgacgaccatcgaa

SEQ ID NO: 324692 - DNA, 30 bp, Artificial Sequence
  Synthetic oligonucleotide
tcaaagcactgcagaaattctaatatcgaa

SEQ ID NO: 324693 - DNA, 30 bp, Artificial Sequence
  Synthetic oligonucleotide
gcgaaaatagcttactggacagatatcgaa

SEQ ID NO: 324694 - DNA, 30 bp, Artificial Sequence
  Synthetic oligonucleotide
aaggcctattcataaagcgtaggtatcgaa

SEQ ID NO: 324695 - DNA, 30 bp, Artificial Sequence
  Synthetic oligonucleotide
gcgttcctttcaaattccgccagtctcgaa

SEQ ID NO: 324696 - DNA, 30 bp, Artificial Sequence
  Synthetic oligonucleotide
gtgtactccggacccgggtcttgagtcgaa

SEQ ID NO: 324697 - DNA, 30 bp, Artificial Sequence
  Synthetic oligonucleotide
ctattacaatcggttcgagcatccgtcgaa

SEQ ID NO: 324698 - DNA, 30 bp, Artificial Sequence
  Synthetic oligonucleotide
tatgaatttcgcgatacttgcgtggtcgaa

SEQ ID NO: 324699 - DNA, 30 bp, Artificial Sequence
  Synthetic oligonucleotide
gctggtgcacacccacagttagatgtcgaa

SEQ ID NO: 324700 - DNA, 30 bp, Artificial Sequence
  Synthetic oligonucleotide
tggcctcatggttcactaatcgagttcgaa

SEQ ID NO: 324701 - DNA, 30 bp, Artificial Sequence
  Synthetic oligonucleotide
ctctcgagaatggccgtctttcggttcgaa

SEQ ID NO: 324702 - DNA, 30 bp, Artificial Sequence
  Synthetic oligonucleotide
gagacgcattgcacagatgtaaatttcgaa

SEQ ID NO: 324703 - DNA, 30 bp, Artificial Sequence
  Synthetic oligonucleotide
aggttcattttttgcggtttatctttcgaa

SEQ ID NO: 324704 - DNA, 30 bp, Artificial Sequence
  Synthetic oligonucleotide
aatctggtttgcgccaatatgggtttcgaa

SEQ ID NO: 324705 - DNA, 30 bp, Artificial Sequence
  Synthetic oligonucleotide
tgagactagatgtgtccctcttcaaaggaa

SEQ ID NO: 324706 - DNA, 30 bp, Artificial Sequence
  Synthetic oligonucleotide
acccgttaatggcgttttaaacgaaaggaa

SEQ ID NO: 324707 - DNA, 30 bp, Artificial Sequence
  Synthetic oligonucleotide
ccgacggtataaacttcgcgtataaaggaa

SEQ ID NO: 324708 - DNA, 30 bp, Artificial Sequence
  Synthetic oligonucleotide
ctgaggaccgtggctaatctacataaggaa

SEQ ID NO: 324709 - DNA, 30 bp, Artificial Sequence
  Synthetic oligonucleotide
aatatggagtggtgctaaagggataaggaa

SEQ ID NO: 324710 - DNA, 30 bp, Artificial Sequence
  Synthetic oligonucleotide
gccaatccgcagcatcggagggctaaggaa

SEQ ID NO: 324711 - DNA, 30 bp, Artificial Sequence
  Synthetic oligonucleotide
gacccaacgtgtcgtactaacacacaggaa

SEQ ID NO: 324712 - DNA, 30 bp, Artificial Sequence
  Synthetic oligonucleotide
gcgggaagggaaattgtcgcggcacaggaa

SEQ ID NO: 324713 - DNA, 30 bp, Artificial Sequence
  Synthetic oligonucleotide
tcaaagtagtctactcggatggcacaggaa

SEQ ID NO: 324714 - DNA, 30 bp, Artificial Sequence
  Synthetic oligonucleotide
tggtagataactgggccatgatttcaggaa

SEQ ID NO: 324715 - DNA, 30 bp, Artificial Sequence
  Synthetic oligonucleotide
cgcgttgctcggaagaaaagtgccgaggaa

SEQ ID NO: 324716 - DNA, 30 bp, Artificial Sequence
  Synthetic oligonucleotide
agcattacgagaccgtctgtggttgaggaa

SEQ ID NO: 324717 - DNA, 30 bp, Artificial Sequence
  Synthetic oligonucleotide
cacagcactcgcaattgaccatttgaggaa

SEQ ID NO: 324718 - DNA, 30 bp, Artificial Sequence
  Synthetic oligonucleotide
aagcacggaattaggcagctccgataggaa

SEQ ID NO: 324719 - DNA, 30 bp, Artificial Sequence
  Synthetic oligonucleotide
ggttcgtctaggcctttgcaaccctaggaa

SEQ ID NO: 324720 - DNA, 30 bp, Artificial Sequence
  Synthetic oligonucleotide
attaagagtgggattatcgtattttaggaa

SEQ ID NO: 324721 - DNA, 30 bp, Artificial Sequence
  Synthetic oligonucleotide
ctagcttcgcgggaacttgccttttaggaa

SEQ ID NO: 324722 - DNA, 30 bp, Artificial Sequence
  Synthetic oligonucleotide
ggcccacccccatggtcatctcaaacggaa

SEQ ID NO: 324723 - DNA, 30 bp, Artificial Sequence
  Synthetic oligonucleotide
tcttagccatatctttcaggacgaacggaa

SEQ ID NO: 324724 - DNA, 30 bp, Artificial Sequence
  Synthetic oligonucleotide
gctgactggcgggagtcggatgtaacggaa

SEQ ID NO: 324725 - DNA, 30 bp, Artificial Sequence
  Synthetic oligonucleotide
tcaaacttgtgcgtgccccggaacacggaa

SEQ ID NO: 324726 - DNA, 30 bp, Artificial Sequence
  Synthetic oligonucleotide
ctcgaaggtcatgattttcaagtcacggaa

SEQ ID NO: 324727 - DNA, 30 bp, Artificial Sequence
  Synthetic oligonucleotide
gacttgataccggattgtgcttagacggaa

SEQ ID NO: 324728 - DNA, 30 bp, Artificial Sequence
  Synthetic oligonucleotide
gcacgcggcagttctgcgactaggacggaa

SEQ ID NO: 324729 - DNA, 30 bp, Artificial Sequence
  Synthetic oligonucleotide
gcgttcaaaactagatttgttgggacggaa

SEQ ID NO: 324730 - DNA, 30 bp, Artificial Sequence
  Synthetic oligonucleotide
gccaaatgttcatcccggcagaaaccggaa

SEQ ID NO: 324731 - DNA, 30 bp, Artificial Sequence
  Synthetic oligonucleotide
gagcgtagtgacgttttgaatggaccggaa

SEQ ID NO: 324732 - DNA, 30 bp, Artificial Sequence
  Synthetic oligonucleotide
cttgagattaagggggattaattaccggaa

SEQ ID NO: 324733 - DNA, 30 bp, Artificial Sequence
  Synthetic oligonucleotide
cccatcaggcagtactgggcgcccccggaa

SEQ ID NO: 324734 - DNA, 30 bp, Artificial Sequence
  Synthetic oligonucleotide
caactgatagttcagagactggatccggaa

SEQ ID NO: 324735 - DNA, 30 bp, Artificial Sequence
  Synthetic oligonucleotide
tcagacctcttactgagtcacagtccggaa

SEQ ID NO: 324736 - DNA, 30 bp, Artificial Sequence
  Synthetic oligonucleotide
tgaaactagacgatagccatcacagcggaa

SEQ ID NO: 324737 - DNA, 30 bp, Artificial Sequence
  Synthetic oligonucleotide
ggctgtgttccaattgtagggtcagcggaa

SEQ ID NO: 324738 - DNA, 30 bp, Artificial Sequence
  Synthetic oligonucleotide
atagttgtagccgtatacccgcgagcggaa

SEQ ID NO: 324739 - DNA, 30 bp, Artificial Sequence
  Synthetic oligonucleotide
aaacataagcctaaaagacgtagcgcggaa

SEQ ID NO: 324740 - DNA, 30 bp, Artificial Sequence
  Synthetic oligonucleotide
gtgaggagttctacatataataaggcggaa

SEQ ID NO: 324741 - DNA, 30 bp, Artificial Sequence
  Synthetic oligonucleotide
ggccttgaatactcttgtgagggggcggaa

SEQ ID NO: 324742 - DNA, 30 bp, Artificial Sequence
  Synthetic oligonucleotide
ttcatctggaaagggaggaaggatgcggaa

SEQ ID NO: 324743 - DNA, 30 bp, Artificial Sequence
  Synthetic oligonucleotide
tcaggttggattggttgttaaggtgcggaa

SEQ ID NO: 324744 - DNA, 30 bp, Artificial Sequence
  Synthetic oligonucleotide
aacactcgtacccacgggtatggtgcggaa

SEQ ID NO: 324745 - DNA, 30 bp, Artificial Sequence
  Synthetic oligonucleotide
cgtagggataccgttttatgtgttgcggaa

SEQ ID NO: 324746 - DNA, 30 bp, Artificial Sequence
  Synthetic oligonucleotide
gatgtgtggccatcgtactatagatcggaa

SEQ ID NO: 324747 - DNA, 30 bp, Artificial Sequence
  Synthetic oligonucleotide
cccgaacggagattaacctactagtcggaa

SEQ ID NO: 324748 - DNA, 30 bp, Artificial Sequence
  Synthetic oligonucleotide
gtttcttcagatgggctacttgggtcggaa

SEQ ID NO: 324749 - DNA, 30 bp, Artificial Sequence
  Synthetic oligonucleotide
gctagacccacgcctagatagtggtcggaa

SEQ ID NO: 324750 - DNA, 30 bp, Artificial Sequence
  Synthetic oligonucleotide
tacacacagttggtggatgccctgtcggaa

SEQ ID NO: 324751 - DNA, 30 bp, Artificial Sequence
  Synthetic oligonucleotide
ccgagctgggtacaggttagtcattcggaa

SEQ ID NO: 324752 - DNA, 30 bp, Artificial Sequence
  Synthetic oligonucleotide
gtcacagaccatgcgaccggtgcttcggaa

SEQ ID NO: 324753 - DNA, 30 bp, Artificial Sequence
  Synthetic oligonucleotide
tgaaagtaaaaaagtacacggtcttcggaa

SEQ ID NO: 324754 - DNA, 30 bp, Artificial Sequence
  Synthetic oligonucleotide
acgcgggcctcatttgatgcgggttcggaa

SEQ ID NO: 324755 - DNA, 30 bp, Artificial Sequence
  Synthetic oligonucleotide
tgttcgaaccgattctattcgggttcggaa

SEQ ID NO: 324756 - DNA, 30 bp, Artificial Sequence
  Synthetic oligonucleotide
tatcacattcgtggttcttcgacaagggaa

SEQ ID NO: 324757 - DNA, 30 bp, Artificial Sequence
  Synthetic oligonucleotide
cctcagccctcttaatcaaggttaagggaa

SEQ ID NO: 324758 - DNA, 30 bp, Artificial Sequence
  Synthetic oligonucleotide
cgatgttaagtatccgaggcaaacagggaa

SEQ ID NO: 324759 - DNA, 30 bp, Artificial Sequence
  Synthetic oligonucleotide
tcgtatattactgtgtagaattacagggaa

SEQ ID NO: 324760 - DNA, 30 bp, Artificial Sequence
  Synthetic oligonucleotide
tacgatttcgtgtgtatctccggcagggaa

SEQ ID NO: 324761 - DNA, 30 bp, Artificial Sequence
  Synthetic oligonucleotide
attgcgtttagcgttttggtcgcgagggaa

SEQ ID NO: 324762 - DNA, 30 bp, Artificial Sequence
  Synthetic oligonucleotide
aatactaactcactctctatatatagggaa

SEQ ID NO: 324763 - DNA, 30 bp, Artificial Sequence
  Synthetic oligonucleotide
gaacaagtgtggtattgtatttatagggaa

SEQ ID NO: 324764 - DNA, 30 bp, Artificial Sequence
  Synthetic oligonucleotide
ggccatgattacctgatggagacacgggaa

SEQ ID NO: 324765 - DNA, 30 bp, Artificial Sequence
  Synthetic oligonucleotide
acatatacacatttaactttactacgggaa

SEQ ID NO: 324766 - DNA, 30 bp, Artificial Sequence
  Synthetic oligonucleotide
taagtttactcgttgcaattattacgggaa

SEQ ID NO: 324767 - DNA, 30 bp, Artificial Sequence
  Synthetic oligonucleotide
atggccgccgtagttaggcgtcggcgggaa

SEQ ID NO: 324768 - DNA, 30 bp, Artificial Sequence
  Synthetic oligonucleotide
caagtactatagacgctaaggattcgggaa

SEQ ID NO: 324769 - DNA, 30 bp, Artificial Sequence
  Synthetic oligonucleotide
gatgctcgatcccactggtgcgaaggggaa

SEQ ID NO: 324770 - DNA, 30 bp, Artificial Sequence
  Synthetic oligonucleotide
ccggattgcgtattgtattgcggaggggaa

SEQ ID NO: 324771 - DNA, 30 bp, Artificial Sequence
  Synthetic oligonucleotide
taaatgatgtggcttggtttatgcggggaa

SEQ ID NO: 324772 - DNA, 30 bp, Artificial Sequence
  Synthetic oligonucleotide
attgttgcgcttcatgctgagaggggggaa

SEQ ID NO: 324773 - DNA, 40 bp, Artificial Sequence
  Synthetic oligonucleotide
aagataatacattcatggtatggtcgggaatcggggggaa

SEQ ID NO: 324774 - DNA, 30 bp, Artificial Sequence
  Synthetic oligonucleotide
gacacccgcaacgggtattgggggggggaa

SEQ ID NO: 324775 - DNA, 30 bp, Artificial Sequence
  Synthetic oligonucleotide
tgtacggagcttaaaaaattaactggggaa

SEQ ID NO: 324776 - DNA, 29 bp, Artificial Sequence
  Synthetic oligonucleotide
ccgatcacatagaacccttgattggggaa

SEQ ID NO: 324777 - DNA, 30 bp, Artificial Sequence
  Synthetic oligonucleotide
tccgaacacggagtaacccccgaatgggaa

SEQ ID NO: 324778 - DNA, 30 bp, Artificial Sequence
  Synthetic oligonucleotide
aaactgcacaatagttatacgcgatgggaa

SEQ ID NO: 324779 - DNA, 30 bp, Artificial Sequence
  Synthetic oligonucleotide
atgtagccgcccaccggcttgatatgggaa

SEQ ID NO: 324780 - DNA, 30 bp, Artificial Sequence
  Synthetic oligonucleotide
tagctctgttattaacaatcgccctgggaa

SEQ ID NO: 324781 - DNA, 30 bp, Artificial Sequence
  Synthetic oligonucleotide
gggtctatatattggcttgaaagctgggaa

SEQ ID NO: 324782 - DNA, 30 bp, Artificial Sequence
  Synthetic oligonucleotide
taccaccatacagtacacttcttctgggaa

SEQ ID NO: 324783 - DNA, 30 bp, Artificial Sequence
  Synthetic oligonucleotide
ccgggacttggacgtggagtggtttgggaa

SEQ ID NO: 324784 - DNA, 30 bp, Artificial Sequence
  Synthetic oligonucleotide
ggactacacattacgtagtccgcaatggaa

SEQ ID NO: 324785 - DNA, 30 bp, Artificial Sequence
  Synthetic oligonucleotide
actatagaattaggaatatatataatggaa

SEQ ID NO: 324786 - DNA, 30 bp, Artificial Sequence
  Synthetic oligonucleotide
tggggatacgtcgcccatcgtttaatggaa

SEQ ID NO: 324787 - DNA, 30 bp, Artificial Sequence
  Synthetic oligonucleotide
gtcggcgggttagcgcaggggcacatggaa

SEQ ID NO: 324788 - DNA, 30 bp, Artificial Sequence
  Synthetic oligonucleotide
gatccaaagtcaccgaacgtgtgcatggaa

SEQ ID NO: 324789 - DNA, 30 bp, Artificial Sequence
  Synthetic oligonucleotide
gcattaacaaacccctgtggtatcatggaa

SEQ ID NO: 324790 - DNA, 30 bp, Artificial Sequence
  Synthetic oligonucleotide
ctctaatctgcctgcagcttagtcatggaa

SEQ ID NO: 324791 - DNA, 30 bp, Artificial Sequence
  Synthetic oligonucleotide
ataatcgctagaggtccttactagatggaa

SEQ ID NO: 324792 - DNA, 30 bp, Artificial Sequence
  Synthetic oligonucleotide
cagtcgtatgtgcaaacagtaacgatggaa

SEQ ID NO: 324793 - DNA, 30 bp, Artificial Sequence
  Synthetic oligonucleotide
atgtgtaacgttgggtgtcccaggatggaa

SEQ ID NO: 324794 - DNA, 30 bp, Artificial Sequence
  Synthetic oligonucleotide
ctatgtgatgggtatgctatgtggatggaa

SEQ ID NO: 324795 - DNA, 30 bp, Artificial Sequence
  Synthetic oligonucleotide
taaatgcagctcggtgagaatctgatggaa

SEQ ID NO: 324796 - DNA, 30 bp, Artificial Sequence
  Synthetic oligonucleotide
gcacacgaagtcgcgccgtggtatatggaa

SEQ ID NO: 324797 - DNA, 30 bp, Artificial Sequence
  Synthetic oligonucleotide
cttcatgcacagggacgcctgtgtatggaa

SEQ ID NO: 324798 - DNA, 30 bp, Artificial Sequence
  Synthetic oligonucleotide
ggtaagacaaggtcggcttccggactggaa

SEQ ID NO: 324799 - DNA, 30 bp, Artificial Sequence
  Synthetic oligonucleotide
ttggaggatccagtttttaggggactggaa

SEQ ID NO: 324800 - DNA, 30 bp, Artificial Sequence
  Synthetic oligonucleotide
gtatctccaagttcaacctctgtactggaa

SEQ ID NO: 324801 - DNA, 30 bp, Artificial Sequence
  Synthetic oligonucleotide
taaaagtcctatctttgtggacccctggaa

SEQ ID NO: 324802 - DNA, 30 bp, Artificial Sequence
  Synthetic oligonucleotide
gggtcggaggaacagctggtctgcctggaa

SEQ ID NO: 324803 - DNA, 30 bp, Artificial Sequence
  Synthetic oligonucleotide
aagccaagccaactttggcattaagtggaa

SEQ ID NO: 324804 - DNA, 30 bp, Artificial Sequence
  Synthetic oligonucleotide
tataacagttgcgcggacgaatacgtggaa

SEQ ID NO: 324805 - DNA, 30 bp, Artificial Sequence
  Synthetic oligonucleotide
taatgtcaggaagcggcttgcggcgtggaa

SEQ ID NO: 324806 - DNA, 30 bp, Artificial Sequence
  Synthetic oligonucleotide
atacacaggccacctgacgggggggtggaa

SEQ ID NO: 324807 - DNA, 30 bp, Artificial Sequence
  Synthetic oligonucleotide
gcatacagaccgtccaccctcaatgtggaa

SEQ ID NO: 324808 - DNA, 30 bp, Artificial Sequence
  Synthetic oligonucleotide
gcagtttacccgcttaacgggaatgtggaa

SEQ ID NO: 324809 - DNA, 30 bp, Artificial Sequence
  Synthetic oligonucleotide
ttgcaacaaccaggcaagtatgatgtggaa

SEQ ID NO: 324810 - DNA, 30 bp, Artificial Sequence
  Synthetic oligonucleotide
aaacgtgcctcatagagtgcgtttgtggaa

SEQ ID NO: 324811 - DNA, 30 bp, Artificial Sequence
  Synthetic oligonucleotide
aaaccacgtaccccggttttctaattggaa

SEQ ID NO: 324812 - DNA, 30 bp, Artificial Sequence
  Synthetic oligonucleotide
aatgcatacaccggagaatatacattggaa

SEQ ID NO: 324813 - DNA, 30 bp, Artificial Sequence
  Synthetic oligonucleotide
gagtacggttcagtttatgaatcattggaa

SEQ ID NO: 324814 - DNA, 30 bp, Artificial Sequence
  Synthetic oligonucleotide
agtgcttatgcaaattaaacgatattggaa

SEQ ID NO: 324815 - DNA, 30 bp, Artificial Sequence
  Synthetic oligonucleotide
agtaagattctgcgtgcacaggtattggaa

SEQ ID NO: 324816 - DNA, 30 bp, Artificial Sequence
  Synthetic oligonucleotide
attaagtcttggacagcgtccctcttggaa

SEQ ID NO: 324817 - DNA, 30 bp, Artificial Sequence
  Synthetic oligonucleotide
aattcgctgcgggcctgttatgcgttggaa

SEQ ID NO: 324818 - DNA, 30 bp, Artificial Sequence
  Synthetic oligonucleotide
tcattaccacagactaacctttcgttggaa

SEQ ID NO: 324819 - DNA, 30 bp, Artificial Sequence
  Synthetic oligonucleotide
ggtcggtttgccaaaccaatcctgttggaa

SEQ ID NO: 324820 - DNA, 30 bp, Artificial Sequence
  Synthetic oligonucleotide
taacgcaaattaacagcccggggtttggaa

SEQ ID NO: 324821 - DNA, 30 bp, Artificial Sequence
  Synthetic oligonucleotide
tcgaaattggcctggcaatatgttttggaa

SEQ ID NO: 324822 - DNA, 30 bp, Artificial Sequence
  Synthetic oligonucleotide
ggctctgggttctaggattagtcaaatgaa

SEQ ID NO: 324823 - DNA, 30 bp, Artificial Sequence
  Synthetic oligonucleotide
gccctttataccgctcgcctccacaatgaa

SEQ ID NO: 324824 - DNA, 30 bp, Artificial Sequence
  Synthetic oligonucleotide
tgctgctgtcagttggcaatctacaatgaa

SEQ ID NO: 324825 - DNA, 30 bp, Artificial Sequence
  Synthetic oligonucleotide
tatgtggtggggttcattcaaatcaatgaa

SEQ ID NO: 324826 - DNA, 30 bp, Artificial Sequence
  Synthetic oligonucleotide
ttacataaggaccgtccactcatgaatgaa

SEQ ID NO: 324827 - DNA, 30 bp, Artificial Sequence
  Synthetic oligonucleotide
cactgactcagggatgacccggtgaatgaa

SEQ ID NO: 324828 - DNA, 30 bp, Artificial Sequence
  Synthetic oligonucleotide
gagtttaaggggtcctggaagcctaatgaa

SEQ ID NO: 324829 - DNA, 30 bp, Artificial Sequence
  Synthetic oligonucleotide
atcgattcttagtacgtctgttgtaatgaa

SEQ ID NO: 324830 - DNA, 31 bp, Artificial Sequence
  Synthetic oligonucleotide
atcatgctgagtgctaaagtcccgacatgaa

SEQ ID NO: 324831 - DNA, 30 bp, Artificial Sequence
  Synthetic oligonucleotide
atgcggttccccctttagggtggacatgaa

SEQ ID NO: 324832 - DNA, 30 bp, Artificial Sequence
  Synthetic oligonucleotide
cgtgtaagccattcgagacgggggcatgaa

SEQ ID NO: 324833 - DNA, 30 bp, Artificial Sequence
  Synthetic oligonucleotide
actgaatctgtactcgagcagctgcatgaa

SEQ ID NO: 324834 - DNA, 30 bp, Artificial Sequence
  Synthetic oligonucleotide
ggttggttctcaggtaaagtagatcatgaa

SEQ ID NO: 324835 - DNA, 30 bp, Artificial Sequence
  Synthetic oligonucleotide
cagtgcagactccatagatcacgagatgaa

SEQ ID NO: 324836 - DNA, 30 bp, Artificial Sequence
  Synthetic oligonucleotide
gttcgttgcgcactactacacagggatgaa

SEQ ID NO: 324837 - DNA, 30 bp, Artificial Sequence
  Synthetic oligonucleotide
ccgttggtacaaacggcgttctctgatgaa

SEQ ID NO: 324838 - DNA, 30 bp, Artificial Sequence
  Synthetic oligonucleotide
ccgcgggggccagtttgccactaatatgaa

SEQ ID NO: 324839 - DNA, 30 bp, Artificial Sequence
  Synthetic oligonucleotide
cggtcctcagacctatatgagatctatgaa

SEQ ID NO: 324840 - DNA, 30 bp, Artificial Sequence
  Synthetic oligonucleotide
gcttagtaggcggggttttcgttctatgaa

SEQ ID NO: 324841 - DNA, 30 bp, Artificial Sequence
  Synthetic oligonucleotide
tttagaggctttggacggcgcgagtatgaa

SEQ ID NO: 324842 - DNA, 30 bp, Artificial Sequence
  Synthetic oligonucleotide
tagagccgctatgctccatgtagttatgaa

SEQ ID NO: 324843 - DNA, 30 bp, Artificial Sequence
  Synthetic oligonucleotide
ggctgggtagtactggatatgcgttatgaa

SEQ ID NO: 324844 - DNA, 30 bp, Artificial Sequence
  Synthetic oligonucleotide
aaggaatatatgagtagtcgggtttatgaa

SEQ ID NO: 324845 - DNA, 30 bp, Artificial Sequence
  Synthetic oligonucleotide
aacagcgatttcggaggtcgggtttatgaa

SEQ ID NO: 324846 - DNA, 30 bp, Artificial Sequence
  Synthetic oligonucleotide
taacctaatgcgtaagtttgtcaaactgaa

SEQ ID NO: 324847 - DNA, 30 bp, Artificial Sequence
  Synthetic oligonucleotide
cgttatttgtagagggtcagggacactgaa

SEQ ID NO: 324848 - DNA, 30 bp, Artificial Sequence
  Synthetic oligonucleotide
gacactattatcacgctgtgtatcactgaa

SEQ ID NO: 324849 - DNA, 30 bp, Artificial Sequence
  Synthetic oligonucleotide
gaatgagagactttgaatgcaaagactgaa

SEQ ID NO: 324850 - DNA, 30 bp, Artificial Sequence
  Synthetic oligonucleotide
cacgctgcttatgggcggcaccatactgaa

SEQ ID NO: 324851 - DNA, 30 bp, Artificial Sequence
  Synthetic oligonucleotide
tggttggactggacaagtgggcaccctgaa

SEQ ID NO: 324852 - DNA, 30 bp, Artificial Sequence
  Synthetic oligonucleotide
aaccagagacttgtggacaatgaccctgaa

SEQ ID NO: 324853 - DNA, 30 bp, Artificial Sequence
  Synthetic oligonucleotide
atcaggacgaacgggactcacgtccctgaa

SEQ ID NO: 324854 - DNA, 30 bp, Artificial Sequence
  Synthetic oligonucleotide
gaataaacacgccgtaaccacatgcctgaa

SEQ ID NO: 324855 - DNA, 30 bp, Artificial Sequence
  Synthetic oligonucleotide
tatacaattctctttgccagattgcctgaa

SEQ ID NO: 324856 - DNA, 30 bp, Artificial Sequence
  Synthetic oligonucleotide
acctgatacgttatgaacggtactcctgaa

SEQ ID NO: 324857 - DNA, 30 bp, Artificial Sequence
  Synthetic oligonucleotide
gatcgggagcctaaatctgggtctcctgaa

SEQ ID NO: 324858 - DNA, 30 bp, Artificial Sequence
  Synthetic oligonucleotide
tctaaaagccactgggataatgacgctgaa

SEQ ID NO: 324859 - DNA, 30 bp, Artificial Sequence
  Synthetic oligonucleotide
cggtatacattttgtaatccatacgctgaa

SEQ ID NO: 324860 - DNA, 30 bp, Artificial Sequence
  Synthetic oligonucleotide
ccgtccggtttgcatgaaagcaccgctgaa

SEQ ID NO: 324861 - DNA, 30 bp, Artificial Sequence
  Synthetic oligonucleotide
gtgtctttccagggcaggcgttccgctgaa

SEQ ID NO: 324862 - DNA, 30 bp, Artificial Sequence
  Synthetic oligonucleotide
aactatcttaatggtcgtgcgtgcgctgaa

SEQ ID NO: 324863 - DNA, 31 bp, Artificial Sequence
  Synthetic oligonucleotide
ggagtattacgacattcgcagaaaggctgaa

SEQ ID NO: 324864 - DNA, 30 bp, Artificial Sequence
  Synthetic oligonucleotide
gccttacggttctgcgaattgtgggctgaa

SEQ ID NO: 324865 - DNA, 30 bp, Artificial Sequence
  Synthetic oligonucleotide
tcttagggcttcgtctagtaatatgctgaa

SEQ ID NO: 324866 - DNA, 30 bp, Artificial Sequence
  Synthetic oligonucleotide
gctccaaaagggtgaatatcttttgctgaa

SEQ ID NO: 324867 - DNA, 30 bp, Artificial Sequence
  Synthetic oligonucleotide
tactttgaggtccacttattttttgctgaa

SEQ ID NO: 324868 - DNA, 30 bp, Artificial Sequence
  Synthetic oligonucleotide
cagagttatttgaatattaaaatatctgaa

SEQ ID NO: 324869 - DNA, 30 bp, Artificial Sequence
  Synthetic oligonucleotide
gtaaagatcagtgtgtgtcatcactctgaa

SEQ ID NO: 324870 - DNA, 30 bp, Artificial Sequence
  Synthetic oligonucleotide
taagccttcagactttttgcgttctctgaa

SEQ ID NO: 324871 - DNA, 30 bp, Artificial Sequence
  Synthetic oligonucleotide
tggagggttgtaatatttaatcagtctgaa

SEQ ID NO: 324872 - DNA, 30 bp, Artificial Sequence
  Synthetic oligonucleotide
tgtaacaaacagacgttccaaatgtctgaa

SEQ ID NO: 324873 - DNA, 30 bp, Artificial Sequence
  Synthetic oligonucleotide
cccggttggtccacaaagcatatgtctgaa

SEQ ID NO: 324874 - DNA, 30 bp, Artificial Sequence
  Synthetic oligonucleotide
gtgctgtgtataactaaggatgtgtctgaa

SEQ ID NO: 324875 - DNA, 30 bp, Artificial Sequence
  Synthetic oligonucleotide
cccgtttctccattcggagtgttgtctgaa

SEQ ID NO: 324876 - DNA, 30 bp, Artificial Sequence
  Synthetic oligonucleotide
taactgcatagcgggaaccagtattctgaa

SEQ ID NO: 324877 - DNA, 30 bp, Artificial Sequence
  Synthetic oligonucleotide
ggtggtctttcggacttcaggagttctgaa

SEQ ID NO: 324878 - DNA, 30 bp, Artificial Sequence
  Synthetic oligonucleotide
ttcgccggccttggctaataaccgagtgaa

SEQ ID NO: 324879 - DNA, 30 bp, Artificial Sequence
  Synthetic oligonucleotide
atactcggaaatgctttaagggtgagtgaa

SEQ ID NO: 324880 - DNA, 30 bp, Artificial Sequence
  Synthetic oligonucleotide
agaagtcaattataaatttaaactagtgaa

SEQ ID NO: 324881 - DNA, 30 bp, Artificial Sequence
  Synthetic oligonucleotide
gatggaattttagaaataaattgtagtgaa

SEQ ID NO: 324882 - DNA, 30 bp, Artificial Sequence
  Synthetic oligonucleotide
ggtagtcacaggtacgtcaggaaccgtgaa

SEQ ID NO: 324883 - DNA, 30 bp, Artificial Sequence
  Synthetic oligonucleotide
acctgccggacatacgattatgaccgtgaa

SEQ ID NO: 324884 - DNA, 30 bp, Artificial Sequence
  Synthetic oligonucleotide
aggttccctcggtattcagcatcgcgtgaa

SEQ ID NO: 324885 - DNA, 30 bp, Artificial Sequence
  Synthetic oligonucleotide
aaaggggcgcctatggataacaggcgtgaa

SEQ ID NO: 324886 - DNA, 30 bp, Artificial Sequence
  Synthetic oligonucleotide
acattactgtgctcgcccctcactcgtgaa

SEQ ID NO: 324887 - DNA, 30 bp, Artificial Sequence
  Synthetic oligonucleotide
gtgctagcgggcctccaataagttcgtgaa

SEQ ID NO: 324888 - DNA, 30 bp, Artificial Sequence
  Synthetic oligonucleotide
cactagtaagaatccaaaagagttcgtgaa

SEQ ID NO: 324889 - DNA, 30 bp, Artificial Sequence
  Synthetic oligonucleotide
ccgcgtgctctctgattaggcacaggtgaa

SEQ ID NO: 324890 - DNA, 30 bp, Artificial Sequence
  Synthetic oligonucleotide
gccccttgcaccttgaacatacgaggtgaa

SEQ ID NO: 324891 - DNA, 30 bp, Artificial Sequence
  Synthetic oligonucleotide
cactgttttcctaactcgtcagtaggtgaa

SEQ ID NO: 324892 - DNA, 30 bp, Artificial Sequence
  Synthetic oligonucleotide
gttctgaagagttaatccgtgcacggtgaa

SEQ ID NO: 324893 - DNA, 30 bp, Artificial Sequence
  Synthetic oligonucleotide
gagacggatcgcagtttgactggcggtgaa

SEQ ID NO: 324894 - DNA, 30 bp, Artificial Sequence
  Synthetic oligonucleotide
gtaggatgctcaccacgggggtagggtgaa

SEQ ID NO: 324895 - DNA, 30 bp, Artificial Sequence
  Synthetic oligonucleotide
cgtggtggtattgcgaataaggggggtgaa

SEQ ID NO: 324896 - DNA, 30 bp, Artificial Sequence
  Synthetic oligonucleotide
aggtacgcaattttttgtaggagatgtgaa

SEQ ID NO: 324897 - DNA, 30 bp, Artificial Sequence
  Synthetic oligonucleotide
atctggacctaggcatgaagacgctgtgaa

SEQ ID NO: 324898 - DNA, 30 bp, Artificial Sequence
  Synthetic oligonucleotide
gtgccgaggtctccgaccgctacgtgtgaa

SEQ ID NO: 324899 - DNA, 30 bp, Artificial Sequence
  Synthetic oligonucleotide
ccagttggtatgaaaatgttcaggtgtgaa

SEQ ID NO: 324900 - DNA, 30 bp, Artificial Sequence
  Synthetic oligonucleotide
ggataaaatcggggtacattgcattgtgaa

SEQ ID NO: 324901 - DNA, 30 bp, Artificial Sequence
  Synthetic oligonucleotide
acccctagggcagtcaggcactcttgtgaa

SEQ ID NO: 324902 - DNA, 30 bp, Artificial Sequence
  Synthetic oligonucleotide
tttcgacttaaccagtcggcaataattgaa

SEQ ID NO: 324903 - DNA, 30 bp, Artificial Sequence
  Synthetic oligonucleotide
tggagattcaaagtttagtgactaattgaa

SEQ ID NO: 324904 - DNA, 30 bp, Artificial Sequence
  Synthetic oligonucleotide
gggtcttctaactttcatggccccattgaa

SEQ ID NO: 324905 - DNA, 30 bp, Artificial Sequence
  Synthetic oligonucleotide
atatgccgcgtcccgaaggcgtcgattgaa

SEQ ID NO: 324906 - DNA, 30 bp, Artificial Sequence
  Synthetic oligonucleotide
aaagaactctcttgtcctggatatattgaa

SEQ ID NO: 324907 - DNA, 30 bp, Artificial Sequence
  Synthetic oligonucleotide
ggacttatacgcgcgtgtgaccttattgaa

SEQ ID NO: 324908 - DNA, 30 bp, Artificial Sequence
  Synthetic oligonucleotide
gtgagggccccggttacggacgttattgaa

SEQ ID NO: 324909 - DNA, 30 bp, Artificial Sequence
  Synthetic oligonucleotide
ttctggaagttacgcccggttcaccttgaa

SEQ ID NO: 324910 - DNA, 30 bp, Artificial Sequence
  Synthetic oligonucleotide
cactggtagtggttggacgtggcccttgaa

SEQ ID NO: 324911 - DNA, 30 bp, Artificial Sequence
  Synthetic oligonucleotide
attaactggatagaacctgctatccttgaa

SEQ ID NO: 324912 - DNA, 30 bp, Artificial Sequence
  Synthetic oligonucleotide
cacgagacacggaagcgggtagcgcttgaa

SEQ ID NO: 324913 - DNA, 30 bp, Artificial Sequence
  Synthetic oligonucleotide
aagtttacggtccgcagagaatggcttgaa

SEQ ID NO: 324914 - DNA, 30 bp, Artificial Sequence
  Synthetic oligonucleotide
acagctttgcgaatctatctgcatcttgaa

SEQ ID NO: 324915 - DNA, 30 bp, Artificial Sequence
  Synthetic oligonucleotide
atattctgcgcaacgaggaactgtcttgaa

SEQ ID NO: 324916 - DNA, 30 bp, Artificial Sequence
  Synthetic oligonucleotide
ccacttttatttgatgagataggagttgaa

SEQ ID NO: 324917 - DNA, 30 bp, Artificial Sequence
  Synthetic oligonucleotide
gaaggatttccggcgctggactgagttgaa

SEQ ID NO: 324918 - DNA, 30 bp, Artificial Sequence
  Synthetic oligonucleotide
ctagcgtacgtgggaagtcaattagttgaa

SEQ ID NO: 324919 - DNA, 30 bp, Artificial Sequence
  Synthetic oligonucleotide
ttgaagggccctctgtccccccgggttgaa

SEQ ID NO: 324920 - DNA, 30 bp, Artificial Sequence
  Synthetic oligonucleotide
tcgccgtggcagcgtgcgaatcatgttgaa

SEQ ID NO: 324921 - DNA, 30 bp, Artificial Sequence
  Synthetic oligonucleotide
atctcctgaggtgatccgttacgctttgaa

SEQ ID NO: 324922 - DNA, 30 bp, Artificial Sequence
  Synthetic oligonucleotide
gatgggccatcaatagttcgcgtctttgaa

SEQ ID NO: 324923 - DNA, 30 bp, Artificial Sequence
  Synthetic oligonucleotide
accttgcctggccaggacacgaggtttgaa

SEQ ID NO: 324924 - DNA, 30 bp, Artificial Sequence
  Synthetic oligonucleotide
gtgattcgacgcttaacatgccggtttgaa

SEQ ID NO: 324925 - DNA, 30 bp, Artificial Sequence
  Synthetic oligonucleotide
gattacgagtacattacatgctggtttgaa

SEQ ID NO: 324926 - DNA, 30 bp, Artificial Sequence
  Synthetic oligonucleotide
ttcagggctaatctaaacgtctaaaaataa

SEQ ID NO: 324927 - DNA, 30 bp, Artificial Sequence
  Synthetic oligonucleotide
gggcacttgacgcggcgtctcaacaaataa

SEQ ID NO: 324928 - DNA, 30 bp, Artificial Sequence
  Synthetic oligonucleotide
tttggagacgaagtccatacagtgaaataa

SEQ ID NO: 324929 - DNA, 30 bp, Artificial Sequence
  Synthetic oligonucleotide
gccgatttgatgctaactaacttgaaataa

SEQ ID NO: 324930 - DNA, 30 bp, Artificial Sequence
  Synthetic oligonucleotide
attagtgtcctcgctggtaggtataaataa

SEQ ID NO: 324931 - DNA, 30 bp, Artificial Sequence
  Synthetic oligonucleotide
tccgatactagcgtctaaggcagtaaataa

SEQ ID NO: 324932 - DNA, 30 bp, Artificial Sequence
  Synthetic oligonucleotide
agatgaaagtatgataagtggtttaaataa

SEQ ID NO: 324933 - DNA, 30 bp, Artificial Sequence
  Synthetic oligonucleotide
cccgtcacgggttgtacaatcgcacaataa

SEQ ID NO: 324934 - DNA, 30 bp, Artificial Sequence
  Synthetic oligonucleotide
gggagcaatgtcattgccagagagcaataa

SEQ ID NO: 324935 - DNA, 30 bp, Artificial Sequence
  Synthetic oligonucleotide
gtgctgtctggaccaggatgttggcaataa

SEQ ID NO: 324936 - DNA, 30 bp, Artificial Sequence
  Synthetic oligonucleotide
atctgaagtcaaagtgagttttatcaataa

SEQ ID NO: 324937 - DNA, 30 bp, Artificial Sequence
  Synthetic oligonucleotide
tggtgtcaccacaggtcgtcgactcaataa

SEQ ID NO: 324938 - DNA, 30 bp, Artificial Sequence
  Synthetic oligonucleotide
agtggggtccgggggcggcttctagaataa

SEQ ID NO: 324939 - DNA, 30 bp, Artificial Sequence
  Synthetic oligonucleotide
aatgtttcaagtcattcctcccacgaataa

SEQ ID NO: 324940 - DNA, 30 bp, Artificial Sequence
  Synthetic oligonucleotide
agggggttgccggacatatttgacgaataa

SEQ ID NO: 324941 - DNA, 30 bp, Artificial Sequence
  Synthetic oligonucleotide
agccaggtttcgaacgcgcagtccgaataa

SEQ ID NO: 324942 - DNA, 30 bp, Artificial Sequence
  Synthetic oligonucleotide
agttattctctcgaatagtcgacggaataa

SEQ ID NO: 324943 - DNA, 30 bp, Artificial Sequence
  Synthetic oligonucleotide
atggtcctatggtgtgggaagagggaataa

SEQ ID NO: 324944 - DNA, 30 bp, Artificial Sequence
  Synthetic oligonucleotide
ttccgtgccacccattgcctcggggaataa

SEQ ID NO: 324945 - DNA, 30 bp, Artificial Sequence
  Synthetic oligonucleotide
cgggaatttgccgagctatgctgataataa

SEQ ID NO: 324946 - DNA, 30 bp, Artificial Sequence
  Synthetic oligonucleotide
ggatccactacgtagtatacttactaataa

SEQ ID NO: 324947 - DNA, 30 bp, Artificial Sequence
  Synthetic oligonucleotide
cgagttgcttacaagatgtagagctaataa

SEQ ID NO: 324948 - DNA, 30 bp, Artificial Sequence
  Synthetic oligonucleotide
aatcccttaggaagacagtaggcgtaataa

SEQ ID NO: 324949 - DNA, 30 bp, Artificial Sequence
  Synthetic oligonucleotide
tggcaacgatgtttatgtgaaaggtaataa

SEQ ID NO: 324950 - DNA, 30 bp, Artificial Sequence
  Synthetic oligonucleotide
gagtgtggtccgataggggcaaggtaataa

SEQ ID NO: 324951 - DNA, 30 bp, Artificial Sequence
  Synthetic oligonucleotide
tgggctctcgctggtacccaaatgtaataa

SEQ ID NO: 324952 - DNA, 30 bp, Artificial Sequence
  Synthetic oligonucleotide
acggtgccatccgtaaccgtgggttaataa

SEQ ID NO: 324953 - DNA, 30 bp, Artificial Sequence
  Synthetic oligonucleotide
acctatctttgctatgaatcaatttaataa

SEQ ID NO: 324954 - DNA, 30 bp, Artificial Sequence
  Synthetic oligonucleotide
tgttagatatccagggtgtacatttaataa

SEQ ID NO: 324955 - DNA, 30 bp, Artificial Sequence
  Synthetic oligonucleotide
attacccggttaaaccacgactaaacataa

SEQ ID NO: 324956 - DNA, 30 bp, Artificial Sequence
  Synthetic oligonucleotide
attgctaagttgcgattacaccagacataa

SEQ ID NO: 324957 - DNA, 30 bp, Artificial Sequence
  Synthetic oligonucleotide
ttgtcatcgatttcggtttgaccaccataa

SEQ ID NO: 324958 - DNA, 30 bp, Artificial Sequence
  Synthetic oligonucleotide
tgttagttaaagctttaaagggcaccataa

SEQ ID NO: 324959 - DNA, 30 bp, Artificial Sequence
  Synthetic oligonucleotide
aagaacggccccttggatcatagaccataa

SEQ ID NO: 324960 - DNA, 30 bp, Artificial Sequence
  Synthetic oligonucleotide
agaagacgtcggggttggtcgaacccataa

SEQ ID NO: 324961 - DNA, 30 bp, Artificial Sequence
  Synthetic oligonucleotide
gtgggtcgctcaggaataccgccgccataa

SEQ ID NO: 324962 - DNA, 30 bp, Artificial Sequence
  Synthetic oligonucleotide
taaagtaacctggattacagagcgccataa

SEQ ID NO: 324963 - DNA, 30 bp, Artificial Sequence
  Synthetic oligonucleotide
taagaacaatctggtggcttgtggccataa

SEQ ID NO: 324964 - DNA, 30 bp, Artificial Sequence
  Synthetic oligonucleotide
gattggtcatacggtccgaggaatccataa

SEQ ID NO: 324965 - DNA, 30 bp, Artificial Sequence
  Synthetic oligonucleotide
gttttgaaggccttggtccttgctccataa

SEQ ID NO: 324966 - DNA, 30 bp, Artificial Sequence
  Synthetic oligonucleotide
acagtcaaactcttattcctaagtccataa

SEQ ID NO: 324967 - DNA, 30 bp, Artificial Sequence
  Synthetic oligonucleotide
cctggggagtttgataaattaagtccataa

SEQ ID NO: 324968 - DNA, 30 bp, Artificial Sequence
  Synthetic oligonucleotide
gaatgcgctacaattaacatcagtccataa

SEQ ID NO: 324969 - DNA, 30 bp, Artificial Sequence
  Synthetic oligonucleotide
agcctgcaattgcttggctcgaaagcataa

SEQ ID NO: 324970 - DNA, 30 bp, Artificial Sequence
  Synthetic oligonucleotide
catctaatttccaaggccaatcgagcataa

SEQ ID NO: 324971 - DNA, 30 bp, Artificial Sequence
  Synthetic oligonucleotide
agcttccacgtcccgcccatagcggcataa

SEQ ID NO: 324972 - DNA, 30 bp, Artificial Sequence
  Synthetic oligonucleotide
gaataacggagacatgatggaagggcataa

SEQ ID NO: 324973 - DNA, 30 bp, Artificial Sequence
  Synthetic oligonucleotide
gtcaagattctagcaaccgtaagggcataa

SEQ ID NO: 324974 - DNA, 30 bp, Artificial Sequence
  Synthetic oligonucleotide
caggtgtttggcttttaggttggggcataa

SEQ ID NO: 324975 - DNA, 30 bp, Artificial Sequence
  Synthetic oligonucleotide
agaaaagcgtgttttgtcggcggtgcataa

SEQ ID NO: 324976 - DNA, 30 bp, Artificial Sequence
  Synthetic oligonucleotide
tttctggtcgagggacgcttggttgcataa

SEQ ID NO: 324977 - DNA, 30 bp, Artificial Sequence
  Synthetic oligonucleotide
actgtgcccagccaggtgcttcgatcataa

SEQ ID NO: 324978 - DNA, 30 bp, Artificial Sequence
  Synthetic oligonucleotide
taaaggatccggacgtaagataggtcataa

SEQ ID NO: 324979 - DNA, 30 bp, Artificial Sequence
  Synthetic oligonucleotide
ctcaaaggagttgggaggaacgggtcataa

SEQ ID NO: 324980 - DNA, 30 bp, Artificial Sequence
  Synthetic oligonucleotide
tgattttgccctgtggcgttggtgtcataa

SEQ ID NO: 324981 - DNA, 30 bp, Artificial Sequence
  Synthetic oligonucleotide
ctggcgttgctatcgattaatagttcataa

SEQ ID NO: 324982 - DNA, 30 bp, Artificial Sequence
  Synthetic oligonucleotide
agctctcagatcacccttctccacagataa

SEQ ID NO: 324983 - DNA, 30 bp, Artificial Sequence
  Synthetic oligonucleotide
tcatgcgcccgggcgagatatatcagataa

SEQ ID NO: 324984 - DNA, 30 bp, Artificial Sequence
  Synthetic oligonucleotide
tcacgacgatataggcttatggagagataa

SEQ ID NO: 324985 - DNA, 30 bp, Artificial Sequence
  Synthetic oligonucleotide
ttgcaagtcaatacggttagcgcgagataa

SEQ ID NO: 324986 - DNA, 30 bp, Artificial Sequence
  Synthetic oligonucleotide
tgagcttgcaaacgatatactcatagataa

SEQ ID NO: 324987 - DNA, 30 bp, Artificial Sequence
  Synthetic oligonucleotide
tgcgcatagttaattgagcatcttagataa

SEQ ID NO: 324988 - DNA, 30 bp, Artificial Sequence
  Synthetic oligonucleotide
aagttcaggaagaatagcacatttagataa

SEQ ID NO: 324989 - DNA, 30 bp, Artificial Sequence
  Synthetic oligonucleotide
gattacatagatggtgctaaccaacgataa

SEQ ID NO: 324990 - DNA, 30 bp, Artificial Sequence
  Synthetic oligonucleotide
gttaacggactaacttcggtttaccgataa

SEQ ID NO: 324991 - DNA, 31 bp, Artificial Sequence
  Synthetic oligonucleotide
aacaacctggcccagtgagtgaccccgataa

SEQ ID NO: 324992 - DNA, 30 bp, Artificial Sequence
  Synthetic oligonucleotide
atctcagcgccttagtaagaattccgataa

SEQ ID NO: 324993 - DNA, 30 bp, Artificial Sequence
  Synthetic oligonucleotide
ctgcaatctgtattgagcgggtctcgataa

SEQ ID NO: 324994 - DNA, 30 bp, Artificial Sequence
  Synthetic oligonucleotide
agtctcggaagttcccgcccgataggataa

SEQ ID NO: 324995 - DNA, 30 bp, Artificial Sequence
  Synthetic oligonucleotide
catatatggtgttccctccgggtaggataa

SEQ ID NO: 324996 - DNA, 30 bp, Artificial Sequence
  Synthetic oligonucleotide
gccttctatggcagatcacccatcggataa

SEQ ID NO: 324997 - DNA, 30 bp, Artificial Sequence
  Synthetic oligonucleotide
aaacttgtcatggtgctttcatagggataa

SEQ ID NO: 324998 - DNA, 30 bp, Artificial Sequence
  Synthetic oligonucleotide
tgagagttattgaggtgcgtgacgggataa

SEQ ID NO: 324999 - DNA, 30 bp, Artificial Sequence
  Synthetic oligonucleotide
tttgatggggggctatatactacgggataa

SEQ ID NO: 325000 - DNA, 30 bp, Artificial Sequence
  Synthetic oligonucleotide
ctcgcctgcttattcctgctgcttggataa

SEQ ID NO: 325001 - DNA, 30 bp, Artificial Sequence
  Synthetic oligonucleotide
tgacatgtgtaatgacgacacaactgataa

SEQ ID NO: 325002 - DNA, 30 bp, Artificial Sequence
  Synthetic oligonucleotide
cgtgcagacccaattggcttgtgttgataa

SEQ ID NO: 325003 - DNA, 30 bp, Artificial Sequence
  Synthetic oligonucleotide
tgttcgtgtctagacggtagggcaatataa

SEQ ID NO: 325004 - DNA, 30 bp, Artificial Sequence
  Synthetic oligonucleotide
cttaccggccattgcctacggggaatataa

SEQ ID NO: 325005 - DNA, 30 bp, Artificial Sequence
  Synthetic oligonucleotide
cgaaacctgcccgtagacagccacatataa

SEQ ID NO: 325006 - DNA, 30 bp, Artificial Sequence
  Synthetic oligonucleotide
ggcatagatggagcctacgagcacatataa

SEQ ID NO: 325007 - DNA, 30 bp, Artificial Sequence
  Synthetic oligonucleotide
ttccgattaacccattcctacgacatataa

SEQ ID NO: 325008 - DNA, 30 bp, Artificial Sequence
  Synthetic oligonucleotide
gcccgggtcctaatgggaacgagcatataa

SEQ ID NO: 325009 - DNA, 30 bp, Artificial Sequence
  Synthetic oligonucleotide
agccaacgggccgcgtatattaagatataa

SEQ ID NO: 325010 - DNA, 30 bp, Artificial Sequence
  Synthetic oligonucleotide
cgaaatttcgcggagagtccggtgatataa

SEQ ID NO: 325011 - DNA, 30 bp, Artificial Sequence
  Synthetic oligonucleotide
ataccctcacgctgacgcgactctatataa

SEQ ID NO: 325012 - DNA, 30 bp, Artificial Sequence
  Synthetic oligonucleotide
gacaaaagttgagatgtattacgtatataa

SEQ ID NO: 325013 - DNA, 30 bp, Artificial Sequence
  Synthetic oligonucleotide
cgacccgattctgtagctccctttatataa

SEQ ID NO: 325014 - DNA, 30 bp, Artificial Sequence
  Synthetic oligonucleotide
attctagagtaatcggagatgcaactataa

SEQ ID NO: 325015 - DNA, 30 bp, Artificial Sequence
  Synthetic oligonucleotide
atttaaattgacgaccaggggctactataa

SEQ ID NO: 325016 - DNA, 30 bp, Artificial Sequence
  Synthetic oligonucleotide
ggcccgcaaaagagatcggttaccctataa

SEQ ID NO: 325017 - DNA, 30 bp, Artificial Sequence
  Synthetic oligonucleotide
tggactggaaggggcttctaatgcctataa

SEQ ID NO: 325018 - DNA, 30 bp, Artificial Sequence
  Synthetic oligonucleotide
tggtatagggcgaacaataagctcctataa

SEQ ID NO: 325019 - DNA, 30 bp, Artificial Sequence
  Synthetic oligonucleotide
agtttgtacaaaaaatatgtacagctataa

SEQ ID NO: 325020 - DNA, 30 bp, Artificial Sequence
  Synthetic oligonucleotide
atgcacagcggacagcggtgtcagctataa

SEQ ID NO: 325021 - DNA, 30 bp, Artificial Sequence
  Synthetic oligonucleotide
gagctaacggctcgtcagcatacgctataa

SEQ ID NO: 325022 - DNA, 30 bp, Artificial Sequence
  Synthetic oligonucleotide
gcgagtcgtagggaacgcagaatgctataa

SEQ ID NO: 325023 - DNA, 30 bp, Artificial Sequence
  Synthetic oligonucleotide
tggatgactagaaaaaccgatgtagtataa

SEQ ID NO: 325024 - DNA, 30 bp, Artificial Sequence
  Synthetic oligonucleotide
ccgaacccacacagcgacgcacgcgtataa

SEQ ID NO: 325025 - DNA, 30 bp, Artificial Sequence
  Synthetic oligonucleotide
ccaggactgcgctgcttggcgaaggtataa

SEQ ID NO: 325026 - DNA, 30 bp, Artificial Sequence
  Synthetic oligonucleotide
agattgacgcatgtcttgttcggggtataa

SEQ ID NO: 325027 - DNA, 30 bp, Artificial Sequence
  Synthetic oligonucleotide
gcaatgttgggctgtgtgtgttgggtataa

SEQ ID NO: 325028 - DNA, 30 bp, Artificial Sequence
  Synthetic oligonucleotide
gcacagtttgatatgtatgtaactgtataa

SEQ ID NO: 325029 - DNA, 30 bp, Artificial Sequence
  Synthetic oligonucleotide
tagtaccggtatggcttcccctaattataa

SEQ ID NO: 325030 - DNA, 30 bp, Artificial Sequence
  Synthetic oligonucleotide
tgagcagactgcattgaaacctcattataa

SEQ ID NO: 325031 - DNA, 30 bp, Artificial Sequence
  Synthetic oligonucleotide
ataagccttactattactggagtattataa

SEQ ID NO: 325032 - DNA, 30 bp, Artificial Sequence
  Synthetic oligonucleotide
cccgagaatttgggtgggtcatacttataa

SEQ ID NO: 325033 - DNA, 30 bp, Artificial Sequence
  Synthetic oligonucleotide
ggcaggaaatacttcggatttgggttataa

SEQ ID NO: 325034 - DNA, 30 bp, Artificial Sequence
  Synthetic oligonucleotide
gtctgcaaacggccctattgggtgttataa

SEQ ID NO: 325035 - DNA, 30 bp, Artificial Sequence
  Synthetic oligonucleotide
tgtgcttaagagggcgcacgcttgttataa

SEQ ID NO: 325036 - DNA, 30 bp, Artificial Sequence
  Synthetic oligonucleotide
ctgtaagagactccaaaggtgattttataa

SEQ ID NO: 325037 - DNA, 30 bp, Artificial Sequence
  Synthetic oligonucleotide
tggaccccctatagcccttacaaaaactaa

SEQ ID NO: 325038 - DNA, 30 bp, Artificial Sequence
  Synthetic oligonucleotide
gggaccggggttggggggcaaccaaactaa

SEQ ID NO: 325039 - DNA, 30 bp, Artificial Sequence
  Synthetic oligonucleotide
agactgacgagggttaggcgtagaaactaa

SEQ ID NO: 325040 - DNA, 30 bp, Artificial Sequence
  Synthetic oligonucleotide
ggctatttaggaggctgaattgccaactaa

SEQ ID NO: 325041 - DNA, 30 bp, Artificial Sequence
  Synthetic oligonucleotide
gggtcagccctttctattgttagcaactaa

SEQ ID NO: 325042 - DNA, 30 bp, Artificial Sequence
  Synthetic oligonucleotide
gaacgcggcaatttcgaagtcgtcaactaa

SEQ ID NO: 325043 - DNA, 30 bp, Artificial Sequence
  Synthetic oligonucleotide
tgattgatatcatttcctgagcggaactaa

SEQ ID NO: 325044 - DNA, 30 bp, Artificial Sequence
  Synthetic oligonucleotide
catcttcggaaagattcccttgggaactaa

SEQ ID NO: 325045 - DNA, 31 bp, Artificial Sequence
  Synthetic oligonucleotide
cgtggggccccctgaaatgaagctgaactaa

SEQ ID NO: 325046 - DNA, 30 bp, Artificial Sequence
  Synthetic oligonucleotide
cttcgtggacataacgacgagaataactaa

SEQ ID NO: 325047 - DNA, 30 bp, Artificial Sequence
  Synthetic oligonucleotide
tagtacggttatggagcaagaccccactaa

SEQ ID NO: 325048 - DNA, 30 bp, Artificial Sequence
  Synthetic oligonucleotide
gtatcgatcgcctatctagggtgccactaa

SEQ ID NO: 325049 - DNA, 30 bp, Artificial Sequence
  Synthetic oligonucleotide
ttgggtcaacgctgggcatacgagcactaa

SEQ ID NO: 325050 - DNA, 30 bp, Artificial Sequence
  Synthetic oligonucleotide
actgatttcagcaatcggcggctgcactaa

SEQ ID NO: 325051 - DNA, 30 bp, Artificial Sequence
  Synthetic oligonucleotide
tgttcatcgcatctaggaatgcctcactaa

SEQ ID NO: 325052 - DNA, 30 bp, Artificial Sequence
  Synthetic oligonucleotide
taagtcgccgtatcaaccagaagtcactaa

SEQ ID NO: 325053 - DNA, 30 bp, Artificial Sequence
  Synthetic oligonucleotide
taggaattctcatattgagggattcactaa

SEQ ID NO: 325054 - DNA, 30 bp, Artificial Sequence
  Synthetic oligonucleotide
gtctcacaacgcgttaaagtaacagactaa

SEQ ID NO: 325055 - DNA, 30 bp, Artificial Sequence
  Synthetic oligonucleotide
ctatatagcaaggcggacttacacgactaa

SEQ ID NO: 325056 - DNA, 30 bp, Artificial Sequence
  Synthetic oligonucleotide
ctttcgctaggacaccaatcacgcgactaa

SEQ ID NO: 325057 - DNA, 30 bp, Artificial Sequence
  Synthetic oligonucleotide
taataaatgctgatttggcaaggcgactaa

SEQ ID NO: 325058 - DNA, 30 bp, Artificial Sequence
  Synthetic oligonucleotide
atatacttcctgagctacgctatcgactaa

SEQ ID NO: 325059 - DNA, 30 bp, Artificial Sequence
  Synthetic oligonucleotide
atcaggctcgctggtgggaggcaggactaa

SEQ ID NO: 325060 - DNA, 30 bp, Artificial Sequence
  Synthetic oligonucleotide
taaaattggagcggacacggatactactaa

SEQ ID NO: 325061 - DNA, 30 bp, Artificial Sequence
  Synthetic oligonucleotide
agctttttggaaggtattggtccctactaa

SEQ ID NO: 325062 - DNA, 30 bp, Artificial Sequence
  Synthetic oligonucleotide
ccaacaggattcctcaaagcctgaacctaa

SEQ ID NO: 325063 - DNA, 30 bp, Artificial Sequence
  Synthetic oligonucleotide
tagttactcgcaagtagctatgcgacctaa

SEQ ID NO: 325064 - DNA, 30 bp, Artificial Sequence
  Synthetic oligonucleotide
gcacctcatcataaagaagactgtacctaa

SEQ ID NO: 325065 - DNA, 30 bp, Artificial Sequence
  Synthetic oligonucleotide
gttaaaacgtccttaatattcccgccctaa

SEQ ID NO: 325066 - DNA, 30 bp, Artificial Sequence
  Synthetic oligonucleotide
acttggcgcttcagacttcacagtccctaa

SEQ ID NO: 325067 - DNA, 30 bp, Artificial Sequence
  Synthetic oligonucleotide
taagacttagtgtgtgcggtgcttccctaa

SEQ ID NO: 325068 - DNA, 30 bp, Artificial Sequence
  Synthetic oligonucleotide
cggagcgccaaccgggaactggccgcctaa

SEQ ID NO: 325069 - DNA, 30 bp, Artificial Sequence
  Synthetic oligonucleotide
gcgctgacaagtggcttttctgatgcctaa

SEQ ID NO: 325070 - DNA, 30 bp, Artificial Sequence
  Synthetic oligonucleotide
gttgctccatgccatgcgacggctgcctaa

SEQ ID NO: 325071 - DNA, 30 bp, Artificial Sequence
  Synthetic oligonucleotide
atattcaagatctggttgcggaactcctaa

SEQ ID NO: 325072 - DNA, 30 bp, Artificial Sequence
  Synthetic oligonucleotide
aaactccacctcgccgctaaatgctcctaa

SEQ ID NO: 325073 - DNA, 30 bp, Artificial Sequence
  Synthetic oligonucleotide
ggaacccacgcattaacaataccgtcctaa

SEQ ID NO: 325074 - DNA, 30 bp, Artificial Sequence
  Synthetic oligonucleotide
ccggatatcgtcaagtttggagcgtcctaa

SEQ ID NO: 325075 - DNA, 30 bp, Artificial Sequence
  Synthetic oligonucleotide
atgtatttttagtggaatgtgaggtcctaa

SEQ ID NO: 325076 - DNA, 30 bp, Artificial Sequence
  Synthetic oligonucleotide
tgagactttgccgtcccggcgttgtcctaa

SEQ ID NO: 325077 - DNA, 30 bp, Artificial Sequence
  Synthetic oligonucleotide
gattaatatattagaccaattcgttcctaa

SEQ ID NO: 325078 - DNA, 30 bp, Artificial Sequence
  Synthetic oligonucleotide
tgtagaccttaaattcgcccggaaagctaa

SEQ ID NO: 325079 - DNA, 30 bp, Artificial Sequence
  Synthetic oligonucleotide
cggcagcaccggaccgccataggcagctaa

SEQ ID NO: 325080 - DNA, 30 bp, Artificial Sequence
  Synthetic oligonucleotide
ggggaaaccggccctagcgtttgcagctaa

SEQ ID NO: 325081 - DNA, 30 bp, Artificial Sequence
  Synthetic oligonucleotide
ctatcacgccgtcgcaaaacccggagctaa

SEQ ID NO: 325082 - DNA, 30 bp, Artificial Sequence
  Synthetic oligonucleotide
tgtaggtacacttgaactagggttagctaa

SEQ ID NO: 325083 - DNA, 30 bp, Artificial Sequence
  Synthetic oligonucleotide
cgtgacgtacattgttgtactgaacgctaa

SEQ ID NO: 325084 - DNA, 30 bp, Artificial Sequence
  Synthetic oligonucleotide
ggggtggtttgcaggatctggagacgctaa

SEQ ID NO: 325085 - DNA, 30 bp, Artificial Sequence
  Synthetic oligonucleotide
gcggctcggatctaaagtttcctacgctaa

SEQ ID NO: 325086 - DNA, 30 bp, Artificial Sequence
  Synthetic oligonucleotide
tagttacgtttttaacgtacctcgcgctaa

SEQ ID NO: 325087 - DNA, 30 bp, Artificial Sequence
  Synthetic oligonucleotide
tctgttcgatcttgataccaccgaggctaa

SEQ ID NO: 325088 - DNA, 30 bp, Artificial Sequence
  Synthetic oligonucleotide
gagccctatgttcaagaccgggacggctaa

SEQ ID NO: 325089 - DNA, 30 bp, Artificial Sequence
  Synthetic oligonucleotide
ggtttcaggacaatgaatagtgtcggctaa

SEQ ID NO: 325090 - DNA, 30 bp, Artificial Sequence
  Synthetic oligonucleotide
agggatccttgttaactaaacaagggctaa

SEQ ID NO: 325091 - DNA, 30 bp, Artificial Sequence
  Synthetic oligonucleotide
taactaaaatgcgttccgttaccgggctaa

SEQ ID NO: 325092 - DNA, 30 bp, Artificial Sequence
  Synthetic oligonucleotide
aaggtcccgcactagaggtttcggggctaa

SEQ ID NO: 325093 - DNA, 30 bp, Artificial Sequence
  Synthetic oligonucleotide
cgattagtctcgccaacgcgatatggctaa

SEQ ID NO: 325094 - DNA, 30 bp, Artificial Sequence
  Synthetic oligonucleotide
gcggcgtattaacaaactgtgagtggctaa

SEQ ID NO: 325095 - DNA, 30 bp, Artificial Sequence
  Synthetic oligonucleotide
atggcgctggaagtcgtgcaaggatgctaa

SEQ ID NO: 325096 - DNA, 30 bp, Artificial Sequence
  Synthetic oligonucleotide
aaagcagagcaactaaaaagtgactgctaa

SEQ ID NO: 325097 - DNA, 30 bp, Artificial Sequence
  Synthetic oligonucleotide
ggaacgtcctacactcgcttctagtgctaa

SEQ ID NO: 325098 - DNA, 30 bp, Artificial Sequence
  Synthetic oligonucleotide
aacccttggagtggttgggcgttttgctaa

SEQ ID NO: 325099 - DNA, 30 bp, Artificial Sequence
  Synthetic oligonucleotide
atcgagtttacggcaacgccgggcatctaa

SEQ ID NO: 325100 - DNA, 30 bp, Artificial Sequence
  Synthetic oligonucleotide
ccggacgtaaattaagcgcttctactctaa

SEQ ID NO: 325101 - DNA, 30 bp, Artificial Sequence
  Synthetic oligonucleotide
gggttagctaccaggaggagttccctctaa

SEQ ID NO: 325102 - DNA, 30 bp, Artificial Sequence
  Synthetic oligonucleotide
cccaataagtagaggctgccgagcctctaa

SEQ ID NO: 325103 - DNA, 30 bp, Artificial Sequence
  Synthetic oligonucleotide
atcatctaagcgcgagggaatcatctctaa

SEQ ID NO: 325104 - DNA, 30 bp, Artificial Sequence
  Synthetic oligonucleotide
attgagacgctacgtacaatgcgtctctaa

SEQ ID NO: 325105 - DNA, 30 bp, Artificial Sequence
  Synthetic oligonucleotide
taaccgttgagcagaatatcataagtctaa

SEQ ID NO: 325106 - DNA, 30 bp, Artificial Sequence
  Synthetic oligonucleotide
atatcgcttacaaaagggtaggcagtctaa

SEQ ID NO: 325107 - DNA, 30 bp, Artificial Sequence
  Synthetic oligonucleotide
atatccttactttagagagatgccgtctaa

SEQ ID NO: 325108 - DNA, 30 bp, Artificial Sequence
  Synthetic oligonucleotide
gaagctcgcggacatggcaacaaggtctaa

SEQ ID NO: 325109 - DNA, 30 bp, Artificial Sequence
  Synthetic oligonucleotide
ggcgtgcgcgacatcgattaaaatgtctaa

SEQ ID NO: 325110 - DNA, 30 bp, Artificial Sequence
  Synthetic oligonucleotide
cgtcggccatgttggctctcatgtgtctaa

SEQ ID NO: 325111 - DNA, 30 bp, Artificial Sequence
  Synthetic oligonucleotide
gccgggtcatatttggtaatataattctaa

SEQ ID NO: 325112 - DNA, 30 bp, Artificial Sequence
  Synthetic oligonucleotide
agtatctcttcagccgatgacggattctaa

SEQ ID NO: 325113 - DNA, 30 bp, Artificial Sequence
  Synthetic oligonucleotide
gcacgaagtccgaggggcgataccttctaa

SEQ ID NO: 325114 - DNA, 30 bp, Artificial Sequence
  Synthetic oligonucleotide
ctcaagcgttgtctctggattgccttctaa

SEQ ID NO: 325115 - DNA, 30 bp, Artificial Sequence
  Synthetic oligonucleotide
tatgtcagtttgatagtaatgtccttctaa

SEQ ID NO: 325116 - DNA, 30 bp, Artificial Sequence
  Synthetic oligonucleotide
aggagccctagcctcgtggctacaaagtaa

SEQ ID NO: 325117 - DNA, 30 bp, Artificial Sequence
  Synthetic oligonucleotide
tactatatggccatatcaagcccaaagtaa

SEQ ID NO: 325118 - DNA, 30 bp, Artificial Sequence
  Synthetic oligonucleotide
ggagaaactattcggtaatgatcaaagtaa

SEQ ID NO: 325119 - DNA, 30 bp, Artificial Sequence
  Synthetic oligonucleotide
ggtagggtgatctcgatgtcgcgaaagtaa

SEQ ID NO: 325120 - DNA, 30 bp, Artificial Sequence
  Synthetic oligonucleotide
ggcgttggttgttccaaactcttaaagtaa

SEQ ID NO: 325121 - DNA, 30 bp, Artificial Sequence
  Synthetic oligonucleotide
cagtttaatggagcatctagacgcaagtaa

SEQ ID NO: 325122 - DNA, 30 bp, Artificial Sequence
  Synthetic oligonucleotide
tctgcgtgtccggttcgtcgtccgaagtaa

SEQ ID NO: 325123 - DNA, 30 bp, Artificial Sequence
  Synthetic oligonucleotide
gtcttgcatggatgggttttccggaagtaa

SEQ ID NO: 325124 - DNA, 30 bp, Artificial Sequence
  Synthetic oligonucleotide
aaacacacagttttagactgctggaagtaa

SEQ ID NO: 325125 - DNA, 30 bp, Artificial Sequence
  Synthetic oligonucleotide
cgagaccgcactccgtgactttggaagtaa

SEQ ID NO: 325126 - DNA, 30 bp, Artificial Sequence
  Synthetic oligonucleotide
tatgggcgcgctccaagtctcagtaagtaa

SEQ ID NO: 325127 - DNA, 30 bp, Artificial Sequence
  Synthetic oligonucleotide
gaaatagcgcggcccatacgcggtaagtaa

SEQ ID NO: 325128 - DNA, 30 bp, Artificial Sequence
  Synthetic oligonucleotide
taattcatgtcattatgcatcgttaagtaa

SEQ ID NO: 325129 - DNA, 30 bp, Artificial Sequence
  Synthetic oligonucleotide
agcttcttgcctattcctacagtacagtaa

SEQ ID NO: 325130 - DNA, 30 bp, Artificial Sequence
  Synthetic oligonucleotide
ctcaacgggcggacactaacattacagtaa

SEQ ID NO: 325131 - DNA, 30 bp, Artificial Sequence
  Synthetic oligonucleotide
atggcgtccttaggaagtggaaagcagtaa

SEQ ID NO: 325132 - DNA, 37 bp, Artificial Sequence
  Synthetic oligonucleotide
agcctactatccttcatacctagccagtgctcagtaa

SEQ ID NO: 325133 - DNA, 30 bp, Artificial Sequence
  Synthetic oligonucleotide
tagcccagtacatggactccgcgtcagtaa

SEQ ID NO: 325134 - DNA, 30 bp, Artificial Sequence
  Synthetic oligonucleotide
caaaaccttgttcgggacagacttcagtaa

SEQ ID NO: 325135 - DNA, 30 bp, Artificial Sequence
  Synthetic oligonucleotide
gggtcttagtttattcggctgatagagtaa

SEQ ID NO: 325136 - DNA, 30 bp, Artificial Sequence
  Synthetic oligonucleotide
gcaagtaagcgaccgccacgccccgagtaa

SEQ ID NO: 325137 - DNA, 30 bp, Artificial Sequence
  Synthetic oligonucleotide
tgttatccgagcttgacctttagcgagtaa

SEQ ID NO: 325138 - DNA, 30 bp, Artificial Sequence
  Synthetic oligonucleotide
gcttcaaaccagggaaactagcgcgagtaa

SEQ ID NO: 325139 - DNA, 30 bp, Artificial Sequence
  Synthetic oligonucleotide
aagtctgctcctattttgttacgggagtaa

SEQ ID NO: 325140 - DNA, 31 bp, Artificial Sequence
  Synthetic oligonucleotide
ctgagtaatacttttacccgtattggagtaa

SEQ ID NO: 325141 - DNA, 30 bp, Artificial Sequence
  Synthetic oligonucleotide
ctgagcggcttcgaacctaattttgagtaa

SEQ ID NO: 325142 - DNA, 30 bp, Artificial Sequence
  Synthetic oligonucleotide
atggacacagattgcttatcattctagtaa

SEQ ID NO: 325143 - DNA, 30 bp, Artificial Sequence
  Synthetic oligonucleotide
gtcataatactatggcggccaggttagtaa

SEQ ID NO: 325144 - DNA, 30 bp, Artificial Sequence
  Synthetic oligonucleotide
ataacgcacgatcctgaagcactttagtaa

SEQ ID NO: 325145 - DNA, 30 bp, Artificial Sequence
  Synthetic oligonucleotide
taacggcgggtgcgttcgtccggaacgtaa

SEQ ID NO: 325146 - DNA, 30 bp, Artificial Sequence
  Synthetic oligonucleotide
atcagggaggcactccaagtgttaacgtaa

SEQ ID NO: 325147 - DNA, 30 bp, Artificial Sequence
  Synthetic oligonucleotide
agagggctttaagtataattagacacgtaa

SEQ ID NO: 325148 - DNA, 30 bp, Artificial Sequence
  Synthetic oligonucleotide
ttaagtccgttgtcttggcagtccacgtaa

SEQ ID NO: 325149 - DNA, 30 bp, Artificial Sequence
  Synthetic oligonucleotide
cagcagccatggaccgcagcacgcacgtaa

SEQ ID NO: 325150 - DNA, 30 bp, Artificial Sequence
  Synthetic oligonucleotide
tactttgaaaataatccttgagcgacgtaa

SEQ ID NO: 325151 - DNA, 30 bp, Artificial Sequence
  Synthetic oligonucleotide
gaggctcctgccagaatgcagattacgtaa

SEQ ID NO: 325152 - DNA, 30 bp, Artificial Sequence
  Synthetic oligonucleotide
gggagctttgataggggaagacttacgtaa

SEQ ID NO: 325153 - DNA, 30 bp, Artificial Sequence
  Synthetic oligonucleotide
tgggaagggggtggcggagactttacgtaa

SEQ ID NO: 325154 - DNA, 30 bp, Artificial Sequence
  Synthetic oligonucleotide
tggtttgaatgcttaagaaggtacccgtaa

SEQ ID NO: 325155 - DNA, 30 bp, Artificial Sequence
  Synthetic oligonucleotide
atctaattgttcaataaccaccgcccgtaa

SEQ ID NO: 325156 - DNA, 30 bp, Artificial Sequence
  Synthetic oligonucleotide
atggtaattgcgcagtccccggcgccgtaa

SEQ ID NO: 325157 - DNA, 30 bp, Artificial Sequence
  Synthetic oligonucleotide
aatcgtatggtaagttagacatctccgtaa

SEQ ID NO: 325158 - DNA, 30 bp, Artificial Sequence
  Synthetic oligonucleotide
aaggcatttgttgtttttgggagtccgtaa

SEQ ID NO: 325159 - DNA, 30 bp, Artificial Sequence
  Synthetic oligonucleotide
ctcaaccaatcattatcgcgatcagcgtaa

SEQ ID NO: 325160 - DNA, 30 bp, Artificial Sequence
  Synthetic oligonucleotide
ttaccagtaatttccgactcaaccgcgtaa

SEQ ID NO: 325161 - DNA, 30 bp, Artificial Sequence
  Synthetic oligonucleotide
agtgatctaaggcatcacatgtccgcgtaa

SEQ ID NO: 325162 - DNA, 30 bp, Artificial Sequence
  Synthetic oligonucleotide
cacaactccattagtacccatctcgcgtaa

SEQ ID NO: 325163 - DNA, 30 bp, Artificial Sequence
  Synthetic oligonucleotide
ggcgcgattttctgtacgaaattcgcgtaa

SEQ ID NO: 325164 - DNA, 30 bp, Artificial Sequence
  Synthetic oligonucleotide
cttgacgaggttctggtcgtgcgggcgtaa

SEQ ID NO: 325165 - DNA, 30 bp, Artificial Sequence
  Synthetic oligonucleotide
aaaggctccggtcagagggagactgcgtaa

SEQ ID NO: 325166 - DNA, 30 bp, Artificial Sequence
  Synthetic oligonucleotide
tcaaacttatttgaaatcacacactcgtaa

SEQ ID NO: 325167 - DNA, 30 bp, Artificial Sequence
  Synthetic oligonucleotide
ggggcgacgacaagttccaagtcgtcgtaa

SEQ ID NO: 325168 - DNA, 30 bp, Artificial Sequence
  Synthetic oligonucleotide
cggacgcacgtttgtcagacttggtcgtaa

SEQ ID NO: 325169 - DNA, 30 bp, Artificial Sequence
  Synthetic oligonucleotide
cgcatacatgacctgtacacggattcgtaa

SEQ ID NO: 325170 - DNA, 30 bp, Artificial Sequence
  Synthetic oligonucleotide
gggtttacagtagttaatttgcgttcgtaa

SEQ ID NO: 325171 - DNA, 30 bp, Artificial Sequence
  Synthetic oligonucleotide
ttccccttgagaaaaaacccagcaaggtaa

SEQ ID NO: 325172 - DNA, 30 bp, Artificial Sequence
  Synthetic oligonucleotide
gatcacaccccatggctacgcgcaaggtaa

SEQ ID NO: 325173 - DNA, 30 bp, Artificial Sequence
  Synthetic oligonucleotide
tctacatatgtgctgcgttgttcaaggtaa

SEQ ID NO: 325174 - DNA, 30 bp, Artificial Sequence
  Synthetic oligonucleotide
tgatatgccacaatggtgatgccgaggtaa

SEQ ID NO: 325175 - DNA, 30 bp, Artificial Sequence
  Synthetic oligonucleotide
tatggtcggtctagcttaaatccgaggtaa

SEQ ID NO: 325176 - DNA, 30 bp, Artificial Sequence
  Synthetic oligonucleotide
gggaccgtaggatctacgttgtcacggtaa

SEQ ID NO: 325177 - DNA, 30 bp, Artificial Sequence
  Synthetic oligonucleotide
ctgggcgtaggttctgtgtgcccccggtaa

SEQ ID NO: 325178 - DNA, 30 bp, Artificial Sequence
  Synthetic oligonucleotide
gcaatagtttaaaacacaggcgtccggtaa

SEQ ID NO: 325179 - DNA, 30 bp, Artificial Sequence
  Synthetic oligonucleotide
ggctctccgtctccgataggtgttcggtaa

SEQ ID NO: 325180 - DNA, 30 bp, Artificial Sequence
  Synthetic oligonucleotide
aagaatgaagccagcgttcctaacgggtaa

SEQ ID NO: 325181 - DNA, 30 bp, Artificial Sequence
  Synthetic oligonucleotide
cgtcatgcgtaaacaacccaccgggggtaa

SEQ ID NO: 325182 - DNA, 30 bp, Artificial Sequence
  Synthetic oligonucleotide
agttgaggtcggactagaaatcaatggtaa

SEQ ID NO: 325183 - DNA, 30 bp, Artificial Sequence
  Synthetic oligonucleotide
agactctttcctaattagttagcatggtaa

SEQ ID NO: 325184 - DNA, 30 bp, Artificial Sequence
  Synthetic oligonucleotide
ataggaaactaaggggttgcacgctggtaa

SEQ ID NO: 325185 - DNA, 30 bp, Artificial Sequence
  Synthetic oligonucleotide
gttatttgtagttctctagacttctggtaa

SEQ ID NO: 325186 - DNA, 30 bp, Artificial Sequence
  Synthetic oligonucleotide
gatccttgagcaccccttgcgccgtggtaa

SEQ ID NO: 325187 - DNA, 30 bp, Artificial Sequence
  Synthetic oligonucleotide
cgctctttactacatagaacgaattggtaa

SEQ ID NO: 325188 - DNA, 30 bp, Artificial Sequence
  Synthetic oligonucleotide
catctgacatctgcgagggcactgatgtaa

SEQ ID NO: 325189 - DNA, 30 bp, Artificial Sequence
  Synthetic oligonucleotide
gtccctcggagacgggatggacatatgtaa

SEQ ID NO: 325190 - DNA, 30 bp, Artificial Sequence
  Synthetic oligonucleotide
gtgccgagaacgtaagtttaatgtatgtaa

SEQ ID NO: 325191 - DNA, 30 bp, Artificial Sequence
  Synthetic oligonucleotide
tgagttctggcggattagttatttatgtaa

SEQ ID NO: 325192 - DNA, 30 bp, Artificial Sequence
  Synthetic oligonucleotide
gcgccgtgcacgcatgaaagtgaactgtaa

SEQ ID NO: 325193 - DNA, 30 bp, Artificial Sequence
  Synthetic oligonucleotide
aataagatgaagacttagcttgaactgtaa

SEQ ID NO: 325194 - DNA, 30 bp, Artificial Sequence
  Synthetic oligonucleotide
atgttgaaccttagagccacctgactgtaa

SEQ ID NO: 325195 - DNA, 30 bp, Artificial Sequence
  Synthetic oligonucleotide
attggcatattgaactagagtaacctgtaa

SEQ ID NO: 325196 - DNA, 30 bp, Artificial Sequence
  Synthetic oligonucleotide
tcaacttcagaagcgcttttgaagctgtaa

SEQ ID NO: 325197 - DNA, 30 bp, Artificial Sequence
  Synthetic oligonucleotide
tttcaaagaattgcttaagttgggctgtaa

SEQ ID NO: 325198 - DNA, 30 bp, Artificial Sequence
  Synthetic oligonucleotide
tatcagggttgaagggtagtaagtctgtaa

SEQ ID NO: 325199 - DNA, 30 bp, Artificial Sequence
  Synthetic oligonucleotide
ttctaccttccgggagacccagttctgtaa

SEQ ID NO: 325200 - DNA, 30 bp, Artificial Sequence
  Synthetic oligonucleotide
cttcatcgggttaccaccgcctcagtgtaa

SEQ ID NO: 325201 - DNA, 30 bp, Artificial Sequence
  Synthetic oligonucleotide
ggtcctctgatcttgaggtttatagtgtaa

SEQ ID NO: 325202 - DNA, 30 bp, Artificial Sequence
  Synthetic oligonucleotide
cagttatcgcatccaatttgacccgtgtaa

SEQ ID NO: 325203 - DNA, 30 bp, Artificial Sequence
  Synthetic oligonucleotide
gttgtcatctaatattctatcagcgtgtaa

SEQ ID NO: 325204 - DNA, 30 bp, Artificial Sequence
  Synthetic oligonucleotide
gtgcatcagtcacctatgacgagcgtgtaa

SEQ ID NO: 325205 - DNA, 30 bp, Artificial Sequence
  Synthetic oligonucleotide
ctgccagggcgttatctatagtgggtgtaa

SEQ ID NO: 325206 - DNA, 30 bp, Artificial Sequence
  Synthetic oligonucleotide
ggtgaatatttccagacacgttatgtgtaa

SEQ ID NO: 325207 - DNA, 30 bp, Artificial Sequence
  Synthetic oligonucleotide
cgcatttccaggtcataaattgctgtgtaa

SEQ ID NO: 325208 - DNA, 30 bp, Artificial Sequence
  Synthetic oligonucleotide
gcctgctgctcgccgctctaaggtgtgtaa

SEQ ID NO: 325209 - DNA, 30 bp, Artificial Sequence
  Synthetic oligonucleotide
cagatagcatatccgagcaatgaattgtaa

SEQ ID NO: 325210 - DNA, 30 bp, Artificial Sequence
  Synthetic oligonucleotide
agaaggtatgctcatgttctatcattgtaa

SEQ ID NO: 325211 - DNA, 30 bp, Artificial Sequence
  Synthetic oligonucleotide
gaactgacaccttagaaatgtaacttgtaa

SEQ ID NO: 325212 - DNA, 30 bp, Artificial Sequence
  Synthetic oligonucleotide
attgggaaatcccaacttgggctcttgtaa

SEQ ID NO: 325213 - DNA, 30 bp, Artificial Sequence
  Synthetic oligonucleotide
taagcagggcctacaatgcaacggttgtaa

SEQ ID NO: 325214 - DNA, 30 bp, Artificial Sequence
  Synthetic oligonucleotide
atcaagtatgtcagtgcctcacgtttgtaa

SEQ ID NO: 325215 - DNA, 30 bp, Artificial Sequence
  Synthetic oligonucleotide
gcctagcggattggttctctacgtttgtaa

SEQ ID NO: 325216 - DNA, 30 bp, Artificial Sequence
  Synthetic oligonucleotide
tagttgtcgccttactccagtggtttgtaa

SEQ ID NO: 325217 - DNA, 30 bp, Artificial Sequence
  Synthetic oligonucleotide
ccacgtggcttttacaagaacgttttgtaa

SEQ ID NO: 325218 - DNA, 30 bp, Artificial Sequence
  Synthetic oligonucleotide
taaatgacatcactgtcttctgcaaattaa

SEQ ID NO: 325219 - DNA, 30 bp, Artificial Sequence
  Synthetic oligonucleotide
gatcgagtgacgtttgtcttcggaaattaa

SEQ ID NO: 325220 - DNA, 30 bp, Artificial Sequence
  Synthetic oligonucleotide
tgatacgaccaggtaatgctatgaaattaa

SEQ ID NO: 325221 - DNA, 30 bp, Artificial Sequence
  Synthetic oligonucleotide
attcgacgctattatgagcctgtcaattaa

SEQ ID NO: 325222 - DNA, 30 bp, Artificial Sequence
  Synthetic oligonucleotide
gagcttcgagaggaggtcatctggaattaa

SEQ ID NO: 325223 - DNA, 30 bp, Artificial Sequence
  Synthetic oligonucleotide
ccacactaggcatagatgcgtatgaattaa

SEQ ID NO: 325224 - DNA, 30 bp, Artificial Sequence
  Synthetic oligonucleotide
tggattgccccaagtctcggagtgaattaa

SEQ ID NO: 325225 - DNA, 30 bp, Artificial Sequence
  Synthetic oligonucleotide
taatgcttgtacccaatggcaaataattaa

SEQ ID NO: 325226 - DNA, 30 bp, Artificial Sequence
  Synthetic oligonucleotide
tgagacccaggatcttctatacataattaa

SEQ ID NO: 325227 - DNA, 30 bp, Artificial Sequence
  Synthetic oligonucleotide
gatttatggaacacctgggttgctaattaa

SEQ ID NO: 325228 - DNA, 30 bp, Artificial Sequence
  Synthetic oligonucleotide
agatacaggcttccggtaacgagtaattaa

SEQ ID NO: 325229 - DNA, 30 bp, Artificial Sequence
  Synthetic oligonucleotide
ataaactagtgcgtttacgtgagtaattaa

SEQ ID NO: 325230 - DNA, 30 bp, Artificial Sequence
  Synthetic oligonucleotide
tgccctatgttaacatcttgagaacattaa

SEQ ID NO: 325231 - DNA, 30 bp, Artificial Sequence
  Synthetic oligonucleotide
gccaggcagtacatcctgtgcggacattaa

SEQ ID NO: 325232 - DNA, 30 bp, Artificial Sequence
  Synthetic oligonucleotide
cgttccgcttcggacgaaggccatcattaa

SEQ ID NO: 325233 - DNA, 30 bp, Artificial Sequence
  Synthetic oligonucleotide
cggtgatgaaatacaatctttcgtcattaa

SEQ ID NO: 325234 - DNA, 30 bp, Artificial Sequence
  Synthetic oligonucleotide
aagcctggttcaggaactagcaccgattaa

SEQ ID NO: 325235 - DNA, 31 bp, Artificial Sequence
  Synthetic oligonucleotide
tatgaccaagtaatggctgctgagtgattaa

SEQ ID NO: 325236 - DNA, 30 bp, Artificial Sequence
  Synthetic oligonucleotide
gcgggaacatgactcccctcacgtgattaa

SEQ ID NO: 325237 - DNA, 30 bp, Artificial Sequence
  Synthetic oligonucleotide
tacgtatacaattgtgaatcatttgattaa

SEQ ID NO: 325238 - DNA, 30 bp, Artificial Sequence
  Synthetic oligonucleotide
ggagtagtatcgaaaccatcaaaatattaa

SEQ ID NO: 325239 - DNA, 30 bp, Artificial Sequence
  Synthetic oligonucleotide
gtcagggcgtctacacaagccgcatattaa

SEQ ID NO: 325240 - DNA, 30 bp, Artificial Sequence
  Synthetic oligonucleotide
gaacgcgaagcattcgcacaacactattaa

SEQ ID NO: 325241 - DNA, 30 bp, Artificial Sequence
  Synthetic oligonucleotide
gtcgagtatacagggataagcgtctattaa

SEQ ID NO: 325242 - DNA, 30 bp, Artificial Sequence
  Synthetic oligonucleotide
gcgtggctttgttcacactgtcattattaa

SEQ ID NO: 325243 - DNA, 30 bp, Artificial Sequence
  Synthetic oligonucleotide
aagcggactcttatggtttaggcttattaa

SEQ ID NO: 325244 - DNA, 30 bp, Artificial Sequence
  Synthetic oligonucleotide
ttagctataagtgggcagtgcgaaacttaa

SEQ ID NO: 325245 - DNA, 30 bp, Artificial Sequence
  Synthetic oligonucleotide
aaccaggggcctacatcggtgggaacttaa

SEQ ID NO: 325246 - DNA, 30 bp, Artificial Sequence
  Synthetic oligonucleotide
aatactctggaacatggacggcgcacttaa

SEQ ID NO: 325247 - DNA, 30 bp, Artificial Sequence
  Synthetic oligonucleotide
gggctcgataaggttgccccctagacttaa

SEQ ID NO: 325248 - DNA, 30 bp, Artificial Sequence
  Synthetic oligonucleotide
gagaacctcagttaggaggtgactacttaa

SEQ ID NO: 325249 - DNA, 30 bp, Artificial Sequence
  Synthetic oligonucleotide
gccggttcgtattggaacataagtacttaa

SEQ ID NO: 325250 - DNA, 30 bp, Artificial Sequence
  Synthetic oligonucleotide
catcggttccgctggtttcgcgttacttaa

SEQ ID NO: 325251 - DNA, 30 bp, Artificial Sequence
  Synthetic oligonucleotide
taaagcgcgcagtgattcggtacaccttaa

SEQ ID NO: 325252 - DNA, 30 bp, Artificial Sequence
  Synthetic oligonucleotide
taggacggaatctttccgcgcagaccttaa

SEQ ID NO: 325253 - DNA, 30 bp, Artificial Sequence
  Synthetic oligonucleotide
gtgtactggttaaagtttatgataccttaa

SEQ ID NO: 325254 - DNA, 30 bp, Artificial Sequence
  Synthetic oligonucleotide
tattcgcagtgcaggagggacctaccttaa

SEQ ID NO: 325255 - DNA, 30 bp, Artificial Sequence
  Synthetic oligonucleotide
gcgaatggcgtctgaagtaagaggccttaa

SEQ ID NO: 325256 - DNA, 30 bp, Artificial Sequence
  Synthetic oligonucleotide
ctggagcgcttgttgaccatggtgccttaa

SEQ ID NO: 325257 - DNA, 30 bp, Artificial Sequence
  Synthetic oligonucleotide
gcccgagcaggcatatgaaaaactccttaa

SEQ ID NO: 325258 - DNA, 30 bp, Artificial Sequence
  Synthetic oligonucleotide
aaaatattgcgtctaggtgagcgtccttaa

SEQ ID NO: 325259 - DNA, 30 bp, Artificial Sequence
  Synthetic oligonucleotide
aataggcggaaagcctacgtacttccttaa

SEQ ID NO: 325260 - DNA, 30 bp, Artificial Sequence
  Synthetic oligonucleotide
aaggagctgggccacgccctgggagcttaa

SEQ ID NO: 325261 - DNA, 30 bp, Artificial Sequence
  Synthetic oligonucleotide
ggcttctaagatgaggtaaggaacgcttaa

SEQ ID NO: 325262 - DNA, 30 bp, Artificial Sequence
  Synthetic oligonucleotide
agtgaagtgttataacggggaatggcttaa

SEQ ID NO: 325263 - DNA, 30 bp, Artificial Sequence
  Synthetic oligonucleotide
gggtaaagctgtgctcggtcggagtcttaa

SEQ ID NO: 325264 - DNA, 30 bp, Artificial Sequence
  Synthetic oligonucleotide
ttgcattacccagaccgcgcaaggtcttaa

SEQ ID NO: 325265 - DNA, 30 bp, Artificial Sequence
  Synthetic oligonucleotide
accttttctgtaaggttgctgaggtcttaa

SEQ ID NO: 325266 - DNA, 30 bp, Artificial Sequence
  Synthetic oligonucleotide
caaagatccctaatgacatgggaaagttaa

SEQ ID NO: 325267 - DNA, 30 bp, Artificial Sequence
  Synthetic oligonucleotide
tacgcaaatctcgctagaggtgaaagttaa

SEQ ID NO: 325268 - DNA, 30 bp, Artificial Sequence
  Synthetic oligonucleotide
acgtgtagtgggactgtgcatgcaagttaa

SEQ ID NO: 325269 - DNA, 30 bp, Artificial Sequence
  Synthetic oligonucleotide
gtgacggtgatactatattaggtcagttaa

SEQ ID NO: 325270 - DNA, 30 bp, Artificial Sequence
  Synthetic oligonucleotide
gcatgtccctactggtccccatcgagttaa

SEQ ID NO: 325271 - DNA, 30 bp, Artificial Sequence
  Synthetic oligonucleotide
ggcttttggagagatggtcattatagttaa

SEQ ID NO: 325272 - DNA, 30 bp, Artificial Sequence
  Synthetic oligonucleotide
agatacagaggatcgtcctcatgtagttaa

SEQ ID NO: 325273 - DNA, 30 bp, Artificial Sequence
  Synthetic oligonucleotide
ccaagcataagggggttaacgcgccgttaa

SEQ ID NO: 325274 - DNA, 30 bp, Artificial Sequence
  Synthetic oligonucleotide
catgaacgtgtcgtgcaaggaaatcgttaa

SEQ ID NO: 325275 - DNA, 30 bp, Artificial Sequence
  Synthetic oligonucleotide
ttagatcttggcatctaacggcatcgttaa

SEQ ID NO: 325276 - DNA, 30 bp, Artificial Sequence
  Synthetic oligonucleotide
cgacgccctggtcattactagcaaggttaa

SEQ ID NO: 325277 - DNA, 30 bp, Artificial Sequence
  Synthetic oligonucleotide
gggtcgtaagcatatccgggaagcggttaa

SEQ ID NO: 325278 - DNA, 30 bp, Artificial Sequence
  Synthetic oligonucleotide
tcaggatgagctgcatattagcgcggttaa

SEQ ID NO: 325279 - DNA, 30 bp, Artificial Sequence
  Synthetic oligonucleotide
gggacgagtcgttgaactgtactcggttaa

SEQ ID NO: 325280 - DNA, 30 bp, Artificial Sequence
  Synthetic oligonucleotide
gaaggcccgggtaacggcaatgagggttaa

SEQ ID NO: 325281 - DNA, 30 bp, Artificial Sequence
  Synthetic oligonucleotide
gataggaggaccaatgttgattcgggttaa

SEQ ID NO: 325282 - DNA, 30 bp, Artificial Sequence
  Synthetic oligonucleotide
ttcatatattagtacggtaaattgggttaa

SEQ ID NO: 325283 - DNA, 30 bp, Artificial Sequence
  Synthetic oligonucleotide
agaaaacttcgaaattatttatctggttaa

SEQ ID NO: 325284 - DNA, 30 bp, Artificial Sequence
  Synthetic oligonucleotide
gagagcttctactaggaacctgtgtgttaa

SEQ ID NO: 325285 - DNA, 30 bp, Artificial Sequence
  Synthetic oligonucleotide
ccttccacccccagatcatacaattgttaa

SEQ ID NO: 325286 - DNA, 30 bp, Artificial Sequence
  Synthetic oligonucleotide
aagaaaggaatggacggtacggattgttaa

SEQ ID NO: 325287 - DNA, 30 bp, Artificial Sequence
  Synthetic oligonucleotide
gtttaaggctttaatatacagggttgttaa

SEQ ID NO: 325288 - DNA, 30 bp, Artificial Sequence
  Synthetic oligonucleotide
cgcagtagcgaaccctactcggaaatttaa

SEQ ID NO: 325289 - DNA, 30 bp, Artificial Sequence
  Synthetic oligonucleotide
cggaaactttaatttggcgagccaatttaa

SEQ ID NO: 325290 - DNA, 30 bp, Artificial Sequence
  Synthetic oligonucleotide
tgcgtgtggaactccacaggagcaatttaa

SEQ ID NO: 325291 - DNA, 30 bp, Artificial Sequence
  Synthetic oligonucleotide
acgtatggcttagatggaggcgcaatttaa

SEQ ID NO: 325292 - DNA, 30 bp, Artificial Sequence
  Synthetic oligonucleotide
tgctttcagaaagtctacctttcaatttaa

SEQ ID NO: 325293 - DNA, 30 bp, Artificial Sequence
  Synthetic oligonucleotide
tccaatgtgtggcttcctgtttcaatttaa

SEQ ID NO: 325294 - DNA, 31 bp, Artificial Sequence
  Synthetic oligonucleotide
ctatacctaaactccaggcacaggaatttaa

SEQ ID NO: 325295 - DNA, 30 bp, Artificial Sequence
  Synthetic oligonucleotide
tcgcaggcacgataagttctagacatttaa

SEQ ID NO: 325296 - DNA, 30 bp, Artificial Sequence
  Synthetic oligonucleotide
atgtctcaaacccccgctaataccatttaa

SEQ ID NO: 325297 - DNA, 30 bp, Artificial Sequence
  Synthetic oligonucleotide
gagtggttcgccatacaagcctgcatttaa

SEQ ID NO: 325298 - DNA, 30 bp, Artificial Sequence
  Synthetic oligonucleotide
agccaggggtgtgggtacaataagatttaa

SEQ ID NO: 325299 - DNA, 30 bp, Artificial Sequence
  Synthetic oligonucleotide
aataattgctacacgtgttgctagatttaa

SEQ ID NO: 325300 - DNA, 30 bp, Artificial Sequence
  Synthetic oligonucleotide
ctggactgacgaagcaatggagggatttaa

SEQ ID NO: 325301 - DNA, 29 bp, Artificial Sequence
  Synthetic oligonucleotide
ggaggctcgaggggtcaccgtggatttaa

SEQ ID NO: 325302 - DNA, 30 bp, Artificial Sequence
  Synthetic oligonucleotide
cgatagcctgtaccccaaacaatactttaa

SEQ ID NO: 325303 - DNA, 30 bp, Artificial Sequence
  Synthetic oligonucleotide
ttcacggactgaaagccgcgactactttaa

SEQ ID NO: 325304 - DNA, 30 bp, Artificial Sequence
  Synthetic oligonucleotide
ttcgatacaattgcgactgggcccctttaa

SEQ ID NO: 325305 - DNA, 30 bp, Artificial Sequence
  Synthetic oligonucleotide
agggtagtacttgcgggcggagtcctttaa

SEQ ID NO: 325306 - DNA, 30 bp, Artificial Sequence
  Synthetic oligonucleotide
aatcagggcagcactgctcacttgctttaa

SEQ ID NO: 325307 - DNA, 30 bp, Artificial Sequence
  Synthetic oligonucleotide
tacagaaggttagctacagaaactctttaa

SEQ ID NO: 325308 - DNA, 30 bp, Artificial Sequence
  Synthetic oligonucleotide
tgacaagcgtgcattgtccgggctctttaa

SEQ ID NO: 325309 - DNA, 30 bp, Artificial Sequence
  Synthetic oligonucleotide
gcataaacctgtaagtaatcctctctttaa

SEQ ID NO: 325310 - DNA, 30 bp, Artificial Sequence
  Synthetic oligonucleotide
ttatgattactaaagtatggcaaagtttaa

SEQ ID NO: 325311 - DNA, 30 bp, Artificial Sequence
  Synthetic oligonucleotide
tctagggggtgattcttacgggaagtttaa

SEQ ID NO: 325312 - DNA, 30 bp, Artificial Sequence
  Synthetic oligonucleotide
ccgcgacaattccaagctgcgtcagtttaa

SEQ ID NO: 325313 - DNA, 30 bp, Artificial Sequence
  Synthetic oligonucleotide
ggaacaacctagcccagtagtggagtttaa

SEQ ID NO: 325314 - DNA, 30 bp, Artificial Sequence
  Synthetic oligonucleotide
ctacgtctcattgcaatgttattagtttaa

SEQ ID NO: 325315 - DNA, 30 bp, Artificial Sequence
  Synthetic oligonucleotide
gtcgttcggacgagtcttctaaacgtttaa

SEQ ID NO: 325316 - DNA, 30 bp, Artificial Sequence
  Synthetic oligonucleotide
aatagacttcttaacgatcctgccgtttaa

SEQ ID NO: 325317 - DNA, 30 bp, Artificial Sequence
  Synthetic oligonucleotide
gagaagccgggaaaatattaggaggtttaa

SEQ ID NO: 325318 - DNA, 30 bp, Artificial Sequence
  Synthetic oligonucleotide
gagttagaaactgtttatatgtaggtttaa

SEQ ID NO: 325319 - DNA, 30 bp, Artificial Sequence
  Synthetic oligonucleotide
aatttggtcaggtagagcgacccggtttaa

SEQ ID NO: 325320 - DNA, 30 bp, Artificial Sequence
  Synthetic oligonucleotide
tctcgaatttttagggcttgttgggtttaa

SEQ ID NO: 325321 - DNA, 30 bp, Artificial Sequence
  Synthetic oligonucleotide
ttatctcgagccctcaccttgcaattttaa

SEQ ID NO: 325322 - DNA, 30 bp, Artificial Sequence
  Synthetic oligonucleotide
tccgtgtttatgtaataaacgtaattttaa

SEQ ID NO: 325323 - DNA, 30 bp, Artificial Sequence
  Synthetic oligonucleotide
atggatcttcaaaaatctgaatcattttaa

SEQ ID NO: 325324 - DNA, 30 bp, Artificial Sequence
  Synthetic oligonucleotide
gttcccagaccagctgaaaaaaccttttaa

SEQ ID NO: 325325 - DNA, 30 bp, Artificial Sequence
  Synthetic oligonucleotide
atggatatgagttcatataataagttttaa

SEQ ID NO: 325326 - DNA, 30 bp, Artificial Sequence
  Synthetic oligonucleotide
atgaaggacgtatagacgcattagttttaa

SEQ ID NO: 325327 - DNA, 30 bp, Artificial Sequence
  Synthetic oligonucleotide
gtgaagcagagggtcagcttaaggttttaa

SEQ ID NO: 325328 - DNA, 30 bp, Artificial Sequence
  Synthetic oligonucleotide
gacgcaagagctcggttacaggtgttttaa

SEQ ID NO: 325329 - DNA, 30 bp, Artificial Sequence
  Synthetic oligonucleotide
atggataaggacgtcggttcgcatttttaa

SEQ ID NO: 325330 - DNA, 30 bp, Artificial Sequence
  Synthetic oligonucleotide
tcatcaatactcaacatcgtgcatttttaa

SEQ ID NO: 325331 - DNA, 29 bp, Artificial Sequence
  Synthetic oligonucleotide
atgcaatgccattcgttgacgatttttaa

SEQ ID NO: 325332 - DNA, 30 bp, Artificial Sequence
  Synthetic oligonucleotide
gatagtccacccctgataagaggaaaaaca

SEQ ID NO: 325333 - DNA, 30 bp, Artificial Sequence
  Synthetic oligonucleotide
ataaagtcctaatggattgacgtaaaaaca

SEQ ID NO: 325334 - DNA, 30 bp, Artificial Sequence
  Synthetic oligonucleotide
tctaattcatacgtagtgacatcgaaaaca

SEQ ID NO: 325335 - DNA, 30 bp, Artificial Sequence
  Synthetic oligonucleotide
ctacaaatccgtttaatcaaggggaaaaca

SEQ ID NO: 325336 - DNA, 30 bp, Artificial Sequence
  Synthetic oligonucleotide
ccttggtttcgggcgcaaatggggaaaaca

SEQ ID NO: 325337 - DNA, 30 bp, Artificial Sequence
  Synthetic oligonucleotide
aaaaatttgaaggcgagtgggctgaaaaca

SEQ ID NO: 325338 - DNA, 30 bp, Artificial Sequence
  Synthetic oligonucleotide
tatacaatctactgacttactcgtaaaaca

SEQ ID NO: 325339 - DNA, 30 bp, Artificial Sequence
  Synthetic oligonucleotide
gtggaccctcgcgtaccttatcttaaaaca

SEQ ID NO: 325340 - DNA, 30 bp, Artificial Sequence
  Synthetic oligonucleotide
gcccacatggggtttaatagctttaaaaca

SEQ ID NO: 325341 - DNA, 30 bp, Artificial Sequence
  Synthetic oligonucleotide
cgtggacgtaagggcgattataaccaaaca

SEQ ID NO: 325342 - DNA, 30 bp, Artificial Sequence
  Synthetic oligonucleotide
ggtgtatcaggtctagatctccatcaaaca

SEQ ID NO: 325343 - DNA, 30 bp, Artificial Sequence
  Synthetic oligonucleotide
cacttaatctccatatctaccgttcaaaca

SEQ ID NO: 325344 - DNA, 30 bp, Artificial Sequence
  Synthetic oligonucleotide
tgtggatcttgcctcctttgtcgcgaaaca

SEQ ID NO: 325345 - DNA, 30 bp, Artificial Sequence
  Synthetic oligonucleotide
gtgacggaaatcgacttcatgcaggaaaca

SEQ ID NO: 325346 - DNA, 30 bp, Artificial Sequence
  Synthetic oligonucleotide
gtgtttccctaattgaatactgaggaaaca

SEQ ID NO: 325347 - DNA, 30 bp, Artificial Sequence
  Synthetic oligonucleotide
tctctctttagaaaaattggtgcggaaaca

SEQ ID NO: 325348 - DNA, 30 bp, Artificial Sequence
  Synthetic oligonucleotide
aaaaggagggaggattttaggatggaaaca

SEQ ID NO: 325349 - DNA, 30 bp, Artificial Sequence
  Synthetic oligonucleotide
aggtcaggatgtatgtttaagttggaaaca

SEQ ID NO: 325350 - DNA, 30 bp, Artificial Sequence
  Synthetic oligonucleotide
tacgcgttcacgttgctgaatgaataaaca

SEQ ID NO: 325351 - DNA, 30 bp, Artificial Sequence
  Synthetic oligonucleotide
ccgataaataagtaacgctcttgataaaca

SEQ ID NO: 325352 - DNA, 30 bp, Artificial Sequence
  Synthetic oligonucleotide
ccttggccctgggagttttgtcactaaaca

SEQ ID NO: 325353 - DNA, 30 bp, Artificial Sequence
  Synthetic oligonucleotide
ttgtgctcccccaggggtacaatgtaaaca

SEQ ID NO: 325354 - DNA, 30 bp, Artificial Sequence
  Synthetic oligonucleotide
gttaatcttagcaatgaggtgaattaaaca

SEQ ID NO: 325355 - DNA, 30 bp, Artificial Sequence
  Synthetic oligonucleotide
gtgagtctggacatgcgtttcagttaaaca

SEQ ID NO: 325356 - DNA, 30 bp, Artificial Sequence
  Synthetic oligonucleotide
tcgctttaatcaatgaaatagccgacaaca

SEQ ID NO: 325357 - DNA, 30 bp, Artificial Sequence
  Synthetic oligonucleotide
taatactcagctgtttcctgcgggacaaca

SEQ ID NO: 325358 - DNA, 30 bp, Artificial Sequence
  Synthetic oligonucleotide
aaatgtttgagtctataataacaaccaaca

SEQ ID NO: 325359 - DNA, 30 bp, Artificial Sequence
  Synthetic oligonucleotide
aaagtgttgatggtaaggtgacaaccaaca

SEQ ID NO: 325360 - DNA, 30 bp, Artificial Sequence
  Synthetic oligonucleotide
cgtggggcatgtggagcgttgaacccaaca

SEQ ID NO: 325361 - DNA, 30 bp, Artificial Sequence
  Synthetic oligonucleotide
tgcaggtttacccccaacttcaagccaaca

SEQ ID NO: 325362 - DNA, 30 bp, Artificial Sequence
  Synthetic oligonucleotide
tgggacgctgcaggcaccctgacgccaaca

SEQ ID NO: 325363 - DNA, 30 bp, Artificial Sequence
  Synthetic oligonucleotide
ttcagatgttagaaacacctatgtccaaca

SEQ ID NO: 325364 - DNA, 30 bp, Artificial Sequence
  Synthetic oligonucleotide
aggccgcagagagggcatggaccagcaaca

SEQ ID NO: 325365 - DNA, 30 bp, Artificial Sequence
  Synthetic oligonucleotide
gcgcttcagtagaacaacagccgagcaaca

SEQ ID NO: 325366 - DNA, 30 bp, Artificial Sequence
  Synthetic oligonucleotide
agtagagagctgataaggtgtctcgcaaca

SEQ ID NO: 325367 - DNA, 30 bp, Artificial Sequence
  Synthetic oligonucleotide
cctggcgatacgagctttggggcggcaaca

SEQ ID NO: 325368 - DNA, 30 bp, Artificial Sequence
  Synthetic oligonucleotide
tccctcaagttactgcaccttatggcaaca

SEQ ID NO: 325369 - DNA, 30 bp, Artificial Sequence
  Synthetic oligonucleotide
aaaaaagacttgtagggatgagaatcaaca

SEQ ID NO: 325370 - DNA, 30 bp, Artificial Sequence
  Synthetic oligonucleotide
gggcacgtatgttaagggaaacactcaaca

SEQ ID NO: 325371 - DNA, 30 bp, Artificial Sequence
  Synthetic oligonucleotide
ccggtggattctcggggattagagtcaaca

SEQ ID NO: 325372 - DNA, 29 bp, Artificial Sequence
  Synthetic oligonucleotide
gggtgatatgggtactgtgctagtcaaca

SEQ ID NO: 325373 - DNA, 30 bp, Artificial Sequence
  Synthetic oligonucleotide
gggatatggcaggccttacacatgtcaaca

SEQ ID NO: 325374 - DNA, 30 bp, Artificial Sequence
  Synthetic oligonucleotide
gtcactacgatggtatgcgcctgttcaaca

SEQ ID NO: 325375 - DNA, 30 bp, Artificial Sequence
  Synthetic oligonucleotide
tgcagtaagatcgtgtgtgtattttcaaca

SEQ ID NO: 325376 - DNA, 30 bp, Artificial Sequence
  Synthetic oligonucleotide
agcgagtttttgcgcgccttgtacagaaca

SEQ ID NO: 325377 - DNA, 30 bp, Artificial Sequence
  Synthetic oligonucleotide
tctcttaaagagagggccgctaccagaaca

SEQ ID NO: 325378 - DNA, 30 bp, Artificial Sequence
  Synthetic oligonucleotide
gaaaggatggacgcacgcacgagcagaaca

SEQ ID NO: 325379 - DNA, 30 bp, Artificial Sequence
  Synthetic oligonucleotide
gacgtcggggcgtttaaaacgcagagaaca

SEQ ID NO: 325380 - DNA, 30 bp, Artificial Sequence
  Synthetic oligonucleotide
acggtggttcactgatatgttcgtagaaca

SEQ ID NO: 325381 - DNA, 30 bp, Artificial Sequence
  Synthetic oligonucleotide
cggggtatctgtatttcatctcttagaaca

SEQ ID NO: 325382 - DNA, 30 bp, Artificial Sequence
  Synthetic oligonucleotide
taactaaacaggcttcgtcaaatacgaaca

SEQ ID NO: 325383 - DNA, 30 bp, Artificial Sequence
  Synthetic oligonucleotide
tttgaacgggaacggttagtcctacgaaca

SEQ ID NO: 325384 - DNA, 30 bp, Artificial Sequence
  Synthetic oligonucleotide
cgggcctgttctcgaccgtttctacgaaca

SEQ ID NO: 325385 - DNA, 30 bp, Artificial Sequence
  Synthetic oligonucleotide
gggtatccttgttgcccaggaggccgaaca

SEQ ID NO: 325386 - DNA, 30 bp, Artificial Sequence
  Synthetic oligonucleotide
caactctcaataaaaaccatttatcgaaca

SEQ ID NO: 325387 - DNA, 30 bp, Artificial Sequence
  Synthetic oligonucleotide
gcaataattttaacgaactcatttcgaaca

SEQ ID NO: 325388 - DNA, 30 bp, Artificial Sequence
  Synthetic oligonucleotide
ttgtattggtataatgccacccgaggaaca

SEQ ID NO: 325389 - DNA, 30 bp, Artificial Sequence
  Synthetic oligonucleotide
ataccgcagagctggcttaaatacggaaca

SEQ ID NO: 325390 - DNA, 30 bp, Artificial Sequence
  Synthetic oligonucleotide
ttgatctctataagtcatgcctcgggaaca

SEQ ID NO: 325391 - DNA, 30 bp, Artificial Sequence
  Synthetic oligonucleotide
gcaatcccggaggtgcaacctaggggaaca

SEQ ID NO: 325392 - DNA, 30 bp, Artificial Sequence
  Synthetic oligonucleotide
gatcccagcttagaatgcaccgctggaaca

SEQ ID NO: 325393 - DNA, 30 bp, Artificial Sequence
  Synthetic oligonucleotide
gaatattccagatatgtaggaaaatgaaca

SEQ ID NO: 325394 - DNA, 30 bp, Artificial Sequence
  Synthetic oligonucleotide
ttcatgactgtgtccaagatcagatgaaca

SEQ ID NO: 325395 - DNA, 30 bp, Artificial Sequence
  Synthetic oligonucleotide
gggatgagcaggacattagacggctgaaca

SEQ ID NO: 325396 - DNA, 30 bp, Artificial Sequence
  Synthetic oligonucleotide
agggttggcggatatgattgtaggtgaaca

SEQ ID NO: 325397 - DNA, 30 bp, Artificial Sequence
  Synthetic oligonucleotide
atgcacaaattctgagatctctggtgaaca

SEQ ID NO: 325398 - DNA, 30 bp, Artificial Sequence
  Synthetic oligonucleotide
attgctcaccaactcactgggggttgaaca

SEQ ID NO: 325399 - DNA, 30 bp, Artificial Sequence
  Synthetic oligonucleotide
attaatcaactacaccataactgaataaca

SEQ ID NO: 325400 - DNA, 30 bp, Artificial Sequence
  Synthetic oligonucleotide
tgatgtcggacagagccctttgagataaca

SEQ ID NO: 325401 - DNA, 30 bp, Artificial Sequence
  Synthetic oligonucleotide
acaaattggttcagtagctacaggataaca

SEQ ID NO: 325402 - DNA, 30 bp, Artificial Sequence
  Synthetic oligonucleotide
acaacaacagcacactgcttgaggataaca

SEQ ID NO: 325403 - DNA, 30 bp, Artificial Sequence
  Synthetic oligonucleotide
gagatcccacggccctatatacgtataaca

SEQ ID NO: 325404 - DNA, 30 bp, Artificial Sequence
  Synthetic oligonucleotide
caggaccggaaacaggtaggggcactaaca

SEQ ID NO: 325405 - DNA, 29 bp, Artificial Sequence
  Synthetic oligonucleotide
accatattcttgcgcgaccgaacctaaca

SEQ ID NO: 325406 - DNA, 30 bp, Artificial Sequence
  Synthetic oligonucleotide
ctctctcacccttctggcacacacctaaca

SEQ ID NO: 325407 - DNA, 30 bp, Artificial Sequence
  Synthetic oligonucleotide
ggtagagcgggtggatgctgaaccctaaca

SEQ ID NO: 325408 - DNA, 30 bp, Artificial Sequence
  Synthetic oligonucleotide
gctacgtacgcattggaaacagccctaaca

SEQ ID NO: 325409 - DNA, 30 bp, Artificial Sequence
  Synthetic oligonucleotide
taatgctcccaggcatttgcctcgctaaca

SEQ ID NO: 325410 - DNA, 30 bp, Artificial Sequence
  Synthetic oligonucleotide
aggtagagcaacacaaagagttcgctaaca

SEQ ID NO: 325411 - DNA, 30 bp, Artificial Sequence
  Synthetic oligonucleotide
gatatatattttggagttatgctgctaaca

SEQ ID NO: 325412 - DNA, 30 bp, Artificial Sequence
  Synthetic oligonucleotide
tgacaccggctggccgctgcagaagtaaca

SEQ ID NO: 325413 - DNA, 30 bp, Artificial Sequence
  Synthetic oligonucleotide
aagactgagcattatggggcatgagtaaca

SEQ ID NO: 325414 - DNA, 30 bp, Artificial Sequence
  Synthetic oligonucleotide
tagtttaagattaatgcgaggatagtaaca

SEQ ID NO: 325415 - DNA, 30 bp, Artificial Sequence
  Synthetic oligonucleotide
tagactggtcatataactagatgcgtaaca

SEQ ID NO: 325416 - DNA, 30 bp, Artificial Sequence
  Synthetic oligonucleotide
tagtaggccattacgcccgcaggggtaaca

SEQ ID NO: 325417 - DNA, 30 bp, Artificial Sequence
  Synthetic oligonucleotide
ctgtattatgacgtaggcgcgactgtaaca

SEQ ID NO: 325418 - DNA, 30 bp, Artificial Sequence
  Synthetic oligonucleotide
agcctgcttggcaggacaaatgaattaaca

SEQ ID NO: 325419 - DNA, 30 bp, Artificial Sequence
  Synthetic oligonucleotide
gctctgaagtctgatctatggccattaaca

SEQ ID NO: 325420 - DNA, 30 bp, Artificial Sequence
  Synthetic oligonucleotide
cgtggtagttggccctgatgagcattaaca

SEQ ID NO: 325421 - DNA, 30 bp, Artificial Sequence
  Synthetic oligonucleotide
ttagatctaggttcactcgtgcgattaaca

SEQ ID NO: 325422 - DNA, 30 bp, Artificial Sequence
  Synthetic oligonucleotide
cactcgactctttgattgttcaacttaaca

SEQ ID NO: 325423 - DNA, 30 bp, Artificial Sequence
  Synthetic oligonucleotide
tgcttatatcgcttgcaatgggagttaaca

SEQ ID NO: 325424 - DNA, 30 bp, Artificial Sequence
  Synthetic oligonucleotide
aagtacagagcaaaatgagtcacgttaaca

SEQ ID NO: 325425 - DNA, 30 bp, Artificial Sequence
  Synthetic oligonucleotide
ttccatacagatcaatctgcaccgttaaca

SEQ ID NO: 325426 - DNA, 30 bp, Artificial Sequence
  Synthetic oligonucleotide
gagaacgtctatagagcaggaaggttaaca

SEQ ID NO: 325427 - DNA, 30 bp, Artificial Sequence
  Synthetic oligonucleotide
ataaaccgcatccatcttgttactttaaca

SEQ ID NO: 325428 - DNA, 30 bp, Artificial Sequence
  Synthetic oligonucleotide
gggctcgtataagcagtcatgcaaaacaca

SEQ ID NO: 325429 - DNA, 30 bp, Artificial Sequence
  Synthetic oligonucleotide
aaaacgcaaaatggatactaaacaaacaca

SEQ ID NO: 325430 - DNA, 30 bp, Artificial Sequence
  Synthetic oligonucleotide
gtgattgttatcgtagaaaggtggaacaca

SEQ ID NO: 325431 - DNA, 30 bp, Artificial Sequence
  Synthetic oligonucleotide
gcacacgaatctgccccctagacgcacaca

SEQ ID NO: 325432 - DNA, 30 bp, Artificial Sequence
  Synthetic oligonucleotide
accatcgattaagagggttgttcgcacaca

SEQ ID NO: 325433 - DNA, 30 bp, Artificial Sequence
  Synthetic oligonucleotide
agtaacagggaagtgcaggatctgcacaca

SEQ ID NO: 325434 - DNA, 30 bp, Artificial Sequence
  Synthetic oligonucleotide
gagtctgcagggccctaggaatgcgacaca

SEQ ID NO: 325435 - DNA, 30 bp, Artificial Sequence
  Synthetic oligonucleotide
ttggatgctggtacatcactgaaggacaca

SEQ ID NO: 325436 - DNA, 30 bp, Artificial Sequence
  Synthetic oligonucleotide
aagactaatgtctggtgcgtaatggacaca

SEQ ID NO: 325437 - DNA, 30 bp, Artificial Sequence
  Synthetic oligonucleotide
ggactaggaaccttagggtctcatgacaca

SEQ ID NO: 325438 - DNA, 30 bp, Artificial Sequence
  Synthetic oligonucleotide
gatcttaggtagtatgaagcggctgacaca

SEQ ID NO: 325439 - DNA, 30 bp, Artificial Sequence
  Synthetic oligonucleotide
gtgaagtgtatgaaatgaggtatatacaca

SEQ ID NO: 325440 - DNA, 30 bp, Artificial Sequence
  Synthetic oligonucleotide
cctattttcatgttccgaaacggctacaca

SEQ ID NO: 325441 - DNA, 30 bp, Artificial Sequence
  Synthetic oligonucleotide
acattgtccctagtgattgctttctacaca

SEQ ID NO: 325442 - DNA, 30 bp, Artificial Sequence
  Synthetic oligonucleotide
tctgcagtagaatatccccgccagtacaca

SEQ ID NO: 325443 - DNA, 30 bp, Artificial Sequence
  Synthetic oligonucleotide
gagacattcaagctgttattttagtacaca

SEQ ID NO: 325444 - DNA, 30 bp, Artificial Sequence
  Synthetic oligonucleotide
cacggccgcgtattttcgaagaggtacaca

SEQ ID NO: 325445 - DNA, 30 bp, Artificial Sequence
  Synthetic oligonucleotide
ggcctacttcgaacgtcgttcatgtacaca

SEQ ID NO: 325446 - DNA, 30 bp, Artificial Sequence
  Synthetic oligonucleotide
aggcaatcgtttatgccgacacgttacaca

SEQ ID NO: 325447 - DNA, 30 bp, Artificial Sequence
  Synthetic oligonucleotide
gtggtgtatggaccggatgtaatttacaca

SEQ ID NO: 325448 - DNA, 30 bp, Artificial Sequence
  Synthetic oligonucleotide
gcaggtaagatttgaccttagccaaccaca

SEQ ID NO: 325449 - DNA, 30 bp, Artificial Sequence
  Synthetic oligonucleotide
cattttgttgaaggccgcgtaccgaccaca

SEQ ID NO: 325450 - DNA, 30 bp, Artificial Sequence
  Synthetic oligonucleotide
gtaatataggcccagctgactatgaccaca

SEQ ID NO: 325451 - DNA, 30 bp, Artificial Sequence
  Synthetic oligonucleotide
cccgggacctccaagatgcgtggacccaca

SEQ ID NO: 325452 - DNA, 30 bp, Artificial Sequence
  Synthetic oligonucleotide
acatgtgagtaacagagaattttacccaca

SEQ ID NO: 325453 - DNA, 30 bp, Artificial Sequence
  Synthetic oligonucleotide
cgacgtatgtcgcggcgaggtctccccaca

SEQ ID NO: 325454 - DNA, 30 bp, Artificial Sequence
  Synthetic oligonucleotide
gactgattcagtatcccagcagggcccaca

SEQ ID NO: 325455 - DNA, 30 bp, Artificial Sequence
  Synthetic oligonucleotide
tccttgcattctaaacgtttatctcccaca

SEQ ID NO: 325456 - DNA, 29 bp, Artificial Sequence
  Synthetic oligonucleotide
gagggttttagttcactttaccagccaca

SEQ ID NO: 325457 - DNA, 30 bp, Artificial Sequence
  Synthetic oligonucleotide
tgctccttgattaacgaaccgctagccaca

SEQ ID NO: 325458 - DNA, 30 bp, Artificial Sequence
  Synthetic oligonucleotide
ataaagttacggctaggtccagtagccaca

SEQ ID NO: 325459 - DNA, 30 bp, Artificial Sequence
  Synthetic oligonucleotide
ccgctcagtggttcgattccagtagccaca

SEQ ID NO: 325460 - DNA, 30 bp, Artificial Sequence
  Synthetic oligonucleotide
tcgagctcgacgaagccagactacgccaca

SEQ ID NO: 325461 - DNA, 30 bp, Artificial Sequence
  Synthetic oligonucleotide
agtagttttttgaatatataagtggccaca

SEQ ID NO: 325462 - DNA, 30 bp, Artificial Sequence
  Synthetic oligonucleotide
cctattgcgggtgcaggtgctcctgccaca

SEQ ID NO: 325463 - DNA, 30 bp, Artificial Sequence
  Synthetic oligonucleotide
acgggggtctagatttacaattctgccaca

SEQ ID NO: 325464 - DNA, 30 bp, Artificial Sequence
  Synthetic oligonucleotide
cgcagttgcttcccccaagttgactccaca

SEQ ID NO: 325465 - DNA, 30 bp, Artificial Sequence
  Synthetic oligonucleotide
agcgttttgagatgagtgtgcgtctccaca

SEQ ID NO: 325466 - DNA, 30 bp, Artificial Sequence
  Synthetic oligonucleotide
tataagaacgggctatcaagtaaaagcaca

SEQ ID NO: 325467 - DNA, 30 bp, Artificial Sequence
  Synthetic oligonucleotide
tggtgcccccactgtcttctccgcagcaca

SEQ ID NO: 325468 - DNA, 30 bp, Artificial Sequence
  Synthetic oligonucleotide
ctgatgcaaatgaccgggtggtgcagcaca

SEQ ID NO: 325469 - DNA, 30 bp, Artificial Sequence
  Synthetic oligonucleotide
gtaattcgaattggcatgcttatcagcaca

SEQ ID NO: 325470 - DNA, 30 bp, Artificial Sequence
  Synthetic oligonucleotide
gtaccttttggtcgaaagtatgtcagcaca

SEQ ID NO: 325471 - DNA, 30 bp, Artificial Sequence
  Synthetic oligonucleotide
gtaaaaaattataaatttcttgagagcaca

SEQ ID NO: 325472 - DNA, 30 bp, Artificial Sequence
  Synthetic oligonucleotide
aggtatccctatcttataattttgagcaca

SEQ ID NO: 325473 - DNA, 29 bp, Artificial Sequence
  Synthetic oligonucleotide
tgcggacatggaagagatgaaatagcaca

SEQ ID NO: 325474 - DNA, 30 bp, Artificial Sequence
  Synthetic oligonucleotide
tgatgtattacgcgcgcattgactagcaca

SEQ ID NO: 325475 - DNA, 30 bp, Artificial Sequence
  Synthetic oligonucleotide
cctaacaaggttagtttttgcgctagcaca

SEQ ID NO: 325476 - DNA, 30 bp, Artificial Sequence
  Synthetic oligonucleotide
ctgataacgtcttcacttcagcttagcaca

SEQ ID NO: 325477 - DNA, 30 bp, Artificial Sequence
  Synthetic oligonucleotide
ccacatttaatgtcagtgccagttagcaca

SEQ ID NO: 325478 - DNA, 31 bp, Artificial Sequence
  Synthetic oligonucleotide
cgagaccctactacaccgtgagttacgcaca

SEQ ID NO: 325479 - DNA, 30 bp, Artificial Sequence
  Synthetic oligonucleotide
tgggcacgccgaactccattcgcccgcaca

SEQ ID NO: 325480 - DNA, 30 bp, Artificial Sequence
  Synthetic oligonucleotide
atgaggcggctaaggttgactatccgcaca

SEQ ID NO: 325481 - DNA, 30 bp, Artificial Sequence
  Synthetic oligonucleotide
gtacagacacaacgctattatctccgcaca

SEQ ID NO: 325482 - DNA, 30 bp, Artificial Sequence
  Synthetic oligonucleotide
gaaggataaccggactagatgtagcgcaca

SEQ ID NO: 325483 - DNA, 30 bp, Artificial Sequence
  Synthetic oligonucleotide
tagatccatgagggtcattacaggcgcaca

SEQ ID NO: 325484 - DNA, 30 bp, Artificial Sequence
  Synthetic oligonucleotide
ttggatgcgtttctggggtcaaatcgcaca

SEQ ID NO: 325485 - DNA, 30 bp, Artificial Sequence
  Synthetic oligonucleotide
aagaccacgggtacaagtgctgctcgcaca

SEQ ID NO: 325486 - DNA, 30 bp, Artificial Sequence
  Synthetic oligonucleotide
cactaataacttgcttgttactttcgcaca

SEQ ID NO: 325487 - DNA, 30 bp, Artificial Sequence
  Synthetic oligonucleotide
gtggataattcattgagcaatccaggcaca

SEQ ID NO: 325488 - DNA, 30 bp, Artificial Sequence
  Synthetic oligonucleotide
gattggcaagatcccaaccggataggcaca

SEQ ID NO: 325489 - DNA, 30 bp, Artificial Sequence
  Synthetic oligonucleotide
tattatctatctgtggctgcagagggcaca

SEQ ID NO: 325490 - DNA, 30 bp, Artificial Sequence
  Synthetic oligonucleotide
caattttaacgaattttgtgagatggcaca

SEQ ID NO: 325491 - DNA, 30 bp, Artificial Sequence
  Synthetic oligonucleotide
ttgtaaagtctggtgattttttatggcaca

SEQ ID NO: 325492 - DNA, 30 bp, Artificial Sequence
  Synthetic oligonucleotide
gttaacagacgggcatatagggctggcaca

SEQ ID NO: 325493 - DNA, 30 bp, Artificial Sequence
  Synthetic oligonucleotide
tgttcggatcactcgggcgagcgatgcaca

SEQ ID NO: 325494 - DNA, 30 bp, Artificial Sequence
  Synthetic oligonucleotide
ctccgcccacacatggggccgatatgcaca

SEQ ID NO: 325495 - DNA, 30 bp, Artificial Sequence
  Synthetic oligonucleotide
taccgggaatttatctgctttatatgcaca

SEQ ID NO: 325496 - DNA, 30 bp, Artificial Sequence
  Synthetic oligonucleotide
taaatacatagtctaagggaaccctgcaca

SEQ ID NO: 325497 - DNA, 30 bp, Artificial Sequence
  Synthetic oligonucleotide
gtatatgcacggttttcccaaacgtgcaca

SEQ ID NO: 325498 - DNA, 30 bp, Artificial Sequence
  Synthetic oligonucleotide
ggataaattaatgggtccgacagttgcaca

SEQ ID NO: 325499 - DNA, 30 bp, Artificial Sequence
  Synthetic oligonucleotide
gctaaagcagcttccgcccttagaatcaca

SEQ ID NO: 325500 - DNA, 30 bp, Artificial Sequence
  Synthetic oligonucleotide
cttctacttacgactccatgactcatcaca

SEQ ID NO: 325501 - DNA, 30 bp, Artificial Sequence
  Synthetic oligonucleotide
ggtaagcttcggcaagttagattcatcaca

SEQ ID NO: 325502 - DNA, 30 bp, Artificial Sequence
  Synthetic oligonucleotide
gaccttcggacataactgaacgagatcaca

SEQ ID NO: 325503 - DNA, 30 bp, Artificial Sequence
  Synthetic oligonucleotide
ttcatagggaatacgcggtgaaggatcaca

SEQ ID NO: 325504 - DNA, 30 bp, Artificial Sequence
  Synthetic oligonucleotide
gtcattatttgtagacaatgggtgatcaca

SEQ ID NO: 325505 - DNA, 30 bp, Artificial Sequence
  Synthetic oligonucleotide
ctgctaaaactcgtcacgtacacactcaca

SEQ ID NO: 325506 - DNA, 30 bp, Artificial Sequence
  Synthetic oligonucleotide
ttcaacgaccttaccacgtaggtactcaca

SEQ ID NO: 325507 - DNA, 30 bp, Artificial Sequence
  Synthetic oligonucleotide
tcccctgagatcataaagtctgtactcaca

SEQ ID NO: 325508 - DNA, 30 bp, Artificial Sequence
  Synthetic oligonucleotide
cagacgctacccatgggtagatacctcaca

SEQ ID NO: 325509 - DNA, 30 bp, Artificial Sequence
  Synthetic oligonucleotide
ttgaagattatagcagcgcggctcctcaca

SEQ ID NO: 325510 - DNA, 30 bp, Artificial Sequence
  Synthetic oligonucleotide
tttaccgaaacttttctactgagtctcaca

SEQ ID NO: 325511 - DNA, 30 bp, Artificial Sequence
  Synthetic oligonucleotide
ccaggctgagtaatcacctgtggagtcaca

SEQ ID NO: 325512 - DNA, 30 bp, Artificial Sequence
  Synthetic oligonucleotide
tttagggaccgaacaggttctcccgtcaca

SEQ ID NO: 325513 - DNA, 30 bp, Artificial Sequence
  Synthetic oligonucleotide
ggagggttgctgttgcacgggatcgtcaca

SEQ ID NO: 325514 - DNA, 30 bp, Artificial Sequence
  Synthetic oligonucleotide
gagggaacgcaaattaacacggtcgtcaca

SEQ ID NO: 325515 - DNA, 30 bp, Artificial Sequence
  Synthetic oligonucleotide
ttgctaggcgactgtgtagtcttcgtcaca

SEQ ID NO: 325516 - DNA, 30 bp, Artificial Sequence
  Synthetic oligonucleotide
ggcttccgggcacccctatcttaggtcaca

SEQ ID NO: 325517 - DNA, 30 bp, Artificial Sequence
  Synthetic oligonucleotide
tggagttaacgcttggggtcgcgggtcaca

SEQ ID NO: 325518 - DNA, 30 bp, Artificial Sequence
  Synthetic oligonucleotide
tgtccttggtggattattcaacaattcaca

SEQ ID NO: 325519 - DNA, 30 bp, Artificial Sequence
  Synthetic oligonucleotide
ttaaaatcccaccgaactcggaccttcaca

SEQ ID NO: 325520 - DNA, 30 bp, Artificial Sequence
  Synthetic oligonucleotide
tgttattagggatgaaagtgaaggttcaca

SEQ ID NO: 325521 - DNA, 30 bp, Artificial Sequence
  Synthetic oligonucleotide
tatgcacttgggataccaacgactttcaca

SEQ ID NO: 325522 - DNA, 30 bp, Artificial Sequence
  Synthetic oligonucleotide
actggctagcggagggatagagttttcaca

SEQ ID NO: 325523 - DNA, 30 bp, Artificial Sequence
  Synthetic oligonucleotide
gagattaagtggcgtttgccacacaagaca

SEQ ID NO: 325524 - DNA, 30 bp, Artificial Sequence
  Synthetic oligonucleotide
ggtaggttctatctgacggtcgtgaagaca

SEQ ID NO: 325525 - DNA, 30 bp, Artificial Sequence
  Synthetic oligonucleotide
aaatgagagaacgctcccatcgcccagaca

SEQ ID NO: 325526 - DNA, 30 bp, Artificial Sequence
  Synthetic oligonucleotide
gtatctgctcacgccaatcgtaagcagaca

SEQ ID NO: 325527 - DNA, 30 bp, Artificial Sequence
  Synthetic oligonucleotide
taatagatgcaggagaaccgcacgcagaca

SEQ ID NO: 325528 - DNA, 30 bp, Artificial Sequence
  Synthetic oligonucleotide
ataaatggaggctcagcacggccgcagaca

SEQ ID NO: 325529 - DNA, 30 bp, Artificial Sequence
  Synthetic oligonucleotide
taatgtataaacgaaaccgcggttcagaca

SEQ ID NO: 325530 - DNA, 30 bp, Artificial Sequence
  Synthetic oligonucleotide
aggggtaaccaggctacctataaagagaca

SEQ ID NO: 325531 - DNA, 30 bp, Artificial Sequence
  Synthetic oligonucleotide
taagatgttatttgtacccacagagagaca

SEQ ID NO: 325532 - DNA, 30 bp, Artificial Sequence
  Synthetic oligonucleotide
aggcaagagcatgacgcccagcaggagaca

SEQ ID NO: 325533 - DNA, 30 bp, Artificial Sequence
  Synthetic oligonucleotide
caacggctcctcgggccaaatcgggagaca

SEQ ID NO: 325534 - DNA, 30 bp, Artificial Sequence
  Synthetic oligonucleotide
gctgctgagactatatctccagtggagaca

SEQ ID NO: 325535 - DNA, 30 bp, Artificial Sequence
  Synthetic oligonucleotide
ctcgcataggacgtaatggtaaatgagaca

SEQ ID NO: 325536 - DNA, 30 bp, Artificial Sequence
  Synthetic oligonucleotide
gtgagctcattactccggggaaaatagaca

SEQ ID NO: 325537 - DNA, 30 bp, Artificial Sequence
  Synthetic oligonucleotide
cctcatagatagtgaatagttgactagaca

SEQ ID NO: 325538 - DNA, 30 bp, Artificial Sequence
  Synthetic oligonucleotide
aatagtcagtcggtttttggtccctagaca

SEQ ID NO: 325539 - DNA, 30 bp, Artificial Sequence
  Synthetic oligonucleotide
ttcgggctcggtcaagcggtccgctagaca

SEQ ID NO: 325540 - DNA, 30 bp, Artificial Sequence
  Synthetic oligonucleotide
tggggtagagacgtatcaaagttctagaca

SEQ ID NO: 325541 - DNA, 30 bp, Artificial Sequence
  Synthetic oligonucleotide
tcacacttccggttacacgattcgtagaca

SEQ ID NO: 325542 - DNA, 30 bp, Artificial Sequence
  Synthetic oligonucleotide
cctcgtgctgtgctcacgagcgggtagaca

SEQ ID NO: 325543 - DNA, 30 bp, Artificial Sequence
  Synthetic oligonucleotide
atgtgatcggcatcgaaatgtgtgtagaca

SEQ ID NO: 325544 - DNA, 30 bp, Artificial Sequence
  Synthetic oligonucleotide
gagacgttaagacataccgatcgaacgaca

SEQ ID NO: 325545 - DNA, 30 bp, Artificial Sequence
  Synthetic oligonucleotide
tccacccggcgctgacattgccacacgaca

SEQ ID NO: 325546 - DNA, 30 bp, Artificial Sequence
  Synthetic oligonucleotide
ttgacggcatactagtcctatcgcacgaca

SEQ ID NO: 325547 - DNA, 30 bp, Artificial Sequence
  Synthetic oligonucleotide
ctcctcgaccgtattagcgcagttacgaca

SEQ ID NO: 325548 - DNA, 30 bp, Artificial Sequence
  Synthetic oligonucleotide
ggtagtacgcttcgagtggacccaccgaca

SEQ ID NO: 325549 - DNA, 30 bp, Artificial Sequence
  Synthetic oligonucleotide
ctcttaggccgatccaaactactaccgaca

SEQ ID NO: 325550 - DNA, 30 bp, Artificial Sequence
  Synthetic oligonucleotide
ttttggttaaagtcagcatctgcgccgaca

SEQ ID NO: 325551 - DNA, 30 bp, Artificial Sequence
  Synthetic oligonucleotide
ccagatctttgctcccacttgggtccgaca

SEQ ID NO: 325552 - DNA, 30 bp, Artificial Sequence
  Synthetic oligonucleotide
gatgttatgggcatgtattgctttccgaca

SEQ ID NO: 325553 - DNA, 30 bp, Artificial Sequence
  Synthetic oligonucleotide
gcatgcgccagcggtgtttgtcaagcgaca

SEQ ID NO: 325554 - DNA, 30 bp, Artificial Sequence
  Synthetic oligonucleotide
taggtgatcggttttaggagtctagcgaca

SEQ ID NO: 325555 - DNA, 30 bp, Artificial Sequence
  Synthetic oligonucleotide
gccattcgcggccaacggctctccgcgaca

SEQ ID NO: 325556 - DNA, 30 bp, Artificial Sequence
  Synthetic oligonucleotide
caccctacatatctggaacggtgcgcgaca

SEQ ID NO: 325557 - DNA, 30 bp, Artificial Sequence
  Synthetic oligonucleotide
ttttcacatcagaaggataggacggcgaca

SEQ ID NO: 325558 - DNA, 30 bp, Artificial Sequence
  Synthetic oligonucleotide
aaacaacagatggtccgatcatatgcgaca

SEQ ID NO: 325559 - DNA, 31 bp, Artificial Sequence
  Synthetic oligonucleotide
ggatttcgagcacacaggccaaccctcgaca

SEQ ID NO: 325560 - DNA, 30 bp, Artificial Sequence
  Synthetic oligonucleotide
ggaggcccggcgcatcggatttgttcgaca

SEQ ID NO: 325561 - DNA, 30 bp, Artificial Sequence
  Synthetic oligonucleotide
agctggacgattccgatatgcataaggaca

SEQ ID NO: 325562 - DNA, 30 bp, Artificial Sequence
  Synthetic oligonucleotide
ggttccacctacacccctgggataaggaca

SEQ ID NO: 325563 - DNA, 30 bp, Artificial Sequence
  Synthetic oligonucleotide
gcccccctacccgtaaggggagtaaggaca

SEQ ID NO: 325564 - DNA, 30 bp, Artificial Sequence
  Synthetic oligonucleotide
ttccagacaccgctgaggtcagccaggaca

SEQ ID NO: 325565 - DNA, 30 bp, Artificial Sequence
  Synthetic oligonucleotide
cgtgggtcggacttacgggtatccaggaca

SEQ ID NO: 325566 - DNA, 30 bp, Artificial Sequence
  Synthetic oligonucleotide
cctaaattttccgcagactacagcaggaca

SEQ ID NO: 325567 - DNA, 30 bp, Artificial Sequence
  Synthetic oligonucleotide
ggcttaagtgtccgcacgttagtcaggaca

SEQ ID NO: 325568 - DNA, 30 bp, Artificial Sequence
  Synthetic oligonucleotide
tggatagggtagaggcagtgtacgaggaca

SEQ ID NO: 325569 - DNA, 30 bp, Artificial Sequence
  Synthetic oligonucleotide
gtgcaacctctcataggctaatataggaca

SEQ ID NO: 325570 - DNA, 31 bp, Artificial Sequence
  Synthetic oligonucleotide
tgccagggcccatggcaatggtagtaggaca

SEQ ID NO: 325571 - DNA, 30 bp, Artificial Sequence
  Synthetic oligonucleotide
tactgctaaaaattagctttccgtaggaca

SEQ ID NO: 325572 - DNA, 30 bp, Artificial Sequence
  Synthetic oligonucleotide
atagtcgtgttattgccgcgatgtaggaca

SEQ ID NO: 325573 - DNA, 30 bp, Artificial Sequence
  Synthetic oligonucleotide
acgctccgagctattcacccaattaggaca

SEQ ID NO: 325574 - DNA, 30 bp, Artificial Sequence
  Synthetic oligonucleotide
tgttgctgggctatcggagcaattaggaca

SEQ ID NO: 325575 - DNA, 30 bp, Artificial Sequence
  Synthetic oligonucleotide
ggaaaatgtctattttcctataaacggaca

SEQ ID NO: 325576 - DNA, 30 bp, Artificial Sequence
  Synthetic oligonucleotide
ttgagggaagcagagcgttctcaacggaca

SEQ ID NO: 325577 - DNA, 30 bp, Artificial Sequence
  Synthetic oligonucleotide
tgttacaggtaaaatgtcctggaacggaca

SEQ ID NO: 325578 - DNA, 30 bp, Artificial Sequence
  Synthetic oligonucleotide
gctttcagatgtctaacaggtgaacggaca

SEQ ID NO: 325579 - DNA, 30 bp, Artificial Sequence
  Synthetic oligonucleotide
gactgacgtcgacatctatagagacggaca

SEQ ID NO: 325580 - DNA, 30 bp, Artificial Sequence
  Synthetic oligonucleotide
caggtcccgactcacatcgtccatcggaca

SEQ ID NO: 325581 - DNA, 30 bp, Artificial Sequence
  Synthetic oligonucleotide
accacaggtgatgttacgagtgctcggaca

SEQ ID NO: 325582 - DNA, 30 bp, Artificial Sequence
  Synthetic oligonucleotide
tagcaactgtcagtcctagtgggtcggaca

SEQ ID NO: 325583 - DNA, 30 bp, Artificial Sequence
  Synthetic oligonucleotide
agaggaaagagctccgtgacgcgagggaca

SEQ ID NO: 325584 - DNA, 30 bp, Artificial Sequence
  Synthetic oligonucleotide
taattctgatgcactcgggcatctgggaca

SEQ ID NO: 325585 - DNA, 30 bp, Artificial Sequence
  Synthetic oligonucleotide
atgggccgtgaaacttgtcttaggtggaca

SEQ ID NO: 325586 - DNA, 30 bp, Artificial Sequence
  Synthetic oligonucleotide
cgctcgagttgattgatatacgtttggaca

SEQ ID NO: 325587 - DNA, 30 bp, Artificial Sequence
  Synthetic oligonucleotide
tcggcgggcacatgcgccgaattttggaca

SEQ ID NO: 325588 - DNA, 30 bp, Artificial Sequence
  Synthetic oligonucleotide
aaaccattattcaattaaataagaatgaca

SEQ ID NO: 325589 - DNA, 30 bp, Artificial Sequence
  Synthetic oligonucleotide
gtgccagtggcttctggtgcagtaatgaca

SEQ ID NO: 325590 - DNA, 30 bp, Artificial Sequence
  Synthetic oligonucleotide
agttgtaaatgtccaacataggccatgaca

SEQ ID NO: 325591 - DNA, 30 bp, Artificial Sequence
  Synthetic oligonucleotide
tgtaataagaaatgacggcggttcatgaca

SEQ ID NO: 325592 - DNA, 30 bp, Artificial Sequence
  Synthetic oligonucleotide
gttttgaaatggtgagacgttgggatgaca

SEQ ID NO: 325593 - DNA, 30 bp, Artificial Sequence
  Synthetic oligonucleotide
agcatgtagtgaactcctaggaatatgaca

SEQ ID NO: 325594 - DNA, 30 bp, Artificial Sequence
  Synthetic oligonucleotide
ggaacagaaactttgagcgctactatgaca

SEQ ID NO: 325595 - DNA, 30 bp, Artificial Sequence
  Synthetic oligonucleotide
agtaagctcacatgggtagttggtatgaca

SEQ ID NO: 325596 - DNA, 30 bp, Artificial Sequence
  Synthetic oligonucleotide
taaaaacgatcctctaggaggtgtatgaca

SEQ ID NO: 325597 - DNA, 30 bp, Artificial Sequence
  Synthetic oligonucleotide
aaggttttaccgtcattctgtccactgaca

SEQ ID NO: 325598 - DNA, 31 bp, Artificial Sequence
  Synthetic oligonucleotide
aacaaggtatccgaacattaagtgactgaca

SEQ ID NO: 325599 - DNA, 30 bp, Artificial Sequence
  Synthetic oligonucleotide
atcttgtggcttgcggtgtgtgtactgaca

SEQ ID NO: 325600 - DNA, 30 bp, Artificial Sequence
  Synthetic oligonucleotide
ataaaggcctaagttcattccgtcctgaca

SEQ ID NO: 325601 - DNA, 30 bp, Artificial Sequence
  Synthetic oligonucleotide
agtaaaaatttagtcacacccttcctgaca

SEQ ID NO: 325602 - DNA, 30 bp, Artificial Sequence
  Synthetic oligonucleotide
cctctgccatggcccgaattcacgctgaca

SEQ ID NO: 325603 - DNA, 30 bp, Artificial Sequence
  Synthetic oligonucleotide
tatcctgctcgcatctaacggcctctgaca

SEQ ID NO: 325604 - DNA, 30 bp, Artificial Sequence
  Synthetic oligonucleotide
tgtgctgctctctctcttgtgcgagtgaca

SEQ ID NO: 325605 - DNA, 30 bp, Artificial Sequence
  Synthetic oligonucleotide
tttacatagaggatgcatgggtccgtgaca

SEQ ID NO: 325606 - DNA, 30 bp, Artificial Sequence
  Synthetic oligonucleotide
tgattgatgggtttgtgaaatcttgtgaca

SEQ ID NO: 325607 - DNA, 30 bp, Artificial Sequence
  Synthetic oligonucleotide
tgtggagtcctcggaataactggattgaca

SEQ ID NO: 325608 - DNA, 30 bp, Artificial Sequence
  Synthetic oligonucleotide
cgatgccacggtaatcccatggtattgaca

SEQ ID NO: 325609 - DNA, 30 bp, Artificial Sequence
  Synthetic oligonucleotide
cttaagaatggtggcccttcacacttgaca

SEQ ID NO: 325610 - DNA, 30 bp, Artificial Sequence
  Synthetic oligonucleotide
agtatcgtacgataggggcaatccttgaca

SEQ ID NO: 325611 - DNA, 30 bp, Artificial Sequence
  Synthetic oligonucleotide
ggcgtaagtaatatcggggctgtcttgaca

SEQ ID NO: 325612 - DNA, 30 bp, Artificial Sequence
  Synthetic oligonucleotide
tatacaacagttaagccaacacatttgaca

SEQ ID NO: 325613 - DNA, 30 bp, Artificial Sequence
  Synthetic oligonucleotide
tgttgatcgacgtaaggcgctactttgaca

SEQ ID NO: 325614 - DNA, 30 bp, Artificial Sequence
  Synthetic oligonucleotide
gccaacctgttcgaattgtgtcgtttgaca

SEQ ID NO: 325615 - DNA, 30 bp, Artificial Sequence
  Synthetic oligonucleotide
cgatgcttttttcgaagcgcaacaaataca

SEQ ID NO: 325616 - DNA, 30 bp, Artificial Sequence
  Synthetic oligonucleotide
ggtggaacgccatggtattggtacaataca

SEQ ID NO: 325617 - DNA, 30 bp, Artificial Sequence
  Synthetic oligonucleotide
tagattgacttagcgcctcgagccaataca

SEQ ID NO: 325618 - DNA, 30 bp, Artificial Sequence
  Synthetic oligonucleotide
cccgcggaatccgtaggagatcgcaataca

SEQ ID NO: 325619 - DNA, 30 bp, Artificial Sequence
  Synthetic oligonucleotide
cggggtgtagtatgatatttgctcaataca

SEQ ID NO: 325620 - DNA, 30 bp, Artificial Sequence
  Synthetic oligonucleotide
tccaatatgaaacttatagcagtcaataca

SEQ ID NO: 325621 - DNA, 30 bp, Artificial Sequence
  Synthetic oligonucleotide
actttatgtaccaacaggtagaagaataca

SEQ ID NO: 325622 - DNA, 30 bp, Artificial Sequence
  Synthetic oligonucleotide
ctgacgaacaatcccccagattagaataca

SEQ ID NO: 325623 - DNA, 30 bp, Artificial Sequence
  Synthetic oligonucleotide
cacggccatctgccacgcttaaggaataca

SEQ ID NO: 325624 - DNA, 30 bp, Artificial Sequence
  Synthetic oligonucleotide
tattccacttgtataggagagaggaataca

SEQ ID NO: 325625 - DNA, 30 bp, Artificial Sequence
  Synthetic oligonucleotide
taagacgaccgatcatctgcggggaataca

SEQ ID NO: 325626 - DNA, 30 bp, Artificial Sequence
  Synthetic oligonucleotide
gttccataactatggtagcccatgaataca

SEQ ID NO: 325627 - DNA, 30 bp, Artificial Sequence
  Synthetic oligonucleotide
tcggttcaacgttcctggattagtaataca

SEQ ID NO: 325628 - DNA, 30 bp, Artificial Sequence
  Synthetic oligonucleotide
ctctattgagttggaaaagctattaataca

SEQ ID NO: 325629 - DNA, 30 bp, Artificial Sequence
  Synthetic oligonucleotide
caagaattcagttgtggaattcaacataca

SEQ ID NO: 325630 - DNA, 30 bp, Artificial Sequence
  Synthetic oligonucleotide
tggatatgcgcggaggcaacgccacataca

SEQ ID NO: 325631 - DNA, 30 bp, Artificial Sequence
  Synthetic oligonucleotide
aaccaaatatgtagtaatggcagacataca

SEQ ID NO: 325632 - DNA, 30 bp, Artificial Sequence
  Synthetic oligonucleotide
ccactttagtagatcgagaggtgccataca

SEQ ID NO: 325633 - DNA, 30 bp, Artificial Sequence
  Synthetic oligonucleotide
tagagctaggttcaagaaatgatccataca

SEQ ID NO: 325634 - DNA, 30 bp, Artificial Sequence
  Synthetic oligonucleotide
cgctgttccagccgctccttagtccataca

SEQ ID NO: 325635 - DNA, 30 bp, Artificial Sequence
  Synthetic oligonucleotide
gtttcgtgaatggtttaaggattccataca

SEQ ID NO: 325636 - DNA, 32 bp, Artificial Sequence
  Synthetic oligonucleotide
tctcatgacgtactaaatagctatggcataca

SEQ ID NO: 325637 - DNA, 30 bp, Artificial Sequence
  Synthetic oligonucleotide
ctcgtgtttggacggccattcactcataca

SEQ ID NO: 325638 - DNA, 30 bp, Artificial Sequence
  Synthetic oligonucleotide
aatgcaagcttacttcttttggttcataca

SEQ ID NO: 325639 - DNA, 30 bp, Artificial Sequence
  Synthetic oligonucleotide
agtcaaattgataattcaatcaaagataca

SEQ ID NO: 325640 - DNA, 30 bp, Artificial Sequence
  Synthetic oligonucleotide
gagcgttgatgtacccgcctgcacgataca

SEQ ID NO: 325641 - DNA, 30 bp, Artificial Sequence
  Synthetic oligonucleotide
tcgtaactgctacgctacaagggcgataca

SEQ ID NO: 325642 - DNA, 30 bp, Artificial Sequence
  Synthetic oligonucleotide
catgatcacgtgctgggcgctctcgataca

SEQ ID NO: 325643 - DNA, 25 bp, Artificial Sequence
  Synthetic oligonucleotide
ggattaagtcgacgtgagggataca

SEQ ID NO: 325644 - DNA, 30 bp, Artificial Sequence
  Synthetic oligonucleotide
caccctgatcccttgcgggatggggataca

SEQ ID NO: 325645 - DNA, 30 bp, Artificial Sequence
  Synthetic oligonucleotide
ttatcctcaaatagcggtagaaaatataca

SEQ ID NO: 325646 - DNA, 30 bp, Artificial Sequence
  Synthetic oligonucleotide
ggcggcttgaaaaaagcctcgacatataca

SEQ ID NO: 325647 - DNA, 30 bp, Artificial Sequence
  Synthetic oligonucleotide
aataacttttgcataagactgctctataca

SEQ ID NO: 325648 - DNA, 30 bp, Artificial Sequence
  Synthetic oligonucleotide
cgtttgacagtccctgtttaaccgtataca

SEQ ID NO: 325649 - DNA, 30 bp, Artificial Sequence
  Synthetic oligonucleotide
taacagtaatggaggagcctaatttataca

SEQ ID NO: 325650 - DNA, 30 bp, Artificial Sequence
  Synthetic oligonucleotide
ggatcggaattgacgaggttattttataca

SEQ ID NO: 325651 - DNA, 30 bp, Artificial Sequence
  Synthetic oligonucleotide
tggatgattaacagtactaacttttataca

SEQ ID NO: 325652 - DNA, 30 bp, Artificial Sequence
  Synthetic oligonucleotide
tgcaagccctcccatggacagtaaactaca

SEQ ID NO: 325653 - DNA, 30 bp, Artificial Sequence
  Synthetic oligonucleotide
taaatgcgagaatagcttcgagcaactaca

SEQ ID NO: 325654 - DNA, 30 bp, Artificial Sequence
  Synthetic oligonucleotide
ggaattcttcttgagggatgtggaactaca

SEQ ID NO: 325655 - DNA, 30 bp, Artificial Sequence
  Synthetic oligonucleotide
gatttaccttctatggcggaacagactaca

SEQ ID NO: 325656 - DNA, 31 bp, Artificial Sequence
  Synthetic oligonucleotide
gtagcgcgaccattaaatctactggactaca

SEQ ID NO: 325657 - DNA, 30 bp, Artificial Sequence
  Synthetic oligonucleotide
taagaactgggcgttaactttttgactaca

SEQ ID NO: 325658 - DNA, 30 bp, Artificial Sequence
  Synthetic oligonucleotide
aaatgagccagactgtccaccatacctaca

SEQ ID NO: 325659 - DNA, 31 bp, Artificial Sequence
  Synthetic oligonucleotide
ggcggtacccgaaaccggtcgtcggcctaca

SEQ ID NO: 325660 - DNA, 30 bp, Artificial Sequence
  Synthetic oligonucleotide
gagtctcaactaggaccccgactagctaca

SEQ ID NO: 325661 - DNA, 30 bp, Artificial Sequence
  Synthetic oligonucleotide
taacataagtcagcaattcagttagctaca

SEQ ID NO: 325662 - DNA, 30 bp, Artificial Sequence
  Synthetic oligonucleotide
gttatccattggtgggcggtcctcgctaca

SEQ ID NO: 325663 - DNA, 30 bp, Artificial Sequence
  Synthetic oligonucleotide
gtgctagctacgagcgagtgggaggctaca

SEQ ID NO: 325664 - DNA, 30 bp, Artificial Sequence
  Synthetic oligonucleotide
gtattaattaggtagagccttcgggctaca

SEQ ID NO: 325665 - DNA, 30 bp, Artificial Sequence
  Synthetic oligonucleotide
ccgtgcaggcgggtgattgacaaatctaca

SEQ ID NO: 325666 - DNA, 30 bp, Artificial Sequence
  Synthetic oligonucleotide
ggtatagattaacgctggagcgaatctaca

SEQ ID NO: 325667 - DNA, 30 bp, Artificial Sequence
  Synthetic oligonucleotide
gaccaatcgaccccttatttggaatctaca

SEQ ID NO: 325668 - DNA, 30 bp, Artificial Sequence
  Synthetic oligonucleotide
cttgccgcgtgaccagggcattagtctaca

SEQ ID NO: 325669 - DNA, 30 bp, Artificial Sequence
  Synthetic oligonucleotide
tgcccgccggggttagtaagtagttctaca

SEQ ID NO: 325670 - DNA, 30 bp, Artificial Sequence
  Synthetic oligonucleotide
aaacattttcgacgtttttggacaagtaca

SEQ ID NO: 325671 - DNA, 30 bp, Artificial Sequence
  Synthetic oligonucleotide
ggccagctaggaaatctttcagacagtaca

SEQ ID NO: 325672 - DNA, 30 bp, Artificial Sequence
  Synthetic oligonucleotide
tagttcgcactcgggtctaacaggagtaca

SEQ ID NO: 325673 - DNA, 30 bp, Artificial Sequence
  Synthetic oligonucleotide
tgtaatcaacgagtggtacctgtacgtaca

SEQ ID NO: 325674 - DNA, 30 bp, Artificial Sequence
  Synthetic oligonucleotide
gggatgggttaatcgacataacgccgtaca

SEQ ID NO: 325675 - DNA, 31 bp, Artificial Sequence
  Synthetic oligonucleotide
caaattggcatttcagtggttccagcgtaca

SEQ ID NO: 325676 - DNA, 30 bp, Artificial Sequence
  Synthetic oligonucleotide
gggatccggtgcgctatgctaaggcgtaca

SEQ ID NO: 325677 - DNA, 30 bp, Artificial Sequence
  Synthetic oligonucleotide
gcattgcacattgatattcactatcgtaca

SEQ ID NO: 325678 - DNA, 30 bp, Artificial Sequence
  Synthetic oligonucleotide
acgttagtgtcgtactacttttaaggtaca

SEQ ID NO: 325679 - DNA, 30 bp, Artificial Sequence
  Synthetic oligonucleotide
acctgtccacgttcggcgacagacggtaca

SEQ ID NO: 325680 - DNA, 30 bp, Artificial Sequence
  Synthetic oligonucleotide
ctctgattaaggggtgagggacccggtaca

SEQ ID NO: 325681 - DNA, 30 bp, Artificial Sequence
  Synthetic oligonucleotide
tgtaagatgtcctcggtactgatcggtaca

SEQ ID NO: 325682 - DNA, 30 bp, Artificial Sequence
  Synthetic oligonucleotide
aattcaagcacgaccacggtgatcggtaca

SEQ ID NO: 325683 - DNA, 30 bp, Artificial Sequence
  Synthetic oligonucleotide
ttccaggtaagccgagcaacgaagggtaca

SEQ ID NO: 325684 - DNA, 30 bp, Artificial Sequence
  Synthetic oligonucleotide
taccgtagactctaaccgatagagggtaca

SEQ ID NO: 325685 - DNA, 30 bp, Artificial Sequence
  Synthetic oligonucleotide
tggtgcccgctcgccgccgaggggggtaca

SEQ ID NO: 325686 - DNA, 30 bp, Artificial Sequence
  Synthetic oligonucleotide
aagaatggatttagggattatgggggtaca

SEQ ID NO: 325687 - DNA, 30 bp, Artificial Sequence
  Synthetic oligonucleotide
agcgataactgagatccctaggtgggtaca

SEQ ID NO: 325688 - DNA, 30 bp, Artificial Sequence
  Synthetic oligonucleotide
taaagctttattggctggtgccgtggtaca

SEQ ID NO: 325689 - DNA, 30 bp, Artificial Sequence
  Synthetic oligonucleotide
aactacgactatgtgactcggtgtggtaca

SEQ ID NO: 325690 - DNA, 30 bp, Artificial Sequence
  Synthetic oligonucleotide
cttgtgccgatatgccccggaattggtaca

SEQ ID NO: 325691 - DNA, 30 bp, Artificial Sequence
  Synthetic oligonucleotide
ggcgtgcagggtaagtccgttcaatgtaca

SEQ ID NO: 325692 - DNA, 30 bp, Artificial Sequence
  Synthetic oligonucleotide
gagtccgtaacattcatcccctcctgtaca

SEQ ID NO: 325693 - DNA, 30 bp, Artificial Sequence
  Synthetic oligonucleotide
ggagcatggtagagtttatgtcagtgtaca

SEQ ID NO: 325694 - DNA, 30 bp, Artificial Sequence
  Synthetic oligonucleotide
accgccgataagtgggtactgccgtgtaca

SEQ ID NO: 325695 - DNA, 30 bp, Artificial Sequence
  Synthetic oligonucleotide
ttcaatgcagaataggtccccttgtgtaca

SEQ ID NO: 325696 - DNA, 30 bp, Artificial Sequence
  Synthetic oligonucleotide
gatacgtagtggggggctacgcattgtaca

SEQ ID NO: 325697 - DNA, 30 bp, Artificial Sequence
  Synthetic oligonucleotide
atcaaggtaagaccaggtttgacttgtaca

SEQ ID NO: 325698 - DNA, 30 bp, Artificial Sequence
  Synthetic oligonucleotide
tgtttggttttttttgatccaggttgtaca

SEQ ID NO: 325699 - DNA, 30 bp, Artificial Sequence
  Synthetic oligonucleotide
accgattgtctgtttacccattcaattaca

SEQ ID NO: 325700 - DNA, 30 bp, Artificial Sequence
  Synthetic oligonucleotide
ttgagccggatgaatgagataggaattaca

SEQ ID NO: 325701 - DNA, 30 bp, Artificial Sequence
  Synthetic oligonucleotide
caccctgccgttaaaatggagctaattaca

SEQ ID NO: 325702 - DNA, 30 bp, Artificial Sequence
  Synthetic oligonucleotide
caatccgaaggtctggctatgtacattaca

SEQ ID NO: 325703 - DNA, 30 bp, Artificial Sequence
  Synthetic oligonucleotide
agacttatggctcacatggcaggcattaca

SEQ ID NO: 325704 - DNA, 30 bp, Artificial Sequence
  Synthetic oligonucleotide
gtggctcgtttcccattctgaatcattaca

SEQ ID NO: 325705 - DNA, 30 bp, Artificial Sequence
  Synthetic oligonucleotide
aagcaatgtgtcgccttaatccgacttaca

SEQ ID NO: 325706 - DNA, 30 bp, Artificial Sequence
  Synthetic oligonucleotide
ttttttacatgccttagatctcaagttaca

SEQ ID NO: 325707 - DNA, 30 bp, Artificial Sequence
  Synthetic oligonucleotide
gggttattcagaccacagccattcgttaca

SEQ ID NO: 325708 - DNA, 30 bp, Artificial Sequence
  Synthetic oligonucleotide
cagctccagtgtctgacggccgaggttaca

SEQ ID NO: 325709 - DNA, 30 bp, Artificial Sequence
  Synthetic oligonucleotide
tggtacgtaggggaccttaatgaggttaca

SEQ ID NO: 325710 - DNA, 30 bp, Artificial Sequence
  Synthetic oligonucleotide
taattgactcggccctaactcggggttaca

SEQ ID NO: 325711 - DNA, 30 bp, Artificial Sequence
  Synthetic oligonucleotide
taattaatatacatcgggctgagatttaca

SEQ ID NO: 325712 - DNA, 30 bp, Artificial Sequence
  Synthetic oligonucleotide
taccgcattggtatgaacatatgatttaca

SEQ ID NO: 325713 - DNA, 30 bp, Artificial Sequence
  Synthetic oligonucleotide
agtgcttttaagcctcaaatctgctttaca

SEQ ID NO: 325714 - DNA, 30 bp, Artificial Sequence
  Synthetic oligonucleotide
gggaaaatcagcaagttatgaccgtttaca

SEQ ID NO: 325715 - DNA, 30 bp, Artificial Sequence
  Synthetic oligonucleotide
gtatagcttaggcgagaaggtcggtttaca

SEQ ID NO: 325716 - DNA, 30 bp, Artificial Sequence
  Synthetic oligonucleotide
ctggagactgccatgcgcatgaaaaaacca

SEQ ID NO: 325717 - DNA, 30 bp, Artificial Sequence
  Synthetic oligonucleotide
cctatccgctgccgtaatatgagaaaacca

SEQ ID NO: 325718 - DNA, 30 bp, Artificial Sequence
  Synthetic oligonucleotide
tagatgataactcgaccgttcggaaaacca

SEQ ID NO: 325719 - DNA, 30 bp, Artificial Sequence
  Synthetic oligonucleotide
tctcacgtccaaatccttttaaacaaacca

SEQ ID NO: 325720 - DNA, 30 bp, Artificial Sequence
  Synthetic oligonucleotide
agatctatcttaacgtgatagcacaaacca

SEQ ID NO: 325721 - DNA, 30 bp, Artificial Sequence
  Synthetic oligonucleotide
ccatctttctcgcgttaagttcggaaacca

SEQ ID NO: 325722 - DNA, 30 bp, Artificial Sequence
  Synthetic oligonucleotide
agcacaaatatgaacgggacggtgaaacca

SEQ ID NO: 325723 - DNA, 30 bp, Artificial Sequence
  Synthetic oligonucleotide
aagtgtgcggagctatagtcgagtaaacca

SEQ ID NO: 325724 - DNA, 30 bp, Artificial Sequence
  Synthetic oligonucleotide
gtctgtaaaagcggggaccgtagtaaacca

SEQ ID NO: 325725 - DNA, 30 bp, Artificial Sequence
  Synthetic oligonucleotide
tatgagtaagtgtttgccagagaacaacca

SEQ ID NO: 325726 - DNA, 30 bp, Artificial Sequence
  Synthetic oligonucleotide
tgtagcacggaaaaatggtctgaccaacca

SEQ ID NO: 325727 - DNA, 30 bp, Artificial Sequence
  Synthetic oligonucleotide
aaagcttgtgagctacagagaatccaacca

SEQ ID NO: 325728 - DNA, 30 bp, Artificial Sequence
  Synthetic oligonucleotide
ggagattgcgttcacgggtgaatgcaacca

SEQ ID NO: 325729 - DNA, 30 bp, Artificial Sequence
  Synthetic oligonucleotide
agacctagcttctgcgctggagcagaacca

SEQ ID NO: 325730 - DNA, 30 bp, Artificial Sequence
  Synthetic oligonucleotide
gacacttacatgtggccgcagtcagaacca

SEQ ID NO: 325731 - DNA, 30 bp, Artificial Sequence
  Synthetic oligonucleotide
ttcatcctaactgagatcttgctcgaacca

SEQ ID NO: 325732 - DNA, 30 bp, Artificial Sequence
  Synthetic oligonucleotide
agtccttgtccaccgcccagactggaacca

SEQ ID NO: 325733 - DNA, 30 bp, Artificial Sequence
  Synthetic oligonucleotide
ttaagcagattcacctcttagctggaacca

SEQ ID NO: 325734 - DNA, 30 bp, Artificial Sequence
  Synthetic oligonucleotide
tgtgggggaaatgtctctaaacctgaacca

SEQ ID NO: 325735 - DNA, 30 bp, Artificial Sequence
  Synthetic oligonucleotide
gagacactggtattgctagttattgaacca

SEQ ID NO: 325736 - DNA, 30 bp, Artificial Sequence
  Synthetic oligonucleotide
ttgtcatccagattatggggacttgaacca

SEQ ID NO: 325737 - DNA, 30 bp, Artificial Sequence
  Synthetic oligonucleotide
aagtccagagaagcttgttcatttgaacca

SEQ ID NO: 325738 - DNA, 30 bp, Artificial Sequence
  Synthetic oligonucleotide
gataaaccaggtattataatacaataacca

SEQ ID NO: 325739 - DNA, 30 bp, Artificial Sequence
  Synthetic oligonucleotide
tactataaggggttatccgcgtaataacca

SEQ ID NO: 325740 - DNA, 30 bp, Artificial Sequence
  Synthetic oligonucleotide
agagagaaagctcttaacagagtctaacca

SEQ ID NO: 325741 - DNA, 30 bp, Artificial Sequence
  Synthetic oligonucleotide
tcggtcagtaagggcctttaggattaacca

SEQ ID NO: 325742 - DNA, 30 bp, Artificial Sequence
  Synthetic oligonucleotide
gatgtaggacggtcgtacatgggttaacca

SEQ ID NO: 325743 - DNA, 30 bp, Artificial Sequence
  Synthetic oligonucleotide
ctggtgatgatctagtgtaaatgttaacca

SEQ ID NO: 325744 - DNA, 30 bp, Artificial Sequence
  Synthetic oligonucleotide
agaggtagcacgtgaatgcagggaacacca

SEQ ID NO: 325745 - DNA, 30 bp, Artificial Sequence
  Synthetic oligonucleotide
tttcgagaccgcgtgtattttataacacca

SEQ ID NO: 325746 - DNA, 30 bp, Artificial Sequence
  Synthetic oligonucleotide
acggacgagtcttttgcgcttaggacacca

SEQ ID NO: 325747 - DNA, 30 bp, Artificial Sequence
  Synthetic oligonucleotide
tacaggcaccgataattctgtatgacacca

SEQ ID NO: 325748 - DNA, 30 bp, Artificial Sequence
  Synthetic oligonucleotide
aatcacttagatcttacgggatttacacca

SEQ ID NO: 325749 - DNA, 30 bp, Artificial Sequence
  Synthetic oligonucleotide
cgcacccggtatcacagccacggaccacca

SEQ ID NO: 325750 - DNA, 30 bp, Artificial Sequence
  Synthetic oligonucleotide
acgagtggagctgaaagaggctccccacca

SEQ ID NO: 325751 - DNA, 30 bp, Artificial Sequence
  Synthetic oligonucleotide
caaaatcatgcggctgcgcgtggcccacca

SEQ ID NO: 325752 - DNA, 30 bp, Artificial Sequence
  Synthetic oligonucleotide
ttagggacagggaagctggggttcccacca

SEQ ID NO: 325753 - DNA, 30 bp, Artificial Sequence
  Synthetic oligonucleotide
cgtacgcaagtcccgttcgcagggccacca

SEQ ID NO: 325754 - DNA, 30 bp, Artificial Sequence
  Synthetic oligonucleotide
acgcagacctcgatgggatatgtgccacca

SEQ ID NO: 325755 - DNA, 30 bp, Artificial Sequence
  Synthetic oligonucleotide
cgcggatcggagcggtcataggctccacca

SEQ ID NO: 325756 - DNA, 30 bp, Artificial Sequence
  Synthetic oligonucleotide
tgcgccgtctcctcccggcctatagcacca

SEQ ID NO: 325757 - DNA, 30 bp, Artificial Sequence
  Synthetic oligonucleotide
tcacgcttgagccgcagaatcggcgcacca

SEQ ID NO: 325758 - DNA, 30 bp, Artificial Sequence
  Synthetic oligonucleotide
attgcgatggtcgttggctccttcgcacca

SEQ ID NO: 325759 - DNA, 30 bp, Artificial Sequence
  Synthetic oligonucleotide
cggcggttgttggaaacaattagggcacca

SEQ ID NO: 325760 - DNA, 30 bp, Artificial Sequence
  Synthetic oligonucleotide
ggagctatacgagatgagttttttgcacca

SEQ ID NO: 325761 - DNA, 30 bp, Artificial Sequence
  Synthetic oligonucleotide
ctggagcgtaagatatcagagcgctcacca

SEQ ID NO: 325762 - DNA, 30 bp, Artificial Sequence
  Synthetic oligonucleotide
ctagacctctgattgtcccatggctcacca

SEQ ID NO: 325763 - DNA, 30 bp, Artificial Sequence
  Synthetic oligonucleotide
tcgggtggcagagcttatgtggtctcacca

SEQ ID NO: 325764 - DNA, 30 bp, Artificial Sequence
  Synthetic oligonucleotide
ggttgagattgcgtgagagacctgtcacca

SEQ ID NO: 325765 - DNA, 30 bp, Artificial Sequence
  Synthetic oligonucleotide
ttgctctgacgataggtcaaacgttcacca

SEQ ID NO: 325766 - DNA, 31 bp, Artificial Sequence
  Synthetic oligonucleotide
tttgtgcggtatgactgattggttaagacca

SEQ ID NO: 325767 - DNA, 30 bp, Artificial Sequence
  Synthetic oligonucleotide
ggtgctagaattctctgacgcctcagacca

SEQ ID NO: 325768 - DNA, 30 bp, Artificial Sequence
  Synthetic oligonucleotide
gtgtgcgaaaggagcatgaaagagagacca

SEQ ID NO: 325769 - DNA, 30 bp, Artificial Sequence
  Synthetic oligonucleotide
ctaacctgatcaacttcttttgagagacca

SEQ ID NO: 325770 - DNA, 30 bp, Artificial Sequence
  Synthetic oligonucleotide
cgttatctgcacactggccctaggagacca

SEQ ID NO: 325771 - DNA, 30 bp, Artificial Sequence
  Synthetic oligonucleotide
ggaagttcgacgcgtttttccgctagacca

SEQ ID NO: 325772 - DNA, 30 bp, Artificial Sequence
  Synthetic oligonucleotide
ctgtgaggggggcgtacatagtaacgacca

SEQ ID NO: 325773 - DNA, 30 bp, Artificial Sequence
  Synthetic oligonucleotide
agcgtacctcgggacgagcaccacggacca

SEQ ID NO: 325774 - DNA, 30 bp, Artificial Sequence
  Synthetic oligonucleotide
ggaagatgcaatcctacagaagggggacca

SEQ ID NO: 325775 - DNA, 30 bp, Artificial Sequence
  Synthetic oligonucleotide
gcggggacgaagttgcggttcgggggacca

SEQ ID NO: 325776 - DNA, 30 bp, Artificial Sequence
  Synthetic oligonucleotide
catgagcaatcaaacttctaatatggacca

SEQ ID NO: 325777 - DNA, 30 bp, Artificial Sequence
  Synthetic oligonucleotide
gtttccaccgggatacatcgcacatgacca

SEQ ID NO: 325778 - DNA, 30 bp, Artificial Sequence
  Synthetic oligonucleotide
tccggactctgcgaactgataagatgacca

SEQ ID NO: 325779 - DNA, 30 bp, Artificial Sequence
  Synthetic oligonucleotide
cagacgacattcacttagtctctatgacca

SEQ ID NO: 325780 - DNA, 30 bp, Artificial Sequence
  Synthetic oligonucleotide
agggtttgtttactcgtaaggatctgacca

SEQ ID NO: 325781 - DNA, 30 bp, Artificial Sequence
  Synthetic oligonucleotide
tgagatggattggtactaaatctctgacca

SEQ ID NO: 325782 - DNA, 30 bp, Artificial Sequence
  Synthetic oligonucleotide
aagccgatagtcagtttgtgtctttgacca

SEQ ID NO: 325783 - DNA, 30 bp, Artificial Sequence
  Synthetic oligonucleotide
tgtttccgaccgtatcataacccaatacca

SEQ ID NO: 325784 - DNA, 30 bp, Artificial Sequence
  Synthetic oligonucleotide
aggagactagacaccgtcttgttcatacca

SEQ ID NO: 325785 - DNA, 30 bp, Artificial Sequence
  Synthetic oligonucleotide
acccggtactgtatattgggtaagatacca

SEQ ID NO: 325786 - DNA, 30 bp, Artificial Sequence
  Synthetic oligonucleotide
gtttgcttggacttgatgtctaggatacca

SEQ ID NO: 325787 - DNA, 30 bp, Artificial Sequence
  Synthetic oligonucleotide
atggttagagcgccgcgggaatggatacca

SEQ ID NO: 325788 - DNA, 30 bp, Artificial Sequence
  Synthetic oligonucleotide
ccactcttataggactttgctgatatacca

SEQ ID NO: 325789 - DNA, 30 bp, Artificial Sequence
  Synthetic oligonucleotide
caagaatacctcagtgaaacatatatacca

SEQ ID NO: 325790 - DNA, 30 bp, Artificial Sequence
  Synthetic oligonucleotide
taaatggtacgagtgtggtgctcactacca

SEQ ID NO: 325791 - DNA, 30 bp, Artificial Sequence
  Synthetic oligonucleotide
acgtaccccgcagatgtggtagacctacca

SEQ ID NO: 325792 - DNA, 30 bp, Artificial Sequence
  Synthetic oligonucleotide
ttaagtggggttaacgtgtcggtcctacca

SEQ ID NO: 325793 - DNA, 30 bp, Artificial Sequence
  Synthetic oligonucleotide
ttgagcccgttgaaagcggattcgctacca

SEQ ID NO: 325794 - DNA, 30 bp, Artificial Sequence
  Synthetic oligonucleotide
cgtagattcggcaaccgccttactctacca

SEQ ID NO: 325795 - DNA, 30 bp, Artificial Sequence
  Synthetic oligonucleotide
agggagaagttaaattgactcgcagtacca

SEQ ID NO: 325796 - DNA, 30 bp, Artificial Sequence
  Synthetic oligonucleotide
tcgatttggagagttggtacagacgtacca

SEQ ID NO: 325797 - DNA, 30 bp, Artificial Sequence
  Synthetic oligonucleotide
gagatattgaccagccagtttagcgtacca

SEQ ID NO: 325798 - DNA, 30 bp, Artificial Sequence
  Synthetic oligonucleotide
tgaagtgcggctaggttcaaattcgtacca

SEQ ID NO: 325799 - DNA, 30 bp, Artificial Sequence
  Synthetic oligonucleotide
gaatagcatacaaaggtctgagctgtacca

SEQ ID NO: 325800 - DNA, 30 bp, Artificial Sequence
  Synthetic oligonucleotide
cagacgactgtaagaactgtaagtgtacca

SEQ ID NO: 325801 - DNA, 30 bp, Artificial Sequence
  Synthetic oligonucleotide
ttgaacactcctcttcaccaaagattacca

SEQ ID NO: 325802 - DNA, 30 bp, Artificial Sequence
  Synthetic oligonucleotide
ggtatgaactttgtggtccatgacttacca

SEQ ID NO: 325803 - DNA, 31 bp, Artificial Sequence
  Synthetic oligonucleotide
ttaacgttgacgggtatatgctgccttacca

SEQ ID NO: 325804 - DNA, 30 bp, Artificial Sequence
  Synthetic oligonucleotide
tgatttaagcgtctaaccttaaagttacca

SEQ ID NO: 325805 - DNA, 30 bp, Artificial Sequence
  Synthetic oligonucleotide
agctatgggcgcccgggatcggaaaaccca

SEQ ID NO: 325806 - DNA, 30 bp, Artificial Sequence
  Synthetic oligonucleotide
gaactagggatacagcggtaaagtaaccca

SEQ ID NO: 325807 - DNA, 30 bp, Artificial Sequence
  Synthetic oligonucleotide
caattgaaggatccaaaacttgcccaccca

SEQ ID NO: 325808 - DNA, 30 bp, Artificial Sequence
  Synthetic oligonucleotide
cagtcatccaataacctacgtaggcaccca

SEQ ID NO: 325809 - DNA, 30 bp, Artificial Sequence
  Synthetic oligonucleotide
tgatagcacactgtattgtttattcaccca

SEQ ID NO: 325810 - DNA, 30 bp, Artificial Sequence
  Synthetic oligonucleotide
gtgatactacggataagtgctatcgaccca

SEQ ID NO: 325811 - DNA, 30 bp, Artificial Sequence
  Synthetic oligonucleotide
aaggcagaaataccgcacggcacggaccca

SEQ ID NO: 325812 - DNA, 30 bp, Artificial Sequence
  Synthetic oligonucleotide
agatcctgccgcgctgggatctgggaccca

SEQ ID NO: 325813 - DNA, 30 bp, Artificial Sequence
  Synthetic oligonucleotide
tgttttgctccaaagcagaccgttgaccca

SEQ ID NO: 325814 - DNA, 30 bp, Artificial Sequence
  Synthetic oligonucleotide
ctaaacgtatgaccagaattaaactaccca

SEQ ID NO: 325815 - DNA, 30 bp, Artificial Sequence
  Synthetic oligonucleotide
actggcctaacgccccgagcgccttaccca

SEQ ID NO: 325816 - DNA, 30 bp, Artificial Sequence
  Synthetic oligonucleotide
cttggggagaaggcgactttattttaccca

SEQ ID NO: 325817 - DNA, 30 bp, Artificial Sequence
  Synthetic oligonucleotide
tttagtgccagcggaaggccttgaacccca

SEQ ID NO: 325818 - DNA, 30 bp, Artificial Sequence
  Synthetic oligonucleotide
atcagcgaatgcgcgggcgtgtacacccca

SEQ ID NO: 325819 - DNA, 30 bp, Artificial Sequence
  Synthetic oligonucleotide
gttacaaatttgatcaccaacagcacccca

SEQ ID NO: 325820 - DNA, 30 bp, Artificial Sequence
  Synthetic oligonucleotide
ggatttgcctggtaccaacttgtcacccca

SEQ ID NO: 325821 - DNA, 30 bp, Artificial Sequence
  Synthetic oligonucleotide
tactctgcgttggtggctggttagacccca

SEQ ID NO: 325822 - DNA, 30 bp, Artificial Sequence
  Synthetic oligonucleotide
tctggagtcagaatgcgttcgccgacccca

SEQ ID NO: 325823 - DNA, 30 bp, Artificial Sequence
  Synthetic oligonucleotide
tattgcatcaccgcccgatacaatacccca

SEQ ID NO: 325824 - DNA, 30 bp, Artificial Sequence
  Synthetic oligonucleotide
gcaatgtagagactaggacaacctacccca

SEQ ID NO: 325825 - DNA, 30 bp, Artificial Sequence
  Synthetic oligonucleotide
tcaggcgcatatgcctggtactgtacccca

SEQ ID NO: 325826 - DNA, 30 bp, Artificial Sequence
  Synthetic oligonucleotide
actactggtagggctggtcgcgaagcccca

SEQ ID NO: 325827 - DNA, 30 bp, Artificial Sequence
  Synthetic oligonucleotide
gttttattgtagccagagcaaaatgcccca

SEQ ID NO: 325828 - DNA, 30 bp, Artificial Sequence
  Synthetic oligonucleotide
aaatcgttacccacaagcacaggtgcccca

SEQ ID NO: 325829 - DNA, 30 bp, Artificial Sequence
  Synthetic oligonucleotide
attgaacgccccagtattaagggtgcccca

SEQ ID NO: 325830 - DNA, 30 bp, Artificial Sequence
  Synthetic oligonucleotide
gagcggtcgcgtgagtaaagtacatcccca

SEQ ID NO: 325831 - DNA, 30 bp, Artificial Sequence
  Synthetic oligonucleotide
aagtacttttatgagaacaattgatcccca

SEQ ID NO: 325832 - DNA, 31 bp, Artificial Sequence
  Synthetic oligonucleotide
attattggacgtgtgggtatttatctcccca

SEQ ID NO: 325833 - DNA, 30 bp, Artificial Sequence
  Synthetic oligonucleotide
aatgaagagcaccttatgattgagtcccca

SEQ ID NO: 325834 - DNA, 30 bp, Artificial Sequence
  Synthetic oligonucleotide
gttctcacgcatttacggaccggttcccca

SEQ ID NO: 325835 - DNA, 30 bp, Artificial Sequence
  Synthetic oligonucleotide
aattcaatacttaacgcacacaaaagccca

SEQ ID NO: 325836 - DNA, 30 bp, Artificial Sequence
  Synthetic oligonucleotide
cgtctactgggttcgtaatttataagccca

SEQ ID NO: 325837 - DNA, 30 bp, Artificial Sequence
  Synthetic oligonucleotide
cttccgtctgtgaattgcgtagtcagccca

SEQ ID NO: 325838 - DNA, 30 bp, Artificial Sequence
  Synthetic oligonucleotide
tcaccccttcggaagctattgtgtagccca

SEQ ID NO: 325839 - DNA, 30 bp, Artificial Sequence
  Synthetic oligonucleotide
gtttggaatgctactaccaaaggccgccca

SEQ ID NO: 325840 - DNA, 30 bp, Artificial Sequence
  Synthetic oligonucleotide
gagtaactgactatgtattttgcgcgccca

SEQ ID NO: 325841 - DNA, 30 bp, Artificial Sequence
  Synthetic oligonucleotide
atgtctaaagacaggggcgcatatcgccca

SEQ ID NO: 325842 - DNA, 30 bp, Artificial Sequence
  Synthetic oligonucleotide
gtataacaatccgaccgctccgcaggccca

SEQ ID NO: 325843 - DNA, 30 bp, Artificial Sequence
  Synthetic oligonucleotide
tcaggtcaggacagattgccggtaggccca

SEQ ID NO: 325844 - DNA, 30 bp, Artificial Sequence
  Synthetic oligonucleotide
tcaatgattgtggatatcctgcccggccca

SEQ ID NO: 325845 - DNA, 30 bp, Artificial Sequence
  Synthetic oligonucleotide
ctcgtcgggttccactgacgcgtcggccca

SEQ ID NO: 325846 - DNA, 30 bp, Artificial Sequence
  Synthetic oligonucleotide
tgaccatacaagcggctaaggactggccca

SEQ ID NO: 325847 - DNA, 30 bp, Artificial Sequence
  Synthetic oligonucleotide
attccgcaggagtgcatgcgtagtggccca

SEQ ID NO: 325848 - DNA, 30 bp, Artificial Sequence
  Synthetic oligonucleotide
aagcattaagatagagctcaggaatgccca

SEQ ID NO: 325849 - DNA, 30 bp, Artificial Sequence
  Synthetic oligonucleotide
accagatctcgaccatcatgacggtgccca

SEQ ID NO: 325850 - DNA, 30 bp, Artificial Sequence
  Synthetic oligonucleotide
cggggatatttccacgaaatagcaatccca

SEQ ID NO: 325851 - DNA, 30 bp, Artificial Sequence
  Synthetic oligonucleotide
attccatacagcgtacgaacgcgaatccca

SEQ ID NO: 325852 - DNA, 30 bp, Artificial Sequence
  Synthetic oligonucleotide
agtacctccggctgtgcaacgttaatccca

SEQ ID NO: 325853 - DNA, 30 bp, Artificial Sequence
  Synthetic oligonucleotide
aaggttgtcgcctgaacatggcacatccca

SEQ ID NO: 325854 - DNA, 30 bp, Artificial Sequence
  Synthetic oligonucleotide
gctggaggggtgtaaggagtcgtcatccca

SEQ ID NO: 325855 - DNA, 30 bp, Artificial Sequence
  Synthetic oligonucleotide
ggtggtcaatatgatacatgtggtatccca

SEQ ID NO: 325856 - DNA, 30 bp, Artificial Sequence
  Synthetic oligonucleotide
gccacgtccaggaggttacgccttatccca

SEQ ID NO: 325857 - DNA, 30 bp, Artificial Sequence
  Synthetic oligonucleotide
tgtgggaagccagtagtgggcaaagtccca

SEQ ID NO: 325858 - DNA, 30 bp, Artificial Sequence
  Synthetic oligonucleotide
accatccaatttatttaatgggaagtccca

SEQ ID NO: 325859 - DNA, 30 bp, Artificial Sequence
  Synthetic oligonucleotide
cgcgtgaagcaaaaacccggctacgtccca

SEQ ID NO: 325860 - DNA, 30 bp, Artificial Sequence
  Synthetic oligonucleotide
ctcataaatccatgcacattaatcgtccca

SEQ ID NO: 325861 - DNA, 30 bp, Artificial Sequence
  Synthetic oligonucleotide
caagtgacttaggtctggtcataggtccca

SEQ ID NO: 325862 - DNA, 30 bp, Artificial Sequence
  Synthetic oligonucleotide
attatcggggcggatataatctatgtccca

SEQ ID NO: 325863 - DNA, 30 bp, Artificial Sequence
  Synthetic oligonucleotide
accactgatgggaacttaattaacttccca

SEQ ID NO: 325864 - DNA, 30 bp, Artificial Sequence
  Synthetic oligonucleotide
ctggtgtccacgtaaagtcggtccttccca

SEQ ID NO: 325865 - DNA, 30 bp, Artificial Sequence
  Synthetic oligonucleotide
agggtagaaggatggtgattactcttccca

SEQ ID NO: 325866 - DNA, 30 bp, Artificial Sequence
  Synthetic oligonucleotide
tggggcttggcggagacgtcaacgttccca

SEQ ID NO: 325867 - DNA, 30 bp, Artificial Sequence
  Synthetic oligonucleotide
acagccgggactcccggattggcgttccca

SEQ ID NO: 325868 - DNA, 30 bp, Artificial Sequence
  Synthetic oligonucleotide
atatacagacacggcccaatggatttccca

SEQ ID NO: 325869 - DNA, 30 bp, Artificial Sequence
  Synthetic oligonucleotide
cgcttgagagggcgagaacggcctttccca

SEQ ID NO: 325870 - DNA, 30 bp, Artificial Sequence
  Synthetic oligonucleotide
agttactcactggtgtgatacaacaagcca

SEQ ID NO: 325871 - DNA, 30 bp, Artificial Sequence
  Synthetic oligonucleotide
gaaacgaagtagcaggtcttaaccaagcca

SEQ ID NO: 325872 - DNA, 30 bp, Artificial Sequence
  Synthetic oligonucleotide
tagtcaaccgtttaggctaagtgtaagcca

SEQ ID NO: 325873 - DNA, 30 bp, Artificial Sequence
  Synthetic oligonucleotide
gtgcttaaatgcgagtgtgaatttaagcca

SEQ ID NO: 325874 - DNA, 30 bp, Artificial Sequence
  Synthetic oligonucleotide
tggctgaggggttttgcctatttacagcca

SEQ ID NO: 325875 - DNA, 30 bp, Artificial Sequence
  Synthetic oligonucleotide
tagttaacgcgtgattgcctactgcagcca

SEQ ID NO: 325876 - DNA, 30 bp, Artificial Sequence
  Synthetic oligonucleotide
aacttcgtggaatccatgcagttgcagcca

SEQ ID NO: 325877 - DNA, 30 bp, Artificial Sequence
  Synthetic oligonucleotide
cgcggagtcgactgagcgcgccctcagcca

SEQ ID NO: 325878 - DNA, 30 bp, Artificial Sequence
  Synthetic oligonucleotide
tacttcgtggacgcgtaattaagtcagcca

SEQ ID NO: 325879 - DNA, 30 bp, Artificial Sequence
  Synthetic oligonucleotide
gatcatcccgtatatgcaagaattcagcca

SEQ ID NO: 325880 - DNA, 30 bp, Artificial Sequence
  Synthetic oligonucleotide
agagtcaagtgtatctttgaccttcagcca

SEQ ID NO: 325881 - DNA, 30 bp, Artificial Sequence
  Synthetic oligonucleotide
atttgcaagcttgtaggactcaaagagcca

SEQ ID NO: 325882 - DNA, 30 bp, Artificial Sequence
  Synthetic oligonucleotide
tgtttgagtcagttctaaggcgcagagcca

SEQ ID NO: 325883 - DNA, 30 bp, Artificial Sequence
  Synthetic oligonucleotide
agccggtcgcagggataaagacgcgagcca

SEQ ID NO: 325884 - DNA, 30 bp, Artificial Sequence
  Synthetic oligonucleotide
tactacgcctgagtccatgtctcggagcca

SEQ ID NO: 325885 - DNA, 30 bp, Artificial Sequence
  Synthetic oligonucleotide
tcaacctcccatcaaattaatcttgagcca

SEQ ID NO: 325886 - DNA, 30 bp, Artificial Sequence
  Synthetic oligonucleotide
ctgggcatactacgcgggggtagatagcca

SEQ ID NO: 325887 - DNA, 30 bp, Artificial Sequence
  Synthetic oligonucleotide
ggaatgtccggggaccagcagaactagcca

SEQ ID NO: 325888 - DNA, 30 bp, Artificial Sequence
  Synthetic oligonucleotide
ccacaaggctcagccatgcacggctagcca

SEQ ID NO: 325889 - DNA, 30 bp, Artificial Sequence
  Synthetic oligonucleotide
gtactgtatgataccgatcgaacgtagcca

SEQ ID NO: 325890 - DNA, 30 bp, Artificial Sequence
  Synthetic oligonucleotide
tgagtcgcttatactgataggctgtagcca

SEQ ID NO: 325891 - DNA, 30 bp, Artificial Sequence
  Synthetic oligonucleotide
attgagtgctaggtttcgcacgcaacgcca

SEQ ID NO: 325892 - DNA, 30 bp, Artificial Sequence
  Synthetic oligonucleotide
gcttgatacttgccttcagcggcaacgcca

SEQ ID NO: 325893 - DNA, 30 bp, Artificial Sequence
  Synthetic oligonucleotide
cttgagtgagagggtatgaccgacacgcca

SEQ ID NO: 325894 - DNA, 30 bp, Artificial Sequence
  Synthetic oligonucleotide
cccaaaagtgcctcccattgggagacgcca

SEQ ID NO: 325895 - DNA, 30 bp, Artificial Sequence
  Synthetic oligonucleotide
tatcactttacaaacgtattctagacgcca

SEQ ID NO: 325896 - DNA, 30 bp, Artificial Sequence
  Synthetic oligonucleotide
agctgaaaggacctataccattagacgcca

SEQ ID NO: 325897 - DNA, 30 bp, Artificial Sequence
  Synthetic oligonucleotide
ttgagaaaacacttaagccataggacgcca

SEQ ID NO: 325898 - DNA, 30 bp, Artificial Sequence
  Synthetic oligonucleotide
gttggggaggtcattatatttggaccgcca

SEQ ID NO: 325899 - DNA, 30 bp, Artificial Sequence
  Synthetic oligonucleotide
agctttgaagcttaggcatccaccccgcca

SEQ ID NO: 325900 - DNA, 30 bp, Artificial Sequence
  Synthetic oligonucleotide
tccataacttgtagatctgaatgcccgcca

SEQ ID NO: 325901 - DNA, 30 bp, Artificial Sequence
  Synthetic oligonucleotide
tggttccgccatcactcgcggccgccgcca

SEQ ID NO: 325902 - DNA, 30 bp, Artificial Sequence
  Synthetic oligonucleotide
tagtactaaagtgtcggtctcattccgcca

SEQ ID NO: 325903 - DNA, 30 bp, Artificial Sequence
  Synthetic oligonucleotide
taacttcatactttgtatcacagagcgcca

SEQ ID NO: 325904 - DNA, 30 bp, Artificial Sequence
  Synthetic oligonucleotide
tgcgaaggacggaccccccgacgagcgcca

SEQ ID NO: 325905 - DNA, 30 bp, Artificial Sequence
  Synthetic oligonucleotide
cggagggccgggaaactcgcgagcgcgcca

SEQ ID NO: 325906 - DNA, 30 bp, Artificial Sequence
  Synthetic oligonucleotide
ctacataaatagacacgggtaatggcgcca

SEQ ID NO: 325907 - DNA, 30 bp, Artificial Sequence
  Synthetic oligonucleotide
tagcttacagtgtcacccttcggtgcgcca

SEQ ID NO: 325908 - DNA, 30 bp, Artificial Sequence
  Synthetic oligonucleotide
gaatttgttggggggaagccggaatcgcca

SEQ ID NO: 325909 - DNA, 30 bp, Artificial Sequence
  Synthetic oligonucleotide
aagatggagcaggggacgtaggcatcgcca

SEQ ID NO: 325910 - DNA, 30 bp, Artificial Sequence
  Synthetic oligonucleotide
actggatgtttggtgatgcgggcctcgcca

SEQ ID NO: 325911 - DNA, 30 bp, Artificial Sequence
  Synthetic oligonucleotide
tactgatatgatccagctttgtgctcgcca

SEQ ID NO: 325912 - DNA, 30 bp, Artificial Sequence
  Synthetic oligonucleotide
actggcacattgctagacttcgggtcgcca

SEQ ID NO: 325913 - DNA, 30 bp, Artificial Sequence
  Synthetic oligonucleotide
tgataaggtttaaattaattcctgtcgcca

SEQ ID NO: 325914 - DNA, 30 bp, Artificial Sequence
  Synthetic oligonucleotide
ccttagtattgctctacattcgtgtcgcca

SEQ ID NO: 325915 - DNA, 30 bp, Artificial Sequence
  Synthetic oligonucleotide
aaagcctaggcgtgattgaatacttcgcca

SEQ ID NO: 325916 - DNA, 30 bp, Artificial Sequence
  Synthetic oligonucleotide
gggcgaaaccatacttggaccgtttcgcca

SEQ ID NO: 325917 - DNA, 30 bp, Artificial Sequence
  Synthetic oligonucleotide
ggataaagcgcgctttagagtccaaggcca

SEQ ID NO: 325918 - DNA, 30 bp, Artificial Sequence
  Synthetic oligonucleotide
gtaatatggctactttgggggggaaggcca

SEQ ID NO: 325919 - DNA, 30 bp, Artificial Sequence
  Synthetic oligonucleotide
cagccggtcaagcttggcgccatgaggcca

SEQ ID NO: 325920 - DNA, 30 bp, Artificial Sequence
  Synthetic oligonucleotide
agtaagtatgattgtggtacccgacggcca

SEQ ID NO: 325921 - DNA, 30 bp, Artificial Sequence
  Synthetic oligonucleotide
cccgataatggttagtggatactgcggcca

SEQ ID NO: 325922 - DNA, 30 bp, Artificial Sequence
  Synthetic oligonucleotide
tctttttttagaagaccgcgaattcggcca

SEQ ID NO: 325923 - DNA, 30 bp, Artificial Sequence
  Synthetic oligonucleotide
aaatcttttaccaatgtcagagcagggcca

SEQ ID NO: 325924 - DNA, 30 bp, Artificial Sequence
  Synthetic oligonucleotide
gtgtcggaggtcaatgtacccaccgggcca

SEQ ID NO: 325925 - DNA, 30 bp, Artificial Sequence
  Synthetic oligonucleotide
gcgcattggtttcaggaaactccggggcca

SEQ ID NO: 325926 - DNA, 30 bp, Artificial Sequence
  Synthetic oligonucleotide
atcctgaccatctccgggaattatgggcca

SEQ ID NO: 325927 - DNA, 30 bp, Artificial Sequence
  Synthetic oligonucleotide
acacatatgctgcaagtcgccactgggcca

SEQ ID NO: 325928 - DNA, 30 bp, Artificial Sequence
  Synthetic oligonucleotide
cgattccgaatacggcggagcccatggcca

SEQ ID NO: 325929 - DNA, 30 bp, Artificial Sequence
  Synthetic oligonucleotide
ccattagcatactatactcggttatggcca

SEQ ID NO: 325930 - DNA, 30 bp, Artificial Sequence
  Synthetic oligonucleotide
tagcaaccggaggcaaccgtgaactggcca

SEQ ID NO: 325931 - DNA, 30 bp, Artificial Sequence
  Synthetic oligonucleotide
aaaagcagtgcgatttgtggtgtctggcca

SEQ ID NO: 325932 - DNA, 30 bp, Artificial Sequence
  Synthetic oligonucleotide
agcgctgaatgttacgttttatcgtggcca

SEQ ID NO: 325933 - DNA, 30 bp, Artificial Sequence
  Synthetic oligonucleotide
ggggtctattttaactacagtaattggcca

SEQ ID NO: 325934 - DNA, 30 bp, Artificial Sequence
  Synthetic oligonucleotide
ggttccggcatgatatatagcataatgcca

SEQ ID NO: 325935 - DNA, 30 bp, Artificial Sequence
  Synthetic oligonucleotide
tacccatgttagctccacacattaatgcca

SEQ ID NO: 325936 - DNA, 30 bp, Artificial Sequence
  Synthetic oligonucleotide
ttaccatcttgtgaacaggtggacatgcca

SEQ ID NO: 325937 - DNA, 30 bp, Artificial Sequence
  Synthetic oligonucleotide
ggctgcacatacgtagcgaaaatcatgcca

SEQ ID NO: 325938 - DNA, 30 bp, Artificial Sequence
  Synthetic oligonucleotide
ccatccgcagttgagaatctctagatgcca

SEQ ID NO: 325939 - DNA, 30 bp, Artificial Sequence
  Synthetic oligonucleotide
cgtagactagctgtaagtccgccgatgcca

SEQ ID NO: 325940 - DNA, 30 bp, Artificial Sequence
  Synthetic oligonucleotide
cagactggcctacgtatgtcatcgatgcca

SEQ ID NO: 325941 - DNA, 30 bp, Artificial Sequence
  Synthetic oligonucleotide
gtcatgtgctattatgccgtgctgatgcca

SEQ ID NO: 325942 - DNA, 30 bp, Artificial Sequence
  Synthetic oligonucleotide
ataatttagtaagttatggcggctatgcca

SEQ ID NO: 325943 - DNA, 30 bp, Artificial Sequence
  Synthetic oligonucleotide
ttgggttagcctgcatcacattgtatgcca

SEQ ID NO: 325944 - DNA, 30 bp, Artificial Sequence
  Synthetic oligonucleotide
accgtgacgggatcaacctgatttatgcca

SEQ ID NO: 325945 - DNA, 30 bp, Artificial Sequence
  Synthetic oligonucleotide
aattaatcctcgacctatggcacactgcca

SEQ ID NO: 325946 - DNA, 30 bp, Artificial Sequence
  Synthetic oligonucleotide
tggttcaaggtaggcccgacagtactgcca

SEQ ID NO: 325947 - DNA, 30 bp, Artificial Sequence
  Synthetic oligonucleotide
aaggacgatatgacgtcagccaacctgcca

SEQ ID NO: 325948 - DNA, 30 bp, Artificial Sequence
  Synthetic oligonucleotide
agactattactaatatggacggacctgcca

SEQ ID NO: 325949 - DNA, 30 bp, Artificial Sequence
  Synthetic oligonucleotide
tcttatgcgttgccttacgccggcctgcca

SEQ ID NO: 325950 - DNA, 30 bp, Artificial Sequence
  Synthetic oligonucleotide
tgatagggatttgctcagcatgcagtgcca

SEQ ID NO: 325951 - DNA, 29 bp, Artificial Sequence
  Synthetic oligonucleotide
tgtgcctttcgacgccgactacggtgcca

SEQ ID NO: 325952 - DNA, 30 bp, Artificial Sequence
  Synthetic oligonucleotide
cttgtgtaagggacgacggtacatgtgcca

SEQ ID NO: 325953 - DNA, 30 bp, Artificial Sequence
  Synthetic oligonucleotide
ggccgcgcactcatagtacctcatgtgcca

SEQ ID NO: 325954 - DNA, 30 bp, Artificial Sequence
  Synthetic oligonucleotide
taattgggctattagctttttcaattgcca

SEQ ID NO: 325955 - DNA, 30 bp, Artificial Sequence
  Synthetic oligonucleotide
aaactggacgcacaaatacgcgaattgcca

SEQ ID NO: 325956 - DNA, 30 bp, Artificial Sequence
  Synthetic oligonucleotide
gttgggggcaaagatacactgacattgcca

SEQ ID NO: 325957 - DNA, 30 bp, Artificial Sequence
  Synthetic oligonucleotide
cagattgaagcttgtatggtgcgattgcca

SEQ ID NO: 325958 - DNA, 30 bp, Artificial Sequence
  Synthetic oligonucleotide
gtaagacgtagaatttacgtcggattgcca

SEQ ID NO: 325959 - DNA, 30 bp, Artificial Sequence
  Synthetic oligonucleotide
caacgcacgtttgtgctaaaactcttgcca

SEQ ID NO: 325960 - DNA, 30 bp, Artificial Sequence
  Synthetic oligonucleotide
atgttggttccgtccttccgcgtcttgcca

SEQ ID NO: 325961 - DNA, 30 bp, Artificial Sequence
  Synthetic oligonucleotide
taatcctgcacgggcgccctaacgttgcca

SEQ ID NO: 325962 - DNA, 30 bp, Artificial Sequence
  Synthetic oligonucleotide
aagggagaaatgttgcatatggctttgcca

SEQ ID NO: 325963 - DNA, 30 bp, Artificial Sequence
  Synthetic oligonucleotide
catcattttcgccggggactccgtttgcca

SEQ ID NO: 325964 - DNA, 30 bp, Artificial Sequence
  Synthetic oligonucleotide
catacacagtggttgggcaatatgaatcca

SEQ ID NO: 325965 - DNA, 30 bp, Artificial Sequence
  Synthetic oligonucleotide
cagaaacgggaacctagttcttataatcca

SEQ ID NO: 325966 - DNA, 30 bp, Artificial Sequence
  Synthetic oligonucleotide
gtaccgcattttgaataccgttataatcca

SEQ ID NO: 325967 - DNA, 30 bp, Artificial Sequence
  Synthetic oligonucleotide
tttgtgaaccgttttggggggcttaatcca

SEQ ID NO: 325968 - DNA, 30 bp, Artificial Sequence
  Synthetic oligonucleotide
ccgcctgttttatgcccactgcttaatcca

SEQ ID NO: 325969 - DNA, 30 bp, Artificial Sequence
  Synthetic oligonucleotide
taaatacatttgactgcggatcaacatcca

SEQ ID NO: 325970 - DNA, 30 bp, Artificial Sequence
  Synthetic oligonucleotide
ttatcccgctgtctagattccgcacatcca

SEQ ID NO: 325971 - DNA, 30 bp, Artificial Sequence
  Synthetic oligonucleotide
gccaggcttggagtgcccaaattgcatcca

SEQ ID NO: 325972 - DNA, 30 bp, Artificial Sequence
  Synthetic oligonucleotide
aaggtgctgtgtagcttccgatgtcatcca

SEQ ID NO: 325973 - DNA, 30 bp, Artificial Sequence
  Synthetic oligonucleotide
ttaactgcaggggcagatcaacaagatcca

SEQ ID NO: 325974 - DNA, 30 bp, Artificial Sequence
  Synthetic oligonucleotide
atatgagtataaaaaaggacctaagatcca

SEQ ID NO: 325975 - DNA, 30 bp, Artificial Sequence
  Synthetic oligonucleotide
ataaaacagatccatagacaaaaggatcca

SEQ ID NO: 325976 - DNA, 30 bp, Artificial Sequence
  Synthetic oligonucleotide
agccctgaaccgtcctctgtccaggatcca

SEQ ID NO: 325977 - DNA, 30 bp, Artificial Sequence
  Synthetic oligonucleotide
cagcagggtctgttctagttaactgatcca

SEQ ID NO: 325978 - DNA, 30 bp, Artificial Sequence
  Synthetic oligonucleotide
taagaagaaattccacgatcgcctgatcca

SEQ ID NO: 325979 - DNA, 30 bp, Artificial Sequence
  Synthetic oligonucleotide
cattccgcgcacaccgagataaaatatcca

SEQ ID NO: 325980 - DNA, 30 bp, Artificial Sequence
  Synthetic oligonucleotide
gataaagggggcccacggatgtcgtatcca

SEQ ID NO: 325981 - DNA, 30 bp, Artificial Sequence
  Synthetic oligonucleotide
cccacatcattttctgcactagtcactcca

SEQ ID NO: 325982 - DNA, 30 bp, Artificial Sequence
  Synthetic oligonucleotide
agtggcccagtgaaatatcttgggactcca

SEQ ID NO: 325983 - DNA, 30 bp, Artificial Sequence
  Synthetic oligonucleotide
taggcatatcacacaggacgtaatactcca

SEQ ID NO: 325984 - DNA, 30 bp, Artificial Sequence
  Synthetic oligonucleotide
aataggtgtagtcaatcatcgaaacctcca

SEQ ID NO: 325985 - DNA, 30 bp, Artificial Sequence
  Synthetic oligonucleotide
aaccagtgaaggcccgagcttttgcctcca

SEQ ID NO: 325986 - DNA, 30 bp, Artificial Sequence
  Synthetic oligonucleotide
accgttatccattgatggagcaatcctcca

SEQ ID NO: 325987 - DNA, 30 bp, Artificial Sequence
  Synthetic oligonucleotide
catgtgataggagcctagatgccagctcca

SEQ ID NO: 325988 - DNA, 30 bp, Artificial Sequence
  Synthetic oligonucleotide
atggactaacggaaatgaggtacatctcca

SEQ ID NO: 325989 - DNA, 30 bp, Artificial Sequence
  Synthetic oligonucleotide
ccaagccgggcggccgcgaggcgatctcca

SEQ ID NO: 325990 - DNA, 30 bp, Artificial Sequence
  Synthetic oligonucleotide
caatgaaatttccatctcggcgtatctcca

SEQ ID NO: 325991 - DNA, 30 bp, Artificial Sequence
  Synthetic oligonucleotide
cggcatgttataggcccgttcctctctcca

SEQ ID NO: 325992 - DNA, 30 bp, Artificial Sequence
  Synthetic oligonucleotide
gcttcatgtgatacctgagcgtagtctcca

SEQ ID NO: 325993 - DNA, 30 bp, Artificial Sequence
  Synthetic oligonucleotide
atctggaccggttagatatcagggtctcca

SEQ ID NO: 325994 - DNA, 30 bp, Artificial Sequence
  Synthetic oligonucleotide
tcaatgacgcttacccacatttcttctcca

SEQ ID NO: 325995 - DNA, 30 bp, Artificial Sequence
  Synthetic oligonucleotide
gtaagcctgtcagtcttgcctactagtcca

SEQ ID NO: 325996 - DNA, 30 bp, Artificial Sequence
  Synthetic oligonucleotide
tgggcttatcgagactgaggaggtagtcca

SEQ ID NO: 325997 - DNA, 30 bp, Artificial Sequence
  Synthetic oligonucleotide
ccaggggtgcagaacggaacggttagtcca

SEQ ID NO: 325998 - DNA, 30 bp, Artificial Sequence
  Synthetic oligonucleotide
ggttatatacacaaacgattagcgcgtcca

SEQ ID NO: 325999 - DNA, 30 bp, Artificial Sequence
  Synthetic oligonucleotide
atttgtgcgaacaggccaatactgcgtcca

SEQ ID NO: 326000 - DNA, 30 bp, Artificial Sequence
  Synthetic oligonucleotide
accgactttgacaagtgaaggaatcgtcca

SEQ ID NO: 326001 - DNA, 30 bp, Artificial Sequence
  Synthetic oligonucleotide
aatgctttgaccgcgtgacaatgaggtcca

SEQ ID NO: 326002 - DNA, 30 bp, Artificial Sequence
  Synthetic oligonucleotide
cacgtcgatttgcggagcttggacggtcca

SEQ ID NO: 326003 - DNA, 30 bp, Artificial Sequence
  Synthetic oligonucleotide
gacgtctcgtgttcgtcacaagcgggtcca

SEQ ID NO: 326004 - DNA, 30 bp, Artificial Sequence
  Synthetic oligonucleotide
taactgcatgtctctacctatcttggtcca

SEQ ID NO: 326005 - DNA, 30 bp, Artificial Sequence
  Synthetic oligonucleotide
gtgtctctctggaaggcggataaatgtcca

SEQ ID NO: 326006 - DNA, 30 bp, Artificial Sequence
  Synthetic oligonucleotide
gtgcgaagaaggcacaaaattctctgtcca

SEQ ID NO: 326007 - DNA, 30 bp, Artificial Sequence
  Synthetic oligonucleotide
gatgtagcccacataagctgttggtgtcca

SEQ ID NO: 326008 - DNA, 30 bp, Artificial Sequence
  Synthetic oligonucleotide
attatagcacagtctaaagataattgtcca

SEQ ID NO: 326009 - DNA, 30 bp, Artificial Sequence
  Synthetic oligonucleotide
gggtcacccgcttatccatttctaattcca

SEQ ID NO: 326010 - DNA, 30 bp, Artificial Sequence
  Synthetic oligonucleotide
aacgttttaactgcaccaagatccattcca

SEQ ID NO: 326011 - DNA, 30 bp, Artificial Sequence
  Synthetic oligonucleotide
ttgaacattctccgtctaagcatcattcca

SEQ ID NO: 326012 - DNA, 30 bp, Artificial Sequence
  Synthetic oligonucleotide
ctcgtcgagtaggccagctaatggattcca

SEQ ID NO: 326013 - DNA, 30 bp, Artificial Sequence
  Synthetic oligonucleotide
acaagccttggccccgggtctatgattcca

SEQ ID NO: 326014 - DNA, 30 bp, Artificial Sequence
  Synthetic oligonucleotide
agtactccatgccaagatcacttgattcca

SEQ ID NO: 326015 - DNA, 30 bp, Artificial Sequence
  Synthetic oligonucleotide
accatttaatgaatatgtcatcatattcca

SEQ ID NO: 326016 - DNA, 30 bp, Artificial Sequence
  Synthetic oligonucleotide
ccgtttggaaacggtgggtagtctattcca

SEQ ID NO: 326017 - DNA, 30 bp, Artificial Sequence
  Synthetic oligonucleotide
cttccagcatatctccgtagtatccttcca

SEQ ID NO: 326018 - DNA, 30 bp, Artificial Sequence
  Synthetic oligonucleotide
tgtcaagtatcatgttacggctggcttcca

SEQ ID NO: 326019 - DNA, 30 bp, Artificial Sequence
  Synthetic oligonucleotide
actatggtcttttactggcattctcttcca

SEQ ID NO: 326020 - DNA, 30 bp, Artificial Sequence
  Synthetic oligonucleotide
cccgcccaggtactatgcaacgaagttcca

SEQ ID NO: 326021 - DNA, 30 bp, Artificial Sequence
  Synthetic oligonucleotide
gcctataattagtctcagttccccgttcca

SEQ ID NO: 326022 - DNA, 30 bp, Artificial Sequence
  Synthetic oligonucleotide
acagtgaggtgcaggccccggcccgttcca

SEQ ID NO: 326023 - DNA, 30 bp, Artificial Sequence
  Synthetic oligonucleotide
gagggatcacgcggttggatagcatttcca

SEQ ID NO: 326024 - DNA, 30 bp, Artificial Sequence
  Synthetic oligonucleotide
ataacctgggccaaccagtgtgtctttcca

SEQ ID NO: 326025 - DNA, 30 bp, Artificial Sequence
  Synthetic oligonucleotide
aaataaatccgttagggggaagagtttcca

SEQ ID NO: 326026 - DNA, 30 bp, Artificial Sequence
  Synthetic oligonucleotide
tgagcagaatccttttcgcacacgtttcca

SEQ ID NO: 326027 - DNA, 30 bp, Artificial Sequence
  Synthetic oligonucleotide
ctggcctgtacacgaagtacgcggtttcca

SEQ ID NO: 326028 - DNA, 30 bp, Artificial Sequence
  Synthetic oligonucleotide
tgctagagtaaaacctgcgaagattttcca

SEQ ID NO: 326029 - DNA, 30 bp, Artificial Sequence
  Synthetic oligonucleotide
ggtacgtttgctagtcgattacgttttcca

SEQ ID NO: 326030 - DNA, 30 bp, Artificial Sequence
  Synthetic oligonucleotide
tacggtgtgaagcgtccgggggtttttcca

SEQ ID NO: 326031 - DNA, 30 bp, Artificial Sequence
  Synthetic oligonucleotide
atattgaaagttggtgatagggggaaagca

SEQ ID NO: 326032 - DNA, 30 bp, Artificial Sequence
  Synthetic oligonucleotide
ggtctctatttaggttaggcgaataaagca

SEQ ID NO: 326033 - DNA, 30 bp, Artificial Sequence
  Synthetic oligonucleotide
ttttcaacaggggttcgccacgctaaagca

SEQ ID NO: 326034 - DNA, 30 bp, Artificial Sequence
  Synthetic oligonucleotide
caaccgggcgtaactcgccgtagtaaagca

SEQ ID NO: 326035 - DNA, 30 bp, Artificial Sequence
  Synthetic oligonucleotide
aaggccctgggctaaaggacaatacaagca

SEQ ID NO: 326036 - DNA, 30 bp, Artificial Sequence
  Synthetic oligonucleotide
gacatctaaccggcggggcccccccaagca

SEQ ID NO: 326037 - DNA, 30 bp, Artificial Sequence
  Synthetic oligonucleotide
gaagtgatgcgtctcattacgagccaagca

SEQ ID NO: 326038 - DNA, 30 bp, Artificial Sequence
  Synthetic oligonucleotide
aattcgttcctcatgcccgactggcaagca

SEQ ID NO: 326039 - DNA, 30 bp, Artificial Sequence
  Synthetic oligonucleotide
gagaccttcggcgtgataattatgcaagca

SEQ ID NO: 326040 - DNA, 30 bp, Artificial Sequence
  Synthetic oligonucleotide
aaggacgcatggaatgatataaatcaagca

SEQ ID NO: 326041 - DNA, 30 bp, Artificial Sequence
  Synthetic oligonucleotide
attcattgagtcctatgtggggctcaagca

SEQ ID NO: 326042 - DNA, 30 bp, Artificial Sequence
  Synthetic oligonucleotide
gacctccagccatgtttttggcgtcaagca

SEQ ID NO: 326043 - DNA, 30 bp, Artificial Sequence
  Synthetic oligonucleotide
atatggcgtttagcctaggccattcaagca

SEQ ID NO: 326044 - DNA, 30 bp, Artificial Sequence
  Synthetic oligonucleotide
ggtaataggtgagggggaactgtcgaagca

SEQ ID NO: 326045 - DNA, 30 bp, Artificial Sequence
  Synthetic oligonucleotide
gcgggttagacggcccgtcttggataagca

SEQ ID NO: 326046 - DNA, 30 bp, Artificial Sequence
  Synthetic oligonucleotide
tcggcgttataaagtcgaaatttataagca

SEQ ID NO: 326047 - DNA, 30 bp, Artificial Sequence
  Synthetic oligonucleotide
tattatcagggacaagacggcctgtaagca

SEQ ID NO: 326048 - DNA, 30 bp, Artificial Sequence
  Synthetic oligonucleotide
cgcgatcgtaacgaacagcgacattaagca

SEQ ID NO: 326049 - DNA, 30 bp, Artificial Sequence
  Synthetic oligonucleotide
agctcaagaaatggggtcagcgattaagca

SEQ ID NO: 326050 - DNA, 30 bp, Artificial Sequence
  Synthetic oligonucleotide
aataacccgactcggcccgtcaaaacagca

SEQ ID NO: 326051 - DNA, 30 bp, Artificial Sequence
  Synthetic oligonucleotide
actgatgccctgaaaggcttttgaacagca

SEQ ID NO: 326052 - DNA, 30 bp, Artificial Sequence
  Synthetic oligonucleotide
atgttgaggtctctgggtgttggcacagca

SEQ ID NO: 326053 - DNA, 30 bp, Artificial Sequence
  Synthetic oligonucleotide
gagggcgtgctccaattatatctcacagca

SEQ ID NO: 326054 - DNA, 30 bp, Artificial Sequence
  Synthetic oligonucleotide
gtaagtcttagggggtatttacggacagca

SEQ ID NO: 326055 - DNA, 30 bp, Artificial Sequence
  Synthetic oligonucleotide
acctctaaggcaattgtgatccgtacagca

SEQ ID NO: 326056 - DNA, 30 bp, Artificial Sequence
  Synthetic oligonucleotide
caaccttagcatggcagaaagtttacagca

SEQ ID NO: 326057 - DNA, 30 bp, Artificial Sequence
  Synthetic oligonucleotide
tgcagatatatagccgcattatagccagca

SEQ ID NO: 326058 - DNA, 30 bp, Artificial Sequence
  Synthetic oligonucleotide
cgttttcgtcattttgtgcaaaggccagca

SEQ ID NO: 326059 - DNA, 30 bp, Artificial Sequence
  Synthetic oligonucleotide
gaaagggcttttgtcccggtaatagcagca

SEQ ID NO: 326060 - DNA, 30 bp, Artificial Sequence
  Synthetic oligonucleotide
tctggaattgggcagctcagtgcggcagca

SEQ ID NO: 326061 - DNA, 30 bp, Artificial Sequence
  Synthetic oligonucleotide
aactagttttactcatccaagtgggcagca

SEQ ID NO: 326062 - DNA, 30 bp, Artificial Sequence
  Synthetic oligonucleotide
aagaacagcctatttagtggcttggcagca

SEQ ID NO: 326063 - DNA, 29 bp, Artificial Sequence
  Synthetic oligonucleotide
agattatatagcgaaactgaggtgcagca

SEQ ID NO: 326064 - DNA, 30 bp, Artificial Sequence
  Synthetic oligonucleotide
agccccaggacagtattcattaactcagca

SEQ ID NO: 326065 - DNA, 30 bp, Artificial Sequence
  Synthetic oligonucleotide
tgttggtgtgaggtgactaaaaagtcagca

SEQ ID NO: 326066 - DNA, 30 bp, Artificial Sequence
  Synthetic oligonucleotide
gctactaaggtccagagtatttagtcagca

SEQ ID NO: 326067 - DNA, 30 bp, Artificial Sequence
  Synthetic oligonucleotide
ccctgtggtatgtcgacagacatgtcagca

SEQ ID NO: 326068 - DNA, 30 bp, Artificial Sequence
  Synthetic oligonucleotide
aagtaccctaggacacattgtcattcagca

SEQ ID NO: 326069 - DNA, 30 bp, Artificial Sequence
  Synthetic oligonucleotide
ctaagattactaccagggtagtgttcagca

SEQ ID NO: 326070 - DNA, 30 bp, Artificial Sequence
  Synthetic oligonucleotide
ataacaaacaaaggttgtacgcaaagagca

SEQ ID NO: 326071 - DNA, 30 bp, Artificial Sequence
  Synthetic oligonucleotide
tatatcggctctatgctagggtgaagagca

SEQ ID NO: 326072 - DNA, 30 bp, Artificial Sequence
  Synthetic oligonucleotide
gagaagacatgttactcaactgtcagagca

SEQ ID NO: 326073 - DNA, 30 bp, Artificial Sequence
  Synthetic oligonucleotide
taacatgtgtcttgatttccggggagagca

SEQ ID NO: 326074 - DNA, 30 bp, Artificial Sequence
  Synthetic oligonucleotide
ttcgtgccgagccacactcgaattagagca

SEQ ID NO: 326075 - DNA, 30 bp, Artificial Sequence
  Synthetic oligonucleotide
cgttcatgagggaattaaggcctacgagca

SEQ ID NO: 326076 - DNA, 30 bp, Artificial Sequence
  Synthetic oligonucleotide
gcttattgtttgataaatggaagccgagca

SEQ ID NO: 326077 - DNA, 30 bp, Artificial Sequence
  Synthetic oligonucleotide
aaaagagtctctctagcggcacagcgagca

SEQ ID NO: 326078 - DNA, 30 bp, Artificial Sequence
  Synthetic oligonucleotide
gcgtacgccgactacatggtgtttcgagca

SEQ ID NO: 326079 - DNA, 30 bp, Artificial Sequence
  Synthetic oligonucleotide
gtaaaaagtgcgataacgactaaaggagca

SEQ ID NO: 326080 - DNA, 30 bp, Artificial Sequence
  Synthetic oligonucleotide
gatatactaggcactggccggaccggagca

SEQ ID NO: 326081 - DNA, 30 bp, Artificial Sequence
  Synthetic oligonucleotide
gccatatccgagagattacgatccggagca

SEQ ID NO: 326082 - DNA, 30 bp, Artificial Sequence
  Synthetic oligonucleotide
gcatcacccgtgtaaggtcagctgggagca

SEQ ID NO: 326083 - DNA, 30 bp, Artificial Sequence
  Synthetic oligonucleotide
gaaactcgatagattatatactctggagca

SEQ ID NO: 326084 - DNA, 30 bp, Artificial Sequence
  Synthetic oligonucleotide
tcagagcgtatggtgtgtggccttggagca

SEQ ID NO: 326085 - DNA, 30 bp, Artificial Sequence
  Synthetic oligonucleotide
tctaggtacattaacgaatctgttggagca

SEQ ID NO: 326086 - DNA, 30 bp, Artificial Sequence
  Synthetic oligonucleotide
ctacaaaggaacctgtcgttacggtgagca

SEQ ID NO: 326087 - DNA, 30 bp, Artificial Sequence
  Synthetic oligonucleotide
gggtagcctacggggcgaaacttgtgagca

SEQ ID NO: 326088 - DNA, 30 bp, Artificial Sequence
  Synthetic oligonucleotide
caaaatataaaagtggttatattttgagca

SEQ ID NO: 326089 - DNA, 30 bp, Artificial Sequence
  Synthetic oligonucleotide
gacccttgcaagatcgcatacgaaatagca

SEQ ID NO: 326090 - DNA, 30 bp, Artificial Sequence
  Synthetic oligonucleotide
gcgttccgaatagtaacatagtaaatagca

SEQ ID NO: 326091 - DNA, 30 bp, Artificial Sequence
  Synthetic oligonucleotide
taatttatttggagaggacgaataatagca

SEQ ID NO: 326092 - DNA, 30 bp, Artificial Sequence
  Synthetic oligonucleotide
caccacattacgcatactgctcccatagca

SEQ ID NO: 326093 - DNA, 31 bp, Artificial Sequence
  Synthetic oligonucleotide
agtaggggacaacgcagaatgtgccatagca

SEQ ID NO: 326094 - DNA, 30 bp, Artificial Sequence
  Synthetic oligonucleotide
ctttgttgaaaaggacacggccagatagca

SEQ ID NO: 326095 - DNA, 30 bp, Artificial Sequence
  Synthetic oligonucleotide
gctttctaaagataagaatattagatagca

SEQ ID NO: 326096 - DNA, 30 bp, Artificial Sequence
  Synthetic oligonucleotide
ctcgatgagcctgcattggcgtctatagca

SEQ ID NO: 326097 - DNA, 30 bp, Artificial Sequence
  Synthetic oligonucleotide
gtttgatagagaccaccgttacaactagca

SEQ ID NO: 326098 - DNA, 30 bp, Artificial Sequence
  Synthetic oligonucleotide
tatagcgcggggagaatccactaactagca

SEQ ID NO: 326099 - DNA, 30 bp, Artificial Sequence
  Synthetic oligonucleotide
ttgccgtgttagccattcttggccctagca

SEQ ID NO: 326100 - DNA, 30 bp, Artificial Sequence
  Synthetic oligonucleotide
cgctggccaagcatagcgctgcgcctagca

SEQ ID NO: 326101 - DNA, 30 bp, Artificial Sequence
  Synthetic oligonucleotide
tcctttcaccgcctccttcacgtcctagca

SEQ ID NO: 326102 - DNA, 30 bp, Artificial Sequence
  Synthetic oligonucleotide
gccgacctccagttagtgttcgctctagca

SEQ ID NO: 326103 - DNA, 30 bp, Artificial Sequence
  Synthetic oligonucleotide
ggtggggatttgtggatttggagtctagca

SEQ ID NO: 326104 - DNA, 30 bp, Artificial Sequence
  Synthetic oligonucleotide
atgccgcatgtttaatacgcgtgtctagca

SEQ ID NO: 326105 - DNA, 30 bp, Artificial Sequence
  Synthetic oligonucleotide
aacgggtagcttgcgcatgccccagtagca

SEQ ID NO: 326106 - DNA, 30 bp, Artificial Sequence
  Synthetic oligonucleotide
acatgcctgcgcccgactcacgcagtagca

SEQ ID NO: 326107 - DNA, 30 bp, Artificial Sequence
  Synthetic oligonucleotide
atcattgatcgagaggacccggtagtagca

SEQ ID NO: 326108 - DNA, 30 bp, Artificial Sequence
  Synthetic oligonucleotide
gtgttatcttcgtagaaggtaaacgtagca

SEQ ID NO: 326109 - DNA, 30 bp, Artificial Sequence
  Synthetic oligonucleotide
ctatacagcttgatttgattagtggtagca

SEQ ID NO: 326110 - DNA, 30 bp, Artificial Sequence
  Synthetic oligonucleotide
taacagattaagcccgcttaattggtagca

SEQ ID NO: 326111 - DNA, 30 bp, Artificial Sequence
  Synthetic oligonucleotide
atgccatcccactctgcaggcattgtagca

SEQ ID NO: 326112 - DNA, 30 bp, Artificial Sequence
  Synthetic oligonucleotide
ggcatctggaatgcaagcttttttgtagca

SEQ ID NO: 326113 - DNA, 30 bp, Artificial Sequence
  Synthetic oligonucleotide
gagcgcaatagacgtgctagcaaattagca

SEQ ID NO: 326114 - DNA, 30 bp, Artificial Sequence
  Synthetic oligonucleotide
taaaatcactgttggtatcggtgattagca

SEQ ID NO: 326115 - DNA, 30 bp, Artificial Sequence
  Synthetic oligonucleotide
actatgtgtcgtaggacttgttgattagca

SEQ ID NO: 326116 - DNA, 30 bp, Artificial Sequence
  Synthetic oligonucleotide
attggactaaggcttgggtagcgcttagca

SEQ ID NO: 326117 - DNA, 30 bp, Artificial Sequence
  Synthetic oligonucleotide
cagaaaagctacttaggcttcgatttagca

SEQ ID NO: 326118 - DNA, 30 bp, Artificial Sequence
  Synthetic oligonucleotide
acgctctattggttctgatagtgtttagca

SEQ ID NO: 326119 - DNA, 30 bp, Artificial Sequence
  Synthetic oligonucleotide
gtggcgctggattccagtaacacaaacgca

SEQ ID NO: 326120 - DNA, 30 bp, Artificial Sequence
  Synthetic oligonucleotide
tgtaattcggcgatacgggtaataaacgca

SEQ ID NO: 326121 - DNA, 30 bp, Artificial Sequence
  Synthetic oligonucleotide
tttagtacatgagacgttatatccaacgca

SEQ ID NO: 326122 - DNA, 30 bp, Artificial Sequence
  Synthetic oligonucleotide
ggtgggcttccatacagagggttcaacgca

SEQ ID NO: 326123 - DNA, 30 bp, Artificial Sequence
  Synthetic oligonucleotide
ggggccctacgaagaagtcgaagtaacgca

SEQ ID NO: 326124 - DNA, 30 bp, Artificial Sequence
  Synthetic oligonucleotide
atccgacgaacacgccagctccgtaacgca

SEQ ID NO: 326125 - DNA, 30 bp, Artificial Sequence
  Synthetic oligonucleotide
ttacaattgataaaaaacatgggtaacgca

SEQ ID NO: 326126 - DNA, 30 bp, Artificial Sequence
  Synthetic oligonucleotide
cattgagaacggttatatttgctacacgca

SEQ ID NO: 326127 - DNA, 30 bp, Artificial Sequence
  Synthetic oligonucleotide
acgagtctgtcttatgtactctgccacgca

SEQ ID NO: 326128 - DNA, 30 bp, Artificial Sequence
  Synthetic oligonucleotide
gtgggtggttccggaattgtcgcgcacgca

SEQ ID NO: 326129 - DNA, 30 bp, Artificial Sequence
  Synthetic oligonucleotide
ttatagagaataccaaatggccggcacgca

SEQ ID NO: 326130 - DNA, 30 bp, Artificial Sequence
  Synthetic oligonucleotide
tatgagttgcaatagtttagagggcacgca

SEQ ID NO: 326131 - DNA, 30 bp, Artificial Sequence
  Synthetic oligonucleotide
tggtaaattacggagactcgattgcacgca

SEQ ID NO: 326132 - DNA, 30 bp, Artificial Sequence
  Synthetic oligonucleotide
ttaccggccaatgatcagtgaggtcacgca

SEQ ID NO: 326133 - DNA, 30 bp, Artificial Sequence
  Synthetic oligonucleotide
agtatggaagttggaatgacaattcacgca

SEQ ID NO: 326134 - DNA, 30 bp, Artificial Sequence
  Synthetic oligonucleotide
gtgagcacgtactcaaaagtcggagacgca

SEQ ID NO: 326135 - DNA, 30 bp, Artificial Sequence
  Synthetic oligonucleotide
tgtaggtttaacggcgtagcagacgacgca

SEQ ID NO: 326136 - DNA, 30 bp, Artificial Sequence
  Synthetic oligonucleotide
gttgctggcgagggctaaataatggacgca

SEQ ID NO: 326137 - DNA, 30 bp, Artificial Sequence
  Synthetic oligonucleotide
atcaggcggtccgttgggaacgtggacgca

SEQ ID NO: 326138 - DNA, 30 bp, Artificial Sequence
  Synthetic oligonucleotide
ctgcttcgaacggctgcggaagcatacgca

SEQ ID NO: 326139 - DNA, 30 bp, Artificial Sequence
  Synthetic oligonucleotide
taccttaggcccttagggggaatatacgca

SEQ ID NO: 326140 - DNA, 30 bp, Artificial Sequence
  Synthetic oligonucleotide
taacgttcaggcccgtgtcttagctacgca

SEQ ID NO: 326141 - DNA, 30 bp, Artificial Sequence
  Synthetic oligonucleotide
gattggatttgacgagttcaactctacgca

SEQ ID NO: 326142 - DNA, 30 bp, Artificial Sequence
  Synthetic oligonucleotide
gaccgctatcacacttaccggtaaaccgca

SEQ ID NO: 326143 - DNA, 30 bp, Artificial Sequence
  Synthetic oligonucleotide
tagacagggtcgtcccatgcgttcaccgca

SEQ ID NO: 326144 - DNA, 30 bp, Artificial Sequence
  Synthetic oligonucleotide
ttccaacaactagtaagatcatagaccgca

SEQ ID NO: 326145 - DNA, 30 bp, Artificial Sequence
  Synthetic oligonucleotide
gaatagcccaagactttgacaatgaccgca

SEQ ID NO: 326146 - DNA, 30 bp, Artificial Sequence
  Synthetic oligonucleotide
gggcgcagtacttgaaggcggatgaccgca

SEQ ID NO: 326147 - DNA, 30 bp, Artificial Sequence
  Synthetic oligonucleotide
gaaccaagtgatacggatacttgacccgca

SEQ ID NO: 326148 - DNA, 30 bp, Artificial Sequence
  Synthetic oligonucleotide
aggcacaattaacgcgggtcggaccccgca

SEQ ID NO: 326149 - DNA, 30 bp, Artificial Sequence
  Synthetic oligonucleotide
cgctacgtgggatgagttaaccgccccgca

SEQ ID NO: 326150 - DNA, 30 bp, Artificial Sequence
  Synthetic oligonucleotide
agtggaatgtctttcagggtctggcccgca

SEQ ID NO: 326151 - DNA, 30 bp, Artificial Sequence
  Synthetic oligonucleotide
aataatcgggtacgaattacgcctcccgca

SEQ ID NO: 326152 - DNA, 30 bp, Artificial Sequence
  Synthetic oligonucleotide
aatagactaaggaatgtagctacagccgca

SEQ ID NO: 326153 - DNA, 30 bp, Artificial Sequence
  Synthetic oligonucleotide
aaatgcacgccataggttataggagccgca

SEQ ID NO: 326154 - DNA, 30 bp, Artificial Sequence
  Synthetic oligonucleotide
tagcctatcgttttggacgcttatgccgca

SEQ ID NO: 326155 - DNA, 30 bp, Artificial Sequence
  Synthetic oligonucleotide
tatacgcgttatgccggatcgatctccgca

SEQ ID NO: 326156 - DNA, 30 bp, Artificial Sequence
  Synthetic oligonucleotide
aatatgccatgcaatcaaaccaagtccgca

SEQ ID NO: 326157 - DNA, 30 bp, Artificial Sequence
  Synthetic oligonucleotide
ttggacaggatgcatctttaatcgtccgca

SEQ ID NO: 326158 - DNA, 30 bp, Artificial Sequence
  Synthetic oligonucleotide
taaggtcgctataacgtaatttgttccgca

SEQ ID NO: 326159 - DNA, 30 bp, Artificial Sequence
  Synthetic oligonucleotide
ggcctcaaacccggcggttacctttccgca

SEQ ID NO: 326160 - DNA, 30 bp, Artificial Sequence
  Synthetic oligonucleotide
gagccgacctgcaggtgtctcaacagcgca

SEQ ID NO: 326161 - DNA, 30 bp, Artificial Sequence
  Synthetic oligonucleotide
ctgtgacatggatatcctctgcacagcgca

SEQ ID NO: 326162 - DNA, 30 bp, Artificial Sequence
  Synthetic oligonucleotide
tcacagcattatgggttatcaaatagcgca

SEQ ID NO: 326163 - DNA, 30 bp, Artificial Sequence
  Synthetic oligonucleotide
taattgcgactttcccggagagatagcgca

SEQ ID NO: 326164 - DNA, 30 bp, Artificial Sequence
  Synthetic oligonucleotide
gattttatcgtaaaaggttcctctagcgca

SEQ ID NO: 326165 - DNA, 30 bp, Artificial Sequence
  Synthetic oligonucleotide
ggtttgttgtgcgaataacgggaacgcgca

SEQ ID NO: 326166 - DNA, 30 bp, Artificial Sequence
  Synthetic oligonucleotide
tttttcacgcacaaatagtacacacgcgca

SEQ ID NO: 326167 - DNA, 30 bp, Artificial Sequence
  Synthetic oligonucleotide
ttccacgcgcctaggtgaagaaaccgcgca

SEQ ID NO: 326168 - DNA, 30 bp, Artificial Sequence
  Synthetic oligonucleotide
actaaaaagccgtggctgccgtgccgcgca

SEQ ID NO: 326169 - DNA, 30 bp, Artificial Sequence
  Synthetic oligonucleotide
atcatataaaggtttgtgtactgtcgcgca

SEQ ID NO: 326170 - DNA, 30 bp, Artificial Sequence
  Synthetic oligonucleotide
ccgggtggccgcgtatccgtgtttcgcgca

SEQ ID NO: 326171 - DNA, 30 bp, Artificial Sequence
  Synthetic oligonucleotide
tggatgtcgccaatatgaatttttcgcgca

SEQ ID NO: 326172 - DNA, 30 bp, Artificial Sequence
  Synthetic oligonucleotide
gcaactgctcaggcgagaggttacggcgca

SEQ ID NO: 326173 - DNA, 30 bp, Artificial Sequence
  Synthetic oligonucleotide
acacatcatttacggccacttttcggcgca

SEQ ID NO: 326174 - DNA, 30 bp, Artificial Sequence
  Synthetic oligonucleotide
tcctatactgtgagaggcaaatagggcgca

SEQ ID NO: 326175 - DNA, 30 bp, Artificial Sequence
  Synthetic oligonucleotide
ttgcgcacgtaggggagttccgcgggcgca

SEQ ID NO: 326176 - DNA, 30 bp, Artificial Sequence
  Synthetic oligonucleotide
atggtcgttggttgttgaaggatgggcgca

SEQ ID NO: 326177 - DNA, 29 bp, Artificial Sequence
  Synthetic oligonucleotide
tgtgagaatctcccacgggcaatggcgca

SEQ ID NO: 326178 - DNA, 30 bp, Artificial Sequence
  Synthetic oligonucleotide
gagtggtactccagtacggcccgtggcgca

SEQ ID NO: 326179 - DNA, 30 bp, Artificial Sequence
  Synthetic oligonucleotide
taaaagctccattatgtaagtgttggcgca

SEQ ID NO: 326180 - DNA, 30 bp, Artificial Sequence
  Synthetic oligonucleotide
tggatcggatggatggggaacatatgcgca

SEQ ID NO: 326181 - DNA, 30 bp, Artificial Sequence
  Synthetic oligonucleotide
cctcgtcatgacccttatgttcggtgcgca

SEQ ID NO: 326182 - DNA, 30 bp, Artificial Sequence
  Synthetic oligonucleotide
atttgggcgtcggtcagtagctggtgcgca

SEQ ID NO: 326183 - DNA, 30 bp, Artificial Sequence
  Synthetic oligonucleotide
gctaattatttgcgtagagttcaaatcgca

SEQ ID NO: 326184 - DNA, 30 bp, Artificial Sequence
  Synthetic oligonucleotide
tagagacagacagggctcttattaatcgca

SEQ ID NO: 326185 - DNA, 30 bp, Artificial Sequence
  Synthetic oligonucleotide
gactcgaggatgccacgataggacatcgca

SEQ ID NO: 326186 - DNA, 30 bp, Artificial Sequence
  Synthetic oligonucleotide
catattttgagccatccgtgtaccatcgca

SEQ ID NO: 326187 - DNA, 30 bp, Artificial Sequence
  Synthetic oligonucleotide
acaaaaatacgggcgctcctagcgatcgca

SEQ ID NO: 326188 - DNA, 30 bp, Artificial Sequence
  Synthetic oligonucleotide
agtcaaaaaggtagaagaagcaggatcgca

SEQ ID NO: 326189 - DNA, 30 bp, Artificial Sequence
  Synthetic oligonucleotide
aatgggcggccggcgcggtaccccctcgca

SEQ ID NO: 326190 - DNA, 30 bp, Artificial Sequence
  Synthetic oligonucleotide
cttatttgcagcggccttaaggccctcgca

SEQ ID NO: 326191 - DNA, 30 bp, Artificial Sequence
  Synthetic oligonucleotide
agaacgggaagagcatagcggtccctcgca

SEQ ID NO: 326192 - DNA, 30 bp, Artificial Sequence
  Synthetic oligonucleotide
tggagactaattcgggcgctgagcctcgca

SEQ ID NO: 326193 - DNA, 30 bp, Artificial Sequence
  Synthetic oligonucleotide
agtagatagtatcctaggtcatggctcgca

SEQ ID NO: 326194 - DNA, 30 bp, Artificial Sequence
  Synthetic oligonucleotide
caataagaataagccatctctaatctcgca

SEQ ID NO: 326195 - DNA, 30 bp, Artificial Sequence
  Synthetic oligonucleotide
catgtagaccccgcaaaacgggcagtcgca

SEQ ID NO: 326196 - DNA, 30 bp, Artificial Sequence
  Synthetic oligonucleotide
cgattaagaaacgagttgctgagggtcgca

SEQ ID NO: 326197 - DNA, 30 bp, Artificial Sequence
  Synthetic oligonucleotide
aaaggtttagattattatagggtggtcgca

SEQ ID NO: 326198 - DNA, 30 bp, Artificial Sequence
  Synthetic oligonucleotide
gggctgtaagtaagccgactacatgtcgca

SEQ ID NO: 326199 - DNA, 30 bp, Artificial Sequence
  Synthetic oligonucleotide
aaagtctaaaagcttgcaacaattgtcgca

SEQ ID NO: 326200 - DNA, 30 bp, Artificial Sequence
  Synthetic oligonucleotide
aactgtaaggagcagaaggcgaaattcgca

SEQ ID NO: 326201 - DNA, 30 bp, Artificial Sequence
  Synthetic oligonucleotide
cagcaatacgagaactgcgtggaattcgca

SEQ ID NO: 326202 - DNA, 30 bp, Artificial Sequence
  Synthetic oligonucleotide
ccctgttatcacttcgtaaagggattcgca

SEQ ID NO: 326203 - DNA, 30 bp, Artificial Sequence
  Synthetic oligonucleotide
ggctatggattgatagggatatcgttcgca

SEQ ID NO: 326204 - DNA, 30 bp, Artificial Sequence
  Synthetic oligonucleotide
aatgtgagtatgtgtgcgtaagctttcgca

SEQ ID NO: 326205 - DNA, 30 bp, Artificial Sequence
  Synthetic oligonucleotide
tagggtacgtcggcatttcattgcaaggca

SEQ ID NO: 326206 - DNA, 30 bp, Artificial Sequence
  Synthetic oligonucleotide
gtaggtgtttagaatcctttgaataaggca

SEQ ID NO: 326207 - DNA, 30 bp, Artificial Sequence
  Synthetic oligonucleotide
agatggacatattgctttttatttaaggca

SEQ ID NO: 326208 - DNA, 30 bp, Artificial Sequence
  Synthetic oligonucleotide
ttgctgccgcaagagtgttcataacaggca

SEQ ID NO: 326209 - DNA, 30 bp, Artificial Sequence
  Synthetic oligonucleotide
gtactgcaatacgcgataggcgcacaggca

SEQ ID NO: 326210 - DNA, 30 bp, Artificial Sequence
  Synthetic oligonucleotide
gcttcgcaatagtcttttgcaccccaggca

SEQ ID NO: 326211 - DNA, 30 bp, Artificial Sequence
  Synthetic oligonucleotide
ccaggaggggttttctatgacttgcaggca

SEQ ID NO: 326212 - DNA, 30 bp, Artificial Sequence
  Synthetic oligonucleotide
atgcgcaacacattttgcaagtgtcaggca

SEQ ID NO: 326213 - DNA, 30 bp, Artificial Sequence
  Synthetic oligonucleotide
cacgcacccgacgaggattctcgagaggca

SEQ ID NO: 326214 - DNA, 30 bp, Artificial Sequence
  Synthetic oligonucleotide
ccgaccagtttacgcttggatttagaggca

SEQ ID NO: 326215 - DNA, 31 bp, Artificial Sequence
  Synthetic oligonucleotide
ataagcagagaaagtcctcaggatcgaggca

SEQ ID NO: 326216 - DNA, 30 bp, Artificial Sequence
  Synthetic oligonucleotide
cgtgcacaaccgatacgggtttcggaggca

SEQ ID NO: 326217 - DNA, 30 bp, Artificial Sequence
  Synthetic oligonucleotide
ctctacaggtcctaacttgttagggaggca

SEQ ID NO: 326218 - DNA, 30 bp, Artificial Sequence
  Synthetic oligonucleotide
tgagtgagtccaggcctcgctcgtgaggca

SEQ ID NO: 326219 - DNA, 30 bp, Artificial Sequence
  Synthetic oligonucleotide
cagcaggcgcgatagcgcgtgattgaggca

SEQ ID NO: 326220 - DNA, 30 bp, Artificial Sequence
  Synthetic oligonucleotide
ggcggatcttgcgctggggtatttgaggca

SEQ ID NO: 326221 - DNA, 30 bp, Artificial Sequence
  Synthetic oligonucleotide
cgattgctttgcctactcggcaaataggca

SEQ ID NO: 326222 - DNA, 30 bp, Artificial Sequence
  Synthetic oligonucleotide
gctggtcttaggcttccaaaaggataggca

SEQ ID NO: 326223 - DNA, 30 bp, Artificial Sequence
  Synthetic oligonucleotide
tagccaatcctcacgactgagggataggca

SEQ ID NO: 326224 - DNA, 30 bp, Artificial Sequence
  Synthetic oligonucleotide
tgtacaacgatagtggcaattttctaggca

SEQ ID NO: 326225 - DNA, 30 bp, Artificial Sequence
  Synthetic oligonucleotide
cattgcatatgaagggtgtagtcgtaggca

SEQ ID NO: 326226 - DNA, 30 bp, Artificial Sequence
  Synthetic oligonucleotide
cgtctgggataaccatgcggtatgtaggca

SEQ ID NO: 326227 - DNA, 30 bp, Artificial Sequence
  Synthetic oligonucleotide
ggaactttattcacaatttactattaggca

SEQ ID NO: 326228 - DNA, 30 bp, Artificial Sequence
  Synthetic oligonucleotide
tggatcagctctggctcgagaacaacggca

SEQ ID NO: 326229 - DNA, 30 bp, Artificial Sequence
  Synthetic oligonucleotide
ataccatctggtatgcactggtcaacggca

SEQ ID NO: 326230 - DNA, 30 bp, Artificial Sequence
  Synthetic oligonucleotide
gtaccgcctaggggtagccgtagaacggca

SEQ ID NO: 326231 - DNA, 30 bp, Artificial Sequence
  Synthetic oligonucleotide
gggtagaattcagattaacaagtaacggca

SEQ ID NO: 326232 - DNA, 30 bp, Artificial Sequence
  Synthetic oligonucleotide
ctgacaagctctaccatgttcaacacggca

SEQ ID NO: 326233 - DNA, 30 bp, Artificial Sequence
  Synthetic oligonucleotide
tgaatccgggaggtgttttatcccacggca

SEQ ID NO: 326234 - DNA, 30 bp, Artificial Sequence
  Synthetic oligonucleotide
tagatgtaaatttcacgggcatgtacggca

SEQ ID NO: 326235 - DNA, 30 bp, Artificial Sequence
  Synthetic oligonucleotide
gcaaagactaaagacgttgaatttacggca

SEQ ID NO: 326236 - DNA, 30 bp, Artificial Sequence
  Synthetic oligonucleotide
tttatgattacaccgagaatgtcaccggca

SEQ ID NO: 326237 - DNA, 30 bp, Artificial Sequence
  Synthetic oligonucleotide
tgcttccaggactgattgacctacccggca

SEQ ID NO: 326238 - DNA, 30 bp, Artificial Sequence
  Synthetic oligonucleotide
tgctgtaatagatatagcgggttcccggca

SEQ ID NO: 326239 - DNA, 30 bp, Artificial Sequence
  Synthetic oligonucleotide
gttacgaccacacatccgttcgagccggca

SEQ ID NO: 326240 - DNA, 30 bp, Artificial Sequence
  Synthetic oligonucleotide
cgcagccaaattctcttcttccatccggca

SEQ ID NO: 326241 - DNA, 30 bp, Artificial Sequence
  Synthetic oligonucleotide
ggggtggtttccccatgttttttggcggca

SEQ ID NO: 326242 - DNA, 30 bp, Artificial Sequence
  Synthetic oligonucleotide
agctattgagtcctcggaaaataatcggca

SEQ ID NO: 326243 - DNA, 30 bp, Artificial Sequence
  Synthetic oligonucleotide
ttgcatgttttctagcgaagagcgtcggca

SEQ ID NO: 326244 - DNA, 30 bp, Artificial Sequence
  Synthetic oligonucleotide
ataatagagccctgtcgcgcgtggtcggca

SEQ ID NO: 326245 - DNA, 30 bp, Artificial Sequence
  Synthetic oligonucleotide
gacatcttcgttaagtgttagaaaagggca

SEQ ID NO: 326246 - DNA, 30 bp, Artificial Sequence
  Synthetic oligonucleotide
gtaagcccaatcaggtataaatgaagggca

SEQ ID NO: 326247 - DNA, 30 bp, Artificial Sequence
  Synthetic oligonucleotide
ttcgatttacaggactggtcgtgaagggca

SEQ ID NO: 326248 - DNA, 30 bp, Artificial Sequence
  Synthetic oligonucleotide
gatgcaagtgttgaagcttaaataagggca

SEQ ID NO: 326249 - DNA, 30 bp, Artificial Sequence
  Synthetic oligonucleotide
taaagcatgtgtaagacatagcacagggca

SEQ ID NO: 326250 - DNA, 30 bp, Artificial Sequence
  Synthetic oligonucleotide
gtctagagcctttcttccaaggacagggca

SEQ ID NO: 326251 - DNA, 30 bp, Artificial Sequence
  Synthetic oligonucleotide
ctaaggtagatattgcgtttgcgcagggca

SEQ ID NO: 326252 - DNA, 30 bp, Artificial Sequence
  Synthetic oligonucleotide
tttctaggctcgtgtttgagtttcagggca

SEQ ID NO: 326253 - DNA, 30 bp, Artificial Sequence
  Synthetic oligonucleotide
tactaaacatgccttgctccttggagggca

SEQ ID NO: 326254 - DNA, 30 bp, Artificial Sequence
  Synthetic oligonucleotide
cacacagttggtcgctccaacatgagggca

SEQ ID NO: 326255 - DNA, 30 bp, Artificial Sequence
  Synthetic oligonucleotide
tgcgggtgcggggcagggtccgctagggca

SEQ ID NO: 326256 - DNA, 30 bp, Artificial Sequence
  Synthetic oligonucleotide
cccacgttacagactagcgtgagtagggca

SEQ ID NO: 326257 - DNA, 30 bp, Artificial Sequence
  Synthetic oligonucleotide
aagaattatactctcgaggtctaacgggca

SEQ ID NO: 326258 - DNA, 30 bp, Artificial Sequence
  Synthetic oligonucleotide
cgccgacggggtacgagtttgggccgggca

SEQ ID NO: 326259 - DNA, 30 bp, Artificial Sequence
  Synthetic oligonucleotide
cgggagaagggagatggacaaacgcgggca

SEQ ID NO: 326260 - DNA, 30 bp, Artificial Sequence
  Synthetic oligonucleotide
ggaaatccacattttggagcaatgcgggca

SEQ ID NO: 326261 - DNA, 30 bp, Artificial Sequence
  Synthetic oligonucleotide
tggctcccacggtgagaatggctgcgggca

SEQ ID NO: 326262 - DNA, 30 bp, Artificial Sequence
  Synthetic oligonucleotide
ctgtaaagtatattggagggaaaaggggca

SEQ ID NO: 326263 - DNA, 30 bp, Artificial Sequence
  Synthetic oligonucleotide
agaataagtgcacagcaatgccaaggggca

SEQ ID NO: 326264 - DNA, 30 bp, Artificial Sequence
  Synthetic oligonucleotide
tattctggcgtgattgaataaggaggggca

SEQ ID NO: 326265 - DNA, 30 bp, Artificial Sequence
  Synthetic oligonucleotide
ttattaccttggtaaataacatacggggca

SEQ ID NO: 326266 - DNA, 30 bp, Artificial Sequence
  Synthetic oligonucleotide
agggccaacggcgaacggtgacccggggca

SEQ ID NO: 326267 - DNA, 30 bp, Artificial Sequence
  Synthetic oligonucleotide
tgacgcatagagatttgcgtgcgcggggca

SEQ ID NO: 326268 - DNA, 30 bp, Artificial Sequence
  Synthetic oligonucleotide
cgtacgtaggccaacagccagtgcggggca

SEQ ID NO: 326269 - DNA, 30 bp, Artificial Sequence
  Synthetic oligonucleotide
tcattgaagttcgtgtgtctcaagggggca

SEQ ID NO: 326270 - DNA, 30 bp, Artificial Sequence
  Synthetic oligonucleotide
gggcctgccatgccaagctcagcgggggca

SEQ ID NO: 326271 - DNA, 30 bp, Artificial Sequence
  Synthetic oligonucleotide
ttgtccggtttcggcgtataatcgggggca

SEQ ID NO: 326272 - DNA, 30 bp, Artificial Sequence
  Synthetic oligonucleotide
gcaaggatcttctaagatttagatggggca

SEQ ID NO: 326273 - DNA, 30 bp, Artificial Sequence
  Synthetic oligonucleotide
tcattttttgagaagcgtggttgtggggca

SEQ ID NO: 326274 - DNA, 30 bp, Artificial Sequence
  Synthetic oligonucleotide
gtgttatagtgaaaggttccccaatgggca

SEQ ID NO: 326275 - DNA, 30 bp, Artificial Sequence
  Synthetic oligonucleotide
aatagcgcttaataagcaacgtaatgggca

SEQ ID NO: 326276 - DNA, 30 bp, Artificial Sequence
  Synthetic oligonucleotide
ttgaacattctgtccaagcgaagatgggca

SEQ ID NO: 326277 - DNA, 30 bp, Artificial Sequence
  Synthetic oligonucleotide
gaatcattgttcaatcaaacgaactgggca

SEQ ID NO: 326278 - DNA, 30 bp, Artificial Sequence
  Synthetic oligonucleotide
tgatgcatgcactgcggtagcgactgggca

SEQ ID NO: 326279 - DNA, 30 bp, Artificial Sequence
  Synthetic oligonucleotide
ggtgtagggtaattcagtaggtactgggca

SEQ ID NO: 326280 - DNA, 30 bp, Artificial Sequence
  Synthetic oligonucleotide
ctccaagcacttatttgcaaagggtgggca

SEQ ID NO: 326281 - DNA, 30 bp, Artificial Sequence
  Synthetic oligonucleotide
ggcgccttcagtgtgcgcgttcattgggca

SEQ ID NO: 326282 - DNA, 30 bp, Artificial Sequence
  Synthetic oligonucleotide
tcctgtaccggcacaccaatcagttgggca

SEQ ID NO: 326283 - DNA, 30 bp, Artificial Sequence
  Synthetic oligonucleotide
acggaaatggtcttctgtcgcgtaatggca

SEQ ID NO: 326284 - DNA, 30 bp, Artificial Sequence
  Synthetic oligonucleotide
gaacggcatgacatgtaccaacacatggca

SEQ ID NO: 326285 - DNA, 30 bp, Artificial Sequence
  Synthetic oligonucleotide
aattccataccacgaaaaagttccatggca

SEQ ID NO: 326286 - DNA, 30 bp, Artificial Sequence
  Synthetic oligonucleotide
tccgtatgggtcgcgaccatgattatggca

SEQ ID NO: 326287 - DNA, 30 bp, Artificial Sequence
  Synthetic oligonucleotide
cttccacagcaacccaaacggagcctggca

SEQ ID NO: 326288 - DNA, 30 bp, Artificial Sequence
  Synthetic oligonucleotide
tgcgctgtactttgcgggtataagctggca

SEQ ID NO: 326289 - DNA, 30 bp, Artificial Sequence
  Synthetic oligonucleotide
ccgtcgccgaaacgtccgttatagctggca

SEQ ID NO: 326290 - DNA, 30 bp, Artificial Sequence
  Synthetic oligonucleotide
aagggcccataaacttaattgctgctggca

SEQ ID NO: 326291 - DNA, 30 bp, Artificial Sequence
  Synthetic oligonucleotide
acacatgccactcgctggaatgatctggca

SEQ ID NO: 326292 - DNA, 30 bp, Artificial Sequence
  Synthetic oligonucleotide
tggatctgtcaaggacactataaagtggca

SEQ ID NO: 326293 - DNA, 30 bp, Artificial Sequence
  Synthetic oligonucleotide
atttagccatggagcgctgcctgagtggca

SEQ ID NO: 326294 - DNA, 30 bp, Artificial Sequence
  Synthetic oligonucleotide
gctagggcgttgtttttgttcctagtggca

SEQ ID NO: 326295 - DNA, 30 bp, Artificial Sequence
  Synthetic oligonucleotide
tatgttgctaggtataggagatacgtggca

SEQ ID NO: 326296 - DNA, 30 bp, Artificial Sequence
  Synthetic oligonucleotide
cccgttagtcattgtcggggcagggtggca

SEQ ID NO: 326297 - DNA, 30 bp, Artificial Sequence
  Synthetic oligonucleotide
aacagaacttacccttcgacctgggtggca

SEQ ID NO: 326298 - DNA, 30 bp, Artificial Sequence
  Synthetic oligonucleotide
ttccaagtcattcatcagacagcattggca

SEQ ID NO: 326299 - DNA, 30 bp, Artificial Sequence
  Synthetic oligonucleotide
tcgagcctagcgggtcatgccgtattggca

SEQ ID NO: 326300 - DNA, 30 bp, Artificial Sequence
  Synthetic oligonucleotide
cgtgtggcaggtctagaagagaacttggca

SEQ ID NO: 326301 - DNA, 30 bp, Artificial Sequence
  Synthetic oligonucleotide
tattgtagtgggaggaagtgtgtcttggca

SEQ ID NO: 326302 - DNA, 30 bp, Artificial Sequence
  Synthetic oligonucleotide
gtcaggaggcaaatgatcaaacatttggca

SEQ ID NO: 326303 - DNA, 30 bp, Artificial Sequence
  Synthetic oligonucleotide
aaccaaactataagggagtccgttttggca

SEQ ID NO: 326304 - DNA, 30 bp, Artificial Sequence
  Synthetic oligonucleotide
tattggttgtactactcattcgttttggca

SEQ ID NO: 326305 - DNA, 30 bp, Artificial Sequence
  Synthetic oligonucleotide
atatgtgggcgacgcattcgatgaaatgca

SEQ ID NO: 326306 - DNA, 30 bp, Artificial Sequence
  Synthetic oligonucleotide
aggttgatttgcaatcggccattaaatgca

SEQ ID NO: 326307 - DNA, 30 bp, Artificial Sequence
  Synthetic oligonucleotide
actacctaagatgacggttgattaaatgca

SEQ ID NO: 326308 - DNA, 30 bp, Artificial Sequence
  Synthetic oligonucleotide
cctggtgtggtcaggaattgcaggaatgca

SEQ ID NO: 326309 - DNA, 30 bp, Artificial Sequence
  Synthetic oligonucleotide
gccgatggtttatccacaaagacacatgca

SEQ ID NO: 326310 - DNA, 29 bp, Artificial Sequence
  Synthetic oligonucleotide
ctggtttggacgcgacaatctaccatgca

SEQ ID NO: 326311 - DNA, 30 bp, Artificial Sequence
  Synthetic oligonucleotide
agcaacatcagcttatcggagtaccatgca

SEQ ID NO: 326312 - DNA, 30 bp, Artificial Sequence
  Synthetic oligonucleotide
gagacgccagacattcaatggtgccatgca

SEQ ID NO: 326313 - DNA, 30 bp, Artificial Sequence
  Synthetic oligonucleotide
tcgatcgttgttcgttagttaacgcatgca

SEQ ID NO: 326314 - DNA, 30 bp, Artificial Sequence
  Synthetic oligonucleotide
acgtttgctcgcgtgaagaaatttcatgca

SEQ ID NO: 326315 - DNA, 30 bp, Artificial Sequence
  Synthetic oligonucleotide
gtccctgtatattaggcaaattcagatgca

SEQ ID NO: 326316 - DNA, 30 bp, Artificial Sequence
  Synthetic oligonucleotide
gatatatgggcactcggcatcaacgatgca

SEQ ID NO: 326317 - DNA, 30 bp, Artificial Sequence
  Synthetic oligonucleotide
gccgtcccaaatccggaccgttgcgatgca

SEQ ID NO: 326318 - DNA, 30 bp, Artificial Sequence
  Synthetic oligonucleotide
gaggctcaataacttgcagagctcgatgca

SEQ ID NO: 326319 - DNA, 30 bp, Artificial Sequence
  Synthetic oligonucleotide
gtcaaggaacatgactctatcgtcgatgca

SEQ ID NO: 326320 - DNA, 30 bp, Artificial Sequence
  Synthetic oligonucleotide
gaaaaaaggcgtctttgatcgagggatgca

SEQ ID NO: 326321 - DNA, 30 bp, Artificial Sequence
  Synthetic oligonucleotide
tatctagagataccaaatagggaatatgca

SEQ ID NO: 326322 - DNA, 30 bp, Artificial Sequence
  Synthetic oligonucleotide
tataccataagccctaggatctaatatgca

SEQ ID NO: 326323 - DNA, 30 bp, Artificial Sequence
  Synthetic oligonucleotide
tccaacgcctagaaactggacgtatatgca

SEQ ID NO: 326324 - DNA, 30 bp, Artificial Sequence
  Synthetic oligonucleotide
gaatgcaaatgccagggggcctactatgca

SEQ ID NO: 326325 - DNA, 30 bp, Artificial Sequence
  Synthetic oligonucleotide
ttgtgtacgtatctcgatataaggtatgca

SEQ ID NO: 326326 - DNA, 30 bp, Artificial Sequence
  Synthetic oligonucleotide
ttctcggtggcgcggcgaaatatgtatgca

SEQ ID NO: 326327 - DNA, 30 bp, Artificial Sequence
  Synthetic oligonucleotide
atagtgcgctcagacgtaacaaattatgca

SEQ ID NO: 326328 - DNA, 30 bp, Artificial Sequence
  Synthetic oligonucleotide
catgcaaaagcgaaagacgccgattatgca

SEQ ID NO: 326329 - DNA, 30 bp, Artificial Sequence
  Synthetic oligonucleotide
attgtgtgacggttgacatcatattatgca

SEQ ID NO: 326330 - DNA, 30 bp, Artificial Sequence
  Synthetic oligonucleotide
tcctagcgttgataaaaaaccccttatgca

SEQ ID NO: 326331 - DNA, 30 bp, Artificial Sequence
  Synthetic oligonucleotide
tcagggcgatagcgcttctacctaactgca

SEQ ID NO: 326332 - DNA, 30 bp, Artificial Sequence
  Synthetic oligonucleotide
gggggcattctaaaggaggcatacactgca

SEQ ID NO: 326333 - DNA, 30 bp, Artificial Sequence
  Synthetic oligonucleotide
ggtatgcaaagggccaaagttggcactgca

SEQ ID NO: 326334 - DNA, 30 bp, Artificial Sequence
  Synthetic oligonucleotide
cctgctaccggtccattagcaatcactgca

SEQ ID NO: 326335 - DNA, 30 bp, Artificial Sequence
  Synthetic oligonucleotide
aagcctggcctgaacatgctttggactgca

SEQ ID NO: 326336 - DNA, 30 bp, Artificial Sequence
  Synthetic oligonucleotide
tgcggcttctgcccggtatactatactgca

SEQ ID NO: 326337 - DNA, 30 bp, Artificial Sequence
  Synthetic oligonucleotide
cggatatttggttgcaagtagcctactgca

SEQ ID NO: 326338 - DNA, 30 bp, Artificial Sequence
  Synthetic oligonucleotide
gacgggataacaagccctggggtccctgca

SEQ ID NO: 326339 - DNA, 30 bp, Artificial Sequence
  Synthetic oligonucleotide
ttgatcaattgacacccgatagttcctgca

SEQ ID NO: 326340 - DNA, 30 bp, Artificial Sequence
  Synthetic oligonucleotide
cacgacaaacacgcggcgcatgttcctgca

SEQ ID NO: 326341 - DNA, 30 bp, Artificial Sequence
  Synthetic oligonucleotide
ctcgtacatttagagtctctcgaagctgca

SEQ ID NO: 326342 - DNA, 30 bp, Artificial Sequence
  Synthetic oligonucleotide
ctactacgacgaaaggacggacacgctgca

SEQ ID NO: 326343 - DNA, 30 bp, Artificial Sequence
  Synthetic oligonucleotide
gcgcttagggttgtcttgaccgaggctgca

SEQ ID NO: 326344 - DNA, 30 bp, Artificial Sequence
  Synthetic oligonucleotide
ggaaagttttactaagtgagttcggctgca

SEQ ID NO: 326345 - DNA, 30 bp, Artificial Sequence
  Synthetic oligonucleotide
atattgctgggacatgtaccaagctctgca

SEQ ID NO: 326346 - DNA, 30 bp, Artificial Sequence
  Synthetic oligonucleotide
agagatagttttcatgccactcgctctgca

SEQ ID NO: 326347 - DNA, 30 bp, Artificial Sequence
  Synthetic oligonucleotide
ttgcacgcgcttttccgtgggatctctgca

SEQ ID NO: 326348 - DNA, 30 bp, Artificial Sequence
  Synthetic oligonucleotide
gtgaggtttcaacgatccagggtctctgca

SEQ ID NO: 326349 - DNA, 30 bp, Artificial Sequence
  Synthetic oligonucleotide
aactctcgtcgtagtatcccgatgtctgca

SEQ ID NO: 326350 - DNA, 30 bp, Artificial Sequence
  Synthetic oligonucleotide
gctaacccgggtgtaattgcgacttctgca

SEQ ID NO: 326351 - DNA, 30 bp, Artificial Sequence
  Synthetic oligonucleotide
gaagtagatttgccttcgaaccgttctgca

SEQ ID NO: 326352 - DNA, 30 bp, Artificial Sequence
  Synthetic oligonucleotide
tcccttaggacgtttggtggcaaaagtgca

SEQ ID NO: 326353 - DNA, 30 bp, Artificial Sequence
  Synthetic oligonucleotide
attgattcgacatgtagggtttaaagtgca

SEQ ID NO: 326354 - DNA, 30 bp, Artificial Sequence
  Synthetic oligonucleotide
cggttgttcgcgctggattaatagagtgca

SEQ ID NO: 326355 - DNA, 30 bp, Artificial Sequence
  Synthetic oligonucleotide
tttaagcttgagagaaccactaatagtgca

SEQ ID NO: 326356 - DNA, 30 bp, Artificial Sequence
  Synthetic oligonucleotide
gggacacccgtccatggggtatgtagtgca

SEQ ID NO: 326357 - DNA, 30 bp, Artificial Sequence
  Synthetic oligonucleotide
gttagtatagccgaaaaactctttagtgca

SEQ ID NO: 326358 - DNA, 30 bp, Artificial Sequence
  Synthetic oligonucleotide
ctagcagcggccaatagattagcacgtgca

SEQ ID NO: 326359 - DNA, 30 bp, Artificial Sequence
  Synthetic oligonucleotide
atctttacataaggtatatacaaccgtgca

SEQ ID NO: 326360 - DNA, 30 bp, Artificial Sequence
  Synthetic oligonucleotide
aacggcatgacaagtaccgcgacgcgtgca

SEQ ID NO: 326361 - DNA, 30 bp, Artificial Sequence
  Synthetic oligonucleotide
acgtgaggaacgcatacccctaggcgtgca

SEQ ID NO: 326362 - DNA, 30 bp, Artificial Sequence
  Synthetic oligonucleotide
aagagatcaagcaaccctaccaagggtgca

SEQ ID NO: 326363 - DNA, 30 bp, Artificial Sequence
  Synthetic oligonucleotide
ggtaattatgaagcgttcccagagggtgca

SEQ ID NO: 326364 - DNA, 30 bp, Artificial Sequence
  Synthetic oligonucleotide
tagctacccaaataggattttgcgggtgca

SEQ ID NO: 326365 - DNA, 30 bp, Artificial Sequence
  Synthetic oligonucleotide
gcacgatcttagttcaacgttattggtgca

SEQ ID NO: 326366 - DNA, 30 bp, Artificial Sequence
  Synthetic oligonucleotide
taataactatgtggcttcccatcatgtgca

SEQ ID NO: 326367 - DNA, 30 bp, Artificial Sequence
  Synthetic oligonucleotide
gatagatgtatggatgtacaatgatgtgca

SEQ ID NO: 326368 - DNA, 30 bp, Artificial Sequence
  Synthetic oligonucleotide
atcttaatttgtccacaaggttactgtgca

SEQ ID NO: 326369 - DNA, 30 bp, Artificial Sequence
  Synthetic oligonucleotide
gcatagtagccgtgtacttacccctgtgca

SEQ ID NO: 326370 - DNA, 30 bp, Artificial Sequence
  Synthetic oligonucleotide
aagatagtgcactgtcatacggtgtgtgca

SEQ ID NO: 326371 - DNA, 30 bp, Artificial Sequence
  Synthetic oligonucleotide
catcttcatcgggtgcggcaaaattgtgca

SEQ ID NO: 326372 - DNA, 30 bp, Artificial Sequence
  Synthetic oligonucleotide
tgctctcgtttcgaaatgcccaattgtgca

SEQ ID NO: 326373 - DNA, 30 bp, Artificial Sequence
  Synthetic oligonucleotide
ttggttgtaggcatgtgagcgacttgtgca

SEQ ID NO: 326374 - DNA, 30 bp, Artificial Sequence
  Synthetic oligonucleotide
ttattgtctccttattttgcccgttgtgca

SEQ ID NO: 326375 - DNA, 30 bp, Artificial Sequence
  Synthetic oligonucleotide
gaataaggcctaatttcccggcaaattgca

SEQ ID NO: 326376 - DNA, 30 bp, Artificial Sequence
  Synthetic oligonucleotide
gatttagcaccacgccgaattctaattgca

SEQ ID NO: 326377 - DNA, 30 bp, Artificial Sequence
  Synthetic oligonucleotide
gtctcccgtagattcccccaattaattgca

SEQ ID NO: 326378 - DNA, 30 bp, Artificial Sequence
  Synthetic oligonucleotide
gtggctttagatgtcgagtagcacattgca

SEQ ID NO: 326379 - DNA, 30 bp, Artificial Sequence
  Synthetic oligonucleotide
actgggtccacatgcaacaccggcattgca

SEQ ID NO: 326380 - DNA, 30 bp, Artificial Sequence
  Synthetic oligonucleotide
aggtgctggtagattaccaaccagattgca

SEQ ID NO: 326381 - DNA, 30 bp, Artificial Sequence
  Synthetic oligonucleotide
attaaacacagtactgtatttgagattgca

SEQ ID NO: 326382 - DNA, 30 bp, Artificial Sequence
  Synthetic oligonucleotide
gctgattcgaccgcgtagccgacgattgca

SEQ ID NO: 326383 - DNA, 30 bp, Artificial Sequence
  Synthetic oligonucleotide
atcctgccatcctagaaggtctatattgca

SEQ ID NO: 326384 - DNA, 30 bp, Artificial Sequence
  Synthetic oligonucleotide
atgctttgtaccgaccctgcgagacttgca

SEQ ID NO: 326385 - DNA, 30 bp, Artificial Sequence
  Synthetic oligonucleotide
ttatcaatataatgacgctatggacttgca

SEQ ID NO: 326386 - DNA, 30 bp, Artificial Sequence
  Synthetic oligonucleotide
ctactaatatgattagtgagtgtacttgca

SEQ ID NO: 326387 - DNA, 30 bp, Artificial Sequence
  Synthetic oligonucleotide
cgcaatacacgtcttctgacggtccttgca

SEQ ID NO: 326388 - DNA, 30 bp, Artificial Sequence
  Synthetic oligonucleotide
aatagttcgactcaggaaataacgcttgca

SEQ ID NO: 326389 - DNA, 30 bp, Artificial Sequence
  Synthetic oligonucleotide
gtgcaagctaagaagatgggggtgcttgca

SEQ ID NO: 326390 - DNA, 30 bp, Artificial Sequence
  Synthetic oligonucleotide
aacaccaatttgcacaatgagaaggttgca

SEQ ID NO: 326391 - DNA, 30 bp, Artificial Sequence
  Synthetic oligonucleotide
catgtaaccaacggactctcgtgggttgca

SEQ ID NO: 326392 - DNA, 30 bp, Artificial Sequence
  Synthetic oligonucleotide
acgcgtaatggcagcgaattggctgttgca

SEQ ID NO: 326393 - DNA, 30 bp, Artificial Sequence
  Synthetic oligonucleotide
gaaacaatagtggtacattatacgtttgca

SEQ ID NO: 326394 - DNA, 30 bp, Artificial Sequence
  Synthetic oligonucleotide
acaccaaggccctaagggttcaggtttgca

SEQ ID NO: 326395 - DNA, 30 bp, Artificial Sequence
  Synthetic oligonucleotide
taaagattgtcgtctatttcggtgtttgca

SEQ ID NO: 326396 - DNA, 30 bp, Artificial Sequence
  Synthetic oligonucleotide
taaggagaacactcgttctatacttttgca

SEQ ID NO: 326397 - DNA, 30 bp, Artificial Sequence
  Synthetic oligonucleotide
cgtagtggtactcacagtacgggttttgca

SEQ ID NO: 326398 - DNA, 30 bp, Artificial Sequence
  Synthetic oligonucleotide
caatcggctggaatgatctcgtgttttgca

SEQ ID NO: 326399 - DNA, 30 bp, Artificial Sequence
  Synthetic oligonucleotide
tcctagggtcgttagctggaaatttttgca

SEQ ID NO: 326400 - DNA, 30 bp, Artificial Sequence
  Synthetic oligonucleotide
ggcctgccttggccttcattggaaaaatca

SEQ ID NO: 326401 - DNA, 30 bp, Artificial Sequence
  Synthetic oligonucleotide
gcgagacacaagggctaccccacaaaatca

SEQ ID NO: 326402 - DNA, 30 bp, Artificial Sequence
  Synthetic oligonucleotide
acctgatattaatgttgcggacgaaaatca

SEQ ID NO: 326403 - DNA, 30 bp, Artificial Sequence
  Synthetic oligonucleotide
ataaagacgccagcggacaagtggaaatca

SEQ ID NO: 326404 - DNA, 30 bp, Artificial Sequence
  Synthetic oligonucleotide
cagtacgcgtcgttcatgattgtgaaatca

SEQ ID NO: 326405 - DNA, 30 bp, Artificial Sequence
  Synthetic oligonucleotide
gaagtcacagctggcccaagtgataaatca

SEQ ID NO: 326406 - DNA, 30 bp, Artificial Sequence
  Synthetic oligonucleotide
gaacaagttgatgctccgaggaaacaatca

SEQ ID NO: 326407 - DNA, 30 bp, Artificial Sequence
  Synthetic oligonucleotide
tcttgaagatcctgctgcaagcaccaatca

SEQ ID NO: 326408 - DNA, 30 bp, Artificial Sequence
  Synthetic oligonucleotide
gtactggcagcagcacgaatcgatcaatca

SEQ ID NO: 326409 - DNA, 30 bp, Artificial Sequence
  Synthetic oligonucleotide
gtgttaacaagttattcgctgattcaatca

SEQ ID NO: 326410 - DNA, 30 bp, Artificial Sequence
  Synthetic oligonucleotide
cccctgctctccaaaccaattattcaatca

SEQ ID NO: 326411 - DNA, 30 bp, Artificial Sequence
  Synthetic oligonucleotide
aatattaacttgctgtgagagaaagaatca

SEQ ID NO: 326412 - DNA, 30 bp, Artificial Sequence
  Synthetic oligonucleotide
tgtgtgggcactcctgcctcacaagaatca

SEQ ID NO: 326413 - DNA, 30 bp, Artificial Sequence
  Synthetic oligonucleotide
cagtaaggctcgtgttattccaacgaatca

SEQ ID NO: 326414 - DNA, 30 bp, Artificial Sequence
  Synthetic oligonucleotide
agtgtttgcgtacgaacaatgcaggaatca

SEQ ID NO: 326415 - DNA, 30 bp, Artificial Sequence
  Synthetic oligonucleotide
ggaaaacgatatgagatgcgggcggaatca

SEQ ID NO: 326416 - DNA, 30 bp, Artificial Sequence
  Synthetic oligonucleotide
cttgattccagtcctcttaagtgggaatca

SEQ ID NO: 326417 - DNA, 30 bp, Artificial Sequence
  Synthetic oligonucleotide
aaaactagtcctcagaacatccaataatca

SEQ ID NO: 326418 - DNA, 30 bp, Artificial Sequence
  Synthetic oligonucleotide
gctcgtgacacgttaactagtgcataatca

SEQ ID NO: 326419 - DNA, 30 bp, Artificial Sequence
  Synthetic oligonucleotide
atggcgagcattatgaattcgctataatca

SEQ ID NO: 326420 - DNA, 30 bp, Artificial Sequence
  Synthetic oligonucleotide
tttcaaccctctaagtagctctgctaatca

SEQ ID NO: 326421 - DNA, 30 bp, Artificial Sequence
  Synthetic oligonucleotide
agggatcgtggtaactccgcgacgtaatca

SEQ ID NO: 326422 - DNA, 30 bp, Artificial Sequence
  Synthetic oligonucleotide
gcaccacgatgtccatggtccgggtaatca

SEQ ID NO: 326423 - DNA, 30 bp, Artificial Sequence
  Synthetic oligonucleotide
cctgacacccaaattaaatgcatgtaatca

SEQ ID NO: 326424 - DNA, 30 bp, Artificial Sequence
  Synthetic oligonucleotide
cgaccggtatgttgtacaagtctgtaatca

SEQ ID NO: 326425 - DNA, 30 bp, Artificial Sequence
  Synthetic oligonucleotide
ataaagattttgagtggcctagccacatca

SEQ ID NO: 326426 - DNA, 30 bp, Artificial Sequence
  Synthetic oligonucleotide
ccaccacggtgaaacggtatggtcacatca

SEQ ID NO: 326427 - DNA, 30 bp, Artificial Sequence
  Synthetic oligonucleotide
ggccacgcatcattatttctggtcacatca

SEQ ID NO: 326428 - DNA, 30 bp, Artificial Sequence
  Synthetic oligonucleotide
gtgtattggcagtcggaactccctacatca

SEQ ID NO: 326429 - DNA, 30 bp, Artificial Sequence
  Synthetic oligonucleotide
atgctaattaagactaaccttcttacatca

SEQ ID NO: 326430 - DNA, 30 bp, Artificial Sequence
  Synthetic oligonucleotide
tgagatctttcggtagtaacagcaccatca

SEQ ID NO: 326431 - DNA, 30 bp, Artificial Sequence
  Synthetic oligonucleotide
ttaaccggaggtcctagtgtaataccatca

SEQ ID NO: 326432 - DNA, 30 bp, Artificial Sequence
  Synthetic oligonucleotide
aatgacctaaattcactgatgaagccatca

SEQ ID NO: 326433 - DNA, 30 bp, Artificial Sequence
  Synthetic oligonucleotide
gggaatggaattaggcgtgcggggccatca

SEQ ID NO: 326434 - DNA, 30 bp, Artificial Sequence
  Synthetic oligonucleotide
agagctctataagtctaactctctccatca

SEQ ID NO: 326435 - DNA, 30 bp, Artificial Sequence
  Synthetic oligonucleotide
gcccaggtgtgaatcttcgtttctccatca

SEQ ID NO: 326436 - DNA, 30 bp, Artificial Sequence
  Synthetic oligonucleotide
tacccaggccgcgttgggttagcagcatca

SEQ ID NO: 326437 - DNA, 30 bp, Artificial Sequence
  Synthetic oligonucleotide
ttttgtggtattaacaaactggtcgcatca

SEQ ID NO: 326438 - DNA, 31 bp, Artificial Sequence
  Synthetic oligonucleotide
ttgtaccctggagtttggaacctcggcatca

SEQ ID NO: 326439 - DNA, 30 bp, Artificial Sequence
  Synthetic oligonucleotide
gactcgcagacacatctaaaaagggcatca

SEQ ID NO: 326440 - DNA, 30 bp, Artificial Sequence
  Synthetic oligonucleotide
gtttcattatttagtaagtcctctgcatca

SEQ ID NO: 326441 - DNA, 30 bp, Artificial Sequence
  Synthetic oligonucleotide
aagctctttacacacagtccatgtgcatca

SEQ ID NO: 326442 - DNA, 30 bp, Artificial Sequence
  Synthetic oligonucleotide
catatcttgcaaggtcagattcaatcatca

SEQ ID NO: 326443 - DNA, 30 bp, Artificial Sequence
  Synthetic oligonucleotide
gagagaccggaacgtactcgagcatcatca

SEQ ID NO: 326444 - DNA, 30 bp, Artificial Sequence
  Synthetic oligonucleotide
ggacgcacagtttaagttggtgcatcatca

SEQ ID NO: 326445 - DNA, 30 bp, Artificial Sequence
  Synthetic oligonucleotide
ttacaacgaactttgcccaactcatcatca

SEQ ID NO: 326446 - DNA, 30 bp, Artificial Sequence
  Synthetic oligonucleotide
gtcgctaagatgtgaaaacaggtatcatca

SEQ ID NO: 326447 - DNA, 30 bp, Artificial Sequence
  Synthetic oligonucleotide
cgatgtttctaattcctctgcaactcatca

SEQ ID NO: 326448 - DNA, 30 bp, Artificial Sequence
  Synthetic oligonucleotide
tacttcatctggacatagggtccctcatca

SEQ ID NO: 326449 - DNA, 30 bp, Artificial Sequence
  Synthetic oligonucleotide
ccatgtcggcttttcgtagattgctcatca

SEQ ID NO: 326450 - DNA, 30 bp, Artificial Sequence
  Synthetic oligonucleotide
tacttgtacgttaagagacgagagtcatca

SEQ ID NO: 326451 - DNA, 30 bp, Artificial Sequence
  Synthetic oligonucleotide
ggtagatcagcctatgagccaagttcatca

SEQ ID NO: 326452 - DNA, 30 bp, Artificial Sequence
  Synthetic oligonucleotide
cgccggacaatgagatttcaaagaagatca

SEQ ID NO: 326453 - DNA, 30 bp, Artificial Sequence
  Synthetic oligonucleotide
aacctagcaagaaaatccgcggtaagatca

SEQ ID NO: 326454 - DNA, 30 bp, Artificial Sequence
  Synthetic oligonucleotide
gataataaaggtctgtgcgacgccagatca

SEQ ID NO: 326455 - DNA, 30 bp, Artificial Sequence
  Synthetic oligonucleotide
ttagcgaaccaagtcgccagcctcagatca

SEQ ID NO: 326456 - DNA, 30 bp, Artificial Sequence
  Synthetic oligonucleotide
tccgcccttgcacaaatatcggcgagatca

SEQ ID NO: 326457 - DNA, 30 bp, Artificial Sequence
  Synthetic oligonucleotide
caatccagtcaactgcggcggcggagatca

SEQ ID NO: 326458 - DNA, 30 bp, Artificial Sequence
  Synthetic oligonucleotide
ccatggcaccgtggattccggtatagatca

SEQ ID NO: 326459 - DNA, 30 bp, Artificial Sequence
  Synthetic oligonucleotide
gtttggtgagctgctaaaagttatagatca

SEQ ID NO: 326460 - DNA, 30 bp, Artificial Sequence
  Synthetic oligonucleotide
agtcgcgcaagtgaatggatccgtagatca

SEQ ID NO: 326461 - DNA, 30 bp, Artificial Sequence
  Synthetic oligonucleotide
atggactcgccgaaaatggttattagatca

SEQ ID NO: 326462 - DNA, 30 bp, Artificial Sequence
  Synthetic oligonucleotide
acggtacaactgtaatatgatggacgatca

SEQ ID NO: 326463 - DNA, 30 bp, Artificial Sequence
  Synthetic oligonucleotide
gtatccactggccaacaagccatacgatca

SEQ ID NO: 326464 - DNA, 30 bp, Artificial Sequence
  Synthetic oligonucleotide
gaagggttattcttcagttaactaggatca

SEQ ID NO: 326465 - DNA, 31 bp, Artificial Sequence
  Synthetic oligonucleotide
tggggacttgcagttaattttcttaggatca

SEQ ID NO: 326466 - DNA, 30 bp, Artificial Sequence
  Synthetic oligonucleotide
atattaaagttcttaccctcttacggatca

SEQ ID NO: 326467 - DNA, 30 bp, Artificial Sequence
  Synthetic oligonucleotide
tgccagcctataccttgtagtaagggatca

SEQ ID NO: 326468 - DNA, 30 bp, Artificial Sequence
  Synthetic oligonucleotide
aacacacccgaaatgagtggatagggatca

SEQ ID NO: 326469 - DNA, 30 bp, Artificial Sequence
  Synthetic oligonucleotide
cattggtcaattgtctacaagcggggatca

SEQ ID NO: 326470 - DNA, 30 bp, Artificial Sequence
  Synthetic oligonucleotide
aaggacctcgggtcgctggttatgggatca

SEQ ID NO: 326471 - DNA, 30 bp, Artificial Sequence
  Synthetic oligonucleotide
tagtcattagaaccgtcctacgctggatca

SEQ ID NO: 326472 - DNA, 30 bp, Artificial Sequence
  Synthetic oligonucleotide
agagcgtgtcaagatgcacttacatgatca

SEQ ID NO: 326473 - DNA, 30 bp, Artificial Sequence
  Synthetic oligonucleotide
gaatgagtaggtgttggcgcatactgatca

SEQ ID NO: 326474 - DNA, 30 bp, Artificial Sequence
  Synthetic oligonucleotide
aaatgacggcagggcaatgaatcgtgatca

SEQ ID NO: 326475 - DNA, 30 bp, Artificial Sequence
  Synthetic oligonucleotide
acccgaggggacgtttaggcacattgatca

SEQ ID NO: 326476 - DNA, 30 bp, Artificial Sequence
  Synthetic oligonucleotide
aggctcacgtatactgatccttgttgatca

SEQ ID NO: 326477 - DNA, 30 bp, Artificial Sequence
  Synthetic oligonucleotide
cagaacttggtgttggtccacctttgatca

SEQ ID NO: 326478 - DNA, 30 bp, Artificial Sequence
  Synthetic oligonucleotide
ccagactgcctgtgggtcggataaatatca

SEQ ID NO: 326479 - DNA, 30 bp, Artificial Sequence
  Synthetic oligonucleotide
acttacagtggtgattggttaataatatca

SEQ ID NO: 326480 - DNA, 30 bp, Artificial Sequence
  Synthetic oligonucleotide
ttgttactgatggcaaagacaaccatatca

SEQ ID NO: 326481 - DNA, 30 bp, Artificial Sequence
  Synthetic oligonucleotide
gtagctctataaagttgtaatgccatatca

SEQ ID NO: 326482 - DNA, 30 bp, Artificial Sequence
  Synthetic oligonucleotide
acacccagctgcatgtaacacggcatatca

SEQ ID NO: 326483 - DNA, 30 bp, Artificial Sequence
  Synthetic oligonucleotide
catccgaggggcgcattgcctggcatatca

SEQ ID NO: 326484 - DNA, 30 bp, Artificial Sequence
  Synthetic oligonucleotide
cgcggtgcatagacgtgactaatcatatca

SEQ ID NO: 326485 - DNA, 30 bp, Artificial Sequence
  Synthetic oligonucleotide
atcatagtggatacggggaagtggatatca

SEQ ID NO: 326486 - DNA, 30 bp, Artificial Sequence
  Synthetic oligonucleotide
aatatacatgtcagtgtccaagatatatca

SEQ ID NO: 326487 - DNA, 30 bp, Artificial Sequence
  Synthetic oligonucleotide
ttggcaacctattagagcctacctatatca

SEQ ID NO: 326488 - DNA, 30 bp, Artificial Sequence
  Synthetic oligonucleotide
accaccgcctaccaaatcggccctatatca

SEQ ID NO: 326489 - DNA, 31 bp, Artificial Sequence
  Synthetic oligonucleotide
gttagaaccggtggtgatggggtcactatca

SEQ ID NO: 326490 - DNA, 30 bp, Artificial Sequence
  Synthetic oligonucleotide
gatctgcctgccaggtacaaacgactatca

SEQ ID NO: 326491 - DNA, 30 bp, Artificial Sequence
  Synthetic oligonucleotide
gtgcttcggacctataggattcgactatca

SEQ ID NO: 326492 - DNA, 30 bp, Artificial Sequence
  Synthetic oligonucleotide
aagccctctaccctaaacactctactatca

SEQ ID NO: 326493 - DNA, 30 bp, Artificial Sequence
  Synthetic oligonucleotide
gttgaagcgtgaattggcgtcgtactatca

SEQ ID NO: 326494 - DNA, 30 bp, Artificial Sequence
  Synthetic oligonucleotide
ggtaaaggccgtcatttggatggcctatca

SEQ ID NO: 326495 - DNA, 30 bp, Artificial Sequence
  Synthetic oligonucleotide
aatgatagtactccttggtaagtcctatca

SEQ ID NO: 326496 - DNA, 30 bp, Artificial Sequence
  Synthetic oligonucleotide
cgcacactcctaaggttcctgagtctatca

SEQ ID NO: 326497 - DNA, 30 bp, Artificial Sequence
  Synthetic oligonucleotide
tattactcgtttaggtggcaaccagtatca

SEQ ID NO: 326498 - DNA, 30 bp, Artificial Sequence
  Synthetic oligonucleotide
gggaccccctagacaacgtgaatagtatca

SEQ ID NO: 326499 - DNA, 30 bp, Artificial Sequence
  Synthetic oligonucleotide
gaccaagacggaacgctgctatacgtatca

SEQ ID NO: 326500 - DNA, 30 bp, Artificial Sequence
  Synthetic oligonucleotide
gtccgacttacgggttgttaagccgtatca

SEQ ID NO: 326501 - DNA, 30 bp, Artificial Sequence
  Synthetic oligonucleotide
atacccaaaatggtccaccggtccgtatca

SEQ ID NO: 326502 - DNA, 30 bp, Artificial Sequence
  Synthetic oligonucleotide
ttccgtccgatgcaggattcgaaggtatca

SEQ ID NO: 326503 - DNA, 30 bp, Artificial Sequence
  Synthetic oligonucleotide
gagcctcttccagcctctcgacgggtatca

SEQ ID NO: 326504 - DNA, 30 bp, Artificial Sequence
  Synthetic oligonucleotide
ttgtaatccattatgcccttcggggtatca

SEQ ID NO: 326505 - DNA, 30 bp, Artificial Sequence
  Synthetic oligonucleotide
gcagtctagcgggctcgcgatgtggtatca

SEQ ID NO: 326506 - DNA, 30 bp, Artificial Sequence
  Synthetic oligonucleotide
caccaccttaatagagcgtttttggtatca

SEQ ID NO: 326507 - DNA, 30 bp, Artificial Sequence
  Synthetic oligonucleotide
ctccatttgccatcatttgtacagttatca

SEQ ID NO: 326508 - DNA, 30 bp, Artificial Sequence
  Synthetic oligonucleotide
aaacacgttccgcttgtaagaccgttatca

SEQ ID NO: 326509 - DNA, 30 bp, Artificial Sequence
  Synthetic oligonucleotide
tgttacatctcaattctgtttgtgttatca

SEQ ID NO: 326510 - DNA, 30 bp, Artificial Sequence
  Synthetic oligonucleotide
tctaagtgagtgcaaggattcaatttatca

SEQ ID NO: 326511 - DNA, 30 bp, Artificial Sequence
  Synthetic oligonucleotide
cgctccagattcatgcctggtcatttatca

SEQ ID NO: 326512 - DNA, 30 bp, Artificial Sequence
  Synthetic oligonucleotide
cggctaagtatcaatgactcctttttatca

SEQ ID NO: 326513 - DNA, 30 bp, Artificial Sequence
  Synthetic oligonucleotide
gagccttccgggagtggggcgaaaaactca

SEQ ID NO: 326514 - DNA, 30 bp, Artificial Sequence
  Synthetic oligonucleotide
gagtctttgtcatctcttcgcgcaaactca

SEQ ID NO: 326515 - DNA, 30 bp, Artificial Sequence
  Synthetic oligonucleotide
aatgccatcaaatccccggtggacaactca

SEQ ID NO: 326516 - DNA, 30 bp, Artificial Sequence
  Synthetic oligonucleotide
atatgagagcgatattattgtcccaactca

SEQ ID NO: 326517 - DNA, 30 bp, Artificial Sequence
  Synthetic oligonucleotide
gcctgagtaacataagccgtaggcaactca

SEQ ID NO: 326518 - DNA, 30 bp, Artificial Sequence
  Synthetic oligonucleotide
acctgattggagtatgtaacggtgaactca

SEQ ID NO: 326519 - DNA, 30 bp, Artificial Sequence
  Synthetic oligonucleotide
caagttaaagttctctgagacagtaactca

SEQ ID NO: 326520 - DNA, 30 bp, Artificial Sequence
  Synthetic oligonucleotide
taatttggacgcgtattcgggcgacactca

SEQ ID NO: 326521 - DNA, 30 bp, Artificial Sequence
  Synthetic oligonucleotide
cacgttagggcttatggctgataccactca

SEQ ID NO: 326522 - DNA, 30 bp, Artificial Sequence
  Synthetic oligonucleotide
agaggtaggggatacacaaagacccactca

SEQ ID NO: 326523 - DNA, 30 bp, Artificial Sequence
  Synthetic oligonucleotide
cggatgcgtggatggagtggatcccactca

SEQ ID NO: 326524 - DNA, 30 bp, Artificial Sequence
  Synthetic oligonucleotide
gctcttatctgtgtctgaatagagcactca

SEQ ID NO: 326525 - DNA, 30 bp, Artificial Sequence
  Synthetic oligonucleotide
ctcattgaatttggtgtaccaacgcactca

SEQ ID NO: 326526 - DNA, 30 bp, Artificial Sequence
  Synthetic oligonucleotide
agtgaagtacgatggcttaccagtcactca

SEQ ID NO: 326527 - DNA, 30 bp, Artificial Sequence
  Synthetic oligonucleotide
ccccatttggttacaccatgacaagactca

SEQ ID NO: 326528 - DNA, 30 bp, Artificial Sequence
  Synthetic oligonucleotide
ccgggtgtatgtataattgggccagactca

SEQ ID NO: 326529 - DNA, 30 bp, Artificial Sequence
  Synthetic oligonucleotide
ctgaagaacctgtttctaacttgagactca

SEQ ID NO: 326530 - DNA, 30 bp, Artificial Sequence
  Synthetic oligonucleotide
ccagtcggtgcgtcacccccgctagactca

SEQ ID NO: 326531 - DNA, 30 bp, Artificial Sequence
  Synthetic oligonucleotide
ttcttactgagaggcatgaaactcgactca

SEQ ID NO: 326532 - DNA, 30 bp, Artificial Sequence
  Synthetic oligonucleotide
gcgacttccgccggtcgacaggctgactca

SEQ ID NO: 326533 - DNA, 30 bp, Artificial Sequence
  Synthetic oligonucleotide
aagcagcggcgcggttgtatccgtgactca

SEQ ID NO: 326534 - DNA, 30 bp, Artificial Sequence
  Synthetic oligonucleotide
ctgcgccagcccggtgatatttttgactca

SEQ ID NO: 326535 - DNA, 30 bp, Artificial Sequence
  Synthetic oligonucleotide
tcaagccctctgagttaaagtctctactca

SEQ ID NO: 326536 - DNA, 30 bp, Artificial Sequence
  Synthetic oligonucleotide
gcattaggcgtgaaccttggtttctactca

SEQ ID NO: 326537 - DNA, 30 bp, Artificial Sequence
  Synthetic oligonucleotide
attccgcggtgtacggcttacaagtactca

SEQ ID NO: 326538 - DNA, 30 bp, Artificial Sequence
  Synthetic oligonucleotide
gaacgcgtaggaattttggccgcgtactca

SEQ ID NO: 326539 - DNA, 30 bp, Artificial Sequence
  Synthetic oligonucleotide
tagtagatggcagcgggccctaggtactca

SEQ ID NO: 326540 - DNA, 30 bp, Artificial Sequence
  Synthetic oligonucleotide
atatgaccaatcggagtgggtcattactca

SEQ ID NO: 326541 - DNA, 30 bp, Artificial Sequence
  Synthetic oligonucleotide
ggtccaagacgggcgagagtagacacctca

SEQ ID NO: 326542 - DNA, 30 bp, Artificial Sequence
  Synthetic oligonucleotide
ttatagggcaatatcccgactatcacctca

SEQ ID NO: 326543 - DNA, 30 bp, Artificial Sequence
  Synthetic oligonucleotide
cattgactgtggatacaaaccggtacctca

SEQ ID NO: 326544 - DNA, 30 bp, Artificial Sequence
  Synthetic oligonucleotide
cgattaactgggggccggtggtgtacctca

SEQ ID NO: 326545 - DNA, 30 bp, Artificial Sequence
  Synthetic oligonucleotide
cagatgcgtggcagccggttactcccctca

SEQ ID NO: 326546 - DNA, 30 bp, Artificial Sequence
  Synthetic oligonucleotide
cctggcgaaggggcaggaagggtcccctca

SEQ ID NO: 326547 - DNA, 30 bp, Artificial Sequence
  Synthetic oligonucleotide
ttgggtatccatcccactaaatcgccctca

SEQ ID NO: 326548 - DNA, 30 bp, Artificial Sequence
  Synthetic oligonucleotide
agatgcggaaaaaacaatcccgaagcctca

SEQ ID NO: 326549 - DNA, 30 bp, Artificial Sequence
  Synthetic oligonucleotide
gcaataccctccggttaacttcgggcctca

SEQ ID NO: 326550 - DNA, 30 bp, Artificial Sequence
  Synthetic oligonucleotide
gacgtatggtccatctcgcttatatcctca

SEQ ID NO: 326551 - DNA, 30 bp, Artificial Sequence
  Synthetic oligonucleotide
gtgtcccagaatctgtacggcgcctcctca

SEQ ID NO: 326552 - DNA, 30 bp, Artificial Sequence
  Synthetic oligonucleotide
tatcgttacgaataataacgaaagtcctca

SEQ ID NO: 326553 - DNA, 30 bp, Artificial Sequence
  Synthetic oligonucleotide
aaagctctgacgctgctacccaggtcctca

SEQ ID NO: 326554 - DNA, 30 bp, Artificial Sequence
  Synthetic oligonucleotide
aagcctcataggctcgttagacgaagctca

SEQ ID NO: 326555 - DNA, 30 bp, Artificial Sequence
  Synthetic oligonucleotide
gcggccattatattccacaatataagctca

SEQ ID NO: 326556 - DNA, 30 bp, Artificial Sequence
  Synthetic oligonucleotide
tcttaactggattgattgtcgacacgctca

SEQ ID NO: 326557 - DNA, 30 bp, Artificial Sequence
  Synthetic oligonucleotide
acccagcttggggaacaagcttgacgctca

SEQ ID NO: 326558 - DNA, 30 bp, Artificial Sequence
  Synthetic oligonucleotide
gctcccgtgggcctaaaaggggaccgctca

SEQ ID NO: 326559 - DNA, 30 bp, Artificial Sequence
  Synthetic oligonucleotide
aagaggttcacgaatcgacctcggcgctca

SEQ ID NO: 326560 - DNA, 30 bp, Artificial Sequence
  Synthetic oligonucleotide
acagccaaaggagcaaattctcaaggctca

SEQ ID NO: 326561 - DNA, 30 bp, Artificial Sequence
  Synthetic oligonucleotide
ggctaagaatgaactgacaggggaggctca

SEQ ID NO: 326562 - DNA, 30 bp, Artificial Sequence
  Synthetic oligonucleotide
aggtgacgtgcctgaagatccgacggctca

SEQ ID NO: 326563 - DNA, 30 bp, Artificial Sequence
  Synthetic oligonucleotide
tggttttaacacgaatccaggcgcggctca

SEQ ID NO: 326564 - DNA, 30 bp, Artificial Sequence
  Synthetic oligonucleotide
cggatcgactatgaaggggcaatcggctca

SEQ ID NO: 326565 - DNA, 30 bp, Artificial Sequence
  Synthetic oligonucleotide
gctgctccggtaaggaccaaggagggctca

SEQ ID NO: 326566 - DNA, 30 bp, Artificial Sequence
  Synthetic oligonucleotide
ccctattctcgggtcaatgttccgggctca

SEQ ID NO: 326567 - DNA, 30 bp, Artificial Sequence
  Synthetic oligonucleotide
cacccaactagaattggagaacaatgctca

SEQ ID NO: 326568 - DNA, 30 bp, Artificial Sequence
  Synthetic oligonucleotide
tagttccgatgcaggtcaagtgaatgctca

SEQ ID NO: 326569 - DNA, 30 bp, Artificial Sequence
  Synthetic oligonucleotide
attagagatacacaactactcacatgctca

SEQ ID NO: 326570 - DNA, 30 bp, Artificial Sequence
  Synthetic oligonucleotide
tcaataagttttcgccacacacgctgctca

SEQ ID NO: 326571 - DNA, 30 bp, Artificial Sequence
  Synthetic oligonucleotide
tgtagggtttatctagatgagaattgctca

SEQ ID NO: 326572 - DNA, 30 bp, Artificial Sequence
  Synthetic oligonucleotide
ggagcatatatacaaatatagacttgctca

SEQ ID NO: 326573 - DNA, 30 bp, Artificial Sequence
  Synthetic oligonucleotide
agggtgtacacagggtgagcgggaatctca

SEQ ID NO: 326574 - DNA, 30 bp, Artificial Sequence
  Synthetic oligonucleotide
catattaaggtggtgggcattcccatctca

SEQ ID NO: 326575 - DNA, 30 bp, Artificial Sequence
  Synthetic oligonucleotide
ggcacggatcctgggagtgggagcatctca

SEQ ID NO: 326576 - DNA, 30 bp, Artificial Sequence
  Synthetic oligonucleotide
gatgtagatgtcgaccttccggcgatctca

SEQ ID NO: 326577 - DNA, 30 bp, Artificial Sequence
  Synthetic oligonucleotide
ggtaccaagactgtggcgccatatatctca

SEQ ID NO: 326578 - DNA, 30 bp, Artificial Sequence
  Synthetic oligonucleotide
gatcttgatcaaggaagtacggctatctca

SEQ ID NO: 326579 - DNA, 30 bp, Artificial Sequence
  Synthetic oligonucleotide
tcgaacgccgcgtaatgcgcgtgtatctca

SEQ ID NO: 326580 - DNA, 30 bp, Artificial Sequence
  Synthetic oligonucleotide
gcgcacggggtgccgccgagtgaactctca

SEQ ID NO: 326581 - DNA, 30 bp, Artificial Sequence
  Synthetic oligonucleotide
tatggttcacgaaaccacacattactctca

SEQ ID NO: 326582 - DNA, 30 bp, Artificial Sequence
  Synthetic oligonucleotide
tgcgcgcaataacctggagacaacctctca

SEQ ID NO: 326583 - DNA, 30 bp, Artificial Sequence
  Synthetic oligonucleotide
attgagtaagtgggagctctttccctctca

SEQ ID NO: 326584 - DNA, 30 bp, Artificial Sequence
  Synthetic oligonucleotide
tgaaatgggtgttagataactgctctctca

SEQ ID NO: 326585 - DNA, 30 bp, Artificial Sequence
  Synthetic oligonucleotide
cttcgggattggtatagcagctttctctca

SEQ ID NO: 326586 - DNA, 30 bp, Artificial Sequence
  Synthetic oligonucleotide
aagttcagtagggaggttgtgtgagtctca

SEQ ID NO: 326587 - DNA, 30 bp, Artificial Sequence
  Synthetic oligonucleotide
cccatattcgtgcgaattttagtagtctca

SEQ ID NO: 326588 - DNA, 30 bp, Artificial Sequence
  Synthetic oligonucleotide
gtgaagaacgagctgtacgagtacgtctca

SEQ ID NO: 326589 - DNA, 30 bp, Artificial Sequence
  Synthetic oligonucleotide
tagtcaattgttccgttgacaagcgtctca

SEQ ID NO: 326590 - DNA, 30 bp, Artificial Sequence
  Synthetic oligonucleotide
cttcaggggaagctaagtcaggcggtctca

SEQ ID NO: 326591 - DNA, 30 bp, Artificial Sequence
  Synthetic oligonucleotide
gaccagtcgcttcaacgggttctggtctca

SEQ ID NO: 326592 - DNA, 30 bp, Artificial Sequence
  Synthetic oligonucleotide
gcccgacagagcgctcaattaggtgtctca

SEQ ID NO: 326593 - DNA, 30 bp, Artificial Sequence
  Synthetic oligonucleotide
ccaagttatggtttggatttagaattctca

SEQ ID NO: 326594 - DNA, 30 bp, Artificial Sequence
  Synthetic oligonucleotide
tctcagattgcaccgcagtacaagttctca

SEQ ID NO: 326595 - DNA, 30 bp, Artificial Sequence
  Synthetic oligonucleotide
ggtctgttgggttgattccttgtgttctca

SEQ ID NO: 326596 - DNA, 31 bp, Artificial Sequence
  Synthetic oligonucleotide
tgggaacatctaaatactcataaatttctca

SEQ ID NO: 326597 - DNA, 30 bp, Artificial Sequence
  Synthetic oligonucleotide
gatgagtgacgtccataactaattttctca

SEQ ID NO: 326598 - DNA, 30 bp, Artificial Sequence
  Synthetic oligonucleotide
gagacgcgcacttctcggagaaaaaagtca

SEQ ID NO: 326599 - DNA, 30 bp, Artificial Sequence
  Synthetic oligonucleotide
ggtgttcaagcgtaaagtacgtaaaagtca

SEQ ID NO: 326600 - DNA, 30 bp, Artificial Sequence
  Synthetic oligonucleotide
aattatgttgaccagcggctcgcgaagtca

SEQ ID NO: 326601 - DNA, 30 bp, Artificial Sequence
  Synthetic oligonucleotide
aactcagatccgtacactctcatgaagtca

SEQ ID NO: 326602 - DNA, 30 bp, Artificial Sequence
  Synthetic oligonucleotide
gatcttagagtaaggtgccttgctaagtca

SEQ ID NO: 326603 - DNA, 30 bp, Artificial Sequence
  Synthetic oligonucleotide
tagcatcaattcgcgcagaggggacagtca

SEQ ID NO: 326604 - DNA, 30 bp, Artificial Sequence
  Synthetic oligonucleotide
gcggcaactgtttatgccacatgacagtca

SEQ ID NO: 326605 - DNA, 30 bp, Artificial Sequence
  Synthetic oligonucleotide
ggatggtaacttttcattccctgagagtca

SEQ ID NO: 326606 - DNA, 30 bp, Artificial Sequence
  Synthetic oligonucleotide
gtgatacacagtcagactctatccgagtca

SEQ ID NO: 326607 - DNA, 30 bp, Artificial Sequence
  Synthetic oligonucleotide
cttgtactattttcggtaggtatcgagtca

SEQ ID NO: 326608 - DNA, 30 bp, Artificial Sequence
  Synthetic oligonucleotide
agagactaataatatatgttgcaggagtca

SEQ ID NO: 326609 - DNA, 30 bp, Artificial Sequence
  Synthetic oligonucleotide
caactcttagtcgaactgtgacatgagtca

SEQ ID NO: 326610 - DNA, 30 bp, Artificial Sequence
  Synthetic oligonucleotide
tgaacacaacaagactggaccgttgagtca

SEQ ID NO: 326611 - DNA, 30 bp, Artificial Sequence
  Synthetic oligonucleotide
atgtacacttcttaagatagcaaatagtca

SEQ ID NO: 326612 - DNA, 30 bp, Artificial Sequence
  Synthetic oligonucleotide
atcggcactcgggtatcacgcccctagtca

SEQ ID NO: 326613 - DNA, 30 bp, Artificial Sequence
  Synthetic oligonucleotide
cgggtattctatcccaaggcaagctagtca

SEQ ID NO: 326614 - DNA, 30 bp, Artificial Sequence
  Synthetic oligonucleotide
acaatcatagtatccactaccctctagtca

SEQ ID NO: 326615 - DNA, 30 bp, Artificial Sequence
  Synthetic oligonucleotide
tgcgacaataatccgtatgagcattagtca

SEQ ID NO: 326616 - DNA, 30 bp, Artificial Sequence
  Synthetic oligonucleotide
tgcgttacttaagcggtaggcgaaacgtca

SEQ ID NO: 326617 - DNA, 30 bp, Artificial Sequence
  Synthetic oligonucleotide
gcgtctgacgagcgatgcgcaagaacgtca

SEQ ID NO: 326618 - DNA, 30 bp, Artificial Sequence
  Synthetic oligonucleotide
aaacttgcatgggggctgcgaaacacgtca

SEQ ID NO: 326619 - DNA, 30 bp, Artificial Sequence
  Synthetic oligonucleotide
taattacggagcgatcccgattggacgtca

SEQ ID NO: 326620 - DNA, 30 bp, Artificial Sequence
  Synthetic oligonucleotide
tgttgtctctgactagccgttgaaccgtca

SEQ ID NO: 326621 - DNA, 30 bp, Artificial Sequence
  Synthetic oligonucleotide
tcccgaaataagcccagtactacaccgtca

SEQ ID NO: 326622 - DNA, 30 bp, Artificial Sequence
  Synthetic oligonucleotide
gcattccagtgctaaggaattcagccgtca

SEQ ID NO: 326623 - DNA, 30 bp, Artificial Sequence
  Synthetic oligonucleotide
aaccagatgcatctttataggacgccgtca

SEQ ID NO: 326624 - DNA, 30 bp, Artificial Sequence
  Synthetic oligonucleotide
tgtcgaacatttagttgaggcaaagcgtca

SEQ ID NO: 326625 - DNA, 30 bp, Artificial Sequence
  Synthetic oligonucleotide
aatccggacaacctttgactataggcgtca

SEQ ID NO: 326626 - DNA, 30 bp, Artificial Sequence
  Synthetic oligonucleotide
ctcttcacacattaccttcaagcggcgtca

SEQ ID NO: 326627 - DNA, 30 bp, Artificial Sequence
  Synthetic oligonucleotide
gaagtgcctaccgcttcgtcgttggcgtca

SEQ ID NO: 326628 - DNA, 30 bp, Artificial Sequence
  Synthetic oligonucleotide
ggaattacgaatgtcattgcctatgcgtca

SEQ ID NO: 326629 - DNA, 30 bp, Artificial Sequence
  Synthetic oligonucleotide
ccccactggccgtaatcagactattcgtca

SEQ ID NO: 326630 - DNA, 30 bp, Artificial Sequence
  Synthetic oligonucleotide
actacgggaatttgtgtttgtggttcgtca

SEQ ID NO: 326631 - DNA, 30 bp, Artificial Sequence
  Synthetic oligonucleotide
aggataaatgtgtacattaacttttcgtca

SEQ ID NO: 326632 - DNA, 30 bp, Artificial Sequence
  Synthetic oligonucleotide
cactctgttgggtcagttaccaaaaggtca

SEQ ID NO: 326633 - DNA, 30 bp, Artificial Sequence
  Synthetic oligonucleotide
gtgctcacgcgaaatcgggcatacaggtca

SEQ ID NO: 326634 - DNA, 30 bp, Artificial Sequence
  Synthetic oligonucleotide
gcaacaatgctatccaatatcagcaggtca

SEQ ID NO: 326635 - DNA, 30 bp, Artificial Sequence
  Synthetic oligonucleotide
gaccaaagtcggctcgtaacaacgaggtca

SEQ ID NO: 326636 - DNA, 30 bp, Artificial Sequence
  Synthetic oligonucleotide
taagattcatgatcgatttcatcgaggtca

SEQ ID NO: 326637 - DNA, 30 bp, Artificial Sequence
  Synthetic oligonucleotide
ggaaagctagagctttagctttggaggtca

SEQ ID NO: 326638 - DNA, 30 bp, Artificial Sequence
  Synthetic oligonucleotide
cctgagctacttgcctggttcaataggtca

SEQ ID NO: 326639 - DNA, 30 bp, Artificial Sequence
  Synthetic oligonucleotide
gggaacgctaatccggcgaagctacggtca

SEQ ID NO: 326640 - DNA, 30 bp, Artificial Sequence
  Synthetic oligonucleotide
tgtacgtgccgtagttctcttcaccggtca

SEQ ID NO: 326641 - DNA, 30 bp, Artificial Sequence
  Synthetic oligonucleotide
tatgctatccaatcaggcgaaacccggtca

SEQ ID NO: 326642 - DNA, 30 bp, Artificial Sequence
  Synthetic oligonucleotide
accggtgtgaccgactaacatggccggtca

SEQ ID NO: 326643 - DNA, 30 bp, Artificial Sequence
  Synthetic oligonucleotide
ctgcgttcagggtacgaggaccgtcggtca

SEQ ID NO: 326644 - DNA, 30 bp, Artificial Sequence
  Synthetic oligonucleotide
aaaccgcaccaataattcatgtaagggtca

SEQ ID NO: 326645 - DNA, 30 bp, Artificial Sequence
  Synthetic oligonucleotide
atcctggcatagaatgcgtccctagggtca

SEQ ID NO: 326646 - DNA, 30 bp, Artificial Sequence
  Synthetic oligonucleotide
tgggtaagtatcgcgatcctcgtagggtca

SEQ ID NO: 326647 - DNA, 30 bp, Artificial Sequence
  Synthetic oligonucleotide
ttattgttaccacacatattagacgggtca

SEQ ID NO: 326648 - DNA, 30 bp, Artificial Sequence
  Synthetic oligonucleotide
cacatgcctccaggcgtattagtcgggtca

SEQ ID NO: 326649 - DNA, 30 bp, Artificial Sequence
  Synthetic oligonucleotide
actagggcggttagcctatcgttggggtca

SEQ ID NO: 326650 - DNA, 31 bp, Artificial Sequence
  Synthetic oligonucleotide
gtagcgcgattccactgtgggataatggtca

SEQ ID NO: 326651 - DNA, 30 bp, Artificial Sequence
  Synthetic oligonucleotide
atgccacccgccactagaaaattctggtca

SEQ ID NO: 326652 - DNA, 30 bp, Artificial Sequence
  Synthetic oligonucleotide
ttgctctgaagggaatggtgacagtggtca

SEQ ID NO: 326653 - DNA, 30 bp, Artificial Sequence
  Synthetic oligonucleotide
ctactttcggtcttgatatcgccgtggtca

SEQ ID NO: 326654 - DNA, 30 bp, Artificial Sequence
  Synthetic oligonucleotide
ctaagggggggctagttagggcggtggtca

SEQ ID NO: 326655 - DNA, 30 bp, Artificial Sequence
  Synthetic oligonucleotide
actcttccccaaacgggatgaatgtggtca

SEQ ID NO: 326656 - DNA, 30 bp, Artificial Sequence
  Synthetic oligonucleotide
accggagtatactggcgatccgtgtggtca

SEQ ID NO: 326657 - DNA, 30 bp, Artificial Sequence
  Synthetic oligonucleotide
taataagatcttacaggtccgttgtggtca

SEQ ID NO: 326658 - DNA, 30 bp, Artificial Sequence
  Synthetic oligonucleotide
aggcttctttatacttacatgtaaatgtca

SEQ ID NO: 326659 - DNA, 30 bp, Artificial Sequence
  Synthetic oligonucleotide
gacagcgtagattcaaaacttagaatgtca

SEQ ID NO: 326660 - DNA, 30 bp, Artificial Sequence
  Synthetic oligonucleotide
tggccagataagtcccgatacgtaatgtca

SEQ ID NO: 326661 - DNA, 30 bp, Artificial Sequence
  Synthetic oligonucleotide
gggtgagatcttataagggcgaacatgtca

SEQ ID NO: 326662 - DNA, 30 bp, Artificial Sequence
  Synthetic oligonucleotide
acactcgcttcaccaaggcctaacatgtca

SEQ ID NO: 326663 - DNA, 30 bp, Artificial Sequence
  Synthetic oligonucleotide
tcgcaggggcagtgcgttcaggccatgtca

SEQ ID NO: 326664 - DNA, 30 bp, Artificial Sequence
  Synthetic oligonucleotide
atatataagaagggctaagtatggatgtca

SEQ ID NO: 326665 - DNA, 30 bp, Artificial Sequence
  Synthetic oligonucleotide
tagaattgtagcgggaatggacatatgtca

SEQ ID NO: 326666 - DNA, 30 bp, Artificial Sequence
  Synthetic oligonucleotide
cggtataggcgcgagtttattcttatgtca

SEQ ID NO: 326667 - DNA, 30 bp, Artificial Sequence
  Synthetic oligonucleotide
tcagattaattagataccccacggctgtca

SEQ ID NO: 326668 - DNA, 30 bp, Artificial Sequence
  Synthetic oligonucleotide
atgcgctcaattccccacgtacatctgtca

SEQ ID NO: 326669 - DNA, 30 bp, Artificial Sequence
  Synthetic oligonucleotide
atagcaactcgtcttgggattcgtctgtca

SEQ ID NO: 326670 - DNA, 30 bp, Artificial Sequence
  Synthetic oligonucleotide
acctacggcttttactcgtggtaagtgtca

SEQ ID NO: 326671 - DNA, 30 bp, Artificial Sequence
  Synthetic oligonucleotide
ggtttgctgcaccggccgaaagcagtgtca

SEQ ID NO: 326672 - DNA, 30 bp, Artificial Sequence
  Synthetic oligonucleotide
ccgaggcatggcaccttatactgcgtgtca

SEQ ID NO: 326673 - DNA, 30 bp, Artificial Sequence
  Synthetic oligonucleotide
ggcgtgaatagactccgcaattaggtgtca

SEQ ID NO: 326674 - DNA, 30 bp, Artificial Sequence
  Synthetic oligonucleotide
ctgtcaggtactcggtcatgaacggtgtca

SEQ ID NO: 326675 - DNA, 30 bp, Artificial Sequence
  Synthetic oligonucleotide
aaaatgggcataagggcctgcccggtgtca

SEQ ID NO: 326676 - DNA, 30 bp, Artificial Sequence
  Synthetic oligonucleotide
ccatcactacagcagtttaggatggtgtca

SEQ ID NO: 326677 - DNA, 30 bp, Artificial Sequence
  Synthetic oligonucleotide
aacaactaatcggtggaatgcttggtgtca

SEQ ID NO: 326678 - DNA, 30 bp, Artificial Sequence
  Synthetic oligonucleotide
tagatttgtccgaacgggcgtagtgtgtca

SEQ ID NO: 326679 - DNA, 30 bp, Artificial Sequence
  Synthetic oligonucleotide
ggtcataaatatacgcttggcggtgtgtca

SEQ ID NO: 326680 - DNA, 30 bp, Artificial Sequence
  Synthetic oligonucleotide
agttcgccttgattactccataaattgtca

SEQ ID NO: 326681 - DNA, 30 bp, Artificial Sequence
  Synthetic oligonucleotide
gtggcaactacattaacgatgctattgtca

SEQ ID NO: 326682 - DNA, 30 bp, Artificial Sequence
  Synthetic oligonucleotide
ctaacaccggcccctgttcacgacttgtca

SEQ ID NO: 326683 - DNA, 29 bp, Artificial Sequence
  Synthetic oligonucleotide
gacagacggactacgcggatgccttgtca

SEQ ID NO: 326684 - DNA, 30 bp, Artificial Sequence
  Synthetic oligonucleotide
tagtagacccgggcttcaaattgcttgtca

SEQ ID NO: 326685 - DNA, 30 bp, Artificial Sequence
  Synthetic oligonucleotide
aattagtgctgtagtaagcatttcttgtca

SEQ ID NO: 326686 - DNA, 30 bp, Artificial Sequence
  Synthetic oligonucleotide
aagctaaccagttcgacccacaggttgtca

SEQ ID NO: 326687 - DNA, 30 bp, Artificial Sequence
  Synthetic oligonucleotide
tgtgtggacataacatatgatctgttgtca

SEQ ID NO: 326688 - DNA, 30 bp, Artificial Sequence
  Synthetic oligonucleotide
cggtttccctctgtcgaacatgcaaattca

SEQ ID NO: 326689 - DNA, 30 bp, Artificial Sequence
  Synthetic oligonucleotide
acagctgaaacccgcgattggagaaattca

SEQ ID NO: 326690 - DNA, 30 bp, Artificial Sequence
  Synthetic oligonucleotide
accgtattcgctcgtgggagaggaaattca

SEQ ID NO: 326691 - DNA, 30 bp, Artificial Sequence
  Synthetic oligonucleotide
ctcttaacggttaggacgattagcaattca

SEQ ID NO: 326692 - DNA, 30 bp, Artificial Sequence
  Synthetic oligonucleotide
tcagcgggcgtctatctgtcgtggaattca

SEQ ID NO: 326693 - DNA, 30 bp, Artificial Sequence
  Synthetic oligonucleotide
cgtagtagtctcgcgcgcatagaacattca

SEQ ID NO: 326694 - DNA, 30 bp, Artificial Sequence
  Synthetic oligonucleotide
gcggtcactcggagcccgggttaacattca

SEQ ID NO: 326695 - DNA, 30 bp, Artificial Sequence
  Synthetic oligonucleotide
ccgctcagacgctcacgcggtagacattca

SEQ ID NO: 326696 - DNA, 30 bp, Artificial Sequence
  Synthetic oligonucleotide
agggattccgattttgtttacgctcattca

SEQ ID NO: 326697 - DNA, 30 bp, Artificial Sequence
  Synthetic oligonucleotide
gttctttaaaataccgaatatagtcattca

SEQ ID NO: 326698 - DNA, 30 bp, Artificial Sequence
  Synthetic oligonucleotide
actagggggagtggagagatgggtcattca

SEQ ID NO: 326699 - DNA, 30 bp, Artificial Sequence
  Synthetic oligonucleotide
ccactggtgatacgagcacgagttcattca

SEQ ID NO: 326700 - DNA, 30 bp, Artificial Sequence
  Synthetic oligonucleotide
tcaacgcaatcaaatgatctggcagattca

SEQ ID NO: 326701 - DNA, 30 bp, Artificial Sequence
  Synthetic oligonucleotide
gtcaaaagtttaccatcgtcctcagattca

SEQ ID NO: 326702 - DNA, 30 bp, Artificial Sequence
  Synthetic oligonucleotide
gtaaacgatatgcaagaaatgagagattca

SEQ ID NO: 326703 - DNA, 30 bp, Artificial Sequence
  Synthetic oligonucleotide
aaattggttacacggacgactcgcgattca

SEQ ID NO: 326704 - DNA, 30 bp, Artificial Sequence
  Synthetic oligonucleotide
aagaattattaagtaatgggtgtcgattca

SEQ ID NO: 326705 - DNA, 30 bp, Artificial Sequence
  Synthetic oligonucleotide
caggttcgcgatagatggaccttcgattca

SEQ ID NO: 326706 - DNA, 30 bp, Artificial Sequence
  Synthetic oligonucleotide
gcattgtctgtgagatccagaagggattca

SEQ ID NO: 326707 - DNA, 30 bp, Artificial Sequence
  Synthetic oligonucleotide
gctcctggatatagcagcgctaatgattca

SEQ ID NO: 326708 - DNA, 30 bp, Artificial Sequence
  Synthetic oligonucleotide
agatggattaagcgcgcgcgcgttgattca

SEQ ID NO: 326709 - DNA, 30 bp, Artificial Sequence
  Synthetic oligonucleotide
aaagagaactaccactacttataatattca

SEQ ID NO: 326710 - DNA, 30 bp, Artificial Sequence
  Synthetic oligonucleotide
aggtttgtagttcaagtagtaaactattca

SEQ ID NO: 326711 - DNA, 30 bp, Artificial Sequence
  Synthetic oligonucleotide
ttcagtctggctagaattagcagctattca

SEQ ID NO: 326712 - DNA, 30 bp, Artificial Sequence
  Synthetic oligonucleotide
cggaagggctagggtttcggcggctattca

SEQ ID NO: 326713 - DNA, 30 bp, Artificial Sequence
  Synthetic oligonucleotide
cctcaagatggcaagtactgcaggtattca

SEQ ID NO: 326714 - DNA, 30 bp, Artificial Sequence
  Synthetic oligonucleotide
tacgctaacttcgcaatgtggaggtattca

SEQ ID NO: 326715 - DNA, 30 bp, Artificial Sequence
  Synthetic oligonucleotide
cgaacattcatacccttttagtggtattca

SEQ ID NO: 326716 - DNA, 30 bp, Artificial Sequence
  Synthetic oligonucleotide
cccactacggcacaggttacagattattca

SEQ ID NO: 326717 - DNA, 30 bp, Artificial Sequence
  Synthetic oligonucleotide
taccacaaggtcgactgaaggccaacttca

SEQ ID NO: 326718 - DNA, 30 bp, Artificial Sequence
  Synthetic oligonucleotide
cttacgcatgttcgtcacagagcaacttca

SEQ ID NO: 326719 - DNA, 30 bp, Artificial Sequence
  Synthetic oligonucleotide
ttgcgaccattatggtctggctcaacttca

SEQ ID NO: 326720 - DNA, 30 bp, Artificial Sequence
  Synthetic oligonucleotide
taaggggtacagatttgctaccgcacttca

SEQ ID NO: 326721 - DNA, 30 bp, Artificial Sequence
  Synthetic oligonucleotide
ggtcataggtgcggccgtgtaatcacttca

SEQ ID NO: 326722 - DNA, 30 bp, Artificial Sequence
  Synthetic oligonucleotide
tactcatcgtccgccatccctcagacttca

SEQ ID NO: 326723 - DNA, 30 bp, Artificial Sequence
  Synthetic oligonucleotide
gcataacttagtatctgcacgtagacttca

SEQ ID NO: 326724 - DNA, 30 bp, Artificial Sequence
  Synthetic oligonucleotide
acacggaggaagaaagttgtagatacttca

SEQ ID NO: 326725 - DNA, 30 bp, Artificial Sequence
  Synthetic oligonucleotide
tgagcgccctgaatcagtaccattacttca

SEQ ID NO: 326726 - DNA, 30 bp, Artificial Sequence
  Synthetic oligonucleotide
caagataattaagcctttttttaaccttca

SEQ ID NO: 326727 - DNA, 30 bp, Artificial Sequence
  Synthetic oligonucleotide
aatgtgccatatcggaaaccgcgcccttca

SEQ ID NO: 326728 - DNA, 30 bp, Artificial Sequence
  Synthetic oligonucleotide
ctagaatggtgcatgactcgaccgccttca

SEQ ID NO: 326729 - DNA, 30 bp, Artificial Sequence
  Synthetic oligonucleotide
gctgcagggttggagttcagtcggccttca

SEQ ID NO: 326730 - DNA, 30 bp, Artificial Sequence
  Synthetic oligonucleotide
tacttgggcgaggaaccgactctgccttca

SEQ ID NO: 326731 - DNA, 30 bp, Artificial Sequence
  Synthetic oligonucleotide
atccgtggatgacctggagcgctagcttca

SEQ ID NO: 326732 - DNA, 30 bp, Artificial Sequence
  Synthetic oligonucleotide
cggtaactgtgtagtttgagttccgcttca

SEQ ID NO: 326733 - DNA, 31 bp, Artificial Sequence
  Synthetic oligonucleotide
tatcagaagcattctgtcccataaggcttca

SEQ ID NO: 326734 - DNA, 30 bp, Artificial Sequence
  Synthetic oligonucleotide
cgctggcccgactacccatcaatggcttca

SEQ ID NO: 326735 - DNA, 30 bp, Artificial Sequence
  Synthetic oligonucleotide
gcttctttttgggtaaaagagcgtgcttca

SEQ ID NO: 326736 - DNA, 30 bp, Artificial Sequence
  Synthetic oligonucleotide
ctccctatcgggggcgtcgtgtttgcttca

SEQ ID NO: 326737 - DNA, 30 bp, Artificial Sequence
  Synthetic oligonucleotide
tggtatctagtgaaataagttgtatcttca

SEQ ID NO: 326738 - DNA, 30 bp, Artificial Sequence
  Synthetic oligonucleotide
aacgcgacgtatggcacactagattcttca

SEQ ID NO: 326739 - DNA, 30 bp, Artificial Sequence
  Synthetic oligonucleotide
ggccgtctgcctccaagccttagaagttca

SEQ ID NO: 326740 - DNA, 30 bp, Artificial Sequence
  Synthetic oligonucleotide
gacctccacctgttaaggcatcgaagttca

SEQ ID NO: 326741 - DNA, 30 bp, Artificial Sequence
  Synthetic oligonucleotide
tatttatcatggatgtgatccgtaagttca

SEQ ID NO: 326742 - DNA, 30 bp, Artificial Sequence
  Synthetic oligonucleotide
aacgcagattagggattgtaggacagttca

SEQ ID NO: 326743 - DNA, 30 bp, Artificial Sequence
  Synthetic oligonucleotide
agggtcatacagctcgcgttagagagttca

SEQ ID NO: 326744 - DNA, 30 bp, Artificial Sequence
  Synthetic oligonucleotide
gttagaaagcgcctgggataagggagttca

SEQ ID NO: 326745 - DNA, 30 bp, Artificial Sequence
  Synthetic oligonucleotide
acgagttttgctgtaaggcagagtagttca

SEQ ID NO: 326746 - DNA, 30 bp, Artificial Sequence
  Synthetic oligonucleotide
gttcacgctccgtcctcttagcaacgttca

SEQ ID NO: 326747 - DNA, 30 bp, Artificial Sequence
  Synthetic oligonucleotide
ttctccattcatggctgatactgacgttca

SEQ ID NO: 326748 - DNA, 30 bp, Artificial Sequence
  Synthetic oligonucleotide
actcgtggttaccaagtcattgtacgttca

SEQ ID NO: 326749 - DNA, 30 bp, Artificial Sequence
  Synthetic oligonucleotide
gactggtttaaagggtaagaccagcgttca

SEQ ID NO: 326750 - DNA, 30 bp, Artificial Sequence
  Synthetic oligonucleotide
gtgacgttgattgctcttattcagcgttca

SEQ ID NO: 326751 - DNA, 30 bp, Artificial Sequence
  Synthetic oligonucleotide
gtacgaatgtcatctgcaacacgtcgttca

SEQ ID NO: 326752 - DNA, 31 bp, Artificial Sequence
  Synthetic oligonucleotide
agaaacgccgacaccagggaaggacggttca

SEQ ID NO: 326753 - DNA, 30 bp, Artificial Sequence
  Synthetic oligonucleotide
agcatttctgctaatgttaggtacggttca

SEQ ID NO: 326754 - DNA, 30 bp, Artificial Sequence
  Synthetic oligonucleotide
ctgtagggtctaaacttttactatggttca

SEQ ID NO: 326755 - DNA, 30 bp, Artificial Sequence
  Synthetic oligonucleotide
acgagagtaacgggcaagcgttaatgttca

SEQ ID NO: 326756 - DNA, 30 bp, Artificial Sequence
  Synthetic oligonucleotide
tctcttagattcgcaccggttcgctgttca

SEQ ID NO: 326757 - DNA, 31 bp, Artificial Sequence
  Synthetic oligonucleotide
attactgctgcgtcttaggtgttgctgttca

SEQ ID NO: 326758 - DNA, 30 bp, Artificial Sequence
  Synthetic oligonucleotide
aaaaaaaggtctggtgaccctcagtgttca

SEQ ID NO: 326759 - DNA, 30 bp, Artificial Sequence
  Synthetic oligonucleotide
ccgccatagcatacaaaattatcttgttca

SEQ ID NO: 326760 - DNA, 30 bp, Artificial Sequence
  Synthetic oligonucleotide
taccatctgctcgcggaccggcgttgttca

SEQ ID NO: 326761 - DNA, 30 bp, Artificial Sequence
  Synthetic oligonucleotide
gggcctcatatcgtacggtttatttgttca

SEQ ID NO: 326762 - DNA, 30 bp, Artificial Sequence
  Synthetic oligonucleotide
aggtgtccgttccttcggaggctttgttca

SEQ ID NO: 326763 - DNA, 30 bp, Artificial Sequence
  Synthetic oligonucleotide
aactgtcaaaaatagtgtattctaatttca

SEQ ID NO: 326764 - DNA, 30 bp, Artificial Sequence
  Synthetic oligonucleotide
atgggtttagcgtttataaatgtaatttca

SEQ ID NO: 326765 - DNA, 30 bp, Artificial Sequence
  Synthetic oligonucleotide
tgcaacatcctactagtaagttgcatttca

SEQ ID NO: 326766 - DNA, 30 bp, Artificial Sequence
  Synthetic oligonucleotide
ggggcttcttataaatgggtcgagatttca

SEQ ID NO: 326767 - DNA, 30 bp, Artificial Sequence
  Synthetic oligonucleotide
acctcatcatcgtatagcgcaacactttca

SEQ ID NO: 326768 - DNA, 30 bp, Artificial Sequence
  Synthetic oligonucleotide
gaaccggaaccgtcgtctctttgactttca

SEQ ID NO: 326769 - DNA, 30 bp, Artificial Sequence
  Synthetic oligonucleotide
tcttgacgtcgagaaagtcataacctttca

SEQ ID NO: 326770 - DNA, 30 bp, Artificial Sequence
  Synthetic oligonucleotide
actcacagacttgctccaggtcccctttca

SEQ ID NO: 326771 - DNA, 30 bp, Artificial Sequence
  Synthetic oligonucleotide
agtaccgcgatgcgcgagtaatccctttca

SEQ ID NO: 326772 - DNA, 30 bp, Artificial Sequence
  Synthetic oligonucleotide
gttgagcctcgtgctgcctaggtcctttca

SEQ ID NO: 326773 - DNA, 30 bp, Artificial Sequence
  Synthetic oligonucleotide
gtagcgttgctcacagccgggaagctttca

SEQ ID NO: 326774 - DNA, 30 bp, Artificial Sequence
  Synthetic oligonucleotide
agtaaataagagtgtagtgaaatgctttca

SEQ ID NO: 326775 - DNA, 30 bp, Artificial Sequence
  Synthetic oligonucleotide
caatgccaaatgtatccgacgggtctttca

SEQ ID NO: 326776 - DNA, 30 bp, Artificial Sequence
  Synthetic oligonucleotide
gcaaagatagggatgccaacctgtctttca

SEQ ID NO: 326777 - DNA, 30 bp, Artificial Sequence
  Synthetic oligonucleotide
tgaaaactataaatagtcggggaagtttca

SEQ ID NO: 326778 - DNA, 30 bp, Artificial Sequence
  Synthetic oligonucleotide
gcccattcctgttcaagacctgaagtttca

SEQ ID NO: 326779 - DNA, 30 bp, Artificial Sequence
  Synthetic oligonucleotide
gtcgccttttagcagttgtaaaacgtttca

SEQ ID NO: 326780 - DNA, 30 bp, Artificial Sequence
  Synthetic oligonucleotide
gtctagctaaggtgcaggtagcccgtttca

SEQ ID NO: 326781 - DNA, 30 bp, Artificial Sequence
  Synthetic oligonucleotide
gatactcagatacgtaaaaaaacggtttca

SEQ ID NO: 326782 - DNA, 31 bp, Artificial Sequence
  Synthetic oligonucleotide
atattagactcacgaaaggcacatggtttca

SEQ ID NO: 326783 - DNA, 30 bp, Artificial Sequence
  Synthetic oligonucleotide
cgttagagaacaagtataactggattttca

SEQ ID NO: 326784 - DNA, 30 bp, Artificial Sequence
  Synthetic oligonucleotide
ctatacctcaataggataagaatattttca

SEQ ID NO: 326785 - DNA, 30 bp, Artificial Sequence
  Synthetic oligonucleotide
gtgatcttataacaataggagatattttca

SEQ ID NO: 326786 - DNA, 30 bp, Artificial Sequence
  Synthetic oligonucleotide
tccggtgacgttacagggtgtctcttttca

SEQ ID NO: 326787 - DNA, 30 bp, Artificial Sequence
  Synthetic oligonucleotide
aatattggaccatgctcaaacgagttttca

SEQ ID NO: 326788 - DNA, 30 bp, Artificial Sequence
  Synthetic oligonucleotide
atggttctctgaaatctcgcatagttttca

SEQ ID NO: 326789 - DNA, 30 bp, Artificial Sequence
  Synthetic oligonucleotide
ccagcggttctttatttaagagcgttttca

SEQ ID NO: 326790 - DNA, 31 bp, Artificial Sequence
  Synthetic oligonucleotide
gtgccctgataaccataaagagaggttttca

SEQ ID NO: 326791 - DNA, 30 bp, Artificial Sequence
  Synthetic oligonucleotide
agattttacccagatattataatgttttca

SEQ ID NO: 326792 - DNA, 30 bp, Artificial Sequence
  Synthetic oligonucleotide
ttcggttcgccgaagctattccatttttca

SEQ ID NO: 326793 - DNA, 30 bp, Artificial Sequence
  Synthetic oligonucleotide
gcttcagaaaataatccaatatctttttca

SEQ ID NO: 326794 - DNA, 30 bp, Artificial Sequence
  Synthetic oligonucleotide
gcatggcccgtgatccacttgtaaaaaaga

SEQ ID NO: 326795 - DNA, 30 bp, Artificial Sequence
  Synthetic oligonucleotide
cgaagatatcccttacgttcagcaaaaaga

SEQ ID NO: 326796 - DNA, 30 bp, Artificial Sequence
  Synthetic oligonucleotide
taacagcggttccgtcgcgcatcaaaaaga

SEQ ID NO: 326797 - DNA, 30 bp, Artificial Sequence
  Synthetic oligonucleotide
gtctccccgggagttgtccagataaaaaga

SEQ ID NO: 326798 - DNA, 30 bp, Artificial Sequence
  Synthetic oligonucleotide
tgggtctggacggccggtcgattaaaaaga

SEQ ID NO: 326799 - DNA, 30 bp, Artificial Sequence
  Synthetic oligonucleotide
gccagctaaaaatctcgactaaacaaaaga

SEQ ID NO: 326800 - DNA, 30 bp, Artificial Sequence
  Synthetic oligonucleotide
agaactaatcagtacctccgctccaaaaga

SEQ ID NO: 326801 - DNA, 30 bp, Artificial Sequence
  Synthetic oligonucleotide
tttgtatcgacacattatcgttccaaaaga

SEQ ID NO: 326802 - DNA, 30 bp, Artificial Sequence
  Synthetic oligonucleotide
gtgtgactgcttcatgtgatacgcaaaaga

SEQ ID NO: 326803 - DNA, 30 bp, Artificial Sequence
  Synthetic oligonucleotide
ggtcttccgacaccataaggtgagaaaaga

SEQ ID NO: 326804 - DNA, 30 bp, Artificial Sequence
  Synthetic oligonucleotide
ttattgtatgatgggatcgtcatgaaaaga

SEQ ID NO: 326805 - DNA, 31 bp, Artificial Sequence
  Synthetic oligonucleotide
ggacatctcaagatgagctactgtgaaaaga

SEQ ID NO: 326806 - DNA, 30 bp, Artificial Sequence
  Synthetic oligonucleotide
tatgaatctgcctcgtcaagcagacaaaga

SEQ ID NO: 326807 - DNA, 30 bp, Artificial Sequence
  Synthetic oligonucleotide
gttcaatagatcaatacgggattacaaaga

SEQ ID NO: 326808 - DNA, 30 bp, Artificial Sequence
  Synthetic oligonucleotide
tcgggaaaccgggcgtttacactccaaaga

SEQ ID NO: 326809 - DNA, 30 bp, Artificial Sequence
  Synthetic oligonucleotide
gttgggacacagcaagcgagaaagcaaaga

SEQ ID NO: 326810 - DNA, 30 bp, Artificial Sequence
  Synthetic oligonucleotide
cacccgggtcttgaagttaaaacgcaaaga

SEQ ID NO: 326811 - DNA, 30 bp, Artificial Sequence
  Synthetic oligonucleotide
cggattatgctcgaattcttggggcaaaga

SEQ ID NO: 326812 - DNA, 30 bp, Artificial Sequence
  Synthetic oligonucleotide
gcagcgtgtttcctttttaatgggcaaaga

SEQ ID NO: 326813 - DNA, 30 bp, Artificial Sequence
  Synthetic oligonucleotide
ctcataaagctgcgtggctagtatcaaaga

SEQ ID NO: 326814 - DNA, 30 bp, Artificial Sequence
  Synthetic oligonucleotide
gagggacacaacgttactaaaagtcaaaga

SEQ ID NO: 326815 - DNA, 30 bp, Artificial Sequence
  Synthetic oligonucleotide
tgtgggtacactaaattttaggtagaaaga

SEQ ID NO: 326816 - DNA, 30 bp, Artificial Sequence
  Synthetic oligonucleotide
agacctagaggtcacgcttttgtcgaaaga

SEQ ID NO: 326817 - DNA, 30 bp, Artificial Sequence
  Synthetic oligonucleotide
ccgagatactcgcggtacatcttcgaaaga

SEQ ID NO: 326818 - DNA, 31 bp, Artificial Sequence
  Synthetic oligonucleotide
ggtagattgggggggcggaggtcaggaaaga

SEQ ID NO: 326819 - DNA, 30 bp, Artificial Sequence
  Synthetic oligonucleotide
cttgaccggtgcggactggaccctgaaaga

SEQ ID NO: 326820 - DNA, 30 bp, Artificial Sequence
  Synthetic oligonucleotide
tgccttcaaatattagctacggcataaaga

SEQ ID NO: 326821 - DNA, 30 bp, Artificial Sequence
  Synthetic oligonucleotide
agccgtcgcaattttctaaaatactaaaga

SEQ ID NO: 326822 - DNA, 30 bp, Artificial Sequence
  Synthetic oligonucleotide
gcgcctaactaagccacgtatagctaaaga

SEQ ID NO: 326823 - DNA, 30 bp, Artificial Sequence
  Synthetic oligonucleotide
gcccaatcgcgcggtccaccccgctaaaga

SEQ ID NO: 326824 - DNA, 30 bp, Artificial Sequence
  Synthetic oligonucleotide
gacgccgcgggttccaaagagtcgtaaaga

SEQ ID NO: 326825 - DNA, 30 bp, Artificial Sequence
  Synthetic oligonucleotide
cattaatagtgaatagggtcgcattaaaga

SEQ ID NO: 326826 - DNA, 30 bp, Artificial Sequence
  Synthetic oligonucleotide
ggggggtgtgattttgccctatattaaaga

SEQ ID NO: 326827 - DNA, 30 bp, Artificial Sequence
  Synthetic oligonucleotide
tgggaacatacctcttatgtctgttaaaga

SEQ ID NO: 326828 - DNA, 30 bp, Artificial Sequence
  Synthetic oligonucleotide
cttcatggtgtaggggccaccgtttaaaga

SEQ ID NO: 326829 - DNA, 30 bp, Artificial Sequence
  Synthetic oligonucleotide
acttttctataggtgggggtgtgaacaaga

SEQ ID NO: 326830 - DNA, 30 bp, Artificial Sequence
  Synthetic oligonucleotide
caagatctgtagtcctggaatctcacaaga

SEQ ID NO: 326831 - DNA, 30 bp, Artificial Sequence
  Synthetic oligonucleotide
tggccgtcgcgagtaaacggccagacaaga

SEQ ID NO: 326832 - DNA, 30 bp, Artificial Sequence
  Synthetic oligonucleotide
accgtttggtacatcatgccagagacaaga

SEQ ID NO: 326833 - DNA, 30 bp, Artificial Sequence
  Synthetic oligonucleotide
ctactggtgcatgacagttcagagacaaga

SEQ ID NO: 326834 - DNA, 30 bp, Artificial Sequence
  Synthetic oligonucleotide
gtctaatagactgtagtatcgccgacaaga

SEQ ID NO: 326835 - DNA, 30 bp, Artificial Sequence
  Synthetic oligonucleotide
catataagtgtattgttatctactacaaga

SEQ ID NO: 326836 - DNA, 30 bp, Artificial Sequence
  Synthetic oligonucleotide
ttttatagactggatatcgttattacaaga

SEQ ID NO: 326837 - DNA, 30 bp, Artificial Sequence
  Synthetic oligonucleotide
gctaaattttgatctaattggacaccaaga

SEQ ID NO: 326838 - DNA, 30 bp, Artificial Sequence
  Synthetic oligonucleotide
agaagaagggctaatttacatgcaccaaga

SEQ ID NO: 326839 - DNA, 30 bp, Artificial Sequence
  Synthetic oligonucleotide
actccggcttttgcagataggtgaccaaga

SEQ ID NO: 326840 - DNA, 30 bp, Artificial Sequence
  Synthetic oligonucleotide
acacttttgtcgggtatgaagaacccaaga

SEQ ID NO: 326841 - DNA, 30 bp, Artificial Sequence
  Synthetic oligonucleotide
aaatagtcaactttattaacagacccaaga

SEQ ID NO: 326842 - DNA, 30 bp, Artificial Sequence
  Synthetic oligonucleotide
cctatttatcgtgtggcattgtccccaaga

SEQ ID NO: 326843 - DNA, 30 bp, Artificial Sequence
  Synthetic oligonucleotide
accagatgtctcgttttgtatctcccaaga

SEQ ID NO: 326844 - DNA, 30 bp, Artificial Sequence
  Synthetic oligonucleotide
ccaggaaaagatgcgattcggccgccaaga

SEQ ID NO: 326845 - DNA, 30 bp, Artificial Sequence
  Synthetic oligonucleotide
aatagtaaatgatttcgacctctgccaaga

SEQ ID NO: 326846 - DNA, 30 bp, Artificial Sequence
  Synthetic oligonucleotide
agtgtggcctgttcggtcattaatccaaga

SEQ ID NO: 326847 - DNA, 30 bp, Artificial Sequence
  Synthetic oligonucleotide
gttaatgtagtccgtatctgagatccaaga

SEQ ID NO: 326848 - DNA, 30 bp, Artificial Sequence
  Synthetic oligonucleotide
attgtgtcgtgggatgtcccgactccaaga

SEQ ID NO: 326849 - DNA, 30 bp, Artificial Sequence
  Synthetic oligonucleotide
gagacaatccgctacagtatctctccaaga

SEQ ID NO: 326850 - DNA, 30 bp, Artificial Sequence
  Synthetic oligonucleotide
gtgtagttcttcctttttaggggcgcaaga

SEQ ID NO: 326851 - DNA, 30 bp, Artificial Sequence
  Synthetic oligonucleotide
caactgaactgcttctatggtaaggcaaga

SEQ ID NO: 326852 - DNA, 30 bp, Artificial Sequence
  Synthetic oligonucleotide
agcggctgggaggtcttaggaacggcaaga

SEQ ID NO: 326853 - DNA, 30 bp, Artificial Sequence
  Synthetic oligonucleotide
cgcattcttttttaagtcaggcatgcaaga

SEQ ID NO: 326854 - DNA, 30 bp, Artificial Sequence
  Synthetic oligonucleotide
ctcggactactgggtatatcacttgcaaga

SEQ ID NO: 326855 - DNA, 30 bp, Artificial Sequence
  Synthetic oligonucleotide
tggcttttcggctggaaagtctttgcaaga

SEQ ID NO: 326856 - DNA, 30 bp, Artificial Sequence
  Synthetic oligonucleotide
aggttcaatccgagcgtcaatcaatcaaga

SEQ ID NO: 326857 - DNA, 30 bp, Artificial Sequence
  Synthetic oligonucleotide
ggatgtctaatggcgcgtagcctctcaaga

SEQ ID NO: 326858 - DNA, 30 bp, Artificial Sequence
  Synthetic oligonucleotide
tggcgctaaacagatcccggggtctcaaga

SEQ ID NO: 326859 - DNA, 29 bp, Artificial Sequence
  Synthetic oligonucleotide
ggtagaccgccgtcggcaacaagtcaaga

SEQ ID NO: 326860 - DNA, 30 bp, Artificial Sequence
  Synthetic oligonucleotide
ctggttgcaattataccacgtaggtcaaga

SEQ ID NO: 326861 - DNA, 30 bp, Artificial Sequence
  Synthetic oligonucleotide
tacgtaaactcggccgaatttcggtcaaga

SEQ ID NO: 326862 - DNA, 30 bp, Artificial Sequence
  Synthetic oligonucleotide
tcttattagtgccctccagggctaagaaga

SEQ ID NO: 326863 - DNA, 30 bp, Artificial Sequence
  Synthetic oligonucleotide
gctcaatgtctgcacttgcttgccagaaga

SEQ ID NO: 326864 - DNA, 30 bp, Artificial Sequence
  Synthetic oligonucleotide
gtgcggttagtgttatacatgcgcagaaga

SEQ ID NO: 326865 - DNA, 30 bp, Artificial Sequence
  Synthetic oligonucleotide
gagtcttccgctgaggtctgatcgagaaga

SEQ ID NO: 326866 - DNA, 30 bp, Artificial Sequence
  Synthetic oligonucleotide
acgcagtcgtgggagggtcttcggagaaga

SEQ ID NO: 326867 - DNA, 30 bp, Artificial Sequence
  Synthetic oligonucleotide
tgggggcgcattgcccgttcatggagaaga

SEQ ID NO: 326868 - DNA, 30 bp, Artificial Sequence
  Synthetic oligonucleotide
catttccaatatcttgaatactgccgaaga

SEQ ID NO: 326869 - DNA, 30 bp, Artificial Sequence
  Synthetic oligonucleotide
acggtgacacacgatgtgcagctccgaaga

SEQ ID NO: 326870 - DNA, 30 bp, Artificial Sequence
  Synthetic oligonucleotide
aacatggccggttgtaccggagtccgaaga

SEQ ID NO: 326871 - DNA, 30 bp, Artificial Sequence
  Synthetic oligonucleotide
ctcgatgcccgccagtcaggggggcgaaga

SEQ ID NO: 326872 - DNA, 30 bp, Artificial Sequence
  Synthetic oligonucleotide
ttgctcatcttcagtcgtaagcacggaaga

SEQ ID NO: 326873 - DNA, 30 bp, Artificial Sequence
  Synthetic oligonucleotide
gtgttagcgtttaatgtgcgttatggaaga

SEQ ID NO: 326874 - DNA, 30 bp, Artificial Sequence
  Synthetic oligonucleotide
gccatttttgtcataactaaataatgaaga

SEQ ID NO: 326875 - DNA, 30 bp, Artificial Sequence
  Synthetic oligonucleotide
gtgggtgccagtgtcacgtaggcatgaaga

SEQ ID NO: 326876 - DNA, 30 bp, Artificial Sequence
  Synthetic oligonucleotide
ggatgttcgagcgttcctttcggatgaaga

SEQ ID NO: 326877 - DNA, 30 bp, Artificial Sequence
  Synthetic oligonucleotide
ctctgtagagacggggaatgatcctgaaga

SEQ ID NO: 326878 - DNA, 30 bp, Artificial Sequence
  Synthetic oligonucleotide
gtgtgataaccggcttgtatatgctgaaga

SEQ ID NO: 326879 - DNA, 30 bp, Artificial Sequence
  Synthetic oligonucleotide
ggcatattaaggaggggagcagcgtgaaga

SEQ ID NO: 326880 - DNA, 30 bp, Artificial Sequence
  Synthetic oligonucleotide
tttaaaatgatcacactacaggtgtgaaga

SEQ ID NO: 326881 - DNA, 30 bp, Artificial Sequence
  Synthetic oligonucleotide
tgggtctacggcagacgtgactattgaaga

SEQ ID NO: 326882 - DNA, 30 bp, Artificial Sequence
  Synthetic oligonucleotide
ttgctgtggtaaatagctgacggttgaaga

SEQ ID NO: 326883 - DNA, 30 bp, Artificial Sequence
  Synthetic oligonucleotide
tcgcattctggcccatcgaagtgttgaaga

SEQ ID NO: 326884 - DNA, 30 bp, Artificial Sequence
  Synthetic oligonucleotide
attctggtaaggggtggaataatttgaaga

SEQ ID NO: 326885 - DNA, 30 bp, Artificial Sequence
  Synthetic oligonucleotide
gcggtttaggggcagatactcgaaataaga

SEQ ID NO: 326886 - DNA, 30 bp, Artificial Sequence
  Synthetic oligonucleotide
tgagtacttggatcttcaccggatataaga

SEQ ID NO: 326887 - DNA, 30 bp, Artificial Sequence
  Synthetic oligonucleotide
tggatccaggggagttatagcacactaaga

SEQ ID NO: 326888 - DNA, 30 bp, Artificial Sequence
  Synthetic oligonucleotide
cagctttgagtacttgcaagcccactaaga

SEQ ID NO: 326889 - DNA, 30 bp, Artificial Sequence
  Synthetic oligonucleotide
tgctacttcccatatggatgtgcactaaga

SEQ ID NO: 326890 - DNA, 30 bp, Artificial Sequence
  Synthetic oligonucleotide
ggttcgcacgtatcctatattatactaaga

SEQ ID NO: 326891 - DNA, 30 bp, Artificial Sequence
  Synthetic oligonucleotide
acattatcacatagaggacgtgcgctaaga

SEQ ID NO: 326892 - DNA, 30 bp, Artificial Sequence
  Synthetic oligonucleotide
agtcactcttagctagtggaaggtctaaga

SEQ ID NO: 326893 - DNA, 30 bp, Artificial Sequence
  Synthetic oligonucleotide
ataaagcctcccctgggtgaacttctaaga

SEQ ID NO: 326894 - DNA, 30 bp, Artificial Sequence
  Synthetic oligonucleotide
aataccgggtagagacaccgttaagtaaga

SEQ ID NO: 326895 - DNA, 30 bp, Artificial Sequence
  Synthetic oligonucleotide
tcggtgttgctctctccttcaagagtaaga

SEQ ID NO: 326896 - DNA, 30 bp, Artificial Sequence
  Synthetic oligonucleotide
tactaccgcgccaagccttcatccgtaaga

SEQ ID NO: 326897 - DNA, 30 bp, Artificial Sequence
  Synthetic oligonucleotide
aatagcaatctctttatgcgcatcgtaaga

SEQ ID NO: 326898 - DNA, 30 bp, Artificial Sequence
  Synthetic oligonucleotide
cgacagtggtgcggttgctgccaggtaaga

SEQ ID NO: 326899 - DNA, 30 bp, Artificial Sequence
  Synthetic oligonucleotide
agatataagtgtaaagtaatgtctgtaaga

SEQ ID NO: 326900 - DNA, 30 bp, Artificial Sequence
  Synthetic oligonucleotide
agtccacgtttccaagtcttgtttgtaaga

SEQ ID NO: 326901 - DNA, 30 bp, Artificial Sequence
  Synthetic oligonucleotide
gacctgggggcacctgatgccgccttaaga

SEQ ID NO: 326902 - DNA, 30 bp, Artificial Sequence
  Synthetic oligonucleotide
cttctaagaagaaccaaaggtgggttaaga

SEQ ID NO: 326903 - DNA, 30 bp, Artificial Sequence
  Synthetic oligonucleotide
aaccggacagacgattttagggtgttaaga

SEQ ID NO: 326904 - DNA, 30 bp, Artificial Sequence
  Synthetic oligonucleotide
cagttctcagagagaaggcactctttaaga

SEQ ID NO: 326905 - DNA, 30 bp, Artificial Sequence
  Synthetic oligonucleotide
cgtgaatgatgaattccgcaagttttaaga

SEQ ID NO: 326906 - DNA, 30 bp, Artificial Sequence
  Synthetic oligonucleotide
cttgtgtatcagtcatatcggtaaaacaga

SEQ ID NO: 326907 - DNA, 30 bp, Artificial Sequence
  Synthetic oligonucleotide
tgtctcgaggagtatcttaagcgaaacaga

SEQ ID NO: 326908 - DNA, 30 bp, Artificial Sequence
  Synthetic oligonucleotide
gagagttcagtcgaacggtctggaaacaga

SEQ ID NO: 326909 - DNA, 30 bp, Artificial Sequence
  Synthetic oligonucleotide
gcccgctagaacctaacctggggcaacaga

SEQ ID NO: 326910 - DNA, 30 bp, Artificial Sequence
  Synthetic oligonucleotide
cctgtgaccggaagttcaatagtcaacaga

SEQ ID NO: 326911 - DNA, 30 bp, Artificial Sequence
  Synthetic oligonucleotide
gtatgttcttctcacctcggcggacacaga

SEQ ID NO: 326912 - DNA, 30 bp, Artificial Sequence
  Synthetic oligonucleotide
ctgacatctaacggatcgttggtccacaga

SEQ ID NO: 326913 - DNA, 30 bp, Artificial Sequence
  Synthetic oligonucleotide
gcaaggtatcgtgtaggtagatttcacaga

SEQ ID NO: 326914 - DNA, 30 bp, Artificial Sequence
  Synthetic oligonucleotide
ttgacaggactgtcgactactcaagacaga

SEQ ID NO: 326915 - DNA, 30 bp, Artificial Sequence
  Synthetic oligonucleotide
tcagggtactggtgccaaggggaagacaga

SEQ ID NO: 326916 - DNA, 30 bp, Artificial Sequence
  Synthetic oligonucleotide
tatcctcagtgtcaggatctagcagacaga

SEQ ID NO: 326917 - DNA, 30 bp, Artificial Sequence
  Synthetic oligonucleotide
ctggtgcgaggccttgagactcgagacaga

SEQ ID NO: 326918 - DNA, 30 bp, Artificial Sequence
  Synthetic oligonucleotide
ggactgtaaaacgtcgtgcactgagacaga

SEQ ID NO: 326919 - DNA, 30 bp, Artificial Sequence
  Synthetic oligonucleotide
agtactgttggatactatttagacgacaga

SEQ ID NO: 326920 - DNA, 30 bp, Artificial Sequence
  Synthetic oligonucleotide
tcatattggtctgccttgtttatcgacaga

SEQ ID NO: 326921 - DNA, 30 bp, Artificial Sequence
  Synthetic oligonucleotide
gcaacgtgcgtgaagcgcaagctatacaga

SEQ ID NO: 326922 - DNA, 30 bp, Artificial Sequence
  Synthetic oligonucleotide
ggagtccgataagaccaagcgctatacaga

SEQ ID NO: 326923 - DNA, 30 bp, Artificial Sequence
  Synthetic oligonucleotide
gtattatgtgaagccaggatgtattacaga

SEQ ID NO: 326924 - DNA, 30 bp, Artificial Sequence
  Synthetic oligonucleotide
aaagagccgttgaccctttgatgaaccaga

SEQ ID NO: 326925 - DNA, 31 bp, Artificial Sequence
  Synthetic oligonucleotide
gaaactacttttacaaatggcagtaaccaga

SEQ ID NO: 326926 - DNA, 30 bp, Artificial Sequence
  Synthetic oligonucleotide
actgatgtcggtaaacacgaggacaccaga

SEQ ID NO: 326927 - DNA, 30 bp, Artificial Sequence
  Synthetic oligonucleotide
gtccggtgtttgcgagttagatgacccaga

SEQ ID NO: 326928 - DNA, 30 bp, Artificial Sequence
  Synthetic oligonucleotide
acagaggatggtgcagctggatggcccaga

SEQ ID NO: 326929 - DNA, 30 bp, Artificial Sequence
  Synthetic oligonucleotide
aatactaccgtcgatactaacttagccaga

SEQ ID NO: 326930 - DNA, 30 bp, Artificial Sequence
  Synthetic oligonucleotide
agacaggggttcccatacccggacgccaga

SEQ ID NO: 326931 - DNA, 30 bp, Artificial Sequence
  Synthetic oligonucleotide
aaccgctgaatttgtatgaagaccgccaga

SEQ ID NO: 326932 - DNA, 30 bp, Artificial Sequence
  Synthetic oligonucleotide
acgaagcagcttcctgagcagagcgccaga

SEQ ID NO: 326933 - DNA, 30 bp, Artificial Sequence
  Synthetic oligonucleotide
cttataacccaatcattagtcaatgccaga

SEQ ID NO: 326934 - DNA, 30 bp, Artificial Sequence
  Synthetic oligonucleotide
tcttgccctagctgaactatatttgccaga

SEQ ID NO: 326935 - DNA, 30 bp, Artificial Sequence
  Synthetic oligonucleotide
gatgcaattagcgcacttggagaatccaga

SEQ ID NO: 326936 - DNA, 30 bp, Artificial Sequence
  Synthetic oligonucleotide
ttttcgatacgacaggccggttaatccaga

SEQ ID NO: 326937 - DNA, 30 bp, Artificial Sequence
  Synthetic oligonucleotide
caaaaagtcatctacagtgtccggtccaga

SEQ ID NO: 326938 - DNA, 31 bp, Artificial Sequence
  Synthetic oligonucleotide
aaacagcctttggccagggtctctgtccaga

SEQ ID NO: 326939 - DNA, 30 bp, Artificial Sequence
  Synthetic oligonucleotide
cgttctattgtgtgagacggtctttccaga

SEQ ID NO: 326940 - DNA, 30 bp, Artificial Sequence
  Synthetic oligonucleotide
ttacctcgaaagtaatataaatggagcaga

SEQ ID NO: 326941 - DNA, 30 bp, Artificial Sequence
  Synthetic oligonucleotide
ggatcgcctacgtgaagggttcatagcaga

SEQ ID NO: 326942 - DNA, 30 bp, Artificial Sequence
  Synthetic oligonucleotide
atgtcctgcactatcgggtagcttagcaga

SEQ ID NO: 326943 - DNA, 30 bp, Artificial Sequence
  Synthetic oligonucleotide
aactctagggggtccgattaagttagcaga

SEQ ID NO: 326944 - DNA, 30 bp, Artificial Sequence
  Synthetic oligonucleotide
gcatgctggggttgcataacttaacgcaga

SEQ ID NO: 326945 - DNA, 30 bp, Artificial Sequence
  Synthetic oligonucleotide
cacacaattccttgaaatggatcccgcaga

SEQ ID NO: 326946 - DNA, 30 bp, Artificial Sequence
  Synthetic oligonucleotide
tagggcgcagtatgtaaaattgggcgcaga

SEQ ID NO: 326947 - DNA, 30 bp, Artificial Sequence
  Synthetic oligonucleotide
tatactctactctcgcctccacaaggcaga

SEQ ID NO: 326948 - DNA, 30 bp, Artificial Sequence
  Synthetic oligonucleotide
gtgtgtgtgtagaatggaggcataggcaga

SEQ ID NO: 326949 - DNA, 30 bp, Artificial Sequence
  Synthetic oligonucleotide
actgtatgagctgacatcggcgtcggcaga

SEQ ID NO: 326950 - DNA, 30 bp, Artificial Sequence
  Synthetic oligonucleotide
atacaatatatatttgtggggccgggcaga

SEQ ID NO: 326951 - DNA, 30 bp, Artificial Sequence
  Synthetic oligonucleotide
gctcaggcggggggggtcgatcggggcaga

SEQ ID NO: 326952 - DNA, 30 bp, Artificial Sequence
  Synthetic oligonucleotide
gatagcaaatcgcccggcccattgggcaga

SEQ ID NO: 326953 - DNA, 30 bp, Artificial Sequence
  Synthetic oligonucleotide
ctaataacttggtccgtgagattgggcaga

SEQ ID NO: 326954 - DNA, 30 bp, Artificial Sequence
  Synthetic oligonucleotide
cgaatttggtacagaactgcgaatggcaga

SEQ ID NO: 326955 - DNA, 30 bp, Artificial Sequence
  Synthetic oligonucleotide
attgtatagtctagcgactcgtatggcaga

SEQ ID NO: 326956 - DNA, 30 bp, Artificial Sequence
  Synthetic oligonucleotide
aattccaatcaggcgcgtatcagtggcaga

SEQ ID NO: 326957 - DNA, 30 bp, Artificial Sequence
  Synthetic oligonucleotide
gcgtctatgacataccacttcaaatgcaga

SEQ ID NO: 326958 - DNA, 30 bp, Artificial Sequence
  Synthetic oligonucleotide
atatgtctcgccggctcgtataaatgcaga

SEQ ID NO: 326959 - DNA, 30 bp, Artificial Sequence
  Synthetic oligonucleotide
ggagtcaggacttatgcacacgtatgcaga

SEQ ID NO: 326960 - DNA, 30 bp, Artificial Sequence
  Synthetic oligonucleotide
attctaggatggccccagtctcgctgcaga

SEQ ID NO: 326961 - DNA, 30 bp, Artificial Sequence
  Synthetic oligonucleotide
taaatattcccaagacaatacgcgtgcaga

SEQ ID NO: 326962 - DNA, 30 bp, Artificial Sequence
  Synthetic oligonucleotide
gtatattcattttaccccaggtcttgcaga

SEQ ID NO: 326963 - DNA, 30 bp, Artificial Sequence
  Synthetic oligonucleotide
acagcgtggttaacgccgcgtgcaatcaga

SEQ ID NO: 326964 - DNA, 30 bp, Artificial Sequence
  Synthetic oligonucleotide
gtgctggttacgtctgcggcgggaatcaga

SEQ ID NO: 326965 - DNA, 30 bp, Artificial Sequence
  Synthetic oligonucleotide
cccatgcggtgtcgtccatgagacatcaga

SEQ ID NO: 326966 - DNA, 30 bp, Artificial Sequence
  Synthetic oligonucleotide
ttccacttcagagatgagatatacatcaga

SEQ ID NO: 326967 - DNA, 30 bp, Artificial Sequence
  Synthetic oligonucleotide
tcagttagcaaacattcacagcgcatcaga

SEQ ID NO: 326968 - DNA, 30 bp, Artificial Sequence
  Synthetic oligonucleotide
aactcaactggcctgccctcattcatcaga

SEQ ID NO: 326969 - DNA, 30 bp, Artificial Sequence
  Synthetic oligonucleotide
aatgtggtcggagactaatgatatatcaga

SEQ ID NO: 326970 - DNA, 30 bp, Artificial Sequence
  Synthetic oligonucleotide
ttttaaaatcgaagagtgacacgtatcaga

SEQ ID NO: 326971 - DNA, 30 bp, Artificial Sequence
  Synthetic oligonucleotide
attgtccgtttctatctaggcggtatcaga

SEQ ID NO: 326972 - DNA, 30 bp, Artificial Sequence
  Synthetic oligonucleotide
ttgtgcattatagaggaggtcggcctcaga

SEQ ID NO: 326973 - DNA, 30 bp, Artificial Sequence
  Synthetic oligonucleotide
gcaatcccactttaacagtaaaacgtcaga

SEQ ID NO: 326974 - DNA, 30 bp, Artificial Sequence
  Synthetic oligonucleotide
ttaatatacgtgcccagacttgtggtcaga

SEQ ID NO: 326975 - DNA, 30 bp, Artificial Sequence
  Synthetic oligonucleotide
cttgcatacgaacttcggattttggtcaga

SEQ ID NO: 326976 - DNA, 30 bp, Artificial Sequence
  Synthetic oligonucleotide
agattaccgggttggcatcactatgtcaga

SEQ ID NO: 326977 - DNA, 30 bp, Artificial Sequence
  Synthetic oligonucleotide
atgatcggccgaggtcggccgcgtgtcaga

SEQ ID NO: 326978 - DNA, 30 bp, Artificial Sequence
  Synthetic oligonucleotide
atcaccaatttctcagcgagaaaattcaga

SEQ ID NO: 326979 - DNA, 30 bp, Artificial Sequence
  Synthetic oligonucleotide
gtgtttcgggtaaaatagcaacaattcaga

SEQ ID NO: 326980 - DNA, 30 bp, Artificial Sequence
  Synthetic oligonucleotide
agttaaagaacgccggtttgagagttcaga

SEQ ID NO: 326981 - DNA, 30 bp, Artificial Sequence
  Synthetic oligonucleotide
caagaacttggccctgaggtagagttcaga

SEQ ID NO: 326982 - DNA, 30 bp, Artificial Sequence
  Synthetic oligonucleotide
gcgtctacgctgccaggaggtgagttcaga

SEQ ID NO: 326983 - DNA, 30 bp, Artificial Sequence
  Synthetic oligonucleotide
gggtacgcttaatgtcagtcttagttcaga

SEQ ID NO: 326984 - DNA, 30 bp, Artificial Sequence
  Synthetic oligonucleotide
gtctgtatttaggcgagcacacggttcaga

SEQ ID NO: 326985 - DNA, 30 bp, Artificial Sequence
  Synthetic oligonucleotide
cttttataaggacagggtaagtatttcaga

SEQ ID NO: 326986 - DNA, 30 bp, Artificial Sequence
  Synthetic oligonucleotide
tcccagaccgagccgtgggaagctttcaga

SEQ ID NO: 326987 - DNA, 30 bp, Artificial Sequence
  Synthetic oligonucleotide
gtcatctcggtaaacccattcgttttcaga

SEQ ID NO: 326988 - DNA, 30 bp, Artificial Sequence
  Synthetic oligonucleotide
gtagctttagcactgctaagttttttcaga

SEQ ID NO: 326989 - DNA, 30 bp, Artificial Sequence
  Synthetic oligonucleotide
gacaagtctcttgcctgcgttgggaagaga

SEQ ID NO: 326990 - DNA, 30 bp, Artificial Sequence
  Synthetic oligonucleotide
tacgctgtgtttggagacatcgctaagaga

SEQ ID NO: 326991 - DNA, 30 bp, Artificial Sequence
  Synthetic oligonucleotide
atagcggccttacaggtttcaattaagaga

SEQ ID NO: 326992 - DNA, 30 bp, Artificial Sequence
  Synthetic oligonucleotide
cttctccataataacctgcacaaacagaga

SEQ ID NO: 326993 - DNA, 30 bp, Artificial Sequence
  Synthetic oligonucleotide
ttctcacattaagttccgtcgtgacagaga

SEQ ID NO: 326994 - DNA, 30 bp, Artificial Sequence
  Synthetic oligonucleotide
ccgggaggcccttagcatcacatgcagaga

SEQ ID NO: 326995 - DNA, 30 bp, Artificial Sequence
  Synthetic oligonucleotide
ttatgattcacgcgtgtgtgttctcagaga

SEQ ID NO: 326996 - DNA, 30 bp, Artificial Sequence
  Synthetic oligonucleotide
gtagcacttaatcaggaaatacttcagaga

SEQ ID NO: 326997 - DNA, 30 bp, Artificial Sequence
  Synthetic oligonucleotide
gagacacgaagtatccggtctgcagagaga

SEQ ID NO: 326998 - DNA, 30 bp, Artificial Sequence
  Synthetic oligonucleotide
cctactctccctgtgggtgcctcagagaga

SEQ ID NO: 326999 - DNA, 30 bp, Artificial Sequence
  Synthetic oligonucleotide
gattagtttaatctgtgtagatgagagaga

SEQ ID NO: 327000 - DNA, 30 bp, Artificial Sequence
  Synthetic oligonucleotide
tgagaaacctcattctgacgttgcgagaga

SEQ ID NO: 327001 - DNA, 30 bp, Artificial Sequence
  Synthetic oligonucleotide
ctgtagaattatattttgttggtatagaga

SEQ ID NO: 327002 - DNA, 30 bp, Artificial Sequence
  Synthetic oligonucleotide
acggattagctttcattgataaactagaga

SEQ ID NO: 327003 - DNA, 30 bp, Artificial Sequence
  Synthetic oligonucleotide
tgctcactatggatcaattcatcctagaga

SEQ ID NO: 327004 - DNA, 30 bp, Artificial Sequence
  Synthetic oligonucleotide
gatcatccccactggttgtgtagctagaga

SEQ ID NO: 327005 - DNA, 30 bp, Artificial Sequence
  Synthetic oligonucleotide
agtttacgtgctcgttagggaatctagaga

SEQ ID NO: 327006 - DNA, 30 bp, Artificial Sequence
  Synthetic oligonucleotide
ggcctgcacactccggcaggtcgttagaga

SEQ ID NO: 327007 - DNA, 30 bp, Artificial Sequence
  Synthetic oligonucleotide
ttcggatacaggtgtcgtgaaatgacgaga

SEQ ID NO: 327008 - DNA, 30 bp, Artificial Sequence
  Synthetic oligonucleotide
gactatctgcagcaatataacgttacgaga

SEQ ID NO: 327009 - DNA, 30 bp, Artificial Sequence
  Synthetic oligonucleotide
agtcgtcgcaatcagggaagggcagcgaga

SEQ ID NO: 327010 - DNA, 30 bp, Artificial Sequence
  Synthetic oligonucleotide
ttcaacgtgttatcaatgtactcagcgaga

SEQ ID NO: 327011 - DNA, 30 bp, Artificial Sequence
  Synthetic oligonucleotide
gttcacgttctgtacttcgtaagagcgaga

SEQ ID NO: 327012 - DNA, 30 bp, Artificial Sequence
  Synthetic oligonucleotide
gccgatatgcaactatgatagaccgcgaga

SEQ ID NO: 327013 - DNA, 29 bp, Artificial Sequence
  Synthetic oligonucleotide
gcgaggcaccgcgatgcctggccgcgaga

SEQ ID NO: 327014 - DNA, 30 bp, Artificial Sequence
  Synthetic oligonucleotide
cataactcggtgagtgctacatcggcgaga

SEQ ID NO: 327015 - DNA, 30 bp, Artificial Sequence
  Synthetic oligonucleotide
caacttatgacaccggagtattaatcgaga

SEQ ID NO: 327016 - DNA, 30 bp, Artificial Sequence
  Synthetic oligonucleotide
gttcgggattatagcatgccaggatcgaga

SEQ ID NO: 327017 - DNA, 30 bp, Artificial Sequence
  Synthetic oligonucleotide
tagtcccggaaattccataaatgctcgaga

SEQ ID NO: 327018 - DNA, 30 bp, Artificial Sequence
  Synthetic oligonucleotide
atgacttgctcctgcaagactgtttcgaga

SEQ ID NO: 327019 - DNA, 30 bp, Artificial Sequence
  Synthetic oligonucleotide
tgagtcggacatcccatgatttagaggaga

SEQ ID NO: 327020 - DNA, 30 bp, Artificial Sequence
  Synthetic oligonucleotide
caaggcagttattggcaaaatcggaggaga

SEQ ID NO: 327021 - DNA, 30 bp, Artificial Sequence
  Synthetic oligonucleotide
gggggatactggacaattcactataggaga

SEQ ID NO: 327022 - DNA, 30 bp, Artificial Sequence
  Synthetic oligonucleotide
tttacctttatcagcgcaccaaaacggaga

SEQ ID NO: 327023 - DNA, 30 bp, Artificial Sequence
  Synthetic oligonucleotide
actatagatcgtttccgtcgaggacggaga

SEQ ID NO: 327024 - DNA, 30 bp, Artificial Sequence
  Synthetic oligonucleotide
tggacgcctcatcagtacagcgcgcggaga

SEQ ID NO: 327025 - DNA, 30 bp, Artificial Sequence
  Synthetic oligonucleotide
gaagtgctctcggtgacagattggcggaga

SEQ ID NO: 327026 - DNA, 30 bp, Artificial Sequence
  Synthetic oligonucleotide
gtagaatctaccgaccagaattttcggaga

SEQ ID NO: 327027 - DNA, 30 bp, Artificial Sequence
  Synthetic oligonucleotide
aattgtggtcgtagttgtgccgaagggaga

SEQ ID NO: 327028 - DNA, 30 bp, Artificial Sequence
  Synthetic oligonucleotide
gtcacgagtatgccaattagaacagggaga

SEQ ID NO: 327029 - DNA, 30 bp, Artificial Sequence
  Synthetic oligonucleotide
cgctgtaacatccgacgtatgcacgggaga

SEQ ID NO: 327030 - DNA, 30 bp, Artificial Sequence
  Synthetic oligonucleotide
gcggaataccatcgagtgacggatgggaga

SEQ ID NO: 327031 - DNA, 30 bp, Artificial Sequence
  Synthetic oligonucleotide
ttagggtaattccggtgctgctatgggaga

SEQ ID NO: 327032 - DNA, 30 bp, Artificial Sequence
  Synthetic oligonucleotide
gccaacgttagctgttaaattacatggaga

SEQ ID NO: 327033 - DNA, 30 bp, Artificial Sequence
  Synthetic oligonucleotide
gcgagtttaccctgagggagcacctggaga

SEQ ID NO: 327034 - DNA, 30 bp, Artificial Sequence
  Synthetic oligonucleotide
ggcgttccttattggagtacgccgtggaga

SEQ ID NO: 327035 - DNA, 30 bp, Artificial Sequence
  Synthetic oligonucleotide
acaatgtaggccatctctttacattggaga

SEQ ID NO: 327036 - DNA, 30 bp, Artificial Sequence
  Synthetic oligonucleotide
gtttaagagttcacgtatcaaacttggaga

SEQ ID NO: 327037 - DNA, 30 bp, Artificial Sequence
  Synthetic oligonucleotide
gactaaggaatttacagcgttggttggaga

SEQ ID NO: 327038 - DNA, 30 bp, Artificial Sequence
  Synthetic oligonucleotide
aataacctccggccggcttggtatatgaga

SEQ ID NO: 327039 - DNA, 30 bp, Artificial Sequence
  Synthetic oligonucleotide
cctatgcatgtgtcatgcctattactgaga

SEQ ID NO: 327040 - DNA, 30 bp, Artificial Sequence
  Synthetic oligonucleotide
gtatcgagatgactccagtatctcctgaga

SEQ ID NO: 327041 - DNA, 30 bp, Artificial Sequence
  Synthetic oligonucleotide
ttgacagcggtaagcgctcgcgtcctgaga

SEQ ID NO: 327042 - DNA, 30 bp, Artificial Sequence
  Synthetic oligonucleotide
taaggtggccttatggtcacacagctgaga

SEQ ID NO: 327043 - DNA, 30 bp, Artificial Sequence
  Synthetic oligonucleotide
caaactcatgcttactaacggccagtgaga

SEQ ID NO: 327044 - DNA, 30 bp, Artificial Sequence
  Synthetic oligonucleotide
tcacgtggctacgccgcctggtcagtgaga

SEQ ID NO: 327045 - DNA, 30 bp, Artificial Sequence
  Synthetic oligonucleotide
gaatagcctccgcaccgtcaatgagtgaga

SEQ ID NO: 327046 - DNA, 30 bp, Artificial Sequence
  Synthetic oligonucleotide
ctaatgggcccccaatgccacctagtgaga

SEQ ID NO: 327047 - DNA, 30 bp, Artificial Sequence
  Synthetic oligonucleotide
cgagctaggcctgccgctttagacgtgaga

SEQ ID NO: 327048 - DNA, 30 bp, Artificial Sequence
  Synthetic oligonucleotide
gtcaagctcctggtggtcgtataggtgaga

SEQ ID NO: 327049 - DNA, 30 bp, Artificial Sequence
  Synthetic oligonucleotide
cttgagatatatatttctaggagggtgaga

SEQ ID NO: 327050 - DNA, 30 bp, Artificial Sequence
  Synthetic oligonucleotide
ggattctcagcgacggaacgattggtgaga

SEQ ID NO: 327051 - DNA, 30 bp, Artificial Sequence
  Synthetic oligonucleotide
cttttaagtattatcgtcattttggtgaga

SEQ ID NO: 327052 - DNA, 30 bp, Artificial Sequence
  Synthetic oligonucleotide
aaaggttctgggttagctcatcatgtgaga

SEQ ID NO: 327053 - DNA, 30 bp, Artificial Sequence
  Synthetic oligonucleotide
gacgcgctatgtcatagtgcgtctgtgaga

SEQ ID NO: 327054 - DNA, 30 bp, Artificial Sequence
  Synthetic oligonucleotide
agcgtcgcaggacgtacaatttgtgtgaga

SEQ ID NO: 327055 - DNA, 30 bp, Artificial Sequence
  Synthetic oligonucleotide
agtgttttggattcgatatcatttgtgaga

SEQ ID NO: 327056 - DNA, 30 bp, Artificial Sequence
  Synthetic oligonucleotide
gggatactggagtgaggctcggaattgaga

SEQ ID NO: 327057 - DNA, 30 bp, Artificial Sequence
  Synthetic oligonucleotide
cgcagtggttataactcaccgacattgaga

SEQ ID NO: 327058 - DNA, 30 bp, Artificial Sequence
  Synthetic oligonucleotide
catagtcagaattagtttcttccattgaga

SEQ ID NO: 327059 - DNA, 30 bp, Artificial Sequence
  Synthetic oligonucleotide
actcgacgatcatggaaccccctattgaga

SEQ ID NO: 327060 - DNA, 30 bp, Artificial Sequence
  Synthetic oligonucleotide
ccaagattgacaggagagggtgacttgaga

SEQ ID NO: 327061 - DNA, 30 bp, Artificial Sequence
  Synthetic oligonucleotide
aaactaggaacaacggttttagcgttgaga

SEQ ID NO: 327062 - DNA, 30 bp, Artificial Sequence
  Synthetic oligonucleotide
tgggaccaaagatgttgagcacggttgaga

SEQ ID NO: 327063 - DNA, 30 bp, Artificial Sequence
  Synthetic oligonucleotide
gagtattcacaatgggcccctgtgttgaga

SEQ ID NO: 327064 - DNA, 30 bp, Artificial Sequence
  Synthetic oligonucleotide
gattctcaggcaagaagtgcacctttgaga

SEQ ID NO: 327065 - DNA, 30 bp, Artificial Sequence
  Synthetic oligonucleotide
taggaaatcaatgcatatatgtctttgaga

SEQ ID NO: 327066 - DNA, 30 bp, Artificial Sequence
  Synthetic oligonucleotide
cataagtatatagtcgaacggagtttgaga

SEQ ID NO: 327067 - DNA, 30 bp, Artificial Sequence
  Synthetic oligonucleotide
gctatgaaatagtgcacatcctgtttgaga

SEQ ID NO: 327068 - DNA, 30 bp, Artificial Sequence
  Synthetic oligonucleotide
aaacagatccacggccgggcgttcaataga

SEQ ID NO: 327069 - DNA, 30 bp, Artificial Sequence
  Synthetic oligonucleotide
ggcggcggcgctccgattgccaagaataga

SEQ ID NO: 327070 - DNA, 30 bp, Artificial Sequence
  Synthetic oligonucleotide
gagtcaaatacattgcgggtacagaataga

SEQ ID NO: 327071 - DNA, 30 bp, Artificial Sequence
  Synthetic oligonucleotide
tggtggagctccatgtgacgctggaataga

SEQ ID NO: 327072 - DNA, 30 bp, Artificial Sequence
  Synthetic oligonucleotide
gggtcaacgaactggccacacggtaataga

SEQ ID NO: 327073 - DNA, 30 bp, Artificial Sequence
  Synthetic oligonucleotide
acccggtgtaaactcggatacccacataga

SEQ ID NO: 327074 - DNA, 30 bp, Artificial Sequence
  Synthetic oligonucleotide
tgggcaggcattgtcctgcctccacataga

SEQ ID NO: 327075 - DNA, 30 bp, Artificial Sequence
  Synthetic oligonucleotide
aacgataaatctaaagcccattcacataga

SEQ ID NO: 327076 - DNA, 28 bp, Artificial Sequence
  Synthetic oligonucleotide
actagcagatttccttgcttcacataga

SEQ ID NO: 327077 - DNA, 30 bp, Artificial Sequence
  Synthetic oligonucleotide
tgtacgacacctgatgtctatcgacataga

SEQ ID NO: 327078 - DNA, 30 bp, Artificial Sequence
  Synthetic oligonucleotide
caattatgcctagccttgtgatagcataga

SEQ ID NO: 327079 - DNA, 30 bp, Artificial Sequence
  Synthetic oligonucleotide
tttcgagatactacagatcgcgggcataga

SEQ ID NO: 327080 - DNA, 30 bp, Artificial Sequence
  Synthetic oligonucleotide
tgcaaaactgtaccgtcttggattcataga

SEQ ID NO: 327081 - DNA, 30 bp, Artificial Sequence
  Synthetic oligonucleotide
aggttcgtgagacgtcctggacttcataga

SEQ ID NO: 327082 - DNA, 30 bp, Artificial Sequence
  Synthetic oligonucleotide
tcgggatcttcagaccggtcgcttcataga

SEQ ID NO: 327083 - DNA, 30 bp, Artificial Sequence
  Synthetic oligonucleotide
tgtttcaccagccagggtggaaaagataga

SEQ ID NO: 327084 - DNA, 30 bp, Artificial Sequence
  Synthetic oligonucleotide
cctacattacaacgaatccgcctagataga

SEQ ID NO: 327085 - DNA, 30 bp, Artificial Sequence
  Synthetic oligonucleotide
ctatatacccgttagctgcgtctagataga

SEQ ID NO: 327086 - DNA, 30 bp, Artificial Sequence
  Synthetic oligonucleotide
attggagctcgatggcagaatttagataga

SEQ ID NO: 327087 - DNA, 30 bp, Artificial Sequence
  Synthetic oligonucleotide
cttttatgaattgtgagacaaacatataga

SEQ ID NO: 327088 - DNA, 30 bp, Artificial Sequence
  Synthetic oligonucleotide
ttcaaattacaggccaaatgcccatataga

SEQ ID NO: 327089 - DNA, 30 bp, Artificial Sequence
  Synthetic oligonucleotide
tatacgggagagctatatctactgtataga

SEQ ID NO: 327090 - DNA, 30 bp, Artificial Sequence
  Synthetic oligonucleotide
ctcagttccaagtatggtcggaattataga

SEQ ID NO: 327091 - DNA, 30 bp, Artificial Sequence
  Synthetic oligonucleotide
ggaaatagctattggtggattaattataga

SEQ ID NO: 327092 - DNA, 29 bp, Artificial Sequence
  Synthetic oligonucleotide
acacatcgatggtcgtgtcctattataga

SEQ ID NO: 327093 - DNA, 30 bp, Artificial Sequence
  Synthetic oligonucleotide
acctagtgctagtacttttacgtaactaga

SEQ ID NO: 327094 - DNA, 30 bp, Artificial Sequence
  Synthetic oligonucleotide
ggatgaatactctagacgacgaacactaga

SEQ ID NO: 327095 - DNA, 30 bp, Artificial Sequence
  Synthetic oligonucleotide
tagaccaaacacccgatgtagcggactaga

SEQ ID NO: 327096 - DNA, 30 bp, Artificial Sequence
  Synthetic oligonucleotide
gacagggctcctaggcttgcccctactaga

SEQ ID NO: 327097 - DNA, 30 bp, Artificial Sequence
  Synthetic oligonucleotide
accattgtccgacagtcacacggtactaga

SEQ ID NO: 327098 - DNA, 30 bp, Artificial Sequence
  Synthetic oligonucleotide
ctggaggtgtactcttttggtgttactaga

SEQ ID NO: 327099 - DNA, 30 bp, Artificial Sequence
  Synthetic oligonucleotide
tagcgctctaaggcgacaagacaacctaga

SEQ ID NO: 327100 - DNA, 30 bp, Artificial Sequence
  Synthetic oligonucleotide
cgcgtcagacccacttctatgcaacctaga

SEQ ID NO: 327101 - DNA, 30 bp, Artificial Sequence
  Synthetic oligonucleotide
aaagagtgagttgtctatcattaacctaga

SEQ ID NO: 327102 - DNA, 30 bp, Artificial Sequence
  Synthetic oligonucleotide
cttcgtccaggaggtgggaacagacctaga

SEQ ID NO: 327103 - DNA, 30 bp, Artificial Sequence
  Synthetic oligonucleotide
agataattattacggcgtggtggacctaga

SEQ ID NO: 327104 - DNA, 30 bp, Artificial Sequence
  Synthetic oligonucleotide
aatccatcggaggtatacgtgttacctaga

SEQ ID NO: 327105 - DNA, 28 bp, Artificial Sequence
  Synthetic oligonucleotide
agcgaaaatgcatatgttgagccctaga

SEQ ID NO: 327106 - DNA, 30 bp, Artificial Sequence
  Synthetic oligonucleotide
tggcgtcgatactcgccgacccatcctaga

SEQ ID NO: 327107 - DNA, 30 bp, Artificial Sequence
  Synthetic oligonucleotide
gtaggtcgttgaattagtgtgggtcctaga

SEQ ID NO: 327108 - DNA, 30 bp, Artificial Sequence
  Synthetic oligonucleotide
aacttttcacccaagcaaacacttcctaga

SEQ ID NO: 327109 - DNA, 30 bp, Artificial Sequence
  Synthetic oligonucleotide
gtcatgcaactaaaaggtcagcccgctaga

SEQ ID NO: 327110 - DNA, 30 bp, Artificial Sequence
  Synthetic oligonucleotide
aattcgcagagcaaacatactatggctaga

SEQ ID NO: 327111 - DNA, 30 bp, Artificial Sequence
  Synthetic oligonucleotide
cgggtcttcaaaagtaatcaggaatctaga

SEQ ID NO: 327112 - DNA, 30 bp, Artificial Sequence
  Synthetic oligonucleotide
ccaagaatttggaaccaccacgcatctaga

SEQ ID NO: 327113 - DNA, 30 bp, Artificial Sequence
  Synthetic oligonucleotide
ttagaccgcggagactagtaaagatctaga

SEQ ID NO: 327114 - DNA, 30 bp, Artificial Sequence
  Synthetic oligonucleotide
ttaaatctggtagccatctaatgatctaga

SEQ ID NO: 327115 - DNA, 30 bp, Artificial Sequence
  Synthetic oligonucleotide
ccagcaaaaggtctcgacccctactctaga

SEQ ID NO: 327116 - DNA, 30 bp, Artificial Sequence
  Synthetic oligonucleotide
ttgccgctcacacgccaagacttaagtaga

SEQ ID NO: 327117 - DNA, 30 bp, Artificial Sequence
  Synthetic oligonucleotide
agcttatttgagtagcgcaccaagagtaga

SEQ ID NO: 327118 - DNA, 30 bp, Artificial Sequence
  Synthetic oligonucleotide
tagatgaacgtgcggcataggagacgtaga

SEQ ID NO: 327119 - DNA, 30 bp, Artificial Sequence
  Synthetic oligonucleotide
cctctgccggtggccgagaacctccgtaga

SEQ ID NO: 327120 - DNA, 30 bp, Artificial Sequence
  Synthetic oligonucleotide
gcaccagtgggttggtttgctaaaggtaga

SEQ ID NO: 327121 - DNA, 30 bp, Artificial Sequence
  Synthetic oligonucleotide
cctcctaggattgtgttgcgacaaggtaga

SEQ ID NO: 327122 - DNA, 30 bp, Artificial Sequence
  Synthetic oligonucleotide
tgccgtgcggcctaaggaagtaacggtaga

SEQ ID NO: 327123 - DNA, 30 bp, Artificial Sequence
  Synthetic oligonucleotide
ccaacgcaggggtctcatctccacggtaga

SEQ ID NO: 327124 - DNA, 30 bp, Artificial Sequence
  Synthetic oligonucleotide
tttggactacagcttggtgggacgggtaga

SEQ ID NO: 327125 - DNA, 30 bp, Artificial Sequence
  Synthetic oligonucleotide
gaagactcatatcggatatacaatggtaga

SEQ ID NO: 327126 - DNA, 30 bp, Artificial Sequence
  Synthetic oligonucleotide
tcatttcctcggacaggtatactctgtaga

SEQ ID NO: 327127 - DNA, 30 bp, Artificial Sequence
  Synthetic oligonucleotide
cgcgtgggcatggacgcaggaaggtgtaga

SEQ ID NO: 327128 - DNA, 30 bp, Artificial Sequence
  Synthetic oligonucleotide
agccgattaagaccgtggcgtcaaattaga

SEQ ID NO: 327129 - DNA, 30 bp, Artificial Sequence
  Synthetic oligonucleotide
gtgaaaaccaacgcaccaactgaaattaga

SEQ ID NO: 327130 - DNA, 30 bp, Artificial Sequence
  Synthetic oligonucleotide
aacgtgtaagtagactgagtagcaattaga

SEQ ID NO: 327131 - DNA, 30 bp, Artificial Sequence
  Synthetic oligonucleotide
aaattacagtgtgcccttcgttacattaga

SEQ ID NO: 327132 - DNA, 30 bp, Artificial Sequence
  Synthetic oligonucleotide
ctacctaaagcgccatcccaacgcattaga

SEQ ID NO: 327133 - DNA, 30 bp, Artificial Sequence
  Synthetic oligonucleotide
aggagtcctaaatttagctctcgcattaga

SEQ ID NO: 327134 - DNA, 30 bp, Artificial Sequence
  Synthetic oligonucleotide
cagtttgtacacttcaaatccggcattaga

SEQ ID NO: 327135 - DNA, 30 bp, Artificial Sequence
  Synthetic oligonucleotide
tcgcgtctgagcacaggctgctgcattaga

SEQ ID NO: 327136 - DNA, 30 bp, Artificial Sequence
  Synthetic oligonucleotide
aaacgtcctaacgacaggttgacgattaga

SEQ ID NO: 327137 - DNA, 30 bp, Artificial Sequence
  Synthetic oligonucleotide
tttcgttatcattgggtcgtgccgattaga

SEQ ID NO: 327138 - DNA, 30 bp, Artificial Sequence
  Synthetic oligonucleotide
tgaatcccgtatgggcatcgtgatattaga

SEQ ID NO: 327139 - DNA, 30 bp, Artificial Sequence
  Synthetic oligonucleotide
ggtcgtctgcacgaatcctagcgtattaga

SEQ ID NO: 327140 - DNA, 30 bp, Artificial Sequence
  Synthetic oligonucleotide
tcaagcggtccggaatgaagacttattaga

SEQ ID NO: 327141 - DNA, 30 bp, Artificial Sequence
  Synthetic oligonucleotide
aatatcgcggatcacggtccggttattaga

SEQ ID NO: 327142 - DNA, 30 bp, Artificial Sequence
  Synthetic oligonucleotide
aaccacctgtttaaactgagtaaacttaga

SEQ ID NO: 327143 - DNA, 30 bp, Artificial Sequence
  Synthetic oligonucleotide
ttggcaatcgggcccaagacttaccttaga

SEQ ID NO: 327144 - DNA, 30 bp, Artificial Sequence
  Synthetic oligonucleotide
agatattgcggcaaacagtctcatcttaga

SEQ ID NO: 327145 - DNA, 30 bp, Artificial Sequence
  Synthetic oligonucleotide
acgaagggtcagcggttttttgaagttaga

SEQ ID NO: 327146 - DNA, 30 bp, Artificial Sequence
  Synthetic oligonucleotide
tcaacattaaaaatctatatattagttaga

SEQ ID NO: 327147 - DNA, 30 bp, Artificial Sequence
  Synthetic oligonucleotide
gagaagctcagttctcatgtcttagttaga

SEQ ID NO: 327148 - DNA, 30 bp, Artificial Sequence
  Synthetic oligonucleotide
acattaggaagtcagcttgggctcgttaga

SEQ ID NO: 327149 - DNA, 30 bp, Artificial Sequence
  Synthetic oligonucleotide
tacgacacgaagcatcattgctaggttaga

SEQ ID NO: 327150 - DNA, 30 bp, Artificial Sequence
  Synthetic oligonucleotide
gtgatgtagctatcggaagaagcggttaga

SEQ ID NO: 327151 - DNA, 30 bp, Artificial Sequence
  Synthetic oligonucleotide
tcctgcgctcccatagcaacatcggttaga

SEQ ID NO: 327152 - DNA, 30 bp, Artificial Sequence
  Synthetic oligonucleotide
caattaataccgctgttagtatctgttaga

SEQ ID NO: 327153 - DNA, 30 bp, Artificial Sequence
  Synthetic oligonucleotide
cgaagattaacgtgatgggggcgtgttaga

SEQ ID NO: 327154 - DNA, 30 bp, Artificial Sequence
  Synthetic oligonucleotide
gtgtggcatacgcctgggcatcattttaga

SEQ ID NO: 327155 - DNA, 30 bp, Artificial Sequence
  Synthetic oligonucleotide
gaaaccatgggagaccagaggtattttaga

SEQ ID NO: 327156 - DNA, 30 bp, Artificial Sequence
  Synthetic oligonucleotide
gtagtgtcgcgaagctagcttggttttaga

SEQ ID NO: 327157 - DNA, 30 bp, Artificial Sequence
  Synthetic oligonucleotide
acgttagtacagcgatagagtttttttaga

SEQ ID NO: 327158 - DNA, 30 bp, Artificial Sequence
  Synthetic oligonucleotide
acgaccgggagcttcgtacgcgcaaaacga

SEQ ID NO: 327159 - DNA, 30 bp, Artificial Sequence
  Synthetic oligonucleotide
gcgtaggttactgcccagcagttcaaacga

SEQ ID NO: 327160 - DNA, 30 bp, Artificial Sequence
  Synthetic oligonucleotide
gcaaagccgtttatacctttgaagaaacga

SEQ ID NO: 327161 - DNA, 30 bp, Artificial Sequence
  Synthetic oligonucleotide
cctgtatgccatccagtacatatgaaacga

SEQ ID NO: 327162 - DNA, 30 bp, Artificial Sequence
  Synthetic oligonucleotide
cccacgtctaacagtattatacctaaacga

SEQ ID NO: 327163 - DNA, 30 bp, Artificial Sequence
  Synthetic oligonucleotide
accaatgtataagctgcagtacctaaacga

SEQ ID NO: 327164 - DNA, 30 bp, Artificial Sequence
  Synthetic oligonucleotide
gccagaccaacgtggcgttttttgcaacga

SEQ ID NO: 327165 - DNA, 30 bp, Artificial Sequence
  Synthetic oligonucleotide
gatatgaaacgctctagcagcaatcaacga

SEQ ID NO: 327166 - DNA, 30 bp, Artificial Sequence
  Synthetic oligonucleotide
atcgcccctcgtttagcaggttctcaacga

SEQ ID NO: 327167 - DNA, 30 bp, Artificial Sequence
  Synthetic oligonucleotide
tgtggagaatcacattgtgtaggtcaacga

SEQ ID NO: 327168 - DNA, 30 bp, Artificial Sequence
  Synthetic oligonucleotide
ttaggatcgcgcctggagtaaggcgaacga

SEQ ID NO: 327169 - DNA, 30 bp, Artificial Sequence
  Synthetic oligonucleotide
aaacaaaccattgagacgaagggcgaacga

SEQ ID NO: 327170 - DNA, 30 bp, Artificial Sequence
  Synthetic oligonucleotide
tctgcagtatccgcatttgcaagataacga

SEQ ID NO: 327171 - DNA, 30 bp, Artificial Sequence
  Synthetic oligonucleotide
ttctgtgaaccatcagttagagattaacga

SEQ ID NO: 327172 - DNA, 30 bp, Artificial Sequence
  Synthetic oligonucleotide
tctccaatgtaatggaggtgatattaacga

SEQ ID NO: 327173 - DNA, 29 bp, Artificial Sequence
  Synthetic oligonucleotide
aattatggttggagctgaagagttaacga

SEQ ID NO: 327174 - DNA, 30 bp, Artificial Sequence
  Synthetic oligonucleotide
gcgagtcgcttttcgaaaattgccacacga

SEQ ID NO: 327175 - DNA, 30 bp, Artificial Sequence
  Synthetic oligonucleotide
ataaataggccgagttttacctccacacga

SEQ ID NO: 327176 - DNA, 30 bp, Artificial Sequence
  Synthetic oligonucleotide
ttggctataagatcttgaaggtgtacacga

SEQ ID NO: 327177 - DNA, 30 bp, Artificial Sequence
  Synthetic oligonucleotide
ttcggttcttggatacgtaggcaaccacga

SEQ ID NO: 327178 - DNA, 30 bp, Artificial Sequence
  Synthetic oligonucleotide
ttaacgtcgtcacttattatacgaccacga

SEQ ID NO: 327179 - DNA, 30 bp, Artificial Sequence
  Synthetic oligonucleotide
gtcttgactgtgttgagttagggaccacga

SEQ ID NO: 327180 - DNA, 30 bp, Artificial Sequence
  Synthetic oligonucleotide
aacgctttgtacgtagagccctgaccacga

SEQ ID NO: 327181 - DNA, 30 bp, Artificial Sequence
  Synthetic oligonucleotide
ggttgacaaatgaggcaagctcctccacga

SEQ ID NO: 327182 - DNA, 30 bp, Artificial Sequence
  Synthetic oligonucleotide
gcagtattaggaacgtaacggtctccacga

SEQ ID NO: 327183 - DNA, 30 bp, Artificial Sequence
  Synthetic oligonucleotide
aaatgagaggataagcaagaaacagcacga

SEQ ID NO: 327184 - DNA, 30 bp, Artificial Sequence
  Synthetic oligonucleotide
actcagcgacttaagccccgcgcagcacga

SEQ ID NO: 327185 - DNA, 30 bp, Artificial Sequence
  Synthetic oligonucleotide
caaccttggtccgaccgaaattgagcacga

SEQ ID NO: 327186 - DNA, 30 bp, Artificial Sequence
  Synthetic oligonucleotide
ccgcatataggcttgtgcagtagcgcacga

SEQ ID NO: 327187 - DNA, 30 bp, Artificial Sequence
  Synthetic oligonucleotide
tagggatgaactatttcctattgcgcacga

SEQ ID NO: 327188 - DNA, 30 bp, Artificial Sequence
  Synthetic oligonucleotide
gagccggaatacatagataatccggcacga

SEQ ID NO: 327189 - DNA, 30 bp, Artificial Sequence
  Synthetic oligonucleotide
gccaccttcatacgttaggcttctgcacga

SEQ ID NO: 327190 - DNA, 30 bp, Artificial Sequence
  Synthetic oligonucleotide
cgcggcaaggaaaaccatccaaaatcacga

SEQ ID NO: 327191 - DNA, 30 bp, Artificial Sequence
  Synthetic oligonucleotide
cagttatttggacgctcacaatcatcacga

SEQ ID NO: 327192 - DNA, 30 bp, Artificial Sequence
  Synthetic oligonucleotide
tgatgtggaaagaacctattagactcacga

SEQ ID NO: 327193 - DNA, 30 bp, Artificial Sequence
  Synthetic oligonucleotide
ttcctatgagacgtgaaaccgagctcacga

SEQ ID NO: 327194 - DNA, 30 bp, Artificial Sequence
  Synthetic oligonucleotide
cagccggataggactaggggcgggtcacga

SEQ ID NO: 327195 - DNA, 30 bp, Artificial Sequence
  Synthetic oligonucleotide
ggtaaattatatagaggtgcagcttcacga

SEQ ID NO: 327196 - DNA, 30 bp, Artificial Sequence
  Synthetic oligonucleotide
acgcgcccgaacctgagtgggatttcacga

SEQ ID NO: 327197 - DNA, 30 bp, Artificial Sequence
  Synthetic oligonucleotide
cccgcggcctttgccaagtggtacagacga

SEQ ID NO: 327198 - DNA, 30 bp, Artificial Sequence
  Synthetic oligonucleotide
gggggggagcttggcagggagagcagacga

SEQ ID NO: 327199 - DNA, 30 bp, Artificial Sequence
  Synthetic oligonucleotide
atcggtggtcgtcgatcacccatcagacga

SEQ ID NO: 327200 - DNA, 30 bp, Artificial Sequence
  Synthetic oligonucleotide
ttttaatcacagcgacggcggatcagacga

SEQ ID NO: 327201 - DNA, 30 bp, Artificial Sequence
  Synthetic oligonucleotide
gtcacgtagtggcatcacggaactagacga

SEQ ID NO: 327202 - DNA, 30 bp, Artificial Sequence
  Synthetic oligonucleotide
tgagagacatacataatgaaagttagacga

SEQ ID NO: 327203 - DNA, 30 bp, Artificial Sequence
  Synthetic oligonucleotide
agtctactctaatcaccaattacacgacga

SEQ ID NO: 327204 - DNA, 30 bp, Artificial Sequence
  Synthetic oligonucleotide
cccggactgtgtgataagatgcggcgacga

SEQ ID NO: 327205 - DNA, 30 bp, Artificial Sequence
  Synthetic oligonucleotide
ttcttcactacacttatcacactgcgacga

SEQ ID NO: 327206 - DNA, 30 bp, Artificial Sequence
  Synthetic oligonucleotide
gtgaattggtctgtacaggattaaggacga

SEQ ID NO: 327207 - DNA, 30 bp, Artificial Sequence
  Synthetic oligonucleotide
gctgtcatttatgtctaagggaccggacga

SEQ ID NO: 327208 - DNA, 30 bp, Artificial Sequence
  Synthetic oligonucleotide
agatggtactactttgtggttgtcggacga

SEQ ID NO: 327209 - DNA, 30 bp, Artificial Sequence
  Synthetic oligonucleotide
ctcccaatgagttgaatcacccatggacga

SEQ ID NO: 327210 - DNA, 30 bp, Artificial Sequence
  Synthetic oligonucleotide
ggccggcagagaacgcaggacgatggacga

SEQ ID NO: 327211 - DNA, 30 bp, Artificial Sequence
  Synthetic oligonucleotide
ctcgtgccctatatttacggatatggacga

SEQ ID NO: 327212 - DNA, 30 bp, Artificial Sequence
  Synthetic oligonucleotide
tccttccattgaagtgtgagcggtggacga

SEQ ID NO: 327213 - DNA, 30 bp, Artificial Sequence
  Synthetic oligonucleotide
gatgctgttgttactgtagaggcctgacga

SEQ ID NO: 327214 - DNA, 30 bp, Artificial Sequence
  Synthetic oligonucleotide
gtcgcgcatatttgtaatccagtctgacga

SEQ ID NO: 327215 - DNA, 30 bp, Artificial Sequence
  Synthetic oligonucleotide
atgatatgtgctcaaactagtgtctgacga

SEQ ID NO: 327216 - DNA, 30 bp, Artificial Sequence
  Synthetic oligonucleotide
caataaaagcgtatagattgtatgtgacga

SEQ ID NO: 327217 - DNA, 30 bp, Artificial Sequence
  Synthetic oligonucleotide
gagccctctgcgtgactcgggaattgacga

SEQ ID NO: 327218 - DNA, 30 bp, Artificial Sequence
  Synthetic oligonucleotide
gaacttcttcaatgacaagctctttgacga

SEQ ID NO: 327219 - DNA, 30 bp, Artificial Sequence
  Synthetic oligonucleotide
tgcaatattccgtacgctctccaaatacga

SEQ ID NO: 327220 - DNA, 30 bp, Artificial Sequence
  Synthetic oligonucleotide
agagtgttaggtacctaattctcaatacga

SEQ ID NO: 327221 - DNA, 30 bp, Artificial Sequence
  Synthetic oligonucleotide
tacaccttgtttaaatgtggctgaatacga

SEQ ID NO: 327222 - DNA, 29 bp, Artificial Sequence
  Synthetic oligonucleotide
tctctcgattataccaggctggcatacga

SEQ ID NO: 327223 - DNA, 30 bp, Artificial Sequence
  Synthetic oligonucleotide
gggttgagaacctcttagaaagtcatacga

SEQ ID NO: 327224 - DNA, 30 bp, Artificial Sequence
  Synthetic oligonucleotide
gcgctcttaactcctgtttgagaactacga

SEQ ID NO: 327225 - DNA, 30 bp, Artificial Sequence
  Synthetic oligonucleotide
ggttttgggcgcgaccagatagacctacga

SEQ ID NO: 327226 - DNA, 30 bp, Artificial Sequence
  Synthetic oligonucleotide
cttttcccacagagtttcaaaaagctacga

SEQ ID NO: 327227 - DNA, 30 bp, Artificial Sequence
  Synthetic oligonucleotide
gaccgaagggctctacgcacggagctacga

SEQ ID NO: 327228 - DNA, 30 bp, Artificial Sequence
  Synthetic oligonucleotide
cggtcgctatgtcgtagaatttagctacga

SEQ ID NO: 327229 - DNA, 30 bp, Artificial Sequence
  Synthetic oligonucleotide
cgcactcagtgcaagttctggatgctacga

SEQ ID NO: 327230 - DNA, 30 bp, Artificial Sequence
  Synthetic oligonucleotide
ataaaacctgttagtaatagatttctacga

SEQ ID NO: 327231 - DNA, 30 bp, Artificial Sequence
  Synthetic oligonucleotide
ccggcagtccaagtcgtgaacagcgtacga

SEQ ID NO: 327232 - DNA, 30 bp, Artificial Sequence
  Synthetic oligonucleotide
gataaagaataggccaatagcttcgtacga

SEQ ID NO: 327233 - DNA, 30 bp, Artificial Sequence
  Synthetic oligonucleotide
gtatttcgttcaggggaactaaaggtacga

SEQ ID NO: 327234 - DNA, 30 bp, Artificial Sequence
  Synthetic oligonucleotide
cgggctcttgacgcgtggattcgggtacga

SEQ ID NO: 327235 - DNA, 30 bp, Artificial Sequence
  Synthetic oligonucleotide
cccacgggaggcagagtcttgctggtacga

SEQ ID NO: 327236 - DNA, 30 bp, Artificial Sequence
  Synthetic oligonucleotide
accacccgtggggatttggtcaatgtacga

SEQ ID NO: 327237 - DNA, 30 bp, Artificial Sequence
  Synthetic oligonucleotide
agaagtttgcgcgcgcaacggagtgtacga

SEQ ID NO: 327238 - DNA, 30 bp, Artificial Sequence
  Synthetic oligonucleotide
gaataaggaagcgggagaaaatttgtacga

SEQ ID NO: 327239 - DNA, 30 bp, Artificial Sequence
  Synthetic oligonucleotide
tttagattttcccaataaggatcattacga

SEQ ID NO: 327240 - DNA, 30 bp, Artificial Sequence
  Synthetic oligonucleotide
gatgaacttaccgcgctggcaatattacga

SEQ ID NO: 327241 - DNA, 30 bp, Artificial Sequence
  Synthetic oligonucleotide
gactgaaagagcgcgatttatgacttacga

SEQ ID NO: 327242 - DNA, 30 bp, Artificial Sequence
  Synthetic oligonucleotide
tttaagtattggtagaagataaccttacga

SEQ ID NO: 327243 - DNA, 30 bp, Artificial Sequence
  Synthetic oligonucleotide
aaagacaagttggttattataaatttacga

SEQ ID NO: 327244 - DNA, 30 bp, Artificial Sequence
  Synthetic oligonucleotide
taaggcaggataaactacttctctttacga

SEQ ID NO: 327245 - DNA, 30 bp, Artificial Sequence
  Synthetic oligonucleotide
tggtgctgacgggcggtgggacgtttacga

SEQ ID NO: 327246 - DNA, 30 bp, Artificial Sequence
  Synthetic oligonucleotide
cttacataaggcggtactccggcaaaccga

SEQ ID NO: 327247 - DNA, 30 bp, Artificial Sequence
  Synthetic oligonucleotide
attgctattgtcaaggctaacaacaaccga

SEQ ID NO: 327248 - DNA, 30 bp, Artificial Sequence
  Synthetic oligonucleotide
agtgacaggcatttccgtacgcacaaccga

SEQ ID NO: 327249 - DNA, 30 bp, Artificial Sequence
  Synthetic oligonucleotide
ttcttgagtagtatgcccagccaccaccga

SEQ ID NO: 327250 - DNA, 31 bp, Artificial Sequence
  Synthetic oligonucleotide
gaaatggggatgtgtccgtgcataccaccga

SEQ ID NO: 327251 - DNA, 30 bp, Artificial Sequence
  Synthetic oligonucleotide
gtgccgcgaattccaaatgatacgcaccga

SEQ ID NO: 327252 - DNA, 30 bp, Artificial Sequence
  Synthetic oligonucleotide
cacgcaagacatacggtagagcttcaccga

SEQ ID NO: 327253 - DNA, 30 bp, Artificial Sequence
  Synthetic oligonucleotide
gtgtttccaagagatctacgtcccgaccga

SEQ ID NO: 327254 - DNA, 30 bp, Artificial Sequence
  Synthetic oligonucleotide
tggtcgtgttctcgttctgaataggaccga

SEQ ID NO: 327255 - DNA, 31 bp, Artificial Sequence
  Synthetic oligonucleotide
ctgggcgtagttgaatcggccaggggaccga

SEQ ID NO: 327256 - DNA, 30 bp, Artificial Sequence
  Synthetic oligonucleotide
aagatttcaggggctggtctgggggaccga

SEQ ID NO: 327257 - DNA, 30 bp, Artificial Sequence
  Synthetic oligonucleotide
attcagatcggaacagtcaaggtggaccga

SEQ ID NO: 327258 - DNA, 30 bp, Artificial Sequence
  Synthetic oligonucleotide
gcgacgcttttaacaagtaatacataccga

SEQ ID NO: 327259 - DNA, 30 bp, Artificial Sequence
  Synthetic oligonucleotide
aggtccaggagtggcacgatacagtaccga

SEQ ID NO: 327260 - DNA, 30 bp, Artificial Sequence
  Synthetic oligonucleotide
gtcttttggtgtaggcgtgagtattaccga

SEQ ID NO: 327261 - DNA, 30 bp, Artificial Sequence
  Synthetic oligonucleotide
agcctatatgaagcttagatgtcaacccga

SEQ ID NO: 327262 - DNA, 30 bp, Artificial Sequence
  Synthetic oligonucleotide
gtgttgaggcgccctcaggacagaacccga

SEQ ID NO: 327263 - DNA, 31 bp, Artificial Sequence
  Synthetic oligonucleotide
gtagtgcgatggacagatatcggtaacccga

SEQ ID NO: 327264 - DNA, 30 bp, Artificial Sequence
  Synthetic oligonucleotide
gcacctcaggactatgaaaggttaacccga

SEQ ID NO: 327265 - DNA, 30 bp, Artificial Sequence
  Synthetic oligonucleotide
cgatttggtgtatattctagggcgacccga

SEQ ID NO: 327266 - DNA, 30 bp, Artificial Sequence
  Synthetic oligonucleotide
tttttgctctgctctcttatcatgacccga

SEQ ID NO: 327267 - DNA, 30 bp, Artificial Sequence
  Synthetic oligonucleotide
catgccgatagcgtgcattcgacaccccga

SEQ ID NO: 327268 - DNA, 30 bp, Artificial Sequence
  Synthetic oligonucleotide
tgcctgggccggcgggggggaggaccccga

SEQ ID NO: 327269 - DNA, 30 bp, Artificial Sequence
  Synthetic oligonucleotide
tcggctgagtcacccatatgttgaccccga

SEQ ID NO: 327270 - DNA, 30 bp, Artificial Sequence
  Synthetic oligonucleotide
gatgcagatgcggcttgaagagacccccga

SEQ ID NO: 327271 - DNA, 30 bp, Artificial Sequence
  Synthetic oligonucleotide
cggtttagataccgttaagcaaggccccga

SEQ ID NO: 327272 - DNA, 30 bp, Artificial Sequence
  Synthetic oligonucleotide
aattgagtgaccatcgaattataagcccga

SEQ ID NO: 327273 - DNA, 30 bp, Artificial Sequence
  Synthetic oligonucleotide
tacaccgttagttaatgtcataccgcccga

SEQ ID NO: 327274 - DNA, 30 bp, Artificial Sequence
  Synthetic oligonucleotide
aaattgcgataaggtcacatggccgcccga

SEQ ID NO: 327275 - DNA, 30 bp, Artificial Sequence
  Synthetic oligonucleotide
ttaaattgaggatcacgctattccgcccga

SEQ ID NO: 327276 - DNA, 30 bp, Artificial Sequence
  Synthetic oligonucleotide
ttattactagtctcttcgctcgatgcccga

SEQ ID NO: 327277 - DNA, 30 bp, Artificial Sequence
  Synthetic oligonucleotide
gctgcgctcggtggtggcctatatgcccga

SEQ ID NO: 327278 - DNA, 30 bp, Artificial Sequence
  Synthetic oligonucleotide
ctgtctagatttatttagctatgatcccga

SEQ ID NO: 327279 - DNA, 30 bp, Artificial Sequence
  Synthetic oligonucleotide
gaatcagactggggcaatagtctatcccga

SEQ ID NO: 327280 - DNA, 30 bp, Artificial Sequence
  Synthetic oligonucleotide
aagtcctaggtcggaacatgcgacagccga

SEQ ID NO: 327281 - DNA, 30 bp, Artificial Sequence
  Synthetic oligonucleotide
tctatcaagctttataaatcttacagccga

SEQ ID NO: 327282 - DNA, 30 bp, Artificial Sequence
  Synthetic oligonucleotide
aagacgaaccggtacggcgctttcagccga

SEQ ID NO: 327283 - DNA, 30 bp, Artificial Sequence
  Synthetic oligonucleotide
ggttatcaagacgcgagttgaaggagccga

SEQ ID NO: 327284 - DNA, 30 bp, Artificial Sequence
  Synthetic oligonucleotide
ggcaccatagatacgggccactgacgccga

SEQ ID NO: 327285 - DNA, 30 bp, Artificial Sequence
  Synthetic oligonucleotide
acgttttcgcgatacaggggttaccgccga

SEQ ID NO: 327286 - DNA, 30 bp, Artificial Sequence
  Synthetic oligonucleotide
tacgttcgggggagttgttgagtccgccga

SEQ ID NO: 327287 - DNA, 30 bp, Artificial Sequence
  Synthetic oligonucleotide
ttagtcctgaggggccacaacttccgccga

SEQ ID NO: 327288 - DNA, 30 bp, Artificial Sequence
  Synthetic oligonucleotide
tgacgtggcacggagagaaggtcgcgccga

SEQ ID NO: 327289 - DNA, 30 bp, Artificial Sequence
  Synthetic oligonucleotide
caaccgtagggatctgtccctgttcgccga

SEQ ID NO: 327290 - DNA, 30 bp, Artificial Sequence
  Synthetic oligonucleotide
ggtttaaggggaccggaatttgaaggccga

SEQ ID NO: 327291 - DNA, 30 bp, Artificial Sequence
  Synthetic oligonucleotide
attttcgcaaaactatacggtccaggccga

SEQ ID NO: 327292 - DNA, 30 bp, Artificial Sequence
  Synthetic oligonucleotide
agttgcgcctatatctcccctcgcggccga

SEQ ID NO: 327293 - DNA, 30 bp, Artificial Sequence
  Synthetic oligonucleotide
tgttccaagtggtaccaaatatcgggccga

SEQ ID NO: 327294 - DNA, 30 bp, Artificial Sequence
  Synthetic oligonucleotide
cggatatcgatcagcgtgatagggggccga

SEQ ID NO: 327295 - DNA, 30 bp, Artificial Sequence
  Synthetic oligonucleotide
cttcagctcacaaggccatctgatggccga

SEQ ID NO: 327296 - DNA, 30 bp, Artificial Sequence
  Synthetic oligonucleotide
ttggcgatgaacatcttgtacagtggccga

SEQ ID NO: 327297 - DNA, 30 bp, Artificial Sequence
  Synthetic oligonucleotide
acgcacaaggcgtagcctatttaatgccga

SEQ ID NO: 327298 - DNA, 30 bp, Artificial Sequence
  Synthetic oligonucleotide
cacaaaaatcaacccgttgtacagtgccga

SEQ ID NO: 327299 - DNA, 30 bp, Artificial Sequence
  Synthetic oligonucleotide
tcatgcacctgcggacacataggttgccga

SEQ ID NO: 327300 - DNA, 30 bp, Artificial Sequence
  Synthetic oligonucleotide
aaaactgccctaatgtcctgaataatccga

SEQ ID NO: 327301 - DNA, 30 bp, Artificial Sequence
  Synthetic oligonucleotide
accctagaaattccagttcattacatccga

SEQ ID NO: 327302 - DNA, 29 bp, Artificial Sequence
  Synthetic oligonucleotide
acaatctaccgaccagtggctttatccga

SEQ ID NO: 327303 - DNA, 30 bp, Artificial Sequence
  Synthetic oligonucleotide
tagtagtggtcacggagtttcttcctccga

SEQ ID NO: 327304 - DNA, 30 bp, Artificial Sequence
  Synthetic oligonucleotide
tatcaaacgtacatgacggcggagctccga

SEQ ID NO: 327305 - DNA, 29 bp, Artificial Sequence
  Synthetic oligonucleotide
aacgttcccgggccaaggtacggctccga

SEQ ID NO: 327306 - DNA, 30 bp, Artificial Sequence
  Synthetic oligonucleotide
tagaaacgatgcccatgaggggatctccga

SEQ ID NO: 327307 - DNA, 30 bp, Artificial Sequence
  Synthetic oligonucleotide
aattagatgtcgccgactgttagtctccga

SEQ ID NO: 327308 - DNA, 30 bp, Artificial Sequence
  Synthetic oligonucleotide
atgctatgtccatttttaaattttctccga

SEQ ID NO: 327309 - DNA, 30 bp, Artificial Sequence
  Synthetic oligonucleotide
actagttctggtctgtttcgtccagtccga

SEQ ID NO: 327310 - DNA, 30 bp, Artificial Sequence
  Synthetic oligonucleotide
tctcgtgcatgtatacgtgtaggagtccga

SEQ ID NO: 327311 - DNA, 30 bp, Artificial Sequence
  Synthetic oligonucleotide
tggatcgcgtaagttcaccattgcgtccga

SEQ ID NO: 327312 - DNA, 30 bp, Artificial Sequence
  Synthetic oligonucleotide
tgccgcagcgagatgtcgagaacggtccga

SEQ ID NO: 327313 - DNA, 30 bp, Artificial Sequence
  Synthetic oligonucleotide
attttccggcatcgaggagccacggtccga

SEQ ID NO: 327314 - DNA, 30 bp, Artificial Sequence
  Synthetic oligonucleotide
aaatatgacagttaagttattgaattccga

SEQ ID NO: 327315 - DNA, 30 bp, Artificial Sequence
  Synthetic oligonucleotide
tggacaatgttaacatggccccgattccga

SEQ ID NO: 327316 - DNA, 30 bp, Artificial Sequence
  Synthetic oligonucleotide
tgatgccgtactgaaacttaaggattccga

SEQ ID NO: 327317 - DNA, 30 bp, Artificial Sequence
  Synthetic oligonucleotide
agctgacgtcttgtgtttagtctattccga

SEQ ID NO: 327318 - DNA, 30 bp, Artificial Sequence
  Synthetic oligonucleotide
gcaatagtgattttccaaacatccttccga

SEQ ID NO: 327319 - DNA, 30 bp, Artificial Sequence
  Synthetic oligonucleotide
tagatacgcgcatgggggttgacgttccga

SEQ ID NO: 327320 - DNA, 30 bp, Artificial Sequence
  Synthetic oligonucleotide
caattttttgtatttatacacctgttccga

SEQ ID NO: 327321 - DNA, 30 bp, Artificial Sequence
  Synthetic oligonucleotide
aacgaagaaagcttacaagttcgaaagcga

SEQ ID NO: 327322 - DNA, 30 bp, Artificial Sequence
  Synthetic oligonucleotide
tgtgagataaccgaggattcctgaaagcga

SEQ ID NO: 327323 - DNA, 30 bp, Artificial Sequence
  Synthetic oligonucleotide
gaatcgtgtgcttaatggaactgcaagcga

SEQ ID NO: 327324 - DNA, 30 bp, Artificial Sequence
  Synthetic oligonucleotide
cctcttctgtgaccatgaatttataagcga

SEQ ID NO: 327325 - DNA, 30 bp, Artificial Sequence
  Synthetic oligonucleotide
accctaagggtattatttcgcagtaagcga

SEQ ID NO: 327326 - DNA, 30 bp, Artificial Sequence
  Synthetic oligonucleotide
aaactatcggccagattggattaacagcga

SEQ ID NO: 327327 - DNA, 30 bp, Artificial Sequence
  Synthetic oligonucleotide
gctaatctttaaagcagtcagatccagcga

SEQ ID NO: 327328 - DNA, 30 bp, Artificial Sequence
  Synthetic oligonucleotide
agtgacctagcagttcggcacgtgcagcga

SEQ ID NO: 327329 - DNA, 30 bp, Artificial Sequence
  Synthetic oligonucleotide
gctctgggcttcccggcgtaccgtcagcga

SEQ ID NO: 327330 - DNA, 30 bp, Artificial Sequence
  Synthetic oligonucleotide
ttcagagggcgttattcgcaggcagagcga

SEQ ID NO: 327331 - DNA, 30 bp, Artificial Sequence
  Synthetic oligonucleotide
ggccttgccaactatcacacgtgagagcga

SEQ ID NO: 327332 - DNA, 30 bp, Artificial Sequence
  Synthetic oligonucleotide
atttagagttcaaactgtacgctagagcga

SEQ ID NO: 327333 - DNA, 30 bp, Artificial Sequence
  Synthetic oligonucleotide
ggttgcaatctcactgggagttacgagcga

SEQ ID NO: 327334 - DNA, 30 bp, Artificial Sequence
  Synthetic oligonucleotide
gcaacgtgcagagtaagataaaatgagcga

SEQ ID NO: 327335 - DNA, 30 bp, Artificial Sequence
  Synthetic oligonucleotide
tgatgtaacctgtgataccgtcatgagcga

SEQ ID NO: 327336 - DNA, 30 bp, Artificial Sequence
  Synthetic oligonucleotide
attccttcagaggtgctgaggcgatagcga

SEQ ID NO: 327337 - DNA, 30 bp, Artificial Sequence
  Synthetic oligonucleotide
tctggcttagattttgactttggatagcga

SEQ ID NO: 327338 - DNA, 30 bp, Artificial Sequence
  Synthetic oligonucleotide
acaaaggaacggcacttggaagtatagcga

SEQ ID NO: 327339 - DNA, 30 bp, Artificial Sequence
  Synthetic oligonucleotide
tttctgggcttgcgttcaggatagtagcga

SEQ ID NO: 327340 - DNA, 30 bp, Artificial Sequence
  Synthetic oligonucleotide
tgataccgcaacctcctaccgtgaacgcga

SEQ ID NO: 327341 - DNA, 30 bp, Artificial Sequence
  Synthetic oligonucleotide
tagaataaggttcgtatgactctcacgcga

SEQ ID NO: 327342 - DNA, 30 bp, Artificial Sequence
  Synthetic oligonucleotide
acggcaggcacattcaacatggagacgcga

SEQ ID NO: 327343 - DNA, 30 bp, Artificial Sequence
  Synthetic oligonucleotide
gtcaagtgagattccagctcgcggacgcga

SEQ ID NO: 327344 - DNA, 30 bp, Artificial Sequence
  Synthetic oligonucleotide
agataggcgatatttccattactgacgcga

SEQ ID NO: 327345 - DNA, 30 bp, Artificial Sequence
  Synthetic oligonucleotide
aggcttatgggaagtttcttgcctacgcga

SEQ ID NO: 327346 - DNA, 30 bp, Artificial Sequence
  Synthetic oligonucleotide
gccgacatgcacgacttttgacgtacgcga

SEQ ID NO: 327347 - DNA, 30 bp, Artificial Sequence
  Synthetic oligonucleotide
ccacacgattttcgtaagaatgcaccgcga

SEQ ID NO: 327348 - DNA, 30 bp, Artificial Sequence
  Synthetic oligonucleotide
cgttatacgggacgtcgtggcagaccgcga

SEQ ID NO: 327349 - DNA, 30 bp, Artificial Sequence
  Synthetic oligonucleotide
tgtcttttctagataatatctaccccgcga

SEQ ID NO: 327350 - DNA, 30 bp, Artificial Sequence
  Synthetic oligonucleotide
gtgattaaatactatacaacgacggcgcga

SEQ ID NO: 327351 - DNA, 30 bp, Artificial Sequence
  Synthetic oligonucleotide
tcgaagacaacatggtagcctaaatcgcga

SEQ ID NO: 327352 - DNA, 30 bp, Artificial Sequence
  Synthetic oligonucleotide
tcggagctccgtagacgcaccccatcgcga

SEQ ID NO: 327353 - DNA, 30 bp, Artificial Sequence
  Synthetic oligonucleotide
gcataccggaacaaaccattcggctcgcga

SEQ ID NO: 327354 - DNA, 30 bp, Artificial Sequence
  Synthetic oligonucleotide
agatatagacttaggaatgtactctcgcga

SEQ ID NO: 327355 - DNA, 30 bp, Artificial Sequence
  Synthetic oligonucleotide
gaagttattcaagattaataggtctcgcga

SEQ ID NO: 327356 - DNA, 30 bp, Artificial Sequence
  Synthetic oligonucleotide
caaggctgggagccgcgatgtgtctcgcga

SEQ ID NO: 327357 - DNA, 30 bp, Artificial Sequence
  Synthetic oligonucleotide
cttcataacttatatgtgagtccgtcgcga

SEQ ID NO: 327358 - DNA, 30 bp, Artificial Sequence
  Synthetic oligonucleotide
aattttgtaaaaaccagaggcccttcgcga

SEQ ID NO: 327359 - DNA, 30 bp, Artificial Sequence
  Synthetic oligonucleotide
ctttcgaaccttagtcctcgttgttcgcga

SEQ ID NO: 327360 - DNA, 30 bp, Artificial Sequence
  Synthetic oligonucleotide
atccccatcgatctccatgacatttcgcga

SEQ ID NO: 327361 - DNA, 30 bp, Artificial Sequence
  Synthetic oligonucleotide
tcactctaatttcatatgctaaggaggcga

SEQ ID NO: 327362 - DNA, 30 bp, Artificial Sequence
  Synthetic oligonucleotide
tactctggtgggtccagcccggataggcga

SEQ ID NO: 327363 - DNA, 30 bp, Artificial Sequence
  Synthetic oligonucleotide
aagtgaagccggcagtcttaaagacggcga

SEQ ID NO: 327364 - DNA, 30 bp, Artificial Sequence
  Synthetic oligonucleotide
tatctgctacagggatgcgggcgacggcga

SEQ ID NO: 327365 - DNA, 30 bp, Artificial Sequence
  Synthetic oligonucleotide
aacggccagcggctggaatccaaccggcga

SEQ ID NO: 327366 - DNA, 30 bp, Artificial Sequence
  Synthetic oligonucleotide
ttacttcctcgggccaaagggtcccggcga

SEQ ID NO: 327367 - DNA, 30 bp, Artificial Sequence
  Synthetic oligonucleotide
ccaatcacttcaaagggctactagcggcga

SEQ ID NO: 327368 - DNA, 30 bp, Artificial Sequence
  Synthetic oligonucleotide
atttttacatcttgacaacctaggcggcga

SEQ ID NO: 327369 - DNA, 30 bp, Artificial Sequence
  Synthetic oligonucleotide
tcctgtgcaggaacgtatgctatagggcga

SEQ ID NO: 327370 - DNA, 30 bp, Artificial Sequence
  Synthetic oligonucleotide
agccaaaatgggtttcaaagcacggggcga

SEQ ID NO: 327371 - DNA, 30 bp, Artificial Sequence
  Synthetic oligonucleotide
aaacaggcatgctttgatggccatgggcga

SEQ ID NO: 327372 - DNA, 30 bp, Artificial Sequence
  Synthetic oligonucleotide
gacttcactgcgcgggtaaccaaatggcga

SEQ ID NO: 327373 - DNA, 30 bp, Artificial Sequence
  Synthetic oligonucleotide
gatgctaatcctagtaaggggtaatggcga

SEQ ID NO: 327374 - DNA, 30 bp, Artificial Sequence
  Synthetic oligonucleotide
ttgttaacctgcttaacgattgcctggcga

SEQ ID NO: 327375 - DNA, 30 bp, Artificial Sequence
  Synthetic oligonucleotide
gttgtccgacgtttgcttcctatctggcga

SEQ ID NO: 327376 - DNA, 30 bp, Artificial Sequence
  Synthetic oligonucleotide
tattcaagttatacgagcgagaattggcga

SEQ ID NO: 327377 - DNA, 30 bp, Artificial Sequence
  Synthetic oligonucleotide
ttggaaagtagtacaggtcatggttggcga

SEQ ID NO: 327378 - DNA, 30 bp, Artificial Sequence
  Synthetic oligonucleotide
gactgaccgctaacgtatcgaataatgcga

SEQ ID NO: 327379 - DNA, 30 bp, Artificial Sequence
  Synthetic oligonucleotide
cccaccattcagtgcaagggagccatgcga

SEQ ID NO: 327380 - DNA, 30 bp, Artificial Sequence
  Synthetic oligonucleotide
tgggcccggttatatttagggtccatgcga

SEQ ID NO: 327381 - DNA, 30 bp, Artificial Sequence
  Synthetic oligonucleotide
gagtaataggtaacgtgtgttctcatgcga

SEQ ID NO: 327382 - DNA, 30 bp, Artificial Sequence
  Synthetic oligonucleotide
taaactcctaagctttgcatatggatgcga

SEQ ID NO: 327383 - DNA, 30 bp, Artificial Sequence
  Synthetic oligonucleotide
cctttcaatttattggctttggtgatgcga

SEQ ID NO: 327384 - DNA, 30 bp, Artificial Sequence
  Synthetic oligonucleotide
tgccttcgcgcataaactctagtgctgcga

SEQ ID NO: 327385 - DNA, 30 bp, Artificial Sequence
  Synthetic oligonucleotide
gtcccggaacgcagggccggccatgtgcga

SEQ ID NO: 327386 - DNA, 30 bp, Artificial Sequence
  Synthetic oligonucleotide
ctaaatgatagcacacaagccctattgcga

SEQ ID NO: 327387 - DNA, 30 bp, Artificial Sequence
  Synthetic oligonucleotide
ttttaatcaagtctagctagtaagttgcga

SEQ ID NO: 327388 - DNA, 30 bp, Artificial Sequence
  Synthetic oligonucleotide
gatacgtcaaaaaaaacggttgggttgcga

SEQ ID NO: 327389 - DNA, 30 bp, Artificial Sequence
  Synthetic oligonucleotide
gagtaaaacggttgttcagtggatttgcga

SEQ ID NO: 327390 - DNA, 30 bp, Artificial Sequence
  Synthetic oligonucleotide
cgacaaaacggcaccgggcggtatttgcga

SEQ ID NO: 327391 - DNA, 30 bp, Artificial Sequence
  Synthetic oligonucleotide
tgcatttcaattgaattgttacgtttgcga

SEQ ID NO: 327392 - DNA, 30 bp, Artificial Sequence
  Synthetic oligonucleotide
atgccagctcggtcagccatgcttttgcga

SEQ ID NO: 327393 - DNA, 30 bp, Artificial Sequence
  Synthetic oligonucleotide
cactagatatagatttacgggtttttgcga

SEQ ID NO: 327394 - DNA, 30 bp, Artificial Sequence
  Synthetic oligonucleotide
gattcataactaaggttctgggcaaatcga

SEQ ID NO: 327395 - DNA, 30 bp, Artificial Sequence
  Synthetic oligonucleotide
atctgggtggacattttgtccgacaatcga

SEQ ID NO: 327396 - DNA, 30 bp, Artificial Sequence
  Synthetic oligonucleotide
aaggtcccagggtgacccggtgggaatcga

SEQ ID NO: 327397 - DNA, 30 bp, Artificial Sequence
  Synthetic oligonucleotide
gctcgtatagtctgtctgtaagaacatcga

SEQ ID NO: 327398 - DNA, 30 bp, Artificial Sequence
  Synthetic oligonucleotide
tatcaacagtcctcgcaaccgatgcatcga

SEQ ID NO: 327399 - DNA, 30 bp, Artificial Sequence
  Synthetic oligonucleotide
gtggcaacctaaatgcacgctcctcatcga

SEQ ID NO: 327400 - DNA, 30 bp, Artificial Sequence
  Synthetic oligonucleotide
actctgacaatatacctgttattagatcga

SEQ ID NO: 327401 - DNA, 30 bp, Artificial Sequence
  Synthetic oligonucleotide
taagttagcgggtttggcatgtacgatcga

SEQ ID NO: 327402 - DNA, 30 bp, Artificial Sequence
  Synthetic oligonucleotide
gtagggcgctgcagcccccaagaggatcga

SEQ ID NO: 327403 - DNA, 30 bp, Artificial Sequence
  Synthetic oligonucleotide
gagattctgcacacaaaacattcggatcga

SEQ ID NO: 327404 - DNA, 30 bp, Artificial Sequence
  Synthetic oligonucleotide
gggaaaaccgctagcaggtacttggatcga

SEQ ID NO: 327405 - DNA, 30 bp, Artificial Sequence
  Synthetic oligonucleotide
ggttcttctgaagatggaaccaatgatcga

SEQ ID NO: 327406 - DNA, 30 bp, Artificial Sequence
  Synthetic oligonucleotide
tacaggatcgtggtgtatgtcattgatcga

SEQ ID NO: 327407 - DNA, 30 bp, Artificial Sequence
  Synthetic oligonucleotide
tatatgtgtcaatcgagtaacggctatcga

SEQ ID NO: 327408 - DNA, 30 bp, Artificial Sequence
  Synthetic oligonucleotide
gcaaaggacttctacggaggatcgtatcga

SEQ ID NO: 327409 - DNA, 30 bp, Artificial Sequence
  Synthetic oligonucleotide
aagcaaagtttcgcagggggaagaactcga

SEQ ID NO: 327410 - DNA, 30 bp, Artificial Sequence
  Synthetic oligonucleotide
aggatacgcattcgcaataaagcgactcga

SEQ ID NO: 327411 - DNA, 30 bp, Artificial Sequence
  Synthetic oligonucleotide
acctttgggtgatattgcacaacacctcga

SEQ ID NO: 327412 - DNA, 30 bp, Artificial Sequence
  Synthetic oligonucleotide
tagatgtctacttgccgactcagagctcga

SEQ ID NO: 327413 - DNA, 30 bp, Artificial Sequence
  Synthetic oligonucleotide
ggaccacgtattttattgtttcacgctcga

SEQ ID NO: 327414 - DNA, 30 bp, Artificial Sequence
  Synthetic oligonucleotide
aaagtttaataattcttcacgttcgctcga

SEQ ID NO: 327415 - DNA, 30 bp, Artificial Sequence
  Synthetic oligonucleotide
agcgtagtgaggattagactcttggctcga

SEQ ID NO: 327416 - DNA, 30 bp, Artificial Sequence
  Synthetic oligonucleotide
ggcacagctctaccaagtcatagtgctcga

SEQ ID NO: 327417 - DNA, 30 bp, Artificial Sequence
  Synthetic oligonucleotide
gaagctttaagaccggcagggcttgctcga

SEQ ID NO: 327418 - DNA, 30 bp, Artificial Sequence
  Synthetic oligonucleotide
ctgtagggcgcgcccagaaccccatctcga

SEQ ID NO: 327419 - DNA, 30 bp, Artificial Sequence
  Synthetic oligonucleotide
ttccgggcgtccaaattattttcctctcga

SEQ ID NO: 327420 - DNA, 30 bp, Artificial Sequence
  Synthetic oligonucleotide
ttcgtaaataatatacacgcacagtctcga

SEQ ID NO: 327421 - DNA, 30 bp, Artificial Sequence
  Synthetic oligonucleotide
ctgtgcaccctggggtcctaccggtctcga

SEQ ID NO: 327422 - DNA, 30 bp, Artificial Sequence
  Synthetic oligonucleotide
aaaacgattcagtagcgttaaaaaagtcga

SEQ ID NO: 327423 - DNA, 30 bp, Artificial Sequence
  Synthetic oligonucleotide
cgatcgtaaggctacccacgcagcagtcga

SEQ ID NO: 327424 - DNA, 30 bp, Artificial Sequence
  Synthetic oligonucleotide
aagaaacgcaaggagccctaagttagtcga

SEQ ID NO: 327425 - DNA, 30 bp, Artificial Sequence
  Synthetic oligonucleotide
actcaaatcacctgatgtattgttagtcga

SEQ ID NO: 327426 - DNA, 30 bp, Artificial Sequence
  Synthetic oligonucleotide
ctttgccacagttatctaagggctcgtcga

SEQ ID NO: 327427 - DNA, 30 bp, Artificial Sequence
  Synthetic oligonucleotide
ttataaacatgacgcccaagacgaggtcga

SEQ ID NO: 327428 - DNA, 30 bp, Artificial Sequence
  Synthetic oligonucleotide
catgaaaaacagcatgaatacgttggtcga

SEQ ID NO: 327429 - DNA, 30 bp, Artificial Sequence
  Synthetic oligonucleotide
taaaatgtgatgcggtggtatttatgtcga

SEQ ID NO: 327430 - DNA, 30 bp, Artificial Sequence
  Synthetic oligonucleotide
gcaagtgtttatggatgggaacagtgtcga

SEQ ID NO: 327431 - DNA, 30 bp, Artificial Sequence
  Synthetic oligonucleotide
ggggcttggatgaccgaccatgggtgtcga

SEQ ID NO: 327432 - DNA, 30 bp, Artificial Sequence
  Synthetic oligonucleotide
aaaagcggaggccagtaaatgacttgtcga

SEQ ID NO: 327433 - DNA, 30 bp, Artificial Sequence
  Synthetic oligonucleotide
actaaaatggacacatggcccagttgtcga

SEQ ID NO: 327434 - DNA, 30 bp, Artificial Sequence
  Synthetic oligonucleotide
tgttgagaatacgatgcataagtttgtcga

SEQ ID NO: 327435 - DNA, 30 bp, Artificial Sequence
  Synthetic oligonucleotide
gctcggcaacaagaattctagaaaattcga

SEQ ID NO: 327436 - DNA, 30 bp, Artificial Sequence
  Synthetic oligonucleotide
ataaggcgtggcagtgggggtgcaattcga

SEQ ID NO: 327437 - DNA, 30 bp, Artificial Sequence
  Synthetic oligonucleotide
gtacaactttagactacctaaagaattcga

SEQ ID NO: 327438 - DNA, 30 bp, Artificial Sequence
  Synthetic oligonucleotide
aggtaaatatcggtgtcatttaccattcga

SEQ ID NO: 327439 - DNA, 30 bp, Artificial Sequence
  Synthetic oligonucleotide
aaaagcaatcgtcaatcaactgcgattcga

SEQ ID NO: 327440 - DNA, 30 bp, Artificial Sequence
  Synthetic oligonucleotide
tagacatgacacagtctcgatgatattcga

SEQ ID NO: 327441 - DNA, 30 bp, Artificial Sequence
  Synthetic oligonucleotide
atgttataaaacaattcagaagttattcga

SEQ ID NO: 327442 - DNA, 30 bp, Artificial Sequence
  Synthetic oligonucleotide
cattcgggtaaccaaggttcccgacttcga

SEQ ID NO: 327443 - DNA, 30 bp, Artificial Sequence
  Synthetic oligonucleotide
atgtattttgacatgatagtcgtacttcga

SEQ ID NO: 327444 - DNA, 30 bp, Artificial Sequence
  Synthetic oligonucleotide
tttcagaacaaaacagatcccgtccttcga

SEQ ID NO: 327445 - DNA, 30 bp, Artificial Sequence
  Synthetic oligonucleotide
atcatcatgtacaggaattcgacgcttcga

SEQ ID NO: 327446 - DNA, 30 bp, Artificial Sequence
  Synthetic oligonucleotide
aatacgacctctgaacaatcatggcttcga

SEQ ID NO: 327447 - DNA, 30 bp, Artificial Sequence
  Synthetic oligonucleotide
gaccatatagtagtggggggtcttcttcga

SEQ ID NO: 327448 - DNA, 30 bp, Artificial Sequence
  Synthetic oligonucleotide
tagagtcatcgaacgaacctgagagttcga

SEQ ID NO: 327449 - DNA, 30 bp, Artificial Sequence
  Synthetic oligonucleotide
catagtccaagtggagtatggcacgttcga

SEQ ID NO: 327450 - DNA, 30 bp, Artificial Sequence
  Synthetic oligonucleotide
tcttaggtaaaaaatcgctcgttcgttcga

SEQ ID NO: 327451 - DNA, 30 bp, Artificial Sequence
  Synthetic oligonucleotide
acattaaactcgggttatgatgcggttcga

SEQ ID NO: 327452 - DNA, 30 bp, Artificial Sequence
  Synthetic oligonucleotide
atatgaattgacgctacaaacagggttcga

SEQ ID NO: 327453 - DNA, 31 bp, Artificial Sequence
  Synthetic oligonucleotide
ccctttgggtaagaccgaggttttggttcga

SEQ ID NO: 327454 - DNA, 30 bp, Artificial Sequence
  Synthetic oligonucleotide
cacctggctcccagacaagaaggtgttcga

SEQ ID NO: 327455 - DNA, 30 bp, Artificial Sequence
  Synthetic oligonucleotide
acagtggtgtcggtagccgaccttgttcga

SEQ ID NO: 327456 - DNA, 30 bp, Artificial Sequence
  Synthetic oligonucleotide
ttccctcggcgagatgtctcgacatttcga

SEQ ID NO: 327457 - DNA, 30 bp, Artificial Sequence
  Synthetic oligonucleotide
tagatagcgtatccttactccgcatttcga

SEQ ID NO: 327458 - DNA, 30 bp, Artificial Sequence
  Synthetic oligonucleotide
gaaactggaccaccagctcgccactttcga

SEQ ID NO: 327459 - DNA, 30 bp, Artificial Sequence
  Synthetic oligonucleotide
gcccatgcctacctgttgtttcactttcga

SEQ ID NO: 327460 - DNA, 30 bp, Artificial Sequence
  Synthetic oligonucleotide
ctgataatgaagctagcgatacgctttcga

SEQ ID NO: 327461 - DNA, 30 bp, Artificial Sequence
  Synthetic oligonucleotide
tgctcggggcctctaaagcagcagtttcga

SEQ ID NO: 327462 - DNA, 30 bp, Artificial Sequence
  Synthetic oligonucleotide
gcccatatgtgcaggagatctaaaaaagga

SEQ ID NO: 327463 - DNA, 28 bp, Artificial Sequence
  Synthetic oligonucleotide
aagacatcatttgctgtagccaaaagga

SEQ ID NO: 327464 - DNA, 30 bp, Artificial Sequence
  Synthetic oligonucleotide
catcaagacgcgaaagacgtttcaaaagga

SEQ ID NO: 327465 - DNA, 30 bp, Artificial Sequence
  Synthetic oligonucleotide
ccccatcggtaagggtgaggtaccaaagga

SEQ ID NO: 327466 - DNA, 30 bp, Artificial Sequence
  Synthetic oligonucleotide
cgtccttagcagcgcgagttctgcaaagga

SEQ ID NO: 327467 - DNA, 30 bp, Artificial Sequence
  Synthetic oligonucleotide
ctctttataatgagcccgcctgataaagga

SEQ ID NO: 327468 - DNA, 30 bp, Artificial Sequence
  Synthetic oligonucleotide
cacacccatactcaggatcggactaaagga

SEQ ID NO: 327469 - DNA, 30 bp, Artificial Sequence
  Synthetic oligonucleotide
catggcctctggggactcgctagtaaagga

SEQ ID NO: 327470 - DNA, 30 bp, Artificial Sequence
  Synthetic oligonucleotide
tgttgcatgagacctagctagcaacaagga

SEQ ID NO: 327471 - DNA, 30 bp, Artificial Sequence
  Synthetic oligonucleotide
gtgacataccagtttctttcttaacaagga

SEQ ID NO: 327472 - DNA, 30 bp, Artificial Sequence
  Synthetic oligonucleotide
aggtcctaacggttcgacgcgagacaagga

SEQ ID NO: 327473 - DNA, 30 bp, Artificial Sequence
  Synthetic oligonucleotide
gccgtgttttttctatgttgtctacaagga

SEQ ID NO: 327474 - DNA, 30 bp, Artificial Sequence
  Synthetic oligonucleotide
gtttcagaacgttcggagaaggtacaagga

SEQ ID NO: 327475 - DNA, 30 bp, Artificial Sequence
  Synthetic oligonucleotide
cagtttaattagacgattaaggcccaagga

SEQ ID NO: 327476 - DNA, 30 bp, Artificial Sequence
  Synthetic oligonucleotide
gggaagtggtatgcgaagcttttccaagga

SEQ ID NO: 327477 - DNA, 30 bp, Artificial Sequence
  Synthetic oligonucleotide
taatattgttgcgagagcgctaagcaagga

SEQ ID NO: 327478 - DNA, 30 bp, Artificial Sequence
  Synthetic oligonucleotide
tcaggatggggctgggcaaggccgcaagga

SEQ ID NO: 327479 - DNA, 30 bp, Artificial Sequence
  Synthetic oligonucleotide
cgcagctcatagatgcccggactgcaagga

SEQ ID NO: 327480 - DNA, 30 bp, Artificial Sequence
  Synthetic oligonucleotide
ggataaagaatattatactgaattcaagga

SEQ ID NO: 327481 - DNA, 30 bp, Artificial Sequence
  Synthetic oligonucleotide
tccatagacccgcggctccatggagaagga

SEQ ID NO: 327482 - DNA, 30 bp, Artificial Sequence
  Synthetic oligonucleotide
ctcccttccaatactaaacgctacgaagga

SEQ ID NO: 327483 - DNA, 30 bp, Artificial Sequence
  Synthetic oligonucleotide
gacggacgcactttttcgatctgggaagga

SEQ ID NO: 327484 - DNA, 30 bp, Artificial Sequence
  Synthetic oligonucleotide
agcctctcatattatttacatagtgaagga

SEQ ID NO: 327485 - DNA, 30 bp, Artificial Sequence
  Synthetic oligonucleotide
taatgagtcgtggaggttatgctctaagga

SEQ ID NO: 327486 - DNA, 30 bp, Artificial Sequence
  Synthetic oligonucleotide
tgcgtcgtaccacgataggttgagtaagga

SEQ ID NO: 327487 - DNA, 30 bp, Artificial Sequence
  Synthetic oligonucleotide
tgacgatacaagggatctatcacgtaagga

SEQ ID NO: 327488 - DNA, 30 bp, Artificial Sequence
  Synthetic oligonucleotide
tagggggctattaacggcggaccgtaagga

SEQ ID NO: 327489 - DNA, 30 bp, Artificial Sequence
  Synthetic oligonucleotide
gtgttgctcattagtgtggtaccgtaagga

SEQ ID NO: 327490 - DNA, 30 bp, Artificial Sequence
  Synthetic oligonucleotide
ccttgcggtggtgtcctagagtcgtaagga

SEQ ID NO: 327491 - DNA, 30 bp, Artificial Sequence
  Synthetic oligonucleotide
taataaaaacacccttcaatagattaagga

SEQ ID NO: 327492 - DNA, 30 bp, Artificial Sequence
  Synthetic oligonucleotide
agcatcttagtgcggtaaaacggttaagga

SEQ ID NO: 327493 - DNA, 30 bp, Artificial Sequence
  Synthetic oligonucleotide
attatatataagtatagtctcaaaacagga

SEQ ID NO: 327494 - DNA, 30 bp, Artificial Sequence
  Synthetic oligonucleotide
accccttagaacgattcatctgacacagga

SEQ ID NO: 327495 - DNA, 30 bp, Artificial Sequence
  Synthetic oligonucleotide
ctatatggggaacttctcgcagccacagga

SEQ ID NO: 327496 - DNA, 30 bp, Artificial Sequence
  Synthetic oligonucleotide
ttaaggaaacttaccggtgtatagacagga

SEQ ID NO: 327497 - DNA, 30 bp, Artificial Sequence
  Synthetic oligonucleotide
gcacagcaagtctctataataaggacagga

SEQ ID NO: 327498 - DNA, 30 bp, Artificial Sequence
  Synthetic oligonucleotide
aagggttagccacctccggtggggacagga

SEQ ID NO: 327499 - DNA, 30 bp, Artificial Sequence
  Synthetic oligonucleotide
cgcaagtaattcgccaccgatgggacagga

SEQ ID NO: 327500 - DNA, 30 bp, Artificial Sequence
  Synthetic oligonucleotide
ggccatccattggaggtataccctacagga

SEQ ID NO: 327501 - DNA, 30 bp, Artificial Sequence
  Synthetic oligonucleotide
accgtgtggggaatattttgacgcccagga

SEQ ID NO: 327502 - DNA, 30 bp, Artificial Sequence
  Synthetic oligonucleotide
tttaaattaggctagtcatgttagccagga

SEQ ID NO: 327503 - DNA, 30 bp, Artificial Sequence
  Synthetic oligonucleotide
agtgatgcccggttctcaatacaggcagga

SEQ ID NO: 327504 - DNA, 29 bp, Artificial Sequence
  Synthetic oligonucleotide
gtgctgttacaggccgtgatttggcagga

SEQ ID NO: 327505 - DNA, 30 bp, Artificial Sequence
  Synthetic oligonucleotide
tagtgatcctcatccgtctctctctcagga

SEQ ID NO: 327506 - DNA, 30 bp, Artificial Sequence
  Synthetic oligonucleotide
ccttcgcgattgaagcttactgcttcagga

SEQ ID NO: 327507 - DNA, 30 bp, Artificial Sequence
  Synthetic oligonucleotide
tgtctagaggtaagcgagcgaaaaagagga

SEQ ID NO: 327508 - DNA, 30 bp, Artificial Sequence
  Synthetic oligonucleotide
accaaaacgaatcatggtctgccaagagga

SEQ ID NO: 327509 - DNA, 30 bp, Artificial Sequence
  Synthetic oligonucleotide
gacggtcgcttaactagttatgtcagagga

SEQ ID NO: 327510 - DNA, 30 bp, Artificial Sequence
  Synthetic oligonucleotide
atccgcacgtaagcagtacggttgagagga

SEQ ID NO: 327511 - DNA, 30 bp, Artificial Sequence
  Synthetic oligonucleotide
agttcgtaattaacgtggatttatagagga

SEQ ID NO: 327512 - DNA, 30 bp, Artificial Sequence
  Synthetic oligonucleotide
aaaacgtgcctttcgtaatcctctagagga

SEQ ID NO: 327513 - DNA, 30 bp, Artificial Sequence
  Synthetic oligonucleotide
cctgtattcatcgaatcagggtctagagga

SEQ ID NO: 327514 - DNA, 30 bp, Artificial Sequence
  Synthetic oligonucleotide
agacttactattatttgaagtggtagagga

SEQ ID NO: 327515 - DNA, 30 bp, Artificial Sequence
  Synthetic oligonucleotide
agcgttcattttgggtcactgcttagagga

SEQ ID NO: 327516 - DNA, 30 bp, Artificial Sequence
  Synthetic oligonucleotide
atattattgatatatcgcttcccacgagga

SEQ ID NO: 327517 - DNA, 30 bp, Artificial Sequence
  Synthetic oligonucleotide
tcgctggtctgcttaaggtagacccgagga

SEQ ID NO: 327518 - DNA, 30 bp, Artificial Sequence
  Synthetic oligonucleotide
cgcagtagccatgcatctaacctccgagga

SEQ ID NO: 327519 - DNA, 30 bp, Artificial Sequence
  Synthetic oligonucleotide
agatacttaggtgggacgtttcagcgagga

SEQ ID NO: 327520 - DNA, 30 bp, Artificial Sequence
  Synthetic oligonucleotide
gacagtattcgtgagtggaagatgcgagga

SEQ ID NO: 327521 - DNA, 30 bp, Artificial Sequence
  Synthetic oligonucleotide
tcaggagtatcgcggcgcctagacggagga

SEQ ID NO: 327522 - DNA, 30 bp, Artificial Sequence
  Synthetic oligonucleotide
agaactcattacgctgggtctagcggagga

SEQ ID NO: 327523 - DNA, 30 bp, Artificial Sequence
  Synthetic oligonucleotide
tgaaggcacccccacccgaggatcggagga

SEQ ID NO: 327524 - DNA, 31 bp, Artificial Sequence
  Synthetic oligonucleotide
gcgaccataccacctccgcttcaagggagga

SEQ ID NO: 327525 - DNA, 30 bp, Artificial Sequence
  Synthetic oligonucleotide
cattcgctactgagctatgtcttgggagga

SEQ ID NO: 327526 - DNA, 30 bp, Artificial Sequence
  Synthetic oligonucleotide
agcctttcgtactgtatgtggcctggagga

SEQ ID NO: 327527 - DNA, 30 bp, Artificial Sequence
  Synthetic oligonucleotide
ggccctgtgacgccggtgaagattggagga

SEQ ID NO: 327528 - DNA, 30 bp, Artificial Sequence
  Synthetic oligonucleotide
tttcgcactttaaataaaatagaatgagga

SEQ ID NO: 327529 - DNA, 30 bp, Artificial Sequence
  Synthetic oligonucleotide
cattagaagtatcttgttggtctatgagga

SEQ ID NO: 327530 - DNA, 30 bp, Artificial Sequence
  Synthetic oligonucleotide
tatagccgtcgatcgtggtaaccgtgagga

SEQ ID NO: 327531 - DNA, 30 bp, Artificial Sequence
  Synthetic oligonucleotide
acatgcccgcccactcactgtccgtgagga

SEQ ID NO: 327532 - DNA, 30 bp, Artificial Sequence
  Synthetic oligonucleotide
gatcatgaacgcaatcgcacggcgtgagga

SEQ ID NO: 327533 - DNA, 30 bp, Artificial Sequence
  Synthetic oligonucleotide
cccgcaagggatggacggcactcttgagga

SEQ ID NO: 327534 - DNA, 30 bp, Artificial Sequence
  Synthetic oligonucleotide
cttacataattttgggtcgttaaaatagga

SEQ ID NO: 327535 - DNA, 30 bp, Artificial Sequence
  Synthetic oligonucleotide
gaaaggcggcgtctgtaatccacaatagga

SEQ ID NO: 327536 - DNA, 30 bp, Artificial Sequence
  Synthetic oligonucleotide
gataaaccacttcttgggacggacatagga

SEQ ID NO: 327537 - DNA, 30 bp, Artificial Sequence
  Synthetic oligonucleotide
aaaacagtaatctggatgtcgaagatagga

SEQ ID NO: 327538 - DNA, 30 bp, Artificial Sequence
  Synthetic oligonucleotide
gtaaatcttcttggtaggcggctgatagga

SEQ ID NO: 327539 - DNA, 30 bp, Artificial Sequence
  Synthetic oligonucleotide
agagcgaggcacattcaactatgtatagga

SEQ ID NO: 327540 - DNA, 30 bp, Artificial Sequence
  Synthetic oligonucleotide
tgcggttgcagaataccgcattgtatagga

SEQ ID NO: 327541 - DNA, 30 bp, Artificial Sequence
  Synthetic oligonucleotide
gcaaaaagcgctacgtggacctttatagga

SEQ ID NO: 327542 - DNA, 30 bp, Artificial Sequence
  Synthetic oligonucleotide
agcattcaacgcgcatgtgcgccactagga

SEQ ID NO: 327543 - DNA, 30 bp, Artificial Sequence
  Synthetic oligonucleotide
aactgtgatgttatatgagaggagctagga

SEQ ID NO: 327544 - DNA, 30 bp, Artificial Sequence
  Synthetic oligonucleotide
gcgaaccggccccaagcgccaggtctagga

SEQ ID NO: 327545 - DNA, 30 bp, Artificial Sequence
  Synthetic oligonucleotide
tgggttagcactcttttcaacggtctagga

SEQ ID NO: 327546 - DNA, 30 bp, Artificial Sequence
  Synthetic oligonucleotide
agaccctgtaattcgatgggcggtctagga

SEQ ID NO: 327547 - DNA, 30 bp, Artificial Sequence
  Synthetic oligonucleotide
aatcgtgctcgaggcctgtactacgtagga

SEQ ID NO: 327548 - DNA, 30 bp, Artificial Sequence
  Synthetic oligonucleotide
tttagcatatggttggcaaaaacggtagga

SEQ ID NO: 327549 - DNA, 30 bp, Artificial Sequence
  Synthetic oligonucleotide
cgtttaataataacggctgtgccggtagga

SEQ ID NO: 327550 - DNA, 30 bp, Artificial Sequence
  Synthetic oligonucleotide
gaatgcttgaacaaaggcggatttgtagga

SEQ ID NO: 327551 - DNA, 30 bp, Artificial Sequence
  Synthetic oligonucleotide
atatactgtgttaataattgagacttagga

SEQ ID NO: 327552 - DNA, 30 bp, Artificial Sequence
  Synthetic oligonucleotide
ctaggctcattcgtcactgatattttagga

SEQ ID NO: 327553 - DNA, 30 bp, Artificial Sequence
  Synthetic oligonucleotide
gttgtccaacgagtttagttaaaaaacgga

SEQ ID NO: 327554 - DNA, 30 bp, Artificial Sequence
  Synthetic oligonucleotide
ccgcctatcggcctaacaaggcaaaacgga

SEQ ID NO: 327555 - DNA, 30 bp, Artificial Sequence
  Synthetic oligonucleotide
ctgtcgattccaattcagaatataaacgga

SEQ ID NO: 327556 - DNA, 30 bp, Artificial Sequence
  Synthetic oligonucleotide
atccatcgccattcgcaggacctaaacgga

SEQ ID NO: 327557 - DNA, 30 bp, Artificial Sequence
  Synthetic oligonucleotide
agataacaagtgtcggttgggttaaacgga

SEQ ID NO: 327558 - DNA, 30 bp, Artificial Sequence
  Synthetic oligonucleotide
gcaactgccctacgaggttgacggaacgga

SEQ ID NO: 327559 - DNA, 30 bp, Artificial Sequence
  Synthetic oligonucleotide
ccagtggcgcttgttgcatgtcggaacgga

SEQ ID NO: 327560 - DNA, 30 bp, Artificial Sequence
  Synthetic oligonucleotide
gcgagtcactacttacagggtattaacgga

SEQ ID NO: 327561 - DNA, 30 bp, Artificial Sequence
  Synthetic oligonucleotide
tggactagtgctggagtgcgatgacacgga

SEQ ID NO: 327562 - DNA, 30 bp, Artificial Sequence
  Synthetic oligonucleotide
gatgggcctaatcgcctgatatgccacgga

SEQ ID NO: 327563 - DNA, 30 bp, Artificial Sequence
  Synthetic oligonucleotide
ggattgtctcagctcgaacgggagcacgga

SEQ ID NO: 327564 - DNA, 30 bp, Artificial Sequence
  Synthetic oligonucleotide
tagatcctatgagtttagcaggggcacgga

SEQ ID NO: 327565 - DNA, 30 bp, Artificial Sequence
  Synthetic oligonucleotide
ctgaaaccctgaacaggatagatgcacgga

SEQ ID NO: 327566 - DNA, 30 bp, Artificial Sequence
  Synthetic oligonucleotide
taactacttttatcatggaactatcacgga

SEQ ID NO: 327567 - DNA, 30 bp, Artificial Sequence
  Synthetic oligonucleotide
acttacccctaggatcaaatctatcacgga

SEQ ID NO: 327568 - DNA, 30 bp, Artificial Sequence
  Synthetic oligonucleotide
ttgtcagtcttatattgctaagctcacgga

SEQ ID NO: 327569 - DNA, 30 bp, Artificial Sequence
  Synthetic oligonucleotide
ggtcctttgggtatttagagttaagacgga

SEQ ID NO: 327570 - DNA, 30 bp, Artificial Sequence
  Synthetic oligonucleotide
aagcctgagcgcatcgtcttaccagacgga

SEQ ID NO: 327571 - DNA, 31 bp, Artificial Sequence
  Synthetic oligonucleotide
gcgccacggccaccgtgttacttccgacgga

SEQ ID NO: 327572 - DNA, 30 bp, Artificial Sequence
  Synthetic oligonucleotide
gccggaaggaccgcccaacctctcgacgga

SEQ ID NO: 327573 - DNA, 30 bp, Artificial Sequence
  Synthetic oligonucleotide
taaacacggctgtttcatgtaacggacgga

SEQ ID NO: 327574 - DNA, 30 bp, Artificial Sequence
  Synthetic oligonucleotide
tggcgaccttgctggattcgatgggacgga

SEQ ID NO: 327575 - DNA, 30 bp, Artificial Sequence
  Synthetic oligonucleotide
ccgcagggctcgaagtccctttgtgacgga

SEQ ID NO: 327576 - DNA, 30 bp, Artificial Sequence
  Synthetic oligonucleotide
tagttctcaaaacagtagggatcatacgga

SEQ ID NO: 327577 - DNA, 30 bp, Artificial Sequence
  Synthetic oligonucleotide
atctgacggcgatcggaagggtattacgga

SEQ ID NO: 327578 - DNA, 30 bp, Artificial Sequence
  Synthetic oligonucleotide
ctaattacagcggggatagtttattacgga

SEQ ID NO: 327579 - DNA, 30 bp, Artificial Sequence
  Synthetic oligonucleotide
tcgtagcgttgcattatacgtgcttacgga

SEQ ID NO: 327580 - DNA, 30 bp, Artificial Sequence
  Synthetic oligonucleotide
ctgcggtaggagagcggcggccaaaccgga

SEQ ID NO: 327581 - DNA, 30 bp, Artificial Sequence
  Synthetic oligonucleotide
tggcctactagcggacctggtacaaccgga

SEQ ID NO: 327582 - DNA, 30 bp, Artificial Sequence
  Synthetic oligonucleotide
gaagggtttcggcggtttcccttaaccgga

SEQ ID NO: 327583 - DNA, 30 bp, Artificial Sequence
  Synthetic oligonucleotide
tcggagtcgaatgaagccagggacaccgga

SEQ ID NO: 327584 - DNA, 30 bp, Artificial Sequence
  Synthetic oligonucleotide
caactggacgggatccatgcagtcaccgga

SEQ ID NO: 327585 - DNA, 30 bp, Artificial Sequence
  Synthetic oligonucleotide
gcacctgatcccaatgtaaagtcgaccgga

SEQ ID NO: 327586 - DNA, 30 bp, Artificial Sequence
  Synthetic oligonucleotide
gggtgtgagatgtgctccacttggaccgga

SEQ ID NO: 327587 - DNA, 30 bp, Artificial Sequence
  Synthetic oligonucleotide
ttctggaggtatcctagctcatataccgga

SEQ ID NO: 327588 - DNA, 30 bp, Artificial Sequence
  Synthetic oligonucleotide
gaaccgatcgtgagtaccgtcagtaccgga

SEQ ID NO: 327589 - DNA, 30 bp, Artificial Sequence
  Synthetic oligonucleotide
cacgaaagcgtaaccgctggtggtaccgga

SEQ ID NO: 327590 - DNA, 30 bp, Artificial Sequence
  Synthetic oligonucleotide
cgctccttcgaagtggtgcttgttaccgga

SEQ ID NO: 327591 - DNA, 30 bp, Artificial Sequence
  Synthetic oligonucleotide
gggtagcatcatccgttggatagacccgga

SEQ ID NO: 327592 - DNA, 30 bp, Artificial Sequence
  Synthetic oligonucleotide
acgctcgttagtagtttcttcggacccgga

SEQ ID NO: 327593 - DNA, 30 bp, Artificial Sequence
  Synthetic oligonucleotide
tgctcgagtgcaggacgctgtacgcccgga

SEQ ID NO: 327594 - DNA, 30 bp, Artificial Sequence
  Synthetic oligonucleotide
tattcggtggatgggttctcttggcccgga

SEQ ID NO: 327595 - DNA, 30 bp, Artificial Sequence
  Synthetic oligonucleotide
atcgtccagggtgatccaacatacgccgga

SEQ ID NO: 327596 - DNA, 30 bp, Artificial Sequence
  Synthetic oligonucleotide
ggtttagattcgttccttgtgaaggccgga

SEQ ID NO: 327597 - DNA, 30 bp, Artificial Sequence
  Synthetic oligonucleotide
tagttctaatacgtcacagtctcggccgga

SEQ ID NO: 327598 - DNA, 30 bp, Artificial Sequence
  Synthetic oligonucleotide
aaaatgtttcgggacctgcgatgtgccgga

SEQ ID NO: 327599 - DNA, 30 bp, Artificial Sequence
  Synthetic oligonucleotide
ccccggttagtagtccggtttgaatccgga

SEQ ID NO: 327600 - DNA, 30 bp, Artificial Sequence
  Synthetic oligonucleotide
ccctcatatctggcctgcttaccatccgga

SEQ ID NO: 327601 - DNA, 30 bp, Artificial Sequence
  Synthetic oligonucleotide
attctacccactactaatatagtatccgga

SEQ ID NO: 327602 - DNA, 30 bp, Artificial Sequence
  Synthetic oligonucleotide
acattgtatgttgctcacttgtgctccgga

SEQ ID NO: 327603 - DNA, 30 bp, Artificial Sequence
  Synthetic oligonucleotide
tttacggaagtatcagggataacgtccgga

SEQ ID NO: 327604 - DNA, 30 bp, Artificial Sequence
  Synthetic oligonucleotide
taatggttgaatcattaagtacggtccgga

SEQ ID NO: 327605 - DNA, 30 bp, Artificial Sequence
  Synthetic oligonucleotide
ggccaatcgcaggggtataacctgtccgga

SEQ ID NO: 327606 - DNA, 30 bp, Artificial Sequence
  Synthetic oligonucleotide
tgaatctggcgtcgcgtcaacaattccgga

SEQ ID NO: 327607 - DNA, 30 bp, Artificial Sequence
  Synthetic oligonucleotide
tactcgttgtgttggcagaagctttccgga

SEQ ID NO: 327608 - DNA, 30 bp, Artificial Sequence
  Synthetic oligonucleotide
tgtaaatatgaaaatttcatcgtcagcgga

SEQ ID NO: 327609 - DNA, 30 bp, Artificial Sequence
  Synthetic oligonucleotide
tgttacgggccttccgggctggagagcgga

SEQ ID NO: 327610 - DNA, 31 bp, Artificial Sequence
  Synthetic oligonucleotide
tatcccggctcggaacacactcaggagcgga

SEQ ID NO: 327611 - DNA, 30 bp, Artificial Sequence
  Synthetic oligonucleotide
aacatatccagtgaaacttcatgtagcgga

SEQ ID NO: 327612 - DNA, 30 bp, Artificial Sequence
  Synthetic oligonucleotide
ccatggtcgaaacttatgcacagacgcgga

SEQ ID NO: 327613 - DNA, 30 bp, Artificial Sequence
  Synthetic oligonucleotide
atagatcacccggagacttcaaaccgcgga

SEQ ID NO: 327614 - DNA, 30 bp, Artificial Sequence
  Synthetic oligonucleotide
taacccggagaccctaggaaagcccgcgga

SEQ ID NO: 327615 - DNA, 30 bp, Artificial Sequence
  Synthetic oligonucleotide
gccggttgaggtgcaacgtcactccgcgga

SEQ ID NO: 327616 - DNA, 30 bp, Artificial Sequence
  Synthetic oligonucleotide
cagtgctggttaagcactaaagggcgcgga

SEQ ID NO: 327617 - DNA, 30 bp, Artificial Sequence
  Synthetic oligonucleotide
ggacaagtcgattctgttttctggcgcgga

SEQ ID NO: 327618 - DNA, 30 bp, Artificial Sequence
  Synthetic oligonucleotide
acattcctgcgtcttgaggtatatcgcgga

SEQ ID NO: 327619 - DNA, 30 bp, Artificial Sequence
  Synthetic oligonucleotide
agccctcatcaactttagataaaaggcgga

SEQ ID NO: 327620 - DNA, 30 bp, Artificial Sequence
  Synthetic oligonucleotide
aacacggagggatctgatgaaacaggcgga

SEQ ID NO: 327621 - DNA, 30 bp, Artificial Sequence
  Synthetic oligonucleotide
tttcgcgatctcatgatccaggggggcgga

SEQ ID NO: 327622 - DNA, 30 bp, Artificial Sequence
  Synthetic oligonucleotide
gtcaacagtgagacgctactcctgggcgga

SEQ ID NO: 327623 - DNA, 30 bp, Artificial Sequence
  Synthetic oligonucleotide
ctacgaacttctgcgaacgcattgggcgga

SEQ ID NO: 327624 - DNA, 30 bp, Artificial Sequence
  Synthetic oligonucleotide
cgggaattgcacccggacggatatggcgga

SEQ ID NO: 327625 - DNA, 29 bp, Artificial Sequence
  Synthetic oligonucleotide
cagccgtgtaccgcgtataaacatgcgga

SEQ ID NO: 327626 - DNA, 30 bp, Artificial Sequence
  Synthetic oligonucleotide
ctggagggcaagggtctagttgcgtgcgga

SEQ ID NO: 327627 - DNA, 30 bp, Artificial Sequence
  Synthetic oligonucleotide
ggctcgagatctcaatcttagtcaatcgga

SEQ ID NO: 327628 - DNA, 30 bp, Artificial Sequence
  Synthetic oligonucleotide
gagtacgggaactggagaaggagaatcgga

SEQ ID NO: 327629 - DNA, 28 bp, Artificial Sequence
  Synthetic oligonucleotide
tctatcagttggtgcatcccgcatcgga

SEQ ID NO: 327630 - DNA, 30 bp, Artificial Sequence
  Synthetic oligonucleotide
acaaactgagactgacgtttatcgatcgga

SEQ ID NO: 327631 - DNA, 30 bp, Artificial Sequence
  Synthetic oligonucleotide
gagatatcaaaaaagcggactgggatcgga

SEQ ID NO: 327632 - DNA, 30 bp, Artificial Sequence
  Synthetic oligonucleotide
tcgtaaggatactctgatagcaatatcgga

SEQ ID NO: 327633 - DNA, 30 bp, Artificial Sequence
  Synthetic oligonucleotide
gcgtaacgatatggggtaacatatatcgga

SEQ ID NO: 327634 - DNA, 30 bp, Artificial Sequence
  Synthetic oligonucleotide
tgaactgcgggcaagaggcataaactcgga

SEQ ID NO: 327635 - DNA, 30 bp, Artificial Sequence
  Synthetic oligonucleotide
ggttataaacggaggagtaatctactcgga

SEQ ID NO: 327636 - DNA, 30 bp, Artificial Sequence
  Synthetic oligonucleotide
gtccaactgtatatgggggtacgcctcgga

SEQ ID NO: 327637 - DNA, 30 bp, Artificial Sequence
  Synthetic oligonucleotide
tcccttcatcataggttggtgaggctcgga

SEQ ID NO: 327638 - DNA, 30 bp, Artificial Sequence
  Synthetic oligonucleotide
gccaacggcgcccaacaaagccggctcgga

SEQ ID NO: 327639 - DNA, 30 bp, Artificial Sequence
  Synthetic oligonucleotide
aagagttggcctgcaaacatggtgctcgga

SEQ ID NO: 327640 - DNA, 30 bp, Artificial Sequence
  Synthetic oligonucleotide
ctgccaacccgatgtgtagctcctctcgga

SEQ ID NO: 327641 - DNA, 30 bp, Artificial Sequence
  Synthetic oligonucleotide
agtccgtaggccgggagaacaggtctcgga

SEQ ID NO: 327642 - DNA, 30 bp, Artificial Sequence
  Synthetic oligonucleotide
gcttggtcatagtcagggtgtggtctcgga

SEQ ID NO: 327643 - DNA, 30 bp, Artificial Sequence
  Synthetic oligonucleotide
gataattctacctcgcagggctgcgtcgga

SEQ ID NO: 327644 - DNA, 30 bp, Artificial Sequence
  Synthetic oligonucleotide
gacgaacttgtcacttcaagcttcgtcgga

SEQ ID NO: 327645 - DNA, 30 bp, Artificial Sequence
  Synthetic oligonucleotide
aactgaaaatcgcagggcggcaaggtcgga

SEQ ID NO: 327646 - DNA, 30 bp, Artificial Sequence
  Synthetic oligonucleotide
gtaatctgtctgttatttaccgcggtcgga

SEQ ID NO: 327647 - DNA, 30 bp, Artificial Sequence
  Synthetic oligonucleotide
gtgaactgacggtagtggcctatattcgga

SEQ ID NO: 327648 - DNA, 30 bp, Artificial Sequence
  Synthetic oligonucleotide
ccttatattagccatcacggagatttcgga

SEQ ID NO: 327649 - DNA, 30 bp, Artificial Sequence
  Synthetic oligonucleotide
tctgtgcggcaacagcagtttgaaaaggga

SEQ ID NO: 327650 - DNA, 30 bp, Artificial Sequence
  Synthetic oligonucleotide
aggttccactgccttaagtagtaaaaggga

SEQ ID NO: 327651 - DNA, 30 bp, Artificial Sequence
  Synthetic oligonucleotide
cggcctacgagccttcagtggtcaaaggga

SEQ ID NO: 327652 - DNA, 30 bp, Artificial Sequence
  Synthetic oligonucleotide
accggcgggtctgagactccaaggaaggga

SEQ ID NO: 327653 - DNA, 30 bp, Artificial Sequence
  Synthetic oligonucleotide
agttatcatatggttttaaagctgaaggga

SEQ ID NO: 327654 - DNA, 30 bp, Artificial Sequence
  Synthetic oligonucleotide
actcagtccgcataggggacacttaaggga

SEQ ID NO: 327655 - DNA, 30 bp, Artificial Sequence
  Synthetic oligonucleotide
aagtcttgctgaagatccgtacaacaggga

SEQ ID NO: 327656 - DNA, 30 bp, Artificial Sequence
  Synthetic oligonucleotide
tcgagtctttgagctgacgactgacaggga

SEQ ID NO: 327657 - DNA, 30 bp, Artificial Sequence
  Synthetic oligonucleotide
gggtcagggtatatggtgccacaccaggga

SEQ ID NO: 327658 - DNA, 30 bp, Artificial Sequence
  Synthetic oligonucleotide
gttgcccatggttacaaacgctaccaggga

SEQ ID NO: 327659 - DNA, 30 bp, Artificial Sequence
  Synthetic oligonucleotide
aagaaacacgtggctctttgaggccaggga

SEQ ID NO: 327660 - DNA, 30 bp, Artificial Sequence
  Synthetic oligonucleotide
gaaccgctgcaacgtccacatatccaggga

SEQ ID NO: 327661 - DNA, 30 bp, Artificial Sequence
  Synthetic oligonucleotide
taggttctgacgggtgagctcccgcaggga

SEQ ID NO: 327662 - DNA, 30 bp, Artificial Sequence
  Synthetic oligonucleotide
ccaccgttagtatctcgcaaagatcaggga

SEQ ID NO: 327663 - DNA, 30 bp, Artificial Sequence
  Synthetic oligonucleotide
tgtgtgtgacatagcagaccctctcaggga

SEQ ID NO: 327664 - DNA, 30 bp, Artificial Sequence
  Synthetic oligonucleotide
gtgctagcgcccaacctcgaaggtcaggga

SEQ ID NO: 327665 - DNA, 30 bp, Artificial Sequence
  Synthetic oligonucleotide
gccattcgtaggcgggaggggggcgaggga

SEQ ID NO: 327666 - DNA, 30 bp, Artificial Sequence
  Synthetic oligonucleotide
gggatgatcgcggacccgtcctaggaggga

SEQ ID NO: 327667 - DNA, 30 bp, Artificial Sequence
  Synthetic oligonucleotide
ttgatccgctctagttctaaatcggaggga

SEQ ID NO: 327668 - DNA, 30 bp, Artificial Sequence
  Synthetic oligonucleotide
gaggaggtaattcgcggttccatggaggga

SEQ ID NO: 327669 - DNA, 30 bp, Artificial Sequence
  Synthetic oligonucleotide
acatacccttcgtagtttttatatgaggga

SEQ ID NO: 327670 - DNA, 29 bp, Artificial Sequence
  Synthetic oligonucleotide
ttgggatagtaaaatgttgctctgaggga

SEQ ID NO: 327671 - DNA, 29 bp, Artificial Sequence
  Synthetic oligonucleotide
tacctcctttgccatggtaaaaataggga

SEQ ID NO: 327672 - DNA, 30 bp, Artificial Sequence
  Synthetic oligonucleotide
atgcagtggttgtagagcgtttaataggga

SEQ ID NO: 327673 - DNA, 30 bp, Artificial Sequence
  Synthetic oligonucleotide
atatatgctatttcgactcttaactaggga

SEQ ID NO: 327674 - DNA, 30 bp, Artificial Sequence
  Synthetic oligonucleotide
ggtgatcgacgcaggggtacaaagtaggga

SEQ ID NO: 327675 - DNA, 30 bp, Artificial Sequence
  Synthetic oligonucleotide
ttatccgacgcgttgaaacggggttaggga

SEQ ID NO: 327676 - DNA, 30 bp, Artificial Sequence
  Synthetic oligonucleotide
gctgtgagtatgagataacttggttaggga

SEQ ID NO: 327677 - DNA, 30 bp, Artificial Sequence
  Synthetic oligonucleotide
acacaccatctggaggtttaagaaacggga

SEQ ID NO: 327678 - DNA, 30 bp, Artificial Sequence
  Synthetic oligonucleotide
atgattttaccgcccccgatagccacggga

SEQ ID NO: 327679 - DNA, 30 bp, Artificial Sequence
  Synthetic oligonucleotide
gatgctatagtaaaacaaaagctcacggga

SEQ ID NO: 327680 - DNA, 30 bp, Artificial Sequence
  Synthetic oligonucleotide
tagtatgtttcaaagtatatagatacggga

SEQ ID NO: 327681 - DNA, 30 bp, Artificial Sequence
  Synthetic oligonucleotide
aatccgggtgaaaatttgtggcctacggga

SEQ ID NO: 327682 - DNA, 30 bp, Artificial Sequence
  Synthetic oligonucleotide
gaactagtttgggacttggagtctacggga

SEQ ID NO: 327683 - DNA, 30 bp, Artificial Sequence
  Synthetic oligonucleotide
gcttctattgttcgacgaatcagtacggga

SEQ ID NO: 327684 - DNA, 30 bp, Artificial Sequence
  Synthetic oligonucleotide
gtgttggactgcgataactgtagaccggga

SEQ ID NO: 327685 - DNA, 30 bp, Artificial Sequence
  Synthetic oligonucleotide
gatacaaccacaaatgttactggaccggga

SEQ ID NO: 327686 - DNA, 30 bp, Artificial Sequence
  Synthetic oligonucleotide
ggcggtcggtaccccccctctaatccggga

SEQ ID NO: 327687 - DNA, 30 bp, Artificial Sequence
  Synthetic oligonucleotide
agacgcctgtgatcggaggcgtgtccggga

SEQ ID NO: 327688 - DNA, 30 bp, Artificial Sequence
  Synthetic oligonucleotide
ggtgaaacggtattgctgcccctagcggga

SEQ ID NO: 327689 - DNA, 30 bp, Artificial Sequence
  Synthetic oligonucleotide
ccagaggctcaagctagaaaagacgcggga

SEQ ID NO: 327690 - DNA, 30 bp, Artificial Sequence
  Synthetic oligonucleotide
ataaagtctaagatgtacttgcaggcggga

SEQ ID NO: 327691 - DNA, 30 bp, Artificial Sequence
  Synthetic oligonucleotide
gaacagttacagtcgaacggggcggcggga

SEQ ID NO: 327692 - DNA, 30 bp, Artificial Sequence
  Synthetic oligonucleotide
gccgacgactgaggttagcagccctcggga

SEQ ID NO: 327693 - DNA, 30 bp, Artificial Sequence
  Synthetic oligonucleotide
gcggaggattcagatttcttaatctcggga

SEQ ID NO: 327694 - DNA, 30 bp, Artificial Sequence
  Synthetic oligonucleotide
tgtccgagtaacattgcacgtctctcggga

SEQ ID NO: 327695 - DNA, 30 bp, Artificial Sequence
  Synthetic oligonucleotide
tcgctttcctaactctgtccattctcggga

SEQ ID NO: 327696 - DNA, 30 bp, Artificial Sequence
  Synthetic oligonucleotide
ctacgctgcgtgcacaaatcggagtcggga

SEQ ID NO: 327697 - DNA, 30 bp, Artificial Sequence
  Synthetic oligonucleotide
accgttatgtaaagactcgatgagtcggga

SEQ ID NO: 327698 - DNA, 30 bp, Artificial Sequence
  Synthetic oligonucleotide
atccgtggtccccggcttgacgcgtcggga

SEQ ID NO: 327699 - DNA, 30 bp, Artificial Sequence
  Synthetic oligonucleotide
ctgctggaataacggcgttagtcgtcggga

SEQ ID NO: 327700 - DNA, 30 bp, Artificial Sequence
  Synthetic oligonucleotide
gtgcctgaaggccgcgctacaatttcggga

SEQ ID NO: 327701 - DNA, 30 bp, Artificial Sequence
  Synthetic oligonucleotide
ggctccccctgcagataccaggaaagggga

SEQ ID NO: 327702 - DNA, 30 bp, Artificial Sequence
  Synthetic oligonucleotide
gggcggagcaatttccattgtctaagggga

SEQ ID NO: 327703 - DNA, 30 bp, Artificial Sequence
  Synthetic oligonucleotide
ggtcaccgggcggactatccattaagggga

SEQ ID NO: 327704 - DNA, 30 bp, Artificial Sequence
  Synthetic oligonucleotide
taacttggtctgagcggttagatcagggga

SEQ ID NO: 327705 - DNA, 30 bp, Artificial Sequence
  Synthetic oligonucleotide
taattagctaagtataagccaccgagggga

SEQ ID NO: 327706 - DNA, 30 bp, Artificial Sequence
  Synthetic oligonucleotide
ccgacgcatcctagggcttaagggagggga

SEQ ID NO: 327707 - DNA, 30 bp, Artificial Sequence
  Synthetic oligonucleotide
gtgctggtaggaggtaagtataatagggga

SEQ ID NO: 327708 - DNA, 30 bp, Artificial Sequence
  Synthetic oligonucleotide
tctgtcaggtcattggagaacgctagggga

SEQ ID NO: 327709 - DNA, 30 bp, Artificial Sequence
  Synthetic oligonucleotide
ggacatggctaaagttatccggttagggga

SEQ ID NO: 327710 - DNA, 30 bp, Artificial Sequence
  Synthetic oligonucleotide
atgtggacctaatgttcgaggacccgggga

SEQ ID NO: 327711 - DNA, 30 bp, Artificial Sequence
  Synthetic oligonucleotide
attccgttaaatagtgcagcaaagcgggga

SEQ ID NO: 327712 - DNA, 30 bp, Artificial Sequence
  Synthetic oligonucleotide
aatgaaatggcttacaatcgcgagcgggga

SEQ ID NO: 327713 - DNA, 30 bp, Artificial Sequence
  Synthetic oligonucleotide
gcgtggaactgccacgcgcgctctcgggga

SEQ ID NO: 327714 - DNA, 30 bp, Artificial Sequence
  Synthetic oligonucleotide
gggaacttgaaacttgtcgagggtcgggga

SEQ ID NO: 327715 - DNA, 30 bp, Artificial Sequence
  Synthetic oligonucleotide
agcccattagtaagatgtggtcaaggggga

SEQ ID NO: 327716 - DNA, 30 bp, Artificial Sequence
  Synthetic oligonucleotide
ttacacaagcaagtcccagctgaaggggga

SEQ ID NO: 327717 - DNA, 30 bp, Artificial Sequence
  Synthetic oligonucleotide
tgtagatttactgagtgctaatcaggggga

SEQ ID NO: 327718 - DNA, 30 bp, Artificial Sequence
  Synthetic oligonucleotide
ggactggttcatatactacgtcagggggga

SEQ ID NO: 327719 - DNA, 40 bp, Artificial Sequence
  Synthetic oligonucleotide
aagataatacattcatggtatggccggggatcggggggga

SEQ ID NO: 327720 - DNA, 40 bp, Artificial Sequence
  Synthetic oligonucleotide
aagataatacattcatggaatggtcggggatcggggggga

SEQ ID NO: 327721 - DNA, 40 bp, Artificial Sequence
  Synthetic oligonucleotide
cagataatacattcatggtatggtcggggatcggggggga

SEQ ID NO: 327722 - DNA, 40 bp, Artificial Sequence
  Synthetic oligonucleotide
atgataatacattcatggtatggtcggggatcggggggga

SEQ ID NO: 327723 - DNA, 40 bp, Artificial Sequence
  Synthetic oligonucleotide
aagatcatacattcatggtatggtcggggatcggggggga

SEQ ID NO: 327724 - DNA, 30 bp, Artificial Sequence
  Synthetic oligonucleotide
cgtcagtacaaggagctccatatgggggga

SEQ ID NO: 327725 - DNA, 30 bp, Artificial Sequence
  Synthetic oligonucleotide
tgggggttattaatccgtaaggatggggga

SEQ ID NO: 327726 - DNA, 30 bp, Artificial Sequence
  Synthetic oligonucleotide
cggctctattataccctgttagcctgggga

SEQ ID NO: 327727 - DNA, 30 bp, Artificial Sequence
  Synthetic oligonucleotide
tacggtaaggtcggaatagtcggctgggga

SEQ ID NO: 327728 - DNA, 30 bp, Artificial Sequence
  Synthetic oligonucleotide
aatgcgaattggcgtggctctcattgggga

SEQ ID NO: 327729 - DNA, 30 bp, Artificial Sequence
  Synthetic oligonucleotide
gtcatctgcagcagatccgtaacttgggga

SEQ ID NO: 327730 - DNA, 30 bp, Artificial Sequence
  Synthetic oligonucleotide
aggagccgcgggggtttccttcgttgggga

SEQ ID NO: 327731 - DNA, 30 bp, Artificial Sequence
  Synthetic oligonucleotide
taggtccaaatagggcttgccataatggga

SEQ ID NO: 327732 - DNA, 30 bp, Artificial Sequence
  Synthetic oligonucleotide
cgtaggccccatccgcgtctcataatggga

SEQ ID NO: 327733 - DNA, 30 bp, Artificial Sequence
  Synthetic oligonucleotide
ctacgattggccagaggccacttaatggga

SEQ ID NO: 327734 - DNA, 30 bp, Artificial Sequence
  Synthetic oligonucleotide
gtagtgaaatttctgcactcagtcatggga

SEQ ID NO: 327735 - DNA, 30 bp, Artificial Sequence
  Synthetic oligonucleotide
gataaagtggcagggagaaggttcatggga

SEQ ID NO: 327736 - DNA, 30 bp, Artificial Sequence
  Synthetic oligonucleotide
ctaaatgactacctgataagggagatggga

SEQ ID NO: 327737 - DNA, 30 bp, Artificial Sequence
  Synthetic oligonucleotide
tgagggtacaagaacgccgatacgatggga

SEQ ID NO: 327738 - DNA, 30 bp, Artificial Sequence
  Synthetic oligonucleotide
aacgactaatgagccgtaattgcgatggga

SEQ ID NO: 327739 - DNA, 30 bp, Artificial Sequence
  Synthetic oligonucleotide
agaactatttgtttgttgctgcggatggga

SEQ ID NO: 327740 - DNA, 30 bp, Artificial Sequence
  Synthetic oligonucleotide
cgggccatagtcctatcgatcctgatggga

SEQ ID NO: 327741 - DNA, 30 bp, Artificial Sequence
  Synthetic oligonucleotide
aatagatgagttaggtagtgaaatatggga

SEQ ID NO: 327742 - DNA, 30 bp, Artificial Sequence
  Synthetic oligonucleotide
gagtatctgggcgcatgttaatttatggga

SEQ ID NO: 327743 - DNA, 30 bp, Artificial Sequence
  Synthetic oligonucleotide
ataaggcgttatttccttaattttatggga

SEQ ID NO: 327744 - DNA, 30 bp, Artificial Sequence
  Synthetic oligonucleotide
gcaaggggcatatattttcgtagactggga

SEQ ID NO: 327745 - DNA, 30 bp, Artificial Sequence
  Synthetic oligonucleotide
ggtaaaaattccggatctggtaacctggga

SEQ ID NO: 327746 - DNA, 30 bp, Artificial Sequence
  Synthetic oligonucleotide
tttgaaaaacatgtaccccttcacctggga

SEQ ID NO: 327747 - DNA, 30 bp, Artificial Sequence
  Synthetic oligonucleotide
gagggatatgcgtccatgtttagcctggga

SEQ ID NO: 327748 - DNA, 30 bp, Artificial Sequence
  Synthetic oligonucleotide
aggacagatgctggaacatctcatctggga

SEQ ID NO: 327749 - DNA, 30 bp, Artificial Sequence
  Synthetic oligonucleotide
tttgctcggtgatcgtgtcggtaagtggga

SEQ ID NO: 327750 - DNA, 30 bp, Artificial Sequence
  Synthetic oligonucleotide
tcaacgctgacccgaacggcactagtggga

SEQ ID NO: 327751 - DNA, 30 bp, Artificial Sequence
  Synthetic oligonucleotide
acattgaattgccaccgctctcccgtggga

SEQ ID NO: 327752 - DNA, 30 bp, Artificial Sequence
  Synthetic oligonucleotide
gaagatgagtgcaaacggctgggggtggga

SEQ ID NO: 327753 - DNA, 30 bp, Artificial Sequence
  Synthetic oligonucleotide
gcagttagtatggggaacaaaatggtggga

SEQ ID NO: 327754 - DNA, 30 bp, Artificial Sequence
  Synthetic oligonucleotide
tacaccggcagataagctctgactgtggga

SEQ ID NO: 327755 - DNA, 30 bp, Artificial Sequence
  Synthetic oligonucleotide
agttgggttccgggtcggagtcgtgtggga

SEQ ID NO: 327756 - DNA, 30 bp, Artificial Sequence
  Synthetic oligonucleotide
tctatatttgtagtggtacacgtcttggga

SEQ ID NO: 327757 - DNA, 30 bp, Artificial Sequence
  Synthetic oligonucleotide
gtaagacatcaactatcacggttcttggga

SEQ ID NO: 327758 - DNA, 30 bp, Artificial Sequence
  Synthetic oligonucleotide
aactcacgggaaccaccctgttcgttggga

SEQ ID NO: 327759 - DNA, 30 bp, Artificial Sequence
  Synthetic oligonucleotide
gcggaccaattcgataatagagctttggga

SEQ ID NO: 327760 - DNA, 30 bp, Artificial Sequence
  Synthetic oligonucleotide
ggttcgtgcacactaagaagctgtttggga

SEQ ID NO: 327761 - DNA, 30 bp, Artificial Sequence
  Synthetic oligonucleotide
acgacaggcctctcgttgttgagaaatgga

SEQ ID NO: 327762 - DNA, 30 bp, Artificial Sequence
  Synthetic oligonucleotide
ctccgggcacaaagaggtttttgaaatgga

SEQ ID NO: 327763 - DNA, 30 bp, Artificial Sequence
  Synthetic oligonucleotide
tgtttgcgttgaaaagtctggaacaatgga

SEQ ID NO: 327764 - DNA, 30 bp, Artificial Sequence
  Synthetic oligonucleotide
tgtgaatacacggtcagtggagtcaatgga

SEQ ID NO: 327765 - DNA, 30 bp, Artificial Sequence
  Synthetic oligonucleotide
gccggagtatctgctgacagctggaatgga

SEQ ID NO: 327766 - DNA, 30 bp, Artificial Sequence
  Synthetic oligonucleotide
tgttcaggttcctgagcagcgatgaatgga

SEQ ID NO: 327767 - DNA, 30 bp, Artificial Sequence
  Synthetic oligonucleotide
tttgcacctgaaataaataaagtgaatgga

SEQ ID NO: 327768 - DNA, 30 bp, Artificial Sequence
  Synthetic oligonucleotide
ggcactgcggtatatttgacaactaatgga

SEQ ID NO: 327769 - DNA, 30 bp, Artificial Sequence
  Synthetic oligonucleotide
gactgagggctatggggcagcgaacatgga

SEQ ID NO: 327770 - DNA, 30 bp, Artificial Sequence
  Synthetic oligonucleotide
agtaatttcttttatagcgaataacatgga

SEQ ID NO: 327771 - DNA, 30 bp, Artificial Sequence
  Synthetic oligonucleotide
ggggcacctaccattttgctgatacatgga

SEQ ID NO: 327772 - DNA, 30 bp, Artificial Sequence
  Synthetic oligonucleotide
ccaggtaaatcgtcatgccctctacatgga

SEQ ID NO: 327773 - DNA, 30 bp, Artificial Sequence
  Synthetic oligonucleotide
ctcgatccattcgtcaaaatataccatgga

SEQ ID NO: 327774 - DNA, 30 bp, Artificial Sequence
  Synthetic oligonucleotide
atggacgacatttcacttttcatgcatgga

SEQ ID NO: 327775 - DNA, 30 bp, Artificial Sequence
  Synthetic oligonucleotide
actaaagtacatggattattcgtgcatgga

SEQ ID NO: 327776 - DNA, 30 bp, Artificial Sequence
  Synthetic oligonucleotide
attgttagtaatcggattagctgtcatgga

SEQ ID NO: 327777 - DNA, 30 bp, Artificial Sequence
  Synthetic oligonucleotide
tgacttgtgtacgggatcccccttcatgga

SEQ ID NO: 327778 - DNA, 30 bp, Artificial Sequence
  Synthetic oligonucleotide
ataacgatgtggcacaataggtttcatgga

SEQ ID NO: 327779 - DNA, 30 bp, Artificial Sequence
  Synthetic oligonucleotide
agtccaaagaaattcgcattttaagatgga

SEQ ID NO: 327780 - DNA, 30 bp, Artificial Sequence
  Synthetic oligonucleotide
ccattgtccattggttttagacgagatgga

SEQ ID NO: 327781 - DNA, 30 bp, Artificial Sequence
  Synthetic oligonucleotide
tcccataagggccactcaatttatgatgga

SEQ ID NO: 327782 - DNA, 30 bp, Artificial Sequence
  Synthetic oligonucleotide
ggtttggagtgaaggcagttttgtgatgga

SEQ ID NO: 327783 - DNA, 30 bp, Artificial Sequence
  Synthetic oligonucleotide
ggtcttggacacagggtagcgttatatgga

SEQ ID NO: 327784 - DNA, 30 bp, Artificial Sequence
  Synthetic oligonucleotide
ttgtacatgctgccgccatagtactatgga

SEQ ID NO: 327785 - DNA, 30 bp, Artificial Sequence
  Synthetic oligonucleotide
gagcgctaagtttaatatatatgctatgga

SEQ ID NO: 327786 - DNA, 30 bp, Artificial Sequence
  Synthetic oligonucleotide
ggtcatatttacttttttctacgcactgga

SEQ ID NO: 327787 - DNA, 30 bp, Artificial Sequence
  Synthetic oligonucleotide
cagctggccatactaggtccatgcactgga

SEQ ID NO: 327788 - DNA, 30 bp, Artificial Sequence
  Synthetic oligonucleotide
gctaccacgggatgcgtaacgtgcactgga

SEQ ID NO: 327789 - DNA, 30 bp, Artificial Sequence
  Synthetic oligonucleotide
actatccggtaacctgctgttgtcactgga

SEQ ID NO: 327790 - DNA, 30 bp, Artificial Sequence
  Synthetic oligonucleotide
accgtctaagcattggagacctcgactgga

SEQ ID NO: 327791 - DNA, 30 bp, Artificial Sequence
  Synthetic oligonucleotide
gccccacattcatcaatcgtttcgactgga

SEQ ID NO: 327792 - DNA, 29 bp, Artificial Sequence
  Synthetic oligonucleotide
gtggctcgcggaaaaccgttttgactgga

SEQ ID NO: 327793 - DNA, 30 bp, Artificial Sequence
  Synthetic oligonucleotide
ggagtataggggtggagtaggcctactgga

SEQ ID NO: 327794 - DNA, 30 bp, Artificial Sequence
  Synthetic oligonucleotide
taatttttaatattggtacaatgtactgga

SEQ ID NO: 327795 - DNA, 31 bp, Artificial Sequence
  Synthetic oligonucleotide
atctggcgcggaaactgggacgtgtactgga

SEQ ID NO: 327796 - DNA, 30 bp, Artificial Sequence
  Synthetic oligonucleotide
aagttggattgacgacaacatacgcctgga

SEQ ID NO: 327797 - DNA, 30 bp, Artificial Sequence
  Synthetic oligonucleotide
accgtagcaatacaggttcatgcgcctgga

SEQ ID NO: 327798 - DNA, 30 bp, Artificial Sequence
  Synthetic oligonucleotide
tatgtcgaacgtcagtcaaggaatcctgga

SEQ ID NO: 327799 - DNA, 30 bp, Artificial Sequence
  Synthetic oligonucleotide
taatattgacggagactacaggctcctgga

SEQ ID NO: 327800 - DNA, 30 bp, Artificial Sequence
  Synthetic oligonucleotide
aggatgtacgcaacgtagccctctcctgga

SEQ ID NO: 327801 - DNA, 30 bp, Artificial Sequence
  Synthetic oligonucleotide
cccgtgcgtaaagtccaatggggtcctgga

SEQ ID NO: 327802 - DNA, 30 bp, Artificial Sequence
  Synthetic oligonucleotide
tatctgctcggtacaagtcttcaagctgga

SEQ ID NO: 327803 - DNA, 30 bp, Artificial Sequence
  Synthetic oligonucleotide
aattagctaatcgtgccgccaaaggctgga

SEQ ID NO: 327804 - DNA, 30 bp, Artificial Sequence
  Synthetic oligonucleotide
taaaaaccaggtttaaatcactcggctgga

SEQ ID NO: 327805 - DNA, 30 bp, Artificial Sequence
  Synthetic oligonucleotide
ttaggtcggccataggagatgctggctgga

SEQ ID NO: 327806 - DNA, 30 bp, Artificial Sequence
  Synthetic oligonucleotide
catgtactacattcaggtgtacatgctgga

SEQ ID NO: 327807 - DNA, 30 bp, Artificial Sequence
  Synthetic oligonucleotide
gctggtagctgttctgtgatgggtgctgga

SEQ ID NO: 327808 - DNA, 30 bp, Artificial Sequence
  Synthetic oligonucleotide
gtctcgcaaacgataagctcttgtgctgga

SEQ ID NO: 327809 - DNA, 30 bp, Artificial Sequence
  Synthetic oligonucleotide
cacctcgaactaggcacgcttacatctgga

SEQ ID NO: 327810 - DNA, 30 bp, Artificial Sequence
  Synthetic oligonucleotide
aatcagcccaacaggtgcagatactctgga

SEQ ID NO: 327811 - DNA, 30 bp, Artificial Sequence
  Synthetic oligonucleotide
gaggagtttcggtgagaatgattctctgga

SEQ ID NO: 327812 - DNA, 30 bp, Artificial Sequence
  Synthetic oligonucleotide
tactcatataataagaacttcgagtctgga

SEQ ID NO: 327813 - DNA, 30 bp, Artificial Sequence
  Synthetic oligonucleotide
catcggcgagacctgtgtctggcgtctgga

SEQ ID NO: 327814 - DNA, 30 bp, Artificial Sequence
  Synthetic oligonucleotide
gtcgtgtgattcctactgaggtcgtctgga

SEQ ID NO: 327815 - DNA, 30 bp, Artificial Sequence
  Synthetic oligonucleotide
ttatccctagtggctttgtgggggtctgga

SEQ ID NO: 327816 - DNA, 30 bp, Artificial Sequence
  Synthetic oligonucleotide
tctgcccatagctcataaaacgcttctgga

SEQ ID NO: 327817 - DNA, 30 bp, Artificial Sequence
  Synthetic oligonucleotide
aaagtgaaccgaaaggggagcttttctgga

SEQ ID NO: 327818 - DNA, 30 bp, Artificial Sequence
  Synthetic oligonucleotide
agcagaggctatggaaatgttaaaagtgga

SEQ ID NO: 327819 - DNA, 30 bp, Artificial Sequence
  Synthetic oligonucleotide
attttacgttgatccaagaaatgaagtgga

SEQ ID NO: 327820 - DNA, 30 bp, Artificial Sequence
  Synthetic oligonucleotide
ggcggattactgacaccatttataagtgga

SEQ ID NO: 327821 - DNA, 30 bp, Artificial Sequence
  Synthetic oligonucleotide
agtgggctggtttggattgtgaacagtgga

SEQ ID NO: 327822 - DNA, 30 bp, Artificial Sequence
  Synthetic oligonucleotide
agtcttgcaacgtgtgcgatcaccagtgga

SEQ ID NO: 327823 - DNA, 30 bp, Artificial Sequence
  Synthetic oligonucleotide
cagcagtaatacgcggacttatccagtgga

SEQ ID NO: 327824 - DNA, 30 bp, Artificial Sequence
  Synthetic oligonucleotide
actcattgcgttagcgtactgcgcagtgga

SEQ ID NO: 327825 - DNA, 30 bp, Artificial Sequence
  Synthetic oligonucleotide
agcaaatggaaatggtccgctcatagtgga

SEQ ID NO: 327826 - DNA, 30 bp, Artificial Sequence
  Synthetic oligonucleotide
acgtacaaggtggcggcgcatcctagtgga

SEQ ID NO: 327827 - DNA, 30 bp, Artificial Sequence
  Synthetic oligonucleotide
agagctctactgtacacgatcttacgtgga

SEQ ID NO: 327828 - DNA, 30 bp, Artificial Sequence
  Synthetic oligonucleotide
tgcaattgtctcagaataagaaaccgtgga

SEQ ID NO: 327829 - DNA, 30 bp, Artificial Sequence
  Synthetic oligonucleotide
tttgccgcatgcattaggttaatccgtgga

SEQ ID NO: 327830 - DNA, 30 bp, Artificial Sequence
  Synthetic oligonucleotide
gcatccaaaggcgaaatgcgtgtccgtgga

SEQ ID NO: 327831 - DNA, 30 bp, Artificial Sequence
  Synthetic oligonucleotide
gcaattggtaaaaactattacttccgtgga

SEQ ID NO: 327832 - DNA, 30 bp, Artificial Sequence
  Synthetic oligonucleotide
aggcgttgcgcagaggcgctatggcgtgga

SEQ ID NO: 327833 - DNA, 30 bp, Artificial Sequence
  Synthetic oligonucleotide
atgcaggtaatctaaagtttgtctcgtgga

SEQ ID NO: 327834 - DNA, 30 bp, Artificial Sequence
  Synthetic oligonucleotide
aatatctgactacggcactatagtcgtgga

SEQ ID NO: 327835 - DNA, 30 bp, Artificial Sequence
  Synthetic oligonucleotide
tattcataaatctaatgttcaggtcgtgga

SEQ ID NO: 327836 - DNA, 30 bp, Artificial Sequence
  Synthetic oligonucleotide
aaaagacaccgtcttgcagaaataggtgga

SEQ ID NO: 327837 - DNA, 30 bp, Artificial Sequence
  Synthetic oligonucleotide
gtctgtgtttaccacctagctaccggtgga

SEQ ID NO: 327838 - DNA, 30 bp, Artificial Sequence
  Synthetic oligonucleotide
accctgcgcctgaagatcttctcgggtgga

SEQ ID NO: 327839 - DNA, 30 bp, Artificial Sequence
  Synthetic oligonucleotide
ctcatgggttcagaccatgtagtgggtgga

SEQ ID NO: 327840 - DNA, 30 bp, Artificial Sequence
  Synthetic oligonucleotide
caggccatgaattgggacggcaatggtgga

SEQ ID NO: 327841 - DNA, 30 bp, Artificial Sequence
  Synthetic oligonucleotide
ttaacgccatccgtaatttctgaatgtgga

SEQ ID NO: 327842 - DNA, 30 bp, Artificial Sequence
  Synthetic oligonucleotide
attccagtcactgcggccaaaccatgtgga

SEQ ID NO: 327843 - DNA, 30 bp, Artificial Sequence
  Synthetic oligonucleotide
taaaatggcacagtgagtcttccatgtgga

SEQ ID NO: 327844 - DNA, 30 bp, Artificial Sequence
  Synthetic oligonucleotide
tttgcacatgctgccagttagcgctgtgga

SEQ ID NO: 327845 - DNA, 30 bp, Artificial Sequence
  Synthetic oligonucleotide
gtgcgggcgatttcggaacttgtctgtgga

SEQ ID NO: 327846 - DNA, 30 bp, Artificial Sequence
  Synthetic oligonucleotide
tacggcctgactgcggcaacgtagtgtgga

SEQ ID NO: 327847 - DNA, 30 bp, Artificial Sequence
  Synthetic oligonucleotide
taatatgcctgcaggatgtttgcgtgtgga

SEQ ID NO: 327848 - DNA, 30 bp, Artificial Sequence
  Synthetic oligonucleotide
caatgtaaatagcaccagcccctgtgtgga

SEQ ID NO: 327849 - DNA, 30 bp, Artificial Sequence
  Synthetic oligonucleotide
tggatactggtattcggtacattgtgtgga

SEQ ID NO: 327850 - DNA, 30 bp, Artificial Sequence
  Synthetic oligonucleotide
tctagtaccttaaagagacccaattgtgga

SEQ ID NO: 327851 - DNA, 30 bp, Artificial Sequence
  Synthetic oligonucleotide
tatgcaatgagtgtaagtccatgttgtgga

SEQ ID NO: 327852 - DNA, 30 bp, Artificial Sequence
  Synthetic oligonucleotide
ccatgaatgtgacttagttgcatttgtgga

SEQ ID NO: 327853 - DNA, 30 bp, Artificial Sequence
  Synthetic oligonucleotide
gcgttgcgtccgtatgctcccccaattgga

SEQ ID NO: 327854 - DNA, 30 bp, Artificial Sequence
  Synthetic oligonucleotide
tttggattgtctgtgtcttggtgaattgga

SEQ ID NO: 327855 - DNA, 30 bp, Artificial Sequence
  Synthetic oligonucleotide
atctggttaataatgaagaagcacattgga

SEQ ID NO: 327856 - DNA, 30 bp, Artificial Sequence
  Synthetic oligonucleotide
gcatcctattatcacaatggtgggattgga

SEQ ID NO: 327857 - DNA, 31 bp, Artificial Sequence
  Synthetic oligonucleotide
gaaccgtggaagggggttttgggtgattgga

SEQ ID NO: 327858 - DNA, 30 bp, Artificial Sequence
  Synthetic oligonucleotide
agtaagggtgagggtgagaggcgtattgga

SEQ ID NO: 327859 - DNA, 30 bp, Artificial Sequence
  Synthetic oligonucleotide
gcgccggccgaggtgttctggcgtattgga

SEQ ID NO: 327860 - DNA, 30 bp, Artificial Sequence
  Synthetic oligonucleotide
gtcggcatagcgccttcatttggtattgga

SEQ ID NO: 327861 - DNA, 30 bp, Artificial Sequence
  Synthetic oligonucleotide
cccaactctacaaaacagccctttattgga

SEQ ID NO: 327862 - DNA, 30 bp, Artificial Sequence
  Synthetic oligonucleotide
tgtcaacataagtctatgggaaaacttgga

SEQ ID NO: 327863 - DNA, 30 bp, Artificial Sequence
  Synthetic oligonucleotide
tggcaagtttttgcgggttggcaacttgga

SEQ ID NO: 327864 - DNA, 30 bp, Artificial Sequence
  Synthetic oligonucleotide
ggcattgcatgatgacaaaggtcacttgga

SEQ ID NO: 327865 - DNA, 30 bp, Artificial Sequence
  Synthetic oligonucleotide
aataaaagtatacgactttcctgacttgga

SEQ ID NO: 327866 - DNA, 30 bp, Artificial Sequence
  Synthetic oligonucleotide
gtcatccattagtggcggtagcaccttgga

SEQ ID NO: 327867 - DNA, 30 bp, Artificial Sequence
  Synthetic oligonucleotide
atcagcgggcgcgcggcacaaatgcttgga

SEQ ID NO: 327868 - DNA, 30 bp, Artificial Sequence
  Synthetic oligonucleotide
cagagactcggccagttcttagtgcttgga

SEQ ID NO: 327869 - DNA, 30 bp, Artificial Sequence
  Synthetic oligonucleotide
aataccaagatggtgaagtgggatcttgga

SEQ ID NO: 327870 - DNA, 29 bp, Artificial Sequence
  Synthetic oligonucleotide
tactcaatttctacgttaacggtcttgga

SEQ ID NO: 327871 - DNA, 30 bp, Artificial Sequence
  Synthetic oligonucleotide
ccgcaagcagatcagtccacagttcttgga

SEQ ID NO: 327872 - DNA, 30 bp, Artificial Sequence
  Synthetic oligonucleotide
gggcggcacccgtgaccgtcggttcttgga

SEQ ID NO: 327873 - DNA, 30 bp, Artificial Sequence
  Synthetic oligonucleotide
taagaataatggcggcgtatcgaagttgga

SEQ ID NO: 327874 - DNA, 30 bp, Artificial Sequence
  Synthetic oligonucleotide
ttcggtgggcgtacaggatggaccgttgga

SEQ ID NO: 327875 - DNA, 30 bp, Artificial Sequence
  Synthetic oligonucleotide
ggctcagctaacgaaagtaagtccgttgga

SEQ ID NO: 327876 - DNA, 30 bp, Artificial Sequence
  Synthetic oligonucleotide
atgtggaggagctcatcgttaggtgttgga

SEQ ID NO: 327877 - DNA, 30 bp, Artificial Sequence
  Synthetic oligonucleotide
actggcccgacgttaactcctattgttgga

SEQ ID NO: 327878 - DNA, 30 bp, Artificial Sequence
  Synthetic oligonucleotide
tcaaggaaatcattacatcatgttgttgga

SEQ ID NO: 327879 - DNA, 30 bp, Artificial Sequence
  Synthetic oligonucleotide
agctcactccgatcggagtactttgttgga

SEQ ID NO: 327880 - DNA, 30 bp, Artificial Sequence
  Synthetic oligonucleotide
tagagcgtcttgcgagttcaacaatttgga

SEQ ID NO: 327881 - DNA, 30 bp, Artificial Sequence
  Synthetic oligonucleotide
atactcccagggcagttatttcgatttgga

SEQ ID NO: 327882 - DNA, 30 bp, Artificial Sequence
  Synthetic oligonucleotide
tacttgagggaacaactctgttgatttgga

SEQ ID NO: 327883 - DNA, 30 bp, Artificial Sequence
  Synthetic oligonucleotide
tcctgccagctgccttatactctatttgga

SEQ ID NO: 327884 - DNA, 30 bp, Artificial Sequence
  Synthetic oligonucleotide
tatcatccttggctgtcaaatgtatttgga

SEQ ID NO: 327885 - DNA, 30 bp, Artificial Sequence
  Synthetic oligonucleotide
agccaggcagaatatgtaacattatttgga

SEQ ID NO: 327886 - DNA, 30 bp, Artificial Sequence
  Synthetic oligonucleotide
aacaacctcgtcaaagaaaatcgctttgga

SEQ ID NO: 327887 - DNA, 30 bp, Artificial Sequence
  Synthetic oligonucleotide
aaatgtcttgagaccacgatatgctttgga

SEQ ID NO: 327888 - DNA, 30 bp, Artificial Sequence
  Synthetic oligonucleotide
acggaccagcccttcatcactacgtttgga

SEQ ID NO: 327889 - DNA, 30 bp, Artificial Sequence
  Synthetic oligonucleotide
agacccgtgtggactcattttaggtttgga

SEQ ID NO: 327890 - DNA, 30 bp, Artificial Sequence
  Synthetic oligonucleotide
aaagacaatcaaatggattgatattttgga

SEQ ID NO: 327891 - DNA, 30 bp, Artificial Sequence
  Synthetic oligonucleotide
ctcacatcgagttccggccggtgttttgga

SEQ ID NO: 327892 - DNA, 30 bp, Artificial Sequence
  Synthetic oligonucleotide
acacgtcgatttaatcaccgagtttttgga

SEQ ID NO: 327893 - DNA, 30 bp, Artificial Sequence
  Synthetic oligonucleotide
gacaatagatgtgtatattttcacaaatga

SEQ ID NO: 327894 - DNA, 30 bp, Artificial Sequence
  Synthetic oligonucleotide
attagggtttcatgttacaaagcgaaatga

SEQ ID NO: 327895 - DNA, 30 bp, Artificial Sequence
  Synthetic oligonucleotide
aagtgatggtatcagacagtctcgaaatga

SEQ ID NO: 327896 - DNA, 30 bp, Artificial Sequence
  Synthetic oligonucleotide
gcggtacgtgcacgtcctagtattcaatga

SEQ ID NO: 327897 - DNA, 30 bp, Artificial Sequence
  Synthetic oligonucleotide
tgccgagaaaaccatgaacccgtagaatga

SEQ ID NO: 327898 - DNA, 30 bp, Artificial Sequence
  Synthetic oligonucleotide
gataccacgcacgggtaaagtgtagaatga

SEQ ID NO: 327899 - DNA, 30 bp, Artificial Sequence
  Synthetic oligonucleotide
tagatgtaaggcgcccgagtttcggaatga

SEQ ID NO: 327900 - DNA, 30 bp, Artificial Sequence
  Synthetic oligonucleotide
taatatggaaccgaaaacaaacgggaatga

SEQ ID NO: 327901 - DNA, 30 bp, Artificial Sequence
  Synthetic oligonucleotide
gatgttttggtttgttgggaccttgaatga

SEQ ID NO: 327902 - DNA, 30 bp, Artificial Sequence
  Synthetic oligonucleotide
atagttccccagttggattccggctaatga

SEQ ID NO: 327903 - DNA, 30 bp, Artificial Sequence
  Synthetic oligonucleotide
catcacgtagagtcacacatgcggtaatga

SEQ ID NO: 327904 - DNA, 30 bp, Artificial Sequence
  Synthetic oligonucleotide
agagtttctatagcgacaagggggtaatga

SEQ ID NO: 327905 - DNA, 30 bp, Artificial Sequence
  Synthetic oligonucleotide
tttgagcccttctgtctatcttaaacatga

SEQ ID NO: 327906 - DNA, 30 bp, Artificial Sequence
  Synthetic oligonucleotide
catcggaggtgctattgcatggacacatga

SEQ ID NO: 327907 - DNA, 30 bp, Artificial Sequence
  Synthetic oligonucleotide
ggggaagttgccttgcaaagagtcacatga

SEQ ID NO: 327908 - DNA, 30 bp, Artificial Sequence
  Synthetic oligonucleotide
ggcatcgatcaatgtcatagtcagacatga

SEQ ID NO: 327909 - DNA, 30 bp, Artificial Sequence
  Synthetic oligonucleotide
gcatatggctatcattccttctagacatga

SEQ ID NO: 327910 - DNA, 30 bp, Artificial Sequence
  Synthetic oligonucleotide
tacatgtagttgaactgccgatcgacatga

SEQ ID NO: 327911 - DNA, 30 bp, Artificial Sequence
  Synthetic oligonucleotide
cataagggaacggttaagtatctgacatga

SEQ ID NO: 327912 - DNA, 30 bp, Artificial Sequence
  Synthetic oligonucleotide
taataacaatagacacattgaagtacatga

SEQ ID NO: 327913 - DNA, 30 bp, Artificial Sequence
  Synthetic oligonucleotide
tagaagcgtcaccgcgatccgataccatga

SEQ ID NO: 327914 - DNA, 30 bp, Artificial Sequence
  Synthetic oligonucleotide
acctaatgatggggtcagtataccccatga

SEQ ID NO: 327915 - DNA, 30 bp, Artificial Sequence
  Synthetic oligonucleotide
tataatagtggacgctcaagatgcccatga

SEQ ID NO: 327916 - DNA, 30 bp, Artificial Sequence
  Synthetic oligonucleotide
tagtaactccggtgcggtgagacgccatga

SEQ ID NO: 327917 - DNA, 30 bp, Artificial Sequence
  Synthetic oligonucleotide
cgacaaaaccggcgttccgcacatccatga

SEQ ID NO: 327918 - DNA, 30 bp, Artificial Sequence
  Synthetic oligonucleotide
agtgagaataagggctgatgtagtccatga

SEQ ID NO: 327919 - DNA, 30 bp, Artificial Sequence
  Synthetic oligonucleotide
gaaacattcgctgtgaaactcggagcatga

SEQ ID NO: 327920 - DNA, 30 bp, Artificial Sequence
  Synthetic oligonucleotide
gcatggaatcgggacagagtttgcgcatga

SEQ ID NO: 327921 - DNA, 30 bp, Artificial Sequence
  Synthetic oligonucleotide
agtgatacgatgcaatgtgtcttcgcatga

SEQ ID NO: 327922 - DNA, 30 bp, Artificial Sequence
  Synthetic oligonucleotide
gccgcacagcttagcttatccagtgcatga

SEQ ID NO: 327923 - DNA, 30 bp, Artificial Sequence
  Synthetic oligonucleotide
cagatagtctgcctcagcagctgctcatga

SEQ ID NO: 327924 - DNA, 30 bp, Artificial Sequence
  Synthetic oligonucleotide
cagatgttggcctagtaggtagggtcatga

SEQ ID NO: 327925 - DNA, 30 bp, Artificial Sequence
  Synthetic oligonucleotide
ggatttacggttcacctacgggtaagatga

SEQ ID NO: 327926 - DNA, 30 bp, Artificial Sequence
  Synthetic oligonucleotide
accccacaattccagatatagtccagatga

SEQ ID NO: 327927 - DNA, 30 bp, Artificial Sequence
  Synthetic oligonucleotide
tagagtacactgatacgatcatggagatga

SEQ ID NO: 327928 - DNA, 30 bp, Artificial Sequence
  Synthetic oligonucleotide
aatgaaggctactctggtatgcctagatga

SEQ ID NO: 327929 - DNA, 30 bp, Artificial Sequence
  Synthetic oligonucleotide
accatgggcggccagttaaaatctagatga

SEQ ID NO: 327930 - DNA, 30 bp, Artificial Sequence
  Synthetic oligonucleotide
gatttctaagagggttagcgtgaccgatga

SEQ ID NO: 327931 - DNA, 30 bp, Artificial Sequence
  Synthetic oligonucleotide
aaataatcgggcatggggcagtagcgatga

SEQ ID NO: 327932 - DNA, 30 bp, Artificial Sequence
  Synthetic oligonucleotide
ctgggcttagggtagaactcttagcgatga

SEQ ID NO: 327933 - DNA, 30 bp, Artificial Sequence
  Synthetic oligonucleotide
ttatgcagcgcggaagaaacggcgcgatga

SEQ ID NO: 327934 - DNA, 30 bp, Artificial Sequence
  Synthetic oligonucleotide
gtaaaataggcagctggcaggcaaggatga

SEQ ID NO: 327935 - DNA, 30 bp, Artificial Sequence
  Synthetic oligonucleotide
cttaagtcaccgtactgactcagaggatga

SEQ ID NO: 327936 - DNA, 30 bp, Artificial Sequence
  Synthetic oligonucleotide
tactgtgaaattgccacatcagacggatga

SEQ ID NO: 327937 - DNA, 30 bp, Artificial Sequence
  Synthetic oligonucleotide
gagctttatacggatgggcgacccggatga

SEQ ID NO: 327938 - DNA, 30 bp, Artificial Sequence
  Synthetic oligonucleotide
gtaacctcatgactgcgaaggttcggatga

SEQ ID NO: 327939 - DNA, 30 bp, Artificial Sequence
  Synthetic oligonucleotide
cgtgtaaagatcaaattgcgtaggggatga

SEQ ID NO: 327940 - DNA, 30 bp, Artificial Sequence
  Synthetic oligonucleotide
agggacgcagacaatacgcctgtgggatga

SEQ ID NO: 327941 - DNA, 30 bp, Artificial Sequence
  Synthetic oligonucleotide
ccatatgaggaccggctataccaatgatga

SEQ ID NO: 327942 - DNA, 30 bp, Artificial Sequence
  Synthetic oligonucleotide
aacgcaggtcctacgatttatatctgatga

SEQ ID NO: 327943 - DNA, 30 bp, Artificial Sequence
  Synthetic oligonucleotide
tccaagtcaaaggggctcgttctctgatga

SEQ ID NO: 327944 - DNA, 30 bp, Artificial Sequence
  Synthetic oligonucleotide
ttatagtaatccaacgaggagaggtgatga

SEQ ID NO: 327945 - DNA, 30 bp, Artificial Sequence
  Synthetic oligonucleotide
gccatcaagagtgttcgattgaggtgatga

SEQ ID NO: 327946 - DNA, 30 bp, Artificial Sequence
  Synthetic oligonucleotide
gggaggcaagtatggcaacgaccttgatga

SEQ ID NO: 327947 - DNA, 30 bp, Artificial Sequence
  Synthetic oligonucleotide
ttggttagcaggcgtatatgacgttgatga

SEQ ID NO: 327948 - DNA, 30 bp, Artificial Sequence
  Synthetic oligonucleotide
caaggttttttaaggccttactgttgatga

SEQ ID NO: 327949 - DNA, 30 bp, Artificial Sequence
  Synthetic oligonucleotide
ctcaataccgtttccccggcgctaatatga

SEQ ID NO: 327950 - DNA, 30 bp, Artificial Sequence
  Synthetic oligonucleotide
ggtttagccgagtgtctggcgttaatatga

SEQ ID NO: 327951 - DNA, 30 bp, Artificial Sequence
  Synthetic oligonucleotide
tggctcgggcctacacgccaatgcatatga

SEQ ID NO: 327952 - DNA, 30 bp, Artificial Sequence
  Synthetic oligonucleotide
tctggtcactggacgaaggtcgagatatga

SEQ ID NO: 327953 - DNA, 30 bp, Artificial Sequence
  Synthetic oligonucleotide
tagagtagctccgtattgtatgagatatga

SEQ ID NO: 327954 - DNA, 30 bp, Artificial Sequence
  Synthetic oligonucleotide
tagttttgtgccggattggggaatatatga

SEQ ID NO: 327955 - DNA, 30 bp, Artificial Sequence
  Synthetic oligonucleotide
gcgagcggtggaagagacctgcatatatga

SEQ ID NO: 327956 - DNA, 30 bp, Artificial Sequence
  Synthetic oligonucleotide
aaccttgactgggcacaacaggatatatga

SEQ ID NO: 327957 - DNA, 30 bp, Artificial Sequence
  Synthetic oligonucleotide
cattcgtactgacctaaatcgtctatatga

SEQ ID NO: 327958 - DNA, 30 bp, Artificial Sequence
  Synthetic oligonucleotide
actaaaatagacggatagctcagactatga

SEQ ID NO: 327959 - DNA, 30 bp, Artificial Sequence
  Synthetic oligonucleotide
ctaatcaaggggtacacgaagtacctatga

SEQ ID NO: 327960 - DNA, 30 bp, Artificial Sequence
  Synthetic oligonucleotide
cgacgtcctggatgctgtatcgtcctatga

SEQ ID NO: 327961 - DNA, 30 bp, Artificial Sequence
  Synthetic oligonucleotide
cattgcagggggaacgtaacattcctatga

SEQ ID NO: 327962 - DNA, 30 bp, Artificial Sequence
  Synthetic oligonucleotide
acaggctcggcaatcgcattagagctatga

SEQ ID NO: 327963 - DNA, 30 bp, Artificial Sequence
  Synthetic oligonucleotide
catcttctgtcaagcaaagcttatctatga

SEQ ID NO: 327964 - DNA, 30 bp, Artificial Sequence
  Synthetic oligonucleotide
ttgatttcgcttgattgatacactctatga

SEQ ID NO: 327965 - DNA, 30 bp, Artificial Sequence
  Synthetic oligonucleotide
acgcactgtatagcataggccgctctatga

SEQ ID NO: 327966 - DNA, 30 bp, Artificial Sequence
  Synthetic oligonucleotide
cgattactcagtgtatggagtagtctatga

SEQ ID NO: 327967 - DNA, 30 bp, Artificial Sequence
  Synthetic oligonucleotide
cgtgtgctaggatacgattgtattctatga

SEQ ID NO: 327968 - DNA, 30 bp, Artificial Sequence
  Synthetic oligonucleotide
gagcgccaaatatggacaaactttctatga

SEQ ID NO: 327969 - DNA, 30 bp, Artificial Sequence
  Synthetic oligonucleotide
cggtcgatttaaacgcgggcacaagtatga

SEQ ID NO: 327970 - DNA, 30 bp, Artificial Sequence
  Synthetic oligonucleotide
tgtgcggttattgcgcaatgggaagtatga

SEQ ID NO: 327971 - DNA, 30 bp, Artificial Sequence
  Synthetic oligonucleotide
ttatgcgtgccaatggacatctgagtatga

SEQ ID NO: 327972 - DNA, 30 bp, Artificial Sequence
  Synthetic oligonucleotide
gggctttccccgaagacatatagggtatga

SEQ ID NO: 327973 - DNA, 30 bp, Artificial Sequence
  Synthetic oligonucleotide
tagaattccggggcagttacactggtatga

SEQ ID NO: 327974 - DNA, 30 bp, Artificial Sequence
  Synthetic oligonucleotide
agacggttcctctgataatttcctgtatga

SEQ ID NO: 327975 - DNA, 30 bp, Artificial Sequence
  Synthetic oligonucleotide
gactaaagggagataaaattggttgtatga

SEQ ID NO: 327976 - DNA, 30 bp, Artificial Sequence
  Synthetic oligonucleotide
cagagagccccgctcgaaaaaaaattatga

SEQ ID NO: 327977 - DNA, 30 bp, Artificial Sequence
  Synthetic oligonucleotide
ttcgtactaaatggacaacgctcattatga

SEQ ID NO: 327978 - DNA, 30 bp, Artificial Sequence
  Synthetic oligonucleotide
gtaggcgcagtactggcactaagattatga

SEQ ID NO: 327979 - DNA, 30 bp, Artificial Sequence
  Synthetic oligonucleotide
aattcacaaatgttcttacggggattatga

SEQ ID NO: 327980 - DNA, 30 bp, Artificial Sequence
  Synthetic oligonucleotide
gcatcgcgttgcagcaagattttattatga

SEQ ID NO: 327981 - DNA, 30 bp, Artificial Sequence
  Synthetic oligonucleotide
cttagcccgatatacgtgcattccttatga

SEQ ID NO: 327982 - DNA, 30 bp, Artificial Sequence
  Synthetic oligonucleotide
gatctgggtgtcaacagtgactgtttatga

SEQ ID NO: 327983 - DNA, 30 bp, Artificial Sequence
  Synthetic oligonucleotide
gagtaggaaggtttggtatcgattttatga

SEQ ID NO: 327984 - DNA, 30 bp, Artificial Sequence
  Synthetic oligonucleotide
ttgggtcgattttgtatgtttctaaactga

SEQ ID NO: 327985 - DNA, 30 bp, Artificial Sequence
  Synthetic oligonucleotide
cgaagagatgattgctttctcaccaactga

SEQ ID NO: 327986 - DNA, 30 bp, Artificial Sequence
  Synthetic oligonucleotide
tggggacaggttcgtccggtagggaactga

SEQ ID NO: 327987 - DNA, 30 bp, Artificial Sequence
  Synthetic oligonucleotide
ttagggtctgatgagcctggtaaacactga

SEQ ID NO: 327988 - DNA, 30 bp, Artificial Sequence
  Synthetic oligonucleotide
gatccgagcattgcctggattcaacactga

SEQ ID NO: 327989 - DNA, 30 bp, Artificial Sequence
  Synthetic oligonucleotide
ccttcatttaccatggagcaggcacactga

SEQ ID NO: 327990 - DNA, 30 bp, Artificial Sequence
  Synthetic oligonucleotide
ctagggcctcgcgaggggtcaaggcactga

SEQ ID NO: 327991 - DNA, 30 bp, Artificial Sequence
  Synthetic oligonucleotide
cgagcctcacgtgctcatagaaatcactga

SEQ ID NO: 327992 - DNA, 30 bp, Artificial Sequence
  Synthetic oligonucleotide
gcatggtcggatgataggcgtggcgactga

SEQ ID NO: 327993 - DNA, 30 bp, Artificial Sequence
  Synthetic oligonucleotide
tagaaagagaatgcagcatgacatgactga

SEQ ID NO: 327994 - DNA, 30 bp, Artificial Sequence
  Synthetic oligonucleotide
ccggcaacaatcagcgcggcacaatactga

SEQ ID NO: 327995 - DNA, 30 bp, Artificial Sequence
  Synthetic oligonucleotide
agattccattgataacatgtcgactactga

SEQ ID NO: 327996 - DNA, 30 bp, Artificial Sequence
  Synthetic oligonucleotide
tatggtatctttgccagcggaacgtactga

SEQ ID NO: 327997 - DNA, 30 bp, Artificial Sequence
  Synthetic oligonucleotide
actccgccggtggggcgccagtggtactga

SEQ ID NO: 327998 - DNA, 30 bp, Artificial Sequence
  Synthetic oligonucleotide
gttgtaatctaggattattgatattactga

SEQ ID NO: 327999 - DNA, 30 bp, Artificial Sequence
  Synthetic oligonucleotide
gagctacgataccctactcgctattactga

SEQ ID NO: 328000 - DNA, 30 bp, Artificial Sequence
  Synthetic oligonucleotide
ctaaactttactatagactctaaaacctga

SEQ ID NO: 328001 - DNA, 30 bp, Artificial Sequence
  Synthetic oligonucleotide
agacagaaggtatacaggaatagcacctga

SEQ ID NO: 328002 - DNA, 30 bp, Artificial Sequence
  Synthetic oligonucleotide
atgtctgtcgcgatggagtcgcagacctga

SEQ ID NO: 328003 - DNA, 30 bp, Artificial Sequence
  Synthetic oligonucleotide
tggattctaactacttatgatagtacctga

SEQ ID NO: 328004 - DNA, 30 bp, Artificial Sequence
  Synthetic oligonucleotide
actgaacaataaaacagttttattacctga

SEQ ID NO: 328005 - DNA, 30 bp, Artificial Sequence
  Synthetic oligonucleotide
gggggaggttctggattgttaggcccctga

SEQ ID NO: 328006 - DNA, 30 bp, Artificial Sequence
  Synthetic oligonucleotide
attgataattgctagttgcggttagcctga

SEQ ID NO: 328007 - DNA, 30 bp, Artificial Sequence
  Synthetic oligonucleotide
gccaataagccgtacacggcaaacgcctga

SEQ ID NO: 328008 - DNA, 30 bp, Artificial Sequence
  Synthetic oligonucleotide
gctgaaagttaggaactcaaaggggcctga

SEQ ID NO: 328009 - DNA, 30 bp, Artificial Sequence
  Synthetic oligonucleotide
agcgggtattcgcactaaatctgtgcctga

SEQ ID NO: 328010 - DNA, 30 bp, Artificial Sequence
  Synthetic oligonucleotide
tggcatgggttggggcctgcacttgcctga

SEQ ID NO: 328011 - DNA, 30 bp, Artificial Sequence
  Synthetic oligonucleotide
cagaaagggttaatggcgtgctaatcctga

SEQ ID NO: 328012 - DNA, 30 bp, Artificial Sequence
  Synthetic oligonucleotide
gagacgttgcgtcaattgtccatatcctga

SEQ ID NO: 328013 - DNA, 30 bp, Artificial Sequence
  Synthetic oligonucleotide
cgtacaacaagttgcctccccaggtcctga

SEQ ID NO: 328014 - DNA, 30 bp, Artificial Sequence
  Synthetic oligonucleotide
cttccaactggcggatcgcacgaaagctga

SEQ ID NO: 328015 - DNA, 30 bp, Artificial Sequence
  Synthetic oligonucleotide
cattggacgagtcgcgcaagactaagctga

SEQ ID NO: 328016 - DNA, 30 bp, Artificial Sequence
  Synthetic oligonucleotide
atgtctggtactctaagaggtgccagctga

SEQ ID NO: 328017 - DNA, 30 bp, Artificial Sequence
  Synthetic oligonucleotide
cgcttagattaccagcaatgaatcagctga

SEQ ID NO: 328018 - DNA, 30 bp, Artificial Sequence
  Synthetic oligonucleotide
agttgtaggattctatctacgcaacgctga

SEQ ID NO: 328019 - DNA, 30 bp, Artificial Sequence
  Synthetic oligonucleotide
ttagggtacgaacagtgtgctcgccgctga

SEQ ID NO: 328020 - DNA, 30 bp, Artificial Sequence
  Synthetic oligonucleotide
atggtcgcagtctgatacgtgccgcgctga

SEQ ID NO: 328021 - DNA, 30 bp, Artificial Sequence
  Synthetic oligonucleotide
tcgtgactacaggacaagacgaatcgctga

SEQ ID NO: 328022 - DNA, 30 bp, Artificial Sequence
  Synthetic oligonucleotide
agttcttaaagcaatatacagattcgctga

SEQ ID NO: 328023 - DNA, 30 bp, Artificial Sequence
  Synthetic oligonucleotide
gtctagcacgcccacctccaggcaggctga

SEQ ID NO: 328024 - DNA, 30 bp, Artificial Sequence
  Synthetic oligonucleotide
atctctggccaggaggcacaaggatgctga

SEQ ID NO: 328025 - DNA, 30 bp, Artificial Sequence
  Synthetic oligonucleotide
gctgtggtctctgccacattagtaatctga

SEQ ID NO: 328026 - DNA, 30 bp, Artificial Sequence
  Synthetic oligonucleotide
gggccatgctgggttattatctagatctga

SEQ ID NO: 328027 - DNA, 30 bp, Artificial Sequence
  Synthetic oligonucleotide
tagcggagcttgtcgtatgttgggatctga

SEQ ID NO: 328028 - DNA, 30 bp, Artificial Sequence
  Synthetic oligonucleotide
gggacatttaatattgagacggtgatctga

SEQ ID NO: 328029 - DNA, 30 bp, Artificial Sequence
  Synthetic oligonucleotide
ttctagatgctacagtaaacaaatatctga

SEQ ID NO: 328030 - DNA, 30 bp, Artificial Sequence
  Synthetic oligonucleotide
gtggcgtgaacatcgttagtgaaactctga

SEQ ID NO: 328031 - DNA, 30 bp, Artificial Sequence
  Synthetic oligonucleotide
ggattgcgacggatcagatgtaaactctga

SEQ ID NO: 328032 - DNA, 30 bp, Artificial Sequence
  Synthetic oligonucleotide
cgggtttgtctcaggacgagggcactctga

SEQ ID NO: 328033 - DNA, 30 bp, Artificial Sequence
  Synthetic oligonucleotide
agagtgcaaccatttgaccctgccctctga

SEQ ID NO: 328034 - DNA, 30 bp, Artificial Sequence
  Synthetic oligonucleotide
tgatacagcaggggcccgacagtcctctga

SEQ ID NO: 328035 - DNA, 30 bp, Artificial Sequence
  Synthetic oligonucleotide
gaatccaaaagggcaacgtcgttcctctga

SEQ ID NO: 328036 - DNA, 30 bp, Artificial Sequence
  Synthetic oligonucleotide
tacagaattaacatagaggtggagctctga

SEQ ID NO: 328037 - DNA, 30 bp, Artificial Sequence
  Synthetic oligonucleotide
tagcgctcgtggggtttaatcttgctctga

SEQ ID NO: 328038 - DNA, 30 bp, Artificial Sequence
  Synthetic oligonucleotide
cggacttttctagcagcggaccaagtctga

SEQ ID NO: 328039 - DNA, 30 bp, Artificial Sequence
  Synthetic oligonucleotide
ggtgcgacgtcgagtcggacagaagtctga

SEQ ID NO: 328040 - DNA, 30 bp, Artificial Sequence
  Synthetic oligonucleotide
tctaacgcttcacggattgtaggagtctga

SEQ ID NO: 328041 - DNA, 30 bp, Artificial Sequence
  Synthetic oligonucleotide
attaaatttatattcaactattacgtctga

SEQ ID NO: 328042 - DNA, 30 bp, Artificial Sequence
  Synthetic oligonucleotide
ttgtaaattttttcgggagcacaggtctga

SEQ ID NO: 328043 - DNA, 30 bp, Artificial Sequence
  Synthetic oligonucleotide
gtaacaacatttttacccgcccaggtctga

SEQ ID NO: 328044 - DNA, 30 bp, Artificial Sequence
  Synthetic oligonucleotide
aaattatcccgagctgtacagtcggtctga

SEQ ID NO: 328045 - DNA, 30 bp, Artificial Sequence
  Synthetic oligonucleotide
tcattaggtggtatactaaaacgattctga

SEQ ID NO: 328046 - DNA, 30 bp, Artificial Sequence
  Synthetic oligonucleotide
ctaaaatactctatgctaggcggattctga

SEQ ID NO: 328047 - DNA, 30 bp, Artificial Sequence
  Synthetic oligonucleotide
tatacggagtttaggaagtggtgcttctga

SEQ ID NO: 328048 - DNA, 30 bp, Artificial Sequence
  Synthetic oligonucleotide
cttgatccctgtgtaggaaggatcttctga

SEQ ID NO: 328049 - DNA, 30 bp, Artificial Sequence
  Synthetic oligonucleotide
tacgcggcgaggaaggcattgacgttctga

SEQ ID NO: 328050 - DNA, 30 bp, Artificial Sequence
  Synthetic oligonucleotide
tattctactcgtacaacagtccatttctga

SEQ ID NO: 328051 - DNA, 30 bp, Artificial Sequence
  Synthetic oligonucleotide
ctacacacgtatttctgtttgcccaagtga

SEQ ID NO: 328052 - DNA, 30 bp, Artificial Sequence
  Synthetic oligonucleotide
cagcggatttgattatcacagctcaagtga

SEQ ID NO: 328053 - DNA, 30 bp, Artificial Sequence
  Synthetic oligonucleotide
gatacttcgcataaccaggctccgaagtga

SEQ ID NO: 328054 - DNA, 30 bp, Artificial Sequence
  Synthetic oligonucleotide
ctccctggcgtacacgtattgcataagtga

SEQ ID NO: 328055 - DNA, 30 bp, Artificial Sequence
  Synthetic oligonucleotide
tatgcgtcagacaacacgcggcgtaagtga

SEQ ID NO: 328056 - DNA, 30 bp, Artificial Sequence
  Synthetic oligonucleotide
cagagacttgggaagtactctagacagtga

SEQ ID NO: 328057 - DNA, 30 bp, Artificial Sequence
  Synthetic oligonucleotide
agcgtaagtttccgcctcatctgacagtga

SEQ ID NO: 328058 - DNA, 30 bp, Artificial Sequence
  Synthetic oligonucleotide
gaattcacgtcatgcaataccttacagtga

SEQ ID NO: 328059 - DNA, 30 bp, Artificial Sequence
  Synthetic oligonucleotide
ccgcaggccgctgtcatggtggaccagtga

SEQ ID NO: 328060 - DNA, 30 bp, Artificial Sequence
  Synthetic oligonucleotide
accttgagtttagcctctgtaggccagtga

SEQ ID NO: 328061 - DNA, 30 bp, Artificial Sequence
  Synthetic oligonucleotide
tgaggccatcacgtgaaattctagcagtga

SEQ ID NO: 328062 - DNA, 30 bp, Artificial Sequence
  Synthetic oligonucleotide
ggcgactcacttcgggcagtagaagagtga

SEQ ID NO: 328063 - DNA, 30 bp, Artificial Sequence
  Synthetic oligonucleotide
aaagtccataaacgttggcgatcagagtga

SEQ ID NO: 328064 - DNA, 30 bp, Artificial Sequence
  Synthetic oligonucleotide
atttgctacagaatatcccacttcgagtga

SEQ ID NO: 328065 - DNA, 30 bp, Artificial Sequence
  Synthetic oligonucleotide
gacattgtgccttaaatggttaatgagtga

SEQ ID NO: 328066 - DNA, 30 bp, Artificial Sequence
  Synthetic oligonucleotide
cgtcagtagtgtcctgttcagacgtagtga

SEQ ID NO: 328067 - DNA, 30 bp, Artificial Sequence
  Synthetic oligonucleotide
cccattgtatagtattcggacgcgtagtga

SEQ ID NO: 328068 - DNA, 30 bp, Artificial Sequence
  Synthetic oligonucleotide
cgcactatttgggttagtcccaattagtga

SEQ ID NO: 328069 - DNA, 30 bp, Artificial Sequence
  Synthetic oligonucleotide
gagtccccgtcgaggatgatcctttagtga

SEQ ID NO: 328070 - DNA, 30 bp, Artificial Sequence
  Synthetic oligonucleotide
gattaaatggaacagcagctaacaacgtga

SEQ ID NO: 328071 - DNA, 30 bp, Artificial Sequence
  Synthetic oligonucleotide
gtacgataggcagatgttagcctaacgtga

SEQ ID NO: 328072 - DNA, 30 bp, Artificial Sequence
  Synthetic oligonucleotide
gtaacaatgtttgcgatggctcagacgtga

SEQ ID NO: 328073 - DNA, 30 bp, Artificial Sequence
  Synthetic oligonucleotide
atgtgttgggatacgtcatcccgtacgtga

SEQ ID NO: 328074 - DNA, 30 bp, Artificial Sequence
  Synthetic oligonucleotide
gtaatccatctaataagataatttacgtga

SEQ ID NO: 328075 - DNA, 30 bp, Artificial Sequence
  Synthetic oligonucleotide
tttttgcaacttctctatgtggaaccgtga

SEQ ID NO: 328076 - DNA, 30 bp, Artificial Sequence
  Synthetic oligonucleotide
gcgagtcactgcggggcggcgtaaccgtga

SEQ ID NO: 328077 - DNA, 30 bp, Artificial Sequence
  Synthetic oligonucleotide
tagtacgtgccttcagaggccgctccgtga

SEQ ID NO: 328078 - DNA, 30 bp, Artificial Sequence
  Synthetic oligonucleotide
tcgcaatccgtcctctagccttctccgtga

SEQ ID NO: 328079 - DNA, 30 bp, Artificial Sequence
  Synthetic oligonucleotide
accattccatgccgaccaataggtccgtga

SEQ ID NO: 328080 - DNA, 30 bp, Artificial Sequence
  Synthetic oligonucleotide
gaatagggtttacgcgagtgggcagcgtga

SEQ ID NO: 328081 - DNA, 30 bp, Artificial Sequence
  Synthetic oligonucleotide
gctacttcgcaatgcggcgcgctagcgtga

SEQ ID NO: 328082 - DNA, 30 bp, Artificial Sequence
  Synthetic oligonucleotide
cagtcaacgagcataggtgttggcgcgtga

SEQ ID NO: 328083 - DNA, 30 bp, Artificial Sequence
  Synthetic oligonucleotide
cgtgccctgatgttttgtcatcctgcgtga

SEQ ID NO: 328084 - DNA, 30 bp, Artificial Sequence
  Synthetic oligonucleotide
taagatttcaaaatcaagccacgtgcgtga

SEQ ID NO: 328085 - DNA, 30 bp, Artificial Sequence
  Synthetic oligonucleotide
gtatccatgaattttaccggtgttgcgtga

SEQ ID NO: 328086 - DNA, 30 bp, Artificial Sequence
  Synthetic oligonucleotide
taccctatgcgtcaacatttcgaatcgtga

SEQ ID NO: 328087 - DNA, 30 bp, Artificial Sequence
  Synthetic oligonucleotide
tacatatgtgaccatagtcgctcatcgtga

SEQ ID NO: 328088 - DNA, 30 bp, Artificial Sequence
  Synthetic oligonucleotide
gtcatatcgggtaacggaacattctcgtga

SEQ ID NO: 328089 - DNA, 30 bp, Artificial Sequence
  Synthetic oligonucleotide
acgaggtcggttagtggtaggacgtcgtga

SEQ ID NO: 328090 - DNA, 30 bp, Artificial Sequence
  Synthetic oligonucleotide
tccggcaggggaataaattaaccgtcgtga

SEQ ID NO: 328091 - DNA, 30 bp, Artificial Sequence
  Synthetic oligonucleotide
gaggggccgaagatccgtagtagttcgtga

SEQ ID NO: 328092 - DNA, 30 bp, Artificial Sequence
  Synthetic oligonucleotide
ttaacgggaacaggtatcaacttttcgtga

SEQ ID NO: 328093 - DNA, 30 bp, Artificial Sequence
  Synthetic oligonucleotide
aatcctggccattggaagaggaacaggtga

SEQ ID NO: 328094 - DNA, 30 bp, Artificial Sequence
  Synthetic oligonucleotide
agcttcaatcatagtactacattcaggtga

SEQ ID NO: 328095 - DNA, 29 bp, Artificial Sequence
  Synthetic oligonucleotide
cggatctaatgtctaaaaaagtgaggtga

SEQ ID NO: 328096 - DNA, 30 bp, Artificial Sequence
  Synthetic oligonucleotide
caatgtttcaccatggtcagaacccggtga

SEQ ID NO: 328097 - DNA, 30 bp, Artificial Sequence
  Synthetic oligonucleotide
accaagttacctaaaaataggcagcggtga

SEQ ID NO: 328098 - DNA, 30 bp, Artificial Sequence
  Synthetic oligonucleotide
tccagggtagggcaccgtgcaacgcggtga

SEQ ID NO: 328099 - DNA, 30 bp, Artificial Sequence
  Synthetic oligonucleotide
ctgagtcatctgcacccctgatcgcggtga

SEQ ID NO: 328100 - DNA, 30 bp, Artificial Sequence
  Synthetic oligonucleotide
ttatgacagttccggtgtatacatcggtga

SEQ ID NO: 328101 - DNA, 30 bp, Artificial Sequence
  Synthetic oligonucleotide
gggcgggttataagagagtatactcggtga

SEQ ID NO: 328102 - DNA, 30 bp, Artificial Sequence
  Synthetic oligonucleotide
gaatagtttagatgagttatcacagggtga

SEQ ID NO: 328103 - DNA, 30 bp, Artificial Sequence
  Synthetic oligonucleotide
actttcattgagatcttagttccagggtga

SEQ ID NO: 328104 - DNA, 30 bp, Artificial Sequence
  Synthetic oligonucleotide
ctggactaaagtaatctgttactagggtga

SEQ ID NO: 328105 - DNA, 30 bp, Artificial Sequence
  Synthetic oligonucleotide
aaacaaaacgaacccgttgaaaccgggtga

SEQ ID NO: 328106 - DNA, 30 bp, Artificial Sequence
  Synthetic oligonucleotide
ttaccttgttctttcacacatagcgggtga

SEQ ID NO: 328107 - DNA, 30 bp, Artificial Sequence
  Synthetic oligonucleotide
aattgtagatacatacggtttagcgggtga

SEQ ID NO: 328108 - DNA, 30 bp, Artificial Sequence
  Synthetic oligonucleotide
gcgacatatgatgaggcgctatatgggtga

SEQ ID NO: 328109 - DNA, 30 bp, Artificial Sequence
  Synthetic oligonucleotide
atcttccggaacgatccagtcactgggtga

SEQ ID NO: 328110 - DNA, 30 bp, Artificial Sequence
  Synthetic oligonucleotide
cagccagggttgcttcgtatattatggtga

SEQ ID NO: 328111 - DNA, 30 bp, Artificial Sequence
  Synthetic oligonucleotide
aatgtaaggaagcgcctcagtggctggtga

SEQ ID NO: 328112 - DNA, 30 bp, Artificial Sequence
  Synthetic oligonucleotide
tggggtatagctccgaatgtatcgtggtga

SEQ ID NO: 328113 - DNA, 30 bp, Artificial Sequence
  Synthetic oligonucleotide
gagataaacgcactgacgttgacttggtga

SEQ ID NO: 328114 - DNA, 30 bp, Artificial Sequence
  Synthetic oligonucleotide
agagacctaacctggtcatgttcttggtga

SEQ ID NO: 328115 - DNA, 30 bp, Artificial Sequence
  Synthetic oligonucleotide
gccagcgacagcaaatgaggaatttggtga

SEQ ID NO: 328116 - DNA, 30 bp, Artificial Sequence
  Synthetic oligonucleotide
acaaattttgctgtgcgaggcaaaatgtga

SEQ ID NO: 328117 - DNA, 30 bp, Artificial Sequence
  Synthetic oligonucleotide
gactatcggtttatgctgtagtaaatgtga

SEQ ID NO: 328118 - DNA, 30 bp, Artificial Sequence
  Synthetic oligonucleotide
acctccgagttgcaacagcaagcaatgtga

SEQ ID NO: 328119 - DNA, 30 bp, Artificial Sequence
  Synthetic oligonucleotide
gaaccacattgtcatgaggattgaatgtga

SEQ ID NO: 328120 - DNA, 30 bp, Artificial Sequence
  Synthetic oligonucleotide
caaattctaagtctgtaacgtttaatgtga

SEQ ID NO: 328121 - DNA, 30 bp, Artificial Sequence
  Synthetic oligonucleotide
gggggaaagcgacacgtgcacgacatgtga

SEQ ID NO: 328122 - DNA, 30 bp, Artificial Sequence
  Synthetic oligonucleotide
gcattcggagttcgcacactaaatatgtga

SEQ ID NO: 328123 - DNA, 30 bp, Artificial Sequence
  Synthetic oligonucleotide
tgggtcactcccgtcagatctagtatgtga

SEQ ID NO: 328124 - DNA, 40 bp, Artificial Sequence
  Synthetic oligonucleotide
aaatgggcccacttgctaatgtccctgcgtgttactgtga

SEQ ID NO: 328125 - DNA, 30 bp, Artificial Sequence
  Synthetic oligonucleotide
acggcattaaggttcactaggtcgctgtga

SEQ ID NO: 328126 - DNA, 30 bp, Artificial Sequence
  Synthetic oligonucleotide
tcagaacccaagggcttatgtgatctgtga

SEQ ID NO: 328127 - DNA, 30 bp, Artificial Sequence
  Synthetic oligonucleotide
aggctgcatacgtatcttgaataagtgtga

SEQ ID NO: 328128 - DNA, 30 bp, Artificial Sequence
  Synthetic oligonucleotide
gtacattggtgttgtttttaaacagtgtga

SEQ ID NO: 328129 - DNA, 30 bp, Artificial Sequence
  Synthetic oligonucleotide
cgacaattgtcatcagggtatatagtgtga

SEQ ID NO: 328130 - DNA, 30 bp, Artificial Sequence
  Synthetic oligonucleotide
gggttcgtgcctcaagcgcgtaacgtgtga

SEQ ID NO: 328131 - DNA, 30 bp, Artificial Sequence
  Synthetic oligonucleotide
aacctcaatcatcctcgaattacggtgtga

SEQ ID NO: 328132 - DNA, 30 bp, Artificial Sequence
  Synthetic oligonucleotide
gccaaagtaaaggtgcggaaatcggtgtga

SEQ ID NO: 328133 - DNA, 30 bp, Artificial Sequence
  Synthetic oligonucleotide
tgcaagcataaatatgcgctaagggtgtga

SEQ ID NO: 328134 - DNA, 30 bp, Artificial Sequence
  Synthetic oligonucleotide
gacgttaacttctgagtcggcgtggtgtga

SEQ ID NO: 328135 - DNA, 30 bp, Artificial Sequence
  Synthetic oligonucleotide
ctgagtactggggttcataaataattgtga

SEQ ID NO: 328136 - DNA, 30 bp, Artificial Sequence
  Synthetic oligonucleotide
gggctaatgatttaacaaggttcattgtga

SEQ ID NO: 328137 - DNA, 30 bp, Artificial Sequence
  Synthetic oligonucleotide
ataagtatggcacaaagtgcaaacttgtga

SEQ ID NO: 328138 - DNA, 30 bp, Artificial Sequence
  Synthetic oligonucleotide
tcaagaaaaccaatggctctgtggttgtga

SEQ ID NO: 328139 - DNA, 30 bp, Artificial Sequence
  Synthetic oligonucleotide
ctctcaacttaaacctatggactgttgtga

SEQ ID NO: 328140 - DNA, 30 bp, Artificial Sequence
  Synthetic oligonucleotide
ccaacgttgtccgtccgtttgcatttgtga

SEQ ID NO: 328141 - DNA, 30 bp, Artificial Sequence
  Synthetic oligonucleotide
ttggctacgtaaacatgcggtggaaattga

SEQ ID NO: 328142 - DNA, 30 bp, Artificial Sequence
  Synthetic oligonucleotide
attataaggcgttcgctgccgttaaattga

SEQ ID NO: 328143 - DNA, 30 bp, Artificial Sequence
  Synthetic oligonucleotide
cgcgatttagtatctccgagcaacaattga

SEQ ID NO: 328144 - DNA, 30 bp, Artificial Sequence
  Synthetic oligonucleotide
gatgaggctgcgctcgcggctgggaattga

SEQ ID NO: 328145 - DNA, 30 bp, Artificial Sequence
  Synthetic oligonucleotide
cggttgggagtgtcgcgataactgaattga

SEQ ID NO: 328146 - DNA, 30 bp, Artificial Sequence
  Synthetic oligonucleotide
tgtgcactcataccgagatgcgtacattga

SEQ ID NO: 328147 - DNA, 30 bp, Artificial Sequence
  Synthetic oligonucleotide
cgcagggaaacatctatttcagcccattga

SEQ ID NO: 328148 - DNA, 30 bp, Artificial Sequence
  Synthetic oligonucleotide
ttcaagcttttggcctgctgtaaagattga

SEQ ID NO: 328149 - DNA, 30 bp, Artificial Sequence
  Synthetic oligonucleotide
gggggactgggtgtatgcccctgggattga

SEQ ID NO: 328150 - DNA, 30 bp, Artificial Sequence
  Synthetic oligonucleotide
tacagctggcttatgggcgaggtggattga

SEQ ID NO: 328151 - DNA, 30 bp, Artificial Sequence
  Synthetic oligonucleotide
ttaacatgcgcaactctgagtgaatattga

SEQ ID NO: 328152 - DNA, 30 bp, Artificial Sequence
  Synthetic oligonucleotide
cagggtcgccaatgaagatcatcatattga

SEQ ID NO: 328153 - DNA, 30 bp, Artificial Sequence
  Synthetic oligonucleotide
ggtcgacaatgggggtagagaggatattga

SEQ ID NO: 328154 - DNA, 30 bp, Artificial Sequence
  Synthetic oligonucleotide
cacaacatgatgaagttcaaacactattga

SEQ ID NO: 328155 - DNA, 30 bp, Artificial Sequence
  Synthetic oligonucleotide
tcaggaacagtagggtgacgtacctattga

SEQ ID NO: 328156 - DNA, 28 bp, Artificial Sequence
  Synthetic oligonucleotide
acagcgctatttcggtgcaatctattga

SEQ ID NO: 328157 - DNA, 30 bp, Artificial Sequence
  Synthetic oligonucleotide
gtggcttcacgaatatccacaaagtattga

SEQ ID NO: 328158 - DNA, 30 bp, Artificial Sequence
  Synthetic oligonucleotide
tcgttaacgttaggtcgttaagcgtattga

SEQ ID NO: 328159 - DNA, 30 bp, Artificial Sequence
  Synthetic oligonucleotide
gatattccaagctacctcgatagcacttga

SEQ ID NO: 328160 - DNA, 30 bp, Artificial Sequence
  Synthetic oligonucleotide
tagcgtaaaatgttgttaggatgcacttga

SEQ ID NO: 328161 - DNA, 30 bp, Artificial Sequence
  Synthetic oligonucleotide
aagctgaagattagtctgtatgtcacttga

SEQ ID NO: 328162 - DNA, 30 bp, Artificial Sequence
  Synthetic oligonucleotide
acgcaggggtgtatgaggtaaccgacttga

SEQ ID NO: 328163 - DNA, 30 bp, Artificial Sequence
  Synthetic oligonucleotide
cccatgccgcttgggtcaggccggacttga

SEQ ID NO: 328164 - DNA, 30 bp, Artificial Sequence
  Synthetic oligonucleotide
tacagatcgcctcatagaaggagtacttga

SEQ ID NO: 328165 - DNA, 30 bp, Artificial Sequence
  Synthetic oligonucleotide
aatagtgttctcggaatgtctgttacttga

SEQ ID NO: 328166 - DNA, 30 bp, Artificial Sequence
  Synthetic oligonucleotide
tggcgtggagcagttgggtagtgaccttga

SEQ ID NO: 328167 - DNA, 30 bp, Artificial Sequence
  Synthetic oligonucleotide
ctcgacggtatagggatgtcggtaccttga

SEQ ID NO: 328168 - DNA, 30 bp, Artificial Sequence
  Synthetic oligonucleotide
aaaatgtcgggtcgatgacgatgcccttga

SEQ ID NO: 328169 - DNA, 30 bp, Artificial Sequence
  Synthetic oligonucleotide
cgtcatgaattgagcgtacaattcccttga

SEQ ID NO: 328170 - DNA, 30 bp, Artificial Sequence
  Synthetic oligonucleotide
ggaatcgaaccatggatacgaaatccttga

SEQ ID NO: 328171 - DNA, 30 bp, Artificial Sequence
  Synthetic oligonucleotide
ataaacggaacaactcatctatgagcttga

SEQ ID NO: 328172 - DNA, 31 bp, Artificial Sequence
  Synthetic oligonucleotide
actgtgggtgcttttaactgtagacgcttga

SEQ ID NO: 328173 - DNA, 30 bp, Artificial Sequence
  Synthetic oligonucleotide
ggaagccattcaattagtaagaccgcttga

SEQ ID NO: 328174 - DNA, 30 bp, Artificial Sequence
  Synthetic oligonucleotide
ctgtaaaagtgatgttcattcgcggcttga

SEQ ID NO: 328175 - DNA, 30 bp, Artificial Sequence
  Synthetic oligonucleotide
atacttggggctacaaagaacttggcttga

SEQ ID NO: 328176 - DNA, 30 bp, Artificial Sequence
  Synthetic oligonucleotide
ttcctggggagtgtagtacagcctgcttga

SEQ ID NO: 328177 - DNA, 30 bp, Artificial Sequence
  Synthetic oligonucleotide
aggaaaatgtctgatgccgggggtgcttga

SEQ ID NO: 328178 - DNA, 30 bp, Artificial Sequence
  Synthetic oligonucleotide
ggcgcttgctctgcgggtcaatgtgcttga

SEQ ID NO: 328179 - DNA, 30 bp, Artificial Sequence
  Synthetic oligonucleotide
tagcgactgcgtgaaggaaatcgatcttga

SEQ ID NO: 328180 - DNA, 30 bp, Artificial Sequence
  Synthetic oligonucleotide
atttagggtgataggaactctacctcttga

SEQ ID NO: 328181 - DNA, 30 bp, Artificial Sequence
  Synthetic oligonucleotide
accgacttgatctgttggtatctctcttga

SEQ ID NO: 328182 - DNA, 30 bp, Artificial Sequence
  Synthetic oligonucleotide
gacactgtatcgactagataggtctcttga

SEQ ID NO: 328183 - DNA, 30 bp, Artificial Sequence
  Synthetic oligonucleotide
ttctataatgctttcagccccccgtcttga

SEQ ID NO: 328184 - DNA, 30 bp, Artificial Sequence
  Synthetic oligonucleotide
tagaattttcggtaggatcttagcagttga

SEQ ID NO: 328185 - DNA, 30 bp, Artificial Sequence
  Synthetic oligonucleotide
ctgtgccgtgttattacgtcccgcagttga

SEQ ID NO: 328186 - DNA, 30 bp, Artificial Sequence
  Synthetic oligonucleotide
aatagggaccgccttgcaccctcgagttga

SEQ ID NO: 328187 - DNA, 30 bp, Artificial Sequence
  Synthetic oligonucleotide
tgcctatgctgggtctggagtgtgagttga

SEQ ID NO: 328188 - DNA, 30 bp, Artificial Sequence
  Synthetic oligonucleotide
ggcgattatcatgcaagaagtaatagttga

SEQ ID NO: 328189 - DNA, 30 bp, Artificial Sequence
  Synthetic oligonucleotide
caggcgaacgcatttcattatgaacgttga

SEQ ID NO: 328190 - DNA, 30 bp, Artificial Sequence
  Synthetic oligonucleotide
gtcctcgaggcagagagtgtatcacgttga

SEQ ID NO: 328191 - DNA, 30 bp, Artificial Sequence
  Synthetic oligonucleotide
actcgtagacgacccccataagaccgttga

SEQ ID NO: 328192 - DNA, 30 bp, Artificial Sequence
  Synthetic oligonucleotide
tcgacagatacggcggctaagtaccgttga

SEQ ID NO: 328193 - DNA, 30 bp, Artificial Sequence
  Synthetic oligonucleotide
aaacaatcccgtacgagtggttcccgttga

SEQ ID NO: 328194 - DNA, 30 bp, Artificial Sequence
  Synthetic oligonucleotide
ctggcaaactatggccacttaggccgttga

SEQ ID NO: 328195 - DNA, 30 bp, Artificial Sequence
  Synthetic oligonucleotide
tttgagcagagaaacatacagctccgttga

SEQ ID NO: 328196 - DNA, 30 bp, Artificial Sequence
  Synthetic oligonucleotide
ggattttcgtttcctacgtccccgcgttga

SEQ ID NO: 328197 - DNA, 30 bp, Artificial Sequence
  Synthetic oligonucleotide
gggttgtatcagggtatattactgcgttga

SEQ ID NO: 328198 - DNA, 29 bp, Artificial Sequence
  Synthetic oligonucleotide
tcttacagcataagatctacgaaggttga

SEQ ID NO: 328199 - DNA, 30 bp, Artificial Sequence
  Synthetic oligonucleotide
gaggaacgtgtttcaaggtgggaaggttga

SEQ ID NO: 328200 - DNA, 30 bp, Artificial Sequence
  Synthetic oligonucleotide
gtactacggatgacataccagccaggttga

SEQ ID NO: 328201 - DNA, 30 bp, Artificial Sequence
  Synthetic oligonucleotide
agcgttgtggaaaaatctggaaacggttga

SEQ ID NO: 328202 - DNA, 30 bp, Artificial Sequence
  Synthetic oligonucleotide
ctctttctcacagtaattcatatcggttga

SEQ ID NO: 328203 - DNA, 30 bp, Artificial Sequence
  Synthetic oligonucleotide
ttaataatcaaaactgtggatagtggttga

SEQ ID NO: 328204 - DNA, 30 bp, Artificial Sequence
  Synthetic oligonucleotide
agatggctcagcttggtcgagtttggttga

SEQ ID NO: 328205 - DNA, 30 bp, Artificial Sequence
  Synthetic oligonucleotide
gtatgaagccgactggaatgcagatgttga

SEQ ID NO: 328206 - DNA, 30 bp, Artificial Sequence
  Synthetic oligonucleotide
ggaatcgttcttaagccgaagttatgttga

SEQ ID NO: 328207 - DNA, 30 bp, Artificial Sequence
  Synthetic oligonucleotide
ggcgacggagccatatgccagcactgttga

SEQ ID NO: 328208 - DNA, 30 bp, Artificial Sequence
  Synthetic oligonucleotide
cccaataaatcatgtttggaggcctgttga

SEQ ID NO: 328209 - DNA, 30 bp, Artificial Sequence
  Synthetic oligonucleotide
ggtaatcagtgatagtacccatagtgttga

SEQ ID NO: 328210 - DNA, 30 bp, Artificial Sequence
  Synthetic oligonucleotide
tcccccgcggcacgatcgagacggtgttga

SEQ ID NO: 328211 - DNA, 30 bp, Artificial Sequence
  Synthetic oligonucleotide
ttgacagtagtgcaacgttcagattgttga

SEQ ID NO: 328212 - DNA, 30 bp, Artificial Sequence
  Synthetic oligonucleotide
gttaggctgtttgaacgactggcaatttga

SEQ ID NO: 328213 - DNA, 30 bp, Artificial Sequence
  Synthetic oligonucleotide
gaagggtttcctaggtgatacggcatttga

SEQ ID NO: 328214 - DNA, 30 bp, Artificial Sequence
  Synthetic oligonucleotide
gcagggcgatcttcactggttaagatttga

SEQ ID NO: 328215 - DNA, 30 bp, Artificial Sequence
  Synthetic oligonucleotide
tggcagtagtttaagataggccgtatttga

SEQ ID NO: 328216 - DNA, 30 bp, Artificial Sequence
  Synthetic oligonucleotide
cgggtaattaatggatttagtcaactttga

SEQ ID NO: 328217 - DNA, 30 bp, Artificial Sequence
  Synthetic oligonucleotide
ccttggataaggttgatccacctactttga

SEQ ID NO: 328218 - DNA, 30 bp, Artificial Sequence
  Synthetic oligonucleotide
atctgatatacgcgccgaagatccctttga

SEQ ID NO: 328219 - DNA, 30 bp, Artificial Sequence
  Synthetic oligonucleotide
agtatataactcgtcatctgagtcctttga

SEQ ID NO: 328220 - DNA, 30 bp, Artificial Sequence
  Synthetic oligonucleotide
atcgtatatctaagaaggctcttgctttga

SEQ ID NO: 328221 - DNA, 30 bp, Artificial Sequence
  Synthetic oligonucleotide
ggctccggtaaaaactgaacacttctttga

SEQ ID NO: 328222 - DNA, 30 bp, Artificial Sequence
  Synthetic oligonucleotide
ggtcttccatgctcacgtctacgagtttga

SEQ ID NO: 328223 - DNA, 30 bp, Artificial Sequence
  Synthetic oligonucleotide
ttacatagaaatcgcaccgacggagtttga

SEQ ID NO: 328224 - DNA, 30 bp, Artificial Sequence
  Synthetic oligonucleotide
gtcgccaaatgcgactgcgaaatcgtttga

SEQ ID NO: 328225 - DNA, 30 bp, Artificial Sequence
  Synthetic oligonucleotide
caacgtccggcgggccggggatcggtttga

SEQ ID NO: 328226 - DNA, 30 bp, Artificial Sequence
  Synthetic oligonucleotide
tgtttaggaagcagccactcggtggtttga

SEQ ID NO: 328227 - DNA, 30 bp, Artificial Sequence
  Synthetic oligonucleotide
ttgacgtacccacagtatactggtgtttga

SEQ ID NO: 328228 - DNA, 30 bp, Artificial Sequence
  Synthetic oligonucleotide
gggaatggcatcggagcgatagaattttga

SEQ ID NO: 328229 - DNA, 30 bp, Artificial Sequence
  Synthetic oligonucleotide
agggccactctagcaggcgaataattttga

SEQ ID NO: 328230 - DNA, 30 bp, Artificial Sequence
  Synthetic oligonucleotide
aactttggcactgaattggagtcattttga

SEQ ID NO: 328231 - DNA, 30 bp, Artificial Sequence
  Synthetic oligonucleotide
tgactctaaaagcgttgagtcaccttttga

SEQ ID NO: 328232 - DNA, 30 bp, Artificial Sequence
  Synthetic oligonucleotide
cgcgcgttacttacggaaagcgccttttga

SEQ ID NO: 328233 - DNA, 30 bp, Artificial Sequence
  Synthetic oligonucleotide
gactaacgtaggcgattagggcgcttttga

SEQ ID NO: 328234 - DNA, 30 bp, Artificial Sequence
  Synthetic oligonucleotide
tccggcgataaccgtacaatcgtcttttga

SEQ ID NO: 328235 - DNA, 30 bp, Artificial Sequence
  Synthetic oligonucleotide
ctgagggaacttcattgcttcaagttttga

SEQ ID NO: 328236 - DNA, 30 bp, Artificial Sequence
  Synthetic oligonucleotide
cgagatgaaccggtcattcagtatttttga

SEQ ID NO: 328237 - DNA, 30 bp, Artificial Sequence
  Synthetic oligonucleotide
taggagtgaaagagggggttcgctttttga

SEQ ID NO: 328238 - DNA, 30 bp, Artificial Sequence
  Synthetic oligonucleotide
tgttatagtcgagtttcagatgctttttga

SEQ ID NO: 328239 - DNA, 30 bp, Artificial Sequence
  Synthetic oligonucleotide
cactcggcataaactcacgataaaaaaata

SEQ ID NO: 328240 - DNA, 30 bp, Artificial Sequence
  Synthetic oligonucleotide
ggggaagggtatgcgtttgtgagaaaaata

SEQ ID NO: 328241 - DNA, 30 bp, Artificial Sequence
  Synthetic oligonucleotide
gttatgttcaagagggggagacacaaaata

SEQ ID NO: 328242 - DNA, 30 bp, Artificial Sequence
  Synthetic oligonucleotide
tgtatttaacttcgaagcacagccaaaata

SEQ ID NO: 328243 - DNA, 30 bp, Artificial Sequence
  Synthetic oligonucleotide
tggtcgtcttgcacgcctcacacgaaaata

SEQ ID NO: 328244 - DNA, 30 bp, Artificial Sequence
  Synthetic oligonucleotide
gcgataaagctttagttccgatggaaaata

SEQ ID NO: 328245 - DNA, 30 bp, Artificial Sequence
  Synthetic oligonucleotide
atcactacgctaaagacggcaaataaaata

SEQ ID NO: 328246 - DNA, 30 bp, Artificial Sequence
  Synthetic oligonucleotide
tggattaagtttaattcgcttactaaaata

SEQ ID NO: 328247 - DNA, 30 bp, Artificial Sequence
  Synthetic oligonucleotide
cgagtatctgtgtcgatcagttttaaaata

SEQ ID NO: 328248 - DNA, 30 bp, Artificial Sequence
  Synthetic oligonucleotide
gtcgcgtttaactaccttcccgaccaaata

SEQ ID NO: 328249 - DNA, 30 bp, Artificial Sequence
  Synthetic oligonucleotide
gattgttctgtatatcctctgcagcaaata

SEQ ID NO: 328250 - DNA, 30 bp, Artificial Sequence
  Synthetic oligonucleotide
tgcggaatcctgcatgttaaagcgcaaata

SEQ ID NO: 328251 - DNA, 30 bp, Artificial Sequence
  Synthetic oligonucleotide
gtgcacgatgctcgtgtacgcgcgcaaata

SEQ ID NO: 328252 - DNA, 30 bp, Artificial Sequence
  Synthetic oligonucleotide
aagcagattacctcacccagtcttcaaata

SEQ ID NO: 328253 - DNA, 30 bp, Artificial Sequence
  Synthetic oligonucleotide
aacactcgagggtcggtcctcgttcaaata

SEQ ID NO: 328254 - DNA, 30 bp, Artificial Sequence
  Synthetic oligonucleotide
cggttactcgatgcaattacgtttcaaata

SEQ ID NO: 328255 - DNA, 30 bp, Artificial Sequence
  Synthetic oligonucleotide
gcagacgcgacatcatcgaacaaagaaata

SEQ ID NO: 328256 - DNA, 30 bp, Artificial Sequence
  Synthetic oligonucleotide
taggtagttcaagtaatctcatcagaaata

SEQ ID NO: 328257 - DNA, 30 bp, Artificial Sequence
  Synthetic oligonucleotide
taggatactagggaaagggcgcaggaaata

SEQ ID NO: 328258 - DNA, 30 bp, Artificial Sequence
  Synthetic oligonucleotide
atgttgtatgtgattcgttgggtggaaata

SEQ ID NO: 328259 - DNA, 30 bp, Artificial Sequence
  Synthetic oligonucleotide
accgttagaacccctccctaagatgaaata

SEQ ID NO: 328260 - DNA, 30 bp, Artificial Sequence
  Synthetic oligonucleotide
aagtattgggggcagtacacttatgaaata

SEQ ID NO: 328261 - DNA, 30 bp, Artificial Sequence
  Synthetic oligonucleotide
agcgaatcgtcggcggcatcgtctgaaata

SEQ ID NO: 328262 - DNA, 30 bp, Artificial Sequence
  Synthetic oligonucleotide
atccccggaggatccgcggaggcataaata

SEQ ID NO: 328263 - DNA, 30 bp, Artificial Sequence
  Synthetic oligonucleotide
tcggttccacaatatactgcgatataaata

SEQ ID NO: 328264 - DNA, 30 bp, Artificial Sequence
  Synthetic oligonucleotide
accgacgtttcaagccttggggtataaata

SEQ ID NO: 328265 - DNA, 30 bp, Artificial Sequence
  Synthetic oligonucleotide
aattgtcatagcctaccctaatagtaaata

SEQ ID NO: 328266 - DNA, 30 bp, Artificial Sequence
  Synthetic oligonucleotide
agccggttttagcggcgtctcgtgtaaata

SEQ ID NO: 328267 - DNA, 30 bp, Artificial Sequence
  Synthetic oligonucleotide
tggcaatatgtccgagtaggagcttaaata

SEQ ID NO: 328268 - DNA, 30 bp, Artificial Sequence
  Synthetic oligonucleotide
tcgaggttacgttcactcgtgcgttaaata

SEQ ID NO: 328269 - DNA, 30 bp, Artificial Sequence
  Synthetic oligonucleotide
atggaaatatgccatgcgggggaaacaata

SEQ ID NO: 328270 - DNA, 30 bp, Artificial Sequence
  Synthetic oligonucleotide
gggggaccccgccgtagagcggctacaata

SEQ ID NO: 328271 - DNA, 30 bp, Artificial Sequence
  Synthetic oligonucleotide
ggttattctttgggagaatggcgtacaata

SEQ ID NO: 328272 - DNA, 30 bp, Artificial Sequence
  Synthetic oligonucleotide
cttctcggttggcaaatcgcagtagcaata

SEQ ID NO: 328273 - DNA, 30 bp, Artificial Sequence
  Synthetic oligonucleotide
aagtgtgtgggatgcagttcagtagcaata

SEQ ID NO: 328274 - DNA, 30 bp, Artificial Sequence
  Synthetic oligonucleotide
gcagtcgtattctcgtatccaaccgcaata

SEQ ID NO: 328275 - DNA, 30 bp, Artificial Sequence
  Synthetic oligonucleotide
tgcggttactagttccggtacaccgcaata

SEQ ID NO: 328276 - DNA, 30 bp, Artificial Sequence
  Synthetic oligonucleotide
atagcttcatgcctgttcaaaggcgcaata

SEQ ID NO: 328277 - DNA, 30 bp, Artificial Sequence
  Synthetic oligonucleotide
gtctcacacatgaccttcgaaggcgcaata

SEQ ID NO: 328278 - DNA, 30 bp, Artificial Sequence
  Synthetic oligonucleotide
ttcctggatccatgctttgggggcgcaata

SEQ ID NO: 328279 - DNA, 30 bp, Artificial Sequence
  Synthetic oligonucleotide
ttaaggtgcgggtatgatgggaaggcaata

SEQ ID NO: 328280 - DNA, 30 bp, Artificial Sequence
  Synthetic oligonucleotide
tccacccgtagttcgaccttttgggcaata

SEQ ID NO: 328281 - DNA, 30 bp, Artificial Sequence
  Synthetic oligonucleotide
ggactcaatcggaggtaaggggctgcaata

SEQ ID NO: 328282 - DNA, 30 bp, Artificial Sequence
  Synthetic oligonucleotide
tggtacaggcgtggcaccttatctgcaata

SEQ ID NO: 328283 - DNA, 30 bp, Artificial Sequence
  Synthetic oligonucleotide
atgccagccacgtgcgcgactcaatcaata

SEQ ID NO: 328284 - DNA, 30 bp, Artificial Sequence
  Synthetic oligonucleotide
ccgtcaggatccgaagttctcccctcaata

SEQ ID NO: 328285 - DNA, 30 bp, Artificial Sequence
  Synthetic oligonucleotide
gaaccagtgacgttagaaatcatctcaata

SEQ ID NO: 328286 - DNA, 30 bp, Artificial Sequence
  Synthetic oligonucleotide
ccagcgagccgtactgaaggttagtcaata

SEQ ID NO: 328287 - DNA, 30 bp, Artificial Sequence
  Synthetic oligonucleotide
acaagccccgggatataggcttggtcaata

SEQ ID NO: 328288 - DNA, 30 bp, Artificial Sequence
  Synthetic oligonucleotide
aagcgaatgtgacaggttctttggtcaata

SEQ ID NO: 328289 - DNA, 30 bp, Artificial Sequence
  Synthetic oligonucleotide
aacttgacactttcttaagctatgtcaata

SEQ ID NO: 328290 - DNA, 30 bp, Artificial Sequence
  Synthetic oligonucleotide
gattactatgtgtattccgtggtgtcaata

SEQ ID NO: 328291 - DNA, 30 bp, Artificial Sequence
  Synthetic oligonucleotide
gcagcggtttatgggttgagaaattcaata

SEQ ID NO: 328292 - DNA, 30 bp, Artificial Sequence
  Synthetic oligonucleotide
ctttgaaagaaataagcctaacgttcaata

SEQ ID NO: 328293 - DNA, 30 bp, Artificial Sequence
  Synthetic oligonucleotide
ttgcagttgaaatatggctggccaagaata

SEQ ID NO: 328294 - DNA, 31 bp, Artificial Sequence
  Synthetic oligonucleotide
atatgaacgttggttacgaacgtgaagaata

SEQ ID NO: 328295 - DNA, 30 bp, Artificial Sequence
  Synthetic oligonucleotide
taatgcatggcgtgtctttagcccagaata

SEQ ID NO: 328296 - DNA, 30 bp, Artificial Sequence
  Synthetic oligonucleotide
ctgttgtatgacgatttatcctccagaata

SEQ ID NO: 328297 - DNA, 30 bp, Artificial Sequence
  Synthetic oligonucleotide
tctgaaagcaattagcgcgtggtcagaata

SEQ ID NO: 328298 - DNA, 30 bp, Artificial Sequence
  Synthetic oligonucleotide
acatatagctacagagatcatgtcagaata

SEQ ID NO: 328299 - DNA, 30 bp, Artificial Sequence
  Synthetic oligonucleotide
ctatatcgagtcccactcagtgcgagaata

SEQ ID NO: 328300 - DNA, 30 bp, Artificial Sequence
  Synthetic oligonucleotide
cccctatcgaccatgaggcccatgagaata

SEQ ID NO: 328301 - DNA, 30 bp, Artificial Sequence
  Synthetic oligonucleotide
taattgattgaaataatcgctctgagaata

SEQ ID NO: 328302 - DNA, 30 bp, Artificial Sequence
  Synthetic oligonucleotide
catagcttccggttacattctttgagaata

SEQ ID NO: 328303 - DNA, 31 bp, Artificial Sequence
  Synthetic oligonucleotide
gaatatccaaaagttctggcgggctagaata

SEQ ID NO: 328304 - DNA, 30 bp, Artificial Sequence
  Synthetic oligonucleotide
ttcgcggaccagcgaagtattagccgaata

SEQ ID NO: 328305 - DNA, 30 bp, Artificial Sequence
  Synthetic oligonucleotide
taatactcgtcccctagaatgctccgaata

SEQ ID NO: 328306 - DNA, 30 bp, Artificial Sequence
  Synthetic oligonucleotide
gaattagccggaatgtttcgcgcgcgaata

SEQ ID NO: 328307 - DNA, 30 bp, Artificial Sequence
  Synthetic oligonucleotide
tggctttgagagattggatttgcgcgaata

SEQ ID NO: 328308 - DNA, 30 bp, Artificial Sequence
  Synthetic oligonucleotide
ggcaggaagtcgaccctctaaaatcgaata

SEQ ID NO: 328309 - DNA, 30 bp, Artificial Sequence
  Synthetic oligonucleotide
tggtgcgtgcagccattaccgtgaggaata

SEQ ID NO: 328310 - DNA, 30 bp, Artificial Sequence
  Synthetic oligonucleotide
cacaggcggacataggccctctacggaata

SEQ ID NO: 328311 - DNA, 30 bp, Artificial Sequence
  Synthetic oligonucleotide
ggtctcccctctgagccattgtacggaata

SEQ ID NO: 328312 - DNA, 30 bp, Artificial Sequence
  Synthetic oligonucleotide
tgtcgcctctaatgcatccgtgtcggaata

SEQ ID NO: 328313 - DNA, 30 bp, Artificial Sequence
  Synthetic oligonucleotide
taagagccttcctaaccgcacgagggaata

SEQ ID NO: 328314 - DNA, 30 bp, Artificial Sequence
  Synthetic oligonucleotide
aacatcaagtccgaggagtctcatggaata

SEQ ID NO: 328315 - DNA, 30 bp, Artificial Sequence
  Synthetic oligonucleotide
aaagtgtgcgtggttagtatatatggaata

SEQ ID NO: 328316 - DNA, 30 bp, Artificial Sequence
  Synthetic oligonucleotide
cactaataaatgtacgcatgctaatgaata

SEQ ID NO: 328317 - DNA, 30 bp, Artificial Sequence
  Synthetic oligonucleotide
tatggctgtgcagaggaagtttaatgaata

SEQ ID NO: 328318 - DNA, 30 bp, Artificial Sequence
  Synthetic oligonucleotide
gccattcggcctggcgctaaatggtgaata

SEQ ID NO: 328319 - DNA, 30 bp, Artificial Sequence
  Synthetic oligonucleotide
acggtgtgtaaacccccgcaacattgaata

SEQ ID NO: 328320 - DNA, 30 bp, Artificial Sequence
  Synthetic oligonucleotide
tcactaaagtccgctatgattcgttgaata

SEQ ID NO: 328321 - DNA, 30 bp, Artificial Sequence
  Synthetic oligonucleotide
accttatagatccccccaatgtcaataata

SEQ ID NO: 328322 - DNA, 30 bp, Artificial Sequence
  Synthetic oligonucleotide
gagtcaagcaaaaagtatcaaggaataata

SEQ ID NO: 328323 - DNA, 30 bp, Artificial Sequence
  Synthetic oligonucleotide
tgtggaactaaggttatcggtataataata

SEQ ID NO: 328324 - DNA, 30 bp, Artificial Sequence
  Synthetic oligonucleotide
taacggttttgattggaactcaccataata

SEQ ID NO: 328325 - DNA, 30 bp, Artificial Sequence
  Synthetic oligonucleotide
agctcgcccgaccgcatatggtccataata

SEQ ID NO: 328326 - DNA, 30 bp, Artificial Sequence
  Synthetic oligonucleotide
tgcgcaatatatactacaccttccataata

SEQ ID NO: 328327 - DNA, 30 bp, Artificial Sequence
  Synthetic oligonucleotide
gaatactctaaaaccagaaggcgcataata

SEQ ID NO: 328328 - DNA, 30 bp, Artificial Sequence
  Synthetic oligonucleotide
atgggagtttgcctacaaagaggcataata

SEQ ID NO: 328329 - DNA, 30 bp, Artificial Sequence
  Synthetic oligonucleotide
catcccgcgattggttaacaaaatataata

SEQ ID NO: 328330 - DNA, 30 bp, Artificial Sequence
  Synthetic oligonucleotide
aaacaaaacaaagggggagtatatataata

SEQ ID NO: 328331 - DNA, 30 bp, Artificial Sequence
  Synthetic oligonucleotide
gatcgagttacatagctttcctatataata

SEQ ID NO: 328332 - DNA, 30 bp, Artificial Sequence
  Synthetic oligonucleotide
ttgattccttggcaatcacctagtataata

SEQ ID NO: 328333 - DNA, 30 bp, Artificial Sequence
  Synthetic oligonucleotide
ggaaatatagacgaccagcaataactaata

SEQ ID NO: 328334 - DNA, 30 bp, Artificial Sequence
  Synthetic oligonucleotide
gagagcaggtctcgctgcgtagacctaata

SEQ ID NO: 328335 - DNA, 30 bp, Artificial Sequence
  Synthetic oligonucleotide
atcacccaactcgggccatgatacctaata

SEQ ID NO: 328336 - DNA, 30 bp, Artificial Sequence
  Synthetic oligonucleotide
ctaccgaccgctcccaacggctacctaata

SEQ ID NO: 328337 - DNA, 30 bp, Artificial Sequence
  Synthetic oligonucleotide
cgcgttttgatttccaatagcctcctaata

SEQ ID NO: 328338 - DNA, 30 bp, Artificial Sequence
  Synthetic oligonucleotide
actctgatccctgaagtaaaaacgctaata

SEQ ID NO: 328339 - DNA, 30 bp, Artificial Sequence
  Synthetic oligonucleotide
aaccgtggtttaaccatgcgtgttctaata

SEQ ID NO: 328340 - DNA, 30 bp, Artificial Sequence
  Synthetic oligonucleotide
aagtcttactcatgttgcaataacgtaata

SEQ ID NO: 328341 - DNA, 30 bp, Artificial Sequence
  Synthetic oligonucleotide
accacgtcgtgagtatatggatgcgtaata

SEQ ID NO: 328342 - DNA, 30 bp, Artificial Sequence
  Synthetic oligonucleotide
cgcgcacttgcattctacggtgaggtaata

SEQ ID NO: 328343 - DNA, 30 bp, Artificial Sequence
  Synthetic oligonucleotide
gcaaaaaaatgactgtctccttgggtaata

SEQ ID NO: 328344 - DNA, 29 bp, Artificial Sequence
  Synthetic oligonucleotide
tggatgtacaaacttatcaactggtaata

SEQ ID NO: 328345 - DNA, 30 bp, Artificial Sequence
  Synthetic oligonucleotide
aactaacgaactgtttagacacgtgtaata

SEQ ID NO: 328346 - DNA, 30 bp, Artificial Sequence
  Synthetic oligonucleotide
cacactgcatacaggcgagcccgtgtaata

SEQ ID NO: 328347 - DNA, 30 bp, Artificial Sequence
  Synthetic oligonucleotide
ttgtccatattgtagaccaagtgtgtaata

SEQ ID NO: 328348 - DNA, 30 bp, Artificial Sequence
  Synthetic oligonucleotide
cgcaggactgtgggatgacagattgtaata

SEQ ID NO: 328349 - DNA, 30 bp, Artificial Sequence
  Synthetic oligonucleotide
aattggaccatctggagcagctttgtaata

SEQ ID NO: 328350 - DNA, 30 bp, Artificial Sequence
  Synthetic oligonucleotide
gggttcaaccttggcagccgtgaattaata

SEQ ID NO: 328351 - DNA, 30 bp, Artificial Sequence
  Synthetic oligonucleotide
tacgttcggaaaccgtagcgaggattaata

SEQ ID NO: 328352 - DNA, 30 bp, Artificial Sequence
  Synthetic oligonucleotide
cagaaccatcgtcccctaggaatattaata

SEQ ID NO: 328353 - DNA, 30 bp, Artificial Sequence
  Synthetic oligonucleotide
tagtacgcaggggctaagttaatattaata

SEQ ID NO: 328354 - DNA, 30 bp, Artificial Sequence
  Synthetic oligonucleotide
tcgctgtgcgcatgcatctacgatttaata

SEQ ID NO: 328355 - DNA, 31 bp, Artificial Sequence
  Synthetic oligonucleotide
atggagtcgaggcacagtttaaagtttaata

SEQ ID NO: 328356 - DNA, 30 bp, Artificial Sequence
  Synthetic oligonucleotide
cgacccatgctgcgtttattccgtttaata

SEQ ID NO: 328357 - DNA, 30 bp, Artificial Sequence
  Synthetic oligonucleotide
cctctgagtatatcgcaacggcaaaacata

SEQ ID NO: 328358 - DNA, 30 bp, Artificial Sequence
  Synthetic oligonucleotide
gtgcacgcgcctgtttaacaggacaacata

SEQ ID NO: 328359 - DNA, 30 bp, Artificial Sequence
  Synthetic oligonucleotide
taccttgacgggttagataggaagaacata

SEQ ID NO: 328360 - DNA, 30 bp, Artificial Sequence
  Synthetic oligonucleotide
ggtcactgtggttacacgggtcataacata

SEQ ID NO: 328361 - DNA, 30 bp, Artificial Sequence
  Synthetic oligonucleotide
gctagcggtttctatgtaatctctaacata

SEQ ID NO: 328362 - DNA, 30 bp, Artificial Sequence
  Synthetic oligonucleotide
aacgagccatcgcgatgtgatattaacata

SEQ ID NO: 328363 - DNA, 30 bp, Artificial Sequence
  Synthetic oligonucleotide
tgaaggctcactattgtacagcgccacata

SEQ ID NO: 328364 - DNA, 30 bp, Artificial Sequence
  Synthetic oligonucleotide
gcggccagcccgtttagatctggccacata

SEQ ID NO: 328365 - DNA, 30 bp, Artificial Sequence
  Synthetic oligonucleotide
atcaagcctatctattagggctggcacata

SEQ ID NO: 328366 - DNA, 30 bp, Artificial Sequence
  Synthetic oligonucleotide
ctggtactaatatcctccatcgctcacata

SEQ ID NO: 328367 - DNA, 30 bp, Artificial Sequence
  Synthetic oligonucleotide
caggtatgccattccagaacacgtcacata

SEQ ID NO: 328368 - DNA, 30 bp, Artificial Sequence
  Synthetic oligonucleotide
gattccatcaaagataatcgggaagacata

SEQ ID NO: 328369 - DNA, 30 bp, Artificial Sequence
  Synthetic oligonucleotide
gtttgaaggcattgatgaacgagagacata

SEQ ID NO: 328370 - DNA, 30 bp, Artificial Sequence
  Synthetic oligonucleotide
gggtggcgccgacacgtagtaggagacata

SEQ ID NO: 328371 - DNA, 30 bp, Artificial Sequence
  Synthetic oligonucleotide
tttgaaatcgctgccatagggatagacata

SEQ ID NO: 328372 - DNA, 30 bp, Artificial Sequence
  Synthetic oligonucleotide
tgttcgactacgagtgcgcgggtagacata

SEQ ID NO: 328373 - DNA, 30 bp, Artificial Sequence
  Synthetic oligonucleotide
agcgtgtggaatcactaagggttagacata

SEQ ID NO: 328374 - DNA, 30 bp, Artificial Sequence
  Synthetic oligonucleotide
cggtggtgcaatagaagtaccggcgacata

SEQ ID NO: 328375 - DNA, 30 bp, Artificial Sequence
  Synthetic oligonucleotide
gcagagtcgactcaaagtatgacggacata

SEQ ID NO: 328376 - DNA, 30 bp, Artificial Sequence
  Synthetic oligonucleotide
ctggtatattctacgtcaatccatgacata

SEQ ID NO: 328377 - DNA, 30 bp, Artificial Sequence
  Synthetic oligonucleotide
cctccgaatagtcgtaatgaatatgacata

SEQ ID NO: 328378 - DNA, 30 bp, Artificial Sequence
  Synthetic oligonucleotide
taggctctgttcgacgttgtatctgacata

SEQ ID NO: 328379 - DNA, 30 bp, Artificial Sequence
  Synthetic oligonucleotide
aaaatatcatgaggcacaataggatacata

SEQ ID NO: 328380 - DNA, 30 bp, Artificial Sequence
  Synthetic oligonucleotide
gagtgggaaaaagacaatagcctgtacata

SEQ ID NO: 328381 - DNA, 30 bp, Artificial Sequence
  Synthetic oligonucleotide
tacctgcgttaaaagtgtcctataaccata

SEQ ID NO: 328382 - DNA, 30 bp, Artificial Sequence
  Synthetic oligonucleotide
tcgccgccgtaggggtaagtgcagaccata

SEQ ID NO: 328383 - DNA, 30 bp, Artificial Sequence
  Synthetic oligonucleotide
tcagatggccataacgcgggggcgaccata

SEQ ID NO: 328384 - DNA, 30 bp, Artificial Sequence
  Synthetic oligonucleotide
gtaagtcttgccgattctggcattaccata

SEQ ID NO: 328385 - DNA, 30 bp, Artificial Sequence
  Synthetic oligonucleotide
aaggggactccgggagacaggtggcccata

SEQ ID NO: 328386 - DNA, 30 bp, Artificial Sequence
  Synthetic oligonucleotide
tgatatggagctgatgcccatctgcccata

SEQ ID NO: 328387 - DNA, 30 bp, Artificial Sequence
  Synthetic oligonucleotide
tactggcgacgtattcttcagcacgccata

SEQ ID NO: 328388 - DNA, 30 bp, Artificial Sequence
  Synthetic oligonucleotide
aattggtggcataggaagttatacgccata

SEQ ID NO: 328389 - DNA, 30 bp, Artificial Sequence
  Synthetic oligonucleotide
cagttctgttacaagttgtagtgggccata

SEQ ID NO: 328390 - DNA, 30 bp, Artificial Sequence
  Synthetic oligonucleotide
ccaacacggtcctttcagccgtttgccata

SEQ ID NO: 328391 - DNA, 30 bp, Artificial Sequence
  Synthetic oligonucleotide
ccggggaatactaattcggattaatccata

SEQ ID NO: 328392 - DNA, 30 bp, Artificial Sequence
  Synthetic oligonucleotide
gcgcatagtttggtcttaggtacgtccata

SEQ ID NO: 328393 - DNA, 30 bp, Artificial Sequence
  Synthetic oligonucleotide
tagactggtgagcctttcctgataagcata

SEQ ID NO: 328394 - DNA, 30 bp, Artificial Sequence
  Synthetic oligonucleotide
tccacttaggctggtgatagtaacagcata

SEQ ID NO: 328395 - DNA, 30 bp, Artificial Sequence
  Synthetic oligonucleotide
ctccccaactaattcggtatgtacagcata

SEQ ID NO: 328396 - DNA, 30 bp, Artificial Sequence
  Synthetic oligonucleotide
attaggaaaggatcgccggcactcagcata

SEQ ID NO: 328397 - DNA, 30 bp, Artificial Sequence
  Synthetic oligonucleotide
gggtctggacaagggtcgcttctcagcata

SEQ ID NO: 328398 - DNA, 30 bp, Artificial Sequence
  Synthetic oligonucleotide
catgatgcattgtcagaaactttcagcata

SEQ ID NO: 328399 - DNA, 30 bp, Artificial Sequence
  Synthetic oligonucleotide
aggtaaacgctttttcaatagcggagcata

SEQ ID NO: 328400 - DNA, 30 bp, Artificial Sequence
  Synthetic oligonucleotide
tgcttattctggtcattacaactacgcata

SEQ ID NO: 328401 - DNA, 30 bp, Artificial Sequence
  Synthetic oligonucleotide
gccacttggcaaacggtgtaaaagcgcata

SEQ ID NO: 328402 - DNA, 30 bp, Artificial Sequence
  Synthetic oligonucleotide
aatgcgttcgggaatttcggcacgcgcata

SEQ ID NO: 328403 - DNA, 30 bp, Artificial Sequence
  Synthetic oligonucleotide
aaccgagctgcaatcgcgaccactcgcata

SEQ ID NO: 328404 - DNA, 30 bp, Artificial Sequence
  Synthetic oligonucleotide
taataggattgtaaactaagaaaaggcata

SEQ ID NO: 328405 - DNA, 30 bp, Artificial Sequence
  Synthetic oligonucleotide
gctcagactccgagtcccgtaatgggcata

SEQ ID NO: 328406 - DNA, 30 bp, Artificial Sequence
  Synthetic oligonucleotide
atttccgactagtttagaaaacaatgcata

SEQ ID NO: 328407 - DNA, 30 bp, Artificial Sequence
  Synthetic oligonucleotide
gaaccagttttagggggagactaatgcata

SEQ ID NO: 328408 - DNA, 30 bp, Artificial Sequence
  Synthetic oligonucleotide
ccctttaaatagactgagagtatctgcata

SEQ ID NO: 328409 - DNA, 30 bp, Artificial Sequence
  Synthetic oligonucleotide
agacgtagaatacggacgttaaggtgcata

SEQ ID NO: 328410 - DNA, 30 bp, Artificial Sequence
  Synthetic oligonucleotide
tctagagcctcgaaagcacatcggtgcata

SEQ ID NO: 328411 - DNA, 30 bp, Artificial Sequence
  Synthetic oligonucleotide
aatgaaaacgcgttgtatgcatggtgcata

SEQ ID NO: 328412 - DNA, 30 bp, Artificial Sequence
  Synthetic oligonucleotide
cttgctaatcgagcagccttggtgtgcata

SEQ ID NO: 328413 - DNA, 30 bp, Artificial Sequence
  Synthetic oligonucleotide
cccagtcaaacttctcatgttcgttgcata

SEQ ID NO: 328414 - DNA, 30 bp, Artificial Sequence
  Synthetic oligonucleotide
attataaaatcgagattataaacaatcata

SEQ ID NO: 328415 - DNA, 30 bp, Artificial Sequence
  Synthetic oligonucleotide
gaaagtaagttacagtttctgtgaatcata

SEQ ID NO: 328416 - DNA, 30 bp, Artificial Sequence
  Synthetic oligonucleotide
aacgatcacaggtataagtacataatcata

SEQ ID NO: 328417 - DNA, 30 bp, Artificial Sequence
  Synthetic oligonucleotide
gatggacggatagttgaaggtttaatcata

SEQ ID NO: 328418 - DNA, 30 bp, Artificial Sequence
  Synthetic oligonucleotide
tactatgtgactatgttcacgttcatcata

SEQ ID NO: 328419 - DNA, 30 bp, Artificial Sequence
  Synthetic oligonucleotide
tgaaactgaaactacatcatacctatcata

SEQ ID NO: 328420 - DNA, 30 bp, Artificial Sequence
  Synthetic oligonucleotide
ttacttgacttattattgcagctcctcata

SEQ ID NO: 328421 - DNA, 30 bp, Artificial Sequence
  Synthetic oligonucleotide
aggctagtttccgcgcagtgatggctcata

SEQ ID NO: 328422 - DNA, 30 bp, Artificial Sequence
  Synthetic oligonucleotide
ttccaggtgcccgtcgttttagttctcata

SEQ ID NO: 328423 - DNA, 30 bp, Artificial Sequence
  Synthetic oligonucleotide
gtatgtatacataacgtacagccagtcata

SEQ ID NO: 328424 - DNA, 30 bp, Artificial Sequence
  Synthetic oligonucleotide
caggcctacagttttgtgtatttagtcata

SEQ ID NO: 328425 - DNA, 30 bp, Artificial Sequence
  Synthetic oligonucleotide
ggctatattccggcgcattgcaacgtcata

SEQ ID NO: 328426 - DNA, 30 bp, Artificial Sequence
  Synthetic oligonucleotide
taacggcgaggacgcgacatgaacgtcata

SEQ ID NO: 328427 - DNA, 30 bp, Artificial Sequence
  Synthetic oligonucleotide
tcgccggccaagactagacccatcgtcata

SEQ ID NO: 328428 - DNA, 30 bp, Artificial Sequence
  Synthetic oligonucleotide
gcttatgatcaggctagttcgctggtcata

SEQ ID NO: 328429 - DNA, 30 bp, Artificial Sequence
  Synthetic oligonucleotide
ggttgcctcaaaggtacgccggtggtcata

SEQ ID NO: 328430 - DNA, 30 bp, Artificial Sequence
  Synthetic oligonucleotide
gcgagtgtgcgcaaatgtcgatatgtcata

SEQ ID NO: 328431 - DNA, 30 bp, Artificial Sequence
  Synthetic oligonucleotide
tgcataaggcctgaggtacaacaattcata

SEQ ID NO: 328432 - DNA, 30 bp, Artificial Sequence
  Synthetic oligonucleotide
tattagtcagtagtaacagggggattcata

SEQ ID NO: 328433 - DNA, 30 bp, Artificial Sequence
  Synthetic oligonucleotide
tatcctggtgcgtcatttttgggattcata

SEQ ID NO: 328434 - DNA, 30 bp, Artificial Sequence
  Synthetic oligonucleotide
atcgtctacttaccctctgttggattcata

SEQ ID NO: 328435 - DNA, 30 bp, Artificial Sequence
  Synthetic oligonucleotide
gcgtacttttactaacttgcaggcttcata

SEQ ID NO: 328436 - DNA, 30 bp, Artificial Sequence
  Synthetic oligonucleotide
tgggatcgtttagtaaaagtcccgttcata

SEQ ID NO: 328437 - DNA, 30 bp, Artificial Sequence
  Synthetic oligonucleotide
tcctcggtacactctctgcgccgtttcata

SEQ ID NO: 328438 - DNA, 30 bp, Artificial Sequence
  Synthetic oligonucleotide
cgtactttggaccactatctatttttcata

SEQ ID NO: 328439 - DNA, 30 bp, Artificial Sequence
  Synthetic oligonucleotide
tggaaagtcagtaaatatgagatgaagata

SEQ ID NO: 328440 - DNA, 30 bp, Artificial Sequence
  Synthetic oligonucleotide
gcccaggttgtagcggctcggtaacagata

SEQ ID NO: 328441 - DNA, 30 bp, Artificial Sequence
  Synthetic oligonucleotide
agggatcaaagagaacggttgacacagata

SEQ ID NO: 328442 - DNA, 30 bp, Artificial Sequence
  Synthetic oligonucleotide
ttgaatgtggctaagtttattccacagata

SEQ ID NO: 328443 - DNA, 30 bp, Artificial Sequence
  Synthetic oligonucleotide
tgaagccacgataatctcttcacccagata

SEQ ID NO: 328444 - DNA, 30 bp, Artificial Sequence
  Synthetic oligonucleotide
tattgacggacctggttattgggccagata

SEQ ID NO: 328445 - DNA, 30 bp, Artificial Sequence
  Synthetic oligonucleotide
gagaggaaggtgacacttcaaacgcagata

SEQ ID NO: 328446 - DNA, 30 bp, Artificial Sequence
  Synthetic oligonucleotide
tctgaccgggcccgacccagggcgcagata

SEQ ID NO: 328447 - DNA, 30 bp, Artificial Sequence
  Synthetic oligonucleotide
aatgaaggtctggccaattggcctcagata

SEQ ID NO: 328448 - DNA, 30 bp, Artificial Sequence
  Synthetic oligonucleotide
caattcatcccaagttaccctattcagata

SEQ ID NO: 328449 - DNA, 30 bp, Artificial Sequence
  Synthetic oligonucleotide
gtcctcagcagtgagaggtatgcagagata

SEQ ID NO: 328450 - DNA, 30 bp, Artificial Sequence
  Synthetic oligonucleotide
aagggggcactaacaagctttggagagata

SEQ ID NO: 328451 - DNA, 30 bp, Artificial Sequence
  Synthetic oligonucleotide
cggctgacgctttgtgagtctatagagata

SEQ ID NO: 328452 - DNA, 30 bp, Artificial Sequence
  Synthetic oligonucleotide
ctttgtatcagtacgacccgaaacgagata

SEQ ID NO: 328453 - DNA, 30 bp, Artificial Sequence
  Synthetic oligonucleotide
agcgattcgtacatggagaccttggagata

SEQ ID NO: 328454 - DNA, 30 bp, Artificial Sequence
  Synthetic oligonucleotide
gacatgggtaacaggtctttgtctgagata

SEQ ID NO: 328455 - DNA, 30 bp, Artificial Sequence
  Synthetic oligonucleotide
agggagtttgacaaccatctaggtgagata

SEQ ID NO: 328456 - DNA, 30 bp, Artificial Sequence
  Synthetic oligonucleotide
ttcatagtagcaaagaactttattgagata

SEQ ID NO: 328457 - DNA, 30 bp, Artificial Sequence
  Synthetic oligonucleotide
aagaatacaacaatgaggccggttgagata

SEQ ID NO: 328458 - DNA, 30 bp, Artificial Sequence
  Synthetic oligonucleotide
acaccattgcctcggtatgagaaatagata

SEQ ID NO: 328459 - DNA, 30 bp, Artificial Sequence
  Synthetic oligonucleotide
taagccgttctatatttgtataaatagata

SEQ ID NO: 328460 - DNA, 30 bp, Artificial Sequence
  Synthetic oligonucleotide
gcagcgcctaatccctacagtttatagata

SEQ ID NO: 328461 - DNA, 30 bp, Artificial Sequence
  Synthetic oligonucleotide
gcccgatccgtcaccgggacaaactagata

SEQ ID NO: 328462 - DNA, 30 bp, Artificial Sequence
  Synthetic oligonucleotide
agtaggttcgtactaaaaggcaactagata

SEQ ID NO: 328463 - DNA, 30 bp, Artificial Sequence
  Synthetic oligonucleotide
ctggccggtagtgttcctggtctctagata

SEQ ID NO: 328464 - DNA, 30 bp, Artificial Sequence
  Synthetic oligonucleotide
cagaatttcgggctacggtataattagata

SEQ ID NO: 328465 - DNA, 30 bp, Artificial Sequence
  Synthetic oligonucleotide
gaaacgtacgtaccacagtggccttagata

SEQ ID NO: 328466 - DNA, 30 bp, Artificial Sequence
  Synthetic oligonucleotide
ctttccgttgtgccgtatggtggttagata

SEQ ID NO: 328467 - DNA, 30 bp, Artificial Sequence
  Synthetic oligonucleotide
gaaccaagtagtagatcagtcctttagata

SEQ ID NO: 328468 - DNA, 30 bp, Artificial Sequence
  Synthetic oligonucleotide
gtctaatatctcaggatagttaaaacgata

SEQ ID NO: 328469 - DNA, 30 bp, Artificial Sequence
  Synthetic oligonucleotide
aattagataacgtatagcgaggaaacgata

SEQ ID NO: 328470 - DNA, 30 bp, Artificial Sequence
  Synthetic oligonucleotide
ggctccggctgttcatctttagacacgata

SEQ ID NO: 328471 - DNA, 30 bp, Artificial Sequence
  Synthetic oligonucleotide
tgcatggatgtcataaagacttatacgata

SEQ ID NO: 328472 - DNA, 30 bp, Artificial Sequence
  Synthetic oligonucleotide
gtgatccaatctagtaccttaagtacgata

SEQ ID NO: 328473 - DNA, 30 bp, Artificial Sequence
  Synthetic oligonucleotide
aaaaggttaatctcgctagtcattacgata

SEQ ID NO: 328474 - DNA, 30 bp, Artificial Sequence
  Synthetic oligonucleotide
ctgacggcgttcgtacggggcccaccgata

SEQ ID NO: 328475 - DNA, 30 bp, Artificial Sequence
  Synthetic oligonucleotide
caacctgtgggccccgcaagatgaccgata

SEQ ID NO: 328476 - DNA, 30 bp, Artificial Sequence
  Synthetic oligonucleotide
atagagtcatttttgaatgtatagccgata

SEQ ID NO: 328477 - DNA, 30 bp, Artificial Sequence
  Synthetic oligonucleotide
aagatttccgcaggaactaccgcgccgata

SEQ ID NO: 328478 - DNA, 30 bp, Artificial Sequence
  Synthetic oligonucleotide
agaatggtatagctggcagtcgatccgata

SEQ ID NO: 328479 - DNA, 30 bp, Artificial Sequence
  Synthetic oligonucleotide
taagggcttgacagatcacgcattccgata

SEQ ID NO: 328480 - DNA, 30 bp, Artificial Sequence
  Synthetic oligonucleotide
tacgtgatgccgtaccgcagataagcgata

SEQ ID NO: 328481 - DNA, 30 bp, Artificial Sequence
  Synthetic oligonucleotide
gtcaacccgttcggcaaactgcgggcgata

SEQ ID NO: 328482 - DNA, 30 bp, Artificial Sequence
  Synthetic oligonucleotide
tacgctcactctcgctggcaccatgcgata

SEQ ID NO: 328483 - DNA, 30 bp, Artificial Sequence
  Synthetic oligonucleotide
gggcgagttcatgccgcctaaggtgcgata

SEQ ID NO: 328484 - DNA, 30 bp, Artificial Sequence
  Synthetic oligonucleotide
ttacaatgtgaggcatgatcggttgcgata

SEQ ID NO: 328485 - DNA, 30 bp, Artificial Sequence
  Synthetic oligonucleotide
gtcgactcggcgtgaaggagatttgcgata

SEQ ID NO: 328486 - DNA, 30 bp, Artificial Sequence
  Synthetic oligonucleotide
tatatagatttctcggtaaatcaatcgata

SEQ ID NO: 328487 - DNA, 30 bp, Artificial Sequence
  Synthetic oligonucleotide
tgttatcccctaacgcaatcgccatcgata

SEQ ID NO: 328488 - DNA, 30 bp, Artificial Sequence
  Synthetic oligonucleotide
gttagactagtcgggagtatatggtcgata

SEQ ID NO: 328489 - DNA, 30 bp, Artificial Sequence
  Synthetic oligonucleotide
aatgagagcgtttgttaataatattcgata

SEQ ID NO: 328490 - DNA, 30 bp, Artificial Sequence
  Synthetic oligonucleotide
ggtgaaattgaagcaaccctgtaaaggata

SEQ ID NO: 328491 - DNA, 30 bp, Artificial Sequence
  Synthetic oligonucleotide
ttccgaatttgtcgtggcccacgaaggata

SEQ ID NO: 328492 - DNA, 30 bp, Artificial Sequence
  Synthetic oligonucleotide
gtcctcaactgacattacaaatccaggata

SEQ ID NO: 328493 - DNA, 30 bp, Artificial Sequence
  Synthetic oligonucleotide
tctttgcactaccggaagcgcctcaggata

SEQ ID NO: 328494 - DNA, 30 bp, Artificial Sequence
  Synthetic oligonucleotide
gaaggctgcgctaagccacggaagaggata

SEQ ID NO: 328495 - DNA, 30 bp, Artificial Sequence
  Synthetic oligonucleotide
gtaactctgattggtttgttggggaggata

SEQ ID NO: 328496 - DNA, 30 bp, Artificial Sequence
  Synthetic oligonucleotide
ctcttacgagccaaactgtcacctaggata

SEQ ID NO: 328497 - DNA, 30 bp, Artificial Sequence
  Synthetic oligonucleotide
agcatggctcagatcgactccggtaggata

SEQ ID NO: 328498 - DNA, 30 bp, Artificial Sequence
  Synthetic oligonucleotide
gtaaaactgttacgggcaagggttaggata

SEQ ID NO: 328499 - DNA, 30 bp, Artificial Sequence
  Synthetic oligonucleotide
gcttgtttttattaaccacattaacggata

SEQ ID NO: 328500 - DNA, 30 bp, Artificial Sequence
  Synthetic oligonucleotide
gttatctggcgtctacagctaagacggata

SEQ ID NO: 328501 - DNA, 30 bp, Artificial Sequence
  Synthetic oligonucleotide
ctgggtgaccagtcatagaggaaccggata

SEQ ID NO: 328502 - DNA, 30 bp, Artificial Sequence
  Synthetic oligonucleotide
cggtaatttccgatgtaaccggaccggata

SEQ ID NO: 328503 - DNA, 30 bp, Artificial Sequence
  Synthetic oligonucleotide
gaccgcgcaactcggattgtttaccggata

SEQ ID NO: 328504 - DNA, 30 bp, Artificial Sequence
  Synthetic oligonucleotide
actcacacaagtacgcattaagcccggata

SEQ ID NO: 328505 - DNA, 30 bp, Artificial Sequence
  Synthetic oligonucleotide
gccgggttccgcttagttgtgtcccggata

SEQ ID NO: 328506 - DNA, 30 bp, Artificial Sequence
  Synthetic oligonucleotide
ggccactgataaggcggaagaagccggata

SEQ ID NO: 328507 - DNA, 30 bp, Artificial Sequence
  Synthetic oligonucleotide
cgtaatcatccaggtaacgtttgccggata

SEQ ID NO: 328508 - DNA, 30 bp, Artificial Sequence
  Synthetic oligonucleotide
cttcttccagtgatctcgagggatcggata

SEQ ID NO: 328509 - DNA, 30 bp, Artificial Sequence
  Synthetic oligonucleotide
tggcataaatagtgcgagacttgagggata

SEQ ID NO: 328510 - DNA, 30 bp, Artificial Sequence
  Synthetic oligonucleotide
tagcaattaaggctccaagggagcgggata

SEQ ID NO: 328511 - DNA, 30 bp, Artificial Sequence
  Synthetic oligonucleotide
gaacattatagttcacggttattcgggata

SEQ ID NO: 328512 - DNA, 30 bp, Artificial Sequence
  Synthetic oligonucleotide
ttgtatcaaaaaggaatagcttgggggata

SEQ ID NO: 328513 - DNA, 30 bp, Artificial Sequence
  Synthetic oligonucleotide
agacgatagatatgcggtttttgtgggata

SEQ ID NO: 328514 - DNA, 30 bp, Artificial Sequence
  Synthetic oligonucleotide
gtttaatggagacacaatataaaatggata

SEQ ID NO: 328515 - DNA, 30 bp, Artificial Sequence
  Synthetic oligonucleotide
tccagggactcccacgtacgtaaatggata

SEQ ID NO: 328516 - DNA, 30 bp, Artificial Sequence
  Synthetic oligonucleotide
aggtaatcgactctacagtttaaatggata

SEQ ID NO: 328517 - DNA, 30 bp, Artificial Sequence
  Synthetic oligonucleotide
caggtgtttggtgctgatatactatggata

SEQ ID NO: 328518 - DNA, 30 bp, Artificial Sequence
  Synthetic oligonucleotide
gcgccttagtaatcccattatctatggata

SEQ ID NO: 328519 - DNA, 30 bp, Artificial Sequence
  Synthetic oligonucleotide
tgctattgatgtcctgattctagctggata

SEQ ID NO: 328520 - DNA, 30 bp, Artificial Sequence
  Synthetic oligonucleotide
tgttctgcgttagtgcacagtatctggata

SEQ ID NO: 328521 - DNA, 30 bp, Artificial Sequence
  Synthetic oligonucleotide
ctcccaaagtggatgagccaggtctggata

SEQ ID NO: 328522 - DNA, 30 bp, Artificial Sequence
  Synthetic oligonucleotide
agtttccgcccaaatcgcggaaattggata

SEQ ID NO: 328523 - DNA, 30 bp, Artificial Sequence
  Synthetic oligonucleotide
tccccagtgacgaccacaggcgattggata

SEQ ID NO: 328524 - DNA, 30 bp, Artificial Sequence
  Synthetic oligonucleotide
catagtacatcttgtaccggttattggata

SEQ ID NO: 328525 - DNA, 30 bp, Artificial Sequence
  Synthetic oligonucleotide
aatggagaagtcgatagctattcttggata

SEQ ID NO: 328526 - DNA, 30 bp, Artificial Sequence
  Synthetic oligonucleotide
gctgcaggaactcgataccccgaaatgata

SEQ ID NO: 328527 - DNA, 30 bp, Artificial Sequence
  Synthetic oligonucleotide
gtactattatcacgggtgcaaccaatgata

SEQ ID NO: 328528 - DNA, 30 bp, Artificial Sequence
  Synthetic oligonucleotide
ggttgtttgatgtggctctgtagcatgata

SEQ ID NO: 328529 - DNA, 30 bp, Artificial Sequence
  Synthetic oligonucleotide
gaacagacgattactgtcgatttcatgata

SEQ ID NO: 328530 - DNA, 30 bp, Artificial Sequence
  Synthetic oligonucleotide
gatctcattgcataatccgtcgagatgata

SEQ ID NO: 328531 - DNA, 30 bp, Artificial Sequence
  Synthetic oligonucleotide
taggtatccatgacttctggccttatgata

SEQ ID NO: 328532 - DNA, 30 bp, Artificial Sequence
  Synthetic oligonucleotide
ccactcaacgataggtacagttttatgata

SEQ ID NO: 328533 - DNA, 30 bp, Artificial Sequence
  Synthetic oligonucleotide
ctagctgacaccttataacccgaactgata

SEQ ID NO: 328534 - DNA, 30 bp, Artificial Sequence
  Synthetic oligonucleotide
gactccggctgagcacttccagccctgata

SEQ ID NO: 328535 - DNA, 30 bp, Artificial Sequence
  Synthetic oligonucleotide
ccaaatgtaagaccggaaagatcgctgata

SEQ ID NO: 328536 - DNA, 30 bp, Artificial Sequence
  Synthetic oligonucleotide
aacttcggtatgagattcgttcggctgata

SEQ ID NO: 328537 - DNA, 30 bp, Artificial Sequence
  Synthetic oligonucleotide
caagcaagttaacgacggcctatgctgata

SEQ ID NO: 328538 - DNA, 30 bp, Artificial Sequence
  Synthetic oligonucleotide
cgaaccagataggccattttcaatctgata

SEQ ID NO: 328539 - DNA, 30 bp, Artificial Sequence
  Synthetic oligonucleotide
tgcgccatgccacagtgcctacaagtgata

SEQ ID NO: 328540 - DNA, 30 bp, Artificial Sequence
  Synthetic oligonucleotide
atgtccaagggtaaagtagactaagtgata

SEQ ID NO: 328541 - DNA, 30 bp, Artificial Sequence
  Synthetic oligonucleotide
ctctcgattcaaaggcgaagcccagtgata

SEQ ID NO: 328542 - DNA, 30 bp, Artificial Sequence
  Synthetic oligonucleotide
tgaaaagatggtgagatcaagctagtgata

SEQ ID NO: 328543 - DNA, 30 bp, Artificial Sequence
  Synthetic oligonucleotide
tcaggctaatggtgatcttcttccgtgata

SEQ ID NO: 328544 - DNA, 30 bp, Artificial Sequence
  Synthetic oligonucleotide
tcaagccaactggggtgtggtaaggtgata

SEQ ID NO: 328545 - DNA, 30 bp, Artificial Sequence
  Synthetic oligonucleotide
atatagcatcgatggtggaacaatgtgata

SEQ ID NO: 328546 - DNA, 30 bp, Artificial Sequence
  Synthetic oligonucleotide
gacctctcgccagcttaggagcgtgtgata

SEQ ID NO: 328547 - DNA, 30 bp, Artificial Sequence
  Synthetic oligonucleotide
aaagttctcaccacagaaattaaattgata

SEQ ID NO: 328548 - DNA, 30 bp, Artificial Sequence
  Synthetic oligonucleotide
acctactaatatgagaatactcagttgata

SEQ ID NO: 328549 - DNA, 30 bp, Artificial Sequence
  Synthetic oligonucleotide
tcaagatttgtgagcgattatacgttgata

SEQ ID NO: 328550 - DNA, 30 bp, Artificial Sequence
  Synthetic oligonucleotide
agagactcagcggaagttctgtggttgata

SEQ ID NO: 328551 - DNA, 30 bp, Artificial Sequence
  Synthetic oligonucleotide
tagagggagttttgcaggtaattgttgata

SEQ ID NO: 328552 - DNA, 30 bp, Artificial Sequence
  Synthetic oligonucleotide
ataaaaacactatggaacataaatttgata

SEQ ID NO: 328553 - DNA, 30 bp, Artificial Sequence
  Synthetic oligonucleotide
aactaatagcaagaatgtatttatttgata

SEQ ID NO: 328554 - DNA, 30 bp, Artificial Sequence
  Synthetic oligonucleotide
caaatgcgcacagtgtttagccgtttgata

SEQ ID NO: 328555 - DNA, 30 bp, Artificial Sequence
  Synthetic oligonucleotide
agtttctaaagtaattagcacgttttgata

SEQ ID NO: 328556 - DNA, 30 bp, Artificial Sequence
  Synthetic oligonucleotide
tagtagatccgctcccttgtggaaaatata

SEQ ID NO: 328557 - DNA, 30 bp, Artificial Sequence
  Synthetic oligonucleotide
agatcgcccacctgctctacctgaaatata

SEQ ID NO: 328558 - DNA, 30 bp, Artificial Sequence
  Synthetic oligonucleotide
ttactccaaccctattcgcctataaatata

SEQ ID NO: 328559 - DNA, 30 bp, Artificial Sequence
  Synthetic oligonucleotide
gttcatttggcggtggcgctagtcaatata

SEQ ID NO: 328560 - DNA, 30 bp, Artificial Sequence
  Synthetic oligonucleotide
gcatgttaacgtaggtaagaatcgaatata

SEQ ID NO: 328561 - DNA, 30 bp, Artificial Sequence
  Synthetic oligonucleotide
taacttacgccacttttacacaggaatata

SEQ ID NO: 328562 - DNA, 30 bp, Artificial Sequence
  Synthetic oligonucleotide
accacgcggaacattgcgacccctaatata

SEQ ID NO: 328563 - DNA, 30 bp, Artificial Sequence
  Synthetic oligonucleotide
gtgtacatattatgcgtatcggaacatata

SEQ ID NO: 328564 - DNA, 30 bp, Artificial Sequence
  Synthetic oligonucleotide
ccggtgtacacttttctagataaccatata

SEQ ID NO: 328565 - DNA, 30 bp, Artificial Sequence
  Synthetic oligonucleotide
gtgttcggcccgctgtttaatcaccatata

SEQ ID NO: 328566 - DNA, 30 bp, Artificial Sequence
  Synthetic oligonucleotide
aatcgagcatcaatcgtaatagagcatata

SEQ ID NO: 328567 - DNA, 30 bp, Artificial Sequence
  Synthetic oligonucleotide
tataataaagcacggcagcaagtgcatata

SEQ ID NO: 328568 - DNA, 30 bp, Artificial Sequence
  Synthetic oligonucleotide
attacgagcgctcactgaggaaaagatata

SEQ ID NO: 328569 - DNA, 30 bp, Artificial Sequence
  Synthetic oligonucleotide
tctatacgcgtaaaccgttcggaggatata

SEQ ID NO: 328570 - DNA, 30 bp, Artificial Sequence
  Synthetic oligonucleotide
ggtcttgctctctcgtatgaggttgatata

SEQ ID NO: 328571 - DNA, 30 bp, Artificial Sequence
  Synthetic oligonucleotide
tgacgcgaagcaggccttcttcaatatata

SEQ ID NO: 328572 - DNA, 30 bp, Artificial Sequence
  Synthetic oligonucleotide
ggtgtaggctcggggccgtggtaatatata

SEQ ID NO: 328573 - DNA, 30 bp, Artificial Sequence
  Synthetic oligonucleotide
ctctcctttattaaaactcaaccatatata

SEQ ID NO: 328574 - DNA, 30 bp, Artificial Sequence
  Synthetic oligonucleotide
acgcataagctggccccagggtgctatata

SEQ ID NO: 328575 - DNA, 30 bp, Artificial Sequence
  Synthetic oligonucleotide
gtgaagtgatgcttggaagagaattatata

SEQ ID NO: 328576 - DNA, 30 bp, Artificial Sequence
  Synthetic oligonucleotide
gtgtaatcggctcgggagtagccttatata

SEQ ID NO: 328577 - DNA, 30 bp, Artificial Sequence
  Synthetic oligonucleotide
tctcactaaatcagaatgataggttatata

SEQ ID NO: 328578 - DNA, 30 bp, Artificial Sequence
  Synthetic oligonucleotide
tgtctgtggttaacgacaacgtgttatata

SEQ ID NO: 328579 - DNA, 30 bp, Artificial Sequence
  Synthetic oligonucleotide
gagcaatgattcataggggagcacactata

SEQ ID NO: 328580 - DNA, 31 bp, Artificial Sequence
  Synthetic oligonucleotide
taacagaacatacatatataaacgcactata

SEQ ID NO: 328581 - DNA, 30 bp, Artificial Sequence
  Synthetic oligonucleotide
ctgtgtagaccgtatcgtgatcgcactata

SEQ ID NO: 328582 - DNA, 30 bp, Artificial Sequence
  Synthetic oligonucleotide
gtggtcaccttaaatctgaccatcactata

SEQ ID NO: 328583 - DNA, 31 bp, Artificial Sequence
  Synthetic oligonucleotide
tgccaggctggaactggttgtcctcactata

SEQ ID NO: 328584 - DNA, 30 bp, Artificial Sequence
  Synthetic oligonucleotide
ttaccgcttgccgaattataagtcactata

SEQ ID NO: 328585 - DNA, 30 bp, Artificial Sequence
  Synthetic oligonucleotide
aagcagatccccgatcgtgaattcactata

SEQ ID NO: 328586 - DNA, 30 bp, Artificial Sequence
  Synthetic oligonucleotide
tggaaagaagagtacctgggtactactata

SEQ ID NO: 328587 - DNA, 30 bp, Artificial Sequence
  Synthetic oligonucleotide
gaagctccacgagtaaatgttgttactata

SEQ ID NO: 328588 - DNA, 30 bp, Artificial Sequence
  Synthetic oligonucleotide
cttcgccacggaggttcaatctttactata

SEQ ID NO: 328589 - DNA, 30 bp, Artificial Sequence
  Synthetic oligonucleotide
cgacacgtaacgcagtatacttgacctata

SEQ ID NO: 328590 - DNA, 30 bp, Artificial Sequence
  Synthetic oligonucleotide
cggggatgctcttaagaaccgtcccctata

SEQ ID NO: 328591 - DNA, 30 bp, Artificial Sequence
  Synthetic oligonucleotide
atgggagggctcgggaggagattccctata

SEQ ID NO: 328592 - DNA, 30 bp, Artificial Sequence
  Synthetic oligonucleotide
agagacatcgaccctctgtcggagcctata

SEQ ID NO: 328593 - DNA, 30 bp, Artificial Sequence
  Synthetic oligonucleotide
agttctttcgtagtagctgagtcgcctata

SEQ ID NO: 328594 - DNA, 30 bp, Artificial Sequence
  Synthetic oligonucleotide
atagatatcatagattctttggctcctata

SEQ ID NO: 328595 - DNA, 30 bp, Artificial Sequence
  Synthetic oligonucleotide
gtatagacctaatgtccaatgtcagctata

SEQ ID NO: 328596 - DNA, 30 bp, Artificial Sequence
  Synthetic oligonucleotide
aaagacccaaactgaaggaccgtagctata

SEQ ID NO: 328597 - DNA, 30 bp, Artificial Sequence
  Synthetic oligonucleotide
gatgggtggctctcggaaaattccgctata

SEQ ID NO: 328598 - DNA, 30 bp, Artificial Sequence
  Synthetic oligonucleotide
aagaaaatagagcccttcgtgccggctata

SEQ ID NO: 328599 - DNA, 30 bp, Artificial Sequence
  Synthetic oligonucleotide
ttaattacccggggaaatcgccatgctata

SEQ ID NO: 328600 - DNA, 30 bp, Artificial Sequence
  Synthetic oligonucleotide
gttatgtcacaagaatttgcctaatctata

SEQ ID NO: 328601 - DNA, 30 bp, Artificial Sequence
  Synthetic oligonucleotide
atctggtgtgataacgattccttatctata

SEQ ID NO: 328602 - DNA, 30 bp, Artificial Sequence
  Synthetic oligonucleotide
ttagattaaactagggcatagatctctata

SEQ ID NO: 328603 - DNA, 30 bp, Artificial Sequence
  Synthetic oligonucleotide
tcgaaggtacggtacggcctttcgtctata

SEQ ID NO: 328604 - DNA, 30 bp, Artificial Sequence
  Synthetic oligonucleotide
gtacaggttcgctttgcctgtaattctata

SEQ ID NO: 328605 - DNA, 30 bp, Artificial Sequence
  Synthetic oligonucleotide
taaggggcctatctctaacaacattctata

SEQ ID NO: 328606 - DNA, 30 bp, Artificial Sequence
  Synthetic oligonucleotide
tgtgatgcacattggtaaccacgaagtata

SEQ ID NO: 328607 - DNA, 30 bp, Artificial Sequence
  Synthetic oligonucleotide
accgctcgctcttccgtgatcctaagtata

SEQ ID NO: 328608 - DNA, 30 bp, Artificial Sequence
  Synthetic oligonucleotide
ggctaccactaagcattgtacaccagtata

SEQ ID NO: 328609 - DNA, 30 bp, Artificial Sequence
  Synthetic oligonucleotide
gggtttactcagtgatgtctaagcagtata

SEQ ID NO: 328610 - DNA, 30 bp, Artificial Sequence
  Synthetic oligonucleotide
gtactggcagaagttctaggcgagagtata

SEQ ID NO: 328611 - DNA, 30 bp, Artificial Sequence
  Synthetic oligonucleotide
gaagtgagaatggagagttcgcggagtata

SEQ ID NO: 328612 - DNA, 30 bp, Artificial Sequence
  Synthetic oligonucleotide
aaactaaagattgcggttcaattgagtata

SEQ ID NO: 328613 - DNA, 30 bp, Artificial Sequence
  Synthetic oligonucleotide
tcttctggcatgagcgtaagggctagtata

SEQ ID NO: 328614 - DNA, 30 bp, Artificial Sequence
  Synthetic oligonucleotide
gaaatatgctcaagaaaagtaagtagtata

SEQ ID NO: 328615 - DNA, 30 bp, Artificial Sequence
  Synthetic oligonucleotide
acactcaaatgggtccggaagagtagtata

SEQ ID NO: 328616 - DNA, 30 bp, Artificial Sequence
  Synthetic oligonucleotide
gtttcctgttgggcctgcgtgagtagtata

SEQ ID NO: 328617 - DNA, 30 bp, Artificial Sequence
  Synthetic oligonucleotide
cctgcgatccgtgatcaccaaggtagtata

SEQ ID NO: 328618 - DNA, 30 bp, Artificial Sequence
  Synthetic oligonucleotide
tgatggtgcctattcaatacatttagtata

SEQ ID NO: 328619 - DNA, 30 bp, Artificial Sequence
  Synthetic oligonucleotide
cgggttgcttcggaagattcatcccgtata

SEQ ID NO: 328620 - DNA, 30 bp, Artificial Sequence
  Synthetic oligonucleotide
cttgaacgctgatttaagttagtccgtata

SEQ ID NO: 328621 - DNA, 30 bp, Artificial Sequence
  Synthetic oligonucleotide
tacaataacttatcaaggtcaaggcgtata

SEQ ID NO: 328622 - DNA, 30 bp, Artificial Sequence
  Synthetic oligonucleotide
gcattcatatggtgatagcatcggcgtata

SEQ ID NO: 328623 - DNA, 30 bp, Artificial Sequence
  Synthetic oligonucleotide
gatagggagactcctccaatgtatcgtata

SEQ ID NO: 328624 - DNA, 30 bp, Artificial Sequence
  Synthetic oligonucleotide
agctttgatactgcttgggctcgtcgtata

SEQ ID NO: 328625 - DNA, 30 bp, Artificial Sequence
  Synthetic oligonucleotide
tcaaaactcagctgcaaattatgtcgtata

SEQ ID NO: 328626 - DNA, 30 bp, Artificial Sequence
  Synthetic oligonucleotide
actctcgaggctctgatcttcgagggtata

SEQ ID NO: 328627 - DNA, 30 bp, Artificial Sequence
  Synthetic oligonucleotide
cgacgctgaacttaaggaccgttgggtata

SEQ ID NO: 328628 - DNA, 30 bp, Artificial Sequence
  Synthetic oligonucleotide
ttgaagaacgtcacgtcaccgcgtggtata

SEQ ID NO: 328629 - DNA, 30 bp, Artificial Sequence
  Synthetic oligonucleotide
ccgaatcggttcaaaccgttgggtggtata

SEQ ID NO: 328630 - DNA, 30 bp, Artificial Sequence
  Synthetic oligonucleotide
tcgcttagcgctctcctcataagatgtata

SEQ ID NO: 328631 - DNA, 30 bp, Artificial Sequence
  Synthetic oligonucleotide
gtataagctcgaccgcgatacttatgtata

SEQ ID NO: 328632 - DNA, 30 bp, Artificial Sequence
  Synthetic oligonucleotide
gcgtccatctcttgacatttcgggtgtata

SEQ ID NO: 328633 - DNA, 30 bp, Artificial Sequence
  Synthetic oligonucleotide
taagatgtggccgaatatatataaattata

SEQ ID NO: 328634 - DNA, 30 bp, Artificial Sequence
  Synthetic oligonucleotide
acggtcgtgatacgtcagcgttaaattata

SEQ ID NO: 328635 - DNA, 30 bp, Artificial Sequence
  Synthetic oligonucleotide
tgacgtgtctcgtgttcaagctgcattata

SEQ ID NO: 328636 - DNA, 30 bp, Artificial Sequence
  Synthetic oligonucleotide
tttataatccaaataaaggagatcattata

SEQ ID NO: 328637 - DNA, 30 bp, Artificial Sequence
  Synthetic oligonucleotide
tgctgttcttgctacaggtgttagattata

SEQ ID NO: 328638 - DNA, 30 bp, Artificial Sequence
  Synthetic oligonucleotide
cgtcggttccttgatgagagttggattata

SEQ ID NO: 328639 - DNA, 30 bp, Artificial Sequence
  Synthetic oligonucleotide
ggtgtatagtaaaacattctactgattata

SEQ ID NO: 328640 - DNA, 30 bp, Artificial Sequence
  Synthetic oligonucleotide
cgcggaggtcgctcaacatccggtattata

SEQ ID NO: 328641 - DNA, 30 bp, Artificial Sequence
  Synthetic oligonucleotide
tagattacaactcagggatcgcaccttata

SEQ ID NO: 328642 - DNA, 30 bp, Artificial Sequence
  Synthetic oligonucleotide
gagcgagtctattatataatcttccttata

SEQ ID NO: 328643 - DNA, 30 bp, Artificial Sequence
  Synthetic oligonucleotide
accgcacaacacgatgatacgtcgcttata

SEQ ID NO: 328644 - DNA, 30 bp, Artificial Sequence
  Synthetic oligonucleotide
gggtccagaggagcaacacgtaggcttata

SEQ ID NO: 328645 - DNA, 30 bp, Artificial Sequence
  Synthetic oligonucleotide
tctactaactgaccgaaaacgtggcttata

SEQ ID NO: 328646 - DNA, 30 bp, Artificial Sequence
  Synthetic oligonucleotide
agttgccatgactacaatacgaatcttata

SEQ ID NO: 328647 - DNA, 30 bp, Artificial Sequence
  Synthetic oligonucleotide
gcgcaattaatggccactattgatcttata

SEQ ID NO: 328648 - DNA, 30 bp, Artificial Sequence
  Synthetic oligonucleotide
aggagatggactaattatattgcagttata

SEQ ID NO: 328649 - DNA, 30 bp, Artificial Sequence
  Synthetic oligonucleotide
gtaggcgctgacacaggggcttacgttata

SEQ ID NO: 328650 - DNA, 30 bp, Artificial Sequence
  Synthetic oligonucleotide
tgcgggaacaattcagtaatgcaggttata

SEQ ID NO: 328651 - DNA, 30 bp, Artificial Sequence
  Synthetic oligonucleotide
tgaggtcgtcggagtgtgcctcaggttata

SEQ ID NO: 328652 - DNA, 30 bp, Artificial Sequence
  Synthetic oligonucleotide
ccctactcagcaattcagaggagggttata

SEQ ID NO: 328653 - DNA, 31 bp, Artificial Sequence
  Synthetic oligonucleotide
gaccgcggctgcttcatcaccccatgttata

SEQ ID NO: 328654 - DNA, 30 bp, Artificial Sequence
  Synthetic oligonucleotide
gctacccaagccggcgactagattgttata

SEQ ID NO: 328655 - DNA, 30 bp, Artificial Sequence
  Synthetic oligonucleotide
tctatcgtgttgaggtaacgaaaatttata

SEQ ID NO: 328656 - DNA, 30 bp, Artificial Sequence
  Synthetic oligonucleotide
cggatccccaagaactgctctctatttata

SEQ ID NO: 328657 - DNA, 30 bp, Artificial Sequence
  Synthetic oligonucleotide
gaacctggctgatgtgagcaggactttata

SEQ ID NO: 328658 - DNA, 29 bp, Artificial Sequence
  Synthetic oligonucleotide
acgaccatgttcaggcatcccgctttata

SEQ ID NO: 328659 - DNA, 30 bp, Artificial Sequence
  Synthetic oligonucleotide
tcattggagacccaacgccataagtttata

SEQ ID NO: 328660 - DNA, 30 bp, Artificial Sequence
  Synthetic oligonucleotide
cataagacccagcagtccgagttaaaacta

SEQ ID NO: 328661 - DNA, 30 bp, Artificial Sequence
  Synthetic oligonucleotide
accttactcgataactcagaccacaaacta

SEQ ID NO: 328662 - DNA, 30 bp, Artificial Sequence
  Synthetic oligonucleotide
ctctgctcatgagatcttattcccaaacta

SEQ ID NO: 328663 - DNA, 30 bp, Artificial Sequence
  Synthetic oligonucleotide
agcaggggtatgaggtatggttccaaacta

SEQ ID NO: 328664 - DNA, 30 bp, Artificial Sequence
  Synthetic oligonucleotide
gatccgctgttacagcttacaagcaaacta

SEQ ID NO: 328665 - DNA, 30 bp, Artificial Sequence
  Synthetic oligonucleotide
atccaatagagcatctattcgagcaaacta

SEQ ID NO: 328666 - DNA, 30 bp, Artificial Sequence
  Synthetic oligonucleotide
taaatgtttaaagggttcatccgcaaacta

SEQ ID NO: 328667 - DNA, 30 bp, Artificial Sequence
  Synthetic oligonucleotide
cgaagtaacctgttcgcaatatcgaaacta

SEQ ID NO: 328668 - DNA, 30 bp, Artificial Sequence
  Synthetic oligonucleotide
acaggcaggcctgattcatgagtgaaacta

SEQ ID NO: 328669 - DNA, 30 bp, Artificial Sequence
  Synthetic oligonucleotide
attcacccgcaaggggtcgaaaaacaacta

SEQ ID NO: 328670 - DNA, 29 bp, Artificial Sequence
  Synthetic oligonucleotide
attaatgcgtgttaagggcatgacaacta

SEQ ID NO: 328671 - DNA, 30 bp, Artificial Sequence
  Synthetic oligonucleotide
atcagatggccgcatgtgtctctacaacta

SEQ ID NO: 328672 - DNA, 30 bp, Artificial Sequence
  Synthetic oligonucleotide
cgcttggcaagagcatcttccaagcaacta

SEQ ID NO: 328673 - DNA, 30 bp, Artificial Sequence
  Synthetic oligonucleotide
ggcccttcgaaggttgacgagaagcaacta

SEQ ID NO: 328674 - DNA, 30 bp, Artificial Sequence
  Synthetic oligonucleotide
atgtcgtactggtctggcttgtctcaacta

SEQ ID NO: 328675 - DNA, 30 bp, Artificial Sequence
  Synthetic oligonucleotide
atgccgacacagccgattgcttaagaacta

SEQ ID NO: 328676 - DNA, 30 bp, Artificial Sequence
  Synthetic oligonucleotide
acaaatagttttgaggctgcctcagaacta

SEQ ID NO: 328677 - DNA, 30 bp, Artificial Sequence
  Synthetic oligonucleotide
catcatcatggcgcacagggtacggaacta

SEQ ID NO: 328678 - DNA, 30 bp, Artificial Sequence
  Synthetic oligonucleotide
tttgcagccaacgatcaagccgtggaacta

SEQ ID NO: 328679 - DNA, 30 bp, Artificial Sequence
  Synthetic oligonucleotide
ccaacatccaaagttcatatcgaataacta

SEQ ID NO: 328680 - DNA, 30 bp, Artificial Sequence
  Synthetic oligonucleotide
tagttattattcccactgttcagataacta

SEQ ID NO: 328681 - DNA, 30 bp, Artificial Sequence
  Synthetic oligonucleotide
gtggattgcttgacatacgtgatctaacta

SEQ ID NO: 328682 - DNA, 30 bp, Artificial Sequence
  Synthetic oligonucleotide
cccataatagctcttagtccctagtaacta

SEQ ID NO: 328683 - DNA, 30 bp, Artificial Sequence
  Synthetic oligonucleotide
gatcctcgcccacagatctggtggtaacta

SEQ ID NO: 328684 - DNA, 30 bp, Artificial Sequence
  Synthetic oligonucleotide
tacatatcctgcgggtatcggatgtaacta

SEQ ID NO: 328685 - DNA, 30 bp, Artificial Sequence
  Synthetic oligonucleotide
acaaatcctattatcatacatgtaacacta

SEQ ID NO: 328686 - DNA, 30 bp, Artificial Sequence
  Synthetic oligonucleotide
ctcctcataccatggatgctgcccacacta

SEQ ID NO: 328687 - DNA, 30 bp, Artificial Sequence
  Synthetic oligonucleotide
cattgtccagtccttgatgcgcgcacacta

SEQ ID NO: 328688 - DNA, 30 bp, Artificial Sequence
  Synthetic oligonucleotide
agatttcaaaggagagtattgtagacacta

SEQ ID NO: 328689 - DNA, 30 bp, Artificial Sequence
  Synthetic oligonucleotide
atgacctccttattttaaatttcgacacta

SEQ ID NO: 328690 - DNA, 30 bp, Artificial Sequence
  Synthetic oligonucleotide
aaggtgtgcttccgtactagtgggacacta

SEQ ID NO: 328691 - DNA, 30 bp, Artificial Sequence
  Synthetic oligonucleotide
gagaaacgttcgcttactcacttcccacta

SEQ ID NO: 328692 - DNA, 30 bp, Artificial Sequence
  Synthetic oligonucleotide
ctgctcgctctcacatcgctctgagcacta

SEQ ID NO: 328693 - DNA, 30 bp, Artificial Sequence
  Synthetic oligonucleotide
ttccgattgaagtgggcgagcaccgcacta

SEQ ID NO: 328694 - DNA, 30 bp, Artificial Sequence
  Synthetic oligonucleotide
ccccagatatccaggattatcaccgcacta

SEQ ID NO: 328695 - DNA, 30 bp, Artificial Sequence
  Synthetic oligonucleotide
gtgcaccgtggcaaaactgtaagcgcacta

SEQ ID NO: 328696 - DNA, 30 bp, Artificial Sequence
  Synthetic oligonucleotide
tgcggtccaggaatcggcagggtcgcacta

SEQ ID NO: 328697 - DNA, 30 bp, Artificial Sequence
  Synthetic oligonucleotide
gttaagtaagggcgaggttgttctgcacta

SEQ ID NO: 328698 - DNA, 30 bp, Artificial Sequence
  Synthetic oligonucleotide
gaatgcatcctccattagcccagatcacta

SEQ ID NO: 328699 - DNA, 30 bp, Artificial Sequence
  Synthetic oligonucleotide
gaggtatataaggggcttcccagatcacta

SEQ ID NO: 328700 - DNA, 30 bp, Artificial Sequence
  Synthetic oligonucleotide
gactagctattgctagcctctctatcacta

SEQ ID NO: 328701 - DNA, 30 bp, Artificial Sequence
  Synthetic oligonucleotide
cagaattccttcaatccgatcttatcacta

SEQ ID NO: 328702 - DNA, 30 bp, Artificial Sequence
  Synthetic oligonucleotide
ttgtagttcctgcgtcccgaagcctcacta

SEQ ID NO: 328703 - DNA, 30 bp, Artificial Sequence
  Synthetic oligonucleotide
tcaagcaaagccactgtagtgggctcacta

SEQ ID NO: 328704 - DNA, 30 bp, Artificial Sequence
  Synthetic oligonucleotide
taatatgtcgagcagatagttacgtcacta

SEQ ID NO: 328705 - DNA, 30 bp, Artificial Sequence
  Synthetic oligonucleotide
caaccggccccataacgcaaactgtcacta

SEQ ID NO: 328706 - DNA, 30 bp, Artificial Sequence
  Synthetic oligonucleotide
ataaagctgcgatgactacttaattcacta

SEQ ID NO: 328707 - DNA, 30 bp, Artificial Sequence
  Synthetic oligonucleotide
cgaccccgtttccgttaggaacgttcacta

SEQ ID NO: 328708 - DNA, 30 bp, Artificial Sequence
  Synthetic oligonucleotide
acttattagtgacgtatggcgatttcacta

SEQ ID NO: 328709 - DNA, 30 bp, Artificial Sequence
  Synthetic oligonucleotide
ccgattagaaaacgcaggagagtttcacta

SEQ ID NO: 328710 - DNA, 30 bp, Artificial Sequence
  Synthetic oligonucleotide
ggtaggacgtaatagtgacagttttcacta

SEQ ID NO: 328711 - DNA, 30 bp, Artificial Sequence
  Synthetic oligonucleotide
gtacgctaaatgtggatcgaggtaagacta

SEQ ID NO: 328712 - DNA, 30 bp, Artificial Sequence
  Synthetic oligonucleotide
gatggtagcaatgaggggttcaacagacta

SEQ ID NO: 328713 - DNA, 30 bp, Artificial Sequence
  Synthetic oligonucleotide
gacaaacgaattatccacgtatccagacta

SEQ ID NO: 328714 - DNA, 30 bp, Artificial Sequence
  Synthetic oligonucleotide
ctgacggatatgcggagacgaagcagacta

SEQ ID NO: 328715 - DNA, 30 bp, Artificial Sequence
  Synthetic oligonucleotide
tcgcgtttcgccagccacgagcagagacta

SEQ ID NO: 328716 - DNA, 30 bp, Artificial Sequence
  Synthetic oligonucleotide
attacacattaactggccaaatctagacta

SEQ ID NO: 328717 - DNA, 30 bp, Artificial Sequence
  Synthetic oligonucleotide
tgtttagaatgggtagatgacgaacgacta

SEQ ID NO: 328718 - DNA, 30 bp, Artificial Sequence
  Synthetic oligonucleotide
gtaagacgctgtaatgtttttcttcgacta

SEQ ID NO: 328719 - DNA, 30 bp, Artificial Sequence
  Synthetic oligonucleotide
ttcagacattgttacgcagggacaggacta

SEQ ID NO: 328720 - DNA, 30 bp, Artificial Sequence
  Synthetic oligonucleotide
tcaagtctgagcatattaaaccgaggacta

SEQ ID NO: 328721 - DNA, 30 bp, Artificial Sequence
  Synthetic oligonucleotide
ctagcaccattaggtcagactcgaggacta

SEQ ID NO: 328722 - DNA, 30 bp, Artificial Sequence
  Synthetic oligonucleotide
gcgattagatagagtcagtatgtaggacta

SEQ ID NO: 328723 - DNA, 30 bp, Artificial Sequence
  Synthetic oligonucleotide
agatcaatagcatattcccgtaacggacta

SEQ ID NO: 328724 - DNA, 30 bp, Artificial Sequence
  Synthetic oligonucleotide
aggctggtcttctgggatttaagcggacta

SEQ ID NO: 328725 - DNA, 30 bp, Artificial Sequence
  Synthetic oligonucleotide
aggatttcgatttgatagattatcggacta

SEQ ID NO: 328726 - DNA, 30 bp, Artificial Sequence
  Synthetic oligonucleotide
atacccctgttgcaggcgtctttcggacta

SEQ ID NO: 328727 - DNA, 30 bp, Artificial Sequence
  Synthetic oligonucleotide
ccgctactgatgtagatcgggcagggacta

SEQ ID NO: 328728 - DNA, 30 bp, Artificial Sequence
  Synthetic oligonucleotide
gcgccttagcaacggcagcgcaggggacta

SEQ ID NO: 328729 - DNA, 30 bp, Artificial Sequence
  Synthetic oligonucleotide
tttaggttgtccggaggatgaatgggacta

SEQ ID NO: 328730 - DNA, 30 bp, Artificial Sequence
  Synthetic oligonucleotide
gggactcgcgacgggctaggcaatggacta

SEQ ID NO: 328731 - DNA, 30 bp, Artificial Sequence
  Synthetic oligonucleotide
cactgtgtgtgtcaagatcgcggtggacta

SEQ ID NO: 328732 - DNA, 30 bp, Artificial Sequence
  Synthetic oligonucleotide
ttgactttaaattctgagggggttggacta

SEQ ID NO: 328733 - DNA, 30 bp, Artificial Sequence
  Synthetic oligonucleotide
tattgtctcatgaaatgagtgggatgacta

SEQ ID NO: 328734 - DNA, 30 bp, Artificial Sequence
  Synthetic oligonucleotide
gccaaggggtaatacgactggtactgacta

SEQ ID NO: 328735 - DNA, 30 bp, Artificial Sequence
  Synthetic oligonucleotide
gtgatggacgccatggcatttcattgacta

SEQ ID NO: 328736 - DNA, 30 bp, Artificial Sequence
  Synthetic oligonucleotide
accggaggacggttggttagcatttgacta

SEQ ID NO: 328737 - DNA, 30 bp, Artificial Sequence
  Synthetic oligonucleotide
cggcccaccagggatagaggcctttgacta

SEQ ID NO: 328738 - DNA, 30 bp, Artificial Sequence
  Synthetic oligonucleotide
gcaagttggtgcgatacgcgagtttgacta

SEQ ID NO: 328739 - DNA, 30 bp, Artificial Sequence
  Synthetic oligonucleotide
aacacatgcaggatgccccatcacatacta

SEQ ID NO: 328740 - DNA, 30 bp, Artificial Sequence
  Synthetic oligonucleotide
aaaagtgggaacaaaaggtcctacatacta

SEQ ID NO: 328741 - DNA, 30 bp, Artificial Sequence
  Synthetic oligonucleotide
ctccataaattgagctaaaggcccatacta

SEQ ID NO: 328742 - DNA, 31 bp, Artificial Sequence
  Synthetic oligonucleotide
ggccctcccgcctgagttggctcaactacta

SEQ ID NO: 328743 - DNA, 30 bp, Artificial Sequence
  Synthetic oligonucleotide
gatagtgacaaaggtatgtaatgactacta

SEQ ID NO: 328744 - DNA, 31 bp, Artificial Sequence
  Synthetic oligonucleotide
taggattggttcctagcggacttgactacta

SEQ ID NO: 328745 - DNA, 30 bp, Artificial Sequence
  Synthetic oligonucleotide
ggcataaaaagatacttgaacgccgtacta

SEQ ID NO: 328746 - DNA, 30 bp, Artificial Sequence
  Synthetic oligonucleotide
tcacatgcacgtgtgaatattaaggtacta

SEQ ID NO: 328747 - DNA, 30 bp, Artificial Sequence
  Synthetic oligonucleotide
gcggcctgttaactcagggtgccggtacta

SEQ ID NO: 328748 - DNA, 30 bp, Artificial Sequence
  Synthetic oligonucleotide
gtaaagctagacctcccttacagggtacta

SEQ ID NO: 328749 - DNA, 30 bp, Artificial Sequence
  Synthetic oligonucleotide
gcctcgtacaataatataacgtttgtacta

SEQ ID NO: 328750 - DNA, 30 bp, Artificial Sequence
  Synthetic oligonucleotide
actcggtaatgaatcaaaggtcgattacta

SEQ ID NO: 328751 - DNA, 30 bp, Artificial Sequence
  Synthetic oligonucleotide
cgccttgctttaacagaaatgtccttacta

SEQ ID NO: 328752 - DNA, 30 bp, Artificial Sequence
  Synthetic oligonucleotide
gccgcagcagcgattgtcaggcggttacta

SEQ ID NO: 328753 - DNA, 30 bp, Artificial Sequence
  Synthetic oligonucleotide
aactccggtaaggtaaatcgatggttacta

SEQ ID NO: 328754 - DNA, 30 bp, Artificial Sequence
  Synthetic oligonucleotide
tgcatggggggattcaaatagctgttacta

SEQ ID NO: 328755 - DNA, 30 bp, Artificial Sequence
  Synthetic oligonucleotide
agggatagaccgaaaataccggctttacta

SEQ ID NO: 328756 - DNA, 30 bp, Artificial Sequence
  Synthetic oligonucleotide
aagaattcgggaggagtttagcgtttacta

SEQ ID NO: 328757 - DNA, 30 bp, Artificial Sequence
  Synthetic oligonucleotide
ctcgcgatgattaaccttcgtgaaaaccta

SEQ ID NO: 328758 - DNA, 31 bp, Artificial Sequence
  Synthetic oligonucleotide
ctcaaaacattttgcaaatgcgccgaaccta

SEQ ID NO: 328759 - DNA, 30 bp, Artificial Sequence
  Synthetic oligonucleotide
cagtgactactggggcgcaaaagtaaccta

SEQ ID NO: 328760 - DNA, 30 bp, Artificial Sequence
  Synthetic oligonucleotide
cgggaagaggaaagcttgaccgttaaccta

SEQ ID NO: 328761 - DNA, 30 bp, Artificial Sequence
  Synthetic oligonucleotide
ttcaaagcgtacaacgcaacgcaagaccta

SEQ ID NO: 328762 - DNA, 31 bp, Artificial Sequence
  Synthetic oligonucleotide
tggtctggctggccatatcactagagaccta

SEQ ID NO: 328763 - DNA, 30 bp, Artificial Sequence
  Synthetic oligonucleotide
aacattagccggagcgtgttcgccgaccta

SEQ ID NO: 328764 - DNA, 30 bp, Artificial Sequence
  Synthetic oligonucleotide
tctgcatgtccgacccttttagatgaccta

SEQ ID NO: 328765 - DNA, 30 bp, Artificial Sequence
  Synthetic oligonucleotide
gttactgtctaacatgtagtaggtgaccta

SEQ ID NO: 328766 - DNA, 30 bp, Artificial Sequence
  Synthetic oligonucleotide
ggggatcttctgcctccgttctgataccta

SEQ ID NO: 328767 - DNA, 30 bp, Artificial Sequence
  Synthetic oligonucleotide
ggcccctgtggtaggcacggtatataccta

SEQ ID NO: 328768 - DNA, 30 bp, Artificial Sequence
  Synthetic oligonucleotide
taaaggagcctcaatgttaacctgtaccta

SEQ ID NO: 328769 - DNA, 30 bp, Artificial Sequence
  Synthetic oligonucleotide
tgaggagccatagagggttccgcttaccta

SEQ ID NO: 328770 - DNA, 30 bp, Artificial Sequence
  Synthetic oligonucleotide
ggtaacgaatcggcctgcattgtttaccta

SEQ ID NO: 328771 - DNA, 30 bp, Artificial Sequence
  Synthetic oligonucleotide
gttgcaccgaactattgcagctcaacccta

SEQ ID NO: 328772 - DNA, 30 bp, Artificial Sequence
  Synthetic oligonucleotide
ggcagatgtgggcagcaagcttccacccta

SEQ ID NO: 328773 - DNA, 30 bp, Artificial Sequence
  Synthetic oligonucleotide
caattccaccgcgtactagcgcgcacccta

SEQ ID NO: 328774 - DNA, 30 bp, Artificial Sequence
  Synthetic oligonucleotide
actggtgccgcttgcggtgcggtcacccta

SEQ ID NO: 328775 - DNA, 30 bp, Artificial Sequence
  Synthetic oligonucleotide
tgtgaaagctattcttaagggaagacccta

SEQ ID NO: 328776 - DNA, 28 bp, Artificial Sequence
  Synthetic oligonucleotide
tcgaacgggtcagcacgtgccgacccta

SEQ ID NO: 328777 - DNA, 30 bp, Artificial Sequence
  Synthetic oligonucleotide
aggattcgtctcgacaaatacttgacccta

SEQ ID NO: 328778 - DNA, 30 bp, Artificial Sequence
  Synthetic oligonucleotide
ccctgatgttgtgaaaaggctgatacccta

SEQ ID NO: 328779 - DNA, 30 bp, Artificial Sequence
  Synthetic oligonucleotide
tcgtgcaacttgaagcttataaaagcccta

SEQ ID NO: 328780 - DNA, 30 bp, Artificial Sequence
  Synthetic oligonucleotide
gaatcagcctagggtcataacccagcccta

SEQ ID NO: 328781 - DNA, 30 bp, Artificial Sequence
  Synthetic oligonucleotide
tttactgtccatccgcgtagatcagcccta

SEQ ID NO: 328782 - DNA, 30 bp, Artificial Sequence
  Synthetic oligonucleotide
gcctcggcgcgcgccattgttttcgcccta

SEQ ID NO: 328783 - DNA, 30 bp, Artificial Sequence
  Synthetic oligonucleotide
tatgctcggggcatcaactttccggcccta

SEQ ID NO: 328784 - DNA, 30 bp, Artificial Sequence
  Synthetic oligonucleotide
ccactcgaacttagctcctcaagggcccta

SEQ ID NO: 328785 - DNA, 30 bp, Artificial Sequence
  Synthetic oligonucleotide
aaagggcatcacgttaatttgaatgcccta

SEQ ID NO: 328786 - DNA, 30 bp, Artificial Sequence
  Synthetic oligonucleotide
tactgtaacctcatgcatggggctgcccta

SEQ ID NO: 328787 - DNA, 30 bp, Artificial Sequence
  Synthetic oligonucleotide
gagaaagaaaaactttgccgtcaatcccta

SEQ ID NO: 328788 - DNA, 30 bp, Artificial Sequence
  Synthetic oligonucleotide
tcgcgccgttagccaccctaataatcccta

SEQ ID NO: 328789 - DNA, 30 bp, Artificial Sequence
  Synthetic oligonucleotide
cacagagacggatatttctcaacatcccta

SEQ ID NO: 328790 - DNA, 30 bp, Artificial Sequence
  Synthetic oligonucleotide
tggcctcttgattagccaccaccctcccta

SEQ ID NO: 328791 - DNA, 30 bp, Artificial Sequence
  Synthetic oligonucleotide
tcctccggagatcccaggatggggtcccta

SEQ ID NO: 328792 - DNA, 30 bp, Artificial Sequence
  Synthetic oligonucleotide
gatcgacgcgccggaggcttgagttcccta

SEQ ID NO: 328793 - DNA, 30 bp, Artificial Sequence
  Synthetic oligonucleotide
atgggtataaacaagtcttagtgttcccta

SEQ ID NO: 328794 - DNA, 30 bp, Artificial Sequence
  Synthetic oligonucleotide
gtatctgcaaagttacaactagtttcccta

SEQ ID NO: 328795 - DNA, 30 bp, Artificial Sequence
  Synthetic oligonucleotide
attcgtgtcacaacgaaatttttttcccta

SEQ ID NO: 328796 - DNA, 30 bp, Artificial Sequence
  Synthetic oligonucleotide
ttggccttcctctttaaaaagctaagccta

SEQ ID NO: 328797 - DNA, 30 bp, Artificial Sequence
  Synthetic oligonucleotide
ctgtgttcccaatgtagcgaacacagccta

SEQ ID NO: 328798 - DNA, 30 bp, Artificial Sequence
  Synthetic oligonucleotide
agttgcggtatcgtagatacctagagccta

SEQ ID NO: 328799 - DNA, 30 bp, Artificial Sequence
  Synthetic oligonucleotide
gaggcctacggagggatcgaatggagccta

SEQ ID NO: 328800 - DNA, 30 bp, Artificial Sequence
  Synthetic oligonucleotide
accagacgaatattggattggtatagccta

SEQ ID NO: 328801 - DNA, 30 bp, Artificial Sequence
  Synthetic oligonucleotide
agtcgtccagtctatttgctccgtagccta

SEQ ID NO: 328802 - DNA, 30 bp, Artificial Sequence
  Synthetic oligonucleotide
tattcgagcgcatgtcggacttaacgccta

SEQ ID NO: 328803 - DNA, 30 bp, Artificial Sequence
  Synthetic oligonucleotide
tatggaaggcgaaggtggcttgcacgccta

SEQ ID NO: 328804 - DNA, 30 bp, Artificial Sequence
  Synthetic oligonucleotide
caggaatcgtcctcatatccacgacgccta

SEQ ID NO: 328805 - DNA, 30 bp, Artificial Sequence
  Synthetic oligonucleotide
ctttatcgggtggcattgagggtacgccta

SEQ ID NO: 328806 - DNA, 30 bp, Artificial Sequence
  Synthetic oligonucleotide
agccgatatatcataggagggcagcgccta

SEQ ID NO: 328807 - DNA, 31 bp, Artificial Sequence
  Synthetic oligonucleotide
cgtggaacggccgggcgggattcgtcgccta

SEQ ID NO: 328808 - DNA, 30 bp, Artificial Sequence
  Synthetic oligonucleotide
ttagatggcgtttgaagataaattcgccta

SEQ ID NO: 328809 - DNA, 30 bp, Artificial Sequence
  Synthetic oligonucleotide
gatacatttagcgacgacggggttcgccta

SEQ ID NO: 328810 - DNA, 30 bp, Artificial Sequence
  Synthetic oligonucleotide
ccctacgaacgggcttgaggctaaggccta

SEQ ID NO: 328811 - DNA, 30 bp, Artificial Sequence
  Synthetic oligonucleotide
cgcagggagtccattctataaccaggccta

SEQ ID NO: 328812 - DNA, 30 bp, Artificial Sequence
  Synthetic oligonucleotide
taatccgataattgtctgagatcaggccta

SEQ ID NO: 328813 - DNA, 30 bp, Artificial Sequence
  Synthetic oligonucleotide
caatccgggattttcttgtgcataggccta

SEQ ID NO: 328814 - DNA, 30 bp, Artificial Sequence
  Synthetic oligonucleotide
acgcggcaagaaggagtggatcacggccta

SEQ ID NO: 328815 - DNA, 30 bp, Artificial Sequence
  Synthetic oligonucleotide
tcggatttacattcctatggatttggccta

SEQ ID NO: 328816 - DNA, 30 bp, Artificial Sequence
  Synthetic oligonucleotide
aagtaccgagcaggatgaggcatgtgccta

SEQ ID NO: 328817 - DNA, 30 bp, Artificial Sequence
  Synthetic oligonucleotide
agcccggccgtcggtgtacagctttgccta

SEQ ID NO: 328818 - DNA, 30 bp, Artificial Sequence
  Synthetic oligonucleotide
ccagatcgtagggatgataaacacatccta

SEQ ID NO: 328819 - DNA, 30 bp, Artificial Sequence
  Synthetic oligonucleotide
tgggacgcggtagctcctacgcacatccta

SEQ ID NO: 328820 - DNA, 30 bp, Artificial Sequence
  Synthetic oligonucleotide
aaagaattcgtgcgttagaaccagatccta

SEQ ID NO: 328821 - DNA, 30 bp, Artificial Sequence
  Synthetic oligonucleotide
ggctgtaacttttagaaattcccgatccta

SEQ ID NO: 328822 - DNA, 30 bp, Artificial Sequence
  Synthetic oligonucleotide
ccgacactggtaatggtgctactgatccta

SEQ ID NO: 328823 - DNA, 30 bp, Artificial Sequence
  Synthetic oligonucleotide
atgcgccactcgtaacggcccgtgatccta

SEQ ID NO: 328824 - DNA, 30 bp, Artificial Sequence
  Synthetic oligonucleotide
tggctattgttttaaacattcaaactccta

SEQ ID NO: 328825 - DNA, 30 bp, Artificial Sequence
  Synthetic oligonucleotide
gaaacggacataccgagggaaactctccta

SEQ ID NO: 328826 - DNA, 30 bp, Artificial Sequence
  Synthetic oligonucleotide
attgtcgtccagagcgaatcgctagtccta

SEQ ID NO: 328827 - DNA, 30 bp, Artificial Sequence
  Synthetic oligonucleotide
gctaaggcaggatagaaaaaattagtccta

SEQ ID NO: 328828 - DNA, 30 bp, Artificial Sequence
  Synthetic oligonucleotide
tgagcacttgcaactggggtactcgtccta

SEQ ID NO: 328829 - DNA, 30 bp, Artificial Sequence
  Synthetic oligonucleotide
gataagcagtaatatacctgaacggtccta

SEQ ID NO: 328830 - DNA, 30 bp, Artificial Sequence
  Synthetic oligonucleotide
agcagcgtgaaagacggtctaagggtccta

SEQ ID NO: 328831 - DNA, 30 bp, Artificial Sequence
  Synthetic oligonucleotide
ggaaatatctatcggtcagatcgggtccta

SEQ ID NO: 328832 - DNA, 30 bp, Artificial Sequence
  Synthetic oligonucleotide
atcagctccaggaatccgaggcaattccta

SEQ ID NO: 328833 - DNA, 30 bp, Artificial Sequence
  Synthetic oligonucleotide
atacggaccgggcaattcttggtcttccta

SEQ ID NO: 328834 - DNA, 30 bp, Artificial Sequence
  Synthetic oligonucleotide
gcgaagtcctcctgcaatcaagtgttccta

SEQ ID NO: 328835 - DNA, 30 bp, Artificial Sequence
  Synthetic oligonucleotide
attcgtcagtattacttcgatgctttccta

SEQ ID NO: 328836 - DNA, 30 bp, Artificial Sequence
  Synthetic oligonucleotide
tacacgtcctgaatctaaaataaaaagcta

SEQ ID NO: 328837 - DNA, 30 bp, Artificial Sequence
  Synthetic oligonucleotide
agcttggtcggaccggtcaaccacaagcta

SEQ ID NO: 328838 - DNA, 30 bp, Artificial Sequence
  Synthetic oligonucleotide
aaaattattaggctttaagaggacaagcta

SEQ ID NO: 328839 - DNA, 30 bp, Artificial Sequence
  Synthetic oligonucleotide
gtagtcccggcgtgacactcatacaagcta

SEQ ID NO: 328840 - DNA, 30 bp, Artificial Sequence
  Synthetic oligonucleotide
agacttcgttcggacaccatcatgaagcta

SEQ ID NO: 328841 - DNA, 30 bp, Artificial Sequence
  Synthetic oligonucleotide
cctttacgagatcggccctcctgacagcta

SEQ ID NO: 328842 - DNA, 30 bp, Artificial Sequence
  Synthetic oligonucleotide
tataacacctatgcggttttagtacagcta

SEQ ID NO: 328843 - DNA, 30 bp, Artificial Sequence
  Synthetic oligonucleotide
atttgcatgtccgccatgcccgaccagcta

SEQ ID NO: 328844 - DNA, 30 bp, Artificial Sequence
  Synthetic oligonucleotide
agtgagaggcccaggcaatataatcagcta

SEQ ID NO: 328845 - DNA, 30 bp, Artificial Sequence
  Synthetic oligonucleotide
gtgagcgcccaatcgctcatatctcagcta

SEQ ID NO: 328846 - DNA, 30 bp, Artificial Sequence
  Synthetic oligonucleotide
gaacattcaaggccgcaagggtaagagcta

SEQ ID NO: 328847 - DNA, 30 bp, Artificial Sequence
  Synthetic oligonucleotide
tgtcaaagatctttaccccttagagagcta

SEQ ID NO: 328848 - DNA, 30 bp, Artificial Sequence
  Synthetic oligonucleotide
taaggtactcgtcttgggttaatggagcta

SEQ ID NO: 328849 - DNA, 30 bp, Artificial Sequence
  Synthetic oligonucleotide
tttgggcggggtcttggcgaacgtgagcta

SEQ ID NO: 328850 - DNA, 30 bp, Artificial Sequence
  Synthetic oligonucleotide
gtaggttttaggtgtgggccagttgagcta

SEQ ID NO: 328851 - DNA, 30 bp, Artificial Sequence
  Synthetic oligonucleotide
ggttgtaggaacatgacgttgcactagcta

SEQ ID NO: 328852 - DNA, 30 bp, Artificial Sequence
  Synthetic oligonucleotide
gttggttggaccttatagaaatcctagcta

SEQ ID NO: 328853 - DNA, 30 bp, Artificial Sequence
  Synthetic oligonucleotide
tcgtgactgtgcggagctcacagctagcta

SEQ ID NO: 328854 - DNA, 30 bp, Artificial Sequence
  Synthetic oligonucleotide
caccgtggtccaaaatattcgggctagcta

SEQ ID NO: 328855 - DNA, 30 bp, Artificial Sequence
  Synthetic oligonucleotide
gtctgtacgcgttagctcaatgcgtagcta

SEQ ID NO: 328856 - DNA, 30 bp, Artificial Sequence
  Synthetic oligonucleotide
cgggggataagttggcgaacatcttagcta

SEQ ID NO: 328857 - DNA, 30 bp, Artificial Sequence
  Synthetic oligonucleotide
ataggtacattaggagacccctgttagcta

SEQ ID NO: 328858 - DNA, 30 bp, Artificial Sequence
  Synthetic oligonucleotide
gtttctcgtgaaattcaacgggaaacgcta

SEQ ID NO: 328859 - DNA, 30 bp, Artificial Sequence
  Synthetic oligonucleotide
tttatggaggccaccaattcgcctacgcta

SEQ ID NO: 328860 - DNA, 30 bp, Artificial Sequence
  Synthetic oligonucleotide
ggtatttattcgtatagcaccgctacgcta

SEQ ID NO: 328861 - DNA, 30 bp, Artificial Sequence
  Synthetic oligonucleotide
atttggctgacgaacttagtcgttacgcta

SEQ ID NO: 328862 - DNA, 30 bp, Artificial Sequence
  Synthetic oligonucleotide
cgctgtcacggctcgttctgaagaccgcta

SEQ ID NO: 328863 - DNA, 30 bp, Artificial Sequence
  Synthetic oligonucleotide
gaatagagtccatcgcggaccggcccgcta

SEQ ID NO: 328864 - DNA, 30 bp, Artificial Sequence
  Synthetic oligonucleotide
acttcactcttattttgtgcggtcccgcta

SEQ ID NO: 328865 - DNA, 31 bp, Artificial Sequence
  Synthetic oligonucleotide
atacttgaagttttttttaaaaggtccgcta

SEQ ID NO: 328866 - DNA, 30 bp, Artificial Sequence
  Synthetic oligonucleotide
agtcgtactaatcggctcctcagagcgcta

SEQ ID NO: 328867 - DNA, 30 bp, Artificial Sequence
  Synthetic oligonucleotide
ggtcttggtctgtccgtccggctagcgcta

SEQ ID NO: 328868 - DNA, 30 bp, Artificial Sequence
  Synthetic oligonucleotide
cttgctgctgggcgttccataaaggcgcta

SEQ ID NO: 328869 - DNA, 30 bp, Artificial Sequence
  Synthetic oligonucleotide
taaagggactagatgctcaactaggcgcta

SEQ ID NO: 328870 - DNA, 30 bp, Artificial Sequence
  Synthetic oligonucleotide
gagggtcatgatttggcggctttggcgcta

SEQ ID NO: 328871 - DNA, 30 bp, Artificial Sequence
  Synthetic oligonucleotide
tctcgtgttatcgagtgtctaagtgcgcta

SEQ ID NO: 328872 - DNA, 30 bp, Artificial Sequence
  Synthetic oligonucleotide
gagccgtataacggagtatacgttgcgcta

SEQ ID NO: 328873 - DNA, 30 bp, Artificial Sequence
  Synthetic oligonucleotide
ctctacgtcacgcttagtaggcgatcgcta

SEQ ID NO: 328874 - DNA, 30 bp, Artificial Sequence
  Synthetic oligonucleotide
tcatcttgtggctcgcggtaagcttcgcta

SEQ ID NO: 328875 - DNA, 30 bp, Artificial Sequence
  Synthetic oligonucleotide
gatatctttcttcagcggtcctcaaggcta

SEQ ID NO: 328876 - DNA, 30 bp, Artificial Sequence
  Synthetic oligonucleotide
tataatggtgttttgtgggacttcaggcta

SEQ ID NO: 328877 - DNA, 30 bp, Artificial Sequence
  Synthetic oligonucleotide
gctgctgacctgcggtaaggcaggaggcta

SEQ ID NO: 328878 - DNA, 30 bp, Artificial Sequence
  Synthetic oligonucleotide
gttgccccgttcaacactataactaggcta

SEQ ID NO: 328879 - DNA, 30 bp, Artificial Sequence
  Synthetic oligonucleotide
gccgtgacagtaatacctttctgacggcta

SEQ ID NO: 328880 - DNA, 30 bp, Artificial Sequence
  Synthetic oligonucleotide
agagatcttatgtttctaaagttacggcta

SEQ ID NO: 328881 - DNA, 30 bp, Artificial Sequence
  Synthetic oligonucleotide
ggacgttcacaagcgcgtatgtcccggcta

SEQ ID NO: 328882 - DNA, 30 bp, Artificial Sequence
  Synthetic oligonucleotide
gtaagggagcaaatgtggggtcagcggcta

SEQ ID NO: 328883 - DNA, 30 bp, Artificial Sequence
  Synthetic oligonucleotide
ttgacacggtcaaaacggcttgggcggcta

SEQ ID NO: 328884 - DNA, 30 bp, Artificial Sequence
  Synthetic oligonucleotide
ccacattgatccttacgttagaatcggcta

SEQ ID NO: 328885 - DNA, 30 bp, Artificial Sequence
  Synthetic oligonucleotide
atgggcgagagaggtaatatctatcggcta

SEQ ID NO: 328886 - DNA, 30 bp, Artificial Sequence
  Synthetic oligonucleotide
gctaacaccgcgtcgcgttagtatcggcta

SEQ ID NO: 328887 - DNA, 30 bp, Artificial Sequence
  Synthetic oligonucleotide
tagtgtgcctaaataggtcatattcggcta

SEQ ID NO: 328888 - DNA, 30 bp, Artificial Sequence
  Synthetic oligonucleotide
gtatggtatcgaaaagcattcgtagggcta

SEQ ID NO: 328889 - DNA, 30 bp, Artificial Sequence
  Synthetic oligonucleotide
gttgagattgtgtaaaggggaaacgggcta

SEQ ID NO: 328890 - DNA, 30 bp, Artificial Sequence
  Synthetic oligonucleotide
aaaagaatcattcccccggcgcgggggcta

SEQ ID NO: 328891 - DNA, 30 bp, Artificial Sequence
  Synthetic oligonucleotide
tattctcgtacatagggtcaaatggggcta

SEQ ID NO: 328892 - DNA, 30 bp, Artificial Sequence
  Synthetic oligonucleotide
tttagagacggtgggagaccgcatgggcta

SEQ ID NO: 328893 - DNA, 30 bp, Artificial Sequence
  Synthetic oligonucleotide
actcgtgcagggcggtagtcgtaatggcta

SEQ ID NO: 328894 - DNA, 30 bp, Artificial Sequence
  Synthetic oligonucleotide
gttttatcgactgacctcggtatatggcta

SEQ ID NO: 328895 - DNA, 30 bp, Artificial Sequence
  Synthetic oligonucleotide
cgtcgtaccggtcgtcagttagactggcta

SEQ ID NO: 328896 - DNA, 30 bp, Artificial Sequence
  Synthetic oligonucleotide
gggaatttggcctttaggtgtccctggcta

SEQ ID NO: 328897 - DNA, 30 bp, Artificial Sequence
  Synthetic oligonucleotide
ggttttaatcactaaagaccatgctggcta

SEQ ID NO: 328898 - DNA, 30 bp, Artificial Sequence
  Synthetic oligonucleotide
tcttgttagacagcgtggtggtggtggcta

SEQ ID NO: 328899 - DNA, 30 bp, Artificial Sequence
  Synthetic oligonucleotide
cgctacgttatgtgattgacgttgtggcta

SEQ ID NO: 328900 - DNA, 30 bp, Artificial Sequence
  Synthetic oligonucleotide
catttttgagtcgggacaaatccttggcta

SEQ ID NO: 328901 - DNA, 30 bp, Artificial Sequence
  Synthetic oligonucleotide
aaccctaatcggcgcaagcagggttggcta

SEQ ID NO: 328902 - DNA, 30 bp, Artificial Sequence
  Synthetic oligonucleotide
cctttttccggagttttgtgcctaatgcta

SEQ ID NO: 328903 - DNA, 30 bp, Artificial Sequence
  Synthetic oligonucleotide
acataactttaatcttgttgattcatgcta

SEQ ID NO: 328904 - DNA, 30 bp, Artificial Sequence
  Synthetic oligonucleotide
ggggtgcagctacggtaagttttcatgcta

SEQ ID NO: 328905 - DNA, 30 bp, Artificial Sequence
  Synthetic oligonucleotide
tctgtgaccccgatcttaaggcagatgcta

SEQ ID NO: 328906 - DNA, 30 bp, Artificial Sequence
  Synthetic oligonucleotide
gtcaagcaaatacgtcctattacgctgcta

SEQ ID NO: 328907 - DNA, 30 bp, Artificial Sequence
  Synthetic oligonucleotide
gacatccaaaccttgcggaagaggctgcta

SEQ ID NO: 328908 - DNA, 30 bp, Artificial Sequence
  Synthetic oligonucleotide
agttggacagggacgtttctgtctctgcta

SEQ ID NO: 328909 - DNA, 30 bp, Artificial Sequence
  Synthetic oligonucleotide
gggcggcacctggggttttggagtctgcta

SEQ ID NO: 328910 - DNA, 30 bp, Artificial Sequence
  Synthetic oligonucleotide
ccagcattatcgtacgtaactacagtgcta

SEQ ID NO: 328911 - DNA, 30 bp, Artificial Sequence
  Synthetic oligonucleotide
gtatttgctctatgagtgccatacgtgcta

SEQ ID NO: 328912 - DNA, 30 bp, Artificial Sequence
  Synthetic oligonucleotide
cgtcctttggcgggctagtgaggggtgcta

SEQ ID NO: 328913 - DNA, 30 bp, Artificial Sequence
  Synthetic oligonucleotide
tggaccgactgctaccagatcagtgtgcta

SEQ ID NO: 328914 - DNA, 30 bp, Artificial Sequence
  Synthetic oligonucleotide
gttgggaagttgaaggaccgacttgtgcta

SEQ ID NO: 328915 - DNA, 30 bp, Artificial Sequence
  Synthetic oligonucleotide
acgacgcagtctccacggaaatgattgcta

SEQ ID NO: 328916 - DNA, 30 bp, Artificial Sequence
  Synthetic oligonucleotide
ttttggggggaataaggacacgccttgcta

SEQ ID NO: 328917 - DNA, 30 bp, Artificial Sequence
  Synthetic oligonucleotide
cgactatatttcctgttacgcatgttgcta

SEQ ID NO: 328918 - DNA, 30 bp, Artificial Sequence
  Synthetic oligonucleotide
tagcatcagccacaactttgcgtgttgcta

SEQ ID NO: 328919 - DNA, 30 bp, Artificial Sequence
  Synthetic oligonucleotide
agtcctgttcctaacggtttatatttgcta

SEQ ID NO: 328920 - DNA, 30 bp, Artificial Sequence
  Synthetic oligonucleotide
cagtttacggttttagcgtgaccaaatcta

SEQ ID NO: 328921 - DNA, 30 bp, Artificial Sequence
  Synthetic oligonucleotide
gaacaaatcgtatgttagatgcgaaatcta

SEQ ID NO: 328922 - DNA, 30 bp, Artificial Sequence
  Synthetic oligonucleotide
cgcagggagaatccagagaccggaaatcta

SEQ ID NO: 328923 - DNA, 30 bp, Artificial Sequence
  Synthetic oligonucleotide
cgcctgaccgctggaaagttggacaatcta

SEQ ID NO: 328924 - DNA, 30 bp, Artificial Sequence
  Synthetic oligonucleotide
agagtgtatctgtatgttaggtacaatcta

SEQ ID NO: 328925 - DNA, 30 bp, Artificial Sequence
  Synthetic oligonucleotide
tttacatatcacttacacccgcagaatcta

SEQ ID NO: 328926 - DNA, 30 bp, Artificial Sequence
  Synthetic oligonucleotide
ctataataagattctatgattaggaatcta

SEQ ID NO: 328927 - DNA, 30 bp, Artificial Sequence
  Synthetic oligonucleotide
cccgctcaatccaaaggtatcgggaatcta

SEQ ID NO: 328928 - DNA, 30 bp, Artificial Sequence
  Synthetic oligonucleotide
ccccgcgagcacgtctaatgaacacatcta

SEQ ID NO: 328929 - DNA, 30 bp, Artificial Sequence
  Synthetic oligonucleotide
ttatatcaagagcataatctcgcacatcta

SEQ ID NO: 328930 - DNA, 30 bp, Artificial Sequence
  Synthetic oligonucleotide
agacttaggagacggtccgcgtgacatcta

SEQ ID NO: 328931 - DNA, 30 bp, Artificial Sequence
  Synthetic oligonucleotide
tccgtcttggactagggctcctcccatcta

SEQ ID NO: 328932 - DNA, 30 bp, Artificial Sequence
  Synthetic oligonucleotide
ggaatattccaatatgaacggtgccatcta

SEQ ID NO: 328933 - DNA, 30 bp, Artificial Sequence
  Synthetic oligonucleotide
cgtacactgcgttcacgtttaaagcatcta

SEQ ID NO: 328934 - DNA, 30 bp, Artificial Sequence
  Synthetic oligonucleotide
ctactatgtttccctctccgtttgcatcta

SEQ ID NO: 328935 - DNA, 30 bp, Artificial Sequence
  Synthetic oligonucleotide
caacgtatgcgggtgctgacgaatcatcta

SEQ ID NO: 328936 - DNA, 30 bp, Artificial Sequence
  Synthetic oligonucleotide
tatgcaacgttgtaactcaattctcatcta

SEQ ID NO: 328937 - DNA, 30 bp, Artificial Sequence
  Synthetic oligonucleotide
aactttgagctagttaacctcagtcatcta

SEQ ID NO: 328938 - DNA, 30 bp, Artificial Sequence
  Synthetic oligonucleotide
ggtgagtttcaggggtcggcatgagatcta

SEQ ID NO: 328939 - DNA, 30 bp, Artificial Sequence
  Synthetic oligonucleotide
ctgtactttggccgacggcgccgcgatcta

SEQ ID NO: 328940 - DNA, 30 bp, Artificial Sequence
  Synthetic oligonucleotide
gcatgtggacaacatagagctatggatcta

SEQ ID NO: 328941 - DNA, 30 bp, Artificial Sequence
  Synthetic oligonucleotide
cccgcctaaacgattagttggtgtgatcta

SEQ ID NO: 328942 - DNA, 30 bp, Artificial Sequence
  Synthetic oligonucleotide
gagcgtgtaattccaagtaacttatatcta

SEQ ID NO: 328943 - DNA, 30 bp, Artificial Sequence
  Synthetic oligonucleotide
aggcgcctctgttgtagaatgcactatcta

SEQ ID NO: 328944 - DNA, 30 bp, Artificial Sequence
  Synthetic oligonucleotide
gcacagattagagtaaattaggtctatcta

SEQ ID NO: 328945 - DNA, 30 bp, Artificial Sequence
  Synthetic oligonucleotide
gcgtctgaaaacgtgcctagacagtatcta

SEQ ID NO: 328946 - DNA, 30 bp, Artificial Sequence
  Synthetic oligonucleotide
atagaaggtcgacattgctacatgtatcta

SEQ ID NO: 328947 - DNA, 30 bp, Artificial Sequence
  Synthetic oligonucleotide
tagccaacaacaaggtattcacgttatcta

SEQ ID NO: 328948 - DNA, 30 bp, Artificial Sequence
  Synthetic oligonucleotide
tgtatgtacagtccccgaataatttatcta

SEQ ID NO: 328949 - DNA, 30 bp, Artificial Sequence
  Synthetic oligonucleotide
ggttgcgggctcctaacaagcgcaactcta

SEQ ID NO: 328950 - DNA, 30 bp, Artificial Sequence
  Synthetic oligonucleotide
caggacctccatgcccacaactgaactcta

SEQ ID NO: 328951 - DNA, 30 bp, Artificial Sequence
  Synthetic oligonucleotide
cacatgagagaattaaatgtcggtactcta

SEQ ID NO: 328952 - DNA, 30 bp, Artificial Sequence
  Synthetic oligonucleotide
cccatatcaacggagttgtattaacctcta

SEQ ID NO: 328953 - DNA, 30 bp, Artificial Sequence
  Synthetic oligonucleotide
caagataatcttaagttgacaagacctcta

SEQ ID NO: 328954 - DNA, 30 bp, Artificial Sequence
  Synthetic oligonucleotide
gattcgacaggaagcgtgtaagtacctcta

SEQ ID NO: 328955 - DNA, 30 bp, Artificial Sequence
  Synthetic oligonucleotide
tttggtacataaaccggcgatggccctcta

SEQ ID NO: 328956 - DNA, 30 bp, Artificial Sequence
  Synthetic oligonucleotide
atggtcgtgtcgtaccacgagctccctcta

SEQ ID NO: 328957 - DNA, 30 bp, Artificial Sequence
  Synthetic oligonucleotide
ccatggctcgatccgggttttttccctcta

SEQ ID NO: 328958 - DNA, 30 bp, Artificial Sequence
  Synthetic oligonucleotide
caggaacatacaacgcggtaaatgcctcta

SEQ ID NO: 328959 - DNA, 30 bp, Artificial Sequence
  Synthetic oligonucleotide
agagcatatctagactctctgtatcctcta

SEQ ID NO: 328960 - DNA, 30 bp, Artificial Sequence
  Synthetic oligonucleotide
acttctgggtatcgggttgggactcctcta

SEQ ID NO: 328961 - DNA, 30 bp, Artificial Sequence
  Synthetic oligonucleotide
gacgaagagatgctactccgctttcctcta

SEQ ID NO: 328962 - DNA, 30 bp, Artificial Sequence
  Synthetic oligonucleotide
ttaggcgtctcagagaggcacttcgctcta

SEQ ID NO: 328963 - DNA, 30 bp, Artificial Sequence
  Synthetic oligonucleotide
ccgatgtagctgggtcgagctaaggctcta

SEQ ID NO: 328964 - DNA, 30 bp, Artificial Sequence
  Synthetic oligonucleotide
tctgcaaatcatcgagcatttacggctcta

SEQ ID NO: 328965 - DNA, 30 bp, Artificial Sequence
  Synthetic oligonucleotide
ccaagttccggaatagaaagctatgctcta

SEQ ID NO: 328966 - DNA, 30 bp, Artificial Sequence
  Synthetic oligonucleotide
aataggaaatcgataatagttcctgctcta

SEQ ID NO: 328967 - DNA, 30 bp, Artificial Sequence
  Synthetic oligonucleotide
gtggctgggcacaactaaataagtgctcta

SEQ ID NO: 328968 - DNA, 29 bp, Artificial Sequence
  Synthetic oligonucleotide
gcagatccaagttcacgaatcgtgctcta

SEQ ID NO: 328969 - DNA, 30 bp, Artificial Sequence
  Synthetic oligonucleotide
caggacggtgatgtttatcaacaatctcta

SEQ ID NO: 328970 - DNA, 30 bp, Artificial Sequence
  Synthetic oligonucleotide
ctgcggctgataaggtttgaacaatctcta

SEQ ID NO: 328971 - DNA, 30 bp, Artificial Sequence
  Synthetic oligonucleotide
ttgagtgggtcagtacccagaggatctcta

SEQ ID NO: 328972 - DNA, 30 bp, Artificial Sequence
  Synthetic oligonucleotide
agggtcattggcgactcgtttaattctcta

SEQ ID NO: 328973 - DNA, 30 bp, Artificial Sequence
  Synthetic oligonucleotide
aatgggcgctgtcactggtgttcttctcta

SEQ ID NO: 328974 - DNA, 30 bp, Artificial Sequence
  Synthetic oligonucleotide
tagttccatcatgcatctgggcgaagtcta

SEQ ID NO: 328975 - DNA, 30 bp, Artificial Sequence
  Synthetic oligonucleotide
tgacagcagttattcgttacgggaagtcta

SEQ ID NO: 328976 - DNA, 30 bp, Artificial Sequence
  Synthetic oligonucleotide
caaacaccgaccttttcagttagcagtcta

SEQ ID NO: 328977 - DNA, 30 bp, Artificial Sequence
  Synthetic oligonucleotide
ggagccagacttgagatcaaggtcagtcta

SEQ ID NO: 328978 - DNA, 30 bp, Artificial Sequence
  Synthetic oligonucleotide
agaaacagtatcaacccgcaggcgagtcta

SEQ ID NO: 328979 - DNA, 30 bp, Artificial Sequence
  Synthetic oligonucleotide
agaggttttcgtgcaaaggacaggagtcta

SEQ ID NO: 328980 - DNA, 30 bp, Artificial Sequence
  Synthetic oligonucleotide
atgggtgattggattcctaaaaatagtcta

SEQ ID NO: 328981 - DNA, 30 bp, Artificial Sequence
  Synthetic oligonucleotide
atatcatagctgaggttggggagacgtcta

SEQ ID NO: 328982 - DNA, 30 bp, Artificial Sequence
  Synthetic oligonucleotide
tatgatggcgtctctggcagagcccgtcta

SEQ ID NO: 328983 - DNA, 30 bp, Artificial Sequence
  Synthetic oligonucleotide
cagttgacgctatcagccagtaggcgtcta

SEQ ID NO: 328984 - DNA, 30 bp, Artificial Sequence
  Synthetic oligonucleotide
gttggcgtgttccttgctcataatcgtcta

SEQ ID NO: 328985 - DNA, 30 bp, Artificial Sequence
  Synthetic oligonucleotide
ctcagaattttgcactgaattacaggtcta

SEQ ID NO: 328986 - DNA, 30 bp, Artificial Sequence
  Synthetic oligonucleotide
ggcggctggggaccggactggccaggtcta

SEQ ID NO: 328987 - DNA, 30 bp, Artificial Sequence
  Synthetic oligonucleotide
cgtcttttgcgttaggggatggcaggtcta

SEQ ID NO: 328988 - DNA, 30 bp, Artificial Sequence
  Synthetic oligonucleotide
gataagaataacctggtcaaactcggtcta

SEQ ID NO: 328989 - DNA, 30 bp, Artificial Sequence
  Synthetic oligonucleotide
aaccggcgtgaggacgttatcttcggtcta

SEQ ID NO: 328990 - DNA, 30 bp, Artificial Sequence
  Synthetic oligonucleotide
ggcactacttgagcatttggctcgggtcta

SEQ ID NO: 328991 - DNA, 30 bp, Artificial Sequence
  Synthetic oligonucleotide
taatggagatgttggtctcgttatggtcta

SEQ ID NO: 328992 - DNA, 30 bp, Artificial Sequence
  Synthetic oligonucleotide
ccatcctgtcagtgcaccagaggctgtcta

SEQ ID NO: 328993 - DNA, 30 bp, Artificial Sequence
  Synthetic oligonucleotide
cacagcaagaattggttcacgaagtgtcta

SEQ ID NO: 328994 - DNA, 30 bp, Artificial Sequence
  Synthetic oligonucleotide
attaacgttaaccttgcgtagacgtgtcta

SEQ ID NO: 328995 - DNA, 30 bp, Artificial Sequence
  Synthetic oligonucleotide
tagtcatcctgtttcccagacccgtgtcta

SEQ ID NO: 328996 - DNA, 30 bp, Artificial Sequence
  Synthetic oligonucleotide
gactccgcgataaggcgtgtcatgtgtcta

SEQ ID NO: 328997 - DNA, 30 bp, Artificial Sequence
  Synthetic oligonucleotide
ctggggaatttgactctctcactttgtcta

SEQ ID NO: 328998 - DNA, 30 bp, Artificial Sequence
  Synthetic oligonucleotide
gagcgtatagctgtagtagtgtaaattcta

SEQ ID NO: 328999 - DNA, 30 bp, Artificial Sequence
  Synthetic oligonucleotide
aacgatagtatcgttacgaaatccattcta

SEQ ID NO: 329000 - DNA, 30 bp, Artificial Sequence
  Synthetic oligonucleotide
tgtgccttccgatggaaggtctccattcta

SEQ ID NO: 329001 - DNA, 30 bp, Artificial Sequence
  Synthetic oligonucleotide
gatgtcgccagacatgagttgctcattcta

SEQ ID NO: 329002 - DNA, 30 bp, Artificial Sequence
  Synthetic oligonucleotide
atcagttcactggggaaatagattattcta

SEQ ID NO: 329003 - DNA, 30 bp, Artificial Sequence
  Synthetic oligonucleotide
aacttacttcaatagaatagctttattcta

SEQ ID NO: 329004 - DNA, 30 bp, Artificial Sequence
  Synthetic oligonucleotide
gtggccacaaggcgtataatttttattcta

SEQ ID NO: 329005 - DNA, 30 bp, Artificial Sequence
  Synthetic oligonucleotide
gtgactaccacgatcgtccaactacttcta

SEQ ID NO: 329006 - DNA, 30 bp, Artificial Sequence
  Synthetic oligonucleotide
aacgggttgctcagaatttttgtacttcta

SEQ ID NO: 329007 - DNA, 30 bp, Artificial Sequence
  Synthetic oligonucleotide
aggccagtatccgagctggcggagcttcta

SEQ ID NO: 329008 - DNA, 30 bp, Artificial Sequence
  Synthetic oligonucleotide
gcacggtcccttcgcactggaccagttcta

SEQ ID NO: 329009 - DNA, 30 bp, Artificial Sequence
  Synthetic oligonucleotide
accggtcgggttcgtttactctgagttcta

SEQ ID NO: 329010 - DNA, 30 bp, Artificial Sequence
  Synthetic oligonucleotide
taccggaacgggttattaagtggcgttcta

SEQ ID NO: 329011 - DNA, 30 bp, Artificial Sequence
  Synthetic oligonucleotide
gactagattgccgtacaggtaagggttcta

SEQ ID NO: 329012 - DNA, 30 bp, Artificial Sequence
  Synthetic oligonucleotide
ctttggtatctacttagaaggtgggttcta

SEQ ID NO: 329013 - DNA, 30 bp, Artificial Sequence
  Synthetic oligonucleotide
agtgtgaaacgacttgccgccaatgttcta

SEQ ID NO: 329014 - DNA, 30 bp, Artificial Sequence
  Synthetic oligonucleotide
catttctgaaaaccgtaagttgatgttcta

SEQ ID NO: 329015 - DNA, 30 bp, Artificial Sequence
  Synthetic oligonucleotide
tctcctgcatgaatatgtcatcaatttcta

SEQ ID NO: 329016 - DNA, 30 bp, Artificial Sequence
  Synthetic oligonucleotide
tttgcggatctgttggtttccacctttcta

SEQ ID NO: 329017 - DNA, 30 bp, Artificial Sequence
  Synthetic oligonucleotide
gtagcaagtatcgacatgttattctttcta

SEQ ID NO: 329018 - DNA, 30 bp, Artificial Sequence
  Synthetic oligonucleotide
caaaaggagttagaccaaactgagtttcta

SEQ ID NO: 329019 - DNA, 30 bp, Artificial Sequence
  Synthetic oligonucleotide
ggatactctctatgaaatgcatcgtttcta

SEQ ID NO: 329020 - DNA, 30 bp, Artificial Sequence
  Synthetic oligonucleotide
ctgtgactttctgctcgagtacggtttcta

SEQ ID NO: 329021 - DNA, 30 bp, Artificial Sequence
  Synthetic oligonucleotide
cgcaaggcaccactggcgtctgggtttcta

SEQ ID NO: 329022 - DNA, 30 bp, Artificial Sequence
  Synthetic oligonucleotide
caagatagtctcccatccaaaatgtttcta

SEQ ID NO: 329023 - DNA, 30 bp, Artificial Sequence
  Synthetic oligonucleotide
ggcgttagccaaagagtcattacttttcta

SEQ ID NO: 329024 - DNA, 30 bp, Artificial Sequence
  Synthetic oligonucleotide
gtaatgttatcttggggcctagaaaaagta

SEQ ID NO: 329025 - DNA, 30 bp, Artificial Sequence
  Synthetic oligonucleotide
aacgatagtctgcggcataaccacaaagta

SEQ ID NO: 329026 - DNA, 30 bp, Artificial Sequence
  Synthetic oligonucleotide
ctatataaattaacttgctaccacaaagta

SEQ ID NO: 329027 - DNA, 30 bp, Artificial Sequence
  Synthetic oligonucleotide
gtcatgagctgggttctaacaaccaaagta

SEQ ID NO: 329028 - DNA, 30 bp, Artificial Sequence
  Synthetic oligonucleotide
ctacgaaggcttaccgatctcctcaaagta

SEQ ID NO: 329029 - DNA, 30 bp, Artificial Sequence
  Synthetic oligonucleotide
ggcttgattcaacgttgaaaccataaagta

SEQ ID NO: 329030 - DNA, 30 bp, Artificial Sequence
  Synthetic oligonucleotide
aagagttgcggctatcagtccgataaagta

SEQ ID NO: 329031 - DNA, 30 bp, Artificial Sequence
  Synthetic oligonucleotide
ccgccgtgaggcgggtgagttacacaagta

SEQ ID NO: 329032 - DNA, 30 bp, Artificial Sequence
  Synthetic oligonucleotide
caatactgatcctcctcgcaggtacaagta

SEQ ID NO: 329033 - DNA, 30 bp, Artificial Sequence
  Synthetic oligonucleotide
gtggccgtgtttcctgccatcgggcaagta

SEQ ID NO: 329034 - DNA, 30 bp, Artificial Sequence
  Synthetic oligonucleotide
aattaattgccaaattagatacttcaagta

SEQ ID NO: 329035 - DNA, 30 bp, Artificial Sequence
  Synthetic oligonucleotide
tcccaatctaaacagtcgttgcaagaagta

SEQ ID NO: 329036 - DNA, 30 bp, Artificial Sequence
  Synthetic oligonucleotide
tgtccaacttccgatgtgcacgccgaagta

SEQ ID NO: 329037 - DNA, 30 bp, Artificial Sequence
  Synthetic oligonucleotide
ttgtctttcgataaatagtaatgcgaagta

SEQ ID NO: 329038 - DNA, 30 bp, Artificial Sequence
  Synthetic oligonucleotide
gctttgccggggaccgaaagacgggaagta

SEQ ID NO: 329039 - DNA, 30 bp, Artificial Sequence
  Synthetic oligonucleotide
tgtcccattaaatgcatatttcgggaagta

SEQ ID NO: 329040 - DNA, 30 bp, Artificial Sequence
  Synthetic oligonucleotide
aaagaaagagactcagttgctcaataagta

SEQ ID NO: 329041 - DNA, 30 bp, Artificial Sequence
  Synthetic oligonucleotide
taattcgggtacataacaatgtgataagta

SEQ ID NO: 329042 - DNA, 30 bp, Artificial Sequence
  Synthetic oligonucleotide
taggggggtttaaattaaacgctataagta

SEQ ID NO: 329043 - DNA, 30 bp, Artificial Sequence
  Synthetic oligonucleotide
cgctcactgttatccgtagcgtcgtaagta

SEQ ID NO: 329044 - DNA, 30 bp, Artificial Sequence
  Synthetic oligonucleotide
cgtgaagactctgcaggcaacttttaagta

SEQ ID NO: 329045 - DNA, 30 bp, Artificial Sequence
  Synthetic oligonucleotide
atagggggtcttttaatctgtccaacagta

SEQ ID NO: 329046 - DNA, 30 bp, Artificial Sequence
  Synthetic oligonucleotide
gaggctcatatctacggagagagaacagta

SEQ ID NO: 329047 - DNA, 30 bp, Artificial Sequence
  Synthetic oligonucleotide
ccttaatgatcaacctcagggcacacagta

SEQ ID NO: 329048 - DNA, 30 bp, Artificial Sequence
  Synthetic oligonucleotide
gaccacttctattcactattctagacagta

SEQ ID NO: 329049 - DNA, 30 bp, Artificial Sequence
  Synthetic oligonucleotide
acggtgatgctttctacggcggcgacagta

SEQ ID NO: 329050 - DNA, 30 bp, Artificial Sequence
  Synthetic oligonucleotide
aatgcatctatcaaggttatgaatacagta

SEQ ID NO: 329051 - DNA, 31 bp, Artificial Sequence
  Synthetic oligonucleotide
agttgtgtacgtaaaagaagtaggtacagta

SEQ ID NO: 329052 - DNA, 30 bp, Artificial Sequence
  Synthetic oligonucleotide
tgggctagatatctttgctggcttacagta

SEQ ID NO: 329053 - DNA, 30 bp, Artificial Sequence
  Synthetic oligonucleotide
atttaatcgatttagtcctgacgaccagta

SEQ ID NO: 329054 - DNA, 30 bp, Artificial Sequence
  Synthetic oligonucleotide
taaagatgtcaattattggtgaacccagta

SEQ ID NO: 329055 - DNA, 30 bp, Artificial Sequence
  Synthetic oligonucleotide
ccatatggggggacggtcatggcgccagta

SEQ ID NO: 329056 - DNA, 30 bp, Artificial Sequence
  Synthetic oligonucleotide
ttagtacctacaatccatcagccagcagta

SEQ ID NO: 329057 - DNA, 30 bp, Artificial Sequence
  Synthetic oligonucleotide
gcatacttggaattcgaatttgtagcagta

SEQ ID NO: 329058 - DNA, 30 bp, Artificial Sequence
  Synthetic oligonucleotide
gagatggtctgacaatgcgcgagcgcagta

SEQ ID NO: 329059 - DNA, 30 bp, Artificial Sequence
  Synthetic oligonucleotide
aaagatgcttaagttcacgctatcgcagta

SEQ ID NO: 329060 - DNA, 30 bp, Artificial Sequence
  Synthetic oligonucleotide
tcagggtatcgagtccaatcctctgcagta

SEQ ID NO: 329061 - DNA, 30 bp, Artificial Sequence
  Synthetic oligonucleotide
cactgtatggttgcgttgtaaggtgcagta

SEQ ID NO: 329062 - DNA, 30 bp, Artificial Sequence
  Synthetic oligonucleotide
ggaaattgccgatagatatgttgtgcagta

SEQ ID NO: 329063 - DNA, 30 bp, Artificial Sequence
  Synthetic oligonucleotide
cgatcagctgtcggtgttcgttttgcagta

SEQ ID NO: 329064 - DNA, 30 bp, Artificial Sequence
  Synthetic oligonucleotide
ctgggtgctcctcttaggagaacatcagta

SEQ ID NO: 329065 - DNA, 30 bp, Artificial Sequence
  Synthetic oligonucleotide
tttcatacatatgtcttactctactcagta

SEQ ID NO: 329066 - DNA, 30 bp, Artificial Sequence
  Synthetic oligonucleotide
ggtggagcaactacggacgcgatctcagta

SEQ ID NO: 329067 - DNA, 30 bp, Artificial Sequence
  Synthetic oligonucleotide
gttgactatgcacaacaacgcaagtcagta

SEQ ID NO: 329068 - DNA, 30 bp, Artificial Sequence
  Synthetic oligonucleotide
tataggtttgggtatacatcccggtcagta

SEQ ID NO: 329069 - DNA, 30 bp, Artificial Sequence
  Synthetic oligonucleotide
tcagttcagagaaatctaagtttgtcagta

SEQ ID NO: 329070 - DNA, 30 bp, Artificial Sequence
  Synthetic oligonucleotide
cagggatagggtcgttgccgggattcagta

SEQ ID NO: 329071 - DNA, 30 bp, Artificial Sequence
  Synthetic oligonucleotide
ctaaaggggtggtcgtaagtgcgttcagta

SEQ ID NO: 329072 - DNA, 30 bp, Artificial Sequence
  Synthetic oligonucleotide
agcaacccaacgtaggatcgctgttcagta

SEQ ID NO: 329073 - DNA, 30 bp, Artificial Sequence
  Synthetic oligonucleotide
ctcctcgttcggattgctggcctttcagta

SEQ ID NO: 329074 - DNA, 30 bp, Artificial Sequence
  Synthetic oligonucleotide
tagtcaggatactcatgacaagcaagagta

SEQ ID NO: 329075 - DNA, 30 bp, Artificial Sequence
  Synthetic oligonucleotide
cctcccgattaatgacgagacgtaagagta

SEQ ID NO: 329076 - DNA, 30 bp, Artificial Sequence
  Synthetic oligonucleotide
ctatcagtttgtcaatcttgtcacagagta

SEQ ID NO: 329077 - DNA, 30 bp, Artificial Sequence
  Synthetic oligonucleotide
gagtttaaattagtgcatcactccagagta

SEQ ID NO: 329078 - DNA, 30 bp, Artificial Sequence
  Synthetic oligonucleotide
gcgcagttactgtcgatttgcctgagagta

SEQ ID NO: 329079 - DNA, 30 bp, Artificial Sequence
  Synthetic oligonucleotide
catattttcctatcccaggctacccgagta

SEQ ID NO: 329080 - DNA, 30 bp, Artificial Sequence
  Synthetic oligonucleotide
atctgatagcagggataaacatgccgagta

SEQ ID NO: 329081 - DNA, 30 bp, Artificial Sequence
  Synthetic oligonucleotide
cagaaatgtgaggttgtctctaggcgagta

SEQ ID NO: 329082 - DNA, 30 bp, Artificial Sequence
  Synthetic oligonucleotide
ttagacctcatagcgtcacgtcggcgagta

SEQ ID NO: 329083 - DNA, 30 bp, Artificial Sequence
  Synthetic oligonucleotide
gatttacattaagtctaagcagatcgagta

SEQ ID NO: 329084 - DNA, 30 bp, Artificial Sequence
  Synthetic oligonucleotide
tccgtatgcctacagtcttgttctcgagta

SEQ ID NO: 329085 - DNA, 30 bp, Artificial Sequence
  Synthetic oligonucleotide
taactcaatttggtcggatgccttcgagta

SEQ ID NO: 329086 - DNA, 30 bp, Artificial Sequence
  Synthetic oligonucleotide
cataccgcagctacggtaccatttcgagta

SEQ ID NO: 329087 - DNA, 30 bp, Artificial Sequence
  Synthetic oligonucleotide
ggatctggattccgcaaaagtacaggagta

SEQ ID NO: 329088 - DNA, 30 bp, Artificial Sequence
  Synthetic oligonucleotide
atgtcatatgtagaggcgaccttaggagta

SEQ ID NO: 329089 - DNA, 30 bp, Artificial Sequence
  Synthetic oligonucleotide
gcgtttgataataaagtgtagttcggagta

SEQ ID NO: 329090 - DNA, 30 bp, Artificial Sequence
  Synthetic oligonucleotide
catagttgtgcgcggccatgcctgggagta

SEQ ID NO: 329091 - DNA, 30 bp, Artificial Sequence
  Synthetic oligonucleotide
gattgggatgtatacacatgtgatggagta

SEQ ID NO: 329092 - DNA, 30 bp, Artificial Sequence
  Synthetic oligonucleotide
tagtacctgttgaggtccctgtatggagta

SEQ ID NO: 329093 - DNA, 30 bp, Artificial Sequence
  Synthetic oligonucleotide
agacagggctttgttggggggtgtggagta

SEQ ID NO: 329094 - DNA, 30 bp, Artificial Sequence
  Synthetic oligonucleotide
tcggctctaggaccgggcgcggaatgagta

SEQ ID NO: 329095 - DNA, 30 bp, Artificial Sequence
  Synthetic oligonucleotide
agagcccacgacttgcttcaggtatgagta

SEQ ID NO: 329096 - DNA, 30 bp, Artificial Sequence
  Synthetic oligonucleotide
cttgtctgtggtgcgagcaaaccctgagta

SEQ ID NO: 329097 - DNA, 30 bp, Artificial Sequence
  Synthetic oligonucleotide
ctagcctcaaggccaaccaagcggtgagta

SEQ ID NO: 329098 - DNA, 30 bp, Artificial Sequence
  Synthetic oligonucleotide
actgggaacccctgctaagattaaatagta

SEQ ID NO: 329099 - DNA, 30 bp, Artificial Sequence
  Synthetic oligonucleotide
cgcactgcagtcgaagccaatagaatagta

SEQ ID NO: 329100 - DNA, 30 bp, Artificial Sequence
  Synthetic oligonucleotide
atactgtagtcttcttgatgtaccatagta

SEQ ID NO: 329101 - DNA, 30 bp, Artificial Sequence
  Synthetic oligonucleotide
ggaggtagaattcaagccataatcatagta

SEQ ID NO: 329102 - DNA, 30 bp, Artificial Sequence
  Synthetic oligonucleotide
atgagtggacgagcaaatagtatcatagta

SEQ ID NO: 329103 - DNA, 30 bp, Artificial Sequence
  Synthetic oligonucleotide
cggtcagcttgcggtgaagtccggatagta

SEQ ID NO: 329104 - DNA, 30 bp, Artificial Sequence
  Synthetic oligonucleotide
agtaacacagggcctttgctggggatagta

SEQ ID NO: 329105 - DNA, 30 bp, Artificial Sequence
  Synthetic oligonucleotide
catggctgatgcactaatttgaatatagta

SEQ ID NO: 329106 - DNA, 30 bp, Artificial Sequence
  Synthetic oligonucleotide
attgccaagttcgtgtggagacatatagta

SEQ ID NO: 329107 - DNA, 30 bp, Artificial Sequence
  Synthetic oligonucleotide
tccatttaggaccgagaatcgggtatagta

SEQ ID NO: 329108 - DNA, 30 bp, Artificial Sequence
  Synthetic oligonucleotide
ggctcggctggtattgtggaaagactagta

SEQ ID NO: 329109 - DNA, 30 bp, Artificial Sequence
  Synthetic oligonucleotide
tacaggctaggaataactgcgttcctagta

SEQ ID NO: 329110 - DNA, 30 bp, Artificial Sequence
  Synthetic oligonucleotide
ttataggacacctatcgccgtgagctagta

SEQ ID NO: 329111 - DNA, 30 bp, Artificial Sequence
  Synthetic oligonucleotide
cctaatttacttaagtcgcagacgctagta

SEQ ID NO: 329112 - DNA, 30 bp, Artificial Sequence
  Synthetic oligonucleotide
catgggtttgattccattgtagcgctagta

SEQ ID NO: 329113 - DNA, 30 bp, Artificial Sequence
  Synthetic oligonucleotide
caggcttgacttgtaggcttttatctagta

SEQ ID NO: 329114 - DNA, 30 bp, Artificial Sequence
  Synthetic oligonucleotide
tcataggattggaatgtcgcaggtctagta

SEQ ID NO: 329115 - DNA, 30 bp, Artificial Sequence
  Synthetic oligonucleotide
gcagttcccaccgcgggttaagaagtagta

SEQ ID NO: 329116 - DNA, 30 bp, Artificial Sequence
  Synthetic oligonucleotide
aaactcgagtcgatacgtcgaagagtagta

SEQ ID NO: 329117 - DNA, 31 bp, Artificial Sequence
  Synthetic oligonucleotide
aacttgacggaatgacaatagattagtagta

SEQ ID NO: 329118 - DNA, 30 bp, Artificial Sequence
  Synthetic oligonucleotide
gcacgcttaccgtgggaaagccgcgtagta

SEQ ID NO: 329119 - DNA, 30 bp, Artificial Sequence
  Synthetic oligonucleotide
acagctgggaggcgagggcttgtggtagta

SEQ ID NO: 329120 - DNA, 30 bp, Artificial Sequence
  Synthetic oligonucleotide
attaatgtgggtcacggcaccttggtagta

SEQ ID NO: 329121 - DNA, 30 bp, Artificial Sequence
  Synthetic oligonucleotide
aaccaagataggattcttgtggctgtagta

SEQ ID NO: 329122 - DNA, 30 bp, Artificial Sequence
  Synthetic oligonucleotide
cattggacaagtagcgacgggaaattagta

SEQ ID NO: 329123 - DNA, 30 bp, Artificial Sequence
  Synthetic oligonucleotide
aaccctggagtttactttactgacttagta

SEQ ID NO: 329124 - DNA, 30 bp, Artificial Sequence
  Synthetic oligonucleotide
gcacggtcttcgaacattgaagggttagta

SEQ ID NO: 329125 - DNA, 30 bp, Artificial Sequence
  Synthetic oligonucleotide
gaacaccattcaagaccggtaatgttagta

SEQ ID NO: 329126 - DNA, 30 bp, Artificial Sequence
  Synthetic oligonucleotide
atacttactggaatccgtcaccatttagta

SEQ ID NO: 329127 - DNA, 30 bp, Artificial Sequence
  Synthetic oligonucleotide
ttcggttggtagaaggccagatatttagta

SEQ ID NO: 329128 - DNA, 28 bp, Artificial Sequence
  Synthetic oligonucleotide
acagtggctgagttaggtctctttagta

SEQ ID NO: 329129 - DNA, 30 bp, Artificial Sequence
  Synthetic oligonucleotide
ggtaagacaatttgtcagacaattttagta

SEQ ID NO: 329130 - DNA, 31 bp, Artificial Sequence
  Synthetic oligonucleotide
gttgtggttgcggaagtgtgttgaaaacgta

SEQ ID NO: 329131 - DNA, 30 bp, Artificial Sequence
  Synthetic oligonucleotide
ccccgtgatatgcaactgagggagaacgta

SEQ ID NO: 329132 - DNA, 30 bp, Artificial Sequence
  Synthetic oligonucleotide
ctgggcaggaagccggaaaggcggaacgta

SEQ ID NO: 329133 - DNA, 30 bp, Artificial Sequence
  Synthetic oligonucleotide
agattcgccatcgcggtacacctgaacgta

SEQ ID NO: 329134 - DNA, 30 bp, Artificial Sequence
  Synthetic oligonucleotide
acgcagttcctgtatgggatacgacacgta

SEQ ID NO: 329135 - DNA, 30 bp, Artificial Sequence
  Synthetic oligonucleotide
cattccgctacgaaatggccgaaccacgta

SEQ ID NO: 329136 - DNA, 30 bp, Artificial Sequence
  Synthetic oligonucleotide
tcggcgactcagcttgaccggatccacgta

SEQ ID NO: 329137 - DNA, 30 bp, Artificial Sequence
  Synthetic oligonucleotide
tatacgggccgggactgtacgctccacgta

SEQ ID NO: 329138 - DNA, 30 bp, Artificial Sequence
  Synthetic oligonucleotide
gggtttgacttattgggaaaagggcacgta

SEQ ID NO: 329139 - DNA, 30 bp, Artificial Sequence
  Synthetic oligonucleotide
atcccaacttgcaatctatgggtgcacgta

SEQ ID NO: 329140 - DNA, 30 bp, Artificial Sequence
  Synthetic oligonucleotide
ttttgcaacttccaaagaacagctcacgta

SEQ ID NO: 329141 - DNA, 30 bp, Artificial Sequence
  Synthetic oligonucleotide
tgtaaccaggtgttatacggtgttcacgta

SEQ ID NO: 329142 - DNA, 30 bp, Artificial Sequence
  Synthetic oligonucleotide
gacgatgtggggcaccggcccgtagacgta

SEQ ID NO: 329143 - DNA, 30 bp, Artificial Sequence
  Synthetic oligonucleotide
atgactattcttcagccagtcgtagacgta

SEQ ID NO: 329144 - DNA, 30 bp, Artificial Sequence
  Synthetic oligonucleotide
aacgttttttatgggacacgtctcgacgta

SEQ ID NO: 329145 - DNA, 30 bp, Artificial Sequence
  Synthetic oligonucleotide
cgagggattacttgcccaatcgtcgacgta

SEQ ID NO: 329146 - DNA, 31 bp, Artificial Sequence
  Synthetic oligonucleotide
aattcaataaactggtctgcaactggacgta

SEQ ID NO: 329147 - DNA, 30 bp, Artificial Sequence
  Synthetic oligonucleotide
ctgtctgatttcgaaaaagtattggacgta

SEQ ID NO: 329148 - DNA, 30 bp, Artificial Sequence
  Synthetic oligonucleotide
aagacacgaagtggtctctcatgatacgta

SEQ ID NO: 329149 - DNA, 30 bp, Artificial Sequence
  Synthetic oligonucleotide
aaaaagatgattccccgtgtcaactacgta

SEQ ID NO: 329150 - DNA, 30 bp, Artificial Sequence
  Synthetic oligonucleotide
cgcggttaccagacacctgggatgtacgta

SEQ ID NO: 329151 - DNA, 30 bp, Artificial Sequence
  Synthetic oligonucleotide
gctgacttggatcaatttcggaattacgta

SEQ ID NO: 329152 - DNA, 30 bp, Artificial Sequence
  Synthetic oligonucleotide
acggaaacactgtctctgttagacaccgta

SEQ ID NO: 329153 - DNA, 30 bp, Artificial Sequence
  Synthetic oligonucleotide
cattgtcagtgttcctaactggctaccgta

SEQ ID NO: 329154 - DNA, 30 bp, Artificial Sequence
  Synthetic oligonucleotide
tattcgtaaaagtcctgcccacaacccgta

SEQ ID NO: 329155 - DNA, 30 bp, Artificial Sequence
  Synthetic oligonucleotide
tatatagaactcgaaagggattcgcccgta

SEQ ID NO: 329156 - DNA, 30 bp, Artificial Sequence
  Synthetic oligonucleotide
tagtgtttagttggagaggttaggcccgta

SEQ ID NO: 329157 - DNA, 30 bp, Artificial Sequence
  Synthetic oligonucleotide
actgccgtgggttgggattcggcagccgta

SEQ ID NO: 329158 - DNA, 30 bp, Artificial Sequence
  Synthetic oligonucleotide
caccggcgggtctaagaaaagcacgccgta

SEQ ID NO: 329159 - DNA, 30 bp, Artificial Sequence
  Synthetic oligonucleotide
agtcgaagaaatgctggtctaatggccgta

SEQ ID NO: 329160 - DNA, 30 bp, Artificial Sequence
  Synthetic oligonucleotide
gcagtgtgagtaccttgtgacttggccgta

SEQ ID NO: 329161 - DNA, 30 bp, Artificial Sequence
  Synthetic oligonucleotide
agtcgtccacgtggggggacgaactccgta

SEQ ID NO: 329162 - DNA, 30 bp, Artificial Sequence
  Synthetic oligonucleotide
ggattacttacatagctactggcctccgta

SEQ ID NO: 329163 - DNA, 30 bp, Artificial Sequence
  Synthetic oligonucleotide
gacatcgctttccagcaatagcagtccgta

SEQ ID NO: 329164 - DNA, 30 bp, Artificial Sequence
  Synthetic oligonucleotide
tctcatgggctcacccacctcttgtccgta

SEQ ID NO: 329165 - DNA, 30 bp, Artificial Sequence
  Synthetic oligonucleotide
gcactgcaaatacgcgcctaggattccgta

SEQ ID NO: 329166 - DNA, 30 bp, Artificial Sequence
  Synthetic oligonucleotide
agcccagcctttggatacgatgtttccgta

SEQ ID NO: 329167 - DNA, 30 bp, Artificial Sequence
  Synthetic oligonucleotide
ctggtcaaaaaagttacaaaaaagagcgta

SEQ ID NO: 329168 - DNA, 30 bp, Artificial Sequence
  Synthetic oligonucleotide
aagtcgaaaatgtgaatgagcccacgcgta

SEQ ID NO: 329169 - DNA, 30 bp, Artificial Sequence
  Synthetic oligonucleotide
gggtcggacaaccgatcgatcttacgcgta

SEQ ID NO: 329170 - DNA, 30 bp, Artificial Sequence
  Synthetic oligonucleotide
tacggcatgtcactgcctgttatgcgcgta

SEQ ID NO: 329171 - DNA, 31 bp, Artificial Sequence
  Synthetic oligonucleotide
gtactcactcttgaaatgtgcttgaggcgta

SEQ ID NO: 329172 - DNA, 30 bp, Artificial Sequence
  Synthetic oligonucleotide
acagcgagacaaatgtggtaaagcggcgta

SEQ ID NO: 329173 - DNA, 30 bp, Artificial Sequence
  Synthetic oligonucleotide
acactcctgatcccgcccgaagtcggcgta

SEQ ID NO: 329174 - DNA, 30 bp, Artificial Sequence
  Synthetic oligonucleotide
ccacaagccgcacgacgcacagagggcgta

SEQ ID NO: 329175 - DNA, 30 bp, Artificial Sequence
  Synthetic oligonucleotide
ctgcagctcttacacacactgacgggcgta

SEQ ID NO: 329176 - DNA, 30 bp, Artificial Sequence
  Synthetic oligonucleotide
actacagagactcccgccacgcggggcgta

SEQ ID NO: 329177 - DNA, 30 bp, Artificial Sequence
  Synthetic oligonucleotide
gtggttatgagttgacaaatgatgggcgta

SEQ ID NO: 329178 - DNA, 30 bp, Artificial Sequence
  Synthetic oligonucleotide
gtcagtcaagtatcgcccattcatggcgta

SEQ ID NO: 329179 - DNA, 30 bp, Artificial Sequence
  Synthetic oligonucleotide
cgtagctatactttggcgacatgtggcgta

SEQ ID NO: 329180 - DNA, 30 bp, Artificial Sequence
  Synthetic oligonucleotide
aaggcgcgtgtgccccgcctccaatgcgta

SEQ ID NO: 329181 - DNA, 30 bp, Artificial Sequence
  Synthetic oligonucleotide
cggtggagagtgcacctcggtacatgcgta

SEQ ID NO: 329182 - DNA, 30 bp, Artificial Sequence
  Synthetic oligonucleotide
gagcggcaactgacgttggaaaagtgcgta

SEQ ID NO: 329183 - DNA, 30 bp, Artificial Sequence
  Synthetic oligonucleotide
gacgaggctctactccgccttcgttgcgta

SEQ ID NO: 329184 - DNA, 30 bp, Artificial Sequence
  Synthetic oligonucleotide
agtagtagttaatttcagagcaaaatcgta

SEQ ID NO: 329185 - DNA, 30 bp, Artificial Sequence
  Synthetic oligonucleotide
tggacggctgctgtcagatagtagatcgta

SEQ ID NO: 329186 - DNA, 30 bp, Artificial Sequence
  Synthetic oligonucleotide
tctcactgagctattcgattgccgatcgta

SEQ ID NO: 329187 - DNA, 30 bp, Artificial Sequence
  Synthetic oligonucleotide
tagattataaataggcgtggacggatcgta

SEQ ID NO: 329188 - DNA, 30 bp, Artificial Sequence
  Synthetic oligonucleotide
ttgtctactcaggagcagccgcctatcgta

SEQ ID NO: 329189 - DNA, 30 bp, Artificial Sequence
  Synthetic oligonucleotide
ctcacttgattagaggggccttccctcgta

SEQ ID NO: 329190 - DNA, 30 bp, Artificial Sequence
  Synthetic oligonucleotide
ttttctgggcacatcttagggaatctcgta

SEQ ID NO: 329191 - DNA, 30 bp, Artificial Sequence
  Synthetic oligonucleotide
gcaccgtatctcgtgaccgtaagagtcgta

SEQ ID NO: 329192 - DNA, 30 bp, Artificial Sequence
  Synthetic oligonucleotide
ttttaaagaacgtggtcggttatagtcgta

SEQ ID NO: 329193 - DNA, 30 bp, Artificial Sequence
  Synthetic oligonucleotide
gatgttgtggacagcgagcagctagtcgta

SEQ ID NO: 329194 - DNA, 30 bp, Artificial Sequence
  Synthetic oligonucleotide
ttataatgatacccaacccacggcgtcgta

SEQ ID NO: 329195 - DNA, 30 bp, Artificial Sequence
  Synthetic oligonucleotide
ggtgtatccgggtttgacggatgtgtcgta

SEQ ID NO: 329196 - DNA, 30 bp, Artificial Sequence
  Synthetic oligonucleotide
gtcaatagattaggggcgaattgtgtcgta

SEQ ID NO: 329197 - DNA, 30 bp, Artificial Sequence
  Synthetic oligonucleotide
agaacggctacgcaggttattgtattcgta

SEQ ID NO: 329198 - DNA, 30 bp, Artificial Sequence
  Synthetic oligonucleotide
agtatgagtagagttattttaaacttcgta

SEQ ID NO: 329199 - DNA, 30 bp, Artificial Sequence
  Synthetic oligonucleotide
aagtttaaagttattgccaataacttcgta

SEQ ID NO: 329200 - DNA, 30 bp, Artificial Sequence
  Synthetic oligonucleotide
ttgcgcggtttagggcccggggacttcgta

SEQ ID NO: 329201 - DNA, 30 bp, Artificial Sequence
  Synthetic oligonucleotide
cccgttgcgaacaatgaggaaggtttcgta

SEQ ID NO: 329202 - DNA, 30 bp, Artificial Sequence
  Synthetic oligonucleotide
ttccctagggtttctacgtgtacaaaggta

SEQ ID NO: 329203 - DNA, 30 bp, Artificial Sequence
  Synthetic oligonucleotide
gggcattgaaaaatttcactcaacaaggta

SEQ ID NO: 329204 - DNA, 30 bp, Artificial Sequence
  Synthetic oligonucleotide
aagttgcgcagcttgctttagcccaaggta

SEQ ID NO: 329205 - DNA, 30 bp, Artificial Sequence
  Synthetic oligonucleotide
ttcaaggcggtaagctctcgcgagaaggta

SEQ ID NO: 329206 - DNA, 30 bp, Artificial Sequence
  Synthetic oligonucleotide
caataggttcgctgctattgctcgaaggta

SEQ ID NO: 329207 - DNA, 30 bp, Artificial Sequence
  Synthetic oligonucleotide
ttaatgtcgccgtactagggctataaggta

SEQ ID NO: 329208 - DNA, 30 bp, Artificial Sequence
  Synthetic oligonucleotide
gcctgtggtcaccggataagtcaacaggta

SEQ ID NO: 329209 - DNA, 30 bp, Artificial Sequence
  Synthetic oligonucleotide
ttggccatgttcttcgtcacagaacaggta

SEQ ID NO: 329210 - DNA, 30 bp, Artificial Sequence
  Synthetic oligonucleotide
agttacgagagtactatgtgtgcacaggta

SEQ ID NO: 329211 - DNA, 30 bp, Artificial Sequence
  Synthetic oligonucleotide
cgggtctgctaacagctatttaagcaggta

SEQ ID NO: 329212 - DNA, 30 bp, Artificial Sequence
  Synthetic oligonucleotide
actagttagcggtaaatgtaaccgcaggta

SEQ ID NO: 329213 - DNA, 30 bp, Artificial Sequence
  Synthetic oligonucleotide
cgaaggggattcaaagccggcgggcaggta

SEQ ID NO: 329214 - DNA, 30 bp, Artificial Sequence
  Synthetic oligonucleotide
ctaaaagaactgtaagtctcttggcaggta

SEQ ID NO: 329215 - DNA, 30 bp, Artificial Sequence
  Synthetic oligonucleotide
gccttaaagctattgaacggggtgcaggta

SEQ ID NO: 329216 - DNA, 30 bp, Artificial Sequence
  Synthetic oligonucleotide
gagtcggagagtataacacaatgtcaggta

SEQ ID NO: 329217 - DNA, 30 bp, Artificial Sequence
  Synthetic oligonucleotide
atcctgtattctgtagagctaccagaggta

SEQ ID NO: 329218 - DNA, 30 bp, Artificial Sequence
  Synthetic oligonucleotide
tagctagctcaacctcgtgcaatagaggta

SEQ ID NO: 329219 - DNA, 30 bp, Artificial Sequence
  Synthetic oligonucleotide
tgggatggaccggtttaaaaagtagaggta

SEQ ID NO: 329220 - DNA, 30 bp, Artificial Sequence
  Synthetic oligonucleotide
actatgatataggagccgcgtaacgaggta

SEQ ID NO: 329221 - DNA, 30 bp, Artificial Sequence
  Synthetic oligonucleotide
atgggatcttgctacgtgccgcccgaggta

SEQ ID NO: 329222 - DNA, 30 bp, Artificial Sequence
  Synthetic oligonucleotide
gcgctaaacttcgttgagtatgccgaggta

SEQ ID NO: 329223 - DNA, 30 bp, Artificial Sequence
  Synthetic oligonucleotide
tcatcctcctgctaataacgagcggaggta

SEQ ID NO: 329224 - DNA, 30 bp, Artificial Sequence
  Synthetic oligonucleotide
ggatgcggttcggtctcacgggatgaggta

SEQ ID NO: 329225 - DNA, 30 bp, Artificial Sequence
  Synthetic oligonucleotide
aacttggttctgacttttatcggtgaggta

SEQ ID NO: 329226 - DNA, 30 bp, Artificial Sequence
  Synthetic oligonucleotide
cgcctggtatcggatcaggcgtaataggta

SEQ ID NO: 329227 - DNA, 30 bp, Artificial Sequence
  Synthetic oligonucleotide
agcctactcccgtgtaatcgtctataggta

SEQ ID NO: 329228 - DNA, 30 bp, Artificial Sequence
  Synthetic oligonucleotide
gcgttcagagcaaaccggcacttataggta

SEQ ID NO: 329229 - DNA, 30 bp, Artificial Sequence
  Synthetic oligonucleotide
caagccacgtctgtaatcggagactaggta

SEQ ID NO: 329230 - DNA, 30 bp, Artificial Sequence
  Synthetic oligonucleotide
ggctagtctagccgggaagttccgtaggta

SEQ ID NO: 329231 - DNA, 30 bp, Artificial Sequence
  Synthetic oligonucleotide
tggacttgtttaccgactggcgcgtaggta

SEQ ID NO: 329232 - DNA, 30 bp, Artificial Sequence
  Synthetic oligonucleotide
cacgagccctacgctcttacgcggtaggta

SEQ ID NO: 329233 - DNA, 30 bp, Artificial Sequence
  Synthetic oligonucleotide
aattacccatagggagacacagggtaggta

SEQ ID NO: 329234 - DNA, 30 bp, Artificial Sequence
  Synthetic oligonucleotide
agatgcaatggaacagttccccaaacggta

SEQ ID NO: 329235 - DNA, 30 bp, Artificial Sequence
  Synthetic oligonucleotide
cttcgacggggccgatctaaaacaacggta

SEQ ID NO: 329236 - DNA, 30 bp, Artificial Sequence
  Synthetic oligonucleotide
ccaagtgttctgacagatttttcaacggta

SEQ ID NO: 329237 - DNA, 30 bp, Artificial Sequence
  Synthetic oligonucleotide
ctcagcgtagtgtggactgcacccacggta

SEQ ID NO: 329238 - DNA, 30 bp, Artificial Sequence
  Synthetic oligonucleotide
gctaacaaccttagttgtcggcccacggta

SEQ ID NO: 329239 - DNA, 30 bp, Artificial Sequence
  Synthetic oligonucleotide
gaatcatgctggaggattgctagcacggta

SEQ ID NO: 329240 - DNA, 30 bp, Artificial Sequence
  Synthetic oligonucleotide
gtaggtgggattgaagggtaatgcacggta

SEQ ID NO: 329241 - DNA, 30 bp, Artificial Sequence
  Synthetic oligonucleotide
cactgggtcacatacccaaggaagacggta

SEQ ID NO: 329242 - DNA, 30 bp, Artificial Sequence
  Synthetic oligonucleotide
gcacggcttcgggaatcagtccggacggta

SEQ ID NO: 329243 - DNA, 30 bp, Artificial Sequence
  Synthetic oligonucleotide
acactttggtgctgggtgtgagggacggta

SEQ ID NO: 329244 - DNA, 30 bp, Artificial Sequence
  Synthetic oligonucleotide
gcttagaccgacactgctacgctgacggta

SEQ ID NO: 329245 - DNA, 30 bp, Artificial Sequence
  Synthetic oligonucleotide
cagagatatatttacgatccatttacggta

SEQ ID NO: 329246 - DNA, 30 bp, Artificial Sequence
  Synthetic oligonucleotide
caacccctatccaatcaggccagaccggta

SEQ ID NO: 329247 - DNA, 30 bp, Artificial Sequence
  Synthetic oligonucleotide
gaaaccaatctaaatagaatgagaccggta

SEQ ID NO: 329248 - DNA, 30 bp, Artificial Sequence
  Synthetic oligonucleotide
aaaagcggtcatgcgaccgaatacccggta

SEQ ID NO: 329249 - DNA, 30 bp, Artificial Sequence
  Synthetic oligonucleotide
aaatgcgattcgtgcatgcgatcgccggta

SEQ ID NO: 329250 - DNA, 30 bp, Artificial Sequence
  Synthetic oligonucleotide
aaccatggagaactggggcatggtccggta

SEQ ID NO: 329251 - DNA, 30 bp, Artificial Sequence
  Synthetic oligonucleotide
gagagagacaattgtcgagattttccggta

SEQ ID NO: 329252 - DNA, 30 bp, Artificial Sequence
  Synthetic oligonucleotide
atgtcaaggccctctagcccgcccgcggta

SEQ ID NO: 329253 - DNA, 30 bp, Artificial Sequence
  Synthetic oligonucleotide
tttcatctagcaggagcaagtaaggcggta

SEQ ID NO: 329254 - DNA, 30 bp, Artificial Sequence
  Synthetic oligonucleotide
tatactcaccatagtccgggttcggcggta

SEQ ID NO: 329255 - DNA, 30 bp, Artificial Sequence
  Synthetic oligonucleotide
atcgacacaatagcggcagatctggcggta

SEQ ID NO: 329256 - DNA, 30 bp, Artificial Sequence
  Synthetic oligonucleotide
ggtacattaatctcggccagcgctgcggta

SEQ ID NO: 329257 - DNA, 30 bp, Artificial Sequence
  Synthetic oligonucleotide
aagagaggcgtgcgggggcgggttgcggta

SEQ ID NO: 329258 - DNA, 30 bp, Artificial Sequence
  Synthetic oligonucleotide
gtacggtcgtagaacccggctaaatcggta

SEQ ID NO: 329259 - DNA, 30 bp, Artificial Sequence
  Synthetic oligonucleotide
atttagggcctccaattgcgcatatcggta

SEQ ID NO: 329260 - DNA, 30 bp, Artificial Sequence
  Synthetic oligonucleotide
tgcaagattccgcgtggcggatcctcggta

SEQ ID NO: 329261 - DNA, 30 bp, Artificial Sequence
  Synthetic oligonucleotide
aagatacagagcttggggctgatctcggta

SEQ ID NO: 329262 - DNA, 30 bp, Artificial Sequence
  Synthetic oligonucleotide
tctaagtcacggctcggattcgtctcggta

SEQ ID NO: 329263 - DNA, 30 bp, Artificial Sequence
  Synthetic oligonucleotide
gggatattggatgatgagctgcgttcggta

SEQ ID NO: 329264 - DNA, 30 bp, Artificial Sequence
  Synthetic oligonucleotide
catctagaacaccgtgcccgcgtttcggta

SEQ ID NO: 329265 - DNA, 30 bp, Artificial Sequence
  Synthetic oligonucleotide
atagtggtcaaatgtcgggtctccagggta

SEQ ID NO: 329266 - DNA, 30 bp, Artificial Sequence
  Synthetic oligonucleotide
taccatttacgggcctgatatagcagggta

SEQ ID NO: 329267 - DNA, 30 bp, Artificial Sequence
  Synthetic oligonucleotide
ttagcactcattgcataagggcagagggta

SEQ ID NO: 329268 - DNA, 30 bp, Artificial Sequence
  Synthetic oligonucleotide
cataagaccgttcgggtttgtgggagggta

SEQ ID NO: 329269 - DNA, 30 bp, Artificial Sequence
  Synthetic oligonucleotide
tccggcggccaagtttcgatttggagggta

SEQ ID NO: 329270 - DNA, 30 bp, Artificial Sequence
  Synthetic oligonucleotide
catacattaggttagcgcagtttgagggta

SEQ ID NO: 329271 - DNA, 30 bp, Artificial Sequence
  Synthetic oligonucleotide
cggtgagttatttaacttttcgctagggta

SEQ ID NO: 329272 - DNA, 30 bp, Artificial Sequence
  Synthetic oligonucleotide
atcctaggggcatgtaactcataacgggta

SEQ ID NO: 329273 - DNA, 30 bp, Artificial Sequence
  Synthetic oligonucleotide
gcgagaatacccccgtgccccgtccgggta

SEQ ID NO: 329274 - DNA, 30 bp, Artificial Sequence
  Synthetic oligonucleotide
aaaaacgtgtggtactcgtggcagcgggta

SEQ ID NO: 329275 - DNA, 30 bp, Artificial Sequence
  Synthetic oligonucleotide
gcgcggaggggggattggcgtttgcgggta

SEQ ID NO: 329276 - DNA, 30 bp, Artificial Sequence
  Synthetic oligonucleotide
tccgccccccgtttacaacaaaaaggggta

SEQ ID NO: 329277 - DNA, 30 bp, Artificial Sequence
  Synthetic oligonucleotide
gagtctttacctttgcagtggcaaggggta

SEQ ID NO: 329278 - DNA, 30 bp, Artificial Sequence
  Synthetic oligonucleotide
gtgagttataggcggtcagtcccaggggta

SEQ ID NO: 329279 - DNA, 30 bp, Artificial Sequence
  Synthetic oligonucleotide
cccttgctagtatgttcacagtgcggggta

SEQ ID NO: 329280 - DNA, 30 bp, Artificial Sequence
  Synthetic oligonucleotide
gtagaagcgtctgcaagtcgacggggggta

SEQ ID NO: 329281 - DNA, 30 bp, Artificial Sequence
  Synthetic oligonucleotide
tacagcgtatatactgtccgcctatgggta

SEQ ID NO: 329282 - DNA, 30 bp, Artificial Sequence
  Synthetic oligonucleotide
atcctctactagtaagtacctaactgggta

SEQ ID NO: 329283 - DNA, 30 bp, Artificial Sequence
  Synthetic oligonucleotide
actccttcgagaacagagtaggactgggta

SEQ ID NO: 329284 - DNA, 30 bp, Artificial Sequence
  Synthetic oligonucleotide
gtgatccgctacgaactcgcctagtgggta

SEQ ID NO: 329285 - DNA, 30 bp, Artificial Sequence
  Synthetic oligonucleotide
ccaagtatctgaacgcattccgtgtgggta

SEQ ID NO: 329286 - DNA, 30 bp, Artificial Sequence
  Synthetic oligonucleotide
atcaatgccacacctcgccagcattgggta

SEQ ID NO: 329287 - DNA, 30 bp, Artificial Sequence
  Synthetic oligonucleotide
gtatgtaattaggggtggactatttgggta

SEQ ID NO: 329288 - DNA, 30 bp, Artificial Sequence
  Synthetic oligonucleotide
cctcagtctaaaggttggtggctttgggta

SEQ ID NO: 329289 - DNA, 30 bp, Artificial Sequence
  Synthetic oligonucleotide
ttctaggccttgatatcatttgcaatggta

SEQ ID NO: 329290 - DNA, 30 bp, Artificial Sequence
  Synthetic oligonucleotide
gcgggcgtacttgaatgcaacagaatggta

SEQ ID NO: 329291 - DNA, 30 bp, Artificial Sequence
  Synthetic oligonucleotide
catttagttttagtgtctttcaacatggta

SEQ ID NO: 329292 - DNA, 30 bp, Artificial Sequence
  Synthetic oligonucleotide
tatatcgcttgcatcactggtgccatggta

SEQ ID NO: 329293 - DNA, 30 bp, Artificial Sequence
  Synthetic oligonucleotide
gggtcctgtaccatttaattggtcatggta

SEQ ID NO: 329294 - DNA, 30 bp, Artificial Sequence
  Synthetic oligonucleotide
tgtcgtaggtccgcggcgcatgctatggta

SEQ ID NO: 329295 - DNA, 30 bp, Artificial Sequence
  Synthetic oligonucleotide
ggtccgatcgcgcactcgggaagtatggta

SEQ ID NO: 329296 - DNA, 30 bp, Artificial Sequence
  Synthetic oligonucleotide
caaaacaggccatgcttctaatgtatggta

SEQ ID NO: 329297 - DNA, 30 bp, Artificial Sequence
  Synthetic oligonucleotide
gctaataggtctaccgcaaggtaactggta

SEQ ID NO: 329298 - DNA, 30 bp, Artificial Sequence
  Synthetic oligonucleotide
cccattgttggtgatccgtaacgactggta

SEQ ID NO: 329299 - DNA, 30 bp, Artificial Sequence
  Synthetic oligonucleotide
cagggttccaataacgatactatactggta

SEQ ID NO: 329300 - DNA, 30 bp, Artificial Sequence
  Synthetic oligonucleotide
tgggccaacaaccataaatctatactggta

SEQ ID NO: 329301 - DNA, 30 bp, Artificial Sequence
  Synthetic oligonucleotide
ctaggatgtgatgcatcgacagccctggta

SEQ ID NO: 329302 - DNA, 30 bp, Artificial Sequence
  Synthetic oligonucleotide
tagttaacggagacaagtgcataagtggta

SEQ ID NO: 329303 - DNA, 30 bp, Artificial Sequence
  Synthetic oligonucleotide
ccaggatatcacattagagacatagtggta

SEQ ID NO: 329304 - DNA, 26 bp, Artificial Sequence
  Synthetic oligonucleotide
accatcgccaggtatgtctagtggta

SEQ ID NO: 329305 - DNA, 30 bp, Artificial Sequence
  Synthetic oligonucleotide
ctatcattatcacgtcaacatgtagtggta

SEQ ID NO: 329306 - DNA, 30 bp, Artificial Sequence
  Synthetic oligonucleotide
tatcatattgacaatacttccctggtggta

SEQ ID NO: 329307 - DNA, 30 bp, Artificial Sequence
  Synthetic oligonucleotide
tggcggcaccttgcaccaggcctggtggta

SEQ ID NO: 329308 - DNA, 30 bp, Artificial Sequence
  Synthetic oligonucleotide
tacatctagtaagcagcgcatttggtggta

SEQ ID NO: 329309 - DNA, 30 bp, Artificial Sequence
  Synthetic oligonucleotide
taatgatctcccctatagacaagtgtggta

SEQ ID NO: 329310 - DNA, 30 bp, Artificial Sequence
  Synthetic oligonucleotide
ccgcactaggtctgtattgatgaattggta

SEQ ID NO: 329311 - DNA, 30 bp, Artificial Sequence
  Synthetic oligonucleotide
gagctaatgtagaggaaaattcccttggta

SEQ ID NO: 329312 - DNA, 30 bp, Artificial Sequence
  Synthetic oligonucleotide
cggaacattactaaggggtgatccttggta

SEQ ID NO: 329313 - DNA, 30 bp, Artificial Sequence
  Synthetic oligonucleotide
ggacgccttaatcacgtgggccagttggta

SEQ ID NO: 329314 - DNA, 30 bp, Artificial Sequence
  Synthetic oligonucleotide
tgcgggcaagcaacgggagtatagttggta

SEQ ID NO: 329315 - DNA, 30 bp, Artificial Sequence
  Synthetic oligonucleotide
tataggagaatgccacggttcaggttggta

SEQ ID NO: 329316 - DNA, 30 bp, Artificial Sequence
  Synthetic oligonucleotide
ccgcctagtgattatgggtggcctttggta

SEQ ID NO: 329317 - DNA, 30 bp, Artificial Sequence
  Synthetic oligonucleotide
tcccatcttgctggaatagaatcaaatgta

SEQ ID NO: 329318 - DNA, 30 bp, Artificial Sequence
  Synthetic oligonucleotide
gggaaaagaccattaggcgattcaaatgta

SEQ ID NO: 329319 - DNA, 30 bp, Artificial Sequence
  Synthetic oligonucleotide
agtggacctagtaccagtgatggaaatgta

SEQ ID NO: 329320 - DNA, 30 bp, Artificial Sequence
  Synthetic oligonucleotide
gcatgataatatacagttctcgtaaatgta

SEQ ID NO: 329321 - DNA, 30 bp, Artificial Sequence
  Synthetic oligonucleotide
cgtaccttgtatatctatgctgacaatgta

SEQ ID NO: 329322 - DNA, 30 bp, Artificial Sequence
  Synthetic oligonucleotide
tcggggtcatttggacgtgttaccaatgta

SEQ ID NO: 329323 - DNA, 30 bp, Artificial Sequence
  Synthetic oligonucleotide
tccggcttagcctatgaagaccagaatgta

SEQ ID NO: 329324 - DNA, 30 bp, Artificial Sequence
  Synthetic oligonucleotide
ttaatagcacgtctcagcgtaccgaatgta

SEQ ID NO: 329325 - DNA, 30 bp, Artificial Sequence
  Synthetic oligonucleotide
ttcgcgcgcagatgctcgaacccgaatgta

SEQ ID NO: 329326 - DNA, 30 bp, Artificial Sequence
  Synthetic oligonucleotide
cttgcataaattctttgagacgcgaatgta

SEQ ID NO: 329327 - DNA, 30 bp, Artificial Sequence
  Synthetic oligonucleotide
catgactcacatgcgaagctaaaacatgta

SEQ ID NO: 329328 - DNA, 30 bp, Artificial Sequence
  Synthetic oligonucleotide
ggtttgtttgttaaatatcactaacatgta

SEQ ID NO: 329329 - DNA, 30 bp, Artificial Sequence
  Synthetic oligonucleotide
tggtggtggctcaaggactatccacatgta

SEQ ID NO: 329330 - DNA, 30 bp, Artificial Sequence
  Synthetic oligonucleotide
tattgaagtaaatctgccaggttacatgta

SEQ ID NO: 329331 - DNA, 30 bp, Artificial Sequence
  Synthetic oligonucleotide
catagttccttccggtagaaatcccatgta

SEQ ID NO: 329332 - DNA, 30 bp, Artificial Sequence
  Synthetic oligonucleotide
ccaacaccaatagtggctaaggatcatgta

SEQ ID NO: 329333 - DNA, 30 bp, Artificial Sequence
  Synthetic oligonucleotide
ttccgtaagtgggatagcaggcgtcatgta

SEQ ID NO: 329334 - DNA, 30 bp, Artificial Sequence
  Synthetic oligonucleotide
agattctgagcagagatacaaggtcatgta

SEQ ID NO: 329335 - DNA, 30 bp, Artificial Sequence
  Synthetic oligonucleotide
gcacgaacccgatgtgagtctgttcatgta

SEQ ID NO: 329336 - DNA, 30 bp, Artificial Sequence
  Synthetic oligonucleotide
ggcatttcactaacaacaatgaaagatgta

SEQ ID NO: 329337 - DNA, 30 bp, Artificial Sequence
  Synthetic oligonucleotide
ctaacaaggctaggatctgtgacagatgta

SEQ ID NO: 329338 - DNA, 30 bp, Artificial Sequence
  Synthetic oligonucleotide
agtcgcttgggggacaggtctctcgatgta

SEQ ID NO: 329339 - DNA, 30 bp, Artificial Sequence
  Synthetic oligonucleotide
gccggacaaaaacggagaagcttcgatgta

SEQ ID NO: 329340 - DNA, 30 bp, Artificial Sequence
  Synthetic oligonucleotide
aagggcttggggctatccgctggggatgta

SEQ ID NO: 329341 - DNA, 30 bp, Artificial Sequence
  Synthetic oligonucleotide
ggttttgaagaaggtaacaggttggatgta

SEQ ID NO: 329342 - DNA, 30 bp, Artificial Sequence
  Synthetic oligonucleotide
caagcgattgctacgttgagttgtgatgta

SEQ ID NO: 329343 - DNA, 30 bp, Artificial Sequence
  Synthetic oligonucleotide
tggcgccaaccgcgcagctcccttgatgta

SEQ ID NO: 329344 - DNA, 30 bp, Artificial Sequence
  Synthetic oligonucleotide
aacatgctcacacgcacgaagaaatatgta

SEQ ID NO: 329345 - DNA, 30 bp, Artificial Sequence
  Synthetic oligonucleotide
atgtcgcgcgccattgctaaaatatatgta

SEQ ID NO: 329346 - DNA, 30 bp, Artificial Sequence
  Synthetic oligonucleotide
taaccgtggtcgtttcgttgcctatatgta

SEQ ID NO: 329347 - DNA, 30 bp, Artificial Sequence
  Synthetic oligonucleotide
caatgaccgatgactttgattgtatatgta

SEQ ID NO: 329348 - DNA, 30 bp, Artificial Sequence
  Synthetic oligonucleotide
tcggccttacgaggcatcagtggctatgta

SEQ ID NO: 329349 - DNA, 30 bp, Artificial Sequence
  Synthetic oligonucleotide
tgaacgtatggcgagtgactctgctatgta

SEQ ID NO: 329350 - DNA, 30 bp, Artificial Sequence
  Synthetic oligonucleotide
tactgaacaaggttatggcccctctatgta

SEQ ID NO: 329351 - DNA, 30 bp, Artificial Sequence
  Synthetic oligonucleotide
acaacatctgaacagctctccacgtatgta

SEQ ID NO: 329352 - DNA, 30 bp, Artificial Sequence
  Synthetic oligonucleotide
tagaactaaccccatcagcacccgtatgta

SEQ ID NO: 329353 - DNA, 30 bp, Artificial Sequence
  Synthetic oligonucleotide
acaacggaagggtcgtcacggccaactgta

SEQ ID NO: 329354 - DNA, 30 bp, Artificial Sequence
  Synthetic oligonucleotide
atgtgcatatttcccggaattataactgta

SEQ ID NO: 329355 - DNA, 30 bp, Artificial Sequence
  Synthetic oligonucleotide
gaaggggctggttgtatgtgaaccactgta

SEQ ID NO: 329356 - DNA, 30 bp, Artificial Sequence
  Synthetic oligonucleotide
gaggcatccctgtattagcccagcactgta

SEQ ID NO: 329357 - DNA, 30 bp, Artificial Sequence
  Synthetic oligonucleotide
tcaatacgggcgacttagtgctggactgta

SEQ ID NO: 329358 - DNA, 30 bp, Artificial Sequence
  Synthetic oligonucleotide
caccgtagtaagactaatctttggactgta

SEQ ID NO: 329359 - DNA, 30 bp, Artificial Sequence
  Synthetic oligonucleotide
gtacagagccaattcacaccaagtactgta

SEQ ID NO: 329360 - DNA, 30 bp, Artificial Sequence
  Synthetic oligonucleotide
gtttacgaagccgaaataggagaccctgta

SEQ ID NO: 329361 - DNA, 30 bp, Artificial Sequence
  Synthetic oligonucleotide
ggttagcagcctttagcttaagcccctgta

SEQ ID NO: 329362 - DNA, 30 bp, Artificial Sequence
  Synthetic oligonucleotide
gaggaccgtaatgggcacaattcccctgta

SEQ ID NO: 329363 - DNA, 30 bp, Artificial Sequence
  Synthetic oligonucleotide
acacgaagaaaaagctaggccagccctgta

SEQ ID NO: 329364 - DNA, 30 bp, Artificial Sequence
  Synthetic oligonucleotide
cggtccgtaccattcagttttgggcctgta

SEQ ID NO: 329365 - DNA, 30 bp, Artificial Sequence
  Synthetic oligonucleotide
agtccatctcgatgcttcgtattagctgta

SEQ ID NO: 329366 - DNA, 30 bp, Artificial Sequence
  Synthetic oligonucleotide
gccatgcgccctcgaaattgtggcgctgta

SEQ ID NO: 329367 - DNA, 30 bp, Artificial Sequence
  Synthetic oligonucleotide
accagcgtcgagcgcatagatctcgctgta

SEQ ID NO: 329368 - DNA, 30 bp, Artificial Sequence
  Synthetic oligonucleotide
ttatagcccctaccaccagtacaggctgta

SEQ ID NO: 329369 - DNA, 30 bp, Artificial Sequence
  Synthetic oligonucleotide
gacgctgtcaattttcgtgcagcggctgta

SEQ ID NO: 329370 - DNA, 30 bp, Artificial Sequence
  Synthetic oligonucleotide
ccaaataggtaaaggggctgctgtgctgta

SEQ ID NO: 329371 - DNA, 30 bp, Artificial Sequence
  Synthetic oligonucleotide
ccccgtcgtggcgttggtcatcaatctgta

SEQ ID NO: 329372 - DNA, 30 bp, Artificial Sequence
  Synthetic oligonucleotide
ccaggttgtgtgtacacaccaacatctgta

SEQ ID NO: 329373 - DNA, 30 bp, Artificial Sequence
  Synthetic oligonucleotide
gttacgactcgctgtgctcggagatctgta

SEQ ID NO: 329374 - DNA, 30 bp, Artificial Sequence
  Synthetic oligonucleotide
tagcaacctagattaccgctatgctctgta

SEQ ID NO: 329375 - DNA, 30 bp, Artificial Sequence
  Synthetic oligonucleotide
agtaacttcaagcccggcgcgcagtctgta

SEQ ID NO: 329376 - DNA, 30 bp, Artificial Sequence
  Synthetic oligonucleotide
tatgccgattggggaaatgtctggtctgta

SEQ ID NO: 329377 - DNA, 30 bp, Artificial Sequence
  Synthetic oligonucleotide
cttagagtcgtatctaattagcattctgta

SEQ ID NO: 329378 - DNA, 30 bp, Artificial Sequence
  Synthetic oligonucleotide
agattcatgtgtgaaagtcggcattctgta

SEQ ID NO: 329379 - DNA, 30 bp, Artificial Sequence
  Synthetic oligonucleotide
atgtcgcgctatgtccctagaggttctgta

SEQ ID NO: 329380 - DNA, 30 bp, Artificial Sequence
  Synthetic oligonucleotide
cccgtacagaacgtccctatttgttctgta

SEQ ID NO: 329381 - DNA, 30 bp, Artificial Sequence
  Synthetic oligonucleotide
ttaattcatggaaggaagcgagaaagtgta

SEQ ID NO: 329382 - DNA, 30 bp, Artificial Sequence
  Synthetic oligonucleotide
ttgtagagtagactggtatgtgaaagtgta

SEQ ID NO: 329383 - DNA, 30 bp, Artificial Sequence
  Synthetic oligonucleotide
ttgaacacaaaagatctagacgacagtgta

SEQ ID NO: 329384 - DNA, 30 bp, Artificial Sequence
  Synthetic oligonucleotide
atgacataccgcaaagagcaatacagtgta

SEQ ID NO: 329385 - DNA, 30 bp, Artificial Sequence
  Synthetic oligonucleotide
gttcacttaataatcccgcagagcagtgta

SEQ ID NO: 329386 - DNA, 30 bp, Artificial Sequence
  Synthetic oligonucleotide
cttcgaaaggttagaaccatctgcagtgta

SEQ ID NO: 329387 - DNA, 39 bp, Artificial Sequence
  Synthetic oligonucleotide
cggacctgtacgttgtcatctactgagggcttcagtgta

SEQ ID NO: 329388 - DNA, 30 bp, Artificial Sequence
  Synthetic oligonucleotide
tccgcgtttcttaaggcacgttcgagtgta

SEQ ID NO: 329389 - DNA, 30 bp, Artificial Sequence
  Synthetic oligonucleotide
caacggtgtttatgattcagacggagtgta

SEQ ID NO: 329390 - DNA, 30 bp, Artificial Sequence
  Synthetic oligonucleotide
ataggaatgccagctccatgatggagtgta

SEQ ID NO: 329391 - DNA, 30 bp, Artificial Sequence
  Synthetic oligonucleotide
gaagaaagggggtgtctactgatgagtgta

SEQ ID NO: 329392 - DNA, 30 bp, Artificial Sequence
  Synthetic oligonucleotide
gcagtgtaaatccctagcgccgtgagtgta

SEQ ID NO: 329393 - DNA, 30 bp, Artificial Sequence
  Synthetic oligonucleotide
aatgacagttgcaatcaggcacatagtgta

SEQ ID NO: 329394 - DNA, 30 bp, Artificial Sequence
  Synthetic oligonucleotide
caacattgatggaccggggttcctagtgta

SEQ ID NO: 329395 - DNA, 30 bp, Artificial Sequence
  Synthetic oligonucleotide
taacacatcagaataaggatctcacgtgta

SEQ ID NO: 329396 - DNA, 30 bp, Artificial Sequence
  Synthetic oligonucleotide
agtgcgactgtgcacatcttagtccgtgta

SEQ ID NO: 329397 - DNA, 30 bp, Artificial Sequence
  Synthetic oligonucleotide
gggaatctgcactacccggatgtccgtgta

SEQ ID NO: 329398 - DNA, 30 bp, Artificial Sequence
  Synthetic oligonucleotide
tctgaggtatttatccccattaggcgtgta

SEQ ID NO: 329399 - DNA, 30 bp, Artificial Sequence
  Synthetic oligonucleotide
cacgccggagatatcacaatgtgtcgtgta

SEQ ID NO: 329400 - DNA, 30 bp, Artificial Sequence
  Synthetic oligonucleotide
aaaggatggtccccgttgacataaggtgta

SEQ ID NO: 329401 - DNA, 30 bp, Artificial Sequence
  Synthetic oligonucleotide
gaaggggttccactctaattgagaggtgta

SEQ ID NO: 329402 - DNA, 30 bp, Artificial Sequence
  Synthetic oligonucleotide
ggacccactcagggtcgtggtggaggtgta

SEQ ID NO: 329403 - DNA, 30 bp, Artificial Sequence
  Synthetic oligonucleotide
ttgctatagatgggcatttcgataggtgta

SEQ ID NO: 329404 - DNA, 30 bp, Artificial Sequence
  Synthetic oligonucleotide
acgtagaacccggtcctcgcccgcggtgta

SEQ ID NO: 329405 - DNA, 30 bp, Artificial Sequence
  Synthetic oligonucleotide
ttgtgttcgcttaactggtaggtcggtgta

SEQ ID NO: 329406 - DNA, 30 bp, Artificial Sequence
  Synthetic oligonucleotide
ccgatacaattggaacagatttagggtgta

SEQ ID NO: 329407 - DNA, 30 bp, Artificial Sequence
  Synthetic oligonucleotide
atcaccgcttggctgacagacgcgggtgta

SEQ ID NO: 329408 - DNA, 30 bp, Artificial Sequence
  Synthetic oligonucleotide
gggggaccagtttcctggaagatgggtgta

SEQ ID NO: 329409 - DNA, 30 bp, Artificial Sequence
  Synthetic oligonucleotide
ctcagccggggccggcaaaggttgggtgta

SEQ ID NO: 329410 - DNA, 30 bp, Artificial Sequence
  Synthetic oligonucleotide
catctcggctgagcgatggatgctggtgta

SEQ ID NO: 329411 - DNA, 30 bp, Artificial Sequence
  Synthetic oligonucleotide
tacgaagcacgcccggttcgcccatgtgta

SEQ ID NO: 329412 - DNA, 30 bp, Artificial Sequence
  Synthetic oligonucleotide
aaacgagtgtaacatctacctccatgtgta

SEQ ID NO: 329413 - DNA, 30 bp, Artificial Sequence
  Synthetic oligonucleotide
agagtactggtaaaatccagggcctgtgta

SEQ ID NO: 329414 - DNA, 30 bp, Artificial Sequence
  Synthetic oligonucleotide
taacccccgccagtgataagcatctgtgta

SEQ ID NO: 329415 - DNA, 30 bp, Artificial Sequence
  Synthetic oligonucleotide
tacgaatcgatcccaatgatgctctgtgta

SEQ ID NO: 329416 - DNA, 30 bp, Artificial Sequence
  Synthetic oligonucleotide
aaacgctcaatgtcacttcataattgtgta

SEQ ID NO: 329417 - DNA, 30 bp, Artificial Sequence
  Synthetic oligonucleotide
atcaattttattggtcaatgtacttgtgta

SEQ ID NO: 329418 - DNA, 30 bp, Artificial Sequence
  Synthetic oligonucleotide
taaccgacaactgaaaaagacttttgtgta

SEQ ID NO: 329419 - DNA, 30 bp, Artificial Sequence
  Synthetic oligonucleotide
cagcctcacatgtatgaaaagggaattgta

SEQ ID NO: 329420 - DNA, 30 bp, Artificial Sequence
  Synthetic oligonucleotide
ctgtgttctggtaaatcatagttaattgta

SEQ ID NO: 329421 - DNA, 30 bp, Artificial Sequence
  Synthetic oligonucleotide
gatcaacgcgcaggaaaaataaccattgta

SEQ ID NO: 329422 - DNA, 30 bp, Artificial Sequence
  Synthetic oligonucleotide
cgtgtattagtatatcccacgagcattgta

SEQ ID NO: 329423 - DNA, 30 bp, Artificial Sequence
  Synthetic oligonucleotide
ccgcgcacttgttgaagtacattcattgta

SEQ ID NO: 329424 - DNA, 30 bp, Artificial Sequence
  Synthetic oligonucleotide
cagtcgtatgatcatacgacagagattgta

SEQ ID NO: 329425 - DNA, 30 bp, Artificial Sequence
  Synthetic oligonucleotide
cttcatgtcttcaggtagcagtagattgta

SEQ ID NO: 329426 - DNA, 30 bp, Artificial Sequence
  Synthetic oligonucleotide
ctatcaaacataatatagcgttcgattgta

SEQ ID NO: 329427 - DNA, 31 bp, Artificial Sequence
  Synthetic oligonucleotide
gagcatatagcattgcacacgacaacttgta

SEQ ID NO: 329428 - DNA, 30 bp, Artificial Sequence
  Synthetic oligonucleotide
catgtgagctttccgtattatggacttgta

SEQ ID NO: 329429 - DNA, 30 bp, Artificial Sequence
  Synthetic oligonucleotide
gccggtgcgatttctcaccctaaccttgta

SEQ ID NO: 329430 - DNA, 30 bp, Artificial Sequence
  Synthetic oligonucleotide
ccaggtggtgtagtaacccaggggcttgta

SEQ ID NO: 329431 - DNA, 30 bp, Artificial Sequence
  Synthetic oligonucleotide
gtgtaggtgcgacgctctgaatatcttgta

SEQ ID NO: 329432 - DNA, 30 bp, Artificial Sequence
  Synthetic oligonucleotide
tttccagcgcgatcatgagagacagttgta

SEQ ID NO: 329433 - DNA, 30 bp, Artificial Sequence
  Synthetic oligonucleotide
attcaagctgaactttcttatacggttgta

SEQ ID NO: 329434 - DNA, 30 bp, Artificial Sequence
  Synthetic oligonucleotide
gcatataggactggcattagtgcggttgta

SEQ ID NO: 329435 - DNA, 30 bp, Artificial Sequence
  Synthetic oligonucleotide
gacgtatccggtcatttgatgagggttgta

SEQ ID NO: 329436 - DNA, 30 bp, Artificial Sequence
  Synthetic oligonucleotide
ttcggcgtccagtctgctttctgggttgta

SEQ ID NO: 329437 - DNA, 30 bp, Artificial Sequence
  Synthetic oligonucleotide
gtgaatggattagatagcactactgttgta

SEQ ID NO: 329438 - DNA, 30 bp, Artificial Sequence
  Synthetic oligonucleotide
tataggaatcggcctgcaggtagtgttgta

SEQ ID NO: 329439 - DNA, 30 bp, Artificial Sequence
  Synthetic oligonucleotide
aaccacagactagggttactacttgttgta

SEQ ID NO: 329440 - DNA, 30 bp, Artificial Sequence
  Synthetic oligonucleotide
caggatgtccggacgtgtcatagctttgta

SEQ ID NO: 329441 - DNA, 30 bp, Artificial Sequence
  Synthetic oligonucleotide
atgattactctgtaggacctatagtttgta

SEQ ID NO: 329442 - DNA, 30 bp, Artificial Sequence
  Synthetic oligonucleotide
gtcttgttccacgattaaagagggtttgta

SEQ ID NO: 329443 - DNA, 30 bp, Artificial Sequence
  Synthetic oligonucleotide
tgtgactaatctgttaatgtcgtgtttgta

SEQ ID NO: 329444 - DNA, 30 bp, Artificial Sequence
  Synthetic oligonucleotide
atattccgggtgcggtgcggagcaaaatta

SEQ ID NO: 329445 - DNA, 30 bp, Artificial Sequence
  Synthetic oligonucleotide
taggcgcgtagtttgcagacggcaaaatta

SEQ ID NO: 329446 - DNA, 30 bp, Artificial Sequence
  Synthetic oligonucleotide
gccacactggtccaattgagcagaaaatta

SEQ ID NO: 329447 - DNA, 30 bp, Artificial Sequence
  Synthetic oligonucleotide
atatcgttaatggtgtcaggtggaaaatta

SEQ ID NO: 329448 - DNA, 30 bp, Artificial Sequence
  Synthetic oligonucleotide
gctgaactttttgggaggaacctaaaatta

SEQ ID NO: 329449 - DNA, 30 bp, Artificial Sequence
  Synthetic oligonucleotide
caggcaggcccatacacggaaatcaaatta

SEQ ID NO: 329450 - DNA, 31 bp, Artificial Sequence
  Synthetic oligonucleotide
ggatacaatatagatagggtggctcaaatta

SEQ ID NO: 329451 - DNA, 30 bp, Artificial Sequence
  Synthetic oligonucleotide
cgtcgtcatgttaaaagggatcagaaatta

SEQ ID NO: 329452 - DNA, 30 bp, Artificial Sequence
  Synthetic oligonucleotide
tacatggttacgacaccagcacggaaatta

SEQ ID NO: 329453 - DNA, 30 bp, Artificial Sequence
  Synthetic oligonucleotide
agcgtatagttgacagcggaagttaaatta

SEQ ID NO: 329454 - DNA, 30 bp, Artificial Sequence
  Synthetic oligonucleotide
ttgggatctattaggtataggttacaatta

SEQ ID NO: 329455 - DNA, 30 bp, Artificial Sequence
  Synthetic oligonucleotide
taaagcctgtccattctttaaccccaatta

SEQ ID NO: 329456 - DNA, 30 bp, Artificial Sequence
  Synthetic oligonucleotide
ctaggtatcttagtccgattattccaatta

SEQ ID NO: 329457 - DNA, 30 bp, Artificial Sequence
  Synthetic oligonucleotide
aatggacagaggacaggggccttccaatta

SEQ ID NO: 329458 - DNA, 30 bp, Artificial Sequence
  Synthetic oligonucleotide
tcaacgaccggctggggttacaagcaatta

SEQ ID NO: 329459 - DNA, 30 bp, Artificial Sequence
  Synthetic oligonucleotide
ttgataatatataaccccacctagcaatta

SEQ ID NO: 329460 - DNA, 30 bp, Artificial Sequence
  Synthetic oligonucleotide
tccgcccgccctgaccgcaaacctcaatta

SEQ ID NO: 329461 - DNA, 30 bp, Artificial Sequence
  Synthetic oligonucleotide
ttaaaaatcagagggaagcctgttcaatta

SEQ ID NO: 329462 - DNA, 30 bp, Artificial Sequence
  Synthetic oligonucleotide
tctccaaggatgcgcggcaagcccgaatta

SEQ ID NO: 329463 - DNA, 30 bp, Artificial Sequence
  Synthetic oligonucleotide
ctatgtgcaagcgaccaatgtggcgaatta

SEQ ID NO: 329464 - DNA, 30 bp, Artificial Sequence
  Synthetic oligonucleotide
ctgcaaggagccagcatcgtaatcgaatta

SEQ ID NO: 329465 - DNA, 30 bp, Artificial Sequence
  Synthetic oligonucleotide
tctatctctccaaggcccggggaggaatta

SEQ ID NO: 329466 - DNA, 30 bp, Artificial Sequence
  Synthetic oligonucleotide
aatatacagtgccccgtgacaggggaatta

SEQ ID NO: 329467 - DNA, 30 bp, Artificial Sequence
  Synthetic oligonucleotide
agtcctgcgacagttttttaaatggaatta

SEQ ID NO: 329468 - DNA, 30 bp, Artificial Sequence
  Synthetic oligonucleotide
tagcacagacgtcataaacgatgataatta

SEQ ID NO: 329469 - DNA, 30 bp, Artificial Sequence
  Synthetic oligonucleotide
agaatttatacatatcgaggacattaatta

SEQ ID NO: 329470 - DNA, 30 bp, Artificial Sequence
  Synthetic oligonucleotide
tgataacaatagtctacaatttgttaatta

SEQ ID NO: 329471 - DNA, 30 bp, Artificial Sequence
  Synthetic oligonucleotide
tttgggactcttttggttttcatttaatta

SEQ ID NO: 329472 - DNA, 30 bp, Artificial Sequence
  Synthetic oligonucleotide
tctcgtgtattgaggcgttgactttaatta

SEQ ID NO: 329473 - DNA, 30 bp, Artificial Sequence
  Synthetic oligonucleotide
tgcaaagtagcatctaactctgtttaatta

SEQ ID NO: 329474 - DNA, 30 bp, Artificial Sequence
  Synthetic oligonucleotide
ttatcatctcttcttactctaagaacatta

SEQ ID NO: 329475 - DNA, 30 bp, Artificial Sequence
  Synthetic oligonucleotide
gtaacagtgcgtttggtagataacacatta

SEQ ID NO: 329476 - DNA, 30 bp, Artificial Sequence
  Synthetic oligonucleotide
ggctcttctagatgtccgggctccacatta

SEQ ID NO: 329477 - DNA, 30 bp, Artificial Sequence
  Synthetic oligonucleotide
ttctttgcagggagcccgacttccacatta

SEQ ID NO: 329478 - DNA, 30 bp, Artificial Sequence
  Synthetic oligonucleotide
attgataatcactggtggtcgggcacatta

SEQ ID NO: 329479 - DNA, 30 bp, Artificial Sequence
  Synthetic oligonucleotide
ctattttaaccgtactcccttgtcacatta

SEQ ID NO: 329480 - DNA, 30 bp, Artificial Sequence
  Synthetic oligonucleotide
tcgttaatctcctgtcacgtacagacatta

SEQ ID NO: 329481 - DNA, 30 bp, Artificial Sequence
  Synthetic oligonucleotide
acagtccggggtccctctgtaacgacatta

SEQ ID NO: 329482 - DNA, 30 bp, Artificial Sequence
  Synthetic oligonucleotide
gtttcaagtatttttacacatacgacatta

SEQ ID NO: 329483 - DNA, 30 bp, Artificial Sequence
  Synthetic oligonucleotide
ggtaatgggaatcctgaatccgctacatta

SEQ ID NO: 329484 - DNA, 30 bp, Artificial Sequence
  Synthetic oligonucleotide
atcgggatgttttagtcagaggttacatta

SEQ ID NO: 329485 - DNA, 30 bp, Artificial Sequence
  Synthetic oligonucleotide
gtctgctatactgcatgcgcaaaaccatta

SEQ ID NO: 329486 - DNA, 30 bp, Artificial Sequence
  Synthetic oligonucleotide
agtggacccgactttagcatctaaccatta

SEQ ID NO: 329487 - DNA, 30 bp, Artificial Sequence
  Synthetic oligonucleotide
ggatgtataggggtggcccgttgaccatta

SEQ ID NO: 329488 - DNA, 30 bp, Artificial Sequence
  Synthetic oligonucleotide
gtagacattataagtcaaggtctaccatta

SEQ ID NO: 329489 - DNA, 30 bp, Artificial Sequence
  Synthetic oligonucleotide
actatggctaagtagacctgacacccatta

SEQ ID NO: 329490 - DNA, 30 bp, Artificial Sequence
  Synthetic oligonucleotide
catgggaaaatactatcccgacagccatta

SEQ ID NO: 329491 - DNA, 30 bp, Artificial Sequence
  Synthetic oligonucleotide
ccgccaccgtcttgcagtggttcgccatta

SEQ ID NO: 329492 - DNA, 30 bp, Artificial Sequence
  Synthetic oligonucleotide
cggaaaaatgcgtagacgcacaggccatta

SEQ ID NO: 329493 - DNA, 30 bp, Artificial Sequence
  Synthetic oligonucleotide
caattatttggcgacaagccaactccatta

SEQ ID NO: 329494 - DNA, 30 bp, Artificial Sequence
  Synthetic oligonucleotide
gggatgctcttaataggcttctctccatta

SEQ ID NO: 329495 - DNA, 30 bp, Artificial Sequence
  Synthetic oligonucleotide
gaccacacgacttggaggaattttccatta

SEQ ID NO: 329496 - DNA, 30 bp, Artificial Sequence
  Synthetic oligonucleotide
atggtcgaagtatatcgcttggaggcatta

SEQ ID NO: 329497 - DNA, 30 bp, Artificial Sequence
  Synthetic oligonucleotide
tttgatgtgtacgggacaacgatggcatta

SEQ ID NO: 329498 - DNA, 30 bp, Artificial Sequence
  Synthetic oligonucleotide
tggatcagacacgggacagcatatgcatta

SEQ ID NO: 329499 - DNA, 30 bp, Artificial Sequence
  Synthetic oligonucleotide
ttgcgacggcattagttttctccatcatta

SEQ ID NO: 329500 - DNA, 30 bp, Artificial Sequence
  Synthetic oligonucleotide
aatgcttgagggcaactttaatgatcatta

SEQ ID NO: 329501 - DNA, 30 bp, Artificial Sequence
  Synthetic oligonucleotide
actctaagtatggatgattttccctcatta

SEQ ID NO: 329502 - DNA, 30 bp, Artificial Sequence
  Synthetic oligonucleotide
accgacgatctactcagttgatcctcatta

SEQ ID NO: 329503 - DNA, 30 bp, Artificial Sequence
  Synthetic oligonucleotide
ctgacgaaaactttgcgtcacgggtcatta

SEQ ID NO: 329504 - DNA, 30 bp, Artificial Sequence
  Synthetic oligonucleotide
tcctactaatgtctggaccaactgtcatta

SEQ ID NO: 329505 - DNA, 30 bp, Artificial Sequence
  Synthetic oligonucleotide
cacagcttaaaaccagctttgccttcatta

SEQ ID NO: 329506 - DNA, 30 bp, Artificial Sequence
  Synthetic oligonucleotide
catgaggttctgcggatcgtaggttcatta

SEQ ID NO: 329507 - DNA, 30 bp, Artificial Sequence
  Synthetic oligonucleotide
accagggacggcaccttcactgcaagatta

SEQ ID NO: 329508 - DNA, 30 bp, Artificial Sequence
  Synthetic oligonucleotide
atggctatcgggccatttacatcaagatta

SEQ ID NO: 329509 - DNA, 30 bp, Artificial Sequence
  Synthetic oligonucleotide
gtacgtcaataccttagaatttgaagatta

SEQ ID NO: 329510 - DNA, 30 bp, Artificial Sequence
  Synthetic oligonucleotide
ataggcgagtaattagtattcataagatta

SEQ ID NO: 329511 - DNA, 30 bp, Artificial Sequence
  Synthetic oligonucleotide
ctactaagtccacataacagctccagatta

SEQ ID NO: 329512 - DNA, 30 bp, Artificial Sequence
  Synthetic oligonucleotide
gcaatggaagaggactttttctgcagatta

SEQ ID NO: 329513 - DNA, 30 bp, Artificial Sequence
  Synthetic oligonucleotide
ctagtccatcggaggttcttgttcagatta

SEQ ID NO: 329514 - DNA, 30 bp, Artificial Sequence
  Synthetic oligonucleotide
ggcgcagccatagacgattaacagagatta

SEQ ID NO: 329515 - DNA, 30 bp, Artificial Sequence
  Synthetic oligonucleotide
ttaataagtccacccttaacaacgagatta

SEQ ID NO: 329516 - DNA, 30 bp, Artificial Sequence
  Synthetic oligonucleotide
aatcaactacgagggagaatatcgagatta

SEQ ID NO: 329517 - DNA, 30 bp, Artificial Sequence
  Synthetic oligonucleotide
ggttatgcttgatgacttcaacggagatta

SEQ ID NO: 329518 - DNA, 30 bp, Artificial Sequence
  Synthetic oligonucleotide
ttaggaacaccctatcagacgcggagatta

SEQ ID NO: 329519 - DNA, 30 bp, Artificial Sequence
  Synthetic oligonucleotide
cgcaatatgcattccgacgacatgagatta

SEQ ID NO: 329520 - DNA, 30 bp, Artificial Sequence
  Synthetic oligonucleotide
agcgataggatattgaactaatgtagatta

SEQ ID NO: 329521 - DNA, 30 bp, Artificial Sequence
  Synthetic oligonucleotide
agccattgacatcttgcttcttaacgatta

SEQ ID NO: 329522 - DNA, 30 bp, Artificial Sequence
  Synthetic oligonucleotide
cagactttaagtcaaataagaacacgatta

SEQ ID NO: 329523 - DNA, 30 bp, Artificial Sequence
  Synthetic oligonucleotide
ttaacagtcgattaacttaagggaggatta

SEQ ID NO: 329524 - DNA, 30 bp, Artificial Sequence
  Synthetic oligonucleotide
aatgattaatcaaggcttgccctcggatta

SEQ ID NO: 329525 - DNA, 30 bp, Artificial Sequence
  Synthetic oligonucleotide
atagaatcttatgagcgcgatgtcggatta

SEQ ID NO: 329526 - DNA, 30 bp, Artificial Sequence
  Synthetic oligonucleotide
cttggactatgagtggacctcaggggatta

SEQ ID NO: 329527 - DNA, 30 bp, Artificial Sequence
  Synthetic oligonucleotide
actggacgccggttgcgcatctggggatta

SEQ ID NO: 329528 - DNA, 30 bp, Artificial Sequence
  Synthetic oligonucleotide
ctgggggagctagacagatccctgggatta

SEQ ID NO: 329529 - DNA, 30 bp, Artificial Sequence
  Synthetic oligonucleotide
ttggaacagtgcattcaccggtctggatta

SEQ ID NO: 329530 - DNA, 30 bp, Artificial Sequence
  Synthetic oligonucleotide
gagcctacaaccggagcgctaaaatgatta

SEQ ID NO: 329531 - DNA, 30 bp, Artificial Sequence
  Synthetic oligonucleotide
tgaacgacaaccatggcctttttatgatta

SEQ ID NO: 329532 - DNA, 30 bp, Artificial Sequence
  Synthetic oligonucleotide
cagaactcttaggtccccttagcctgatta

SEQ ID NO: 329533 - DNA, 30 bp, Artificial Sequence
  Synthetic oligonucleotide
acaacggcgctgctaatgttatcctgatta

SEQ ID NO: 329534 - DNA, 30 bp, Artificial Sequence
  Synthetic oligonucleotide
gacacaagttaacatcccggccgctgatta

SEQ ID NO: 329535 - DNA, 30 bp, Artificial Sequence
  Synthetic oligonucleotide
atagtctaacccctggaggttatctgatta

SEQ ID NO: 329536 - DNA, 30 bp, Artificial Sequence
  Synthetic oligonucleotide
gcttggtaagcaggctattgctaaatatta

SEQ ID NO: 329537 - DNA, 30 bp, Artificial Sequence
  Synthetic oligonucleotide
tcataagttaccacactcattttaatatta

SEQ ID NO: 329538 - DNA, 30 bp, Artificial Sequence
  Synthetic oligonucleotide
agcagtgcccataaatggaaggccatatta

SEQ ID NO: 329539 - DNA, 30 bp, Artificial Sequence
  Synthetic oligonucleotide
cctacggccaactctcctcctatgatatta

SEQ ID NO: 329540 - DNA, 30 bp, Artificial Sequence
  Synthetic oligonucleotide
aaggtctcaggtatttagtgtgtgatatta

SEQ ID NO: 329541 - DNA, 30 bp, Artificial Sequence
  Synthetic oligonucleotide
aacccttttctagtgagctgaagtatatta

SEQ ID NO: 329542 - DNA, 30 bp, Artificial Sequence
  Synthetic oligonucleotide
aagcccgtgcgcaacgcgcggtacctatta

SEQ ID NO: 329543 - DNA, 30 bp, Artificial Sequence
  Synthetic oligonucleotide
tagcaaccaaaacctgctaggaagctatta

SEQ ID NO: 329544 - DNA, 30 bp, Artificial Sequence
  Synthetic oligonucleotide
tgtggacgtgtgagagttagaccgctatta

SEQ ID NO: 329545 - DNA, 30 bp, Artificial Sequence
  Synthetic oligonucleotide
ccacgataagagcaccgcgcggcgctatta

SEQ ID NO: 329546 - DNA, 30 bp, Artificial Sequence
  Synthetic oligonucleotide
tgttacttgactgtccttttgcctctatta

SEQ ID NO: 329547 - DNA, 30 bp, Artificial Sequence
  Synthetic oligonucleotide
tccccggacgaacagctaggcagtctatta

SEQ ID NO: 329548 - DNA, 30 bp, Artificial Sequence
  Synthetic oligonucleotide
actctgtctagcttcttctttacagtatta

SEQ ID NO: 329549 - DNA, 30 bp, Artificial Sequence
  Synthetic oligonucleotide
taaatgagtcggatgccgtgacgagtatta

SEQ ID NO: 329550 - DNA, 30 bp, Artificial Sequence
  Synthetic oligonucleotide
ttcgagagcaggcagccactaggagtatta

SEQ ID NO: 329551 - DNA, 30 bp, Artificial Sequence
  Synthetic oligonucleotide
ttgccttagagtacagaaaagggagtatta

SEQ ID NO: 329552 - DNA, 30 bp, Artificial Sequence
  Synthetic oligonucleotide
tgaaacattcccggacctagcgccgtatta

SEQ ID NO: 329553 - DNA, 30 bp, Artificial Sequence
  Synthetic oligonucleotide
atcaacaaggggctgcgcagaaaggtatta

SEQ ID NO: 329554 - DNA, 30 bp, Artificial Sequence
  Synthetic oligonucleotide
ccaacatcgggtattgtgcttaaggtatta

SEQ ID NO: 329555 - DNA, 30 bp, Artificial Sequence
  Synthetic oligonucleotide
gagtctgtgcggcgatagatactggtatta

SEQ ID NO: 329556 - DNA, 30 bp, Artificial Sequence
  Synthetic oligonucleotide
tcttgatttaatatattgatattggtatta

SEQ ID NO: 329557 - DNA, 30 bp, Artificial Sequence
  Synthetic oligonucleotide
caacgacctacgctggcgccttatgtatta

SEQ ID NO: 329558 - DNA, 30 bp, Artificial Sequence
  Synthetic oligonucleotide
tgcagcactcagccatgtcccggtgtatta

SEQ ID NO: 329559 - DNA, 30 bp, Artificial Sequence
  Synthetic oligonucleotide
ataggagaaaattttgaaggacttgtatta

SEQ ID NO: 329560 - DNA, 30 bp, Artificial Sequence
  Synthetic oligonucleotide
tcgggtaggctacagagcttacttgtatta

SEQ ID NO: 329561 - DNA, 30 bp, Artificial Sequence
  Synthetic oligonucleotide
gtaactacgcgataatagcaacaattatta

SEQ ID NO: 329562 - DNA, 30 bp, Artificial Sequence
  Synthetic oligonucleotide
gcttggcttgtatgtgtgattgcattatta

SEQ ID NO: 329563 - DNA, 30 bp, Artificial Sequence
  Synthetic oligonucleotide
cattcggcatctcttgacaccagattatta

SEQ ID NO: 329564 - DNA, 30 bp, Artificial Sequence
  Synthetic oligonucleotide
tgaaggggaggggcagatcctctattatta

SEQ ID NO: 329565 - DNA, 30 bp, Artificial Sequence
  Synthetic oligonucleotide
acgtcatgtagagacctccatggcttatta

SEQ ID NO: 329566 - DNA, 30 bp, Artificial Sequence
  Synthetic oligonucleotide
cttggtttttgatcgtccactggcttatta

SEQ ID NO: 329567 - DNA, 30 bp, Artificial Sequence
  Synthetic oligonucleotide
atgatggggcattgacctgcaatgttatta

SEQ ID NO: 329568 - DNA, 30 bp, Artificial Sequence
  Synthetic oligonucleotide
agggacctctgggcccccaacgacaactta

SEQ ID NO: 329569 - DNA, 30 bp, Artificial Sequence
  Synthetic oligonucleotide
acgtggggacctatttcgatgaataactta

SEQ ID NO: 329570 - DNA, 30 bp, Artificial Sequence
  Synthetic oligonucleotide
ggacatgccattcacggtacggataactta

SEQ ID NO: 329571 - DNA, 30 bp, Artificial Sequence
  Synthetic oligonucleotide
tcagctataactagtacaagtggtaactta

SEQ ID NO: 329572 - DNA, 30 bp, Artificial Sequence
  Synthetic oligonucleotide
atacgtgagtgcgcgatctaagttaactta

SEQ ID NO: 329573 - DNA, 30 bp, Artificial Sequence
  Synthetic oligonucleotide
aagcgtaactcattgccactggcacactta

SEQ ID NO: 329574 - DNA, 30 bp, Artificial Sequence
  Synthetic oligonucleotide
aattacacaccggcaacatctgcacactta

SEQ ID NO: 329575 - DNA, 30 bp, Artificial Sequence
  Synthetic oligonucleotide
gatgcggtattgcagacgtggtaccactta

SEQ ID NO: 329576 - DNA, 30 bp, Artificial Sequence
  Synthetic oligonucleotide
tggattcacggattgcaggaagtccactta

SEQ ID NO: 329577 - DNA, 30 bp, Artificial Sequence
  Synthetic oligonucleotide
tccctccctactacaactagaaagcactta

SEQ ID NO: 329578 - DNA, 30 bp, Artificial Sequence
  Synthetic oligonucleotide
gggtttggccaggcacattgtaggcactta

SEQ ID NO: 329579 - DNA, 30 bp, Artificial Sequence
  Synthetic oligonucleotide
gatagaaaaactttatacatcgggcactta

SEQ ID NO: 329580 - DNA, 30 bp, Artificial Sequence
  Synthetic oligonucleotide
gagatgcaaatcgcatttgtagctcactta

SEQ ID NO: 329581 - DNA, 30 bp, Artificial Sequence
  Synthetic oligonucleotide
gtaagtgtaccactgcgtctagaagactta

SEQ ID NO: 329582 - DNA, 30 bp, Artificial Sequence
  Synthetic oligonucleotide
ggggtgtccacacacaaggcgcccgactta

SEQ ID NO: 329583 - DNA, 30 bp, Artificial Sequence
  Synthetic oligonucleotide
gttacgctgctcatcgtcttagccgactta

SEQ ID NO: 329584 - DNA, 30 bp, Artificial Sequence
  Synthetic oligonucleotide
ccacgtgggttcataagcgagttcgactta

SEQ ID NO: 329585 - DNA, 30 bp, Artificial Sequence
  Synthetic oligonucleotide
gccagaccggatggcagagcgctggactta

SEQ ID NO: 329586 - DNA, 30 bp, Artificial Sequence
  Synthetic oligonucleotide
cacaggcatccttaacggatatatgactta

SEQ ID NO: 329587 - DNA, 30 bp, Artificial Sequence
  Synthetic oligonucleotide
caaatattcatcctgcggccgcgatactta

SEQ ID NO: 329588 - DNA, 30 bp, Artificial Sequence
  Synthetic oligonucleotide
taaccacagaacgataagatcatctactta

SEQ ID NO: 329589 - DNA, 30 bp, Artificial Sequence
  Synthetic oligonucleotide
accttttagggtactaggtccgtctactta

SEQ ID NO: 329590 - DNA, 30 bp, Artificial Sequence
  Synthetic oligonucleotide
gggtatttctcgacaggtcatcagtactta

SEQ ID NO: 329591 - DNA, 30 bp, Artificial Sequence
  Synthetic oligonucleotide
cttatgaacgacggtggtaagacgtactta

SEQ ID NO: 329592 - DNA, 30 bp, Artificial Sequence
  Synthetic oligonucleotide
ccttctcggactaagtcactcgggtactta

SEQ ID NO: 329593 - DNA, 30 bp, Artificial Sequence
  Synthetic oligonucleotide
gggtaagcgtggtgctcggcgtggtactta

SEQ ID NO: 329594 - DNA, 30 bp, Artificial Sequence
  Synthetic oligonucleotide
ctaggctagtagtcaattaataattactta

SEQ ID NO: 329595 - DNA, 30 bp, Artificial Sequence
  Synthetic oligonucleotide
caactaagacttattaagaacagttactta

SEQ ID NO: 329596 - DNA, 30 bp, Artificial Sequence
  Synthetic oligonucleotide
cgcatcttatacgcgataccatgttactta

SEQ ID NO: 329597 - DNA, 30 bp, Artificial Sequence
  Synthetic oligonucleotide
ttatccacccaacatgcaagccgcacctta

SEQ ID NO: 329598 - DNA, 30 bp, Artificial Sequence
  Synthetic oligonucleotide
tgcaggtggcgaacattgcgttatacctta

SEQ ID NO: 329599 - DNA, 30 bp, Artificial Sequence
  Synthetic oligonucleotide
agatactgactccacgaccgtagtacctta

SEQ ID NO: 329600 - DNA, 30 bp, Artificial Sequence
  Synthetic oligonucleotide
caggctgctgtagattaggcgggtacctta

SEQ ID NO: 329601 - DNA, 30 bp, Artificial Sequence
  Synthetic oligonucleotide
gaacgcgggatatatgacgccgttacctta

SEQ ID NO: 329602 - DNA, 30 bp, Artificial Sequence
  Synthetic oligonucleotide
aggagtctcgccgatgaagtttttacctta

SEQ ID NO: 329603 - DNA, 30 bp, Artificial Sequence
  Synthetic oligonucleotide
cagtagatccaatatcaaggcgtaccctta

SEQ ID NO: 329604 - DNA, 30 bp, Artificial Sequence
  Synthetic oligonucleotide
ttcttctaccacgtaactctcacagcctta

SEQ ID NO: 329605 - DNA, 30 bp, Artificial Sequence
  Synthetic oligonucleotide
gtagataaaccacttaaacggtgagcctta

SEQ ID NO: 329606 - DNA, 30 bp, Artificial Sequence
  Synthetic oligonucleotide
attagggccttagtgcaatactacgcctta

SEQ ID NO: 329607 - DNA, 30 bp, Artificial Sequence
  Synthetic oligonucleotide
ttccgacgcaagagagaccacctcgcctta

SEQ ID NO: 329608 - DNA, 30 bp, Artificial Sequence
  Synthetic oligonucleotide
ccagcgcgtggtcgttatacgcactcctta

SEQ ID NO: 329609 - DNA, 30 bp, Artificial Sequence
  Synthetic oligonucleotide
ctgggaatcaagcaattcattggctcctta

SEQ ID NO: 329610 - DNA, 30 bp, Artificial Sequence
  Synthetic oligonucleotide
ttcgtataaggatcgggcagaatctcctta

SEQ ID NO: 329611 - DNA, 30 bp, Artificial Sequence
  Synthetic oligonucleotide
tatgtggatacatgtgagcaactctcctta

SEQ ID NO: 329612 - DNA, 30 bp, Artificial Sequence
  Synthetic oligonucleotide
cgcgtactaagctgtcctacgaagtcctta

SEQ ID NO: 329613 - DNA, 30 bp, Artificial Sequence
  Synthetic oligonucleotide
gttcagactagagtgaaaacgtagtcctta

SEQ ID NO: 329614 - DNA, 30 bp, Artificial Sequence
  Synthetic oligonucleotide
aagggacggatcggaaaatccttgtcctta

SEQ ID NO: 329615 - DNA, 30 bp, Artificial Sequence
  Synthetic oligonucleotide
cccattaaatctgcggcgttccacagctta

SEQ ID NO: 329616 - DNA, 30 bp, Artificial Sequence
  Synthetic oligonucleotide
attttgttgcagcgaaagagtgacagctta

SEQ ID NO: 329617 - DNA, 30 bp, Artificial Sequence
  Synthetic oligonucleotide
gtaagtcattccatgacaactggcagctta

SEQ ID NO: 329618 - DNA, 30 bp, Artificial Sequence
  Synthetic oligonucleotide
acatcacgcagaaattagaaactcagctta

SEQ ID NO: 329619 - DNA, 30 bp, Artificial Sequence
  Synthetic oligonucleotide
ctgagggcgtaaaaggagtaggatagctta

SEQ ID NO: 329620 - DNA, 30 bp, Artificial Sequence
  Synthetic oligonucleotide
tcaagacagtagtcgccgctggctagctta

SEQ ID NO: 329621 - DNA, 30 bp, Artificial Sequence
  Synthetic oligonucleotide
tcccgggcagatattgaggctgctagctta

SEQ ID NO: 329622 - DNA, 30 bp, Artificial Sequence
  Synthetic oligonucleotide
gtcgccagttagggccgtgatgcacgctta

SEQ ID NO: 329623 - DNA, 30 bp, Artificial Sequence
  Synthetic oligonucleotide
ataacaaaataaagcccactcttacgctta

SEQ ID NO: 329624 - DNA, 30 bp, Artificial Sequence
  Synthetic oligonucleotide
gagcagagtttgacatcccgaacccgctta

SEQ ID NO: 329625 - DNA, 30 bp, Artificial Sequence
  Synthetic oligonucleotide
gtatgcgactcaattaggagaaatcgctta

SEQ ID NO: 329626 - DNA, 30 bp, Artificial Sequence
  Synthetic oligonucleotide
agctatgagacccggcgaggagatcgctta

SEQ ID NO: 329627 - DNA, 30 bp, Artificial Sequence
  Synthetic oligonucleotide
aacaggcgcctaaaggagataacaggctta

SEQ ID NO: 329628 - DNA, 30 bp, Artificial Sequence
  Synthetic oligonucleotide
aactattccataataaaaaaaaccggctta

SEQ ID NO: 329629 - DNA, 30 bp, Artificial Sequence
  Synthetic oligonucleotide
taatttgagagaccgtgcacaagcggctta

SEQ ID NO: 329630 - DNA, 30 bp, Artificial Sequence
  Synthetic oligonucleotide
tatagctagttaggctgaaccacgggctta

SEQ ID NO: 329631 - DNA, 30 bp, Artificial Sequence
  Synthetic oligonucleotide
ttcagttgacctgctttaatcgtgggctta

SEQ ID NO: 329632 - DNA, 30 bp, Artificial Sequence
  Synthetic oligonucleotide
ggttcggccgggccgtgcggataatgctta

SEQ ID NO: 329633 - DNA, 30 bp, Artificial Sequence
  Synthetic oligonucleotide
gcggggcacagggtctatgcctgatgctta

SEQ ID NO: 329634 - DNA, 30 bp, Artificial Sequence
  Synthetic oligonucleotide
aatacgggggtaagaggggccgcctgctta

SEQ ID NO: 329635 - DNA, 30 bp, Artificial Sequence
  Synthetic oligonucleotide
tgtaagtaagcagtgtagcgctgctgctta

SEQ ID NO: 329636 - DNA, 30 bp, Artificial Sequence
  Synthetic oligonucleotide
ggaagttagagggagtctttgctctgctta

SEQ ID NO: 329637 - DNA, 30 bp, Artificial Sequence
  Synthetic oligonucleotide
tgagcctcgcccaggcgggccaagtgctta

SEQ ID NO: 329638 - DNA, 30 bp, Artificial Sequence
  Synthetic oligonucleotide
accgcaccagccctcgggggcaagtgctta

SEQ ID NO: 329639 - DNA, 30 bp, Artificial Sequence
  Synthetic oligonucleotide
aagaccgcatcgtcctaccggccgtgctta

SEQ ID NO: 329640 - DNA, 30 bp, Artificial Sequence
  Synthetic oligonucleotide
atgcaaatccacccgactagtgggtgctta

SEQ ID NO: 329641 - DNA, 30 bp, Artificial Sequence
  Synthetic oligonucleotide
taaatgataggcgcgatacatgtttgctta

SEQ ID NO: 329642 - DNA, 30 bp, Artificial Sequence
  Synthetic oligonucleotide
agttagggattcgcgatagggtaaatctta

SEQ ID NO: 329643 - DNA, 30 bp, Artificial Sequence
  Synthetic oligonucleotide
ctacgcaggcatttagtgacacacatctta

SEQ ID NO: 329644 - DNA, 30 bp, Artificial Sequence
  Synthetic oligonucleotide
ggattaagtattggttaacgtttcatctta

SEQ ID NO: 329645 - DNA, 30 bp, Artificial Sequence
  Synthetic oligonucleotide
tttacaatcagacttgtagccgagatctta

SEQ ID NO: 329646 - DNA, 30 bp, Artificial Sequence
  Synthetic oligonucleotide
ggctaactgcgcacgtggctttagatctta

SEQ ID NO: 329647 - DNA, 30 bp, Artificial Sequence
  Synthetic oligonucleotide
gattgaggtttatccgttgtttagatctta

SEQ ID NO: 329648 - DNA, 30 bp, Artificial Sequence
  Synthetic oligonucleotide
ttagacgttttaaaaccaaagccgatctta

SEQ ID NO: 329649 - DNA, 30 bp, Artificial Sequence
  Synthetic oligonucleotide
aaagaaaacaactatacatggcatatctta

SEQ ID NO: 329650 - DNA, 30 bp, Artificial Sequence
  Synthetic oligonucleotide
ttgatggtaattgagtctagcgttatctta

SEQ ID NO: 329651 - DNA, 30 bp, Artificial Sequence
  Synthetic oligonucleotide
gcgaaataaatcgttcacctatttatctta

SEQ ID NO: 329652 - DNA, 30 bp, Artificial Sequence
  Synthetic oligonucleotide
ggacactgtagttcggtagaatgactctta

SEQ ID NO: 329653 - DNA, 30 bp, Artificial Sequence
  Synthetic oligonucleotide
ccagcctaacagtcacaagatctactctta

SEQ ID NO: 329654 - DNA, 30 bp, Artificial Sequence
  Synthetic oligonucleotide
gttaaattgagagttggctgggacctctta

SEQ ID NO: 329655 - DNA, 30 bp, Artificial Sequence
  Synthetic oligonucleotide
accgagcccgagcccccacccagcctctta

SEQ ID NO: 329656 - DNA, 30 bp, Artificial Sequence
  Synthetic oligonucleotide
gtaccgaaattgagggtcgttgagctctta

SEQ ID NO: 329657 - DNA, 30 bp, Artificial Sequence
  Synthetic oligonucleotide
ggatctggttaggaggataacggagtctta

SEQ ID NO: 329658 - DNA, 30 bp, Artificial Sequence
  Synthetic oligonucleotide
gaaggctcgagcactcgagccatagtctta

SEQ ID NO: 329659 - DNA, 30 bp, Artificial Sequence
  Synthetic oligonucleotide
accacttaccgacgcgccgtcatcgtctta

SEQ ID NO: 329660 - DNA, 30 bp, Artificial Sequence
  Synthetic oligonucleotide
tgcggttgcaaatgggcgtaattcgtctta

SEQ ID NO: 329661 - DNA, 30 bp, Artificial Sequence
  Synthetic oligonucleotide
tcgcttgcaacgattttggcctaggtctta

SEQ ID NO: 329662 - DNA, 30 bp, Artificial Sequence
  Synthetic oligonucleotide
gatgatactaaaatgacaaggtgggtctta

SEQ ID NO: 329663 - DNA, 30 bp, Artificial Sequence
  Synthetic oligonucleotide
taagaagagattagagctgtaatattctta

SEQ ID NO: 329664 - DNA, 30 bp, Artificial Sequence
  Synthetic oligonucleotide
tcgtggtcaatacgacattgcgtattctta

SEQ ID NO: 329665 - DNA, 30 bp, Artificial Sequence
  Synthetic oligonucleotide
gatactattggcttggatacggacttctta

SEQ ID NO: 329666 - DNA, 30 bp, Artificial Sequence
  Synthetic oligonucleotide
gatacatggggcatgcgaagccgcttctta

SEQ ID NO: 329667 - DNA, 30 bp, Artificial Sequence
  Synthetic oligonucleotide
tatctactaaatcgtgaatggttcttctta

SEQ ID NO: 329668 - DNA, 30 bp, Artificial Sequence
  Synthetic oligonucleotide
ttcttagtggccagcgaactattgttctta

SEQ ID NO: 329669 - DNA, 30 bp, Artificial Sequence
  Synthetic oligonucleotide
agcaccgtcgaagaaggatgttatttctta

SEQ ID NO: 329670 - DNA, 30 bp, Artificial Sequence
  Synthetic oligonucleotide
ctaaagaacctatacaaggtctgaaagtta

SEQ ID NO: 329671 - DNA, 30 bp, Artificial Sequence
  Synthetic oligonucleotide
cgatacacggcaaaacggggagacaagtta

SEQ ID NO: 329672 - DNA, 30 bp, Artificial Sequence
  Synthetic oligonucleotide
cgtaggaagaaagtatttcttggcaagtta

SEQ ID NO: 329673 - DNA, 30 bp, Artificial Sequence
  Synthetic oligonucleotide
atgacacgggcctgccagaactcgaagtta

SEQ ID NO: 329674 - DNA, 30 bp, Artificial Sequence
  Synthetic oligonucleotide
catacagttctaacgaactctaggaagtta

SEQ ID NO: 329675 - DNA, 30 bp, Artificial Sequence
  Synthetic oligonucleotide
agtactcggaaagctagtccgcttaagtta

SEQ ID NO: 329676 - DNA, 30 bp, Artificial Sequence
  Synthetic oligonucleotide
tggctcaactcgggacactgcatccagtta

SEQ ID NO: 329677 - DNA, 30 bp, Artificial Sequence
  Synthetic oligonucleotide
ggtagcggagttttccactcacagcagtta

SEQ ID NO: 329678 - DNA, 30 bp, Artificial Sequence
  Synthetic oligonucleotide
taatacttctactgagtctgagagcagtta

SEQ ID NO: 329679 - DNA, 30 bp, Artificial Sequence
  Synthetic oligonucleotide
cgagcatttcccaacggagcaaatcagtta

SEQ ID NO: 329680 - DNA, 30 bp, Artificial Sequence
  Synthetic oligonucleotide
cggaggtctgtataggaaagtcatcagtta

SEQ ID NO: 329681 - DNA, 30 bp, Artificial Sequence
  Synthetic oligonucleotide
gtccccgatgggcacgatccacgtcagtta

SEQ ID NO: 329682 - DNA, 30 bp, Artificial Sequence
  Synthetic oligonucleotide
aatgttagtgagaagaagcaaattcagtta

SEQ ID NO: 329683 - DNA, 30 bp, Artificial Sequence
  Synthetic oligonucleotide
acgttttgataatggccgcttattcagtta

SEQ ID NO: 329684 - DNA, 30 bp, Artificial Sequence
  Synthetic oligonucleotide
tctcagacaggtggcgtgacagccgagtta

SEQ ID NO: 329685 - DNA, 30 bp, Artificial Sequence
  Synthetic oligonucleotide
attaggtggctaatccaacttgaggagtta

SEQ ID NO: 329686 - DNA, 30 bp, Artificial Sequence
  Synthetic oligonucleotide
gctagtcattggaacaatcgaacggagtta

SEQ ID NO: 329687 - DNA, 30 bp, Artificial Sequence
  Synthetic oligonucleotide
cattgagccgttcaaccctcctgggagtta

SEQ ID NO: 329688 - DNA, 30 bp, Artificial Sequence
  Synthetic oligonucleotide
gaaagcaaggtcatcttggcgcctgagtta

SEQ ID NO: 329689 - DNA, 30 bp, Artificial Sequence
  Synthetic oligonucleotide
taccggatacttcacacactcggatagtta

SEQ ID NO: 329690 - DNA, 30 bp, Artificial Sequence
  Synthetic oligonucleotide
ggcgaccgagcatcaatcggatgctagtta

SEQ ID NO: 329691 - DNA, 30 bp, Artificial Sequence
  Synthetic oligonucleotide
acttatcttgagcgccgaaactgctagtta

SEQ ID NO: 329692 - DNA, 30 bp, Artificial Sequence
  Synthetic oligonucleotide
tatctagccacatatgtacgatagtagtta

SEQ ID NO: 329693 - DNA, 30 bp, Artificial Sequence
  Synthetic oligonucleotide
tggagtgcgtgcaggcactgtccttagtta

SEQ ID NO: 329694 - DNA, 30 bp, Artificial Sequence
  Synthetic oligonucleotide
ctatacggttacctcaatagaatttagtta

SEQ ID NO: 329695 - DNA, 30 bp, Artificial Sequence
  Synthetic oligonucleotide
tttgccgaaaaccttccaccactaacgtta

SEQ ID NO: 329696 - DNA, 30 bp, Artificial Sequence
  Synthetic oligonucleotide
ttaccctatcgattacattcgggcacgtta

SEQ ID NO: 329697 - DNA, 30 bp, Artificial Sequence
  Synthetic oligonucleotide
taaaaaatcatatatctcaccgtcacgtta

SEQ ID NO: 329698 - DNA, 30 bp, Artificial Sequence
  Synthetic oligonucleotide
agtggtacaatacacgccttacagacgtta

SEQ ID NO: 329699 - DNA, 30 bp, Artificial Sequence
  Synthetic oligonucleotide
ccaacaagtatagattccgtagggacgtta

SEQ ID NO: 329700 - DNA, 30 bp, Artificial Sequence
  Synthetic oligonucleotide
ttctcagtattagaccaataattgacgtta

SEQ ID NO: 329701 - DNA, 30 bp, Artificial Sequence
  Synthetic oligonucleotide
cccaaggttggtcttatcgagtttacgtta

SEQ ID NO: 329702 - DNA, 30 bp, Artificial Sequence
  Synthetic oligonucleotide
atgcacggtgagtgaagtatctcaccgtta

SEQ ID NO: 329703 - DNA, 30 bp, Artificial Sequence
  Synthetic oligonucleotide
tctctgaatcaaacgcaaacatgaccgtta

SEQ ID NO: 329704 - DNA, 30 bp, Artificial Sequence
  Synthetic oligonucleotide
cgcaaatgtcatttagctagctgcccgtta

SEQ ID NO: 329705 - DNA, 30 bp, Artificial Sequence
  Synthetic oligonucleotide
cgtgttatacgagggtaacggttcccgtta

SEQ ID NO: 329706 - DNA, 30 bp, Artificial Sequence
  Synthetic oligonucleotide
ctggatttacagtggatcaggtcgccgtta

SEQ ID NO: 329707 - DNA, 30 bp, Artificial Sequence
  Synthetic oligonucleotide
aaattggtgagcaaggatttccgtccgtta

SEQ ID NO: 329708 - DNA, 30 bp, Artificial Sequence
  Synthetic oligonucleotide
actgcctgttttctacttcgggcagcgtta

SEQ ID NO: 329709 - DNA, 30 bp, Artificial Sequence
  Synthetic oligonucleotide
tcactcttaacagatcacctcagggcgtta

SEQ ID NO: 329710 - DNA, 30 bp, Artificial Sequence
  Synthetic oligonucleotide
tgtaacttgttcggactcaatggggcgtta

SEQ ID NO: 329711 - DNA, 30 bp, Artificial Sequence
  Synthetic oligonucleotide
ggtaatcttcatgtagttcgtggtgcgtta

SEQ ID NO: 329712 - DNA, 30 bp, Artificial Sequence
  Synthetic oligonucleotide
ctaccgcactaaggtaggtagggatcgtta

SEQ ID NO: 329713 - DNA, 30 bp, Artificial Sequence
  Synthetic oligonucleotide
ggaatgtagtggtatgagcatatatcgtta

SEQ ID NO: 329714 - DNA, 30 bp, Artificial Sequence
  Synthetic oligonucleotide
gctttgaggtcaggctagttggtatcgtta

SEQ ID NO: 329715 - DNA, 30 bp, Artificial Sequence
  Synthetic oligonucleotide
aaccctgaacgtgacgaactatagtcgtta

SEQ ID NO: 329716 - DNA, 30 bp, Artificial Sequence
  Synthetic oligonucleotide
ttccgttgttaacatggagatgcgtcgtta

SEQ ID NO: 329717 - DNA, 30 bp, Artificial Sequence
  Synthetic oligonucleotide
tgttgtgcagtgtatgcgacagaaaggtta

SEQ ID NO: 329718 - DNA, 30 bp, Artificial Sequence
  Synthetic oligonucleotide
gaaagaatatgaaatgtacccacaaggtta

SEQ ID NO: 329719 - DNA, 30 bp, Artificial Sequence
  Synthetic oligonucleotide
attgcaacaatcggcgaacatgcaaggtta

SEQ ID NO: 329720 - DNA, 30 bp, Artificial Sequence
  Synthetic oligonucleotide
aaacaccgggttatagtagaggtaaggtta

SEQ ID NO: 329721 - DNA, 30 bp, Artificial Sequence
  Synthetic oligonucleotide
gggattaaagaaatacggacggtaaggtta

SEQ ID NO: 329722 - DNA, 30 bp, Artificial Sequence
  Synthetic oligonucleotide
cttcactgcataagtaaaggattaaggtta

SEQ ID NO: 329723 - DNA, 30 bp, Artificial Sequence
  Synthetic oligonucleotide
taggttgctaacagaggggtatccaggtta

SEQ ID NO: 329724 - DNA, 30 bp, Artificial Sequence
  Synthetic oligonucleotide
cttgtagatcgatataaagaaatcaggtta

SEQ ID NO: 329725 - DNA, 30 bp, Artificial Sequence
  Synthetic oligonucleotide
tatgacttgtgttgacacgatgtcaggtta

SEQ ID NO: 329726 - DNA, 30 bp, Artificial Sequence
  Synthetic oligonucleotide
cataagtggacgctctccaaagggaggtta

SEQ ID NO: 329727 - DNA, 30 bp, Artificial Sequence
  Synthetic oligonucleotide
cttgggctgcttcccagcctggggaggtta

SEQ ID NO: 329728 - DNA, 30 bp, Artificial Sequence
  Synthetic oligonucleotide
tacgctgaacagtttgcgttctttaggtta

SEQ ID NO: 329729 - DNA, 30 bp, Artificial Sequence
  Synthetic oligonucleotide
tgagtgtcactaggacctcttaaacggtta

SEQ ID NO: 329730 - DNA, 30 bp, Artificial Sequence
  Synthetic oligonucleotide
tcgtacagccaatttacgacagaacggtta

SEQ ID NO: 329731 - DNA, 30 bp, Artificial Sequence
  Synthetic oligonucleotide
cttttgctcggcagccaaagagaccggtta

SEQ ID NO: 329732 - DNA, 30 bp, Artificial Sequence
  Synthetic oligonucleotide
tgacacactttccgctcctgagaccggtta

SEQ ID NO: 329733 - DNA, 30 bp, Artificial Sequence
  Synthetic oligonucleotide
agcgaatccgtgccccatggaattcggtta

SEQ ID NO: 329734 - DNA, 30 bp, Artificial Sequence
  Synthetic oligonucleotide
catttcggcacgtccggagtgattcggtta

SEQ ID NO: 329735 - DNA, 30 bp, Artificial Sequence
  Synthetic oligonucleotide
ggtcgctgtttcaggtaacggtcagggtta

SEQ ID NO: 329736 - DNA, 30 bp, Artificial Sequence
  Synthetic oligonucleotide
gggtttgcttgaggcccatctttcgggtta

SEQ ID NO: 329737 - DNA, 30 bp, Artificial Sequence
  Synthetic oligonucleotide
tcgtctggggcagcaagtaattcggggtta

SEQ ID NO: 329738 - DNA, 30 bp, Artificial Sequence
  Synthetic oligonucleotide
ggatggtttctggcgggatctaaatggtta

SEQ ID NO: 329739 - DNA, 30 bp, Artificial Sequence
  Synthetic oligonucleotide
caataccgtaatagatcattatcatggtta

SEQ ID NO: 329740 - DNA, 30 bp, Artificial Sequence
  Synthetic oligonucleotide
tccgatcaaaaattcttcaaacactggtta

SEQ ID NO: 329741 - DNA, 30 bp, Artificial Sequence
  Synthetic oligonucleotide
gggacagcaagagaatggctaggctggtta

SEQ ID NO: 329742 - DNA, 30 bp, Artificial Sequence
  Synthetic oligonucleotide
ttggatattggttcgtttggcaagtggtta

SEQ ID NO: 329743 - DNA, 30 bp, Artificial Sequence
  Synthetic oligonucleotide
gccaactaccaggtggccccgcggtggtta

SEQ ID NO: 329744 - DNA, 30 bp, Artificial Sequence
  Synthetic oligonucleotide
actccgcagcacatatttcgtcggtggtta

SEQ ID NO: 329745 - DNA, 30 bp, Artificial Sequence
  Synthetic oligonucleotide
agctgtggtctcaaacaattcgcttggtta

SEQ ID NO: 329746 - DNA, 30 bp, Artificial Sequence
  Synthetic oligonucleotide
tgatttagatttcaaacaggctcttggtta

SEQ ID NO: 329747 - DNA, 30 bp, Artificial Sequence
  Synthetic oligonucleotide
tagtatggtgcccttaggtcaagttggtta

SEQ ID NO: 329748 - DNA, 30 bp, Artificial Sequence
  Synthetic oligonucleotide
taggatatgtattgttaccggttttggtta

SEQ ID NO: 329749 - DNA, 30 bp, Artificial Sequence
  Synthetic oligonucleotide
tagccgggtacaaggagtttccaaatgtta

SEQ ID NO: 329750 - DNA, 30 bp, Artificial Sequence
  Synthetic oligonucleotide
caggattcctgctagcctcttgaaatgtta

SEQ ID NO: 329751 - DNA, 30 bp, Artificial Sequence
  Synthetic oligonucleotide
atatacctagattgtataccttcaatgtta

SEQ ID NO: 329752 - DNA, 30 bp, Artificial Sequence
  Synthetic oligonucleotide
gagagtggtgtgccgtagatgttaatgtta

SEQ ID NO: 329753 - DNA, 30 bp, Artificial Sequence
  Synthetic oligonucleotide
tactagccgcaattcaatcacaacatgtta

SEQ ID NO: 329754 - DNA, 30 bp, Artificial Sequence
  Synthetic oligonucleotide
tatcgctagtaggatatatagcacatgtta

SEQ ID NO: 329755 - DNA, 30 bp, Artificial Sequence
  Synthetic oligonucleotide
attcgtgcacgaaagcgtttatccatgtta

SEQ ID NO: 329756 - DNA, 30 bp, Artificial Sequence
  Synthetic oligonucleotide
caacggcttgacgcaacccagtagatgtta

SEQ ID NO: 329757 - DNA, 30 bp, Artificial Sequence
  Synthetic oligonucleotide
cccattagatagtaccgacaaccgatgtta

SEQ ID NO: 329758 - DNA, 30 bp, Artificial Sequence
  Synthetic oligonucleotide
ttagcttaatctagcgcgacccggatgtta

SEQ ID NO: 329759 - DNA, 30 bp, Artificial Sequence
  Synthetic oligonucleotide
agaggtcgttgagcaagacaatggatgtta

SEQ ID NO: 329760 - DNA, 30 bp, Artificial Sequence
  Synthetic oligonucleotide
gtgttccgtggaagacctattattatgtta

SEQ ID NO: 329761 - DNA, 30 bp, Artificial Sequence
  Synthetic oligonucleotide
actttgtgcccttatgactacgtactgtta

SEQ ID NO: 329762 - DNA, 30 bp, Artificial Sequence
  Synthetic oligonucleotide
ctccggtcacggaccgttacgaccctgtta

SEQ ID NO: 329763 - DNA, 30 bp, Artificial Sequence
  Synthetic oligonucleotide
taccacagggcaatttacgcgaccctgtta

SEQ ID NO: 329764 - DNA, 30 bp, Artificial Sequence
  Synthetic oligonucleotide
gtgattttcaaatgctgcggggatctgtta

SEQ ID NO: 329765 - DNA, 30 bp, Artificial Sequence
  Synthetic oligonucleotide
aattgttcagggggatactgttatctgtta

SEQ ID NO: 329766 - DNA, 30 bp, Artificial Sequence
  Synthetic oligonucleotide
ggcgtaagccatgttggcgccattctgtta

SEQ ID NO: 329767 - DNA, 30 bp, Artificial Sequence
  Synthetic oligonucleotide
atataggtggaccacccgcgacttctgtta

SEQ ID NO: 329768 - DNA, 30 bp, Artificial Sequence
  Synthetic oligonucleotide
ctctcaggaaccccgtcgaacccagtgtta

SEQ ID NO: 329769 - DNA, 30 bp, Artificial Sequence
  Synthetic oligonucleotide
gctgcgtttcataattatgccccagtgtta

SEQ ID NO: 329770 - DNA, 30 bp, Artificial Sequence
  Synthetic oligonucleotide
catctcgtttaaggtaaaaggttagtgtta

SEQ ID NO: 329771 - DNA, 30 bp, Artificial Sequence
  Synthetic oligonucleotide
ggtcaatatggagcttttaacgaggtgtta

SEQ ID NO: 329772 - DNA, 30 bp, Artificial Sequence
  Synthetic oligonucleotide
cgttgcggacatctacaaccccatgtgtta

SEQ ID NO: 329773 - DNA, 30 bp, Artificial Sequence
  Synthetic oligonucleotide
aagaaagagctgttaggtcaagctgtgtta

SEQ ID NO: 329774 - DNA, 30 bp, Artificial Sequence
  Synthetic oligonucleotide
aacaaagttgacgtgataaccaaattgtta

SEQ ID NO: 329775 - DNA, 30 bp, Artificial Sequence
  Synthetic oligonucleotide
ttaacgatatagtttacagggacattgtta

SEQ ID NO: 329776 - DNA, 30 bp, Artificial Sequence
  Synthetic oligonucleotide
atccagatggtagtaggtcggccattgtta

SEQ ID NO: 329777 - DNA, 30 bp, Artificial Sequence
  Synthetic oligonucleotide
cgacgagtagttttacttgattcattgtta

SEQ ID NO: 329778 - DNA, 30 bp, Artificial Sequence
  Synthetic oligonucleotide
cctaacccataccaccgacccagattgtta

SEQ ID NO: 329779 - DNA, 30 bp, Artificial Sequence
  Synthetic oligonucleotide
gcgttgggctgctcgggcaccaacttgtta

SEQ ID NO: 329780 - DNA, 30 bp, Artificial Sequence
  Synthetic oligonucleotide
aactacacgtcaacaggtttgaagttgtta

SEQ ID NO: 329781 - DNA, 30 bp, Artificial Sequence
  Synthetic oligonucleotide
gacggccgggatgaccctttacggttgtta

SEQ ID NO: 329782 - DNA, 30 bp, Artificial Sequence
  Synthetic oligonucleotide
ctaatcacttctttcataagccggttgtta

SEQ ID NO: 329783 - DNA, 30 bp, Artificial Sequence
  Synthetic oligonucleotide
atctgagaacatgaaatatgcgtaaattta

SEQ ID NO: 329784 - DNA, 30 bp, Artificial Sequence
  Synthetic oligonucleotide
ggtcacaattccatcacgtacgcgaattta

SEQ ID NO: 329785 - DNA, 30 bp, Artificial Sequence
  Synthetic oligonucleotide
cggttctaatccgaattcgtctcgaattta

SEQ ID NO: 329786 - DNA, 30 bp, Artificial Sequence
  Synthetic oligonucleotide
atgtaacatcttagattaaggcggaattta

SEQ ID NO: 329787 - DNA, 30 bp, Artificial Sequence
  Synthetic oligonucleotide
ccctctacatctcaagctgtcaataattta

SEQ ID NO: 329788 - DNA, 30 bp, Artificial Sequence
  Synthetic oligonucleotide
agtcgggtactgcatctggtgcgtaattta

SEQ ID NO: 329789 - DNA, 30 bp, Artificial Sequence
  Synthetic oligonucleotide
gaaggccatcagcccactagtgaacattta

SEQ ID NO: 329790 - DNA, 30 bp, Artificial Sequence
  Synthetic oligonucleotide
agacgtgctataagggtctgcacacattta

SEQ ID NO: 329791 - DNA, 30 bp, Artificial Sequence
  Synthetic oligonucleotide
gaaagagtaacgatgtcgagaatacattta

SEQ ID NO: 329792 - DNA, 30 bp, Artificial Sequence
  Synthetic oligonucleotide
cgtcgcgtttacgaggacaaggaccattta

SEQ ID NO: 329793 - DNA, 30 bp, Artificial Sequence
  Synthetic oligonucleotide
attggggctagacgctatcaactccattta

SEQ ID NO: 329794 - DNA, 30 bp, Artificial Sequence
  Synthetic oligonucleotide
tgtggtgagttggattcatatgtccattta

SEQ ID NO: 329795 - DNA, 30 bp, Artificial Sequence
  Synthetic oligonucleotide
attatataagggggcgagggatagcattta

SEQ ID NO: 329796 - DNA, 30 bp, Artificial Sequence
  Synthetic oligonucleotide
agctgtgccccagaatcgtacgcgcattta

SEQ ID NO: 329797 - DNA, 30 bp, Artificial Sequence
  Synthetic oligonucleotide
atacatagccctcccagggatgcgcattta

SEQ ID NO: 329798 - DNA, 30 bp, Artificial Sequence
  Synthetic oligonucleotide
gaaacgaaatactggaattggaggcattta

SEQ ID NO: 329799 - DNA, 30 bp, Artificial Sequence
  Synthetic oligonucleotide
aagaaagaattaccgtcgataatgcattta

SEQ ID NO: 329800 - DNA, 30 bp, Artificial Sequence
  Synthetic oligonucleotide
ttagcttgggctgcgtttcttgtgcattta

SEQ ID NO: 329801 - DNA, 30 bp, Artificial Sequence
  Synthetic oligonucleotide
gaactaagcgagcatatgggaaatcattta

SEQ ID NO: 329802 - DNA, 30 bp, Artificial Sequence
  Synthetic oligonucleotide
tacacacgcgtgacacttcagactcattta

SEQ ID NO: 329803 - DNA, 30 bp, Artificial Sequence
  Synthetic oligonucleotide
tacaagttggggcctcttaggagtcattta

SEQ ID NO: 329804 - DNA, 30 bp, Artificial Sequence
  Synthetic oligonucleotide
ctatgcatgtggggagaatatagtcattta

SEQ ID NO: 329805 - DNA, 30 bp, Artificial Sequence
  Synthetic oligonucleotide
gaaaacgtcaggagcgccggcagagattta

SEQ ID NO: 329806 - DNA, 30 bp, Artificial Sequence
  Synthetic oligonucleotide
acgacaatctacgacctgtggttcgattta

SEQ ID NO: 329807 - DNA, 30 bp, Artificial Sequence
  Synthetic oligonucleotide
ctcgtagtaagactagaccactaggattta

SEQ ID NO: 329808 - DNA, 30 bp, Artificial Sequence
  Synthetic oligonucleotide
cccaattctgcaaatctgagctcggattta

SEQ ID NO: 329809 - DNA, 30 bp, Artificial Sequence
  Synthetic oligonucleotide
caacaacttcgccttgcgaggtttgattta

SEQ ID NO: 329810 - DNA, 31 bp, Artificial Sequence
  Synthetic oligonucleotide
agaaattaaatgttccagatttaaatattta

SEQ ID NO: 329811 - DNA, 30 bp, Artificial Sequence
  Synthetic oligonucleotide
gggccgttagtcgtcaggcaaacatattta

SEQ ID NO: 329812 - DNA, 30 bp, Artificial Sequence
  Synthetic oligonucleotide
gctccggcgagcaaggtagtgatatattta

SEQ ID NO: 329813 - DNA, 30 bp, Artificial Sequence
  Synthetic oligonucleotide
ccatacttaactgatgaagacccgtattta

SEQ ID NO: 329814 - DNA, 30 bp, Artificial Sequence
  Synthetic oligonucleotide
cgagtatccactggggatgtgtggtattta

SEQ ID NO: 329815 - DNA, 30 bp, Artificial Sequence
  Synthetic oligonucleotide
ggacaaggacacgagttcgctcattattta

SEQ ID NO: 329816 - DNA, 30 bp, Artificial Sequence
  Synthetic oligonucleotide
caatttattgttcggagccgtgattattta

SEQ ID NO: 329817 - DNA, 30 bp, Artificial Sequence
  Synthetic oligonucleotide
gcgaacgcggactcgaaccgtccttattta

SEQ ID NO: 329818 - DNA, 30 bp, Artificial Sequence
  Synthetic oligonucleotide
tacggagtaaggccagtcccgagttattta

SEQ ID NO: 329819 - DNA, 30 bp, Artificial Sequence
  Synthetic oligonucleotide
gggcccactggcataatgtcacgaacttta

SEQ ID NO: 329820 - DNA, 30 bp, Artificial Sequence
  Synthetic oligonucleotide
gtattacagcccggaccgagtttaacttta

SEQ ID NO: 329821 - DNA, 30 bp, Artificial Sequence
  Synthetic oligonucleotide
tcgctttaaatgttcgggcttagcacttta

SEQ ID NO: 329822 - DNA, 30 bp, Artificial Sequence
  Synthetic oligonucleotide
ccctgggtacgatgactgtgaggcacttta

SEQ ID NO: 329823 - DNA, 30 bp, Artificial Sequence
  Synthetic oligonucleotide
atttcgggcgggtgtagtagtgtcacttta

SEQ ID NO: 329824 - DNA, 30 bp, Artificial Sequence
  Synthetic oligonucleotide
agaagcgtttcccgcttgtctgctacttta

SEQ ID NO: 329825 - DNA, 32 bp, Artificial Sequence
  Synthetic oligonucleotide
tcttatctgttgtgttttccttcttaccttta

SEQ ID NO: 329826 - DNA, 30 bp, Artificial Sequence
  Synthetic oligonucleotide
ccgagttttgcgcgtggcggacatccttta

SEQ ID NO: 329827 - DNA, 30 bp, Artificial Sequence
  Synthetic oligonucleotide
gctgggttgacggcgttgcgaactccttta

SEQ ID NO: 329828 - DNA, 30 bp, Artificial Sequence
  Synthetic oligonucleotide
gtgtgtagattctaaggcttagaagcttta

SEQ ID NO: 329829 - DNA, 30 bp, Artificial Sequence
  Synthetic oligonucleotide
gatattctggatagccttgactgagcttta

SEQ ID NO: 329830 - DNA, 30 bp, Artificial Sequence
  Synthetic oligonucleotide
tgaaatgacgtagatctctgttgagcttta

SEQ ID NO: 329831 - DNA, 30 bp, Artificial Sequence
  Synthetic oligonucleotide
gttgggcgagtgagagaaagaatcgcttta

SEQ ID NO: 329832 - DNA, 30 bp, Artificial Sequence
  Synthetic oligonucleotide
cgaaggttggttagtgcttggaaggcttta

SEQ ID NO: 329833 - DNA, 30 bp, Artificial Sequence
  Synthetic oligonucleotide
tgggcttaggtctggacgatcccggcttta

SEQ ID NO: 329834 - DNA, 30 bp, Artificial Sequence
  Synthetic oligonucleotide
atttcgaaacaattttcgttagcggcttta

SEQ ID NO: 329835 - DNA, 30 bp, Artificial Sequence
  Synthetic oligonucleotide
gtgtcgggtgaaggccaggttggggcttta

SEQ ID NO: 329836 - DNA, 30 bp, Artificial Sequence
  Synthetic oligonucleotide
ataatatatggaaaagagttacatgcttta

SEQ ID NO: 329837 - DNA, 30 bp, Artificial Sequence
  Synthetic oligonucleotide
acggggcaggttgcagcttgtgatgcttta

SEQ ID NO: 329838 - DNA, 30 bp, Artificial Sequence
  Synthetic oligonucleotide
agcgatacacaattctccctaagtgcttta

SEQ ID NO: 329839 - DNA, 30 bp, Artificial Sequence
  Synthetic oligonucleotide
gagggagtgaccacatcttactaatcttta

SEQ ID NO: 329840 - DNA, 30 bp, Artificial Sequence
  Synthetic oligonucleotide
cgcttgaattgatcgaatagagcatcttta

SEQ ID NO: 329841 - DNA, 30 bp, Artificial Sequence
  Synthetic oligonucleotide
tgacaatggcctacattgtgtgcgtcttta

SEQ ID NO: 329842 - DNA, 30 bp, Artificial Sequence
  Synthetic oligonucleotide
cacgatggggatccgggtttacattcttta

SEQ ID NO: 329843 - DNA, 30 bp, Artificial Sequence
  Synthetic oligonucleotide
cggcagagtgccttttgatgtacaagttta

SEQ ID NO: 329844 - DNA, 30 bp, Artificial Sequence
  Synthetic oligonucleotide
gtggattaaaatcatacagggggcagttta

SEQ ID NO: 329845 - DNA, 30 bp, Artificial Sequence
  Synthetic oligonucleotide
tggtatcgggattccgcccggatcagttta

SEQ ID NO: 329846 - DNA, 30 bp, Artificial Sequence
  Synthetic oligonucleotide
tagtcgccaaggctcgacatggtcagttta

SEQ ID NO: 329847 - DNA, 30 bp, Artificial Sequence
  Synthetic oligonucleotide
agtccagtggagattcgtacaagtagttta

SEQ ID NO: 329848 - DNA, 30 bp, Artificial Sequence
  Synthetic oligonucleotide
gtggagcgggctgcgttggggggtagttta

SEQ ID NO: 329849 - DNA, 30 bp, Artificial Sequence
  Synthetic oligonucleotide
gcatccgcatatgatacaatttttagttta

SEQ ID NO: 329850 - DNA, 30 bp, Artificial Sequence
  Synthetic oligonucleotide
ctgcagggtagacataggggaccacgttta

SEQ ID NO: 329851 - DNA, 30 bp, Artificial Sequence
  Synthetic oligonucleotide
gaaggccgtacctaaaaactagcacgttta

SEQ ID NO: 329852 - DNA, 30 bp, Artificial Sequence
  Synthetic oligonucleotide
tacctaacgcgatgcatcctctaccgttta

SEQ ID NO: 329853 - DNA, 30 bp, Artificial Sequence
  Synthetic oligonucleotide
caggcgattttatagtaggttggccgttta

SEQ ID NO: 329854 - DNA, 30 bp, Artificial Sequence
  Synthetic oligonucleotide
cgcctcggtcctgtcaagcgcctccgttta

SEQ ID NO: 329855 - DNA, 30 bp, Artificial Sequence
  Synthetic oligonucleotide
gagaagtaagcttactgaactaagcgttta

SEQ ID NO: 329856 - DNA, 30 bp, Artificial Sequence
  Synthetic oligonucleotide
gggtcgcccgacccaataaaccggcgttta

SEQ ID NO: 329857 - DNA, 30 bp, Artificial Sequence
  Synthetic oligonucleotide
gaaggtctcggctgtatcctctggcgttta

SEQ ID NO: 329858 - DNA, 30 bp, Artificial Sequence
  Synthetic oligonucleotide
agctatccagatagagaattactgcgttta

SEQ ID NO: 329859 - DNA, 30 bp, Artificial Sequence
  Synthetic oligonucleotide
gattaagcccctaactgatcaactcgttta

SEQ ID NO: 329860 - DNA, 30 bp, Artificial Sequence
  Synthetic oligonucleotide
ctcccaaattagaacggaagctcaggttta

SEQ ID NO: 329861 - DNA, 30 bp, Artificial Sequence
  Synthetic oligonucleotide
atcacactactgaaacaagcgcccggttta

SEQ ID NO: 329862 - DNA, 30 bp, Artificial Sequence
  Synthetic oligonucleotide
ccgactaaagcaagggattggggcggttta

SEQ ID NO: 329863 - DNA, 30 bp, Artificial Sequence
  Synthetic oligonucleotide
tacggcgcgcgtataatctcaaggggttta

SEQ ID NO: 329864 - DNA, 30 bp, Artificial Sequence
  Synthetic oligonucleotide
tgaacacgcctcaagatagatttgggttta

SEQ ID NO: 329865 - DNA, 30 bp, Artificial Sequence
  Synthetic oligonucleotide
tatcgtattcgatatatgaaacctggttta

SEQ ID NO: 329866 - DNA, 30 bp, Artificial Sequence
  Synthetic oligonucleotide
aatagaggactcccccggcggtctggttta

SEQ ID NO: 329867 - DNA, 30 bp, Artificial Sequence
  Synthetic oligonucleotide
cttattaggaagaatatgggaggtggttta

SEQ ID NO: 329868 - DNA, 30 bp, Artificial Sequence
  Synthetic oligonucleotide
atggtgtcagtgactgggggagttggttta

SEQ ID NO: 329869 - DNA, 30 bp, Artificial Sequence
  Synthetic oligonucleotide
tgataggaaagggtcgaaacgaaatgttta

SEQ ID NO: 329870 - DNA, 30 bp, Artificial Sequence
  Synthetic oligonucleotide
tgttattagagggatcgtggtagatgttta

SEQ ID NO: 329871 - DNA, 30 bp, Artificial Sequence
  Synthetic oligonucleotide
ccacccgtctttgtatcggctcgatgttta

SEQ ID NO: 329872 - DNA, 30 bp, Artificial Sequence
  Synthetic oligonucleotide
ccctgaaggcacgcactggatatatgttta

SEQ ID NO: 329873 - DNA, 30 bp, Artificial Sequence
  Synthetic oligonucleotide
caactgtggtgagtatatgtatcctgttta

SEQ ID NO: 329874 - DNA, 29 bp, Artificial Sequence
  Synthetic oligonucleotide
ttctgctcatcctggaccattcgtgttta

SEQ ID NO: 329875 - DNA, 30 bp, Artificial Sequence
  Synthetic oligonucleotide
tttgaaggggagagccctcaaaattgttta

SEQ ID NO: 329876 - DNA, 30 bp, Artificial Sequence
  Synthetic oligonucleotide
gtgcgagagagtatgatgcctaattgttta

SEQ ID NO: 329877 - DNA, 30 bp, Artificial Sequence
  Synthetic oligonucleotide
ctatctggaatcaacgggttacattgttta

SEQ ID NO: 329878 - DNA, 30 bp, Artificial Sequence
  Synthetic oligonucleotide
gcgtggctaccctattattcggattgttta

SEQ ID NO: 329879 - DNA, 30 bp, Artificial Sequence
  Synthetic oligonucleotide
gaggcccacagaagtgggcaaacttgttta

SEQ ID NO: 329880 - DNA, 30 bp, Artificial Sequence
  Synthetic oligonucleotide
gtggttactggtattatgtccaaaatttta

SEQ ID NO: 329881 - DNA, 30 bp, Artificial Sequence
  Synthetic oligonucleotide
tttataggtcttcacttagctgcaatttta

SEQ ID NO: 329882 - DNA, 30 bp, Artificial Sequence
  Synthetic oligonucleotide
tgagctcacaataatacctcatacatttta

SEQ ID NO: 329883 - DNA, 30 bp, Artificial Sequence
  Synthetic oligonucleotide
tttgaggagggattctaggcgtacatttta

SEQ ID NO: 329884 - DNA, 30 bp, Artificial Sequence
  Synthetic oligonucleotide
taatgtggcggtctgtaaagaagcatttta

SEQ ID NO: 329885 - DNA, 30 bp, Artificial Sequence
  Synthetic oligonucleotide
atgatgccattttcattgctaggcatttta

SEQ ID NO: 329886 - DNA, 30 bp, Artificial Sequence
  Synthetic oligonucleotide
gcagtaatgtatagtattatcaagatttta

SEQ ID NO: 329887 - DNA, 30 bp, Artificial Sequence
  Synthetic oligonucleotide
gttgcaactcactaagtcttgaagatttta

SEQ ID NO: 329888 - DNA, 30 bp, Artificial Sequence
  Synthetic oligonucleotide
tgactcaatgctatatggatagagatttta

SEQ ID NO: 329889 - DNA, 30 bp, Artificial Sequence
  Synthetic oligonucleotide
caagtatcaaatatgtattcgacgatttta

SEQ ID NO: 329890 - DNA, 30 bp, Artificial Sequence
  Synthetic oligonucleotide
caggttgctcaaatggtttgctcgatttta

SEQ ID NO: 329891 - DNA, 30 bp, Artificial Sequence
  Synthetic oligonucleotide
ggcaacttatgaccggaaacgttgatttta

SEQ ID NO: 329892 - DNA, 30 bp, Artificial Sequence
  Synthetic oligonucleotide
acaaaaacgttgtcatctagtgatatttta

SEQ ID NO: 329893 - DNA, 30 bp, Artificial Sequence
  Synthetic oligonucleotide
acccacggtaggcgggaaagtactatttta

SEQ ID NO: 329894 - DNA, 30 bp, Artificial Sequence
  Synthetic oligonucleotide
tcgcgtccagtctgagaggcgcttatttta

SEQ ID NO: 329895 - DNA, 30 bp, Artificial Sequence
  Synthetic oligonucleotide
ggaagaccgggccgcttgtgaccactttta

SEQ ID NO: 329896 - DNA, 30 bp, Artificial Sequence
  Synthetic oligonucleotide
ctcgcctcccctgacggaactcgactttta

SEQ ID NO: 329897 - DNA, 30 bp, Artificial Sequence
  Synthetic oligonucleotide
actgttgttaacactgacgtgcgcctttta

SEQ ID NO: 329898 - DNA, 30 bp, Artificial Sequence
  Synthetic oligonucleotide
ttcaggatataattcaaagtccatctttta

SEQ ID NO: 329899 - DNA, 30 bp, Artificial Sequence
  Synthetic oligonucleotide
agtgagctcaacattcacctgtatctttta

SEQ ID NO: 329900 - DNA, 30 bp, Artificial Sequence
  Synthetic oligonucleotide
ccttctctcggggtgggccaaactctttta

SEQ ID NO: 329901 - DNA, 30 bp, Artificial Sequence
  Synthetic oligonucleotide
tattcaactgtatatggcagccgagtttta

SEQ ID NO: 329902 - DNA, 30 bp, Artificial Sequence
  Synthetic oligonucleotide
ggtaatacactaaaaacgatcaaggtttta

SEQ ID NO: 329903 - DNA, 30 bp, Artificial Sequence
  Synthetic oligonucleotide
gcgtactccttgagagtatttccggtttta

SEQ ID NO: 329904 - DNA, 30 bp, Artificial Sequence
  Synthetic oligonucleotide
attccttgcgttactggcacactggtttta

SEQ ID NO: 329905 - DNA, 30 bp, Artificial Sequence
  Synthetic oligonucleotide
cctggctgaacgtaggtggttcctgtttta

SEQ ID NO: 329906 - DNA, 30 bp, Artificial Sequence
  Synthetic oligonucleotide
acgtggctctatgcaaatcaaacattttta

SEQ ID NO: 329907 - DNA, 30 bp, Artificial Sequence
  Synthetic oligonucleotide
aagccaagacaacgatccgcgcccttttta

SEQ ID NO: 329908 - DNA, 30 bp, Artificial Sequence
  Synthetic oligonucleotide
gagaaggattggactagaccactcttttta

SEQ ID NO: 329909 - DNA, 30 bp, Artificial Sequence
  Synthetic oligonucleotide
aagttaacgcgctttgagacaatgttttta

SEQ ID NO: 329910 - DNA, 30 bp, Artificial Sequence
  Synthetic oligonucleotide
atgtgtggcaatcgggtctcaatgttttta

SEQ ID NO: 329911 - DNA, 30 bp, Artificial Sequence
  Synthetic oligonucleotide
attagtctagggatgcttccacatttttta

SEQ ID NO: 329912 - DNA, 30 bp, Artificial Sequence
  Synthetic oligonucleotide
gcacctgttgtgtattgggtatgtttttta

SEQ ID NO: 329913 - DNA, 30 bp, Artificial Sequence
  Synthetic oligonucleotide
gaggtgcttttaagcagcaaagaaaaaaac

SEQ ID NO: 329914 - DNA, 30 bp, Artificial Sequence
  Synthetic oligonucleotide
gggcgtatacctttattgtgatgaaaaaac

SEQ ID NO: 329915 - DNA, 30 bp, Artificial Sequence
  Synthetic oligonucleotide
ggcgctggtgggtgaatcgtggtaaaaaac

SEQ ID NO: 329916 - DNA, 30 bp, Artificial Sequence
  Synthetic oligonucleotide
aagctgcgcgtagcaggtatggccaaaaac

SEQ ID NO: 329917 - DNA, 30 bp, Artificial Sequence
  Synthetic oligonucleotide
tctgggcaggatagtggttgtgccaaaaac

SEQ ID NO: 329918 - DNA, 30 bp, Artificial Sequence
  Synthetic oligonucleotide
tcgctggataatgacttcatatccaaaaac

SEQ ID NO: 329919 - DNA, 30 bp, Artificial Sequence
  Synthetic oligonucleotide
gccttttgtcctaagagctaatgcaaaaac

SEQ ID NO: 329920 - DNA, 30 bp, Artificial Sequence
  Synthetic oligonucleotide
ggtaacgcccaacagtcattgacgaaaaac

SEQ ID NO: 329921 - DNA, 30 bp, Artificial Sequence
  Synthetic oligonucleotide
ggctaattatattgttaatgactgaaaaac

SEQ ID NO: 329922 - DNA, 30 bp, Artificial Sequence
  Synthetic oligonucleotide
gcaggtctagaacggctagctgataaaaac

SEQ ID NO: 329923 - DNA, 30 bp, Artificial Sequence
  Synthetic oligonucleotide
atcggcgtgtaatcgcagccgactaaaaac

SEQ ID NO: 329924 - DNA, 30 bp, Artificial Sequence
  Synthetic oligonucleotide
gcacactggcactccttgccagctaaaaac

SEQ ID NO: 329925 - DNA, 30 bp, Artificial Sequence
  Synthetic oligonucleotide
tccaaagctacaaaggattgatctaaaaac

SEQ ID NO: 329926 - DNA, 30 bp, Artificial Sequence
  Synthetic oligonucleotide
tcaccccacgggcaaaacgtgtaacaaaac

SEQ ID NO: 329927 - DNA, 30 bp, Artificial Sequence
  Synthetic oligonucleotide
tggcacaagagggccctagggcaccaaaac

SEQ ID NO: 329928 - DNA, 30 bp, Artificial Sequence
  Synthetic oligonucleotide
ggagacaatgcctagtgcgtacggcaaaac

SEQ ID NO: 329929 - DNA, 30 bp, Artificial Sequence
  Synthetic oligonucleotide
ggcggtgtgggattcctatgaaatcaaaac

SEQ ID NO: 329930 - DNA, 30 bp, Artificial Sequence
  Synthetic oligonucleotide
accaacaattagtgagcggatcctcaaaac

SEQ ID NO: 329931 - DNA, 30 bp, Artificial Sequence
  Synthetic oligonucleotide
agagagtctagctcacttccgagtcaaaac

SEQ ID NO: 329932 - DNA, 30 bp, Artificial Sequence
  Synthetic oligonucleotide
gcaggagtgcggtgagctgctaaagaaaac

SEQ ID NO: 329933 - DNA, 30 bp, Artificial Sequence
  Synthetic oligonucleotide
ttgcgctatagccgggtatgtaaggaaaac

SEQ ID NO: 329934 - DNA, 30 bp, Artificial Sequence
  Synthetic oligonucleotide
cccggcacagggcacgatggacaggaaaac

SEQ ID NO: 329935 - DNA, 30 bp, Artificial Sequence
  Synthetic oligonucleotide
gcaaaacccggtggatacggcgaggaaaac

SEQ ID NO: 329936 - DNA, 30 bp, Artificial Sequence
  Synthetic oligonucleotide
ttagattatcatacatcgtttgaggaaaac

SEQ ID NO: 329937 - DNA, 30 bp, Artificial Sequence
  Synthetic oligonucleotide
actcttcggggtggattaatattggaaaac

SEQ ID NO: 329938 - DNA, 30 bp, Artificial Sequence
  Synthetic oligonucleotide
acaagcacgattatgtgaaagtatgaaaac

SEQ ID NO: 329939 - DNA, 30 bp, Artificial Sequence
  Synthetic oligonucleotide
atcgcaatttaagtcaaacacgctgaaaac

SEQ ID NO: 329940 - DNA, 30 bp, Artificial Sequence
  Synthetic oligonucleotide
aattgacggaaatcgaaagtacttgaaaac

SEQ ID NO: 329941 - DNA, 30 bp, Artificial Sequence
  Synthetic oligonucleotide
agctagaggggctcagagacctttgaaaac

SEQ ID NO: 329942 - DNA, 30 bp, Artificial Sequence
  Synthetic oligonucleotide
gattctaccgacgagccaatcatataaaac

SEQ ID NO: 329943 - DNA, 30 bp, Artificial Sequence
  Synthetic oligonucleotide
tctcggtcggtgtttggactgaactaaaac

SEQ ID NO: 329944 - DNA, 30 bp, Artificial Sequence
  Synthetic oligonucleotide
tagggcatctggatccccgttaactaaaac

SEQ ID NO: 329945 - DNA, 30 bp, Artificial Sequence
  Synthetic oligonucleotide
ccggctacggactctgtgagagcctaaaac

SEQ ID NO: 329946 - DNA, 30 bp, Artificial Sequence
  Synthetic oligonucleotide
cataatagcgtagggtgtcgcatctaaaac

SEQ ID NO: 329947 - DNA, 30 bp, Artificial Sequence
  Synthetic oligonucleotide
gatggatattagacattgtgctattaaaac

SEQ ID NO: 329948 - DNA, 30 bp, Artificial Sequence
  Synthetic oligonucleotide
aagcaagcgtagcgtatgccctcttaaaac

SEQ ID NO: 329949 - DNA, 30 bp, Artificial Sequence
  Synthetic oligonucleotide
gccaacggcggaaagcgtcgtggttaaaac

SEQ ID NO: 329950 - DNA, 30 bp, Artificial Sequence
  Synthetic oligonucleotide
aaatgttcggcgcactccgtactttaaaac

SEQ ID NO: 329951 - DNA, 30 bp, Artificial Sequence
  Synthetic oligonucleotide
agtctatccagcagggcctaaggaacaaac

SEQ ID NO: 329952 - DNA, 30 bp, Artificial Sequence
  Synthetic oligonucleotide
atactcactgaccgggttccgtgaacaaac

SEQ ID NO: 329953 - DNA, 30 bp, Artificial Sequence
  Synthetic oligonucleotide
actttacggactcagcctccgaggacaaac

SEQ ID NO: 329954 - DNA, 30 bp, Artificial Sequence
  Synthetic oligonucleotide
atcaacgtagcggatctgagattgacaaac

SEQ ID NO: 329955 - DNA, 30 bp, Artificial Sequence
  Synthetic oligonucleotide
gattaaaatcattaccctaacagtacaaac

SEQ ID NO: 329956 - DNA, 30 bp, Artificial Sequence
  Synthetic oligonucleotide
ggtgagtatctgtagctttggtatccaaac

SEQ ID NO: 329957 - DNA, 30 bp, Artificial Sequence
  Synthetic oligonucleotide
tgcttgagagtgcggagcactacagcaaac

SEQ ID NO: 329958 - DNA, 30 bp, Artificial Sequence
  Synthetic oligonucleotide
tgtccaaacttttggctcgcgaacgcaaac

SEQ ID NO: 329959 - DNA, 30 bp, Artificial Sequence
  Synthetic oligonucleotide
tggcggtatatacgggttagggacgcaaac

SEQ ID NO: 329960 - DNA, 30 bp, Artificial Sequence
  Synthetic oligonucleotide
cgtgcgtcaaacttagacctgtacgcaaac

SEQ ID NO: 329961 - DNA, 30 bp, Artificial Sequence
  Synthetic oligonucleotide
aggtcgtactagtttaagtggatggcaaac

SEQ ID NO: 329962 - DNA, 30 bp, Artificial Sequence
  Synthetic oligonucleotide
tttgatgaacactaggacggctatgcaaac

SEQ ID NO: 329963 - DNA, 30 bp, Artificial Sequence
  Synthetic oligonucleotide
ttgacatccgtaccccgaactggtgcaaac

SEQ ID NO: 329964 - DNA, 30 bp, Artificial Sequence
  Synthetic oligonucleotide
agccggtctaacccgaaccgggttgcaaac

SEQ ID NO: 329965 - DNA, 30 bp, Artificial Sequence
  Synthetic oligonucleotide
tgtgatgcaggcattgttggttcatcaaac

SEQ ID NO: 329966 - DNA, 30 bp, Artificial Sequence
  Synthetic oligonucleotide
ggggcctgcgatgtgggcctcgtatcaaac

SEQ ID NO: 329967 - DNA, 30 bp, Artificial Sequence
  Synthetic oligonucleotide
gcgtcaagtgcttggtatcactgctcaaac

SEQ ID NO: 329968 - DNA, 30 bp, Artificial Sequence
  Synthetic oligonucleotide
gtcgctcctaaaccagctgttcggtcaaac

SEQ ID NO: 329969 - DNA, 30 bp, Artificial Sequence
  Synthetic oligonucleotide
tccattgttaagcggatagtctggtcaaac

SEQ ID NO: 329970 - DNA, 30 bp, Artificial Sequence
  Synthetic oligonucleotide
acttcattctacttagtcggcctgtcaaac

SEQ ID NO: 329971 - DNA, 30 bp, Artificial Sequence
  Synthetic oligonucleotide
aacgttatttgccaaagacggtattcaaac

SEQ ID NO: 329972 - DNA, 30 bp, Artificial Sequence
  Synthetic oligonucleotide
tctctaaatcacgcctccgcccaaagaaac

SEQ ID NO: 329973 - DNA, 30 bp, Artificial Sequence
  Synthetic oligonucleotide
gctggaacgatacccggagttcaaagaaac

SEQ ID NO: 329974 - DNA, 30 bp, Artificial Sequence
  Synthetic oligonucleotide
caattggtacctaatgggtagcgaagaaac

SEQ ID NO: 329975 - DNA, 30 bp, Artificial Sequence
  Synthetic oligonucleotide
atcaggcaagcccaatcacgcgacagaaac

SEQ ID NO: 329976 - DNA, 30 bp, Artificial Sequence
  Synthetic oligonucleotide
ggaaatcagtcattataaatacccagaaac

SEQ ID NO: 329977 - DNA, 30 bp, Artificial Sequence
  Synthetic oligonucleotide
gaacagccagtcacggttaccccgagaaac

SEQ ID NO: 329978 - DNA, 30 bp, Artificial Sequence
  Synthetic oligonucleotide
acttgtgaagtcattggggtgttgagaaac

SEQ ID NO: 329979 - DNA, 30 bp, Artificial Sequence
  Synthetic oligonucleotide
gaaaggaatgtagcagcttcgtgtagaaac

SEQ ID NO: 329980 - DNA, 30 bp, Artificial Sequence
  Synthetic oligonucleotide
tgcatgtgcctatatgttcacgcccgaaac

SEQ ID NO: 329981 - DNA, 30 bp, Artificial Sequence
  Synthetic oligonucleotide
tcgtgtttgcactcccatcgtgatcgaaac

SEQ ID NO: 329982 - DNA, 30 bp, Artificial Sequence
  Synthetic oligonucleotide
ataaggttgcaagcccggatttttcgaaac

SEQ ID NO: 329983 - DNA, 30 bp, Artificial Sequence
  Synthetic oligonucleotide
gtgtcagcggtgtagttggtcgaaggaaac

SEQ ID NO: 329984 - DNA, 30 bp, Artificial Sequence
  Synthetic oligonucleotide
cgttgtcagaatgtactcgcgagaggaaac

SEQ ID NO: 329985 - DNA, 30 bp, Artificial Sequence
  Synthetic oligonucleotide
ttttcaatggtacttagcaaaataggaaac

SEQ ID NO: 329986 - DNA, 30 bp, Artificial Sequence
  Synthetic oligonucleotide
tattgatgtcctcacgggacactaggaaac

SEQ ID NO: 329987 - DNA, 30 bp, Artificial Sequence
  Synthetic oligonucleotide
gtcagtcccaaggatgtagccaagggaaac

SEQ ID NO: 329988 - DNA, 30 bp, Artificial Sequence
  Synthetic oligonucleotide
acgatcgcgctttgaagttgctagggaaac

SEQ ID NO: 329989 - DNA, 30 bp, Artificial Sequence
  Synthetic oligonucleotide
gactggccattggtcggattgttgggaaac

SEQ ID NO: 329990 - DNA, 30 bp, Artificial Sequence
  Synthetic oligonucleotide
gccgttgaactgtacttgtaaggatgaaac

SEQ ID NO: 329991 - DNA, 30 bp, Artificial Sequence
  Synthetic oligonucleotide
gagggagccggacaaacattgcactgaaac

SEQ ID NO: 329992 - DNA, 30 bp, Artificial Sequence
  Synthetic oligonucleotide
ataaacattccagggcgatggaagtgaaac

SEQ ID NO: 329993 - DNA, 30 bp, Artificial Sequence
  Synthetic oligonucleotide
ctcgctcgtatttggcgtaggtcgtgaaac

SEQ ID NO: 329994 - DNA, 30 bp, Artificial Sequence
  Synthetic oligonucleotide
gcataatatacagtcatgtattattgaaac

SEQ ID NO: 329995 - DNA, 30 bp, Artificial Sequence
  Synthetic oligonucleotide
ggcacccgcatttccgcgcgatcttgaaac

SEQ ID NO: 329996 - DNA, 30 bp, Artificial Sequence
  Synthetic oligonucleotide
gatggcaagatgaggtaaatctcttgaaac

SEQ ID NO: 329997 - DNA, 30 bp, Artificial Sequence
  Synthetic oligonucleotide
aggtcagtgggattaataaggttttgaaac

SEQ ID NO: 329998 - DNA, 29 bp, Artificial Sequence
  Synthetic oligonucleotide
atcgtcgtctcgaacactatctaataaac

SEQ ID NO: 329999 - DNA, 30 bp, Artificial Sequence
  Synthetic oligonucleotide
cggggtggtttagctttttttaccataaac

SEQ ID NO: 330000 - DNA, 30 bp, Artificial Sequence
  Synthetic oligonucleotide
ccaacaccttgagtttcggtgtgcataaac

SEQ ID NO: 330001 - DNA, 30 bp, Artificial Sequence
  Synthetic oligonucleotide
gcgaactattaggcgccgagcgtcataaac

SEQ ID NO: 330002 - DNA, 30 bp, Artificial Sequence
  Synthetic oligonucleotide
aagccatcttatattgttctcccgataaac

SEQ ID NO: 330003 - DNA, 30 bp, Artificial Sequence
  Synthetic oligonucleotide
gtgctagtctcttaaagagttgcgataaac

SEQ ID NO: 330004 - DNA, 30 bp, Artificial Sequence
  Synthetic oligonucleotide
gggggaggctgtatggaaagttggataaac

SEQ ID NO: 330005 - DNA, 30 bp, Artificial Sequence
  Synthetic oligonucleotide
cgggtggaagtccacaataactatataaac

SEQ ID NO: 330006 - DNA, 30 bp, Artificial Sequence
  Synthetic oligonucleotide
cagaccctttgtcgctcaataggactaaac

SEQ ID NO: 330007 - DNA, 30 bp, Artificial Sequence
  Synthetic oligonucleotide
ttttagatgaaagggcccagtcacctaaac

SEQ ID NO: 330008 - DNA, 30 bp, Artificial Sequence
  Synthetic oligonucleotide
gctcatgcaactaacaaggttgacctaaac

SEQ ID NO: 330009 - DNA, 30 bp, Artificial Sequence
  Synthetic oligonucleotide
cctttcggtgggcgatcaattgtcctaaac

SEQ ID NO: 330010 - DNA, 30 bp, Artificial Sequence
  Synthetic oligonucleotide
gtcgaccgtgaggcgggagaccagctaaac

SEQ ID NO: 330011 - DNA, 30 bp, Artificial Sequence
  Synthetic oligonucleotide
ggagtcccaggatcattttaagggctaaac

SEQ ID NO: 330012 - DNA, 30 bp, Artificial Sequence
  Synthetic oligonucleotide
gcgacttcgtgaatactcttatatctaaac

SEQ ID NO: 330013 - DNA, 30 bp, Artificial Sequence
  Synthetic oligonucleotide
agtgacgataataaactaggtactctaaac

SEQ ID NO: 330014 - DNA, 30 bp, Artificial Sequence
  Synthetic oligonucleotide
atcgctatgcaagtccgacaaggtctaaac

SEQ ID NO: 330015 - DNA, 30 bp, Artificial Sequence
  Synthetic oligonucleotide
gtgcctctagggtaccgtaattgtctaaac

SEQ ID NO: 330016 - DNA, 30 bp, Artificial Sequence
  Synthetic oligonucleotide
tgggactggcagttgcatgtctttctaaac

SEQ ID NO: 330017 - DNA, 30 bp, Artificial Sequence
  Synthetic oligonucleotide
cgttcaactgctcaggatgtacaagtaaac

SEQ ID NO: 330018 - DNA, 30 bp, Artificial Sequence
  Synthetic oligonucleotide
cctcgagtagtccgtccggacctcgtaaac

SEQ ID NO: 330019 - DNA, 30 bp, Artificial Sequence
  Synthetic oligonucleotide
ggcaccaggcaccagggactaggggtaaac

SEQ ID NO: 330020 - DNA, 30 bp, Artificial Sequence
  Synthetic oligonucleotide
atccaacgggaacgtgccccagtggtaaac

SEQ ID NO: 330021 - DNA, 30 bp, Artificial Sequence
  Synthetic oligonucleotide
acggtacttccgtgttggttctatgtaaac

SEQ ID NO: 330022 - DNA, 30 bp, Artificial Sequence
  Synthetic oligonucleotide
gccatagtccaacttttagtttctgtaaac

SEQ ID NO: 330023 - DNA, 30 bp, Artificial Sequence
  Synthetic oligonucleotide
attgctggttcccaccctaggaacttaaac

SEQ ID NO: 330024 - DNA, 30 bp, Artificial Sequence
  Synthetic oligonucleotide
ggaagctagtaccgagttagagccttaaac

SEQ ID NO: 330025 - DNA, 30 bp, Artificial Sequence
  Synthetic oligonucleotide
ataatccgagcttcactaacctccttaaac

SEQ ID NO: 330026 - DNA, 30 bp, Artificial Sequence
  Synthetic oligonucleotide
tatacgcgaagacatcacacgggcttaaac

SEQ ID NO: 330027 - DNA, 30 bp, Artificial Sequence
  Synthetic oligonucleotide
tgggtttcacttctctaccgggggttaaac

SEQ ID NO: 330028 - DNA, 30 bp, Artificial Sequence
  Synthetic oligonucleotide
gctcacagggatgcgatagatgtgttaaac

SEQ ID NO: 330029 - DNA, 30 bp, Artificial Sequence
  Synthetic oligonucleotide
gttaccgacaggggccggtaattgttaaac

SEQ ID NO: 330030 - DNA, 30 bp, Artificial Sequence
  Synthetic oligonucleotide
atcaccaaggaaaatgatgacacaaacaac

SEQ ID NO: 330031 - DNA, 30 bp, Artificial Sequence
  Synthetic oligonucleotide
gcgataaaataagctcccttgggaaacaac

SEQ ID NO: 330032 - DNA, 30 bp, Artificial Sequence
  Synthetic oligonucleotide
ggtattgacagcacaaggtgcaacaacaac

SEQ ID NO: 330033 - DNA, 30 bp, Artificial Sequence
  Synthetic oligonucleotide
gcaaatatggacagaactggtgacaacaac

SEQ ID NO: 330034 - DNA, 30 bp, Artificial Sequence
  Synthetic oligonucleotide
tgaccagtggctccaccaagggtgaacaac

SEQ ID NO: 330035 - DNA, 30 bp, Artificial Sequence
  Synthetic oligonucleotide
cagacgcgctgacctgtgttggtgaacaac

SEQ ID NO: 330036 - DNA, 30 bp, Artificial Sequence
  Synthetic oligonucleotide
aggtattctaattaacagtgggctaacaac

SEQ ID NO: 330037 - DNA, 30 bp, Artificial Sequence
  Synthetic oligonucleotide
ggtatggtgggaatactagcttctaacaac

SEQ ID NO: 330038 - DNA, 30 bp, Artificial Sequence
  Synthetic oligonucleotide
gccataactaaaaggggtaataaccacaac

SEQ ID NO: 330039 - DNA, 30 bp, Artificial Sequence
  Synthetic oligonucleotide
aagttgtgttcaggcaagatagcccacaac

SEQ ID NO: 330040 - DNA, 30 bp, Artificial Sequence
  Synthetic oligonucleotide
ctaggcggaaggcttaagcggccgcacaac

SEQ ID NO: 330041 - DNA, 30 bp, Artificial Sequence
  Synthetic oligonucleotide
tgttgcttcgagacaactcgattgcacaac

SEQ ID NO: 330042 - DNA, 30 bp, Artificial Sequence
  Synthetic oligonucleotide
gaaaatatcagctacggccaccaagacaac

SEQ ID NO: 330043 - DNA, 30 bp, Artificial Sequence
  Synthetic oligonucleotide
agaagcttgtagagggtgatgctcgacaac

SEQ ID NO: 330044 - DNA, 30 bp, Artificial Sequence
  Synthetic oligonucleotide
cctttttggcctaacatggattaggacaac

SEQ ID NO: 330045 - DNA, 30 bp, Artificial Sequence
  Synthetic oligonucleotide
atacatgatgggacttgatagccggacaac

SEQ ID NO: 330046 - DNA, 30 bp, Artificial Sequence
  Synthetic oligonucleotide
aagagctgggacatgcttttgcgggacaac

SEQ ID NO: 330047 - DNA, 30 bp, Artificial Sequence
  Synthetic oligonucleotide
tgttctcaggaccgtggagaggcatacaac

SEQ ID NO: 330048 - DNA, 30 bp, Artificial Sequence
  Synthetic oligonucleotide
ctaagtgatatcgcgattgtttcatacaac

SEQ ID NO: 330049 - DNA, 30 bp, Artificial Sequence
  Synthetic oligonucleotide
attttgggagatttccctctagtatacaac

SEQ ID NO: 330050 - DNA, 30 bp, Artificial Sequence
  Synthetic oligonucleotide
atctagctaacatgatttatagtctacaac

SEQ ID NO: 330051 - DNA, 30 bp, Artificial Sequence
  Synthetic oligonucleotide
agtcgtaggctgtactgttacgtctacaac

SEQ ID NO: 330052 - DNA, 30 bp, Artificial Sequence
  Synthetic oligonucleotide
atcagacccgtcaccatcggtctttacaac

SEQ ID NO: 330053 - DNA, 30 bp, Artificial Sequence
  Synthetic oligonucleotide
atagacgtaggtatgccaaataaaaccaac

SEQ ID NO: 330054 - DNA, 30 bp, Artificial Sequence
  Synthetic oligonucleotide
cacccgatgtaaatgagaatcgcaaccaac

SEQ ID NO: 330055 - DNA, 30 bp, Artificial Sequence
  Synthetic oligonucleotide
ctcttgtccggcgtcacacacttaaccaac

SEQ ID NO: 330056 - DNA, 30 bp, Artificial Sequence
  Synthetic oligonucleotide
tgcgacctgaaggctcggatcaccaccaac

SEQ ID NO: 330057 - DNA, 30 bp, Artificial Sequence
  Synthetic oligonucleotide
accatggcggactgcgcgacagccaccaac

SEQ ID NO: 330058 - DNA, 30 bp, Artificial Sequence
  Synthetic oligonucleotide
agtacaggtcatgacctacccgctaccaac

SEQ ID NO: 330059 - DNA, 30 bp, Artificial Sequence
  Synthetic oligonucleotide
agatatcatgaaggtgagtatgaacccaac

SEQ ID NO: 330060 - DNA, 30 bp, Artificial Sequence
  Synthetic oligonucleotide
gggtcatctaacgcatatcgaccacccaac

SEQ ID NO: 330061 - DNA, 31 bp, Artificial Sequence
  Synthetic oligonucleotide
ataatgctaactcctatactcggtgcccaac

SEQ ID NO: 330062 - DNA, 30 bp, Artificial Sequence
  Synthetic oligonucleotide
ggcgcatgcagtagccaggagctagccaac

SEQ ID NO: 330063 - DNA, 30 bp, Artificial Sequence
  Synthetic oligonucleotide
tgtgccggttagagacgctgtaaggccaac

SEQ ID NO: 330064 - DNA, 30 bp, Artificial Sequence
  Synthetic oligonucleotide
ccgtaggtcgaccgggtgaggtcggccaac

SEQ ID NO: 330065 - DNA, 30 bp, Artificial Sequence
  Synthetic oligonucleotide
tggttgggtacgattgtggaacgggccaac

SEQ ID NO: 330066 - DNA, 30 bp, Artificial Sequence
  Synthetic oligonucleotide
atatgtacttaactccttagtgtggccaac

SEQ ID NO: 330067 - DNA, 30 bp, Artificial Sequence
  Synthetic oligonucleotide
tatcaaagaagctgaacgacgcctgccaac

SEQ ID NO: 330068 - DNA, 30 bp, Artificial Sequence
  Synthetic oligonucleotide
tgtttattaaaaccacaagattcatccaac

SEQ ID NO: 330069 - DNA, 29 bp, Artificial Sequence
  Synthetic oligonucleotide
gcccgtagaatttacaggtgacctccaac

SEQ ID NO: 330070 - DNA, 30 bp, Artificial Sequence
  Synthetic oligonucleotide
gcagcgccatgttgacgtcggcattccaac

SEQ ID NO: 330071 - DNA, 30 bp, Artificial Sequence
  Synthetic oligonucleotide
ggcgaatagtttaatagtctagattccaac

SEQ ID NO: 330072 - DNA, 30 bp, Artificial Sequence
  Synthetic oligonucleotide
ccagtaacgttcggacttcggccttccaac

SEQ ID NO: 330073 - DNA, 30 bp, Artificial Sequence
  Synthetic oligonucleotide
gcgatggatcgtacctgtctccaaagcaac

SEQ ID NO: 330074 - DNA, 30 bp, Artificial Sequence
  Synthetic oligonucleotide
ccagcgtcaaagaccttctgcgaaagcaac

SEQ ID NO: 330075 - DNA, 30 bp, Artificial Sequence
  Synthetic oligonucleotide
ggttgttatctagagttttattaaagcaac

SEQ ID NO: 330076 - DNA, 30 bp, Artificial Sequence
  Synthetic oligonucleotide
gtaagtctctgaaagcgggtcataagcaac

SEQ ID NO: 330077 - DNA, 30 bp, Artificial Sequence
  Synthetic oligonucleotide
atgggatcgcgaagatgtctgcacagcaac

SEQ ID NO: 330078 - DNA, 30 bp, Artificial Sequence
  Synthetic oligonucleotide
tcagtttttgtttacggccagctcagcaac

SEQ ID NO: 330079 - DNA, 30 bp, Artificial Sequence
  Synthetic oligonucleotide
aatagttagacacgattgtcagggagcaac

SEQ ID NO: 330080 - DNA, 30 bp, Artificial Sequence
  Synthetic oligonucleotide
acgaatcgttctgtgaactgcgggagcaac

SEQ ID NO: 330081 - DNA, 30 bp, Artificial Sequence
  Synthetic oligonucleotide
gttatggcatcgtcgcctgcggtgagcaac

SEQ ID NO: 330082 - DNA, 30 bp, Artificial Sequence
  Synthetic oligonucleotide
gtcgttaaatatgcaattatacatagcaac

SEQ ID NO: 330083 - DNA, 30 bp, Artificial Sequence
  Synthetic oligonucleotide
cctccgctcatagaattccctccacgcaac

SEQ ID NO: 330084 - DNA, 30 bp, Artificial Sequence
  Synthetic oligonucleotide
tggtttttccataggccagacgaccgcaac

SEQ ID NO: 330085 - DNA, 30 bp, Artificial Sequence
  Synthetic oligonucleotide
ttaacatagtgactcagcttattccgcaac

SEQ ID NO: 330086 - DNA, 30 bp, Artificial Sequence
  Synthetic oligonucleotide
tattagtggattgggacatccgggcgcaac

SEQ ID NO: 330087 - DNA, 30 bp, Artificial Sequence
  Synthetic oligonucleotide
accgtaaattaccacgcaaccatgcgcaac

SEQ ID NO: 330088 - DNA, 30 bp, Artificial Sequence
  Synthetic oligonucleotide
tccacaccactattattcatcaatcgcaac

SEQ ID NO: 330089 - DNA, 30 bp, Artificial Sequence
  Synthetic oligonucleotide
gactaaacgctcaaggcctggtttcgcaac

SEQ ID NO: 330090 - DNA, 31 bp, Artificial Sequence
  Synthetic oligonucleotide
acatttgctttcagcggacgtctgaggcaac

SEQ ID NO: 330091 - DNA, 30 bp, Artificial Sequence
  Synthetic oligonucleotide
atggaacacggatgtacgggttagggcaac

SEQ ID NO: 330092 - DNA, 30 bp, Artificial Sequence
  Synthetic oligonucleotide
gttattcctttgtacactccgactggcaac

SEQ ID NO: 330093 - DNA, 30 bp, Artificial Sequence
  Synthetic oligonucleotide
taggagggtacataggattacattggcaac

SEQ ID NO: 330094 - DNA, 30 bp, Artificial Sequence
  Synthetic oligonucleotide
tggttccaaggttaataccctattggcaac

SEQ ID NO: 330095 - DNA, 30 bp, Artificial Sequence
  Synthetic oligonucleotide
gaatagcatttcacgccctagtttggcaac

SEQ ID NO: 330096 - DNA, 30 bp, Artificial Sequence
  Synthetic oligonucleotide
gcggcgctggcctttaaaatgtcatgcaac

SEQ ID NO: 330097 - DNA, 30 bp, Artificial Sequence
  Synthetic oligonucleotide
gcggggtgtatcctttctcccggatgcaac

SEQ ID NO: 330098 - DNA, 30 bp, Artificial Sequence
  Synthetic oligonucleotide
gctaggaatccgaggccttcgggatgcaac

SEQ ID NO: 330099 - DNA, 30 bp, Artificial Sequence
  Synthetic oligonucleotide
ctgtcatacgtgatagacttaatgtgcaac

SEQ ID NO: 330100 - DNA, 30 bp, Artificial Sequence
  Synthetic oligonucleotide
cgttccaaatcccagaaattatgttgcaac

SEQ ID NO: 330101 - DNA, 30 bp, Artificial Sequence
  Synthetic oligonucleotide
gcgccggggaaatgccgcccgccaatcaac

SEQ ID NO: 330102 - DNA, 30 bp, Artificial Sequence
  Synthetic oligonucleotide
gtgttggcgtgtcttatagagataatcaac

SEQ ID NO: 330103 - DNA, 30 bp, Artificial Sequence
  Synthetic oligonucleotide
gcgttatcaacgtcgcgtctggacatcaac

SEQ ID NO: 330104 - DNA, 30 bp, Artificial Sequence
  Synthetic oligonucleotide
cctttaggtatccccgagagagcgatcaac

SEQ ID NO: 330105 - DNA, 30 bp, Artificial Sequence
  Synthetic oligonucleotide
acaattgtaggcgtagccgcgatgatcaac

SEQ ID NO: 330106 - DNA, 30 bp, Artificial Sequence
  Synthetic oligonucleotide
gggttaaccgacgcaatgtatcgtatcaac

SEQ ID NO: 330107 - DNA, 30 bp, Artificial Sequence
  Synthetic oligonucleotide
gcccggctgcctatagctgggcaactcaac

SEQ ID NO: 330108 - DNA, 30 bp, Artificial Sequence
  Synthetic oligonucleotide
aaggtaagcggcatcttaggtatactcaac

SEQ ID NO: 330109 - DNA, 30 bp, Artificial Sequence
  Synthetic oligonucleotide
cgattacgggcgggtgaatccttactcaac

SEQ ID NO: 330110 - DNA, 30 bp, Artificial Sequence
  Synthetic oligonucleotide
ggatttcaacatgggagaccaaacctcaac

SEQ ID NO: 330111 - DNA, 30 bp, Artificial Sequence
  Synthetic oligonucleotide
gcatctctggagaaagatctccgcctcaac

SEQ ID NO: 330112 - DNA, 30 bp, Artificial Sequence
  Synthetic oligonucleotide
accggaaaatgatgcgggcactcgctcaac

SEQ ID NO: 330113 - DNA, 30 bp, Artificial Sequence
  Synthetic oligonucleotide
gtgaataccggcagagtggattcgctcaac

SEQ ID NO: 330114 - DNA, 30 bp, Artificial Sequence
  Synthetic oligonucleotide
ctgtctcgaatatgcacaggagtgctcaac

SEQ ID NO: 330115 - DNA, 30 bp, Artificial Sequence
  Synthetic oligonucleotide
tggcaaaacatccctcgaggattgctcaac

SEQ ID NO: 330116 - DNA, 30 bp, Artificial Sequence
  Synthetic oligonucleotide
gatgataaattacacaccggaggtctcaac

SEQ ID NO: 330117 - DNA, 30 bp, Artificial Sequence
  Synthetic oligonucleotide
actaatttccagataatatagtttctcaac

SEQ ID NO: 330118 - DNA, 30 bp, Artificial Sequence
  Synthetic oligonucleotide
cttgctatcgcaacttaaaagtcagtcaac

SEQ ID NO: 330119 - DNA, 30 bp, Artificial Sequence
  Synthetic oligonucleotide
atctagaggcatttacatgcctacgtcaac

SEQ ID NO: 330120 - DNA, 30 bp, Artificial Sequence
  Synthetic oligonucleotide
tgacacctacggtacttggaccatgtcaac

SEQ ID NO: 330121 - DNA, 30 bp, Artificial Sequence
  Synthetic oligonucleotide
tacgcgaaccgcactaccgacactgtcaac

SEQ ID NO: 330122 - DNA, 30 bp, Artificial Sequence
  Synthetic oligonucleotide
tggccctgagcaagactggcgttattcaac

SEQ ID NO: 330123 - DNA, 30 bp, Artificial Sequence
  Synthetic oligonucleotide
tagctaagagtcggtggcaccccgttcaac

SEQ ID NO: 330124 - DNA, 30 bp, Artificial Sequence
  Synthetic oligonucleotide
acatacgtaatctgatatcctaggttcaac

SEQ ID NO: 330125 - DNA, 30 bp, Artificial Sequence
  Synthetic oligonucleotide
tccttatgccgcctgtttaacagtttcaac

SEQ ID NO: 330126 - DNA, 30 bp, Artificial Sequence
  Synthetic oligonucleotide
taccgtattctagggtcggctcttttcaac

SEQ ID NO: 330127 - DNA, 30 bp, Artificial Sequence
  Synthetic oligonucleotide
ggttcttgaaccttttagcctggaaagaac

SEQ ID NO: 330128 - DNA, 30 bp, Artificial Sequence
  Synthetic oligonucleotide
agcgctccacaccagtatgatttaaagaac

SEQ ID NO: 330129 - DNA, 30 bp, Artificial Sequence
  Synthetic oligonucleotide
ctacttggtcatagtagggagtccaagaac

SEQ ID NO: 330130 - DNA, 30 bp, Artificial Sequence
  Synthetic oligonucleotide
gccaaaaatcgaaggttttgtaagaagaac

SEQ ID NO: 330131 - DNA, 30 bp, Artificial Sequence
  Synthetic oligonucleotide
atagactcatatgctattaacccgaagaac

SEQ ID NO: 330132 - DNA, 30 bp, Artificial Sequence
  Synthetic oligonucleotide
aggtaatgcaatctcctgtccgtgaagaac

SEQ ID NO: 330133 - DNA, 30 bp, Artificial Sequence
  Synthetic oligonucleotide
accccacataaattgcctcgatgtaagaac

SEQ ID NO: 330134 - DNA, 30 bp, Artificial Sequence
  Synthetic oligonucleotide
atcgaatttgtggaactacgttgtaagaac

SEQ ID NO: 330135 - DNA, 30 bp, Artificial Sequence
  Synthetic oligonucleotide
tctccgactcggcgctattagggacagaac

SEQ ID NO: 330136 - DNA, 30 bp, Artificial Sequence
  Synthetic oligonucleotide
aaaatcatttcggcaataagtacccagaac

SEQ ID NO: 330137 - DNA, 30 bp, Artificial Sequence
  Synthetic oligonucleotide
agtcgccaggttaggccggatttccagaac

SEQ ID NO: 330138 - DNA, 30 bp, Artificial Sequence
  Synthetic oligonucleotide
tttacgctgttagccacaataaatcagaac

SEQ ID NO: 330139 - DNA, 30 bp, Artificial Sequence
  Synthetic oligonucleotide
acctaatgatctgtcacttggaatcagaac

SEQ ID NO: 330140 - DNA, 30 bp, Artificial Sequence
  Synthetic oligonucleotide
ctggatatgcagcacgggagaagtcagaac

SEQ ID NO: 330141 - DNA, 30 bp, Artificial Sequence
  Synthetic oligonucleotide
acccctgcgaccgatcctccgagtcagaac

SEQ ID NO: 330142 - DNA, 30 bp, Artificial Sequence
  Synthetic oligonucleotide
gactcggatatggtgagtctaggtcagaac

SEQ ID NO: 330143 - DNA, 30 bp, Artificial Sequence
  Synthetic oligonucleotide
agggtgttcggctggtaatctacagagaac

SEQ ID NO: 330144 - DNA, 30 bp, Artificial Sequence
  Synthetic oligonucleotide
gacatgtgggaatctctaacgatcgagaac

SEQ ID NO: 330145 - DNA, 30 bp, Artificial Sequence
  Synthetic oligonucleotide
gctagtataggagtttggccatgggagaac

SEQ ID NO: 330146 - DNA, 30 bp, Artificial Sequence
  Synthetic oligonucleotide
ctcccagttcaccctgactaagaatagaac

SEQ ID NO: 330147 - DNA, 30 bp, Artificial Sequence
  Synthetic oligonucleotide
cgtacgtactagttccttttcacatagaac

SEQ ID NO: 330148 - DNA, 30 bp, Artificial Sequence
  Synthetic oligonucleotide
tagacggaaatggagacaattatatagaac

SEQ ID NO: 330149 - DNA, 30 bp, Artificial Sequence
  Synthetic oligonucleotide
ggataagattcccggggtgccagttagaac

SEQ ID NO: 330150 - DNA, 30 bp, Artificial Sequence
  Synthetic oligonucleotide
tcacttcgcaataggtaagaattaacgaac

SEQ ID NO: 330151 - DNA, 30 bp, Artificial Sequence
  Synthetic oligonucleotide
ttgtcgacagcgactcatcgccacacgaac

SEQ ID NO: 330152 - DNA, 30 bp, Artificial Sequence
  Synthetic oligonucleotide
cggtagtcatttcactgagacgacacgaac

SEQ ID NO: 330153 - DNA, 30 bp, Artificial Sequence
  Synthetic oligonucleotide
atcactgtggctcatttgagttacacgaac

SEQ ID NO: 330154 - DNA, 30 bp, Artificial Sequence
  Synthetic oligonucleotide
ttaaacgaagctactataatgcccacgaac

SEQ ID NO: 330155 - DNA, 30 bp, Artificial Sequence
  Synthetic oligonucleotide
tataagccttaaactgtctgctagacgaac

SEQ ID NO: 330156 - DNA, 30 bp, Artificial Sequence
  Synthetic oligonucleotide
agtaacgaaggacccgcatagtagacgaac

SEQ ID NO: 330157 - DNA, 30 bp, Artificial Sequence
  Synthetic oligonucleotide
cctgatatagcgtctcactacgtgacgaac

SEQ ID NO: 330158 - DNA, 30 bp, Artificial Sequence
  Synthetic oligonucleotide
tcgttactcgctgaagtcgagtaaccgaac

SEQ ID NO: 330159 - DNA, 30 bp, Artificial Sequence
  Synthetic oligonucleotide
tcatgcttggcggtttttataagaccgaac

SEQ ID NO: 330160 - DNA, 30 bp, Artificial Sequence
  Synthetic oligonucleotide
gcatacctagtttacgcgtaccgaccgaac

SEQ ID NO: 330161 - DNA, 30 bp, Artificial Sequence
  Synthetic oligonucleotide
cctcgtctggacagtcttacaataccgaac

SEQ ID NO: 330162 - DNA, 30 bp, Artificial Sequence
  Synthetic oligonucleotide
ccgcgacttcaattggttggtaccccgaac

SEQ ID NO: 330163 - DNA, 30 bp, Artificial Sequence
  Synthetic oligonucleotide
ttagcgttcaaggcgagcaaaccgccgaac

SEQ ID NO: 330164 - DNA, 30 bp, Artificial Sequence
  Synthetic oligonucleotide
tatattgtgactccaaaaggttcgccgaac

SEQ ID NO: 330165 - DNA, 30 bp, Artificial Sequence
  Synthetic oligonucleotide
atactgacttgactgcttatggggccgaac

SEQ ID NO: 330166 - DNA, 30 bp, Artificial Sequence
  Synthetic oligonucleotide
atgtgccacatcggtccaagtagagcgaac

SEQ ID NO: 330167 - DNA, 30 bp, Artificial Sequence
  Synthetic oligonucleotide
gtccagagatatcgtcaaattgacgcgaac

SEQ ID NO: 330168 - DNA, 30 bp, Artificial Sequence
  Synthetic oligonucleotide
cattatagagcaattttacacagggcgaac

SEQ ID NO: 330169 - DNA, 30 bp, Artificial Sequence
  Synthetic oligonucleotide
tctcggacagcacgcagaggtagggcgaac

SEQ ID NO: 330170 - DNA, 30 bp, Artificial Sequence
  Synthetic oligonucleotide
ccacgtaattactccttcgacatggcgaac

SEQ ID NO: 330171 - DNA, 30 bp, Artificial Sequence
  Synthetic oligonucleotide
acacatagaagatgcaagtgtttggcgaac

SEQ ID NO: 330172 - DNA, 30 bp, Artificial Sequence
  Synthetic oligonucleotide
caaggaaggtagaaaggactgggtgcgaac

SEQ ID NO: 330173 - DNA, 30 bp, Artificial Sequence
  Synthetic oligonucleotide
aggattaaacggttactatggtttgcgaac

SEQ ID NO: 330174 - DNA, 30 bp, Artificial Sequence
  Synthetic oligonucleotide
tagttattctcgcaccccgataattcgaac

SEQ ID NO: 330175 - DNA, 30 bp, Artificial Sequence
  Synthetic oligonucleotide
cgagcacgtgacacgtcgactctttcgaac

SEQ ID NO: 330176 - DNA, 30 bp, Artificial Sequence
  Synthetic oligonucleotide
attgggccataggtaggacgaaaaaggaac

SEQ ID NO: 330177 - DNA, 30 bp, Artificial Sequence
  Synthetic oligonucleotide
tgttagggtgactacggcggataaaggaac

SEQ ID NO: 330178 - DNA, 30 bp, Artificial Sequence
  Synthetic oligonucleotide
aaataaccctgctgcaacgtttaaaggaac

SEQ ID NO: 330179 - DNA, 30 bp, Artificial Sequence
  Synthetic oligonucleotide
ttctgataagatatacggccctcaaggaac

SEQ ID NO: 330180 - DNA, 30 bp, Artificial Sequence
  Synthetic oligonucleotide
tagccgtgaacgacgtcacgtgacaggaac

SEQ ID NO: 330181 - DNA, 30 bp, Artificial Sequence
  Synthetic oligonucleotide
gtagtaaaggcacgcatgtgaagcaggaac

SEQ ID NO: 330182 - DNA, 30 bp, Artificial Sequence
  Synthetic oligonucleotide
ggggtaccggcagaagttcctaaacggaac

SEQ ID NO: 330183 - DNA, 30 bp, Artificial Sequence
  Synthetic oligonucleotide
taacagctcagcataaagggcagacggaac

SEQ ID NO: 330184 - DNA, 30 bp, Artificial Sequence
  Synthetic oligonucleotide
gatgctatgtaagtcccgttcagccggaac

SEQ ID NO: 330185 - DNA, 30 bp, Artificial Sequence
  Synthetic oligonucleotide
tctgacgttgacgattgaaccgcgcggaac

SEQ ID NO: 330186 - DNA, 30 bp, Artificial Sequence
  Synthetic oligonucleotide
acgtgaactgatactctacggcctcggaac

SEQ ID NO: 330187 - DNA, 30 bp, Artificial Sequence
  Synthetic oligonucleotide
agctcccggaagtggacaggacttcggaac

SEQ ID NO: 330188 - DNA, 30 bp, Artificial Sequence
  Synthetic oligonucleotide
cctggcgcggactgtaatttgccagggaac

SEQ ID NO: 330189 - DNA, 30 bp, Artificial Sequence
  Synthetic oligonucleotide
atatagaaaacttagagatggcacgggaac

SEQ ID NO: 330190 - DNA, 30 bp, Artificial Sequence
  Synthetic oligonucleotide
atgtgggacacactagcttattaggggaac

SEQ ID NO: 330191 - DNA, 30 bp, Artificial Sequence
  Synthetic oligonucleotide
caaaaggtgttaccggtatagccggggaac

SEQ ID NO: 330192 - DNA, 30 bp, Artificial Sequence
  Synthetic oligonucleotide
gatctatgacagtagcactgaatggggaac

SEQ ID NO: 330193 - DNA, 30 bp, Artificial Sequence
  Synthetic oligonucleotide
agggtagaacccaacactggttgtgggaac

SEQ ID NO: 330194 - DNA, 30 bp, Artificial Sequence
  Synthetic oligonucleotide
aaaggaaatttgattcttgtaattgggaac

SEQ ID NO: 330195 - DNA, 30 bp, Artificial Sequence
  Synthetic oligonucleotide
gctccaggtaattggatacaagttgggaac

SEQ ID NO: 330196 - DNA, 30 bp, Artificial Sequence
  Synthetic oligonucleotide
tactcacctggagcatcgtgtgaatggaac

SEQ ID NO: 330197 - DNA, 30 bp, Artificial Sequence
  Synthetic oligonucleotide
ataggcttatgactcccatttcactggaac

SEQ ID NO: 330198 - DNA, 30 bp, Artificial Sequence
  Synthetic oligonucleotide
tccccataataatacagaacagagtggaac

SEQ ID NO: 330199 - DNA, 30 bp, Artificial Sequence
  Synthetic oligonucleotide
aggggcttagccttgcccacctggtggaac

SEQ ID NO: 330200 - DNA, 30 bp, Artificial Sequence
  Synthetic oligonucleotide
tcatctagctaactgtgggcattgtggaac

SEQ ID NO: 330201 - DNA, 30 bp, Artificial Sequence
  Synthetic oligonucleotide
ttagcgtgcgaaggaaacctttgaatgaac

SEQ ID NO: 330202 - DNA, 30 bp, Artificial Sequence
  Synthetic oligonucleotide
agcatatgatgcggttttacagtaatgaac

SEQ ID NO: 330203 - DNA, 30 bp, Artificial Sequence
  Synthetic oligonucleotide
taatcccagggttcaccttttaacatgaac

SEQ ID NO: 330204 - DNA, 30 bp, Artificial Sequence
  Synthetic oligonucleotide
cctttcggccccacgatgtcaacgatgaac

SEQ ID NO: 330205 - DNA, 30 bp, Artificial Sequence
  Synthetic oligonucleotide
aacacgagcaatcgtaccccgccgatgaac

SEQ ID NO: 330206 - DNA, 30 bp, Artificial Sequence
  Synthetic oligonucleotide
cgttctgcacggaaagtcgccgcgatgaac

SEQ ID NO: 330207 - DNA, 30 bp, Artificial Sequence
  Synthetic oligonucleotide
gagtaagtagtgaacgctctttggatgaac

SEQ ID NO: 330208 - DNA, 30 bp, Artificial Sequence
  Synthetic oligonucleotide
ccccctaaagagcacgaacaggctatgaac

SEQ ID NO: 330209 - DNA, 30 bp, Artificial Sequence
  Synthetic oligonucleotide
gcctcaagtcgtgggatcgcgattatgaac

SEQ ID NO: 330210 - DNA, 30 bp, Artificial Sequence
  Synthetic oligonucleotide
agttgtttcacgttgctagaggttatgaac

SEQ ID NO: 330211 - DNA, 30 bp, Artificial Sequence
  Synthetic oligonucleotide
caggaacgacgctgaaattcagccctgaac

SEQ ID NO: 330212 - DNA, 30 bp, Artificial Sequence
  Synthetic oligonucleotide
cccaaggaccatggtgtttttctcctgaac

SEQ ID NO: 330213 - DNA, 30 bp, Artificial Sequence
  Synthetic oligonucleotide
gatggatactttatcatgtgttggctgaac

SEQ ID NO: 330214 - DNA, 30 bp, Artificial Sequence
  Synthetic oligonucleotide
ttagactcggttcaactagctatgctgaac

SEQ ID NO: 330215 - DNA, 30 bp, Artificial Sequence
  Synthetic oligonucleotide
agcccggtaatataaataaacaatctgaac

SEQ ID NO: 330216 - DNA, 30 bp, Artificial Sequence
  Synthetic oligonucleotide
aaccgaaagtggaggctgcactaggtgaac

SEQ ID NO: 330217 - DNA, 30 bp, Artificial Sequence
  Synthetic oligonucleotide
cttctatgcggagtgagaggaagtgtgaac

SEQ ID NO: 330218 - DNA, 30 bp, Artificial Sequence
  Synthetic oligonucleotide
agcttataccaggaatcgtatccattgaac

SEQ ID NO: 330219 - DNA, 30 bp, Artificial Sequence
  Synthetic oligonucleotide
catttgctctcattaaagttgagattgaac

SEQ ID NO: 330220 - DNA, 30 bp, Artificial Sequence
  Synthetic oligonucleotide
acttcggttttaaccgatacgaacttgaac

SEQ ID NO: 330221 - DNA, 30 bp, Artificial Sequence
  Synthetic oligonucleotide
gtgagggacacttcaaacggttacttgaac

SEQ ID NO: 330222 - DNA, 30 bp, Artificial Sequence
  Synthetic oligonucleotide
acttctgtacaatggcgttattatttgaac

SEQ ID NO: 330223 - DNA, 31 bp, Artificial Sequence
  Synthetic oligonucleotide
tcagacctggcgaggttgacgaattttgaac

SEQ ID NO: 330224 - DNA, 30 bp, Artificial Sequence
  Synthetic oligonucleotide
gtaacagaggcctcctcggcggttttgaac

SEQ ID NO: 330225 - DNA, 30 bp, Artificial Sequence
  Synthetic oligonucleotide
tacgattgttcaaatcaatcgcacaataac

SEQ ID NO: 330226 - DNA, 30 bp, Artificial Sequence
  Synthetic oligonucleotide
cttcgggctccttgtcagacgtggaataac

SEQ ID NO: 330227 - DNA, 31 bp, Artificial Sequence
  Synthetic oligonucleotide
cgtacaccgttcggatcgtagctataataac

SEQ ID NO: 330228 - DNA, 30 bp, Artificial Sequence
  Synthetic oligonucleotide
gatctataacagcttgaatttccacataac

SEQ ID NO: 330229 - DNA, 30 bp, Artificial Sequence
  Synthetic oligonucleotide
aatgaacaatcgtagattaagtcacataac

SEQ ID NO: 330230 - DNA, 30 bp, Artificial Sequence
  Synthetic oligonucleotide
taatgcgttaggtagaagatttgacataac

SEQ ID NO: 330231 - DNA, 30 bp, Artificial Sequence
  Synthetic oligonucleotide
agttctatgaataatgcactcacccataac

SEQ ID NO: 330232 - DNA, 29 bp, Artificial Sequence
  Synthetic oligonucleotide
gctatgattgcgtgtaccgtaatcataac

SEQ ID NO: 330233 - DNA, 30 bp, Artificial Sequence
  Synthetic oligonucleotide
tagtgacaacttacgccgacgcatcataac

SEQ ID NO: 330234 - DNA, 30 bp, Artificial Sequence
  Synthetic oligonucleotide
agatactccaggatgctatcacttcataac

SEQ ID NO: 330235 - DNA, 30 bp, Artificial Sequence
  Synthetic oligonucleotide
cggtgtcgcggtacactagtgtgagataac

SEQ ID NO: 330236 - DNA, 30 bp, Artificial Sequence
  Synthetic oligonucleotide
tacctttacaaatcgtcagcactcgataac

SEQ ID NO: 330237 - DNA, 30 bp, Artificial Sequence
  Synthetic oligonucleotide
gtgaatatctcattttgctaccaggataac

SEQ ID NO: 330238 - DNA, 30 bp, Artificial Sequence
  Synthetic oligonucleotide
aaaaccgatatgcacatacgcgtggataac

SEQ ID NO: 330239 - DNA, 30 bp, Artificial Sequence
  Synthetic oligonucleotide
cttttaagctaacatcctgaccatgataac

SEQ ID NO: 330240 - DNA, 30 bp, Artificial Sequence
  Synthetic oligonucleotide
ggatcgagacaacgaatgtctcgtgataac

SEQ ID NO: 330241 - DNA, 30 bp, Artificial Sequence
  Synthetic oligonucleotide
gcatctaacatggttgtgcaaatgtataac

SEQ ID NO: 330242 - DNA, 30 bp, Artificial Sequence
  Synthetic oligonucleotide
agtgcggacatgcaaaatttagcttataac

SEQ ID NO: 330243 - DNA, 30 bp, Artificial Sequence
  Synthetic oligonucleotide
ccatctggcataatcgtggctctaactaac

SEQ ID NO: 330244 - DNA, 30 bp, Artificial Sequence
  Synthetic oligonucleotide
aaaaagacacttgtccacaatggcactaac

SEQ ID NO: 330245 - DNA, 30 bp, Artificial Sequence
  Synthetic oligonucleotide
ccaagaagcacatgtcagggcgcgactaac

SEQ ID NO: 330246 - DNA, 30 bp, Artificial Sequence
  Synthetic oligonucleotide
tgcccttagacggtgcgccactaacctaac

SEQ ID NO: 330247 - DNA, 30 bp, Artificial Sequence
  Synthetic oligonucleotide
gatagatcgcaaataagttgccatcctaac

SEQ ID NO: 330248 - DNA, 30 bp, Artificial Sequence
  Synthetic oligonucleotide
atcgcggaacctcgttacaggtctcctaac

SEQ ID NO: 330249 - DNA, 30 bp, Artificial Sequence
  Synthetic oligonucleotide
ccactaagatagcagcgattagaagctaac

SEQ ID NO: 330250 - DNA, 30 bp, Artificial Sequence
  Synthetic oligonucleotide
tgtgtaaagggagacaatctagtcgctaac

SEQ ID NO: 330251 - DNA, 30 bp, Artificial Sequence
  Synthetic oligonucleotide
tcataccttctagcagacacaaatgctaac

SEQ ID NO: 330252 - DNA, 31 bp, Artificial Sequence
  Synthetic oligonucleotide
gattcgttcgtcgcaaaggaaaacatctaac

SEQ ID NO: 330253 - DNA, 30 bp, Artificial Sequence
  Synthetic oligonucleotide
tccggagcttgcttgaatacgccctctaac

SEQ ID NO: 330254 - DNA, 30 bp, Artificial Sequence
  Synthetic oligonucleotide
ggggaagctggtttattgttaacgtctaac

SEQ ID NO: 330255 - DNA, 30 bp, Artificial Sequence
  Synthetic oligonucleotide
gttgtcatacttgcaataaacgcgtctaac

SEQ ID NO: 330256 - DNA, 30 bp, Artificial Sequence
  Synthetic oligonucleotide
tgccctattaggtaaacggtacggtctaac

SEQ ID NO: 330257 - DNA, 30 bp, Artificial Sequence
  Synthetic oligonucleotide
cgcccgcgagacttaataggggggtctaac

SEQ ID NO: 330258 - DNA, 30 bp, Artificial Sequence
  Synthetic oligonucleotide
gatactgctaaggccttgcagctgtctaac

SEQ ID NO: 330259 - DNA, 30 bp, Artificial Sequence
  Synthetic oligonucleotide
acctgcctacttacaatggcctaaagtaac

SEQ ID NO: 330260 - DNA, 30 bp, Artificial Sequence
  Synthetic oligonucleotide
gtaccggcgcaacttatcggcacaagtaac

SEQ ID NO: 330261 - DNA, 30 bp, Artificial Sequence
  Synthetic oligonucleotide
tttctgaatctatggctgtgcgccagtaac

SEQ ID NO: 330262 - DNA, 30 bp, Artificial Sequence
  Synthetic oligonucleotide
cggccgtcgcagcactaggggacgagtaac

SEQ ID NO: 330263 - DNA, 30 bp, Artificial Sequence
  Synthetic oligonucleotide
gcgccggaatttaacgtcgttaatagtaac

SEQ ID NO: 330264 - DNA, 30 bp, Artificial Sequence
  Synthetic oligonucleotide
tccagctttgacaggcatggcactagtaac

SEQ ID NO: 330265 - DNA, 30 bp, Artificial Sequence
  Synthetic oligonucleotide
ctacggaaggtgatcttacgcattagtaac

SEQ ID NO: 330266 - DNA, 30 bp, Artificial Sequence
  Synthetic oligonucleotide
aacttgtcgggaaccatagatcttagtaac

SEQ ID NO: 330267 - DNA, 30 bp, Artificial Sequence
  Synthetic oligonucleotide
gagtcacattccaccaagccgaaacgtaac

SEQ ID NO: 330268 - DNA, 30 bp, Artificial Sequence
  Synthetic oligonucleotide
ccttgaatgaggctacataccgcccgtaac

SEQ ID NO: 330269 - DNA, 30 bp, Artificial Sequence
  Synthetic oligonucleotide
tagggagccatttatgcgaacagtcgtaac

SEQ ID NO: 330270 - DNA, 30 bp, Artificial Sequence
  Synthetic oligonucleotide
atagctgtgtctacgcccttgtacggtaac

SEQ ID NO: 330271 - DNA, 30 bp, Artificial Sequence
  Synthetic oligonucleotide
ccttattcttcacccgagacacccggtaac

SEQ ID NO: 330272 - DNA, 30 bp, Artificial Sequence
  Synthetic oligonucleotide
ggatgcagtaatcaggtgtgtgccggtaac

SEQ ID NO: 330273 - DNA, 30 bp, Artificial Sequence
  Synthetic oligonucleotide
agcagagtacctacatacgtcttcggtaac

SEQ ID NO: 330274 - DNA, 30 bp, Artificial Sequence
  Synthetic oligonucleotide
gggtgtgtttatttattacagccgggtaac

SEQ ID NO: 330275 - DNA, 30 bp, Artificial Sequence
  Synthetic oligonucleotide
atcatcaatgcgtgttgggcagctggtaac

SEQ ID NO: 330276 - DNA, 30 bp, Artificial Sequence
  Synthetic oligonucleotide
caatacgcgaacaactcgatgccatgtaac

SEQ ID NO: 330277 - DNA, 30 bp, Artificial Sequence
  Synthetic oligonucleotide
aggtagccttagcttgatcgtagatgtaac

SEQ ID NO: 330278 - DNA, 30 bp, Artificial Sequence
  Synthetic oligonucleotide
gggtatttctatttcgagtggggctgtaac

SEQ ID NO: 330279 - DNA, 30 bp, Artificial Sequence
  Synthetic oligonucleotide
gacgaaccctttcggcaccagtagtgtaac

SEQ ID NO: 330280 - DNA, 30 bp, Artificial Sequence
  Synthetic oligonucleotide
gactcttagtatcacgtgaccgcgtgtaac

SEQ ID NO: 330281 - DNA, 30 bp, Artificial Sequence
  Synthetic oligonucleotide
gagaggccacttgggaagtaaaattgtaac

SEQ ID NO: 330282 - DNA, 30 bp, Artificial Sequence
  Synthetic oligonucleotide
gaggggtggatacacgcctgttattgtaac

SEQ ID NO: 330283 - DNA, 30 bp, Artificial Sequence
  Synthetic oligonucleotide
tatcatgtcacaagggatattccttgtaac

SEQ ID NO: 330284 - DNA, 30 bp, Artificial Sequence
  Synthetic oligonucleotide
caccatacatagagcggaataagttgtaac

SEQ ID NO: 330285 - DNA, 30 bp, Artificial Sequence
  Synthetic oligonucleotide
ccagatcccggtaaacacataagttgtaac

SEQ ID NO: 330286 - DNA, 30 bp, Artificial Sequence
  Synthetic oligonucleotide
tcctacactcgggtgaaaattcgttgtaac

SEQ ID NO: 330287 - DNA, 30 bp, Artificial Sequence
  Synthetic oligonucleotide
gtcaacagctatactgactaaagaattaac

SEQ ID NO: 330288 - DNA, 30 bp, Artificial Sequence
  Synthetic oligonucleotide
taaaccggttaggagctcatagacattaac

SEQ ID NO: 330289 - DNA, 30 bp, Artificial Sequence
  Synthetic oligonucleotide
ccggcggttaaataacagtcacccattaac

SEQ ID NO: 330290 - DNA, 30 bp, Artificial Sequence
  Synthetic oligonucleotide
agtcgcaaggggctccgactgttcattaac

SEQ ID NO: 330291 - DNA, 30 bp, Artificial Sequence
  Synthetic oligonucleotide
tgaacaccgtgcttactggagaagattaac

SEQ ID NO: 330292 - DNA, 30 bp, Artificial Sequence
  Synthetic oligonucleotide
tgtaactccgccgtcaccggacaacttaac

SEQ ID NO: 330293 - DNA, 30 bp, Artificial Sequence
  Synthetic oligonucleotide
atgtaggcatttcgtcgggccctacttaac

SEQ ID NO: 330294 - DNA, 30 bp, Artificial Sequence
  Synthetic oligonucleotide
gccttgcgtgcgtcaactgcgctacttaac

SEQ ID NO: 330295 - DNA, 30 bp, Artificial Sequence
  Synthetic oligonucleotide
tggataggctggttgatggcaccgcttaac

SEQ ID NO: 330296 - DNA, 30 bp, Artificial Sequence
  Synthetic oligonucleotide
agtcgggtggcttcgctacctaggcttaac

SEQ ID NO: 330297 - DNA, 30 bp, Artificial Sequence
  Synthetic oligonucleotide
gctccggtggacatgccgatgcatcttaac

SEQ ID NO: 330298 - DNA, 30 bp, Artificial Sequence
  Synthetic oligonucleotide
cctattttgagcgttttcagagctcttaac

SEQ ID NO: 330299 - DNA, 30 bp, Artificial Sequence
  Synthetic oligonucleotide
gcgcgctcgtaagcttatgttcaagttaac

SEQ ID NO: 330300 - DNA, 30 bp, Artificial Sequence
  Synthetic oligonucleotide
acccaacgttggattcctacagcagttaac

SEQ ID NO: 330301 - DNA, 30 bp, Artificial Sequence
  Synthetic oligonucleotide
attaatctcttggaatgcgttaacgttaac

SEQ ID NO: 330302 - DNA, 30 bp, Artificial Sequence
  Synthetic oligonucleotide
ttcctgaaccagggagcgcttagtgttaac

SEQ ID NO: 330303 - DNA, 30 bp, Artificial Sequence
  Synthetic oligonucleotide
caggtcctttaggcgttattgattgttaac

SEQ ID NO: 330304 - DNA, 30 bp, Artificial Sequence
  Synthetic oligonucleotide
aactttacaagttcaaggtccaaatttaac

SEQ ID NO: 330305 - DNA, 30 bp, Artificial Sequence
  Synthetic oligonucleotide
gaacggcgagcagtacaaacgatatttaac

SEQ ID NO: 330306 - DNA, 30 bp, Artificial Sequence
  Synthetic oligonucleotide
ccagggtttgccattcgccacttatttaac

SEQ ID NO: 330307 - DNA, 30 bp, Artificial Sequence
  Synthetic oligonucleotide
aagtctctgtaattgcttaagacgtttaac

SEQ ID NO: 330308 - DNA, 30 bp, Artificial Sequence
  Synthetic oligonucleotide
ctgtttgtattacaggtaataaaaaaacac

SEQ ID NO: 330309 - DNA, 30 bp, Artificial Sequence
  Synthetic oligonucleotide
tctaggggaaaattcttgataaagaaacac

SEQ ID NO: 330310 - DNA, 30 bp, Artificial Sequence
  Synthetic oligonucleotide
tgatgtcagggttagaccgcgaagaaacac

SEQ ID NO: 330311 - DNA, 30 bp, Artificial Sequence
  Synthetic oligonucleotide
tacaccctaaactatagttcggataaacac

SEQ ID NO: 330312 - DNA, 30 bp, Artificial Sequence
  Synthetic oligonucleotide
attcagttctggattcgatagactaaacac

SEQ ID NO: 330313 - DNA, 30 bp, Artificial Sequence
  Synthetic oligonucleotide
cacctagttgctggccgtctggttaaacac

SEQ ID NO: 330314 - DNA, 30 bp, Artificial Sequence
  Synthetic oligonucleotide
cgaaggctatatgtgctgtcgtttaaacac

SEQ ID NO: 330315 - DNA, 30 bp, Artificial Sequence
  Synthetic oligonucleotide
ttttcactagtaacgtcataataacaacac

SEQ ID NO: 330316 - DNA, 30 bp, Artificial Sequence
  Synthetic oligonucleotide
tagggctgcccagtatcgtgaccacaacac

SEQ ID NO: 330317 - DNA, 30 bp, Artificial Sequence
  Synthetic oligonucleotide
gacaagtcgttggttacctgggcacaacac

SEQ ID NO: 330318 - DNA, 30 bp, Artificial Sequence
  Synthetic oligonucleotide
agttcgtcgccattcagattgtgacaacac

SEQ ID NO: 330319 - DNA, 30 bp, Artificial Sequence
  Synthetic oligonucleotide
gcaatgcaccaccgctcagcagggcaacac

SEQ ID NO: 330320 - DNA, 30 bp, Artificial Sequence
  Synthetic oligonucleotide
agttggcatatccggcagaatggcgaacac

SEQ ID NO: 330321 - DNA, 30 bp, Artificial Sequence
  Synthetic oligonucleotide
tcagagctacgaccgctctattgcgaacac

SEQ ID NO: 330322 - DNA, 30 bp, Artificial Sequence
  Synthetic oligonucleotide
gatgggtcgtcaggtaactagacggaacac

SEQ ID NO: 330323 - DNA, 30 bp, Artificial Sequence
  Synthetic oligonucleotide
tgtgctcccgattgtatgagctcggaacac

SEQ ID NO: 330324 - DNA, 30 bp, Artificial Sequence
  Synthetic oligonucleotide
cccgcagaggctattcccgagatggaacac

SEQ ID NO: 330325 - DNA, 31 bp, Artificial Sequence
  Synthetic oligonucleotide
agctgtctgggaacatgaggtatatgaacac

SEQ ID NO: 330326 - DNA, 30 bp, Artificial Sequence
  Synthetic oligonucleotide
ggcatatgatgtgatcttaaagaataacac

SEQ ID NO: 330327 - DNA, 30 bp, Artificial Sequence
  Synthetic oligonucleotide
aaaccaagacccgttgcaagaccataacac

SEQ ID NO: 330328 - DNA, 30 bp, Artificial Sequence
  Synthetic oligonucleotide
tgtgcaaaggcttggtcagagtcataacac

SEQ ID NO: 330329 - DNA, 30 bp, Artificial Sequence
  Synthetic oligonucleotide
gcaatgtagtattacgcttttgagtaacac

SEQ ID NO: 330330 - DNA, 30 bp, Artificial Sequence
  Synthetic oligonucleotide
ggatctgtgactgacagtggaccgtaacac

SEQ ID NO: 330331 - DNA, 30 bp, Artificial Sequence
  Synthetic oligonucleotide
cgtcaaccgtcgatgcacccactgtaacac

SEQ ID NO: 330332 - DNA, 30 bp, Artificial Sequence
  Synthetic oligonucleotide
cggagctagagacaacggagtggttaacac

SEQ ID NO: 330333 - DNA, 30 bp, Artificial Sequence
  Synthetic oligonucleotide
cgtagataaggtgattaataaacaacacac

SEQ ID NO: 330334 - DNA, 30 bp, Artificial Sequence
  Synthetic oligonucleotide
atatgatcagcgaaaggttcccccacacac

SEQ ID NO: 330335 - DNA, 30 bp, Artificial Sequence
  Synthetic oligonucleotide
cttgcggaaaattccgcaggatcgacacac

SEQ ID NO: 330336 - DNA, 30 bp, Artificial Sequence
  Synthetic oligonucleotide
caatgcgccttctaacgcatcgggacacac

SEQ ID NO: 330337 - DNA, 30 bp, Artificial Sequence
  Synthetic oligonucleotide
gggtccagcaacatgaggatttatacacac

SEQ ID NO: 330338 - DNA, 30 bp, Artificial Sequence
  Synthetic oligonucleotide
tgacatcttatcacttcgtcgcgtacacac

SEQ ID NO: 330339 - DNA, 30 bp, Artificial Sequence
  Synthetic oligonucleotide
ctcctcgtcccatcgtactattttacacac

SEQ ID NO: 330340 - DNA, 30 bp, Artificial Sequence
  Synthetic oligonucleotide
aggaagcgaaccgatagtccgcgcccacac

SEQ ID NO: 330341 - DNA, 30 bp, Artificial Sequence
  Synthetic oligonucleotide
tatgtccgacgcgctccccccggcccacac

SEQ ID NO: 330342 - DNA, 31 bp, Artificial Sequence
  Synthetic oligonucleotide
gagttcacaaggacgcaatcggctcccacac

SEQ ID NO: 330343 - DNA, 30 bp, Artificial Sequence
  Synthetic oligonucleotide
gcgtagtatcttcgcttgcaagagccacac

SEQ ID NO: 330344 - DNA, 30 bp, Artificial Sequence
  Synthetic oligonucleotide
ttcaaacagtcgtggaagtcttagccacac

SEQ ID NO: 330345 - DNA, 30 bp, Artificial Sequence
  Synthetic oligonucleotide
atatattgagaaaacttgcgcccgccacac

SEQ ID NO: 330346 - DNA, 30 bp, Artificial Sequence
  Synthetic oligonucleotide
ttggtgtttccaagcttacgatcgccacac

SEQ ID NO: 330347 - DNA, 30 bp, Artificial Sequence
  Synthetic oligonucleotide
tatctggcactatataatgggcatccacac

SEQ ID NO: 330348 - DNA, 30 bp, Artificial Sequence
  Synthetic oligonucleotide
agattacatgacagcgcgtatattccacac

SEQ ID NO: 330349 - DNA, 30 bp, Artificial Sequence
  Synthetic oligonucleotide
tagctcagaaattagtcgattaaagcacac

SEQ ID NO: 330350 - DNA, 30 bp, Artificial Sequence
  Synthetic oligonucleotide
aagaagacgctgggaggcatttgagcacac

SEQ ID NO: 330351 - DNA, 31 bp, Artificial Sequence
  Synthetic oligonucleotide
actactcgctcctgtatgcgcgatcgcacac

SEQ ID NO: 330352 - DNA, 30 bp, Artificial Sequence
  Synthetic oligonucleotide
tataagtccgagccacgtatatcggcacac

SEQ ID NO: 330353 - DNA, 30 bp, Artificial Sequence
  Synthetic oligonucleotide
tgccacgtcaacccacgctggggggcacac

SEQ ID NO: 330354 - DNA, 30 bp, Artificial Sequence
  Synthetic oligonucleotide
ttagagagtattttatccggattggcacac

SEQ ID NO: 330355 - DNA, 30 bp, Artificial Sequence
  Synthetic oligonucleotide
aaccgggattcatgtagcatatgtgcacac

SEQ ID NO: 330356 - DNA, 30 bp, Artificial Sequence
  Synthetic oligonucleotide
tggcattcgtacaagaaggagcaatcacac

SEQ ID NO: 330357 - DNA, 30 bp, Artificial Sequence
  Synthetic oligonucleotide
ctctggacctatacagttgttggatcacac

SEQ ID NO: 330358 - DNA, 30 bp, Artificial Sequence
  Synthetic oligonucleotide
ctttagaccgtgtccgagcacacctcacac

SEQ ID NO: 330359 - DNA, 30 bp, Artificial Sequence
  Synthetic oligonucleotide
agtgggagtggcccgactgccacctcacac

SEQ ID NO: 330360 - DNA, 30 bp, Artificial Sequence
  Synthetic oligonucleotide
gtggacacagatcctgggagatcctcacac

SEQ ID NO: 330361 - DNA, 30 bp, Artificial Sequence
  Synthetic oligonucleotide
aaatggatatgcgtgttgaattgctcacac

SEQ ID NO: 330362 - DNA, 30 bp, Artificial Sequence
  Synthetic oligonucleotide
tgtgcgtacttgcaggcaatgttctcacac

SEQ ID NO: 330363 - DNA, 30 bp, Artificial Sequence
  Synthetic oligonucleotide
tagttagagagattatctgaaccgtcacac

SEQ ID NO: 330364 - DNA, 30 bp, Artificial Sequence
  Synthetic oligonucleotide
gaactcctctacgtcagactctggtcacac

SEQ ID NO: 330365 - DNA, 30 bp, Artificial Sequence
  Synthetic oligonucleotide
aaaggcgtgtttggcctcgtcgacagacac

SEQ ID NO: 330366 - DNA, 30 bp, Artificial Sequence
  Synthetic oligonucleotide
tagtaggttgttactgccggatggagacac

SEQ ID NO: 330367 - DNA, 30 bp, Artificial Sequence
  Synthetic oligonucleotide
agccacaggcgaatttatctgagccgacac

SEQ ID NO: 330368 - DNA, 30 bp, Artificial Sequence
  Synthetic oligonucleotide
cttgtcgtagataacaaatctatccgacac

SEQ ID NO: 330369 - DNA, 30 bp, Artificial Sequence
  Synthetic oligonucleotide
agtataattatgggttaagggcagcgacac

SEQ ID NO: 330370 - DNA, 30 bp, Artificial Sequence
  Synthetic oligonucleotide
atatcacagcagattgtgtaataaggacac

SEQ ID NO: 330371 - DNA, 30 bp, Artificial Sequence
  Synthetic oligonucleotide
caatcattgtggcactcttacggaggacac

SEQ ID NO: 330372 - DNA, 30 bp, Artificial Sequence
  Synthetic oligonucleotide
gtaccagcaaatatatctcgggtaggacac

SEQ ID NO: 330373 - DNA, 30 bp, Artificial Sequence
  Synthetic oligonucleotide
tgctcttgagcgctgagttacttaggacac

SEQ ID NO: 330374 - DNA, 30 bp, Artificial Sequence
  Synthetic oligonucleotide
ctgctttcggcgagagatacaatcggacac

SEQ ID NO: 330375 - DNA, 30 bp, Artificial Sequence
  Synthetic oligonucleotide
ctctagtgtagtcgaaacggtttgggacac

SEQ ID NO: 330376 - DNA, 30 bp, Artificial Sequence
  Synthetic oligonucleotide
taatggcttgcactgtggttctatggacac

SEQ ID NO: 330377 - DNA, 30 bp, Artificial Sequence
  Synthetic oligonucleotide
cgttagggatagaagcgttagagtggacac

SEQ ID NO: 330378 - DNA, 30 bp, Artificial Sequence
  Synthetic oligonucleotide
ttacgtaccaactctggaggcgaatgacac

SEQ ID NO: 330379 - DNA, 30 bp, Artificial Sequence
  Synthetic oligonucleotide
cagtaagtgatatggcggcagtcatgacac

SEQ ID NO: 330380 - DNA, 30 bp, Artificial Sequence
  Synthetic oligonucleotide
gaatccaggacctgcaggatcgtctgacac

SEQ ID NO: 330381 - DNA, 31 bp, Artificial Sequence
  Synthetic oligonucleotide
aaattatgccgggtagcgtcgcgggtgacac

SEQ ID NO: 330382 - DNA, 30 bp, Artificial Sequence
  Synthetic oligonucleotide
ctggtgcaaaaacccaatagttcttgacac

SEQ ID NO: 330383 - DNA, 30 bp, Artificial Sequence
  Synthetic oligonucleotide
ctattatgagcaacgaaggcgttttgacac

SEQ ID NO: 330384 - DNA, 30 bp, Artificial Sequence
  Synthetic oligonucleotide
aggttctggatcccctggttgtaaatacac

SEQ ID NO: 330385 - DNA, 30 bp, Artificial Sequence
  Synthetic oligonucleotide
ctagggtcctaaatatataaccacatacac

SEQ ID NO: 330386 - DNA, 30 bp, Artificial Sequence
  Synthetic oligonucleotide
cgggacgcgcctatcgtgataacgatacac

SEQ ID NO: 330387 - DNA, 30 bp, Artificial Sequence
  Synthetic oligonucleotide
gaaatcaccctgcgtgtaggccgtatacac

SEQ ID NO: 330388 - DNA, 30 bp, Artificial Sequence
  Synthetic oligonucleotide
gaactgggtaaagcgtcatggcgactacac

SEQ ID NO: 330389 - DNA, 30 bp, Artificial Sequence
  Synthetic oligonucleotide
tatcaccaacaactgggctcggaagtacac

SEQ ID NO: 330390 - DNA, 30 bp, Artificial Sequence
  Synthetic oligonucleotide
ggcatctcgtcatcaacgtctgaagtacac

SEQ ID NO: 330391 - DNA, 30 bp, Artificial Sequence
  Synthetic oligonucleotide
cgagatttctttaagggggccggagtacac

SEQ ID NO: 330392 - DNA, 30 bp, Artificial Sequence
  Synthetic oligonucleotide
ccaattacaacagcacaccccttagtacac

SEQ ID NO: 330393 - DNA, 30 bp, Artificial Sequence
  Synthetic oligonucleotide
ccgtaccccgcttcctcaatgaacgtacac

SEQ ID NO: 330394 - DNA, 30 bp, Artificial Sequence
  Synthetic oligonucleotide
aggtaaccattcttttttcaagacgtacac

SEQ ID NO: 330395 - DNA, 30 bp, Artificial Sequence
  Synthetic oligonucleotide
ggatgctaacttcaaaccgactccgtacac

SEQ ID NO: 330396 - DNA, 30 bp, Artificial Sequence
  Synthetic oligonucleotide
aagcatggcccttcacagcgcttcgtacac

SEQ ID NO: 330397 - DNA, 30 bp, Artificial Sequence
  Synthetic oligonucleotide
gagatatggatgaccgtatattcggtacac

SEQ ID NO: 330398 - DNA, 30 bp, Artificial Sequence
  Synthetic oligonucleotide
ctgggaaggtcgacaggtgtaactgtacac

SEQ ID NO: 330399 - DNA, 30 bp, Artificial Sequence
  Synthetic oligonucleotide
agacacaactttggtttgaactttgtacac

SEQ ID NO: 330400 - DNA, 30 bp, Artificial Sequence
  Synthetic oligonucleotide
ccacagacaaatggcaacttttaattacac

SEQ ID NO: 330401 - DNA, 30 bp, Artificial Sequence
  Synthetic oligonucleotide
taaaccctggcgcctagcggctgattacac

SEQ ID NO: 330402 - DNA, 30 bp, Artificial Sequence
  Synthetic oligonucleotide
aaggaaatgtgttggtcgacttacttacac

SEQ ID NO: 330403 - DNA, 30 bp, Artificial Sequence
  Synthetic oligonucleotide
ctggtactacttagcagcggaggcttacac

SEQ ID NO: 330404 - DNA, 30 bp, Artificial Sequence
  Synthetic oligonucleotide
ggttcataactagtgaggccatagttacac

SEQ ID NO: 330405 - DNA, 30 bp, Artificial Sequence
  Synthetic oligonucleotide
tctgactgtcgttaaccgttaagtttacac

SEQ ID NO: 330406 - DNA, 29 bp, Artificial Sequence
  Synthetic oligonucleotide
tattaagaaattaagtaagaggaaaccac

SEQ ID NO: 330407 - DNA, 30 bp, Artificial Sequence
  Synthetic oligonucleotide
tgatgtagatagatcaccatctctaaccac

SEQ ID NO: 330408 - DNA, 30 bp, Artificial Sequence
  Synthetic oligonucleotide
aatgatataccagtcaagtcatttaaccac

SEQ ID NO: 330409 - DNA, 30 bp, Artificial Sequence
  Synthetic oligonucleotide
gtcggagggttccgggattttagacaccac

SEQ ID NO: 330410 - DNA, 30 bp, Artificial Sequence
  Synthetic oligonucleotide
gccattccaatcaaataaaacttacaccac

SEQ ID NO: 330411 - DNA, 30 bp, Artificial Sequence
  Synthetic oligonucleotide
ccgggtgaagaagaatataagacgcaccac

SEQ ID NO: 330412 - DNA, 30 bp, Artificial Sequence
  Synthetic oligonucleotide
gctttgcgacaggtgcgatagtcgcaccac

SEQ ID NO: 330413 - DNA, 30 bp, Artificial Sequence
  Synthetic oligonucleotide
taagtagaggtaatagcgcatatgcaccac

SEQ ID NO: 330414 - DNA, 30 bp, Artificial Sequence
  Synthetic oligonucleotide
tcgctgggctttgtgtgcaaacctcaccac

SEQ ID NO: 330415 - DNA, 30 bp, Artificial Sequence
  Synthetic oligonucleotide
gacttaatagtgtgtcgggtcgctcaccac

SEQ ID NO: 330416 - DNA, 30 bp, Artificial Sequence
  Synthetic oligonucleotide
gctggagttttacccacatataaagaccac

SEQ ID NO: 330417 - DNA, 30 bp, Artificial Sequence
  Synthetic oligonucleotide
tccggagggaatggacataatggagaccac

SEQ ID NO: 330418 - DNA, 30 bp, Artificial Sequence
  Synthetic oligonucleotide
cggagggtttctgacctagagcccgaccac

SEQ ID NO: 330419 - DNA, 30 bp, Artificial Sequence
  Synthetic oligonucleotide
atcgggtattgcaaaggagggagcgaccac

SEQ ID NO: 330420 - DNA, 30 bp, Artificial Sequence
  Synthetic oligonucleotide
gcactgtggggttgactcgcaccggaccac

SEQ ID NO: 330421 - DNA, 30 bp, Artificial Sequence
  Synthetic oligonucleotide
gtagacaggcatgccggtatgggggaccac

SEQ ID NO: 330422 - DNA, 30 bp, Artificial Sequence
  Synthetic oligonucleotide
taaagcgtctggactctttaagttgaccac

SEQ ID NO: 330423 - DNA, 30 bp, Artificial Sequence
  Synthetic oligonucleotide
ttcgtagggtgtcaaccccagttataccac

SEQ ID NO: 330424 - DNA, 30 bp, Artificial Sequence
  Synthetic oligonucleotide
gcgcatagccgttggcaacagtattaccac

SEQ ID NO: 330425 - DNA, 30 bp, Artificial Sequence
  Synthetic oligonucleotide
gctcgatggcccttggttccgtattaccac

SEQ ID NO: 330426 - DNA, 30 bp, Artificial Sequence
  Synthetic oligonucleotide
taagggaactataggacgcaacgttaccac

SEQ ID NO: 330427 - DNA, 30 bp, Artificial Sequence
  Synthetic oligonucleotide
gcagtactgggatcttgcgggaacacccac

SEQ ID NO: 330428 - DNA, 30 bp, Artificial Sequence
  Synthetic oligonucleotide
gcgggaactcggttcaggctacggacccac

SEQ ID NO: 330429 - DNA, 30 bp, Artificial Sequence
  Synthetic oligonucleotide
cggggttatctagacaattcagggacccac

SEQ ID NO: 330430 - DNA, 30 bp, Artificial Sequence
  Synthetic oligonucleotide
aaactagcgcaaggaacgagagtgacccac

SEQ ID NO: 330431 - DNA, 30 bp, Artificial Sequence
  Synthetic oligonucleotide
aagcgttagagccgtccagatattacccac

SEQ ID NO: 330432 - DNA, 30 bp, Artificial Sequence
  Synthetic oligonucleotide
aggctcggatcttagttttcgcgaccccac

SEQ ID NO: 330433 - DNA, 30 bp, Artificial Sequence
  Synthetic oligonucleotide
tcggccatttcatcagctgtcccgccccac

SEQ ID NO: 330434 - DNA, 30 bp, Artificial Sequence
  Synthetic oligonucleotide
agcctccacagaagtcttactcaagcccac

SEQ ID NO: 330435 - DNA, 30 bp, Artificial Sequence
  Synthetic oligonucleotide
agggtctaacatcaggagctgatagcccac

SEQ ID NO: 330436 - DNA, 30 bp, Artificial Sequence
  Synthetic oligonucleotide
aggcgtgcgagtgtggtgatattagcccac

SEQ ID NO: 330437 - DNA, 30 bp, Artificial Sequence
  Synthetic oligonucleotide
tgtaaagaatattcccggcgcgccgcccac

SEQ ID NO: 330438 - DNA, 30 bp, Artificial Sequence
  Synthetic oligonucleotide
gcaggcagtagcgccagttcacgcgcccac

SEQ ID NO: 330439 - DNA, 30 bp, Artificial Sequence
  Synthetic oligonucleotide
tgcttatcagattagcggctataggcccac

SEQ ID NO: 330440 - DNA, 30 bp, Artificial Sequence
  Synthetic oligonucleotide
gtctgaagggggagatatatgggggcccac

SEQ ID NO: 330441 - DNA, 30 bp, Artificial Sequence
  Synthetic oligonucleotide
atacagctgggtcatcatcctggggcccac

SEQ ID NO: 330442 - DNA, 30 bp, Artificial Sequence
  Synthetic oligonucleotide
gcgcaaatctactggaacgcgtgtgcccac

SEQ ID NO: 330443 - DNA, 30 bp, Artificial Sequence
  Synthetic oligonucleotide
tttagacggtgcatacgaacgattgcccac

SEQ ID NO: 330444 - DNA, 30 bp, Artificial Sequence
  Synthetic oligonucleotide
ttccatccagctgagtatcagcaatcccac

SEQ ID NO: 330445 - DNA, 30 bp, Artificial Sequence
  Synthetic oligonucleotide
caaatgtggaggagaaattggggatcccac

SEQ ID NO: 330446 - DNA, 30 bp, Artificial Sequence
  Synthetic oligonucleotide
cgacatcattggattacatagtgatcccac

SEQ ID NO: 330447 - DNA, 30 bp, Artificial Sequence
  Synthetic oligonucleotide
gttctacgcgatttgtaagacatatcccac

SEQ ID NO: 330448 - DNA, 30 bp, Artificial Sequence
  Synthetic oligonucleotide
actcaaggcaaagggtttgtactttcccac

SEQ ID NO: 330449 - DNA, 30 bp, Artificial Sequence
  Synthetic oligonucleotide
ttggttatatctgtttgttctcagagccac

SEQ ID NO: 330450 - DNA, 30 bp, Artificial Sequence
  Synthetic oligonucleotide
aaattgagaaggctgtcaggcccgagccac

SEQ ID NO: 330451 - DNA, 30 bp, Artificial Sequence
  Synthetic oligonucleotide
gacggaacgtgaatgtgctccgcgagccac

SEQ ID NO: 330452 - DNA, 30 bp, Artificial Sequence
  Synthetic oligonucleotide
gcatatgattagttttaaccttctagccac

SEQ ID NO: 330453 - DNA, 30 bp, Artificial Sequence
  Synthetic oligonucleotide
gccagtatacttacaagtggagaacgccac

SEQ ID NO: 330454 - DNA, 30 bp, Artificial Sequence
  Synthetic oligonucleotide
tacaaacattattgcgtagcttttcgccac

SEQ ID NO: 330455 - DNA, 30 bp, Artificial Sequence
  Synthetic oligonucleotide
ccaggtggggaggccagggctgcaggccac

SEQ ID NO: 330456 - DNA, 30 bp, Artificial Sequence
  Synthetic oligonucleotide
ccacggcgtccgtagaacgcgctgggccac

SEQ ID NO: 330457 - DNA, 30 bp, Artificial Sequence
  Synthetic oligonucleotide
attatggcacactgatacctccactgccac

SEQ ID NO: 330458 - DNA, 30 bp, Artificial Sequence
  Synthetic oligonucleotide
ccgttaattccgggataatcgtcaatccac

SEQ ID NO: 330459 - DNA, 30 bp, Artificial Sequence
  Synthetic oligonucleotide
ccgccggtaaaagcttatatatgcatccac

SEQ ID NO: 330460 - DNA, 30 bp, Artificial Sequence
  Synthetic oligonucleotide
tgacagtcactgtgcgtatctatcatccac

SEQ ID NO: 330461 - DNA, 30 bp, Artificial Sequence
  Synthetic oligonucleotide
gataagtcatcagagactgcattgatccac

SEQ ID NO: 330462 - DNA, 30 bp, Artificial Sequence
  Synthetic oligonucleotide
tccatggtcatgtcgattcctaaactccac

SEQ ID NO: 330463 - DNA, 30 bp, Artificial Sequence
  Synthetic oligonucleotide
caacgtggttttcaggcaaatacactccac

SEQ ID NO: 330464 - DNA, 30 bp, Artificial Sequence
  Synthetic oligonucleotide
ttggtgtctaaaagtactgattacctccac

SEQ ID NO: 330465 - DNA, 30 bp, Artificial Sequence
  Synthetic oligonucleotide
gcgtcgaggggcggtactggctgcctccac

SEQ ID NO: 330466 - DNA, 30 bp, Artificial Sequence
  Synthetic oligonucleotide
catgtcgagcagttgaatctaatgctccac

SEQ ID NO: 330467 - DNA, 30 bp, Artificial Sequence
  Synthetic oligonucleotide
gccaaatggaaaacagtagcgccagtccac

SEQ ID NO: 330468 - DNA, 30 bp, Artificial Sequence
  Synthetic oligonucleotide
gatagcccgtattatgagcgtaacgtccac

SEQ ID NO: 330469 - DNA, 30 bp, Artificial Sequence
  Synthetic oligonucleotide
tatctactgagtggcacgataggcgtccac

SEQ ID NO: 330470 - DNA, 30 bp, Artificial Sequence
  Synthetic oligonucleotide
gaccagggtccacactcacaacatgtccac

SEQ ID NO: 330471 - DNA, 30 bp, Artificial Sequence
  Synthetic oligonucleotide
ccaggtccgtagtatagtggtgttgtccac

SEQ ID NO: 330472 - DNA, 30 bp, Artificial Sequence
  Synthetic oligonucleotide
tgtattagctagcacagtctgtcattccac

SEQ ID NO: 330473 - DNA, 30 bp, Artificial Sequence
  Synthetic oligonucleotide
ctcccggagatctgtcctggcaacttccac

SEQ ID NO: 330474 - DNA, 30 bp, Artificial Sequence
  Synthetic oligonucleotide
catttcaagactaaacgaagctacttccac

SEQ ID NO: 330475 - DNA, 30 bp, Artificial Sequence
  Synthetic oligonucleotide
atttcgatacgggggacggtaacgttccac

SEQ ID NO: 330476 - DNA, 30 bp, Artificial Sequence
  Synthetic oligonucleotide
ccatgattgctttcccaatctgaaaagcac

SEQ ID NO: 330477 - DNA, 30 bp, Artificial Sequence
  Synthetic oligonucleotide
taaccgctccgtcgctgtgatgcaaagcac

SEQ ID NO: 330478 - DNA, 30 bp, Artificial Sequence
  Synthetic oligonucleotide
gttgctgcggacctcattggcggaaagcac

SEQ ID NO: 330479 - DNA, 30 bp, Artificial Sequence
  Synthetic oligonucleotide
ttactcatccaattgtgtttacttaagcac

SEQ ID NO: 330480 - DNA, 30 bp, Artificial Sequence
  Synthetic oligonucleotide
gatgagggagactcacggcttacacagcac

SEQ ID NO: 330481 - DNA, 30 bp, Artificial Sequence
  Synthetic oligonucleotide
atgcgtcgttgcaatctggacgcacagcac

SEQ ID NO: 330482 - DNA, 30 bp, Artificial Sequence
  Synthetic oligonucleotide
tgtccaggtcggtggtcctgggcacagcac

SEQ ID NO: 330483 - DNA, 30 bp, Artificial Sequence
  Synthetic oligonucleotide
gtgtaatagacgatgatgtaaggacagcac

SEQ ID NO: 330484 - DNA, 30 bp, Artificial Sequence
  Synthetic oligonucleotide
attctatcgactgcctgtggaaaccagcac

SEQ ID NO: 330485 - DNA, 30 bp, Artificial Sequence
  Synthetic oligonucleotide
tcggttcagttgaccatgaaggaccagcac

SEQ ID NO: 330486 - DNA, 30 bp, Artificial Sequence
  Synthetic oligonucleotide
cgacacgatggggatactcgagtccagcac

SEQ ID NO: 330487 - DNA, 30 bp, Artificial Sequence
  Synthetic oligonucleotide
gtacgcataaaggtttctcagcaagagcac

SEQ ID NO: 330488 - DNA, 29 bp, Artificial Sequence
  Synthetic oligonucleotide
taatagatcggcgccacaccccggagcac

SEQ ID NO: 330489 - DNA, 30 bp, Artificial Sequence
  Synthetic oligonucleotide
acagtggtacccagagcggaggaatagcac

SEQ ID NO: 330490 - DNA, 30 bp, Artificial Sequence
  Synthetic oligonucleotide
cgctgaaagcccgaaacttgtttatagcac

SEQ ID NO: 330491 - DNA, 30 bp, Artificial Sequence
  Synthetic oligonucleotide
ccaggagacctgggtgggggtacgtagcac

SEQ ID NO: 330492 - DNA, 30 bp, Artificial Sequence
  Synthetic oligonucleotide
cacttacttattaaagctccaaggtagcac

SEQ ID NO: 330493 - DNA, 30 bp, Artificial Sequence
  Synthetic oligonucleotide
ggctttggagcggggattagccaaacgcac

SEQ ID NO: 330494 - DNA, 30 bp, Artificial Sequence
  Synthetic oligonucleotide
actgtccttaggagcagatacgcaacgcac

SEQ ID NO: 330495 - DNA, 30 bp, Artificial Sequence
  Synthetic oligonucleotide
tcgtttactgatcgtcatggccccacgcac

SEQ ID NO: 330496 - DNA, 30 bp, Artificial Sequence
  Synthetic oligonucleotide
cattaagtaatagagagaagctgtacgcac

SEQ ID NO: 330497 - DNA, 30 bp, Artificial Sequence
  Synthetic oligonucleotide
tatcgacatccgccctgcggagccccgcac

SEQ ID NO: 330498 - DNA, 30 bp, Artificial Sequence
  Synthetic oligonucleotide
gtccacctgcaaggatgtttaaagccgcac

SEQ ID NO: 330499 - DNA, 30 bp, Artificial Sequence
  Synthetic oligonucleotide
actctagctggcgcacgcaactagccgcac

SEQ ID NO: 330500 - DNA, 30 bp, Artificial Sequence
  Synthetic oligonucleotide
attggtgatagggcatacataccgccgcac

SEQ ID NO: 330501 - DNA, 30 bp, Artificial Sequence
  Synthetic oligonucleotide
caccgtgtcgcccgggacctcaggccgcac

SEQ ID NO: 330502 - DNA, 30 bp, Artificial Sequence
  Synthetic oligonucleotide
gtgaaagagaggtctttgcgaaatccgcac

SEQ ID NO: 330503 - DNA, 30 bp, Artificial Sequence
  Synthetic oligonucleotide
aaccgggattttatgcggagggtagcgcac

SEQ ID NO: 330504 - DNA, 30 bp, Artificial Sequence
  Synthetic oligonucleotide
catctatggcaaaccggataatacgcgcac

SEQ ID NO: 330505 - DNA, 30 bp, Artificial Sequence
  Synthetic oligonucleotide
gtatactgtaggcggcccactcgtgcgcac

SEQ ID NO: 330506 - DNA, 30 bp, Artificial Sequence
  Synthetic oligonucleotide
agcgccatcagtggtatagaggcatcgcac

SEQ ID NO: 330507 - DNA, 30 bp, Artificial Sequence
  Synthetic oligonucleotide
atcctcattacttaacactcttcgtcgcac

SEQ ID NO: 330508 - DNA, 30 bp, Artificial Sequence
  Synthetic oligonucleotide
cctcgctcaaggttcacaatggcttcgcac

SEQ ID NO: 330509 - DNA, 30 bp, Artificial Sequence
  Synthetic oligonucleotide
ggcaccaagtctggtataattacaaggcac

SEQ ID NO: 330510 - DNA, 30 bp, Artificial Sequence
  Synthetic oligonucleotide
tatgaatcctgtctctgagactacaggcac

SEQ ID NO: 330511 - DNA, 30 bp, Artificial Sequence
  Synthetic oligonucleotide
ctgaccgggtgaacttcagtaccgaggcac

SEQ ID NO: 330512 - DNA, 30 bp, Artificial Sequence
  Synthetic oligonucleotide
cccacgcacctgcattgggatcataggcac

SEQ ID NO: 330513 - DNA, 30 bp, Artificial Sequence
  Synthetic oligonucleotide
agtgccggggtctccctacgtcataggcac

SEQ ID NO: 330514 - DNA, 30 bp, Artificial Sequence
  Synthetic oligonucleotide
ccaattctctcagtgggttgacctaggcac

SEQ ID NO: 330515 - DNA, 30 bp, Artificial Sequence
  Synthetic oligonucleotide
tggcttttgaatgcgattacgcctaggcac

SEQ ID NO: 330516 - DNA, 30 bp, Artificial Sequence
  Synthetic oligonucleotide
tgtaaatcgtcaaccctatacgctaggcac

SEQ ID NO: 330517 - DNA, 30 bp, Artificial Sequence
  Synthetic oligonucleotide
tccctcaggagcgtcctacgacaacggcac

SEQ ID NO: 330518 - DNA, 30 bp, Artificial Sequence
  Synthetic oligonucleotide
accaaatagataggcggcctctgacggcac

SEQ ID NO: 330519 - DNA, 30 bp, Artificial Sequence
  Synthetic oligonucleotide
cagcgggatcggaatatctcgcgccggcac

SEQ ID NO: 330520 - DNA, 30 bp, Artificial Sequence
  Synthetic oligonucleotide
cctcgataccgttcattagcactgcggcac

SEQ ID NO: 330521 - DNA, 30 bp, Artificial Sequence
  Synthetic oligonucleotide
gacttcgtacgtgacaatttgcgagggcac

SEQ ID NO: 330522 - DNA, 30 bp, Artificial Sequence
  Synthetic oligonucleotide
cggcgtactactcctttctgtgtagggcac

SEQ ID NO: 330523 - DNA, 30 bp, Artificial Sequence
  Synthetic oligonucleotide
gtattctaatgaatcaaactattcgggcac

SEQ ID NO: 330524 - DNA, 30 bp, Artificial Sequence
  Synthetic oligonucleotide
agtggtaggcaaacataatagttcgggcac

SEQ ID NO: 330525 - DNA, 30 bp, Artificial Sequence
  Synthetic oligonucleotide
tcagcctatatctcaaggcatacggggcac

SEQ ID NO: 330526 - DNA, 30 bp, Artificial Sequence
  Synthetic oligonucleotide
acgatattgttgcgggaatggggggggcac

SEQ ID NO: 330527 - DNA, 30 bp, Artificial Sequence
  Synthetic oligonucleotide
tcctcgcaggaaggctgccatctggggcac

SEQ ID NO: 330528 - DNA, 30 bp, Artificial Sequence
  Synthetic oligonucleotide
gggcggctcagttttggttaacatgggcac

SEQ ID NO: 330529 - DNA, 30 bp, Artificial Sequence
  Synthetic oligonucleotide
gtctcgtgttcgccataggtaattgggcac

SEQ ID NO: 330530 - DNA, 30 bp, Artificial Sequence
  Synthetic oligonucleotide
tccactgttgggcgaagcctttttgggcac

SEQ ID NO: 330531 - DNA, 30 bp, Artificial Sequence
  Synthetic oligonucleotide
tgaccggtgtgcgatccaatgggatggcac

SEQ ID NO: 330532 - DNA, 30 bp, Artificial Sequence
  Synthetic oligonucleotide
gttcaaaagggcgtcaccgtaacctggcac

SEQ ID NO: 330533 - DNA, 30 bp, Artificial Sequence
  Synthetic oligonucleotide
ttacagtcagccgaatgaagtccctggcac

SEQ ID NO: 330534 - DNA, 30 bp, Artificial Sequence
  Synthetic oligonucleotide
gattggtaagagcttgagcgcagttggcac

SEQ ID NO: 330535 - DNA, 30 bp, Artificial Sequence
  Synthetic oligonucleotide
ttggttttgagttgggtacaagtttggcac

SEQ ID NO: 330536 - DNA, 30 bp, Artificial Sequence
  Synthetic oligonucleotide
cttaacgtacaggggaagttgttttggcac

SEQ ID NO: 330537 - DNA, 30 bp, Artificial Sequence
  Synthetic oligonucleotide
aatagttttaagcagaatcaagcaatgcac

SEQ ID NO: 330538 - DNA, 30 bp, Artificial Sequence
  Synthetic oligonucleotide
ggaatgactcgtagttgaatggcaatgcac

SEQ ID NO: 330539 - DNA, 30 bp, Artificial Sequence
  Synthetic oligonucleotide
aaacttaatgtcgagagaaggttaatgcac

SEQ ID NO: 330540 - DNA, 30 bp, Artificial Sequence
  Synthetic oligonucleotide
cgaatacgccggttggttgggtcgatgcac

SEQ ID NO: 330541 - DNA, 30 bp, Artificial Sequence
  Synthetic oligonucleotide
acccggcatctctgtccggctagcctgcac

SEQ ID NO: 330542 - DNA, 30 bp, Artificial Sequence
  Synthetic oligonucleotide
atatgggggcaggttcagaacaaagtgcac

SEQ ID NO: 330543 - DNA, 31 bp, Artificial Sequence
  Synthetic oligonucleotide
ctcatgttggtattcacgcccatgagtgcac

SEQ ID NO: 330544 - DNA, 30 bp, Artificial Sequence
  Synthetic oligonucleotide
aacggggagctcacgacaacgtgagtgcac

SEQ ID NO: 330545 - DNA, 30 bp, Artificial Sequence
  Synthetic oligonucleotide
tacgactacgatgagtcagaactagtgcac

SEQ ID NO: 330546 - DNA, 30 bp, Artificial Sequence
  Synthetic oligonucleotide
cgaatcggaactctctaaacacacgtgcac

SEQ ID NO: 330547 - DNA, 30 bp, Artificial Sequence
  Synthetic oligonucleotide
ttagagttgcagaacgtcgcgacggtgcac

SEQ ID NO: 330548 - DNA, 30 bp, Artificial Sequence
  Synthetic oligonucleotide
aaaaacgaggccgcgtgacggggggtgcac

SEQ ID NO: 330549 - DNA, 31 bp, Artificial Sequence
  Synthetic oligonucleotide
cgccaaatacgtagtcgcctcgtgggtgcac

SEQ ID NO: 330550 - DNA, 30 bp, Artificial Sequence
  Synthetic oligonucleotide
caattctagtttggcatgttatatgtgcac

SEQ ID NO: 330551 - DNA, 30 bp, Artificial Sequence
  Synthetic oligonucleotide
ttgcgccagtgcctaaaggtttctgtgcac

SEQ ID NO: 330552 - DNA, 30 bp, Artificial Sequence
  Synthetic oligonucleotide
ttgactatcgggtctccattgtaattgcac

SEQ ID NO: 330553 - DNA, 30 bp, Artificial Sequence
  Synthetic oligonucleotide
ctgtaccgagtttaagttcctacattgcac

SEQ ID NO: 330554 - DNA, 30 bp, Artificial Sequence
  Synthetic oligonucleotide
gaggtgcgtccgccgagcttgctcttgcac

SEQ ID NO: 330555 - DNA, 30 bp, Artificial Sequence
  Synthetic oligonucleotide
caggacaaaacggcgttaaaacctttgcac

SEQ ID NO: 330556 - DNA, 30 bp, Artificial Sequence
  Synthetic oligonucleotide
gccagggatacgtgtgcataatgtttgcac

SEQ ID NO: 330557 - DNA, 30 bp, Artificial Sequence
  Synthetic oligonucleotide
agcatgttgcaaccgttggactaaaatcac

SEQ ID NO: 330558 - DNA, 30 bp, Artificial Sequence
  Synthetic oligonucleotide
ggtatcgggtcgatacgtggtcgaaatcac

SEQ ID NO: 330559 - DNA, 30 bp, Artificial Sequence
  Synthetic oligonucleotide
gtgatgggtcagcaagaatcgataaatcac

SEQ ID NO: 330560 - DNA, 30 bp, Artificial Sequence
  Synthetic oligonucleotide
ggatggccccgcaactgggaaaagaatcac

SEQ ID NO: 330561 - DNA, 30 bp, Artificial Sequence
  Synthetic oligonucleotide
cagccatcagggagtttcaggactaatcac

SEQ ID NO: 330562 - DNA, 30 bp, Artificial Sequence
  Synthetic oligonucleotide
tatgttagagtagctggactaggtaatcac

SEQ ID NO: 330563 - DNA, 30 bp, Artificial Sequence
  Synthetic oligonucleotide
tgcatatccaatccgttgaacatgcatcac

SEQ ID NO: 330564 - DNA, 30 bp, Artificial Sequence
  Synthetic oligonucleotide
ggtctgtgtaccctcggggttgatcatcac

SEQ ID NO: 330565 - DNA, 30 bp, Artificial Sequence
  Synthetic oligonucleotide
gagcacatttgacctctgtatgctcatcac

SEQ ID NO: 330566 - DNA, 30 bp, Artificial Sequence
  Synthetic oligonucleotide
agcgagaattcacatgctcgtgaagatcac

SEQ ID NO: 330567 - DNA, 30 bp, Artificial Sequence
  Synthetic oligonucleotide
gaagtatactcggtgacagaattggatcac

SEQ ID NO: 330568 - DNA, 30 bp, Artificial Sequence
  Synthetic oligonucleotide
gtacactcagcgcaaggggttactgatcac

SEQ ID NO: 330569 - DNA, 30 bp, Artificial Sequence
  Synthetic oligonucleotide
tccagcttggatggctcaatttgtgatcac

SEQ ID NO: 330570 - DNA, 30 bp, Artificial Sequence
  Synthetic oligonucleotide
gtactgcacgtttttttcactaactatcac

SEQ ID NO: 330571 - DNA, 30 bp, Artificial Sequence
  Synthetic oligonucleotide
aatcatatatagctcgttaaacactatcac

SEQ ID NO: 330572 - DNA, 30 bp, Artificial Sequence
  Synthetic oligonucleotide
ggtgtgtacatcctttcgaaagactatcac

SEQ ID NO: 330573 - DNA, 30 bp, Artificial Sequence
  Synthetic oligonucleotide
ttctggggttggttgattaaatattatcac

SEQ ID NO: 330574 - DNA, 30 bp, Artificial Sequence
  Synthetic oligonucleotide
tagagggccgacaagcaggaagcttatcac

SEQ ID NO: 330575 - DNA, 30 bp, Artificial Sequence
  Synthetic oligonucleotide
aagaagacggataccttgtggtcttatcac

SEQ ID NO: 330576 - DNA, 30 bp, Artificial Sequence
  Synthetic oligonucleotide
actatttaggggttgtacttaagttatcac

SEQ ID NO: 330577 - DNA, 30 bp, Artificial Sequence
  Synthetic oligonucleotide
tcggacccagtgtgctaacgtgacactcac

SEQ ID NO: 330578 - DNA, 30 bp, Artificial Sequence
  Synthetic oligonucleotide
ccctcaagcagtaatgatgaaagcactcac

SEQ ID NO: 330579 - DNA, 30 bp, Artificial Sequence
  Synthetic oligonucleotide
aggtcaccttgtgacacgtgacgcactcac

SEQ ID NO: 330580 - DNA, 30 bp, Artificial Sequence
  Synthetic oligonucleotide
ggaatttgcaaccaaaacttccagactcac

SEQ ID NO: 330581 - DNA, 30 bp, Artificial Sequence
  Synthetic oligonucleotide
gatattccctttgcgaaactcctgactcac

SEQ ID NO: 330582 - DNA, 30 bp, Artificial Sequence
  Synthetic oligonucleotide
gctggaaagttgtagatgctcagtactcac

SEQ ID NO: 330583 - DNA, 30 bp, Artificial Sequence
  Synthetic oligonucleotide
gaagaaggactcagatgctaccttactcac

SEQ ID NO: 330584 - DNA, 30 bp, Artificial Sequence
  Synthetic oligonucleotide
ggtgataacagacaccgagtttcacctcac

SEQ ID NO: 330585 - DNA, 30 bp, Artificial Sequence
  Synthetic oligonucleotide
agccactaagctggcgaggattgacctcac

SEQ ID NO: 330586 - DNA, 30 bp, Artificial Sequence
  Synthetic oligonucleotide
ccgggagacaattcagagtaaaaccctcac

SEQ ID NO: 330587 - DNA, 30 bp, Artificial Sequence
  Synthetic oligonucleotide
ctacccggtggttacaacatgtctcctcac

SEQ ID NO: 330588 - DNA, 30 bp, Artificial Sequence
  Synthetic oligonucleotide
cactttcaagttgggctcctatgagctcac

SEQ ID NO: 330589 - DNA, 30 bp, Artificial Sequence
  Synthetic oligonucleotide
catcctgtgggtatagggccgatcgctcac

SEQ ID NO: 330590 - DNA, 30 bp, Artificial Sequence
  Synthetic oligonucleotide
tttacgattccgggatgcgtccatgctcac

SEQ ID NO: 330591 - DNA, 30 bp, Artificial Sequence
  Synthetic oligonucleotide
tcatggctatggactccaagcgttgctcac

SEQ ID NO: 330592 - DNA, 30 bp, Artificial Sequence
  Synthetic oligonucleotide
gaatatgcctaacattgggaacattctcac

SEQ ID NO: 330593 - DNA, 30 bp, Artificial Sequence
  Synthetic oligonucleotide
ttaacacacggcttgatgtgtggttctcac

SEQ ID NO: 330594 - DNA, 30 bp, Artificial Sequence
  Synthetic oligonucleotide
ccggctgttgctattgggcttgaaagtcac

SEQ ID NO: 330595 - DNA, 30 bp, Artificial Sequence
  Synthetic oligonucleotide
tataagagccttgacacccgatccagtcac

SEQ ID NO: 330596 - DNA, 30 bp, Artificial Sequence
  Synthetic oligonucleotide
aagcgtgtttaagtaaacaaagtcagtcac

SEQ ID NO: 330597 - DNA, 30 bp, Artificial Sequence
  Synthetic oligonucleotide
gagggacttacgttgaatcccttcagtcac

SEQ ID NO: 330598 - DNA, 30 bp, Artificial Sequence
  Synthetic oligonucleotide
gactgccatgttttataggtagctagtcac

SEQ ID NO: 330599 - DNA, 30 bp, Artificial Sequence
  Synthetic oligonucleotide
gggatccgtcctatagtagcgagtagtcac

SEQ ID NO: 330600 - DNA, 26 bp, Artificial Sequence
  Synthetic oligonucleotide
cgtttacaaatttcactcggcgtcac

SEQ ID NO: 330601 - DNA, 30 bp, Artificial Sequence
  Synthetic oligonucleotide
cagcttctttggtgaagataggctcgtcac

SEQ ID NO: 330602 - DNA, 30 bp, Artificial Sequence
  Synthetic oligonucleotide
aagttgaggggcctccaaaagaaaggtcac

SEQ ID NO: 330603 - DNA, 30 bp, Artificial Sequence
  Synthetic oligonucleotide
tgacatttattatgatcaccacgaggtcac

SEQ ID NO: 330604 - DNA, 30 bp, Artificial Sequence
  Synthetic oligonucleotide
ctagtccatgacaagggatgtaacggtcac

SEQ ID NO: 330605 - DNA, 30 bp, Artificial Sequence
  Synthetic oligonucleotide
cggagcagcagctgaaatctggagggtcac

SEQ ID NO: 330606 - DNA, 30 bp, Artificial Sequence
  Synthetic oligonucleotide
gattggtgtaaaattaacagttggggtcac

SEQ ID NO: 330607 - DNA, 30 bp, Artificial Sequence
  Synthetic oligonucleotide
acgtgcacagcagttagagcaatgggtcac

SEQ ID NO: 330608 - DNA, 30 bp, Artificial Sequence
  Synthetic oligonucleotide
gttccccaagatccgacgtacgtatgtcac

SEQ ID NO: 330609 - DNA, 30 bp, Artificial Sequence
  Synthetic oligonucleotide
gcgacggtgccaagactcgaagagtgtcac

SEQ ID NO: 330610 - DNA, 30 bp, Artificial Sequence
  Synthetic oligonucleotide
gttgcgccgcctcttttgagcaggtgtcac

SEQ ID NO: 330611 - DNA, 30 bp, Artificial Sequence
  Synthetic oligonucleotide
aaagccatgtccgcgatagacgtttgtcac

SEQ ID NO: 330612 - DNA, 30 bp, Artificial Sequence
  Synthetic oligonucleotide
tgcatgcagaatggttgatcgtcaattcac

SEQ ID NO: 330613 - DNA, 30 bp, Artificial Sequence
  Synthetic oligonucleotide
ttcaaggaggagcctaaaggtgggattcac

SEQ ID NO: 330614 - DNA, 30 bp, Artificial Sequence
  Synthetic oligonucleotide
ataactgaccaggagagagatatgattcac

SEQ ID NO: 330615 - DNA, 30 bp, Artificial Sequence
  Synthetic oligonucleotide
cccaaagcttgtataggcgtattgattcac

SEQ ID NO: 330616 - DNA, 30 bp, Artificial Sequence
  Synthetic oligonucleotide
cacgcgcaaaaattataaccttatattcac

SEQ ID NO: 330617 - DNA, 30 bp, Artificial Sequence
  Synthetic oligonucleotide
ttaccggtaaatgctaacgagggtattcac

SEQ ID NO: 330618 - DNA, 30 bp, Artificial Sequence
  Synthetic oligonucleotide
aataaccatgcatgtcggtggtgtattcac

SEQ ID NO: 330619 - DNA, 30 bp, Artificial Sequence
  Synthetic oligonucleotide
ccctctactgatagataaagacgacttcac

SEQ ID NO: 330620 - DNA, 30 bp, Artificial Sequence
  Synthetic oligonucleotide
ggcgcctcgagagaccgtgaggtccttcac

SEQ ID NO: 330621 - DNA, 30 bp, Artificial Sequence
  Synthetic oligonucleotide
cattcgagccgttccttgaagacagttcac

SEQ ID NO: 330622 - DNA, 30 bp, Artificial Sequence
  Synthetic oligonucleotide
ggggtcgacttcgaaggccccccagttcac

SEQ ID NO: 330623 - DNA, 30 bp, Artificial Sequence
  Synthetic oligonucleotide
taggggttcctgcctgaattcagagttcac

SEQ ID NO: 330624 - DNA, 30 bp, Artificial Sequence
  Synthetic oligonucleotide
gtctgtaattccgactcgaatctagttcac

SEQ ID NO: 330625 - DNA, 30 bp, Artificial Sequence
  Synthetic oligonucleotide
caagcgtataattgaattgcacccgttcac

SEQ ID NO: 330626 - DNA, 30 bp, Artificial Sequence
  Synthetic oligonucleotide
aggctggtctacttcgcagcttccgttcac

SEQ ID NO: 330627 - DNA, 30 bp, Artificial Sequence
  Synthetic oligonucleotide
acttgcaaccacggattatatcaggttcac

SEQ ID NO: 330628 - DNA, 30 bp, Artificial Sequence
  Synthetic oligonucleotide
acgcatcggcttatgtcagactaggttcac

SEQ ID NO: 330629 - DNA, 30 bp, Artificial Sequence
  Synthetic oligonucleotide
gtccccaaccagaagcacgacattgttcac

SEQ ID NO: 330630 - DNA, 30 bp, Artificial Sequence
  Synthetic oligonucleotide
gttaattgctcggccggtaaaccatttcac

SEQ ID NO: 330631 - DNA, 30 bp, Artificial Sequence
  Synthetic oligonucleotide
atccgtggatagggtctgccaccatttcac

SEQ ID NO: 330632 - DNA, 30 bp, Artificial Sequence
  Synthetic oligonucleotide
ccacgcattgcagtgagaggggtatttcac

SEQ ID NO: 330633 - DNA, 30 bp, Artificial Sequence
  Synthetic oligonucleotide
ggaacgttaagagcgtattaattctttcac

SEQ ID NO: 330634 - DNA, 30 bp, Artificial Sequence
  Synthetic oligonucleotide
acggccgggaaacacttaagtgtgtttcac

SEQ ID NO: 330635 - DNA, 30 bp, Artificial Sequence
  Synthetic oligonucleotide
ttttaaggtatggagtaatatttttttcac

SEQ ID NO: 330636 - DNA, 30 bp, Artificial Sequence
  Synthetic oligonucleotide
catcttcagaagatcctgagcacaaaagac

SEQ ID NO: 330637 - DNA, 34 bp, Artificial Sequence
  Synthetic oligonucleotide
gatactagactaccacgtgtccatcagaaaagac

SEQ ID NO: 330638 - DNA, 34 bp, Artificial Sequence
  Synthetic oligonucleotide
gatactagaccgccacgtgtccatcagaaaagac

SEQ ID NO: 330639 - DNA, 33 bp, Artificial Sequence
  Synthetic oligonucleotide
gatactagaccacccgtgtccatcagaaaagac

SEQ ID NO: 330640 - DNA, 30 bp, Artificial Sequence
  Synthetic oligonucleotide
tatgaacaaatcggaggctttggaaaagac

SEQ ID NO: 330641 - DNA, 30 bp, Artificial Sequence
  Synthetic oligonucleotide
gcagttgaagagcggtgggataacaaagac

SEQ ID NO: 330642 - DNA, 30 bp, Artificial Sequence
  Synthetic oligonucleotide
gactattggcatatcgcgtgtagcaaagac

SEQ ID NO: 330643 - DNA, 30 bp, Artificial Sequence
  Synthetic oligonucleotide
cacttgctcctaggcaaagtgctcaaagac

SEQ ID NO: 330644 - DNA, 30 bp, Artificial Sequence
  Synthetic oligonucleotide
gatgagtacccgtgcggcgaacagaaagac

SEQ ID NO: 330645 - DNA, 30 bp, Artificial Sequence
  Synthetic oligonucleotide
ggggattgggcggcacagagtatgaaagac

SEQ ID NO: 330646 - DNA, 30 bp, Artificial Sequence
  Synthetic oligonucleotide
gcgcagtcagttgggtatagactgaaagac

SEQ ID NO: 330647 - DNA, 30 bp, Artificial Sequence
  Synthetic oligonucleotide
tctttcttatgtctcgaacgaagtaaagac

SEQ ID NO: 330648 - DNA, 30 bp, Artificial Sequence
  Synthetic oligonucleotide
ctctcaaagtacttgttctggggtaaagac

SEQ ID NO: 330649 - DNA, 30 bp, Artificial Sequence
  Synthetic oligonucleotide
gtgtttgcaaccgatcactgcgaacaagac

SEQ ID NO: 330650 - DNA, 30 bp, Artificial Sequence
  Synthetic oligonucleotide
tagatcacacgaagacgcaacacacaagac

SEQ ID NO: 330651 - DNA, 31 bp, Artificial Sequence
  Synthetic oligonucleotide
gataggaacggccatcctgctttgacaagac

SEQ ID NO: 330652 - DNA, 30 bp, Artificial Sequence
  Synthetic oligonucleotide
gtgaagaatttaattggtcattagcaagac

SEQ ID NO: 330653 - DNA, 30 bp, Artificial Sequence
  Synthetic oligonucleotide
ccttggtggtggtagtgtactcttcaagac

SEQ ID NO: 330654 - DNA, 30 bp, Artificial Sequence
  Synthetic oligonucleotide
ctaccaccttcaagggcgtctgaagaagac

SEQ ID NO: 330655 - DNA, 30 bp, Artificial Sequence
  Synthetic oligonucleotide
gaccctgtttgacgtggggataacgaagac

SEQ ID NO: 330656 - DNA, 30 bp, Artificial Sequence
  Synthetic oligonucleotide
cactttgagcgatagcgggtccgcgaagac

SEQ ID NO: 330657 - DNA, 30 bp, Artificial Sequence
  Synthetic oligonucleotide
ccaagtcggtggatcggtcactgggaagac

SEQ ID NO: 330658 - DNA, 30 bp, Artificial Sequence
  Synthetic oligonucleotide
gcacgattggaacgagctttcctggaagac

SEQ ID NO: 330659 - DNA, 30 bp, Artificial Sequence
  Synthetic oligonucleotide
gttagagtctcgtatagagtgtatgaagac

SEQ ID NO: 330660 - DNA, 30 bp, Artificial Sequence
  Synthetic oligonucleotide
aaacgacggatagtcgtgtttcgtgaagac

SEQ ID NO: 330661 - DNA, 30 bp, Artificial Sequence
  Synthetic oligonucleotide
tcgtggcgtaaagccacgggggcataagac

SEQ ID NO: 330662 - DNA, 30 bp, Artificial Sequence
  Synthetic oligonucleotide
gggtacccctgtaggatcatgatataagac

SEQ ID NO: 330663 - DNA, 30 bp, Artificial Sequence
  Synthetic oligonucleotide
atcccctgggtattgagcctgcactaagac

SEQ ID NO: 330664 - DNA, 30 bp, Artificial Sequence
  Synthetic oligonucleotide
aagtactgttatagatttaccacctaagac

SEQ ID NO: 330665 - DNA, 30 bp, Artificial Sequence
  Synthetic oligonucleotide
catcatcagagattggattttgcctaagac

SEQ ID NO: 330666 - DNA, 30 bp, Artificial Sequence
  Synthetic oligonucleotide
atgttgtcgtgatggaagaggttctaagac

SEQ ID NO: 330667 - DNA, 30 bp, Artificial Sequence
  Synthetic oligonucleotide
agcaatagtttggggggcgaaccgtaagac

SEQ ID NO: 330668 - DNA, 30 bp, Artificial Sequence
  Synthetic oligonucleotide
gtgcaactactgacggatccttgttaagac

SEQ ID NO: 330669 - DNA, 30 bp, Artificial Sequence
  Synthetic oligonucleotide
atacgtaggaaaaaatcccgtatttaagac

SEQ ID NO: 330670 - DNA, 30 bp, Artificial Sequence
  Synthetic oligonucleotide
aatgtagctagatactacagtagaacagac

SEQ ID NO: 330671 - DNA, 30 bp, Artificial Sequence
  Synthetic oligonucleotide
tgtatttgggacactcatctaaccacagac

SEQ ID NO: 330672 - DNA, 30 bp, Artificial Sequence
  Synthetic oligonucleotide
ttactctacccgtacggagttcccacagac

SEQ ID NO: 330673 - DNA, 30 bp, Artificial Sequence
  Synthetic oligonucleotide
atacattggcaggggcggcgattcacagac

SEQ ID NO: 330674 - DNA, 30 bp, Artificial Sequence
  Synthetic oligonucleotide
ttaaagaacatggatttatcagcgacagac

SEQ ID NO: 330675 - DNA, 30 bp, Artificial Sequence
  Synthetic oligonucleotide
taacggatatcctgtacaaccctgacagac

SEQ ID NO: 330676 - DNA, 30 bp, Artificial Sequence
  Synthetic oligonucleotide
ccccatgggtgtttcacaagttcgccagac

SEQ ID NO: 330677 - DNA, 30 bp, Artificial Sequence
  Synthetic oligonucleotide
ttaatacttcgctccctaatccctccagac

SEQ ID NO: 330678 - DNA, 30 bp, Artificial Sequence
  Synthetic oligonucleotide
taagtggcgcataatgtctcttcagcagac

SEQ ID NO: 330679 - DNA, 30 bp, Artificial Sequence
  Synthetic oligonucleotide
cagcttattttaatttaggaactggcagac

SEQ ID NO: 330680 - DNA, 30 bp, Artificial Sequence
  Synthetic oligonucleotide
ttgggggagcataggcagtgaactgcagac

SEQ ID NO: 330681 - DNA, 30 bp, Artificial Sequence
  Synthetic oligonucleotide
ctgaataactgtccagactcactatcagac

SEQ ID NO: 330682 - DNA, 30 bp, Artificial Sequence
  Synthetic oligonucleotide
catctcctagcatctcacttggcctcagac

SEQ ID NO: 330683 - DNA, 30 bp, Artificial Sequence
  Synthetic oligonucleotide
atgtagcacttagactaatcgcagtcagac

SEQ ID NO: 330684 - DNA, 30 bp, Artificial Sequence
  Synthetic oligonucleotide
gtgcacctacgcgggcccggttattcagac

SEQ ID NO: 330685 - DNA, 30 bp, Artificial Sequence
  Synthetic oligonucleotide
cccgagtcccgggtatagctcagttcagac

SEQ ID NO: 330686 - DNA, 30 bp, Artificial Sequence
  Synthetic oligonucleotide
tgcgtaaaaataaagagccccgcaagagac

SEQ ID NO: 330687 - DNA, 30 bp, Artificial Sequence
  Synthetic oligonucleotide
tttgtgccctctttcgtgagtggaagagac

SEQ ID NO: 330688 - DNA, 30 bp, Artificial Sequence
  Synthetic oligonucleotide
tactgaagatatttactacagtacagagac

SEQ ID NO: 330689 - DNA, 30 bp, Artificial Sequence
  Synthetic oligonucleotide
gattagccgtataaccttatttccagagac

SEQ ID NO: 330690 - DNA, 30 bp, Artificial Sequence
  Synthetic oligonucleotide
cgggcattaaggggggagagaggcagagac

SEQ ID NO: 330691 - DNA, 30 bp, Artificial Sequence
  Synthetic oligonucleotide
agtcgtttgggtggccagcgtccgagagac

SEQ ID NO: 330692 - DNA, 30 bp, Artificial Sequence
  Synthetic oligonucleotide
tagagctcaagcgtcacggcaaaccgagac

SEQ ID NO: 330693 - DNA, 30 bp, Artificial Sequence
  Synthetic oligonucleotide
tggatctgtgagaccgaggatgcccgagac

SEQ ID NO: 330694 - DNA, 30 bp, Artificial Sequence
  Synthetic oligonucleotide
agtttataagatgtgaacaccgttcgagac

SEQ ID NO: 330695 - DNA, 30 bp, Artificial Sequence
  Synthetic oligonucleotide
actcagatatcgacgacggcgagaggagac

SEQ ID NO: 330696 - DNA, 30 bp, Artificial Sequence
  Synthetic oligonucleotide
atgtagtgcttggggcagttacgaggagac

SEQ ID NO: 330697 - DNA, 30 bp, Artificial Sequence
  Synthetic oligonucleotide
tgccctctcgcaacatggggagacggagac

SEQ ID NO: 330698 - DNA, 30 bp, Artificial Sequence
  Synthetic oligonucleotide
aattggtggattggtcaattgatcggagac

SEQ ID NO: 330699 - DNA, 30 bp, Artificial Sequence
  Synthetic oligonucleotide
ttttaaaagcatgcacgggtaaagggagac

SEQ ID NO: 330700 - DNA, 30 bp, Artificial Sequence
  Synthetic oligonucleotide
tcgaagggatctcaatgacgcccgggagac

SEQ ID NO: 330701 - DNA, 30 bp, Artificial Sequence
  Synthetic oligonucleotide
gtacttctcaaccttagctacgttggagac

SEQ ID NO: 330702 - DNA, 30 bp, Artificial Sequence
  Synthetic oligonucleotide
tgatttgtcgaggttgaaccggcctgagac

SEQ ID NO: 330703 - DNA, 30 bp, Artificial Sequence
  Synthetic oligonucleotide
ctagtattagtttacaactcagtctgagac

SEQ ID NO: 330704 - DNA, 30 bp, Artificial Sequence
  Synthetic oligonucleotide
gctcatgacacattaatggtaaggtgagac

SEQ ID NO: 330705 - DNA, 30 bp, Artificial Sequence
  Synthetic oligonucleotide
tgagatcgcctagctcctcctgcttgagac

SEQ ID NO: 330706 - DNA, 30 bp, Artificial Sequence
  Synthetic oligonucleotide
cagcctgaggtgggtggcaacagaatagac

SEQ ID NO: 330707 - DNA, 30 bp, Artificial Sequence
  Synthetic oligonucleotide
gaccagtcactccatagtcttagaatagac

SEQ ID NO: 330708 - DNA, 30 bp, Artificial Sequence
  Synthetic oligonucleotide
tgaaaacggagtttggcatatataatagac

SEQ ID NO: 330709 - DNA, 30 bp, Artificial Sequence
  Synthetic oligonucleotide
tatcccagtgatcgtaacagtcatatagac

SEQ ID NO: 330710 - DNA, 30 bp, Artificial Sequence
  Synthetic oligonucleotide
tcttccagagacccagcgaaaaaactagac

SEQ ID NO: 330711 - DNA, 30 bp, Artificial Sequence
  Synthetic oligonucleotide
aacattagcgtccggatgcctgcactagac

SEQ ID NO: 330712 - DNA, 30 bp, Artificial Sequence
  Synthetic oligonucleotide
catgaggttaatcatacctcatgactagac

SEQ ID NO: 330713 - DNA, 30 bp, Artificial Sequence
  Synthetic oligonucleotide
tagttaaacgcacactgtcacatcctagac

SEQ ID NO: 330714 - DNA, 30 bp, Artificial Sequence
  Synthetic oligonucleotide
tctgaatccctagcataggactcgctagac

SEQ ID NO: 330715 - DNA, 30 bp, Artificial Sequence
  Synthetic oligonucleotide
cgattgcagtaactcatgcgttggctagac

SEQ ID NO: 330716 - DNA, 30 bp, Artificial Sequence
  Synthetic oligonucleotide
tattttggtaaacgactccaaaaagtagac

SEQ ID NO: 330717 - DNA, 30 bp, Artificial Sequence
  Synthetic oligonucleotide
aagctaattcaccggggggtactagtagac

SEQ ID NO: 330718 - DNA, 30 bp, Artificial Sequence
  Synthetic oligonucleotide
tcgaaggtccgggtacctcgattagtagac

SEQ ID NO: 330719 - DNA, 30 bp, Artificial Sequence
  Synthetic oligonucleotide
cttcggcacaccaacgacaagcgggtagac

SEQ ID NO: 330720 - DNA, 30 bp, Artificial Sequence
  Synthetic oligonucleotide
ctagtatcacacctctgccagccattagac

SEQ ID NO: 330721 - DNA, 30 bp, Artificial Sequence
  Synthetic oligonucleotide
acgaatatgttccttgttcctgcattagac

SEQ ID NO: 330722 - DNA, 30 bp, Artificial Sequence
  Synthetic oligonucleotide
gagtataatgagagcacttttgcattagac

SEQ ID NO: 330723 - DNA, 30 bp, Artificial Sequence
  Synthetic oligonucleotide
acgccaggtatggactgaaaagccttagac

SEQ ID NO: 330724 - DNA, 30 bp, Artificial Sequence
  Synthetic oligonucleotide
gtcgtgaagaagttcaccactttcttagac

SEQ ID NO: 330725 - DNA, 30 bp, Artificial Sequence
  Synthetic oligonucleotide
actgttggaatgtgtagggcggagttagac

SEQ ID NO: 330726 - DNA, 30 bp, Artificial Sequence
  Synthetic oligonucleotide
ccttccgcatgtcacaccgcgccgttagac

SEQ ID NO: 330727 - DNA, 30 bp, Artificial Sequence
  Synthetic oligonucleotide
ttaagtgggcattcgtcaggttatttagac

SEQ ID NO: 330728 - DNA, 30 bp, Artificial Sequence
  Synthetic oligonucleotide
agagatgccgcgatcagtgtatgtttagac

SEQ ID NO: 330729 - DNA, 30 bp, Artificial Sequence
  Synthetic oligonucleotide
aaagagtcgcactacaggatgtttttagac

SEQ ID NO: 330730 - DNA, 30 bp, Artificial Sequence
  Synthetic oligonucleotide
tttcataggtgatcatacaggggaaacgac

SEQ ID NO: 330731 - DNA, 30 bp, Artificial Sequence
  Synthetic oligonucleotide
agccgggggtttgaagaaagatgaaacgac

SEQ ID NO: 330732 - DNA, 30 bp, Artificial Sequence
  Synthetic oligonucleotide
gtgcctcagaatttgtgggcttgaaacgac

SEQ ID NO: 330733 - DNA, 30 bp, Artificial Sequence
  Synthetic oligonucleotide
cggctccagctcgtcggtgtggacaacgac

SEQ ID NO: 330734 - DNA, 30 bp, Artificial Sequence
  Synthetic oligonucleotide
actaagcggggattaccggattccaacgac

SEQ ID NO: 330735 - DNA, 30 bp, Artificial Sequence
  Synthetic oligonucleotide
ggctttgaagggcgctcggatgctaacgac

SEQ ID NO: 330736 - DNA, 30 bp, Artificial Sequence
  Synthetic oligonucleotide
gttgtcatatagattgcatcttctaacgac

SEQ ID NO: 330737 - DNA, 30 bp, Artificial Sequence
  Synthetic oligonucleotide
ccattagccccttcattgctagttaacgac

SEQ ID NO: 330738 - DNA, 30 bp, Artificial Sequence
  Synthetic oligonucleotide
ataaacttcatatatttggacgtacacgac

SEQ ID NO: 330739 - DNA, 30 bp, Artificial Sequence
  Synthetic oligonucleotide
ataccccgttagccttacgttcgccacgac

SEQ ID NO: 330740 - DNA, 30 bp, Artificial Sequence
  Synthetic oligonucleotide
gatgtgcgaccaggcggattacaggacgac

SEQ ID NO: 330741 - DNA, 30 bp, Artificial Sequence
  Synthetic oligonucleotide
aaccacagcaaatctccttttgaggacgac

SEQ ID NO: 330742 - DNA, 30 bp, Artificial Sequence
  Synthetic oligonucleotide
aaatagtcgaatacagcacggtcggacgac

SEQ ID NO: 330743 - DNA, 30 bp, Artificial Sequence
  Synthetic oligonucleotide
cttacactgaggatttatcaaatggacgac

SEQ ID NO: 330744 - DNA, 30 bp, Artificial Sequence
  Synthetic oligonucleotide
taggcttatctctactgagtgggtgacgac

SEQ ID NO: 330745 - DNA, 30 bp, Artificial Sequence
  Synthetic oligonucleotide
gggttcaaagtcgcctcctgctggtacgac

SEQ ID NO: 330746 - DNA, 30 bp, Artificial Sequence
  Synthetic oligonucleotide
ggggttcgctatcataaccagtggtacgac

SEQ ID NO: 330747 - DNA, 30 bp, Artificial Sequence
  Synthetic oligonucleotide
ttctcataatgtctatgtgggctgtacgac

SEQ ID NO: 330748 - DNA, 30 bp, Artificial Sequence
  Synthetic oligonucleotide
ttcgtacagaggttgattatgaattacgac

SEQ ID NO: 330749 - DNA, 30 bp, Artificial Sequence
  Synthetic oligonucleotide
taaacgtttccggccgtgccgctaaccgac

SEQ ID NO: 330750 - DNA, 30 bp, Artificial Sequence
  Synthetic oligonucleotide
agggactatagaggaccggcgaagaccgac

SEQ ID NO: 330751 - DNA, 30 bp, Artificial Sequence
  Synthetic oligonucleotide
ctcccactaggtgcgacccttgtacccgac

SEQ ID NO: 330752 - DNA, 30 bp, Artificial Sequence
  Synthetic oligonucleotide
cccgtatagagtcatttagggcgccccgac

SEQ ID NO: 330753 - DNA, 30 bp, Artificial Sequence
  Synthetic oligonucleotide
agctggctatggggctgacatgcgcccgac

SEQ ID NO: 330754 - DNA, 30 bp, Artificial Sequence
  Synthetic oligonucleotide
atcctttattaagagcctggctttcccgac

SEQ ID NO: 330755 - DNA, 30 bp, Artificial Sequence
  Synthetic oligonucleotide
ccggttagggagtctctgggttccgccgac

SEQ ID NO: 330756 - DNA, 30 bp, Artificial Sequence
  Synthetic oligonucleotide
cccaatgtgcgtgataaaccaaaatccgac

SEQ ID NO: 330757 - DNA, 30 bp, Artificial Sequence
  Synthetic oligonucleotide
gtaggttctgggtgctggctagaatccgac

SEQ ID NO: 330758 - DNA, 30 bp, Artificial Sequence
  Synthetic oligonucleotide
tgcaaagcagctggcgcatcacgctccgac

SEQ ID NO: 330759 - DNA, 30 bp, Artificial Sequence
  Synthetic oligonucleotide
ccttgaatgtttaatgtagctctctccgac

SEQ ID NO: 330760 - DNA, 30 bp, Artificial Sequence
  Synthetic oligonucleotide
ctcctcatttttcagcaggactagtccgac

SEQ ID NO: 330761 - DNA, 30 bp, Artificial Sequence
  Synthetic oligonucleotide
tctgatcttacaacgaagcttgggtccgac

SEQ ID NO: 330762 - DNA, 30 bp, Artificial Sequence
  Synthetic oligonucleotide
ggggcagaaaagcgatgcgcgatttccgac

SEQ ID NO: 330763 - DNA, 30 bp, Artificial Sequence
  Synthetic oligonucleotide
gtacccccgctcactggattaaaaagcgac

SEQ ID NO: 330764 - DNA, 30 bp, Artificial Sequence
  Synthetic oligonucleotide
gatgagaggtctcaagcggctcgaagcgac

SEQ ID NO: 330765 - DNA, 30 bp, Artificial Sequence
  Synthetic oligonucleotide
accattcagggtctgaacggcagcagcgac

SEQ ID NO: 330766 - DNA, 30 bp, Artificial Sequence
  Synthetic oligonucleotide
actaataggcccgtatacgtgcagagcgac

SEQ ID NO: 330767 - DNA, 30 bp, Artificial Sequence
  Synthetic oligonucleotide
ctttggggactaagtgtgctcgagagcgac

SEQ ID NO: 330768 - DNA, 30 bp, Artificial Sequence
  Synthetic oligonucleotide
tttcaactaacgaactgtggatggagcgac

SEQ ID NO: 330769 - DNA, 30 bp, Artificial Sequence
  Synthetic oligonucleotide
ttcgatactaaattaataattatgagcgac

SEQ ID NO: 330770 - DNA, 30 bp, Artificial Sequence
  Synthetic oligonucleotide
tttcaagcacgcgtaatcccgcctagcgac

SEQ ID NO: 330771 - DNA, 30 bp, Artificial Sequence
  Synthetic oligonucleotide
atggacatccgtgagcctagtggtagcgac

SEQ ID NO: 330772 - DNA, 30 bp, Artificial Sequence
  Synthetic oligonucleotide
ttttcaggcatttgtaaattctcacgcgac

SEQ ID NO: 330773 - DNA, 30 bp, Artificial Sequence
  Synthetic oligonucleotide
gtaccatcaggtacgtacccgttacgcgac

SEQ ID NO: 330774 - DNA, 30 bp, Artificial Sequence
  Synthetic oligonucleotide
gggataaaacaggggtatatatgccgcgac

SEQ ID NO: 330775 - DNA, 30 bp, Artificial Sequence
  Synthetic oligonucleotide
ggtcactgtccagtagagcagccgcgcgac

SEQ ID NO: 330776 - DNA, 30 bp, Artificial Sequence
  Synthetic oligonucleotide
agcttcggtgatcttcatatccggcgcgac

SEQ ID NO: 330777 - DNA, 30 bp, Artificial Sequence
  Synthetic oligonucleotide
atcgccaaatagctcagatcgatgcgcgac

SEQ ID NO: 330778 - DNA, 30 bp, Artificial Sequence
  Synthetic oligonucleotide
tctaaccgtatccttgcttagcaaggcgac

SEQ ID NO: 330779 - DNA, 30 bp, Artificial Sequence
  Synthetic oligonucleotide
taagaagaagtttcgccgaaacacggcgac

SEQ ID NO: 330780 - DNA, 30 bp, Artificial Sequence
  Synthetic oligonucleotide
acacggggcgttgcaagcagggtcggcgac

SEQ ID NO: 330781 - DNA, 30 bp, Artificial Sequence
  Synthetic oligonucleotide
tattcccgttcagtgaatagtttcggcgac

SEQ ID NO: 330782 - DNA, 30 bp, Artificial Sequence
  Synthetic oligonucleotide
ggcgacttatctcgagggttgcggggcgac

SEQ ID NO: 330783 - DNA, 30 bp, Artificial Sequence
  Synthetic oligonucleotide
catccacgacgcacgggcatgttgggcgac

SEQ ID NO: 330784 - DNA, 30 bp, Artificial Sequence
  Synthetic oligonucleotide
ttggttctgtcgggcgagttctcatgcgac

SEQ ID NO: 330785 - DNA, 30 bp, Artificial Sequence
  Synthetic oligonucleotide
tatgtatgtacaaagtgtcaatgatgcgac

SEQ ID NO: 330786 - DNA, 30 bp, Artificial Sequence
  Synthetic oligonucleotide
tctcggcgctagtgtatcgaggtatgcgac

SEQ ID NO: 330787 - DNA, 30 bp, Artificial Sequence
  Synthetic oligonucleotide
gatggcggttatacccgacaggtctgcgac

SEQ ID NO: 330788 - DNA, 30 bp, Artificial Sequence
  Synthetic oligonucleotide
gttaaaaggtgtaagcctgcaaagtgcgac

SEQ ID NO: 330789 - DNA, 30 bp, Artificial Sequence
  Synthetic oligonucleotide
atctcgtgacacaggggagtcaaaatcgac

SEQ ID NO: 330790 - DNA, 30 bp, Artificial Sequence
  Synthetic oligonucleotide
taagtcaagacaccatgcgtacgaatcgac

SEQ ID NO: 330791 - DNA, 30 bp, Artificial Sequence
  Synthetic oligonucleotide
cgcacagccctcaagcatattcgaatcgac

SEQ ID NO: 330792 - DNA, 30 bp, Artificial Sequence
  Synthetic oligonucleotide
tggtgtaggtcggtagtataattaatcgac

SEQ ID NO: 330793 - DNA, 30 bp, Artificial Sequence
  Synthetic oligonucleotide
gaaggtacgaggacaaacttgcccatcgac

SEQ ID NO: 330794 - DNA, 30 bp, Artificial Sequence
  Synthetic oligonucleotide
gtcttaaccatttcataaccaccgatcgac

SEQ ID NO: 330795 - DNA, 30 bp, Artificial Sequence
  Synthetic oligonucleotide
gctgtgggtatcatagtatcatcgatcgac

SEQ ID NO: 330796 - DNA, 30 bp, Artificial Sequence
  Synthetic oligonucleotide
gttcgtaagtacggcactttacggatcgac

SEQ ID NO: 330797 - DNA, 30 bp, Artificial Sequence
  Synthetic oligonucleotide
aagaactgcactcttccattcaagctcgac

SEQ ID NO: 330798 - DNA, 30 bp, Artificial Sequence
  Synthetic oligonucleotide
aagcacagcccgtgagtcgggaagctcgac

SEQ ID NO: 330799 - DNA, 30 bp, Artificial Sequence
  Synthetic oligonucleotide
tgaccgcatcgagcatcacaacatctcgac

SEQ ID NO: 330800 - DNA, 30 bp, Artificial Sequence
  Synthetic oligonucleotide
gatgcttgtgcgggaatgttataagtcgac

SEQ ID NO: 330801 - DNA, 30 bp, Artificial Sequence
  Synthetic oligonucleotide
cttagagcattcagataaaatctagtcgac

SEQ ID NO: 330802 - DNA, 30 bp, Artificial Sequence
  Synthetic oligonucleotide
aaagtaattagaacgtgagcacatgtcgac

SEQ ID NO: 330803 - DNA, 30 bp, Artificial Sequence
  Synthetic oligonucleotide
ggatcggaggtgaccttttaccttgtcgac

SEQ ID NO: 330804 - DNA, 30 bp, Artificial Sequence
  Synthetic oligonucleotide
tccgtaagggcagacgatggacaattcgac

SEQ ID NO: 330805 - DNA, 30 bp, Artificial Sequence
  Synthetic oligonucleotide
ctgggtacgagtatagagcgtctcttcgac

SEQ ID NO: 330806 - DNA, 30 bp, Artificial Sequence
  Synthetic oligonucleotide
gtggcaccgacgtctacaacctggttcgac

SEQ ID NO: 330807 - DNA, 30 bp, Artificial Sequence
  Synthetic oligonucleotide
tatagatgcaaagcattgactaatttcgac

SEQ ID NO: 330808 - DNA, 30 bp, Artificial Sequence
  Synthetic oligonucleotide
tgagcatggcaaaaaattacatctttcgac

SEQ ID NO: 330809 - DNA, 30 bp, Artificial Sequence
  Synthetic oligonucleotide
ggggaacatgaggtacgaaagtgtttcgac

SEQ ID NO: 330810 - DNA, 30 bp, Artificial Sequence
  Synthetic oligonucleotide
caaatgatgaaccaatgtacggaaaaggac

SEQ ID NO: 330811 - DNA, 30 bp, Artificial Sequence
  Synthetic oligonucleotide
tacgcagagtaaggtcatctgcccaaggac

SEQ ID NO: 330812 - DNA, 30 bp, Artificial Sequence
  Synthetic oligonucleotide
tgcgcaaattgtccattcctgttcaaggac

SEQ ID NO: 330813 - DNA, 30 bp, Artificial Sequence
  Synthetic oligonucleotide
ctcccctaataggcgcaccgaaagaaggac

SEQ ID NO: 330814 - DNA, 30 bp, Artificial Sequence
  Synthetic oligonucleotide
cctcgttccgtttgtacgtgccggaaggac

SEQ ID NO: 330815 - DNA, 30 bp, Artificial Sequence
  Synthetic oligonucleotide
ttctgctggcgtctcctagccgggaaggac

SEQ ID NO: 330816 - DNA, 30 bp, Artificial Sequence
  Synthetic oligonucleotide
atcggggttcatggtcactggtataaggac

SEQ ID NO: 330817 - DNA, 30 bp, Artificial Sequence
  Synthetic oligonucleotide
aagccgtaaggctagtagtcctctaaggac

SEQ ID NO: 330818 - DNA, 30 bp, Artificial Sequence
  Synthetic oligonucleotide
tgtcttaactccccaaattttccccaggac

SEQ ID NO: 330819 - DNA, 30 bp, Artificial Sequence
  Synthetic oligonucleotide
agaagcttcttgtagtagctatggcaggac

SEQ ID NO: 330820 - DNA, 30 bp, Artificial Sequence
  Synthetic oligonucleotide
gtgctatcgagattgggtgagagagaggac

SEQ ID NO: 330821 - DNA, 30 bp, Artificial Sequence
  Synthetic oligonucleotide
agcacgttttagcgcaaaggcagcgaggac

SEQ ID NO: 330822 - DNA, 30 bp, Artificial Sequence
  Synthetic oligonucleotide
tgtaggctgacctgtaacgcacctgaggac

SEQ ID NO: 330823 - DNA, 30 bp, Artificial Sequence
  Synthetic oligonucleotide
agagatgtttcataccgtctggctgaggac

SEQ ID NO: 330824 - DNA, 30 bp, Artificial Sequence
  Synthetic oligonucleotide
cattattggatcggcgtaaacgcataggac

SEQ ID NO: 330825 - DNA, 30 bp, Artificial Sequence
  Synthetic oligonucleotide
agtcaacggccacggggtatgcgataggac

SEQ ID NO: 330826 - DNA, 30 bp, Artificial Sequence
  Synthetic oligonucleotide
tatcttaagctcggtacatatttctaggac

SEQ ID NO: 330827 - DNA, 30 bp, Artificial Sequence
  Synthetic oligonucleotide
gacgttaggcctgggtattcttcgtaggac

SEQ ID NO: 330828 - DNA, 30 bp, Artificial Sequence
  Synthetic oligonucleotide
ccacaagtcgttcagggtagggtgtaggac

SEQ ID NO: 330829 - DNA, 30 bp, Artificial Sequence
  Synthetic oligonucleotide
ctcgatcttctgtctcggaacggttaggac

SEQ ID NO: 330830 - DNA, 30 bp, Artificial Sequence
  Synthetic oligonucleotide
atcgttgacacaatggaccaacaaacggac

SEQ ID NO: 330831 - DNA, 30 bp, Artificial Sequence
  Synthetic oligonucleotide
caagctgaggtccgttataggagaacggac

SEQ ID NO: 330832 - DNA, 30 bp, Artificial Sequence
  Synthetic oligonucleotide
ctaagaaatatacttcgactattaacggac

SEQ ID NO: 330833 - DNA, 30 bp, Artificial Sequence
  Synthetic oligonucleotide
ttataggcagaaaggcaagcgggcacggac

SEQ ID NO: 330834 - DNA, 30 bp, Artificial Sequence
  Synthetic oligonucleotide
aacgtggttgatcaaggcctttgcacggac

SEQ ID NO: 330835 - DNA, 30 bp, Artificial Sequence
  Synthetic oligonucleotide
acgttgcacttagtcccacgcatcacggac

SEQ ID NO: 330836 - DNA, 30 bp, Artificial Sequence
  Synthetic oligonucleotide
atctaagcctagcccccttagacgacggac

SEQ ID NO: 330837 - DNA, 30 bp, Artificial Sequence
  Synthetic oligonucleotide
aagaatgtcttattttggggttcgacggac

SEQ ID NO: 330838 - DNA, 30 bp, Artificial Sequence
  Synthetic oligonucleotide
agtcgtaatgcagaatacattttgacggac

SEQ ID NO: 330839 - DNA, 30 bp, Artificial Sequence
  Synthetic oligonucleotide
acaggtcgaactggtatcccgtatacggac

SEQ ID NO: 330840 - DNA, 30 bp, Artificial Sequence
  Synthetic oligonucleotide
tcctttaggggtggcgtctactgtacggac

SEQ ID NO: 330841 - DNA, 30 bp, Artificial Sequence
  Synthetic oligonucleotide
tcttgcatggtcggtgggaccgcgccggac

SEQ ID NO: 330842 - DNA, 30 bp, Artificial Sequence
  Synthetic oligonucleotide
ccctactcacttctcctatggcggccggac

SEQ ID NO: 330843 - DNA, 30 bp, Artificial Sequence
  Synthetic oligonucleotide
ggactctgcgggagttagtttcatccggac

SEQ ID NO: 330844 - DNA, 30 bp, Artificial Sequence
  Synthetic oligonucleotide
gctatagaactacagcaccaggctccggac

SEQ ID NO: 330845 - DNA, 31 bp, Artificial Sequence
  Synthetic oligonucleotide
ggtcatatgtcgtgcgggtagccaagcggac

SEQ ID NO: 330846 - DNA, 30 bp, Artificial Sequence
  Synthetic oligonucleotide
cgattggatgcttgttcaaggcaagcggac

SEQ ID NO: 330847 - DNA, 30 bp, Artificial Sequence
  Synthetic oligonucleotide
aataggtggcctgacgtggacggagcggac

SEQ ID NO: 330848 - DNA, 30 bp, Artificial Sequence
  Synthetic oligonucleotide
taatggcaccccaaggctgttttagcggac

SEQ ID NO: 330849 - DNA, 30 bp, Artificial Sequence
  Synthetic oligonucleotide
catcttccggcaattgagctataggcggac

SEQ ID NO: 330850 - DNA, 30 bp, Artificial Sequence
  Synthetic oligonucleotide
tggtcgtagagtgtgaacatctgggcggac

SEQ ID NO: 330851 - DNA, 30 bp, Artificial Sequence
  Synthetic oligonucleotide
accaggtcgcccctcggcccgtatgcggac

SEQ ID NO: 330852 - DNA, 30 bp, Artificial Sequence
  Synthetic oligonucleotide
taaggaaatagagtttgtccctaatcggac

SEQ ID NO: 330853 - DNA, 30 bp, Artificial Sequence
  Synthetic oligonucleotide
gctgggcttacgcggcggttcaagtcggac

SEQ ID NO: 330854 - DNA, 30 bp, Artificial Sequence
  Synthetic oligonucleotide
aagcatcagcagtacgtgtgtatgtcggac

SEQ ID NO: 330855 - DNA, 30 bp, Artificial Sequence
  Synthetic oligonucleotide
ctgtcaaacgaatctatcaaggattcggac

SEQ ID NO: 330856 - DNA, 30 bp, Artificial Sequence
  Synthetic oligonucleotide
actaattcctgggcagagccaacttcggac

SEQ ID NO: 330857 - DNA, 30 bp, Artificial Sequence
  Synthetic oligonucleotide
gagaattgtgcgttcgtaagcatttcggac

SEQ ID NO: 330858 - DNA, 30 bp, Artificial Sequence
  Synthetic oligonucleotide
cgttcggtacgtgtggcctgatgaagggac

SEQ ID NO: 330859 - DNA, 30 bp, Artificial Sequence
  Synthetic oligonucleotide
actagaatatgggctagcgggcgtagggac

SEQ ID NO: 330860 - DNA, 30 bp, Artificial Sequence
  Synthetic oligonucleotide
gaatctgcaggtgtgtcatttaaacgggac

SEQ ID NO: 330861 - DNA, 30 bp, Artificial Sequence
  Synthetic oligonucleotide
aacttgacagacccagggtgcggacgggac

SEQ ID NO: 330862 - DNA, 30 bp, Artificial Sequence
  Synthetic oligonucleotide
cgcccctataattgctctaatgtacgggac

SEQ ID NO: 330863 - DNA, 30 bp, Artificial Sequence
  Synthetic oligonucleotide
gctatgcaggtttcacatagccaccgggac

SEQ ID NO: 330864 - DNA, 30 bp, Artificial Sequence
  Synthetic oligonucleotide
acggtatcctttccaaaagtcgcccgggac

SEQ ID NO: 330865 - DNA, 30 bp, Artificial Sequence
  Synthetic oligonucleotide
gggcgttctgactcttcctgtaagcgggac

SEQ ID NO: 330866 - DNA, 30 bp, Artificial Sequence
  Synthetic oligonucleotide
tggatttgtgagcccacccctccgcgggac

SEQ ID NO: 330867 - DNA, 30 bp, Artificial Sequence
  Synthetic oligonucleotide
tgcctaaaagagccggttacgactcgggac

SEQ ID NO: 330868 - DNA, 30 bp, Artificial Sequence
  Synthetic oligonucleotide
tacagttcagtgaacccacgaaaaggggac

SEQ ID NO: 330869 - DNA, 30 bp, Artificial Sequence
  Synthetic oligonucleotide
actagactcctgtagacagaaaccggggac

SEQ ID NO: 330870 - DNA, 30 bp, Artificial Sequence
  Synthetic oligonucleotide
aagctgagtaccatatcggcgcggggggac

SEQ ID NO: 330871 - DNA, 30 bp, Artificial Sequence
  Synthetic oligonucleotide
tacggaggatcaggcacaaggattggggac

SEQ ID NO: 330872 - DNA, 30 bp, Artificial Sequence
  Synthetic oligonucleotide
ttattagaggatcattaaagatttggggac

SEQ ID NO: 330873 - DNA, 30 bp, Artificial Sequence
  Synthetic oligonucleotide
aatgggggacgccggccagcatactgggac

SEQ ID NO: 330874 - DNA, 30 bp, Artificial Sequence
  Synthetic oligonucleotide
gaaaacattaaaagttacgttcgctgggac

SEQ ID NO: 330875 - DNA, 30 bp, Artificial Sequence
  Synthetic oligonucleotide
aaacgtctagatgagttgccagagtgggac

SEQ ID NO: 330876 - DNA, 30 bp, Artificial Sequence
  Synthetic oligonucleotide
aagactttctcttgcgtcctggggtgggac

SEQ ID NO: 330877 - DNA, 30 bp, Artificial Sequence
  Synthetic oligonucleotide
atgggtggaagtaaaaatttggtgtgggac

SEQ ID NO: 330878 - DNA, 30 bp, Artificial Sequence
  Synthetic oligonucleotide
ataaatatcatacactgactgtcttgggac

SEQ ID NO: 330879 - DNA, 30 bp, Artificial Sequence
  Synthetic oligonucleotide
ttggccattgagtatagtttaataatggac

SEQ ID NO: 330880 - DNA, 30 bp, Artificial Sequence
  Synthetic oligonucleotide
ctgatatgtttaccactcggtttcatggac

SEQ ID NO: 330881 - DNA, 30 bp, Artificial Sequence
  Synthetic oligonucleotide
ttgtcctcaccaaagttggattcgatggac

SEQ ID NO: 330882 - DNA, 30 bp, Artificial Sequence
  Synthetic oligonucleotide
cttttcgagacgaccattgcatggatggac

SEQ ID NO: 330883 - DNA, 30 bp, Artificial Sequence
  Synthetic oligonucleotide
gttatgcaaggaagcgtcatcattatggac

SEQ ID NO: 330884 - DNA, 30 bp, Artificial Sequence
  Synthetic oligonucleotide
cttgtcgactgcgaccaaaatcttatggac

SEQ ID NO: 330885 - DNA, 30 bp, Artificial Sequence
  Synthetic oligonucleotide
gacgagccccgcccatacgcggcactggac

SEQ ID NO: 330886 - DNA, 30 bp, Artificial Sequence
  Synthetic oligonucleotide
ttccttggggatacaaggaaggccctggac

SEQ ID NO: 330887 - DNA, 30 bp, Artificial Sequence
  Synthetic oligonucleotide
ggaacacttgggtccagaaagctgctggac

SEQ ID NO: 330888 - DNA, 30 bp, Artificial Sequence
  Synthetic oligonucleotide
cgaaattgtaacgccccttccgcagtggac

SEQ ID NO: 330889 - DNA, 30 bp, Artificial Sequence
  Synthetic oligonucleotide
cagaaagatcgtaataaactatcagtggac

SEQ ID NO: 330890 - DNA, 30 bp, Artificial Sequence
  Synthetic oligonucleotide
cggcttgccgattagtaaatagtagtggac

SEQ ID NO: 330891 - DNA, 30 bp, Artificial Sequence
  Synthetic oligonucleotide
ggttgtgccaaaaagcgagcttgcgtggac

SEQ ID NO: 330892 - DNA, 30 bp, Artificial Sequence
  Synthetic oligonucleotide
cgatcgtaggaggggggcctggaggtggac

SEQ ID NO: 330893 - DNA, 30 bp, Artificial Sequence
  Synthetic oligonucleotide
tactacgaagatcagcggcctaatgtggac

SEQ ID NO: 330894 - DNA, 30 bp, Artificial Sequence
  Synthetic oligonucleotide
agtgtcatgaacgcatacattgttgtggac

SEQ ID NO: 330895 - DNA, 30 bp, Artificial Sequence
  Synthetic oligonucleotide
agggggtgcaacacacccgcatcattggac

SEQ ID NO: 330896 - DNA, 30 bp, Artificial Sequence
  Synthetic oligonucleotide
ctaagttggtagaggaattctaacttggac

SEQ ID NO: 330897 - DNA, 30 bp, Artificial Sequence
  Synthetic oligonucleotide
cctaaaaaggtggtacacccttgcttggac

SEQ ID NO: 330898 - DNA, 30 bp, Artificial Sequence
  Synthetic oligonucleotide
ttccgaggctatcccgcgtaccggttggac

SEQ ID NO: 330899 - DNA, 30 bp, Artificial Sequence
  Synthetic oligonucleotide
ggcccattttgcgctggaactgtgttggac

SEQ ID NO: 330900 - DNA, 30 bp, Artificial Sequence
  Synthetic oligonucleotide
tcatgtagagggtgattaggaaatttggac

SEQ ID NO: 330901 - DNA, 30 bp, Artificial Sequence
  Synthetic oligonucleotide
agcagagtgcacttggcgagcagaaatgac

SEQ ID NO: 330902 - DNA, 30 bp, Artificial Sequence
  Synthetic oligonucleotide
ggtcgtgagagtactgggctcagaaatgac

SEQ ID NO: 330903 - DNA, 30 bp, Artificial Sequence
  Synthetic oligonucleotide
ggcttgttaccaggcgggtgaaacaatgac

SEQ ID NO: 330904 - DNA, 30 bp, Artificial Sequence
  Synthetic oligonucleotide
aggctgctgcacctggaatagctcaatgac

SEQ ID NO: 330905 - DNA, 30 bp, Artificial Sequence
  Synthetic oligonucleotide
atagcgacttataggactcatctcaatgac

SEQ ID NO: 330906 - DNA, 30 bp, Artificial Sequence
  Synthetic oligonucleotide
tgtcgtgccgatcatttagtgaagaatgac

SEQ ID NO: 330907 - DNA, 30 bp, Artificial Sequence
  Synthetic oligonucleotide
taccgcacaggcgtacactggtggaatgac

SEQ ID NO: 330908 - DNA, 30 bp, Artificial Sequence
  Synthetic oligonucleotide
cataccgcaattggtgcactagctaatgac

SEQ ID NO: 330909 - DNA, 30 bp, Artificial Sequence
  Synthetic oligonucleotide
accgttaagtctcctcataaagaacatgac

SEQ ID NO: 330910 - DNA, 30 bp, Artificial Sequence
  Synthetic oligonucleotide
accgtcacgtgtactatctatggacatgac

SEQ ID NO: 330911 - DNA, 30 bp, Artificial Sequence
  Synthetic oligonucleotide
ataatgtcatgggctgccgagttacatgac

SEQ ID NO: 330912 - DNA, 30 bp, Artificial Sequence
  Synthetic oligonucleotide
cactagtgacgcataaaaggctgccatgac

SEQ ID NO: 330913 - DNA, 30 bp, Artificial Sequence
  Synthetic oligonucleotide
aaacggagagtcttttcgaaatctcatgac

SEQ ID NO: 330914 - DNA, 30 bp, Artificial Sequence
  Synthetic oligonucleotide
ctcgaggatgcatctctgcagcaagatgac

SEQ ID NO: 330915 - DNA, 30 bp, Artificial Sequence
  Synthetic oligonucleotide
agaagaaacgtttgtacgatccccgatgac

SEQ ID NO: 330916 - DNA, 30 bp, Artificial Sequence
  Synthetic oligonucleotide
ttaacaccattgaatcaccgtaatgatgac

SEQ ID NO: 330917 - DNA, 30 bp, Artificial Sequence
  Synthetic oligonucleotide
agaaatatattaaagatatgcgatgatgac

SEQ ID NO: 330918 - DNA, 30 bp, Artificial Sequence
  Synthetic oligonucleotide
gtatcggccgcatccgaaaactatgatgac

SEQ ID NO: 330919 - DNA, 30 bp, Artificial Sequence
  Synthetic oligonucleotide
tggatggcttttacctatcgccctgatgac

SEQ ID NO: 330920 - DNA, 30 bp, Artificial Sequence
  Synthetic oligonucleotide
ttaattggtaaaagtaatatctgtgatgac

SEQ ID NO: 330921 - DNA, 30 bp, Artificial Sequence
  Synthetic oligonucleotide
ggagtcgtaatcggccgtgtttttgatgac

SEQ ID NO: 330922 - DNA, 30 bp, Artificial Sequence
  Synthetic oligonucleotide
ggtccgacaacattgctcactggatatgac

SEQ ID NO: 330923 - DNA, 30 bp, Artificial Sequence
  Synthetic oligonucleotide
gggttgacttcaaaagatcacgactatgac

SEQ ID NO: 330924 - DNA, 30 bp, Artificial Sequence
  Synthetic oligonucleotide
catgcgcgctttgattctggcagctatgac

SEQ ID NO: 330925 - DNA, 30 bp, Artificial Sequence
  Synthetic oligonucleotide
tatatactaaggtgccctaggatgtatgac

SEQ ID NO: 330926 - DNA, 30 bp, Artificial Sequence
  Synthetic oligonucleotide
ctaataggaatggtggcagcggtttatgac

SEQ ID NO: 330927 - DNA, 30 bp, Artificial Sequence
  Synthetic oligonucleotide
gtcctggtggggtactagccaaccactgac

SEQ ID NO: 330928 - DNA, 30 bp, Artificial Sequence
  Synthetic oligonucleotide
atggccggaatgtgattcgaggccactgac

SEQ ID NO: 330929 - DNA, 30 bp, Artificial Sequence
  Synthetic oligonucleotide
tggctgagtagtggatcatttcagactgac

SEQ ID NO: 330930 - DNA, 30 bp, Artificial Sequence
  Synthetic oligonucleotide
tctcaagtacagtccttgagctggactgac

SEQ ID NO: 330931 - DNA, 30 bp, Artificial Sequence
  Synthetic oligonucleotide
cgcttgaggctacttcctggttatactgac

SEQ ID NO: 330932 - DNA, 30 bp, Artificial Sequence
  Synthetic oligonucleotide
tttaatgtaaacgagtgaggaggtactgac

SEQ ID NO: 330933 - DNA, 30 bp, Artificial Sequence
  Synthetic oligonucleotide
caatctcattagtgaattgcacaacctgac

SEQ ID NO: 330934 - DNA, 30 bp, Artificial Sequence
  Synthetic oligonucleotide
agcaatttgtgctctatacccgtacctgac

SEQ ID NO: 330935 - DNA, 30 bp, Artificial Sequence
  Synthetic oligonucleotide
gtattccggcgcaaaacaataaggcctgac

SEQ ID NO: 330936 - DNA, 30 bp, Artificial Sequence
  Synthetic oligonucleotide
tgcttgggcgtccagcatcgggcagctgac

SEQ ID NO: 330937 - DNA, 30 bp, Artificial Sequence
  Synthetic oligonucleotide
gcgttggacctagacgggtcgtcagctgac

SEQ ID NO: 330938 - DNA, 30 bp, Artificial Sequence
  Synthetic oligonucleotide
ggaggcgcatggtcaacggatcgagctgac

SEQ ID NO: 330939 - DNA, 30 bp, Artificial Sequence
  Synthetic oligonucleotide
agcagtatacccccttctctatgagctgac

SEQ ID NO: 330940 - DNA, 30 bp, Artificial Sequence
  Synthetic oligonucleotide
actggtattcattcacaagctcacgctgac

SEQ ID NO: 330941 - DNA, 30 bp, Artificial Sequence
  Synthetic oligonucleotide
ggctgcccgaggcaggaagtccgcgctgac

SEQ ID NO: 330942 - DNA, 30 bp, Artificial Sequence
  Synthetic oligonucleotide
tctaaagtccatcagcgtattttcgctgac

SEQ ID NO: 330943 - DNA, 30 bp, Artificial Sequence
  Synthetic oligonucleotide
aaggaagctcgagttagttacccggctgac

SEQ ID NO: 330944 - DNA, 30 bp, Artificial Sequence
  Synthetic oligonucleotide
tatccagagatcccgtccagaggggctgac

SEQ ID NO: 330945 - DNA, 30 bp, Artificial Sequence
  Synthetic oligonucleotide
gtggacagccggggaataactatggctgac

SEQ ID NO: 330946 - DNA, 30 bp, Artificial Sequence
  Synthetic oligonucleotide
aaagagtacttaatgtgttgcctggctgac

SEQ ID NO: 330947 - DNA, 30 bp, Artificial Sequence
  Synthetic oligonucleotide
agccagaaagcctatgcctgcgtgtctgac

SEQ ID NO: 330948 - DNA, 30 bp, Artificial Sequence
  Synthetic oligonucleotide
actccggttgaaatccgtcacgaaagtgac

SEQ ID NO: 330949 - DNA, 30 bp, Artificial Sequence
  Synthetic oligonucleotide
tttcgtgcgtgaaatcatatgtaaagtgac

SEQ ID NO: 330950 - DNA, 30 bp, Artificial Sequence
  Synthetic oligonucleotide
cgactttttattcctgttgctagaagtgac

SEQ ID NO: 330951 - DNA, 30 bp, Artificial Sequence
  Synthetic oligonucleotide
aaatcgtgagaacgtgcgtatctaagtgac

SEQ ID NO: 330952 - DNA, 30 bp, Artificial Sequence
  Synthetic oligonucleotide
tcctaaacgttcatacatgaacgcagtgac

SEQ ID NO: 330953 - DNA, 30 bp, Artificial Sequence
  Synthetic oligonucleotide
ccgtgtgacctgcaagaagtggagagtgac

SEQ ID NO: 330954 - DNA, 30 bp, Artificial Sequence
  Synthetic oligonucleotide
cgccccgctaccacgttgtattagagtgac

SEQ ID NO: 330955 - DNA, 30 bp, Artificial Sequence
  Synthetic oligonucleotide
taccggaaacgcaacgacttgtatagtgac

SEQ ID NO: 330956 - DNA, 30 bp, Artificial Sequence
  Synthetic oligonucleotide
aagtacacaacgactgtcagtccccgtgac

SEQ ID NO: 330957 - DNA, 30 bp, Artificial Sequence
  Synthetic oligonucleotide
attaaggcctcaggcctccctgcccgtgac

SEQ ID NO: 330958 - DNA, 30 bp, Artificial Sequence
  Synthetic oligonucleotide
tcgctattctgggccaaagaataaggtgac

SEQ ID NO: 330959 - DNA, 30 bp, Artificial Sequence
  Synthetic oligonucleotide
gacggtccgcgtcaccgcagtataggtgac

SEQ ID NO: 330960 - DNA, 30 bp, Artificial Sequence
  Synthetic oligonucleotide
cgataggggcaacatccggtttagggtgac

SEQ ID NO: 330961 - DNA, 30 bp, Artificial Sequence
  Synthetic oligonucleotide
ttcactgagatcacggtagtaactggtgac

SEQ ID NO: 330962 - DNA, 30 bp, Artificial Sequence
  Synthetic oligonucleotide
ggaactcacttgcacactatcaagtgtgac

SEQ ID NO: 330963 - DNA, 30 bp, Artificial Sequence
  Synthetic oligonucleotide
cccggaagtttacaaagaccgaggtgtgac

SEQ ID NO: 330964 - DNA, 30 bp, Artificial Sequence
  Synthetic oligonucleotide
cactcgttgtatctatattgccccattgac

SEQ ID NO: 330965 - DNA, 30 bp, Artificial Sequence
  Synthetic oligonucleotide
gtaagtggacgtcggctttgattacttgac

SEQ ID NO: 330966 - DNA, 30 bp, Artificial Sequence
  Synthetic oligonucleotide
ttcataaaaggcccgaccgacatccttgac

SEQ ID NO: 330967 - DNA, 30 bp, Artificial Sequence
  Synthetic oligonucleotide
atcgtccgcaaactcacgtgaacagttgac

SEQ ID NO: 330968 - DNA, 30 bp, Artificial Sequence
  Synthetic oligonucleotide
gggggccccacaggagctaactgagttgac

SEQ ID NO: 330969 - DNA, 31 bp, Artificial Sequence
  Synthetic oligonucleotide
ccgatcttaacgtggccgtgagatagttgac

SEQ ID NO: 330970 - DNA, 30 bp, Artificial Sequence
  Synthetic oligonucleotide
ggcataccggcccaccatcaaggcgttgac

SEQ ID NO: 330971 - DNA, 30 bp, Artificial Sequence
  Synthetic oligonucleotide
ggtaactcaggttccattttaccggttgac

SEQ ID NO: 330972 - DNA, 30 bp, Artificial Sequence
  Synthetic oligonucleotide
aataatttcccgtgatctataagggttgac

SEQ ID NO: 330973 - DNA, 30 bp, Artificial Sequence
  Synthetic oligonucleotide
acgtgcgataaccgcccgggacaatttgac

SEQ ID NO: 330974 - DNA, 30 bp, Artificial Sequence
  Synthetic oligonucleotide
gatgtaattttgtgatacgatatatttgac

SEQ ID NO: 330975 - DNA, 30 bp, Artificial Sequence
  Synthetic oligonucleotide
cgctatgcgacaatttactcgaactttgac

SEQ ID NO: 330976 - DNA, 30 bp, Artificial Sequence
  Synthetic oligonucleotide
taggtgcggatgagcttaaatcagtttgac

SEQ ID NO: 330977 - DNA, 30 bp, Artificial Sequence
  Synthetic oligonucleotide
cagaacagcagtggataagttgagtttgac

SEQ ID NO: 330978 - DNA, 30 bp, Artificial Sequence
  Synthetic oligonucleotide
tgacgattaaggcatctcataacgtttgac

SEQ ID NO: 330979 - DNA, 30 bp, Artificial Sequence
  Synthetic oligonucleotide
cgattcccagacgtccgtggtgggtttgac

SEQ ID NO: 330980 - DNA, 30 bp, Artificial Sequence
  Synthetic oligonucleotide
ggacaaagttgaatcagagaagattttgac

SEQ ID NO: 330981 - DNA, 30 bp, Artificial Sequence
  Synthetic oligonucleotide
gatttcatccctacgtaaaacgattttgac

SEQ ID NO: 330982 - DNA, 30 bp, Artificial Sequence
  Synthetic oligonucleotide
cacatggacccggggtgggtaataaaatac

SEQ ID NO: 330983 - DNA, 30 bp, Artificial Sequence
  Synthetic oligonucleotide
gaaatcggcgggacccgtcgagtaaaatac

SEQ ID NO: 330984 - DNA, 30 bp, Artificial Sequence
  Synthetic oligonucleotide
tagcatgtttgaatcgcctagttaaaatac

SEQ ID NO: 330985 - DNA, 30 bp, Artificial Sequence
  Synthetic oligonucleotide
gccgtgagggattatctagggtccaaatac

SEQ ID NO: 330986 - DNA, 30 bp, Artificial Sequence
  Synthetic oligonucleotide
ttaatcacggggatcaacaatcagaaatac

SEQ ID NO: 330987 - DNA, 30 bp, Artificial Sequence
  Synthetic oligonucleotide
ttctctagcaccttaaatacgaggaaatac

SEQ ID NO: 330988 - DNA, 30 bp, Artificial Sequence
  Synthetic oligonucleotide
ggagtatcggagttcatgccgaggaaatac

SEQ ID NO: 330989 - DNA, 30 bp, Artificial Sequence
  Synthetic oligonucleotide
gatcaaggattaacactcagggggaaatac

SEQ ID NO: 330990 - DNA, 30 bp, Artificial Sequence
  Synthetic oligonucleotide
gggaccgtcacaaaggtgtagcgtaaatac

SEQ ID NO: 330991 - DNA, 30 bp, Artificial Sequence
  Synthetic oligonucleotide
gggaggctcgttcgacacagaattaaatac

SEQ ID NO: 330992 - DNA, 30 bp, Artificial Sequence
  Synthetic oligonucleotide
atggtccatgggtccatcatctcacaatac

SEQ ID NO: 330993 - DNA, 30 bp, Artificial Sequence
  Synthetic oligonucleotide
tgggcccgaatttaagatgcgatacaatac

SEQ ID NO: 330994 - DNA, 30 bp, Artificial Sequence
  Synthetic oligonucleotide
gctgacctccgttactcgtaatgccaatac

SEQ ID NO: 330995 - DNA, 30 bp, Artificial Sequence
  Synthetic oligonucleotide
taagctcttggaacaatatatactcaatac

SEQ ID NO: 330996 - DNA, 30 bp, Artificial Sequence
  Synthetic oligonucleotide
ggaagtaataagtataccggagaagaatac

SEQ ID NO: 330997 - DNA, 30 bp, Artificial Sequence
  Synthetic oligonucleotide
tcgtcccggaagatgcgttatctagaatac

SEQ ID NO: 330998 - DNA, 30 bp, Artificial Sequence
  Synthetic oligonucleotide
attggcctggtcgggtaaccccccgaatac

SEQ ID NO: 330999 - DNA, 30 bp, Artificial Sequence
  Synthetic oligonucleotide
ggataaaagtaatgcggaacagtcgaatac

SEQ ID NO: 331000 - DNA, 30 bp, Artificial Sequence
  Synthetic oligonucleotide
gttattgtagctcgaggctcaggggaatac

SEQ ID NO: 331001 - DNA, 30 bp, Artificial Sequence
  Synthetic oligonucleotide
gctaggagtttggcctagacctatgaatac

SEQ ID NO: 331002 - DNA, 30 bp, Artificial Sequence
  Synthetic oligonucleotide
attacatgctacaatgtgtttcagtaatac

SEQ ID NO: 331003 - DNA, 30 bp, Artificial Sequence
  Synthetic oligonucleotide
gcgaaacctgttgaggtcggagagtaatac

SEQ ID NO: 331004 - DNA, 30 bp, Artificial Sequence
  Synthetic oligonucleotide
tattttttgatataccgattcgcgtaatac

SEQ ID NO: 331005 - DNA, 30 bp, Artificial Sequence
  Synthetic oligonucleotide
gggcaatatggactttggtttgcgtaatac

SEQ ID NO: 331006 - DNA, 30 bp, Artificial Sequence
  Synthetic oligonucleotide
aattcagttagccaaatgaagggttaatac

SEQ ID NO: 331007 - DNA, 30 bp, Artificial Sequence
  Synthetic oligonucleotide
gtaattgcctaatatcaccatgtttaatac

SEQ ID NO: 331008 - DNA, 30 bp, Artificial Sequence
  Synthetic oligonucleotide
caaaagttgccgccccacggcaaaacatac

SEQ ID NO: 331009 - DNA, 30 bp, Artificial Sequence
  Synthetic oligonucleotide
aaagaagaagcgtgcgtgcgaagaacatac

SEQ ID NO: 331010 - DNA, 30 bp, Artificial Sequence
  Synthetic oligonucleotide
acttgtgggccatgactgatatacacatac

SEQ ID NO: 331011 - DNA, 30 bp, Artificial Sequence
  Synthetic oligonucleotide
aatatgcgcagaaggggtgaagcgacatac

SEQ ID NO: 331012 - DNA, 30 bp, Artificial Sequence
  Synthetic oligonucleotide
tccatcgggttcgtccacaagaggacatac

SEQ ID NO: 331013 - DNA, 30 bp, Artificial Sequence
  Synthetic oligonucleotide
gacaaccagtgtgggtgcgaccatacatac

SEQ ID NO: 331014 - DNA, 30 bp, Artificial Sequence
  Synthetic oligonucleotide
cgctgtatggatagtcgtgacactacatac

SEQ ID NO: 331015 - DNA, 31 bp, Artificial Sequence
  Synthetic oligonucleotide
acctgctgatgtgctatacacgactacatac

SEQ ID NO: 331016 - DNA, 30 bp, Artificial Sequence
  Synthetic oligonucleotide
aacaggctagagcctgaatcttaaccatac

SEQ ID NO: 331017 - DNA, 30 bp, Artificial Sequence
  Synthetic oligonucleotide
ttcaccagaaaatcagcagagacaccatac

SEQ ID NO: 331018 - DNA, 30 bp, Artificial Sequence
  Synthetic oligonucleotide
ggccgcgaaagctgcttatcgcccccatac

SEQ ID NO: 331019 - DNA, 30 bp, Artificial Sequence
  Synthetic oligonucleotide
cagccggggtataagcagcgcttcccatac

SEQ ID NO: 331020 - DNA, 30 bp, Artificial Sequence
  Synthetic oligonucleotide
tcaacactccacttttaagatgttccatac

SEQ ID NO: 331021 - DNA, 30 bp, Artificial Sequence
  Synthetic oligonucleotide
taggttggcctcactgatcactcagcatac

SEQ ID NO: 331022 - DNA, 30 bp, Artificial Sequence
  Synthetic oligonucleotide
tcctgggccttaagcacgcgaatagcatac

SEQ ID NO: 331023 - DNA, 30 bp, Artificial Sequence
  Synthetic oligonucleotide
agtgtgtagtacgaccggtggaccgcatac

SEQ ID NO: 331024 - DNA, 30 bp, Artificial Sequence
  Synthetic oligonucleotide
atagaaaataggttgtcaaaaagcgcatac

SEQ ID NO: 331025 - DNA, 30 bp, Artificial Sequence
  Synthetic oligonucleotide
aaagtcgattgaacacgtagggtcgcatac

SEQ ID NO: 331026 - DNA, 30 bp, Artificial Sequence
  Synthetic oligonucleotide
tggttataagtttcttactcatgggcatac

SEQ ID NO: 331027 - DNA, 30 bp, Artificial Sequence
  Synthetic oligonucleotide
aactctgttagaacgtgggcccatgcatac

SEQ ID NO: 331028 - DNA, 30 bp, Artificial Sequence
  Synthetic oligonucleotide
taaattatgcttaaatccgtgcgtgcatac

SEQ ID NO: 331029 - DNA, 30 bp, Artificial Sequence
  Synthetic oligonucleotide
agagttccgtccggtagtatgacatcatac

SEQ ID NO: 331030 - DNA, 30 bp, Artificial Sequence
  Synthetic oligonucleotide
ccaagtctagtctttacaaatagatcatac

SEQ ID NO: 331031 - DNA, 30 bp, Artificial Sequence
  Synthetic oligonucleotide
gcgttttaagcacggtgccgggtatcatac

SEQ ID NO: 331032 - DNA, 30 bp, Artificial Sequence
  Synthetic oligonucleotide
gggcatactcatggcgggagccgctcatac

SEQ ID NO: 331033 - DNA, 30 bp, Artificial Sequence
  Synthetic oligonucleotide
cggacgctgcactgggacaaagagtcatac

SEQ ID NO: 331034 - DNA, 30 bp, Artificial Sequence
  Synthetic oligonucleotide
agatagaccggggcagtccgggggtcatac

SEQ ID NO: 331035 - DNA, 30 bp, Artificial Sequence
  Synthetic oligonucleotide
tatgccatcgtttagcgagaacgttcatac

SEQ ID NO: 331036 - DNA, 30 bp, Artificial Sequence
  Synthetic oligonucleotide
cggcggtgatgtgctattggccacagatac

SEQ ID NO: 331037 - DNA, 30 bp, Artificial Sequence
  Synthetic oligonucleotide
gatttaaactcgacgtataacagcagatac

SEQ ID NO: 331038 - DNA, 30 bp, Artificial Sequence
  Synthetic oligonucleotide
aggagctgaccgctatgctagagcagatac

SEQ ID NO: 331039 - DNA, 30 bp, Artificial Sequence
  Synthetic oligonucleotide
gaagtcttgggtcggagggataagagatac

SEQ ID NO: 331040 - DNA, 30 bp, Artificial Sequence
  Synthetic oligonucleotide
aaggtgcgaacctcttgctaccagagatac

SEQ ID NO: 331041 - DNA, 30 bp, Artificial Sequence
  Synthetic oligonucleotide
ctgaagtacccgcgctaaaaatagagatac

SEQ ID NO: 331042 - DNA, 30 bp, Artificial Sequence
  Synthetic oligonucleotide
tcgaatccgagccgtgactccatgagatac

SEQ ID NO: 331043 - DNA, 30 bp, Artificial Sequence
  Synthetic oligonucleotide
gatctaagtcgggccgtcagtcatagatac

SEQ ID NO: 331044 - DNA, 30 bp, Artificial Sequence
  Synthetic oligonucleotide
aatactgcggcattgccggcgtatagatac

SEQ ID NO: 331045 - DNA, 30 bp, Artificial Sequence
  Synthetic oligonucleotide
tctagctctacgcgcggcgtcactagatac

SEQ ID NO: 331046 - DNA, 30 bp, Artificial Sequence
  Synthetic oligonucleotide
actttgcctcagttggatcatggtagatac

SEQ ID NO: 331047 - DNA, 30 bp, Artificial Sequence
  Synthetic oligonucleotide
ggtgtcataggaaaacagggtcaacgatac

SEQ ID NO: 331048 - DNA, 30 bp, Artificial Sequence
  Synthetic oligonucleotide
tgagcgaggtgttcagtacacggacgatac

SEQ ID NO: 331049 - DNA, 30 bp, Artificial Sequence
  Synthetic oligonucleotide
acagggatcaggacacggccattgcgatac

SEQ ID NO: 331050 - DNA, 30 bp, Artificial Sequence
  Synthetic oligonucleotide
tcacaggcccgcagtttccacatgggatac

SEQ ID NO: 331051 - DNA, 30 bp, Artificial Sequence
  Synthetic oligonucleotide
ttgagaacgtcgcgtgaaggcgatggatac

SEQ ID NO: 331052 - DNA, 30 bp, Artificial Sequence
  Synthetic oligonucleotide
gtaagagagaggtccgctgagtgtggatac

SEQ ID NO: 331053 - DNA, 30 bp, Artificial Sequence
  Synthetic oligonucleotide
gcagtggagttcctttaacgacttggatac

SEQ ID NO: 331054 - DNA, 30 bp, Artificial Sequence
  Synthetic oligonucleotide
cggctaatagtttaaacgaagccatgatac

SEQ ID NO: 331055 - DNA, 30 bp, Artificial Sequence
  Synthetic oligonucleotide
agacgaattcttatgagtatctcatgatac

SEQ ID NO: 331056 - DNA, 30 bp, Artificial Sequence
  Synthetic oligonucleotide
agcgcttactttctatagatctagtgatac

SEQ ID NO: 331057 - DNA, 30 bp, Artificial Sequence
  Synthetic oligonucleotide
agtcattgtgtcgggtggcgcacttgatac

SEQ ID NO: 331058 - DNA, 30 bp, Artificial Sequence
  Synthetic oligonucleotide
aaaattgttaaggttttgggatgttgatac

SEQ ID NO: 331059 - DNA, 30 bp, Artificial Sequence
  Synthetic oligonucleotide
actgtagaagcttctcatccgatttgatac

SEQ ID NO: 331060 - DNA, 30 bp, Artificial Sequence
  Synthetic oligonucleotide
tgtttcaggtatatccggtgtcaaatatac

SEQ ID NO: 331061 - DNA, 30 bp, Artificial Sequence
  Synthetic oligonucleotide
ccgttccattgttgggggcttctaatatac

SEQ ID NO: 331062 - DNA, 30 bp, Artificial Sequence
  Synthetic oligonucleotide
gcctggtggcgcacctctaaagtaatatac

SEQ ID NO: 331063 - DNA, 30 bp, Artificial Sequence
  Synthetic oligonucleotide
ctttatctatacgatctccccgacatatac

SEQ ID NO: 331064 - DNA, 30 bp, Artificial Sequence
  Synthetic oligonucleotide
cggcgtggtcagctggaacggaggatatac

SEQ ID NO: 331065 - DNA, 30 bp, Artificial Sequence
  Synthetic oligonucleotide
acgcatctaatagacatctaagggatatac

SEQ ID NO: 331066 - DNA, 30 bp, Artificial Sequence
  Synthetic oligonucleotide
ctagctcctcgtctgtggttgatgatatac

SEQ ID NO: 331067 - DNA, 30 bp, Artificial Sequence
  Synthetic oligonucleotide
ataacctgtaagcaaagagtactactatac

SEQ ID NO: 331068 - DNA, 30 bp, Artificial Sequence
  Synthetic oligonucleotide
gcctgaattggcagttttttcctgctatac

SEQ ID NO: 331069 - DNA, 30 bp, Artificial Sequence
  Synthetic oligonucleotide
gactttcctgctctcaacagcaaagtatac

SEQ ID NO: 331070 - DNA, 30 bp, Artificial Sequence
  Synthetic oligonucleotide
gcactcggtcaagtaccgtcaaacgtatac

SEQ ID NO: 331071 - DNA, 30 bp, Artificial Sequence
  Synthetic oligonucleotide
gggtgggaagcggcaaaggagcaggtatac

SEQ ID NO: 331072 - DNA, 28 bp, Artificial Sequence
  Synthetic oligonucleotide
aaaggattgcatcatcacggaggtatac

SEQ ID NO: 331073 - DNA, 30 bp, Artificial Sequence
  Synthetic oligonucleotide
acgcgttcatgataacgctgcctggtatac

SEQ ID NO: 331074 - DNA, 30 bp, Artificial Sequence
  Synthetic oligonucleotide
ggtaagcgtagctagcagatgtctgtatac

SEQ ID NO: 331075 - DNA, 30 bp, Artificial Sequence
  Synthetic oligonucleotide
cttagaacgatatttaataatagtgtatac

SEQ ID NO: 331076 - DNA, 29 bp, Artificial Sequence
  Synthetic oligonucleotide
ttcggggaaactggggcctgtgattatac

SEQ ID NO: 331077 - DNA, 30 bp, Artificial Sequence
  Synthetic oligonucleotide
ccaccagtcgaagccgggaagttattatac

SEQ ID NO: 331078 - DNA, 30 bp, Artificial Sequence
  Synthetic oligonucleotide
cacatcagtgtgatcacgtagttattatac

SEQ ID NO: 331079 - DNA, 30 bp, Artificial Sequence
  Synthetic oligonucleotide
ctgaaggcgctaactctaatccccttatac

SEQ ID NO: 331080 - DNA, 30 bp, Artificial Sequence
  Synthetic oligonucleotide
acacgggattcaacaactaatgtcttatac

SEQ ID NO: 331081 - DNA, 30 bp, Artificial Sequence
  Synthetic oligonucleotide
acgtagtgtgggctgcaacgggctttatac

SEQ ID NO: 331082 - DNA, 30 bp, Artificial Sequence
  Synthetic oligonucleotide
atactagatggtcaggtaggacgtttatac

SEQ ID NO: 331083 - DNA, 30 bp, Artificial Sequence
  Synthetic oligonucleotide
ctgcctagtacatcacgctctcttttatac

SEQ ID NO: 331084 - DNA, 30 bp, Artificial Sequence
  Synthetic oligonucleotide
atttgtatcggtgaatacagttcaaactac

SEQ ID NO: 331085 - DNA, 30 bp, Artificial Sequence
  Synthetic oligonucleotide
aagttaatgtattggtctaacataaactac

SEQ ID NO: 331086 - DNA, 30 bp, Artificial Sequence
  Synthetic oligonucleotide
ggcatagtttatctgatagccctaaactac

SEQ ID NO: 331087 - DNA, 30 bp, Artificial Sequence
  Synthetic oligonucleotide
tgcgatccactgatgtcaaatttaaactac

SEQ ID NO: 331088 - DNA, 30 bp, Artificial Sequence
  Synthetic oligonucleotide
accctcgaatagcatgcgcagatcaactac

SEQ ID NO: 331089 - DNA, 30 bp, Artificial Sequence
  Synthetic oligonucleotide
taatttcatgcgaattgttggaagaactac

SEQ ID NO: 331090 - DNA, 31 bp, Artificial Sequence
  Synthetic oligonucleotide
caatggcaaacttaagccatctcagaactac

SEQ ID NO: 331091 - DNA, 30 bp, Artificial Sequence
  Synthetic oligonucleotide
aagtttgtgaaaaaaaggtacgcgaactac

SEQ ID NO: 331092 - DNA, 30 bp, Artificial Sequence
  Synthetic oligonucleotide
gggtgtctggttctcttcgcaactaactac

SEQ ID NO: 331093 - DNA, 30 bp, Artificial Sequence
  Synthetic oligonucleotide
tataaaaatgaaataacatgccctaactac

SEQ ID NO: 331094 - DNA, 30 bp, Artificial Sequence
  Synthetic oligonucleotide
aggacctcaaatttacaaagaggtaactac

SEQ ID NO: 331095 - DNA, 30 bp, Artificial Sequence
  Synthetic oligonucleotide
agggcctggttcttgggagttattaactac

SEQ ID NO: 331096 - DNA, 30 bp, Artificial Sequence
  Synthetic oligonucleotide
tatgagccgaaccccagtaattaacactac

SEQ ID NO: 331097 - DNA, 30 bp, Artificial Sequence
  Synthetic oligonucleotide
ggaagactgaaagtaacgtcggtacactac

SEQ ID NO: 331098 - DNA, 30 bp, Artificial Sequence
  Synthetic oligonucleotide
ggcaagtctgttacagcaaccactcactac

SEQ ID NO: 331099 - DNA, 30 bp, Artificial Sequence
  Synthetic oligonucleotide
acacttgaggtttttaaacctcgcgactac

SEQ ID NO: 331100 - DNA, 30 bp, Artificial Sequence
  Synthetic oligonucleotide
tttactttattcgttcagatagtggactac

SEQ ID NO: 331101 - DNA, 30 bp, Artificial Sequence
  Synthetic oligonucleotide
ggcggcacttatttaacatctatatactac

SEQ ID NO: 331102 - DNA, 30 bp, Artificial Sequence
  Synthetic oligonucleotide
gacgtctgttgctcgccttaggcaacctac

SEQ ID NO: 331103 - DNA, 30 bp, Artificial Sequence
  Synthetic oligonucleotide
acaaggaatctctatagatacagaacctac

SEQ ID NO: 331104 - DNA, 30 bp, Artificial Sequence
  Synthetic oligonucleotide
aggctgacgcacgttgtttaggtaacctac

SEQ ID NO: 331105 - DNA, 30 bp, Artificial Sequence
  Synthetic oligonucleotide
actagacgattccgtcatatagccacctac

SEQ ID NO: 331106 - DNA, 30 bp, Artificial Sequence
  Synthetic oligonucleotide
gttgcacgggccgttttagcttccacctac

SEQ ID NO: 331107 - DNA, 30 bp, Artificial Sequence
  Synthetic oligonucleotide
tgagttctccaacagttgtaaacgacctac

SEQ ID NO: 331108 - DNA, 30 bp, Artificial Sequence
  Synthetic oligonucleotide
ggagacagtagtgcatttcggcctacctac

SEQ ID NO: 331109 - DNA, 30 bp, Artificial Sequence
  Synthetic oligonucleotide
gccatttggcatggactcatatcaccctac

SEQ ID NO: 331110 - DNA, 30 bp, Artificial Sequence
  Synthetic oligonucleotide
tgttatcaaaggtgcccataaagaccctac

SEQ ID NO: 331111 - DNA, 30 bp, Artificial Sequence
  Synthetic oligonucleotide
tctgccatgggcgtcactattagaccctac

SEQ ID NO: 331112 - DNA, 30 bp, Artificial Sequence
  Synthetic oligonucleotide
atgtttgaacatgtatagagtgacccctac

SEQ ID NO: 331113 - DNA, 30 bp, Artificial Sequence
  Synthetic oligonucleotide
cagctcgagaacctaacttgcgccccctac

SEQ ID NO: 331114 - DNA, 30 bp, Artificial Sequence
  Synthetic oligonucleotide
ccacccaacatataggttggaagcccctac

SEQ ID NO: 331115 - DNA, 30 bp, Artificial Sequence
  Synthetic oligonucleotide
acaccacggggacaccctcacatcccctac

SEQ ID NO: 331116 - DNA, 30 bp, Artificial Sequence
  Synthetic oligonucleotide
gtagacagccagtgatcacagcctccctac

SEQ ID NO: 331117 - DNA, 30 bp, Artificial Sequence
  Synthetic oligonucleotide
ctctaccctagtaagcgattctctccctac

SEQ ID NO: 331118 - DNA, 30 bp, Artificial Sequence
  Synthetic oligonucleotide
tggagagatgctaggctgcgttccgcctac

SEQ ID NO: 331119 - DNA, 30 bp, Artificial Sequence
  Synthetic oligonucleotide
ctagcttcattgggggattaactcgcctac

SEQ ID NO: 331120 - DNA, 30 bp, Artificial Sequence
  Synthetic oligonucleotide
tagcgagggtgagtagagacttgtgcctac

SEQ ID NO: 331121 - DNA, 30 bp, Artificial Sequence
  Synthetic oligonucleotide
ggcactgcgtgcgtgcaatttaaatcctac

SEQ ID NO: 331122 - DNA, 30 bp, Artificial Sequence
  Synthetic oligonucleotide
gcactggaaaaggctgtcctgagttcctac

SEQ ID NO: 331123 - DNA, 30 bp, Artificial Sequence
  Synthetic oligonucleotide
aggcgccaggagaacgaacgtagttcctac

SEQ ID NO: 331124 - DNA, 30 bp, Artificial Sequence
  Synthetic oligonucleotide
ttaaggtgatcacggccagtacaaagctac

SEQ ID NO: 331125 - DNA, 30 bp, Artificial Sequence
  Synthetic oligonucleotide
ggagccattgctcatcgcgtaagcagctac

SEQ ID NO: 331126 - DNA, 30 bp, Artificial Sequence
  Synthetic oligonucleotide
aacgttagtagtgcttttccgggcagctac

SEQ ID NO: 331127 - DNA, 30 bp, Artificial Sequence
  Synthetic oligonucleotide
tctaccacggggaagtagggacagagctac

SEQ ID NO: 331128 - DNA, 30 bp, Artificial Sequence
  Synthetic oligonucleotide
atatcaatagtatagcgaatacggagctac

SEQ ID NO: 331129 - DNA, 30 bp, Artificial Sequence
  Synthetic oligonucleotide
cccacaagtgtactatcacgtcggagctac

SEQ ID NO: 331130 - DNA, 30 bp, Artificial Sequence
  Synthetic oligonucleotide
gaacgtggccggtgacctacgtctagctac

SEQ ID NO: 331131 - DNA, 30 bp, Artificial Sequence
  Synthetic oligonucleotide
ggtacacttgagtaacgcacaacacgctac

SEQ ID NO: 331132 - DNA, 30 bp, Artificial Sequence
  Synthetic oligonucleotide
cttaccagcgctgttctcaacagccgctac

SEQ ID NO: 331133 - DNA, 30 bp, Artificial Sequence
  Synthetic oligonucleotide
cgcattttgagaggataaaaaatgcgctac

SEQ ID NO: 331134 - DNA, 30 bp, Artificial Sequence
  Synthetic oligonucleotide
aggagacggagcacctatggagaaggctac

SEQ ID NO: 331135 - DNA, 30 bp, Artificial Sequence
  Synthetic oligonucleotide
ttggagaacatcccttccgtcgcaggctac

SEQ ID NO: 331136 - DNA, 30 bp, Artificial Sequence
  Synthetic oligonucleotide
actcgtactaacggggctcatccgggctac

SEQ ID NO: 331137 - DNA, 30 bp, Artificial Sequence
  Synthetic oligonucleotide
atttacaagctggcacggcgatatggctac

SEQ ID NO: 331138 - DNA, 30 bp, Artificial Sequence
  Synthetic oligonucleotide
cgtttatactagaatttcaacgaatgctac

SEQ ID NO: 331139 - DNA, 30 bp, Artificial Sequence
  Synthetic oligonucleotide
tgcctcggtgccccttacaagccttgctac

SEQ ID NO: 331140 - DNA, 30 bp, Artificial Sequence
  Synthetic oligonucleotide
gtgtaattaaagtcgatacacatttgctac

SEQ ID NO: 331141 - DNA, 30 bp, Artificial Sequence
  Synthetic oligonucleotide
ttcatccactatccgtggggagcaatctac

SEQ ID NO: 331142 - DNA, 30 bp, Artificial Sequence
  Synthetic oligonucleotide
gtcccgcgtccggggatgtaatcaatctac

SEQ ID NO: 331143 - DNA, 30 bp, Artificial Sequence
  Synthetic oligonucleotide
catttaccgtttatttcactcttgatctac

SEQ ID NO: 331144 - DNA, 30 bp, Artificial Sequence
  Synthetic oligonucleotide
tacgtataggatcaaaggaatggcctctac

SEQ ID NO: 331145 - DNA, 30 bp, Artificial Sequence
  Synthetic oligonucleotide
gcacggaggttttgctggatgctcctctac

SEQ ID NO: 331146 - DNA, 30 bp, Artificial Sequence
  Synthetic oligonucleotide
tgccgagagggggggctgcccccgctctac

SEQ ID NO: 331147 - DNA, 30 bp, Artificial Sequence
  Synthetic oligonucleotide
tttcgttatagtaaggaacggtcgctctac

SEQ ID NO: 331148 - DNA, 30 bp, Artificial Sequence
  Synthetic oligonucleotide
catttggctggccgaaccagtcgtctctac

SEQ ID NO: 331149 - DNA, 30 bp, Artificial Sequence
  Synthetic oligonucleotide
taaagcccatagagatttcagacagtctac

SEQ ID NO: 331150 - DNA, 30 bp, Artificial Sequence
  Synthetic oligonucleotide
gatgctgaccaaagactggacggagtctac

SEQ ID NO: 331151 - DNA, 30 bp, Artificial Sequence
  Synthetic oligonucleotide
aagagggcagttaagcccaacaaggtctac

SEQ ID NO: 331152 - DNA, 30 bp, Artificial Sequence
  Synthetic oligonucleotide
ctccaatgatatataagtgccccggtctac

SEQ ID NO: 331153 - DNA, 30 bp, Artificial Sequence
  Synthetic oligonucleotide
ttctttatgataaggtctagcgcggtctac

SEQ ID NO: 331154 - DNA, 30 bp, Artificial Sequence
  Synthetic oligonucleotide
aggggcttggttagcaatggttacttctac

SEQ ID NO: 331155 - DNA, 30 bp, Artificial Sequence
  Synthetic oligonucleotide
agagtagacgatgtccgagagaccttctac

SEQ ID NO: 331156 - DNA, 30 bp, Artificial Sequence
  Synthetic oligonucleotide
agctcatagacgctgccacctggcttctac

SEQ ID NO: 331157 - DNA, 30 bp, Artificial Sequence
  Synthetic oligonucleotide
agacactggcgtctaaatacgcagttctac

SEQ ID NO: 331158 - DNA, 30 bp, Artificial Sequence
  Synthetic oligonucleotide
gaagataccagccaacctcgcaaaaagtac

SEQ ID NO: 331159 - DNA, 30 bp, Artificial Sequence
  Synthetic oligonucleotide
ttataaacttgtttggcgttgtaaaagtac

SEQ ID NO: 331160 - DNA, 30 bp, Artificial Sequence
  Synthetic oligonucleotide
aacctgtatatgatatctcgagcaaagtac

SEQ ID NO: 331161 - DNA, 30 bp, Artificial Sequence
  Synthetic oligonucleotide
actcgtcacccggctcagttcgtaaagtac

SEQ ID NO: 331162 - DNA, 30 bp, Artificial Sequence
  Synthetic oligonucleotide
gtaaagtctgtgtagttagaggtaaagtac

SEQ ID NO: 331163 - DNA, 30 bp, Artificial Sequence
  Synthetic oligonucleotide
gttgatataagcgtgaggttagacaagtac

SEQ ID NO: 331164 - DNA, 30 bp, Artificial Sequence
  Synthetic oligonucleotide
agaccggtagttcgtggttcctgcaagtac

SEQ ID NO: 331165 - DNA, 30 bp, Artificial Sequence
  Synthetic oligonucleotide
atccgaggtgcattcactaggctcaagtac

SEQ ID NO: 331166 - DNA, 30 bp, Artificial Sequence
  Synthetic oligonucleotide
tacttattaaaacgacacactgtcaagtac

SEQ ID NO: 331167 - DNA, 30 bp, Artificial Sequence
  Synthetic oligonucleotide
atagtgcacgaagtcagtaggtagaagtac

SEQ ID NO: 331168 - DNA, 30 bp, Artificial Sequence
  Synthetic oligonucleotide
taaagggggatcatggtctatccgaagtac

SEQ ID NO: 331169 - DNA, 30 bp, Artificial Sequence
  Synthetic oligonucleotide
ttcatccaaaggttagagggcgcgaagtac

SEQ ID NO: 331170 - DNA, 30 bp, Artificial Sequence
  Synthetic oligonucleotide
gcaaagtgtgcctgcgttttcatgaagtac

SEQ ID NO: 331171 - DNA, 30 bp, Artificial Sequence
  Synthetic oligonucleotide
caagcagctcccttgcaaatgtctaagtac

SEQ ID NO: 331172 - DNA, 30 bp, Artificial Sequence
  Synthetic oligonucleotide
tgcacagtacagttccatcccagtaagtac

SEQ ID NO: 331173 - DNA, 30 bp, Artificial Sequence
  Synthetic oligonucleotide
aacgattccaggtattacttgtgtaagtac

SEQ ID NO: 331174 - DNA, 30 bp, Artificial Sequence
  Synthetic oligonucleotide
acggtactgccgacttgcagccgacagtac

SEQ ID NO: 331175 - DNA, 30 bp, Artificial Sequence
  Synthetic oligonucleotide
tattcctgggcttgaccctccatacagtac

SEQ ID NO: 331176 - DNA, 30 bp, Artificial Sequence
  Synthetic oligonucleotide
tttcatcttttgcttcggccctggcagtac

SEQ ID NO: 331177 - DNA, 30 bp, Artificial Sequence
  Synthetic oligonucleotide
gtcaagacgcgcgaatgagtcgctcagtac

SEQ ID NO: 331178 - DNA, 30 bp, Artificial Sequence
  Synthetic oligonucleotide
ctcgggatccgtgtgagtatggctcagtac

SEQ ID NO: 331179 - DNA, 30 bp, Artificial Sequence
  Synthetic oligonucleotide
taagccaattctaatatgccgcccgagtac

SEQ ID NO: 331180 - DNA, 30 bp, Artificial Sequence
  Synthetic oligonucleotide
gtttagtctagaaggttgtgttgcgagtac

SEQ ID NO: 331181 - DNA, 30 bp, Artificial Sequence
  Synthetic oligonucleotide
gaaaggttaggggattcggtaatcgagtac

SEQ ID NO: 331182 - DNA, 30 bp, Artificial Sequence
  Synthetic oligonucleotide
taagacaaggacattatcatccgggagtac

SEQ ID NO: 331183 - DNA, 30 bp, Artificial Sequence
  Synthetic oligonucleotide
gttcgtcattataatttgcccttggagtac

SEQ ID NO: 331184 - DNA, 30 bp, Artificial Sequence
  Synthetic oligonucleotide
ggagtctagccttacgtaatgtatgagtac

SEQ ID NO: 331185 - DNA, 30 bp, Artificial Sequence
  Synthetic oligonucleotide
cggttcggtccatcaagttgttgtgagtac

SEQ ID NO: 331186 - DNA, 30 bp, Artificial Sequence
  Synthetic oligonucleotide
gcctgagcgaggagcttctcttttgagtac

SEQ ID NO: 331187 - DNA, 30 bp, Artificial Sequence
  Synthetic oligonucleotide
agaaacggggtgtccttattgggatagtac

SEQ ID NO: 331188 - DNA, 30 bp, Artificial Sequence
  Synthetic oligonucleotide
tcattgctctctaacataagccactagtac

SEQ ID NO: 331189 - DNA, 30 bp, Artificial Sequence
  Synthetic oligonucleotide
cctgcactcggtaaagggccaggctagtac

SEQ ID NO: 331190 - DNA, 29 bp, Artificial Sequence
  Synthetic oligonucleotide
aggaacgtcccggttcgcatgggtagtac

SEQ ID NO: 331191 - DNA, 30 bp, Artificial Sequence
  Synthetic oligonucleotide
aaggattccaacatccaattgctgtagtac

SEQ ID NO: 331192 - DNA, 30 bp, Artificial Sequence
  Synthetic oligonucleotide
atgtgatggttcgggctcccgcgttagtac

SEQ ID NO: 331193 - DNA, 31 bp, Artificial Sequence
  Synthetic oligonucleotide
aagttccgcggacccagactcgggttagtac

SEQ ID NO: 331194 - DNA, 30 bp, Artificial Sequence
  Synthetic oligonucleotide
gtgtaatgataaaggaggtggttttagtac

SEQ ID NO: 331195 - DNA, 30 bp, Artificial Sequence
  Synthetic oligonucleotide
ctatcctcagcgagagtgatcgccacgtac

SEQ ID NO: 331196 - DNA, 28 bp, Artificial Sequence
  Synthetic oligonucleotide
agtttccacggacccgtgtgagacgtac

SEQ ID NO: 331197 - DNA, 30 bp, Artificial Sequence
  Synthetic oligonucleotide
tggtctataggtttccttttatcgacgtac

SEQ ID NO: 331198 - DNA, 30 bp, Artificial Sequence
  Synthetic oligonucleotide
gacgaatatagtggatcgcacgggacgtac

SEQ ID NO: 331199 - DNA, 30 bp, Artificial Sequence
  Synthetic oligonucleotide
gtaaactgtccagaaaagttctatccgtac

SEQ ID NO: 331200 - DNA, 30 bp, Artificial Sequence
  Synthetic oligonucleotide
tagagagcacagcgtgcccaatccgcgtac

SEQ ID NO: 331201 - DNA, 30 bp, Artificial Sequence
  Synthetic oligonucleotide
ctaatgactgggatgactgatttcgcgtac

SEQ ID NO: 331202 - DNA, 30 bp, Artificial Sequence
  Synthetic oligonucleotide
gtatacattaaatgcggtactttggcgtac

SEQ ID NO: 331203 - DNA, 30 bp, Artificial Sequence
  Synthetic oligonucleotide
agcccgggtctaggtcagtcctgtgcgtac

SEQ ID NO: 331204 - DNA, 30 bp, Artificial Sequence
  Synthetic oligonucleotide
atgagtctacaattcgtattataatcgtac

SEQ ID NO: 331205 - DNA, 30 bp, Artificial Sequence
  Synthetic oligonucleotide
ggtattaccaccctcgcactagtatcgtac

SEQ ID NO: 331206 - DNA, 30 bp, Artificial Sequence
  Synthetic oligonucleotide
agatcgcgtttaggcagtcctaacaggtac

SEQ ID NO: 331207 - DNA, 30 bp, Artificial Sequence
  Synthetic oligonucleotide
tctatgtgtgattcaattgagcacaggtac

SEQ ID NO: 331208 - DNA, 30 bp, Artificial Sequence
  Synthetic oligonucleotide
cagctacatatggtcccgaacggcaggtac

SEQ ID NO: 331209 - DNA, 30 bp, Artificial Sequence
  Synthetic oligonucleotide
tacatttccgagctcggtgatctcaggtac

SEQ ID NO: 331210 - DNA, 30 bp, Artificial Sequence
  Synthetic oligonucleotide
gaaatatcacgttcgggaccgtggaggtac

SEQ ID NO: 331211 - DNA, 30 bp, Artificial Sequence
  Synthetic oligonucleotide
cgctgtgccagtggccgtttgctgaggtac

SEQ ID NO: 331212 - DNA, 30 bp, Artificial Sequence
  Synthetic oligonucleotide
caattttgccgagccgtgtttcctaggtac

SEQ ID NO: 331213 - DNA, 30 bp, Artificial Sequence
  Synthetic oligonucleotide
ggctcgttcctagcatctcgatgacggtac

SEQ ID NO: 331214 - DNA, 30 bp, Artificial Sequence
  Synthetic oligonucleotide
ctcgatggattcacataactaatccggtac

SEQ ID NO: 331215 - DNA, 30 bp, Artificial Sequence
  Synthetic oligonucleotide
accgaggcggcacacttcgatcagcggtac

SEQ ID NO: 331216 - DNA, 30 bp, Artificial Sequence
  Synthetic oligonucleotide
taacgttgctgttaaaggcgcagtcggtac

SEQ ID NO: 331217 - DNA, 30 bp, Artificial Sequence
  Synthetic oligonucleotide
gtttcgtcaatccacgggtgttttcggtac

SEQ ID NO: 331218 - DNA, 30 bp, Artificial Sequence
  Synthetic oligonucleotide
atcataacggctttatgcgttgaagggtac

SEQ ID NO: 331219 - DNA, 30 bp, Artificial Sequence
  Synthetic oligonucleotide
tagagcggtgtaattgcatacctagggtac

SEQ ID NO: 331220 - DNA, 30 bp, Artificial Sequence
  Synthetic oligonucleotide
actctacaaaggtttacacgactggggtac

SEQ ID NO: 331221 - DNA, 30 bp, Artificial Sequence
  Synthetic oligonucleotide
tcaatagagcaaaaatgaaatcctgggtac

SEQ ID NO: 331222 - DNA, 30 bp, Artificial Sequence
  Synthetic oligonucleotide
gttcaaacggaatttcctcaaagtgggtac

SEQ ID NO: 331223 - DNA, 30 bp, Artificial Sequence
  Synthetic oligonucleotide
cgtggttttggctcggttcatcttgggtac

SEQ ID NO: 331224 - DNA, 30 bp, Artificial Sequence
  Synthetic oligonucleotide
ccggcagcgaaattattagggatatggtac

SEQ ID NO: 331225 - DNA, 30 bp, Artificial Sequence
  Synthetic oligonucleotide
aagtcaggggtgatcaagactcgctggtac

SEQ ID NO: 331226 - DNA, 30 bp, Artificial Sequence
  Synthetic oligonucleotide
atagttaggtatatcacgagtcgctggtac

SEQ ID NO: 331227 - DNA, 30 bp, Artificial Sequence
  Synthetic oligonucleotide
gtgtcatgcatttctcggtatgcgtggtac

SEQ ID NO: 331228 - DNA, 30 bp, Artificial Sequence
  Synthetic oligonucleotide
ttgagatataacaaatagtcttcgtggtac

SEQ ID NO: 331229 - DNA, 30 bp, Artificial Sequence
  Synthetic oligonucleotide
cggatagtttcggccacacgatattggtac

SEQ ID NO: 331230 - DNA, 30 bp, Artificial Sequence
  Synthetic oligonucleotide
ctagggcggtttggcagcgaaacttggtac

SEQ ID NO: 331231 - DNA, 30 bp, Artificial Sequence
  Synthetic oligonucleotide
aggcagcgcacgtgattaatattttggtac

SEQ ID NO: 331232 - DNA, 30 bp, Artificial Sequence
  Synthetic oligonucleotide
gacgattgcaatcgacttacgtacatgtac

SEQ ID NO: 331233 - DNA, 30 bp, Artificial Sequence
  Synthetic oligonucleotide
tcacatcccttcccgcgcaggatcatgtac

SEQ ID NO: 331234 - DNA, 30 bp, Artificial Sequence
  Synthetic oligonucleotide
tgcagtgtagtaccagagatatggatgtac

SEQ ID NO: 331235 - DNA, 30 bp, Artificial Sequence
  Synthetic oligonucleotide
gcaatgggtatatactccggagatatgtac

SEQ ID NO: 331236 - DNA, 30 bp, Artificial Sequence
  Synthetic oligonucleotide
gtagcataaaatacctcctcgcgtatgtac

SEQ ID NO: 331237 - DNA, 30 bp, Artificial Sequence
  Synthetic oligonucleotide
ccccgaagatcgccatcactgggactgtac

SEQ ID NO: 331238 - DNA, 30 bp, Artificial Sequence
  Synthetic oligonucleotide
cgcattatggacccaccacgttgactgtac

SEQ ID NO: 331239 - DNA, 30 bp, Artificial Sequence
  Synthetic oligonucleotide
tgttaaggcttgtcccctcctgtcctgtac

SEQ ID NO: 331240 - DNA, 30 bp, Artificial Sequence
  Synthetic oligonucleotide
gtacatgaccttctcactgacttcctgtac

SEQ ID NO: 331241 - DNA, 30 bp, Artificial Sequence
  Synthetic oligonucleotide
acaaagccgcgactgttggataggctgtac

SEQ ID NO: 331242 - DNA, 30 bp, Artificial Sequence
  Synthetic oligonucleotide
cgaccctcgcgctctctgccacctctgtac

SEQ ID NO: 331243 - DNA, 30 bp, Artificial Sequence
  Synthetic oligonucleotide
agcgtgactaaccctacgagtgctctgtac

SEQ ID NO: 331244 - DNA, 30 bp, Artificial Sequence
  Synthetic oligonucleotide
ctatgggcaccgacttgaccgcgtctgtac

SEQ ID NO: 331245 - DNA, 30 bp, Artificial Sequence
  Synthetic oligonucleotide
tagctaggtcaatcagcctctgttctgtac

SEQ ID NO: 331246 - DNA, 30 bp, Artificial Sequence
  Synthetic oligonucleotide
cggcgcggtacgcaatctggtgaagtgtac

SEQ ID NO: 331247 - DNA, 30 bp, Artificial Sequence
  Synthetic oligonucleotide
cgacgcctcgagagttaaacaaccgtgtac

SEQ ID NO: 331248 - DNA, 30 bp, Artificial Sequence
  Synthetic oligonucleotide
aatcgtgatactgaatcaaggtatgtgtac

SEQ ID NO: 331249 - DNA, 30 bp, Artificial Sequence
  Synthetic oligonucleotide
cgggaatccgcctacgcaagcctattgtac

SEQ ID NO: 331250 - DNA, 30 bp, Artificial Sequence
  Synthetic oligonucleotide
taacacgagcgtgaggttagcgacttgtac

SEQ ID NO: 331251 - DNA, 30 bp, Artificial Sequence
  Synthetic oligonucleotide
ggattcacataccagcacataaagttgtac

SEQ ID NO: 331252 - DNA, 30 bp, Artificial Sequence
  Synthetic oligonucleotide
tcgcacggacggctgtagagggttttgtac

SEQ ID NO: 331253 - DNA, 30 bp, Artificial Sequence
  Synthetic oligonucleotide
tgcactaacagtcatggaggggcaaattac

SEQ ID NO: 331254 - DNA, 30 bp, Artificial Sequence
  Synthetic oligonucleotide
cgggctccgggcatgtagatatcaaattac

SEQ ID NO: 331255 - DNA, 30 bp, Artificial Sequence
  Synthetic oligonucleotide
gaagcaaccgttttcccctattggaattac

SEQ ID NO: 331256 - DNA, 30 bp, Artificial Sequence
  Synthetic oligonucleotide
atgaatgtaaaggccaatacttttaattac

SEQ ID NO: 331257 - DNA, 30 bp, Artificial Sequence
  Synthetic oligonucleotide
caagatcttcttcacgtaccaaaacattac

SEQ ID NO: 331258 - DNA, 30 bp, Artificial Sequence
  Synthetic oligonucleotide
gaaagagtctggatacataaaagacattac

SEQ ID NO: 331259 - DNA, 30 bp, Artificial Sequence
  Synthetic oligonucleotide
ccgcagtgaatgggcacattatgacattac

SEQ ID NO: 331260 - DNA, 30 bp, Artificial Sequence
  Synthetic oligonucleotide
ttcaacgatggggaccaagcctgccattac

SEQ ID NO: 331261 - DNA, 30 bp, Artificial Sequence
  Synthetic oligonucleotide
gagaaatttgaaggtacctcccggcattac

SEQ ID NO: 331262 - DNA, 30 bp, Artificial Sequence
  Synthetic oligonucleotide
tacctgcgacctcaatccaaactgcattac

SEQ ID NO: 331263 - DNA, 30 bp, Artificial Sequence
  Synthetic oligonucleotide
caaagcgagacttagatggggtatcattac

SEQ ID NO: 331264 - DNA, 30 bp, Artificial Sequence
  Synthetic oligonucleotide
actgataggggtttttatagacttcattac

SEQ ID NO: 331265 - DNA, 30 bp, Artificial Sequence
  Synthetic oligonucleotide
gaaacggccattaagtgcagttttcattac

SEQ ID NO: 331266 - DNA, 30 bp, Artificial Sequence
  Synthetic oligonucleotide
cgagtaattaagaagataacgaaagattac

SEQ ID NO: 331267 - DNA, 30 bp, Artificial Sequence
  Synthetic oligonucleotide
aggatcctatatattaggtttctagattac

SEQ ID NO: 331268 - DNA, 30 bp, Artificial Sequence
  Synthetic oligonucleotide
gcccgtaaagaaaaaatctcccacgattac

SEQ ID NO: 331269 - DNA, 30 bp, Artificial Sequence
  Synthetic oligonucleotide
cctccgagccgatctcaggcgtacgattac

SEQ ID NO: 331270 - DNA, 30 bp, Artificial Sequence
  Synthetic oligonucleotide
gacggagattattcctatgataccgattac

SEQ ID NO: 331271 - DNA, 30 bp, Artificial Sequence
  Synthetic oligonucleotide
ccggatcagagagtacggtgggccgattac

SEQ ID NO: 331272 - DNA, 30 bp, Artificial Sequence
  Synthetic oligonucleotide
ctttaaatttcccgcctattatgcgattac

SEQ ID NO: 331273 - DNA, 30 bp, Artificial Sequence
  Synthetic oligonucleotide
cccgaaaaccgcgcgagatactaggattac

SEQ ID NO: 331274 - DNA, 30 bp, Artificial Sequence
  Synthetic oligonucleotide
tttggcttggcgggaccgataagggattac

SEQ ID NO: 331275 - DNA, 30 bp, Artificial Sequence
  Synthetic oligonucleotide
ccagttagcagtggtcctcggatggattac

SEQ ID NO: 331276 - DNA, 30 bp, Artificial Sequence
  Synthetic oligonucleotide
ctaggccacccaccacttacagtggattac

SEQ ID NO: 331277 - DNA, 30 bp, Artificial Sequence
  Synthetic oligonucleotide
ttccacttaagaagataggcgcatgattac

SEQ ID NO: 331278 - DNA, 30 bp, Artificial Sequence
  Synthetic oligonucleotide
gtgtcgtgtcatacacggcagactgattac

SEQ ID NO: 331279 - DNA, 30 bp, Artificial Sequence
  Synthetic oligonucleotide
tgtacttatttgcaaggataagttgattac

SEQ ID NO: 331280 - DNA, 30 bp, Artificial Sequence
  Synthetic oligonucleotide
gtgttagaagtagaaaaatgttaatattac

SEQ ID NO: 331281 - DNA, 30 bp, Artificial Sequence
  Synthetic oligonucleotide
gtacgatcgagatttatgttgttatattac

SEQ ID NO: 331282 - DNA, 30 bp, Artificial Sequence
  Synthetic oligonucleotide
taatccgacgtggagtccacgaactattac

SEQ ID NO: 331283 - DNA, 30 bp, Artificial Sequence
  Synthetic oligonucleotide
atattgtcggacggggatcgccactattac

SEQ ID NO: 331284 - DNA, 30 bp, Artificial Sequence
  Synthetic oligonucleotide
gcaaatccatccgggcctgttgcctattac

SEQ ID NO: 331285 - DNA, 30 bp, Artificial Sequence
  Synthetic oligonucleotide
tcccgtgcaaagaatagtgacagctattac

SEQ ID NO: 331286 - DNA, 30 bp, Artificial Sequence
  Synthetic oligonucleotide
aaaccgcgtaaaagtgagtagggctattac

SEQ ID NO: 331287 - DNA, 30 bp, Artificial Sequence
  Synthetic oligonucleotide
agattctaccgggcgggccagatctattac

SEQ ID NO: 331288 - DNA, 30 bp, Artificial Sequence
  Synthetic oligonucleotide
catattgtgacctccgaccccaagtattac

SEQ ID NO: 331289 - DNA, 30 bp, Artificial Sequence
  Synthetic oligonucleotide
caagtttacctatctatctctgcgtattac

SEQ ID NO: 331290 - DNA, 30 bp, Artificial Sequence
  Synthetic oligonucleotide
tctacgcgcacgcaaggctaggggtattac

SEQ ID NO: 331291 - DNA, 30 bp, Artificial Sequence
  Synthetic oligonucleotide
cgcaggatcaaggccgctcagcaaacttac

SEQ ID NO: 331292 - DNA, 30 bp, Artificial Sequence
  Synthetic oligonucleotide
gtggtgaaagatctctgatcaaaaccttac

SEQ ID NO: 331293 - DNA, 30 bp, Artificial Sequence
  Synthetic oligonucleotide
tagacgcattgagcaaaggtagtaccttac

SEQ ID NO: 331294 - DNA, 30 bp, Artificial Sequence
  Synthetic oligonucleotide
ttaaagtgcataacccagacgaacccttac

SEQ ID NO: 331295 - DNA, 30 bp, Artificial Sequence
  Synthetic oligonucleotide
tatggggaggcaaagttgactcggccttac

SEQ ID NO: 331296 - DNA, 30 bp, Artificial Sequence
  Synthetic oligonucleotide
tgagcaactggacgagccagttcagcttac

SEQ ID NO: 331297 - DNA, 30 bp, Artificial Sequence
  Synthetic oligonucleotide
ctgggattagtagagccagataaggcttac

SEQ ID NO: 331298 - DNA, 30 bp, Artificial Sequence
  Synthetic oligonucleotide
gataccaccgagactcttctacgtgcttac

SEQ ID NO: 331299 - DNA, 30 bp, Artificial Sequence
  Synthetic oligonucleotide
tccgatttgtggtgtacgcggtttgcttac

SEQ ID NO: 331300 - DNA, 30 bp, Artificial Sequence
  Synthetic oligonucleotide
cagaaacggctatcgttagtttattcttac

SEQ ID NO: 331301 - DNA, 30 bp, Artificial Sequence
  Synthetic oligonucleotide
tgtacacggtacagtgcgtatcaaagttac

SEQ ID NO: 331302 - DNA, 30 bp, Artificial Sequence
  Synthetic oligonucleotide
gggcttaaggaatttaattgggtaagttac

SEQ ID NO: 331303 - DNA, 27 bp, Artificial Sequence
  Synthetic oligonucleotide
gggatgcacatccccacgcacagttac

SEQ ID NO: 331304 - DNA, 30 bp, Artificial Sequence
  Synthetic oligonucleotide
cttgatagagtgtacatacaggacagttac

SEQ ID NO: 331305 - DNA, 30 bp, Artificial Sequence
  Synthetic oligonucleotide
gggtgcgttaactatagtgttcgcagttac

SEQ ID NO: 331306 - DNA, 30 bp, Artificial Sequence
  Synthetic oligonucleotide
tttagtccgagtccaatgcctccgagttac

SEQ ID NO: 331307 - DNA, 30 bp, Artificial Sequence
  Synthetic oligonucleotide
gtcgccactggggctagaggtaggagttac

SEQ ID NO: 331308 - DNA, 30 bp, Artificial Sequence
  Synthetic oligonucleotide
tcccctggtggtttaaattaacggagttac

SEQ ID NO: 331309 - DNA, 30 bp, Artificial Sequence
  Synthetic oligonucleotide
attaaaatccaacaagaccgtcctagttac

SEQ ID NO: 331310 - DNA, 30 bp, Artificial Sequence
  Synthetic oligonucleotide
tatcgcccgcaacgatatatcgttagttac

SEQ ID NO: 331311 - DNA, 29 bp, Artificial Sequence
  Synthetic oligonucleotide
tataagtgtaatagggattagcacgttac

SEQ ID NO: 331312 - DNA, 30 bp, Artificial Sequence
  Synthetic oligonucleotide
actatgtcaattcctactatgggacgttac

SEQ ID NO: 331313 - DNA, 30 bp, Artificial Sequence
  Synthetic oligonucleotide
tgcgctgaccgagtggtcaggctacgttac

SEQ ID NO: 331314 - DNA, 30 bp, Artificial Sequence
  Synthetic oligonucleotide
caatccatggtgaaagcaccaaaccgttac

SEQ ID NO: 331315 - DNA, 30 bp, Artificial Sequence
  Synthetic oligonucleotide
ccatacacgtctactactacagggcgttac

SEQ ID NO: 331316 - DNA, 30 bp, Artificial Sequence
  Synthetic oligonucleotide
caagcgcgagggctatcgaaaacaggttac

SEQ ID NO: 331317 - DNA, 30 bp, Artificial Sequence
  Synthetic oligonucleotide
tctccacatactgggcaaagcgcaggttac

SEQ ID NO: 331318 - DNA, 30 bp, Artificial Sequence
  Synthetic oligonucleotide
gcctcggaatggccatgttcccacggttac

SEQ ID NO: 331319 - DNA, 30 bp, Artificial Sequence
  Synthetic oligonucleotide
tagatagatgtgcacgtgccgtacggttac

SEQ ID NO: 331320 - DNA, 30 bp, Artificial Sequence
  Synthetic oligonucleotide
tgcataaactctggattacggtgcggttac

SEQ ID NO: 331321 - DNA, 30 bp, Artificial Sequence
  Synthetic oligonucleotide
ttagggcggagcgcaaggtttatgggttac

SEQ ID NO: 331322 - DNA, 30 bp, Artificial Sequence
  Synthetic oligonucleotide
taacagaacgtgtaggatgcaattggttac

SEQ ID NO: 331323 - DNA, 30 bp, Artificial Sequence
  Synthetic oligonucleotide
ggccgttttacagccttattgaaatgttac

SEQ ID NO: 331324 - DNA, 30 bp, Artificial Sequence
  Synthetic oligonucleotide
tgagcgtcccagggaacggttcaatgttac

SEQ ID NO: 331325 - DNA, 30 bp, Artificial Sequence
  Synthetic oligonucleotide
gatggacgattgacgcctacattctgttac

SEQ ID NO: 331326 - DNA, 30 bp, Artificial Sequence
  Synthetic oligonucleotide
taggattgggctgcgatccgtcattgttac

SEQ ID NO: 331327 - DNA, 30 bp, Artificial Sequence
  Synthetic oligonucleotide
ggattctcggcaaagcaagaaagttgttac

SEQ ID NO: 331328 - DNA, 30 bp, Artificial Sequence
  Synthetic oligonucleotide
ttgtatgacgtgtacgttagtgtttgttac

SEQ ID NO: 331329 - DNA, 30 bp, Artificial Sequence
  Synthetic oligonucleotide
atcacgactgatgtgacacctggaatttac

SEQ ID NO: 331330 - DNA, 30 bp, Artificial Sequence
  Synthetic oligonucleotide
catgtgttgttagatggcgaaacgatttac

SEQ ID NO: 331331 - DNA, 30 bp, Artificial Sequence
  Synthetic oligonucleotide
ttagaacgagttgcaactgctgtgatttac

SEQ ID NO: 331332 - DNA, 30 bp, Artificial Sequence
  Synthetic oligonucleotide
ttatgccagaagaacggcgcacatatttac

SEQ ID NO: 331333 - DNA, 30 bp, Artificial Sequence
  Synthetic oligonucleotide
gaaggtccctttgcaatggcgaaactttac

SEQ ID NO: 331334 - DNA, 30 bp, Artificial Sequence
  Synthetic oligonucleotide
tgccagaatcacggtatccaagtactttac

SEQ ID NO: 331335 - DNA, 30 bp, Artificial Sequence
  Synthetic oligonucleotide
gagaggtaattattatgttgcccgctttac

SEQ ID NO: 331336 - DNA, 30 bp, Artificial Sequence
  Synthetic oligonucleotide
ccctcagtattactgggacagctgctttac

SEQ ID NO: 331337 - DNA, 31 bp, Artificial Sequence
  Synthetic oligonucleotide
ttcttgggagggcttgccatattgtctttac

SEQ ID NO: 331338 - DNA, 30 bp, Artificial Sequence
  Synthetic oligonucleotide
atccgagaaaaaagctagagtaaagtttac

SEQ ID NO: 331339 - DNA, 30 bp, Artificial Sequence
  Synthetic oligonucleotide
cctaagacagcagtacatcattaagtttac

SEQ ID NO: 331340 - DNA, 30 bp, Artificial Sequence
  Synthetic oligonucleotide
gttaaaatgttaggaaatacatacgtttac

SEQ ID NO: 331341 - DNA, 30 bp, Artificial Sequence
  Synthetic oligonucleotide
gtatagtagttgatcgcgagatcggtttac

SEQ ID NO: 331342 - DNA, 30 bp, Artificial Sequence
  Synthetic oligonucleotide
tatgttaagaccaaattcgcgttggtttac

SEQ ID NO: 331343 - DNA, 30 bp, Artificial Sequence
  Synthetic oligonucleotide
ccgtgcgctttagggagtgattatgtttac

SEQ ID NO: 331344 - DNA, 30 bp, Artificial Sequence
  Synthetic oligonucleotide
ataatagtcatggccctcgggatattttac

SEQ ID NO: 331345 - DNA, 30 bp, Artificial Sequence
  Synthetic oligonucleotide
acgcaaatatggctcgcggtagagttttac

SEQ ID NO: 331346 - DNA, 30 bp, Artificial Sequence
  Synthetic oligonucleotide
tgtgagagggagttatggacaacgttttac

SEQ ID NO: 331347 - DNA, 30 bp, Artificial Sequence
  Synthetic oligonucleotide
gaacgtcagcataaagatgccccgttttac

SEQ ID NO: 331348 - DNA, 30 bp, Artificial Sequence
  Synthetic oligonucleotide
acattaaagttaggttaatggactttttac

SEQ ID NO: 331349 - DNA, 29 bp, Artificial Sequence
  Synthetic oligonucleotide
cgttcttaatatccataggccaaaaaacc

SEQ ID NO: 331350 - DNA, 30 bp, Artificial Sequence
  Synthetic oligonucleotide
tctgatcgaccccttttcatggggaaaacc

SEQ ID NO: 331351 - DNA, 30 bp, Artificial Sequence
  Synthetic oligonucleotide
tgctttcacaggtcacatgggatgaaaacc

SEQ ID NO: 331352 - DNA, 30 bp, Artificial Sequence
  Synthetic oligonucleotide
gtcgataggctttagtgttttgctaaaacc

SEQ ID NO: 331353 - DNA, 30 bp, Artificial Sequence
  Synthetic oligonucleotide
aacgctcagttgggaacacatattaaaacc

SEQ ID NO: 331354 - DNA, 30 bp, Artificial Sequence
  Synthetic oligonucleotide
gtaaacgtcagtcgtaactatgtacaaacc

SEQ ID NO: 331355 - DNA, 30 bp, Artificial Sequence
  Synthetic oligonucleotide
attaagtcaccagtgttctcgccgcaaacc

SEQ ID NO: 331356 - DNA, 30 bp, Artificial Sequence
  Synthetic oligonucleotide
agcgcttggggcagagagccagtgcaaacc

SEQ ID NO: 331357 - DNA, 30 bp, Artificial Sequence
  Synthetic oligonucleotide
gtttagcgagagatgcgatgggatcaaacc

SEQ ID NO: 331358 - DNA, 30 bp, Artificial Sequence
  Synthetic oligonucleotide
catcataacttttgaggtgtaactcaaacc

SEQ ID NO: 331359 - DNA, 30 bp, Artificial Sequence
  Synthetic oligonucleotide
agccctaccattcccgctagccctcaaacc

SEQ ID NO: 331360 - DNA, 30 bp, Artificial Sequence
  Synthetic oligonucleotide
gctgcaggaatcatcccccgggctcaaacc

SEQ ID NO: 331361 - DNA, 30 bp, Artificial Sequence
  Synthetic oligonucleotide
tccaatgaggtgccagttcaatcagaaacc

SEQ ID NO: 331362 - DNA, 30 bp, Artificial Sequence
  Synthetic oligonucleotide
aggcaagtgtccggggtacgattagaaacc

SEQ ID NO: 331363 - DNA, 30 bp, Artificial Sequence
  Synthetic oligonucleotide
agtccatgagtctcaagcatgttagaaacc

SEQ ID NO: 331364 - DNA, 30 bp, Artificial Sequence
  Synthetic oligonucleotide
aaacacggtccatcaacattagatgaaacc

SEQ ID NO: 331365 - DNA, 30 bp, Artificial Sequence
  Synthetic oligonucleotide
gccggaggttgaggtgcccgggaataaacc

SEQ ID NO: 331366 - DNA, 30 bp, Artificial Sequence
  Synthetic oligonucleotide
atctttccgagtggaggttgagtgtaaacc

SEQ ID NO: 331367 - DNA, 30 bp, Artificial Sequence
  Synthetic oligonucleotide
gtggaagggtacgagcattcagaaacaacc

SEQ ID NO: 331368 - DNA, 30 bp, Artificial Sequence
  Synthetic oligonucleotide
ttcggaacaaaagtgctcgaatgaacaacc

SEQ ID NO: 331369 - DNA, 30 bp, Artificial Sequence
  Synthetic oligonucleotide
tcggatgtgtaggcctaacgccccacaacc

SEQ ID NO: 331370 - DNA, 30 bp, Artificial Sequence
  Synthetic oligonucleotide
ggttcgtacgatggtgccagtgccacaacc

SEQ ID NO: 331371 - DNA, 30 bp, Artificial Sequence
  Synthetic oligonucleotide
aggcactgatattacctgtagcggacaacc

SEQ ID NO: 331372 - DNA, 30 bp, Artificial Sequence
  Synthetic oligonucleotide
gtagaaagttgttaaacgggtttgacaacc

SEQ ID NO: 331373 - DNA, 30 bp, Artificial Sequence
  Synthetic oligonucleotide
atatagctttgtttggcctcttcaccaacc

SEQ ID NO: 331374 - DNA, 30 bp, Artificial Sequence
  Synthetic oligonucleotide
cagcaaagtagatatcacgcaatcccaacc

SEQ ID NO: 331375 - DNA, 30 bp, Artificial Sequence
  Synthetic oligonucleotide
gaaaatacttgttggactaaatagccaacc

SEQ ID NO: 331376 - DNA, 30 bp, Artificial Sequence
  Synthetic oligonucleotide
gctacatctctcctgcaaacaacgccaacc

SEQ ID NO: 331377 - DNA, 30 bp, Artificial Sequence
  Synthetic oligonucleotide
ggacctcaagtagtgttatatgcagcaacc

SEQ ID NO: 331378 - DNA, 30 bp, Artificial Sequence
  Synthetic oligonucleotide
gactatctcgaactagaatctgacgcaacc

SEQ ID NO: 331379 - DNA, 30 bp, Artificial Sequence
  Synthetic oligonucleotide
gcgggattggcattcgaaggacccgcaacc

SEQ ID NO: 331380 - DNA, 30 bp, Artificial Sequence
  Synthetic oligonucleotide
gtatctgtgcggtcatctgccggggcaacc

SEQ ID NO: 331381 - DNA, 30 bp, Artificial Sequence
  Synthetic oligonucleotide
ccccgcaagaggccaatgccgatggcaacc

SEQ ID NO: 331382 - DNA, 30 bp, Artificial Sequence
  Synthetic oligonucleotide
caagcatcggaacgcttgatagatgcaacc

SEQ ID NO: 331383 - DNA, 30 bp, Artificial Sequence
  Synthetic oligonucleotide
gagcagccattcatggccacgattgcaacc

SEQ ID NO: 331384 - DNA, 30 bp, Artificial Sequence
  Synthetic oligonucleotide
ccctgaatactatgactgtcagcatcaacc

SEQ ID NO: 331385 - DNA, 30 bp, Artificial Sequence
  Synthetic oligonucleotide
tcccgacgtcctagccaaggatgatcaacc

SEQ ID NO: 331386 - DNA, 30 bp, Artificial Sequence
  Synthetic oligonucleotide
tgtgctaggtcgtcccacggattatcaacc

SEQ ID NO: 331387 - DNA, 30 bp, Artificial Sequence
  Synthetic oligonucleotide
ttttggctcaaatgcatccgaacctcaacc

SEQ ID NO: 331388 - DNA, 30 bp, Artificial Sequence
  Synthetic oligonucleotide
actctcggttttggtttaaggacctcaacc

SEQ ID NO: 331389 - DNA, 30 bp, Artificial Sequence
  Synthetic oligonucleotide
aaagtcgcggcctctgggcgtgtctcaacc

SEQ ID NO: 331390 - DNA, 30 bp, Artificial Sequence
  Synthetic oligonucleotide
actgtaagcctattcatgtgaaagtcaacc

SEQ ID NO: 331391 - DNA, 30 bp, Artificial Sequence
  Synthetic oligonucleotide
cgccgtctgcggtgcattccatattcaacc

SEQ ID NO: 331392 - DNA, 30 bp, Artificial Sequence
  Synthetic oligonucleotide
taaaccttataagatcgctcgtattcaacc

SEQ ID NO: 331393 - DNA, 30 bp, Artificial Sequence
  Synthetic oligonucleotide
accagtaactaggctctctggttaagaacc

SEQ ID NO: 331394 - DNA, 30 bp, Artificial Sequence
  Synthetic oligonucleotide
tttagcgttgatactaaccatttaagaacc

SEQ ID NO: 331395 - DNA, 30 bp, Artificial Sequence
  Synthetic oligonucleotide
atgacgagcggtaggttggtccatagaacc

SEQ ID NO: 331396 - DNA, 30 bp, Artificial Sequence
  Synthetic oligonucleotide
aaagagggtccattggttctttttagaacc

SEQ ID NO: 331397 - DNA, 30 bp, Artificial Sequence
  Synthetic oligonucleotide
agtagccatattcgcgtttaaggacgaacc

SEQ ID NO: 331398 - DNA, 30 bp, Artificial Sequence
  Synthetic oligonucleotide
atcacaaataccgcgggacctatccgaacc

SEQ ID NO: 331399 - DNA, 30 bp, Artificial Sequence
  Synthetic oligonucleotide
cccggagggagcgcagctgttaagcgaacc

SEQ ID NO: 331400 - DNA, 30 bp, Artificial Sequence
  Synthetic oligonucleotide
gccagacacatcatgaggaccaggcgaacc

SEQ ID NO: 331401 - DNA, 30 bp, Artificial Sequence
  Synthetic oligonucleotide
gatgttacatggtcgagaccatttcgaacc

SEQ ID NO: 331402 - DNA, 30 bp, Artificial Sequence
  Synthetic oligonucleotide
tataaaatcccatgcctcacgccaggaacc

SEQ ID NO: 331403 - DNA, 30 bp, Artificial Sequence
  Synthetic oligonucleotide
ggaggcgcagacagcccgatgataggaacc

SEQ ID NO: 331404 - DNA, 30 bp, Artificial Sequence
  Synthetic oligonucleotide
taactaaaatcttaggtcgtaggcggaacc

SEQ ID NO: 331405 - DNA, 30 bp, Artificial Sequence
  Synthetic oligonucleotide
caacacattaggctcgcccgaatcggaacc

SEQ ID NO: 331406 - DNA, 30 bp, Artificial Sequence
  Synthetic oligonucleotide
ctgttcaccgggcgcaacaacaagggaacc

SEQ ID NO: 331407 - DNA, 30 bp, Artificial Sequence
  Synthetic oligonucleotide
gaccgtatttgtctcgggatgtagggaacc

SEQ ID NO: 331408 - DNA, 30 bp, Artificial Sequence
  Synthetic oligonucleotide
tttagcctgtaatcatggagttagggaacc

SEQ ID NO: 331409 - DNA, 30 bp, Artificial Sequence
  Synthetic oligonucleotide
gcagctttatcatagattcctacgggaacc

SEQ ID NO: 331410 - DNA, 30 bp, Artificial Sequence
  Synthetic oligonucleotide
aattaaactaccggcccgggtcctggaacc

SEQ ID NO: 331411 - DNA, 30 bp, Artificial Sequence
  Synthetic oligonucleotide
gacaatctcaagtaattggccgctggaacc

SEQ ID NO: 331412 - DNA, 30 bp, Artificial Sequence
  Synthetic oligonucleotide
ggggatctacctggcggcgataactgaacc

SEQ ID NO: 331413 - DNA, 30 bp, Artificial Sequence
  Synthetic oligonucleotide
ttgagttgatgctgcggcgtggagtgaacc

SEQ ID NO: 331414 - DNA, 30 bp, Artificial Sequence
  Synthetic oligonucleotide
tgtcatccctaggctaacatgttgtgaacc

SEQ ID NO: 331415 - DNA, 30 bp, Artificial Sequence
  Synthetic oligonucleotide
aatgcacgccatctggaatagacaataacc

SEQ ID NO: 331416 - DNA, 29 bp, Artificial Sequence
  Synthetic oligonucleotide
gtgatgtgatgcacatcgctgagataacc

SEQ ID NO: 331417 - DNA, 30 bp, Artificial Sequence
  Synthetic oligonucleotide
gcgacccagtctaaaagaatgggtataacc

SEQ ID NO: 331418 - DNA, 30 bp, Artificial Sequence
  Synthetic oligonucleotide
cctatagagcaagtacatgtacgactaacc

SEQ ID NO: 331419 - DNA, 30 bp, Artificial Sequence
  Synthetic oligonucleotide
tgatgctggaaggcactcccagacctaacc

SEQ ID NO: 331420 - DNA, 30 bp, Artificial Sequence
  Synthetic oligonucleotide
ccttatatcttgtgacgtgagcggctaacc

SEQ ID NO: 331421 - DNA, 30 bp, Artificial Sequence
  Synthetic oligonucleotide
ccgtatattaacagctgattagatctaacc

SEQ ID NO: 331422 - DNA, 29 bp, Artificial Sequence
  Synthetic oligonucleotide
actgtaggggggtgtccgaacctctaacc

SEQ ID NO: 331423 - DNA, 30 bp, Artificial Sequence
  Synthetic oligonucleotide
tcgaggtatcggactttgtgaaacgtaacc

SEQ ID NO: 331424 - DNA, 30 bp, Artificial Sequence
  Synthetic oligonucleotide
tttgcgtctgtaagagaaagcctcgtaacc

SEQ ID NO: 331425 - DNA, 30 bp, Artificial Sequence
  Synthetic oligonucleotide
gatatactactctccggcgaggcggtaacc

SEQ ID NO: 331426 - DNA, 30 bp, Artificial Sequence
  Synthetic oligonucleotide
tgtgggtctagttaaagttcgactgtaacc

SEQ ID NO: 331427 - DNA, 30 bp, Artificial Sequence
  Synthetic oligonucleotide
aagcacgccaagtaattcagggcattaacc

SEQ ID NO: 331428 - DNA, 30 bp, Artificial Sequence
  Synthetic oligonucleotide
ccggccgctaatgttaaccgactcttaacc

SEQ ID NO: 331429 - DNA, 30 bp, Artificial Sequence
  Synthetic oligonucleotide
gtgcttctatattaccattgtaatttaacc

SEQ ID NO: 331430 - DNA, 30 bp, Artificial Sequence
  Synthetic oligonucleotide
accgaacatgtctcctgatgtttaaacacc

SEQ ID NO: 331431 - DNA, 30 bp, Artificial Sequence
  Synthetic oligonucleotide
gcaaatagcagttgccaacggggtaacacc

SEQ ID NO: 331432 - DNA, 30 bp, Artificial Sequence
  Synthetic oligonucleotide
cccagtcagcgtaccttgagcacacacacc

SEQ ID NO: 331433 - DNA, 30 bp, Artificial Sequence
  Synthetic oligonucleotide
gtactgttaaacaggggccaagcacacacc

SEQ ID NO: 331434 - DNA, 30 bp, Artificial Sequence
  Synthetic oligonucleotide
gcgtattgcacaaaaaagtgttcacacacc

SEQ ID NO: 331435 - DNA, 30 bp, Artificial Sequence
  Synthetic oligonucleotide
gtgtgcagcagtgacaggactgtacacacc

SEQ ID NO: 331436 - DNA, 30 bp, Artificial Sequence
  Synthetic oligonucleotide
gtgaagcgcattcatgtatgtttacacacc

SEQ ID NO: 331437 - DNA, 30 bp, Artificial Sequence
  Synthetic oligonucleotide
taacgcctgaaggtaaggtattcgcacacc

SEQ ID NO: 331438 - DNA, 30 bp, Artificial Sequence
  Synthetic oligonucleotide
cacatcagcgcaatcatgtgagatcacacc

SEQ ID NO: 331439 - DNA, 30 bp, Artificial Sequence
  Synthetic oligonucleotide
atcgaggcctttggggcgatcggtcacacc

SEQ ID NO: 331440 - DNA, 30 bp, Artificial Sequence
  Synthetic oligonucleotide
ttcatggtcaggtcttgactaggagacacc

SEQ ID NO: 331441 - DNA, 30 bp, Artificial Sequence
  Synthetic oligonucleotide
tgcggaggctttcggcttcgcgtagacacc

SEQ ID NO: 331442 - DNA, 29 bp, Artificial Sequence
  Synthetic oligonucleotide
tggacttaggggcacagccggtagacacc

SEQ ID NO: 331443 - DNA, 30 bp, Artificial Sequence
  Synthetic oligonucleotide
gtaataagcgagaggggccctaatgacacc

SEQ ID NO: 331444 - DNA, 30 bp, Artificial Sequence
  Synthetic oligonucleotide
accgattgggccaggtcataatatgacacc

SEQ ID NO: 331445 - DNA, 30 bp, Artificial Sequence
  Synthetic oligonucleotide
ttcccacgaatagcactcagttaatacacc

SEQ ID NO: 331446 - DNA, 30 bp, Artificial Sequence
  Synthetic oligonucleotide
ctcccgccaggtcccctttggcgatacacc

SEQ ID NO: 331447 - DNA, 30 bp, Artificial Sequence
  Synthetic oligonucleotide
gcagacaaacttactatgccagcctacacc

SEQ ID NO: 331448 - DNA, 30 bp, Artificial Sequence
  Synthetic oligonucleotide
aaaggatgctcgggcacaaggacttacacc

SEQ ID NO: 331449 - DNA, 30 bp, Artificial Sequence
  Synthetic oligonucleotide
ggggattacacaaacgttaaatcttacacc

SEQ ID NO: 331450 - DNA, 30 bp, Artificial Sequence
  Synthetic oligonucleotide
gtcgtgtaaagtgaggacacacgttacacc

SEQ ID NO: 331451 - DNA, 30 bp, Artificial Sequence
  Synthetic oligonucleotide
caattacgtagcgaggcacatcaaaccacc

SEQ ID NO: 331452 - DNA, 30 bp, Artificial Sequence
  Synthetic oligonucleotide
ttagaatttgcattaaaacatagaaccacc

SEQ ID NO: 331453 - DNA, 30 bp, Artificial Sequence
  Synthetic oligonucleotide
cacgcatttatgatgaattgcgtcaccacc

SEQ ID NO: 331454 - DNA, 30 bp, Artificial Sequence
  Synthetic oligonucleotide
gtggggcccaggcaatctccttataccacc

SEQ ID NO: 331455 - DNA, 30 bp, Artificial Sequence
  Synthetic oligonucleotide
ggagctatgagcttatgtgtatttaccacc

SEQ ID NO: 331456 - DNA, 30 bp, Artificial Sequence
  Synthetic oligonucleotide
acgggaatcccggggtgtatataccccacc

SEQ ID NO: 331457 - DNA, 30 bp, Artificial Sequence
  Synthetic oligonucleotide
tatagggctaatgtatccttcgtccccacc

SEQ ID NO: 331458 - DNA, 30 bp, Artificial Sequence
  Synthetic oligonucleotide
taaatgaggactaaccgtaggttccccacc

SEQ ID NO: 331459 - DNA, 30 bp, Artificial Sequence
  Synthetic oligonucleotide
tgagttgaggcgacttcctaaatgcccacc

SEQ ID NO: 331460 - DNA, 30 bp, Artificial Sequence
  Synthetic oligonucleotide
gccaggacgcgcgtatgtttccctcccacc

SEQ ID NO: 331461 - DNA, 30 bp, Artificial Sequence
  Synthetic oligonucleotide
gctgtcgataaagacagggattctcccacc

SEQ ID NO: 331462 - DNA, 30 bp, Artificial Sequence
  Synthetic oligonucleotide
ctataaaactacctgtgtcagggagccacc

SEQ ID NO: 331463 - DNA, 30 bp, Artificial Sequence
  Synthetic oligonucleotide
cccgcggccttaagatgtactaacgccacc

SEQ ID NO: 331464 - DNA, 30 bp, Artificial Sequence
  Synthetic oligonucleotide
gaatgatactgtattgcgttacacgccacc

SEQ ID NO: 331465 - DNA, 30 bp, Artificial Sequence
  Synthetic oligonucleotide
cagggtgtgatgtttaaagaacgcgccacc

SEQ ID NO: 331466 - DNA, 30 bp, Artificial Sequence
  Synthetic oligonucleotide
gagttcatagttccattgcaaatcgccacc

SEQ ID NO: 331467 - DNA, 30 bp, Artificial Sequence
  Synthetic oligonucleotide
gggttcctggtaaattaggacccatccacc

SEQ ID NO: 331468 - DNA, 30 bp, Artificial Sequence
  Synthetic oligonucleotide
taattatgggatacccgaaaaatctccacc

SEQ ID NO: 331469 - DNA, 30 bp, Artificial Sequence
  Synthetic oligonucleotide
gagactataaaccggcatgaggtctccacc

SEQ ID NO: 331470 - DNA, 30 bp, Artificial Sequence
  Synthetic oligonucleotide
tcgaaagtataactggttgcaaattccacc

SEQ ID NO: 331471 - DNA, 30 bp, Artificial Sequence
  Synthetic oligonucleotide
taaacgtcccctgtcaagcagttcagcacc

SEQ ID NO: 331472 - DNA, 30 bp, Artificial Sequence
  Synthetic oligonucleotide
ctgatctaccggcaaaacacaagacgcacc

SEQ ID NO: 331473 - DNA, 30 bp, Artificial Sequence
  Synthetic oligonucleotide
gcccgtgatggtcagagtcgcctacgcacc

SEQ ID NO: 331474 - DNA, 30 bp, Artificial Sequence
  Synthetic oligonucleotide
ggccaataggcttgtatgtataagcgcacc

SEQ ID NO: 331475 - DNA, 30 bp, Artificial Sequence
  Synthetic oligonucleotide
atgtcgacactttcgaccaaccggcgcacc

SEQ ID NO: 331476 - DNA, 30 bp, Artificial Sequence
  Synthetic oligonucleotide
acaaaagtggctttgcgactttgtcgcacc

SEQ ID NO: 331477 - DNA, 30 bp, Artificial Sequence
  Synthetic oligonucleotide
cgcatgtagtatcgttgattgtcaggcacc

SEQ ID NO: 331478 - DNA, 30 bp, Artificial Sequence
  Synthetic oligonucleotide
agtcagcacggtaaggatagttcaggcacc

SEQ ID NO: 331479 - DNA, 30 bp, Artificial Sequence
  Synthetic oligonucleotide
gtgtacgcttggggtatagaaagcggcacc

SEQ ID NO: 331480 - DNA, 30 bp, Artificial Sequence
  Synthetic oligonucleotide
ggtgagactagaagcagcgccatcggcacc

SEQ ID NO: 331481 - DNA, 30 bp, Artificial Sequence
  Synthetic oligonucleotide
cgtagctgacggcaccgcatgcagggcacc

SEQ ID NO: 331482 - DNA, 30 bp, Artificial Sequence
  Synthetic oligonucleotide
atgttacattgagtctcatgatggggcacc

SEQ ID NO: 331483 - DNA, 30 bp, Artificial Sequence
  Synthetic oligonucleotide
gcgtcccgtgccatccagttccatggcacc

SEQ ID NO: 331484 - DNA, 30 bp, Artificial Sequence
  Synthetic oligonucleotide
gcagcacttctcgcaacgtatcaatgcacc

SEQ ID NO: 331485 - DNA, 30 bp, Artificial Sequence
  Synthetic oligonucleotide
cttaatacagaggggcggttgcactgcacc

SEQ ID NO: 331486 - DNA, 30 bp, Artificial Sequence
  Synthetic oligonucleotide
ccgcggaagtgagtcacaaagttctgcacc

SEQ ID NO: 331487 - DNA, 30 bp, Artificial Sequence
  Synthetic oligonucleotide
gaatagtaggtgaggggagtccagtgcacc

SEQ ID NO: 331488 - DNA, 30 bp, Artificial Sequence
  Synthetic oligonucleotide
gtggacgaaggcgtgcaatcagcttgcacc

SEQ ID NO: 331489 - DNA, 30 bp, Artificial Sequence
  Synthetic oligonucleotide
ctggaccgcccttggtgggggggttgcacc

SEQ ID NO: 331490 - DNA, 30 bp, Artificial Sequence
  Synthetic oligonucleotide
taaatcgacctctgccctgaataaatcacc

SEQ ID NO: 331491 - DNA, 30 bp, Artificial Sequence
  Synthetic oligonucleotide
ctcggatcgtgaacttggaagtgaatcacc

SEQ ID NO: 331492 - DNA, 30 bp, Artificial Sequence
  Synthetic oligonucleotide
atagagtccacgttgctttaagagctcacc

SEQ ID NO: 331493 - DNA, 30 bp, Artificial Sequence
  Synthetic oligonucleotide
aaattaggtgtcagtaaaaacaggctcacc

SEQ ID NO: 331494 - DNA, 30 bp, Artificial Sequence
  Synthetic oligonucleotide
tgcaggcatgaggagctacgacatctcacc

SEQ ID NO: 331495 - DNA, 30 bp, Artificial Sequence
  Synthetic oligonucleotide
aattgggtcgcctacttcccgactctcacc

SEQ ID NO: 331496 - DNA, 30 bp, Artificial Sequence
  Synthetic oligonucleotide
attttatgttgcggtgcatatgtagtcacc

SEQ ID NO: 331497 - DNA, 30 bp, Artificial Sequence
  Synthetic oligonucleotide
agggaatattttcaccttggagagttcacc

SEQ ID NO: 331498 - DNA, 30 bp, Artificial Sequence
  Synthetic oligonucleotide
gtaccatggacgggattgctcaaaaagacc

SEQ ID NO: 331499 - DNA, 30 bp, Artificial Sequence
  Synthetic oligonucleotide
acagcatggtcggtcttacacgcaaagacc

SEQ ID NO: 331500 - DNA, 30 bp, Artificial Sequence
  Synthetic oligonucleotide
ctgcggccgatggcatacaaagccaagacc

SEQ ID NO: 331501 - DNA, 30 bp, Artificial Sequence
  Synthetic oligonucleotide
aattcgtgtctttagaccggatataagacc

SEQ ID NO: 331502 - DNA, 31 bp, Artificial Sequence
  Synthetic oligonucleotide
gcgatattcaaacctgagggcaagtaagacc

SEQ ID NO: 331503 - DNA, 30 bp, Artificial Sequence
  Synthetic oligonucleotide
aggacatggcgatatgtagatctacagacc

SEQ ID NO: 331504 - DNA, 30 bp, Artificial Sequence
  Synthetic oligonucleotide
gcctgaacgagttcaaacgctcaccagacc

SEQ ID NO: 331505 - DNA, 30 bp, Artificial Sequence
  Synthetic oligonucleotide
cagttgcgctaccgatggtaacggcagacc

SEQ ID NO: 331506 - DNA, 30 bp, Artificial Sequence
  Synthetic oligonucleotide
tggcccgcgagcccggtgttggggcagacc

SEQ ID NO: 331507 - DNA, 30 bp, Artificial Sequence
  Synthetic oligonucleotide
gctgctaccagaatatgagcccctcagacc

SEQ ID NO: 331508 - DNA, 30 bp, Artificial Sequence
  Synthetic oligonucleotide
tagtgagcagtctagcggtgtcgtcagacc

SEQ ID NO: 331509 - DNA, 30 bp, Artificial Sequence
  Synthetic oligonucleotide
tgacagccgcattccttcagggccgagacc

SEQ ID NO: 331510 - DNA, 30 bp, Artificial Sequence
  Synthetic oligonucleotide
gcttacaggatacgcacgggcacggagacc

SEQ ID NO: 331511 - DNA, 29 bp, Artificial Sequence
  Synthetic oligonucleotide
tgtgagagtatctaaattatgcggagacc

SEQ ID NO: 331512 - DNA, 30 bp, Artificial Sequence
  Synthetic oligonucleotide
acaaagttatattccggggaccatgagacc

SEQ ID NO: 331513 - DNA, 30 bp, Artificial Sequence
  Synthetic oligonucleotide
aattccggcttattcggatcgacatagacc

SEQ ID NO: 331514 - DNA, 30 bp, Artificial Sequence
  Synthetic oligonucleotide
attacgatcgttttgtaaactacatagacc

SEQ ID NO: 331515 - DNA, 30 bp, Artificial Sequence
  Synthetic oligonucleotide
ccctcgcgagctacgtgaagagcatagacc

SEQ ID NO: 331516 - DNA, 30 bp, Artificial Sequence
  Synthetic oligonucleotide
actgatttgacaaaggccccaatctagacc

SEQ ID NO: 331517 - DNA, 30 bp, Artificial Sequence
  Synthetic oligonucleotide
ccgacaggcgtaagacgttggaagtagacc

SEQ ID NO: 331518 - DNA, 30 bp, Artificial Sequence
  Synthetic oligonucleotide
aaatagaaactgtggacattaatgtagacc

SEQ ID NO: 331519 - DNA, 30 bp, Artificial Sequence
  Synthetic oligonucleotide
gtcggtgcacccgtcgggaaggtgtagacc

SEQ ID NO: 331520 - DNA, 30 bp, Artificial Sequence
  Synthetic oligonucleotide
gagaaggcggttgcatttctcgcaacgacc

SEQ ID NO: 331521 - DNA, 30 bp, Artificial Sequence
  Synthetic oligonucleotide
gacaggcgggcatgtagtggatcaacgacc

SEQ ID NO: 331522 - DNA, 30 bp, Artificial Sequence
  Synthetic oligonucleotide
gcgcccagtggagtgttgggttgcacgacc

SEQ ID NO: 331523 - DNA, 30 bp, Artificial Sequence
  Synthetic oligonucleotide
ctctaagggttgtctctatgcctcacgacc

SEQ ID NO: 331524 - DNA, 30 bp, Artificial Sequence
  Synthetic oligonucleotide
tcgagtcgtagtattggactgtagacgacc

SEQ ID NO: 331525 - DNA, 30 bp, Artificial Sequence
  Synthetic oligonucleotide
gtagacaatagacacggatgttatacgacc

SEQ ID NO: 331526 - DNA, 30 bp, Artificial Sequence
  Synthetic oligonucleotide
gaaagaggctcgggtcccacaagaccgacc

SEQ ID NO: 331527 - DNA, 30 bp, Artificial Sequence
  Synthetic oligonucleotide
ctaaggcataattgcatgccgcgaccgacc

SEQ ID NO: 331528 - DNA, 30 bp, Artificial Sequence
  Synthetic oligonucleotide
ggttcccgggtgaccaaactccatccgacc

SEQ ID NO: 331529 - DNA, 30 bp, Artificial Sequence
  Synthetic oligonucleotide
gaaaaagcgggaatgagcagaattccgacc

SEQ ID NO: 331530 - DNA, 30 bp, Artificial Sequence
  Synthetic oligonucleotide
ttctcgaccagtagaaaagggtaagcgacc

SEQ ID NO: 331531 - DNA, 30 bp, Artificial Sequence
  Synthetic oligonucleotide
tcgtggtaagcaaccggggatttagcgacc

SEQ ID NO: 331532 - DNA, 30 bp, Artificial Sequence
  Synthetic oligonucleotide
gcaatgcaaataagtaataccgtcgcgacc

SEQ ID NO: 331533 - DNA, 30 bp, Artificial Sequence
  Synthetic oligonucleotide
cgtaacgtgttcttccgaggtcgggcgacc

SEQ ID NO: 331534 - DNA, 30 bp, Artificial Sequence
  Synthetic oligonucleotide
tagggcgttgcatctcagtttcgggcgacc

SEQ ID NO: 331535 - DNA, 30 bp, Artificial Sequence
  Synthetic oligonucleotide
ggactttcaaagtatatataatttgcgacc

SEQ ID NO: 331536 - DNA, 30 bp, Artificial Sequence
  Synthetic oligonucleotide
gagcttggtcattggcacgtctaaaggacc

SEQ ID NO: 331537 - DNA, 30 bp, Artificial Sequence
  Synthetic oligonucleotide
ggcttatgtgagaacataacgtcaaggacc

SEQ ID NO: 331538 - DNA, 30 bp, Artificial Sequence
  Synthetic oligonucleotide
gcccaggtagggtgtgtaacccacaggacc

SEQ ID NO: 331539 - DNA, 30 bp, Artificial Sequence
  Synthetic oligonucleotide
gtcaggtgggtagaacaccgctacaggacc

SEQ ID NO: 331540 - DNA, 30 bp, Artificial Sequence
  Synthetic oligonucleotide
cagttaaggttgcgaatcgcgcccaggacc

SEQ ID NO: 331541 - DNA, 30 bp, Artificial Sequence
  Synthetic oligonucleotide
atgatgtgggttgcaatagttagcaggacc

SEQ ID NO: 331542 - DNA, 30 bp, Artificial Sequence
  Synthetic oligonucleotide
tgtcttctaaagcagatggaccgcaggacc

SEQ ID NO: 331543 - DNA, 30 bp, Artificial Sequence
  Synthetic oligonucleotide
cagcatgctagacaaatgtacatcaggacc

SEQ ID NO: 331544 - DNA, 30 bp, Artificial Sequence
  Synthetic oligonucleotide
caggtatcggttcctaatacattcaggacc

SEQ ID NO: 331545 - DNA, 30 bp, Artificial Sequence
  Synthetic oligonucleotide
cctggacagtaaatactgcgcctgaggacc

SEQ ID NO: 331546 - DNA, 30 bp, Artificial Sequence
  Synthetic oligonucleotide
ttcactatccaatatcggttaaataggacc

SEQ ID NO: 331547 - DNA, 30 bp, Artificial Sequence
  Synthetic oligonucleotide
gttcattgggcgacgggcggtagtaggacc

SEQ ID NO: 331548 - DNA, 30 bp, Artificial Sequence
  Synthetic oligonucleotide
tagtgaaccggtagccggcatcggcggacc

SEQ ID NO: 331549 - DNA, 30 bp, Artificial Sequence
  Synthetic oligonucleotide
ataccaacgggacgctgtcctcgtcggacc

SEQ ID NO: 331550 - DNA, 30 bp, Artificial Sequence
  Synthetic oligonucleotide
cccacgcagttcgtgtaactagttcggacc

SEQ ID NO: 331551 - DNA, 30 bp, Artificial Sequence
  Synthetic oligonucleotide
gaaccactttcaagcgtcccccgagggacc

SEQ ID NO: 331552 - DNA, 30 bp, Artificial Sequence
  Synthetic oligonucleotide
aaggtgacggggtcgcggcggctcgggacc

SEQ ID NO: 331553 - DNA, 30 bp, Artificial Sequence
  Synthetic oligonucleotide
cgctgcgactaccttgtacatacggggacc

SEQ ID NO: 331554 - DNA, 30 bp, Artificial Sequence
  Synthetic oligonucleotide
taatttaaagtgctcatgccggctgggacc

SEQ ID NO: 331555 - DNA, 30 bp, Artificial Sequence
  Synthetic oligonucleotide
gcggaccctacaaggcttattgttgggacc

SEQ ID NO: 331556 - DNA, 30 bp, Artificial Sequence
  Synthetic oligonucleotide
tctttagacttgagtaggaggagatggacc

SEQ ID NO: 331557 - DNA, 30 bp, Artificial Sequence
  Synthetic oligonucleotide
cgtacgggcgattccattcactagtggacc

SEQ ID NO: 331558 - DNA, 30 bp, Artificial Sequence
  Synthetic oligonucleotide
ctagatttccccgagattctattgtggacc

SEQ ID NO: 331559 - DNA, 30 bp, Artificial Sequence
  Synthetic oligonucleotide
ttgcctttggcgtgacacgtgacaatgacc

SEQ ID NO: 331560 - DNA, 30 bp, Artificial Sequence
  Synthetic oligonucleotide
ctaccagagccaactaaagccgcaatgacc

SEQ ID NO: 331561 - DNA, 30 bp, Artificial Sequence
  Synthetic oligonucleotide
ggttcgtagcgtcgaggtacaagaatgacc

SEQ ID NO: 331562 - DNA, 30 bp, Artificial Sequence
  Synthetic oligonucleotide
gatcatttttctactatggtgggaatgacc

SEQ ID NO: 331563 - DNA, 30 bp, Artificial Sequence
  Synthetic oligonucleotide
tgctatggcatactagcccggtgaatgacc

SEQ ID NO: 331564 - DNA, 30 bp, Artificial Sequence
  Synthetic oligonucleotide
tctgatgatgaggtaataaaccctatgacc

SEQ ID NO: 331565 - DNA, 30 bp, Artificial Sequence
  Synthetic oligonucleotide
agagaagcaatagctgacgtagctatgacc

SEQ ID NO: 331566 - DNA, 30 bp, Artificial Sequence
  Synthetic oligonucleotide
acataatgccggctgcaaatcacactgacc

SEQ ID NO: 331567 - DNA, 30 bp, Artificial Sequence
  Synthetic oligonucleotide
cagagggcccgcggcaatatggcactgacc

SEQ ID NO: 331568 - DNA, 30 bp, Artificial Sequence
  Synthetic oligonucleotide
cactttcgtgagacttaaggcaccctgacc

SEQ ID NO: 331569 - DNA, 30 bp, Artificial Sequence
  Synthetic oligonucleotide
ccaccggtgctgtgggatcattggctgacc

SEQ ID NO: 331570 - DNA, 30 bp, Artificial Sequence
  Synthetic oligonucleotide
agatccaccctgcaaattgcggctctgacc

SEQ ID NO: 331571 - DNA, 30 bp, Artificial Sequence
  Synthetic oligonucleotide
aaaccggttttcggatccgtagaagtgacc

SEQ ID NO: 331572 - DNA, 30 bp, Artificial Sequence
  Synthetic oligonucleotide
gaacgtccatcagagtgcctcatattgacc

SEQ ID NO: 331573 - DNA, 30 bp, Artificial Sequence
  Synthetic oligonucleotide
gcgtaagttatgaatacgtgttcgttgacc

SEQ ID NO: 331574 - DNA, 30 bp, Artificial Sequence
  Synthetic oligonucleotide
gctaaccagcaccacgtccattggttgacc

SEQ ID NO: 331575 - DNA, 30 bp, Artificial Sequence
  Synthetic oligonucleotide
attatcatgattcgatcctttgtgttgacc

SEQ ID NO: 331576 - DNA, 30 bp, Artificial Sequence
  Synthetic oligonucleotide
tctcgcggaattcattggaatctaaatacc

SEQ ID NO: 331577 - DNA, 30 bp, Artificial Sequence
  Synthetic oligonucleotide
ggttatgcactctcgagagaattaaatacc

SEQ ID NO: 331578 - DNA, 30 bp, Artificial Sequence
  Synthetic oligonucleotide
tatctaggcggtgtcgtttcgaacaatacc

SEQ ID NO: 331579 - DNA, 30 bp, Artificial Sequence
  Synthetic oligonucleotide
aagccaagcggctcgaacgaatccaatacc

SEQ ID NO: 331580 - DNA, 30 bp, Artificial Sequence
  Synthetic oligonucleotide
agggattcctgtgcccgtcaatcacatacc

SEQ ID NO: 331581 - DNA, 30 bp, Artificial Sequence
  Synthetic oligonucleotide
ggataattggctcgcccccatatacatacc

SEQ ID NO: 331582 - DNA, 30 bp, Artificial Sequence
  Synthetic oligonucleotide
attattgaaagaggggataacgtacatacc

SEQ ID NO: 331583 - DNA, 30 bp, Artificial Sequence
  Synthetic oligonucleotide
gacctatgcagggaacacacggagcatacc

SEQ ID NO: 331584 - DNA, 30 bp, Artificial Sequence
  Synthetic oligonucleotide
gtcgcaacattatcaacgtggaatcatacc

SEQ ID NO: 331585 - DNA, 30 bp, Artificial Sequence
  Synthetic oligonucleotide
gtaattcgcaggcgggagtctcatcatacc

SEQ ID NO: 331586 - DNA, 30 bp, Artificial Sequence
  Synthetic oligonucleotide
cattgagccattaggagcgccactcatacc

SEQ ID NO: 331587 - DNA, 30 bp, Artificial Sequence
  Synthetic oligonucleotide
ctatccctcgaggttgctactgttcatacc

SEQ ID NO: 331588 - DNA, 30 bp, Artificial Sequence
  Synthetic oligonucleotide
ggcacaaaacgcagagcttttcgagatacc

SEQ ID NO: 331589 - DNA, 30 bp, Artificial Sequence
  Synthetic oligonucleotide
acctgaaaattattgtgtccgtacgatacc

SEQ ID NO: 331590 - DNA, 30 bp, Artificial Sequence
  Synthetic oligonucleotide
tcttcaggccaatccgtgtaccccgatacc

SEQ ID NO: 331591 - DNA, 30 bp, Artificial Sequence
  Synthetic oligonucleotide
tgggccgttgcgcagaggagatgcgatacc

SEQ ID NO: 331592 - DNA, 30 bp, Artificial Sequence
  Synthetic oligonucleotide
tttgagtatcctgtgcattcccgggatacc

SEQ ID NO: 331593 - DNA, 30 bp, Artificial Sequence
  Synthetic oligonucleotide
gaggctcacctgcgaggcgggtgggatacc

SEQ ID NO: 331594 - DNA, 30 bp, Artificial Sequence
  Synthetic oligonucleotide
atgggcttaagatataggaccctatatacc

SEQ ID NO: 331595 - DNA, 30 bp, Artificial Sequence
  Synthetic oligonucleotide
ctcaggaccattaggtggggcctatatacc

SEQ ID NO: 331596 - DNA, 30 bp, Artificial Sequence
  Synthetic oligonucleotide
aaaaagaatcctgccactacacactatacc

SEQ ID NO: 331597 - DNA, 30 bp, Artificial Sequence
  Synthetic oligonucleotide
gaacagaagggttactcgatatcctatacc

SEQ ID NO: 331598 - DNA, 30 bp, Artificial Sequence
  Synthetic oligonucleotide
caagtcacttgacactgaccagtgtatacc

SEQ ID NO: 331599 - DNA, 30 bp, Artificial Sequence
  Synthetic oligonucleotide
gctctaaatttgggcgtcgtttgttatacc

SEQ ID NO: 331600 - DNA, 30 bp, Artificial Sequence
  Synthetic oligonucleotide
tctataaccgaggagcttatgacgactacc

SEQ ID NO: 331601 - DNA, 30 bp, Artificial Sequence
  Synthetic oligonucleotide
tctagcgaggcgtacgctgtgctacctacc

SEQ ID NO: 331602 - DNA, 30 bp, Artificial Sequence
  Synthetic oligonucleotide
tatggttcgctcgttacacctctacctacc

SEQ ID NO: 331603 - DNA, 30 bp, Artificial Sequence
  Synthetic oligonucleotide
tgattagaaaacgtacaaaacccccctacc

SEQ ID NO: 331604 - DNA, 30 bp, Artificial Sequence
  Synthetic oligonucleotide
tttgtctctcgacagtaaaatctccctacc

SEQ ID NO: 331605 - DNA, 30 bp, Artificial Sequence
  Synthetic oligonucleotide
cctcccgaaggttctatatggccagctacc

SEQ ID NO: 331606 - DNA, 30 bp, Artificial Sequence
  Synthetic oligonucleotide
gttctttggcaaatccgctatggagctacc

SEQ ID NO: 331607 - DNA, 30 bp, Artificial Sequence
  Synthetic oligonucleotide
gtgcaggtcgtaaccggggcttcatctacc

SEQ ID NO: 331608 - DNA, 30 bp, Artificial Sequence
  Synthetic oligonucleotide
atagtcaagtgagtcctcttgggatctacc

SEQ ID NO: 331609 - DNA, 30 bp, Artificial Sequence
  Synthetic oligonucleotide
cagatcacgactgcagctacttcctctacc

SEQ ID NO: 331610 - DNA, 30 bp, Artificial Sequence
  Synthetic oligonucleotide
cacttactagctccacgcgccgagtctacc

SEQ ID NO: 331611 - DNA, 30 bp, Artificial Sequence
  Synthetic oligonucleotide
attagatttgagggcgagcgtaggtctacc

SEQ ID NO: 331612 - DNA, 30 bp, Artificial Sequence
  Synthetic oligonucleotide
acaccatctacgagccggccttggtctacc

SEQ ID NO: 331613 - DNA, 30 bp, Artificial Sequence
  Synthetic oligonucleotide
gtattaagtgtctctatctgcccttctacc

SEQ ID NO: 331614 - DNA, 31 bp, Artificial Sequence
  Synthetic oligonucleotide
ggggtaacatcctcgacgcgggtaaagtacc

SEQ ID NO: 331615 - DNA, 30 bp, Artificial Sequence
  Synthetic oligonucleotide
acggacatctgtacgaagatttcaagtacc

SEQ ID NO: 331616 - DNA, 30 bp, Artificial Sequence
  Synthetic oligonucleotide
cgctttgccgacacgctatatctcagtacc

SEQ ID NO: 331617 - DNA, 30 bp, Artificial Sequence
  Synthetic oligonucleotide
gtattgtgggtaaggaacggttcgagtacc

SEQ ID NO: 331618 - DNA, 30 bp, Artificial Sequence
  Synthetic oligonucleotide
atgggtcagcgcgagctccccaatagtacc

SEQ ID NO: 331619 - DNA, 30 bp, Artificial Sequence
  Synthetic oligonucleotide
attagttgccggtcgggctcaactagtacc

SEQ ID NO: 331620 - DNA, 30 bp, Artificial Sequence
  Synthetic oligonucleotide
cgtcttgtttcagcgtcgttggaacgtacc

SEQ ID NO: 331621 - DNA, 30 bp, Artificial Sequence
  Synthetic oligonucleotide
tcatatagaaatcaagcgtaatcacgtacc

SEQ ID NO: 331622 - DNA, 30 bp, Artificial Sequence
  Synthetic oligonucleotide
ggggactggtgggaactctcgttacgtacc

SEQ ID NO: 331623 - DNA, 30 bp, Artificial Sequence
  Synthetic oligonucleotide
tattggcgtgtacagcaaggcaaccgtacc

SEQ ID NO: 331624 - DNA, 30 bp, Artificial Sequence
  Synthetic oligonucleotide
aggcatgtaaaaaaatatagcgaccgtacc

SEQ ID NO: 331625 - DNA, 30 bp, Artificial Sequence
  Synthetic oligonucleotide
caatctatacaaccaagtagtggccgtacc

SEQ ID NO: 331626 - DNA, 30 bp, Artificial Sequence
  Synthetic oligonucleotide
gttcactacgtgtatctgatgttccgtacc

SEQ ID NO: 331627 - DNA, 30 bp, Artificial Sequence
  Synthetic oligonucleotide
cttaatagggattggagtctgccgcgtacc

SEQ ID NO: 331628 - DNA, 30 bp, Artificial Sequence
  Synthetic oligonucleotide
agcgctcaaaatgcacattatcgtcgtacc

SEQ ID NO: 331629 - DNA, 30 bp, Artificial Sequence
  Synthetic oligonucleotide
gagatggaccgggggttatcgcaaggtacc

SEQ ID NO: 331630 - DNA, 30 bp, Artificial Sequence
  Synthetic oligonucleotide
tagaagcatatgcagatatgaacaggtacc

SEQ ID NO: 331631 - DNA, 30 bp, Artificial Sequence
  Synthetic oligonucleotide
cgttagttagggctaacataaaccggtacc

SEQ ID NO: 331632 - DNA, 30 bp, Artificial Sequence
  Synthetic oligonucleotide
agatagcaggtcattggattactcggtacc

SEQ ID NO: 331633 - DNA, 30 bp, Artificial Sequence
  Synthetic oligonucleotide
tcataaagggacatattccttaagggtacc

SEQ ID NO: 331634 - DNA, 30 bp, Artificial Sequence
  Synthetic oligonucleotide
atcatgaaccaagaagtatgattgggtacc

SEQ ID NO: 331635 - DNA, 30 bp, Artificial Sequence
  Synthetic oligonucleotide
aaccataaagatggacaacacttgggtacc

SEQ ID NO: 331636 - DNA, 30 bp, Artificial Sequence
  Synthetic oligonucleotide
cctaagggctccgcgttcccggatggtacc

SEQ ID NO: 331637 - DNA, 30 bp, Artificial Sequence
  Synthetic oligonucleotide
gaagtggtttgattgcgaggtgaatgtacc

SEQ ID NO: 331638 - DNA, 30 bp, Artificial Sequence
  Synthetic oligonucleotide
gccagagttcttcgtaagatgttatgtacc

SEQ ID NO: 331639 - DNA, 30 bp, Artificial Sequence
  Synthetic oligonucleotide
gcaagtattatcccgcataccaactgtacc

SEQ ID NO: 331640 - DNA, 30 bp, Artificial Sequence
  Synthetic oligonucleotide
atagcggcgtaagaggtaaaaccgtgtacc

SEQ ID NO: 331641 - DNA, 30 bp, Artificial Sequence
  Synthetic oligonucleotide
cggctacgcatgtcacattgagtgtgtacc

SEQ ID NO: 331642 - DNA, 30 bp, Artificial Sequence
  Synthetic oligonucleotide
ggattatacaagtcttagagttgttgtacc

SEQ ID NO: 331643 - DNA, 30 bp, Artificial Sequence
  Synthetic oligonucleotide
tatcctgtatcggggcacggccaaattacc

SEQ ID NO: 331644 - DNA, 30 bp, Artificial Sequence
  Synthetic oligonucleotide
tggtccgagtgactgttgccccgaattacc

SEQ ID NO: 331645 - DNA, 30 bp, Artificial Sequence
  Synthetic oligonucleotide
tcacatcaacctcgttttcggtgaattacc

SEQ ID NO: 331646 - DNA, 30 bp, Artificial Sequence
  Synthetic oligonucleotide
attaaatcagggaatgatgatttcattacc

SEQ ID NO: 331647 - DNA, 30 bp, Artificial Sequence
  Synthetic oligonucleotide
ataatccacatcagtatggttcggattacc

SEQ ID NO: 331648 - DNA, 30 bp, Artificial Sequence
  Synthetic oligonucleotide
aacgtacacattctagagggtgtgattacc

SEQ ID NO: 331649 - DNA, 30 bp, Artificial Sequence
  Synthetic oligonucleotide
atgaaagttgggcgactcaagggtattacc

SEQ ID NO: 331650 - DNA, 30 bp, Artificial Sequence
  Synthetic oligonucleotide
gggagtgctaggaaacctttcacacttacc

SEQ ID NO: 331651 - DNA, 30 bp, Artificial Sequence
  Synthetic oligonucleotide
ataccggcccccggggcaatcctgcttacc

SEQ ID NO: 331652 - DNA, 30 bp, Artificial Sequence
  Synthetic oligonucleotide
attaataacgtctacgtgtaatatcttacc

SEQ ID NO: 331653 - DNA, 30 bp, Artificial Sequence
  Synthetic oligonucleotide
caggtcctcccctattaataaatagttacc

SEQ ID NO: 331654 - DNA, 30 bp, Artificial Sequence
  Synthetic oligonucleotide
aagaccgccgaggcgtttaattacgttacc

SEQ ID NO: 331655 - DNA, 30 bp, Artificial Sequence
  Synthetic oligonucleotide
gcctcttcgggaagatttccggtggttacc

SEQ ID NO: 331656 - DNA, 30 bp, Artificial Sequence
  Synthetic oligonucleotide
tcggttggcactgctgcggtctcatttacc

SEQ ID NO: 331657 - DNA, 30 bp, Artificial Sequence
  Synthetic oligonucleotide
ctgtccccgttattacaaacgccctttacc

SEQ ID NO: 331658 - DNA, 30 bp, Artificial Sequence
  Synthetic oligonucleotide
ctaggtcagccctcctcgttcagctttacc

SEQ ID NO: 331659 - DNA, 30 bp, Artificial Sequence
  Synthetic oligonucleotide
gcaacgtgctttgcagagttcgtctttacc

SEQ ID NO: 331660 - DNA, 30 bp, Artificial Sequence
  Synthetic oligonucleotide
cccgaacttccaggggaaaacacgtttacc

SEQ ID NO: 331661 - DNA, 30 bp, Artificial Sequence
  Synthetic oligonucleotide
aaagaaagctacggcgatagggcaaaaccc

SEQ ID NO: 331662 - DNA, 30 bp, Artificial Sequence
  Synthetic oligonucleotide
gggagttctagcgtgtggtagcccaaaccc

SEQ ID NO: 331663 - DNA, 30 bp, Artificial Sequence
  Synthetic oligonucleotide
tgtcaacgaggagtccctcgtatgaaaccc

SEQ ID NO: 331664 - DNA, 30 bp, Artificial Sequence
  Synthetic oligonucleotide
tatggactctcgaggcactttcctaaaccc

SEQ ID NO: 331665 - DNA, 30 bp, Artificial Sequence
  Synthetic oligonucleotide
ccagaaagggtacgcaccatacgtaaaccc

SEQ ID NO: 331666 - DNA, 30 bp, Artificial Sequence
  Synthetic oligonucleotide
gattaaaggcactccgggagcggtaaaccc

SEQ ID NO: 331667 - DNA, 30 bp, Artificial Sequence
  Synthetic oligonucleotide
agccgactccagttaaggaccgaccaaccc

SEQ ID NO: 331668 - DNA, 30 bp, Artificial Sequence
  Synthetic oligonucleotide
ccatacgcgaggtgtgtgaaataccaaccc

SEQ ID NO: 331669 - DNA, 30 bp, Artificial Sequence
  Synthetic oligonucleotide
agacaagccttaggcgtctgacgccaaccc

SEQ ID NO: 331670 - DNA, 30 bp, Artificial Sequence
  Synthetic oligonucleotide
gtcggacaggaggccgtctcaggccaaccc

SEQ ID NO: 331671 - DNA, 30 bp, Artificial Sequence
  Synthetic oligonucleotide
tatacagggttagagccaacgtgtcaaccc

SEQ ID NO: 331672 - DNA, 30 bp, Artificial Sequence
  Synthetic oligonucleotide
ttgggggtaaccgtatatgccaaagaaccc

SEQ ID NO: 331673 - DNA, 30 bp, Artificial Sequence
  Synthetic oligonucleotide
ctgtagcttaatactaatcgcagagaaccc

SEQ ID NO: 331674 - DNA, 30 bp, Artificial Sequence
  Synthetic oligonucleotide
cggtcagtagccgtacatgccggcgaaccc

SEQ ID NO: 331675 - DNA, 30 bp, Artificial Sequence
  Synthetic oligonucleotide
attgaacggaatagtgtcattgtcgaaccc

SEQ ID NO: 331676 - DNA, 30 bp, Artificial Sequence
  Synthetic oligonucleotide
gttagtggattcgggtgaattgtggaaccc

SEQ ID NO: 331677 - DNA, 30 bp, Artificial Sequence
  Synthetic oligonucleotide
cacaaaacggtccacactggaatataaccc

SEQ ID NO: 331678 - DNA, 30 bp, Artificial Sequence
  Synthetic oligonucleotide
gtaagtcgtcttaatggagaccagtaaccc

SEQ ID NO: 331679 - DNA, 30 bp, Artificial Sequence
  Synthetic oligonucleotide
aaagggacagctatctttttcgggtaaccc

SEQ ID NO: 331680 - DNA, 30 bp, Artificial Sequence
  Synthetic oligonucleotide
ataatctgacgtgttcgagatatgtaaccc

SEQ ID NO: 331681 - DNA, 30 bp, Artificial Sequence
  Synthetic oligonucleotide
gaagttttacttcaagtcgcaccttaaccc

SEQ ID NO: 331682 - DNA, 30 bp, Artificial Sequence
  Synthetic oligonucleotide
aggccgagtggtctgatacccagaacaccc

SEQ ID NO: 331683 - DNA, 30 bp, Artificial Sequence
  Synthetic oligonucleotide
ggatggcctcccaaggggcatgccacaccc

SEQ ID NO: 331684 - DNA, 30 bp, Artificial Sequence
  Synthetic oligonucleotide
gcattgtgttgattcctacggaagacaccc

SEQ ID NO: 331685 - DNA, 30 bp, Artificial Sequence
  Synthetic oligonucleotide
cgtgatacgtctagtatccccccgacaccc

SEQ ID NO: 331686 - DNA, 30 bp, Artificial Sequence
  Synthetic oligonucleotide
tccacgtggtttactccgtaggcgacaccc

SEQ ID NO: 331687 - DNA, 30 bp, Artificial Sequence
  Synthetic oligonucleotide
catgccgtcatgaagctgcagcttacaccc

SEQ ID NO: 331688 - DNA, 30 bp, Artificial Sequence
  Synthetic oligonucleotide
tctgggaggcaatagcaaattcttacaccc

SEQ ID NO: 331689 - DNA, 30 bp, Artificial Sequence
  Synthetic oligonucleotide
tgcaagcccatggcgcgcccagccccaccc

SEQ ID NO: 331690 - DNA, 30 bp, Artificial Sequence
  Synthetic oligonucleotide
ccttatggatagtggcgcaatccgccaccc

SEQ ID NO: 331691 - DNA, 30 bp, Artificial Sequence
  Synthetic oligonucleotide
agtctcataggtgttcggtggtgagcaccc

SEQ ID NO: 331692 - DNA, 30 bp, Artificial Sequence
  Synthetic oligonucleotide
gtttgagttagcctcgaaggaagcgcaccc

SEQ ID NO: 331693 - DNA, 30 bp, Artificial Sequence
  Synthetic oligonucleotide
agtcaccggcagtggcttgtaagcgcaccc

SEQ ID NO: 331694 - DNA, 30 bp, Artificial Sequence
  Synthetic oligonucleotide
agcgtggtggactcgatgcggcaggcaccc

SEQ ID NO: 331695 - DNA, 30 bp, Artificial Sequence
  Synthetic oligonucleotide
ggatacatgactcgaggttggtatgcaccc

SEQ ID NO: 331696 - DNA, 30 bp, Artificial Sequence
  Synthetic oligonucleotide
ggaatagttcatattgaggatgaatcaccc

SEQ ID NO: 331697 - DNA, 30 bp, Artificial Sequence
  Synthetic oligonucleotide
cacatggcatattagggcgtatcgtcaccc

SEQ ID NO: 331698 - DNA, 30 bp, Artificial Sequence
  Synthetic oligonucleotide
atgtacttaacccgcctcctatggtcaccc

SEQ ID NO: 331699 - DNA, 30 bp, Artificial Sequence
  Synthetic oligonucleotide
cagacagacgcgctaactggacattcaccc

SEQ ID NO: 331700 - DNA, 30 bp, Artificial Sequence
  Synthetic oligonucleotide
agtcgttggaccggggtagaagcttcaccc

SEQ ID NO: 331701 - DNA, 30 bp, Artificial Sequence
  Synthetic oligonucleotide
ccaagatctgtttcgacgtacataagaccc

SEQ ID NO: 331702 - DNA, 30 bp, Artificial Sequence
  Synthetic oligonucleotide
ttatcgagttagaagggggctaatagaccc

SEQ ID NO: 331703 - DNA, 30 bp, Artificial Sequence
  Synthetic oligonucleotide
acctgagccaatggagttatggctagaccc

SEQ ID NO: 331704 - DNA, 30 bp, Artificial Sequence
  Synthetic oligonucleotide
tatcgttaagtaagacgacactcacgaccc

SEQ ID NO: 331705 - DNA, 30 bp, Artificial Sequence
  Synthetic oligonucleotide
acatgccatatacgcgccggtgcgcgaccc

SEQ ID NO: 331706 - DNA, 30 bp, Artificial Sequence
  Synthetic oligonucleotide
aacggtttcaagactccgactctaggaccc

SEQ ID NO: 331707 - DNA, 30 bp, Artificial Sequence
  Synthetic oligonucleotide
caaagtcccgcaagacgaaagttaggaccc

SEQ ID NO: 331708 - DNA, 30 bp, Artificial Sequence
  Synthetic oligonucleotide
gatctgattacggaaagtgagcggtgaccc

SEQ ID NO: 331709 - DNA, 29 bp, Artificial Sequence
  Synthetic oligonucleotide
cggtaagtggaaactttgatacttgaccc

SEQ ID NO: 331710 - DNA, 30 bp, Artificial Sequence
  Synthetic oligonucleotide
gtgagaagtgggtacgtacgatcttgaccc

SEQ ID NO: 331711 - DNA, 30 bp, Artificial Sequence
  Synthetic oligonucleotide
atataccaaatcccaggctttgaaataccc

SEQ ID NO: 331712 - DNA, 30 bp, Artificial Sequence
  Synthetic oligonucleotide
cgttcaccatagagtgcatacggaataccc

SEQ ID NO: 331713 - DNA, 30 bp, Artificial Sequence
  Synthetic oligonucleotide
ggcgttatcatatccagttcgtgaataccc

SEQ ID NO: 331714 - DNA, 30 bp, Artificial Sequence
  Synthetic oligonucleotide
gcggggtaaggtaagacgcttgcgataccc

SEQ ID NO: 331715 - DNA, 30 bp, Artificial Sequence
  Synthetic oligonucleotide
aaaaaggacaatcgatactacatgataccc

SEQ ID NO: 331716 - DNA, 30 bp, Artificial Sequence
  Synthetic oligonucleotide
atcaacatgcaaaggtaactggtgataccc

SEQ ID NO: 331717 - DNA, 30 bp, Artificial Sequence
  Synthetic oligonucleotide
ctagaaagatccgcccgcaaacctataccc

SEQ ID NO: 331718 - DNA, 30 bp, Artificial Sequence
  Synthetic oligonucleotide
gtatccaacgtctcctcacttttcctaccc

SEQ ID NO: 331719 - DNA, 30 bp, Artificial Sequence
  Synthetic oligonucleotide
tcatccgactaactaaacacgccgctaccc

SEQ ID NO: 331720 - DNA, 30 bp, Artificial Sequence
  Synthetic oligonucleotide
aagcagttgtcaaaagatgataaagtaccc

SEQ ID NO: 331721 - DNA, 30 bp, Artificial Sequence
  Synthetic oligonucleotide
attgtgaggggttaacgggaaacagtaccc

SEQ ID NO: 331722 - DNA, 30 bp, Artificial Sequence
  Synthetic oligonucleotide
agaatagcaaccggacaacccttcgtaccc

SEQ ID NO: 331723 - DNA, 30 bp, Artificial Sequence
  Synthetic oligonucleotide
acatacggtctcatggacactacggtaccc

SEQ ID NO: 331724 - DNA, 30 bp, Artificial Sequence
  Synthetic oligonucleotide
ggctgagaaccataacctatcatattaccc

SEQ ID NO: 331725 - DNA, 30 bp, Artificial Sequence
  Synthetic oligonucleotide
ggggtcacatcagaactgatggtattaccc

SEQ ID NO: 331726 - DNA, 30 bp, Artificial Sequence
  Synthetic oligonucleotide
ctccgataattgctgccttgcccgttaccc

SEQ ID NO: 331727 - DNA, 30 bp, Artificial Sequence
  Synthetic oligonucleotide
gggacctatgagttctaacgtgggttaccc

SEQ ID NO: 331728 - DNA, 30 bp, Artificial Sequence
  Synthetic oligonucleotide
tagtggtaagaaaggtaaagtttgttaccc

SEQ ID NO: 331729 - DNA, 30 bp, Artificial Sequence
  Synthetic oligonucleotide
acgcccgcctcctcaatatccacgaacccc

SEQ ID NO: 331730 - DNA, 30 bp, Artificial Sequence
  Synthetic oligonucleotide
ccataggttatgtagggtctcaggaacccc

SEQ ID NO: 331731 - DNA, 30 bp, Artificial Sequence
  Synthetic oligonucleotide
gttgaggtatcgcggataggtctgaacccc

SEQ ID NO: 331732 - DNA, 30 bp, Artificial Sequence
  Synthetic oligonucleotide
cggtatcaggctaaaagcaatttgaacccc

SEQ ID NO: 331733 - DNA, 30 bp, Artificial Sequence
  Synthetic oligonucleotide
cactcttggaaacccacaaacatgcacccc

SEQ ID NO: 331734 - DNA, 30 bp, Artificial Sequence
  Synthetic oligonucleotide
agcatggatgaatcgggagttcatcacccc

SEQ ID NO: 331735 - DNA, 30 bp, Artificial Sequence
  Synthetic oligonucleotide
ttcggtaggtgtgtaaacgccgatcacccc

SEQ ID NO: 331736 - DNA, 30 bp, Artificial Sequence
  Synthetic oligonucleotide
acaggctaacgtaattgcccttacgacccc

SEQ ID NO: 331737 - DNA, 30 bp, Artificial Sequence
  Synthetic oligonucleotide
caaaggccaatatatagaccccccgacccc

SEQ ID NO: 331738 - DNA, 30 bp, Artificial Sequence
  Synthetic oligonucleotide
tcatcaaatctcgcatcagatcaggacccc

SEQ ID NO: 331739 - DNA, 30 bp, Artificial Sequence
  Synthetic oligonucleotide
gtatttaactgtaattctccaactgacccc

SEQ ID NO: 331740 - DNA, 30 bp, Artificial Sequence
  Synthetic oligonucleotide
gcgcaataaaggtaaaccaaattatacccc

SEQ ID NO: 331741 - DNA, 30 bp, Artificial Sequence
  Synthetic oligonucleotide
aatgaacatcagacaggtaatcagtacccc

SEQ ID NO: 331742 - DNA, 30 bp, Artificial Sequence
  Synthetic oligonucleotide
caaagctcatagactcctgtcacgtacccc

SEQ ID NO: 331743 - DNA, 30 bp, Artificial Sequence
  Synthetic oligonucleotide
ccaggggcctgaatcggccgccggtacccc

SEQ ID NO: 331744 - DNA, 30 bp, Artificial Sequence
  Synthetic oligonucleotide
cgtaggtacagccgtttggggccttacccc

SEQ ID NO: 331745 - DNA, 30 bp, Artificial Sequence
  Synthetic oligonucleotide
ggtgaggaccgtacctggtatagttacccc

SEQ ID NO: 331746 - DNA, 30 bp, Artificial Sequence
  Synthetic oligonucleotide
aaacagagtgcgcgaatatggcacaccccc

SEQ ID NO: 331747 - DNA, 30 bp, Artificial Sequence
  Synthetic oligonucleotide
attgaccttcccccagcgtctcccaccccc

SEQ ID NO: 331748 - DNA, 30 bp, Artificial Sequence
  Synthetic oligonucleotide
gggactggtagaaataagacgggcaccccc

SEQ ID NO: 331749 - DNA, 30 bp, Artificial Sequence
  Synthetic oligonucleotide
acgcccgcgtcaagcgctaccgaacccccc

SEQ ID NO: 331750 - DNA, 30 bp, Artificial Sequence
  Synthetic oligonucleotide
catatgtcaaataggacaccaggacccccc

SEQ ID NO: 331751 - DNA, 30 bp, Artificial Sequence
  Synthetic oligonucleotide
ggaaggtccggattaggtaccctacccccc

SEQ ID NO: 331752 - DNA, 30 bp, Artificial Sequence
  Synthetic oligonucleotide
aggtggccggtttagttcacgaacgccccc

SEQ ID NO: 331753 - DNA, 30 bp, Artificial Sequence
  Synthetic oligonucleotide
ttgtagcgtagaggcgccggcgacgccccc

SEQ ID NO: 331754 - DNA, 30 bp, Artificial Sequence
  Synthetic oligonucleotide
aacggagcccgacagttcttggaggccccc

SEQ ID NO: 331755 - DNA, 30 bp, Artificial Sequence
  Synthetic oligonucleotide
attgggtttttggcatttgtgattgccccc

SEQ ID NO: 331756 - DNA, 30 bp, Artificial Sequence
  Synthetic oligonucleotide
aggaggatctccacttgataccagtccccc

SEQ ID NO: 331757 - DNA, 30 bp, Artificial Sequence
  Synthetic oligonucleotide
ggctgcccgtgggcgtcacgagcaagcccc

SEQ ID NO: 331758 - DNA, 30 bp, Artificial Sequence
  Synthetic oligonucleotide
aaaacccatgataccgcacgcggaagcccc

SEQ ID NO: 331759 - DNA, 30 bp, Artificial Sequence
  Synthetic oligonucleotide
gtacgcagagcatacgcgtgcgacagcccc

SEQ ID NO: 331760 - DNA, 30 bp, Artificial Sequence
  Synthetic oligonucleotide
ccacatatttaaagcctcgtctacagcccc

SEQ ID NO: 331761 - DNA, 30 bp, Artificial Sequence
  Synthetic oligonucleotide
gttaaacttttatgttctcccgtcagcccc

SEQ ID NO: 331762 - DNA, 30 bp, Artificial Sequence
  Synthetic oligonucleotide
tgacaacaagcgtgccatggggtgagcccc

SEQ ID NO: 331763 - DNA, 30 bp, Artificial Sequence
  Synthetic oligonucleotide
atggggtttctgaacttatcatatagcccc

SEQ ID NO: 331764 - DNA, 30 bp, Artificial Sequence
  Synthetic oligonucleotide
tactggatatgggtgaatgagatgcgcccc

SEQ ID NO: 331765 - DNA, 30 bp, Artificial Sequence
  Synthetic oligonucleotide
gcttataagtttttaaaagctactcgcccc

SEQ ID NO: 331766 - DNA, 30 bp, Artificial Sequence
  Synthetic oligonucleotide
ccctggcggaggatttacacctgtcgcccc

SEQ ID NO: 331767 - DNA, 30 bp, Artificial Sequence
  Synthetic oligonucleotide
cgccactaaaggtatgcacgactcggcccc

SEQ ID NO: 331768 - DNA, 30 bp, Artificial Sequence
  Synthetic oligonucleotide
gttgattcggaccagactaacgtcggcccc

SEQ ID NO: 331769 - DNA, 30 bp, Artificial Sequence
  Synthetic oligonucleotide
gttgggggagttcacgtaggcccatgcccc

SEQ ID NO: 331770 - DNA, 30 bp, Artificial Sequence
  Synthetic oligonucleotide
tggctgactatccggatgccaatatgcccc

SEQ ID NO: 331771 - DNA, 30 bp, Artificial Sequence
  Synthetic oligonucleotide
atggctacacaaacccatagagactgcccc

SEQ ID NO: 331772 - DNA, 30 bp, Artificial Sequence
  Synthetic oligonucleotide
gtggaagggggggattgtatgtagtgcccc

SEQ ID NO: 331773 - DNA, 30 bp, Artificial Sequence
  Synthetic oligonucleotide
taggaagaaagtcgtttgctcagttgcccc

SEQ ID NO: 331774 - DNA, 30 bp, Artificial Sequence
  Synthetic oligonucleotide
gttggtggacaattctcgtagaaaatcccc

SEQ ID NO: 331775 - DNA, 30 bp, Artificial Sequence
  Synthetic oligonucleotide
ccagtttactgccccggttatccgatcccc

SEQ ID NO: 331776 - DNA, 30 bp, Artificial Sequence
  Synthetic oligonucleotide
aagtcaatggccccgctaggcaatatcccc

SEQ ID NO: 331777 - DNA, 30 bp, Artificial Sequence
  Synthetic oligonucleotide
gatccaagtaaacaagtacatggtatcccc

SEQ ID NO: 331778 - DNA, 30 bp, Artificial Sequence
  Synthetic oligonucleotide
ttcaggttacgttggttctccattatcccc

SEQ ID NO: 331779 - DNA, 30 bp, Artificial Sequence
  Synthetic oligonucleotide
aacttgaccggtgtctgggtttcactcccc

SEQ ID NO: 331780 - DNA, 30 bp, Artificial Sequence
  Synthetic oligonucleotide
ggggcttttaatcaatagtaagcgctcccc

SEQ ID NO: 331781 - DNA, 30 bp, Artificial Sequence
  Synthetic oligonucleotide
agatgacgtcttctcacttgtgaagtcccc

SEQ ID NO: 331782 - DNA, 30 bp, Artificial Sequence
  Synthetic oligonucleotide
ataggctaggggggaacgggatcagtcccc

SEQ ID NO: 331783 - DNA, 30 bp, Artificial Sequence
  Synthetic oligonucleotide
accgatatgtattctaagtaacacgtcccc

SEQ ID NO: 331784 - DNA, 30 bp, Artificial Sequence
  Synthetic oligonucleotide
cggacagacggagggcctaatggcgtcccc

SEQ ID NO: 331785 - DNA, 30 bp, Artificial Sequence
  Synthetic oligonucleotide
caactagtgcgcaaacgcggtaaggtcccc

SEQ ID NO: 331786 - DNA, 30 bp, Artificial Sequence
  Synthetic oligonucleotide
atacctccggccatttggcttggtgtcccc

SEQ ID NO: 331787 - DNA, 30 bp, Artificial Sequence
  Synthetic oligonucleotide
tcagccacacccggccagtcagcattcccc

SEQ ID NO: 331788 - DNA, 30 bp, Artificial Sequence
  Synthetic oligonucleotide
tttgggggcgagtttcagttagacttcccc

SEQ ID NO: 331789 - DNA, 30 bp, Artificial Sequence
  Synthetic oligonucleotide
cggtgttttcatgcccgaatggccttcccc

SEQ ID NO: 331790 - DNA, 30 bp, Artificial Sequence
  Synthetic oligonucleotide
gtgggtaccggataacggagtacgttcccc

SEQ ID NO: 331791 - DNA, 30 bp, Artificial Sequence
  Synthetic oligonucleotide
tacctgactaacaattttccagatttcccc

SEQ ID NO: 331792 - DNA, 30 bp, Artificial Sequence
  Synthetic oligonucleotide
taaccgaatccgtgatattcaattttcccc

SEQ ID NO: 331793 - DNA, 29 bp, Artificial Sequence
  Synthetic oligonucleotide
ctaagttcgtacgcgtgggtgacaagccc

SEQ ID NO: 331794 - DNA, 30 bp, Artificial Sequence
  Synthetic oligonucleotide
tactacagtagatggggattaaagaagccc

SEQ ID NO: 331795 - DNA, 30 bp, Artificial Sequence
  Synthetic oligonucleotide
catccagtatacacgactagccggaagccc

SEQ ID NO: 331796 - DNA, 30 bp, Artificial Sequence
  Synthetic oligonucleotide
ggatctatataaagtaacgacaataagccc

SEQ ID NO: 331797 - DNA, 30 bp, Artificial Sequence
  Synthetic oligonucleotide
cagatcaccgattgcgggtgttaacagccc

SEQ ID NO: 331798 - DNA, 30 bp, Artificial Sequence
  Synthetic oligonucleotide
cggcctggctttgtccatttaagccagccc

SEQ ID NO: 331799 - DNA, 30 bp, Artificial Sequence
  Synthetic oligonucleotide
tccctagcatcatgagtacctccgcagccc

SEQ ID NO: 331800 - DNA, 30 bp, Artificial Sequence
  Synthetic oligonucleotide
taaaacaatagttttaattcggtgcagccc

SEQ ID NO: 331801 - DNA, 30 bp, Artificial Sequence
  Synthetic oligonucleotide
gtggcgatgcgcaaaagaccccatcagccc

SEQ ID NO: 331802 - DNA, 30 bp, Artificial Sequence
  Synthetic oligonucleotide
aaaggaatgctcatcgggtgtaccgagccc

SEQ ID NO: 331803 - DNA, 30 bp, Artificial Sequence
  Synthetic oligonucleotide
tgcaggggcctaactccaaaagtcgagccc

SEQ ID NO: 331804 - DNA, 30 bp, Artificial Sequence
  Synthetic oligonucleotide
gatggaaggcctgatccaacggcctagccc

SEQ ID NO: 331805 - DNA, 30 bp, Artificial Sequence
  Synthetic oligonucleotide
tcataagtaccattggccggattctagccc

SEQ ID NO: 331806 - DNA, 30 bp, Artificial Sequence
  Synthetic oligonucleotide
gttacagtgcgtcataacgcgcagtagccc

SEQ ID NO: 331807 - DNA, 30 bp, Artificial Sequence
  Synthetic oligonucleotide
atactttgtagactggctcttgggtagccc

SEQ ID NO: 331808 - DNA, 30 bp, Artificial Sequence
  Synthetic oligonucleotide
cgaacggtcacggtctaaacgagttagccc

SEQ ID NO: 331809 - DNA, 30 bp, Artificial Sequence
  Synthetic oligonucleotide
agtatagtacaaggtctccctcgttagccc

SEQ ID NO: 331810 - DNA, 30 bp, Artificial Sequence
  Synthetic oligonucleotide
ttagtctctagagggttcgtgggttagccc

SEQ ID NO: 331811 - DNA, 30 bp, Artificial Sequence
  Synthetic oligonucleotide
ttctgcggcgttgcggtcagtcaaacgccc

SEQ ID NO: 331812 - DNA, 30 bp, Artificial Sequence
  Synthetic oligonucleotide
tcgtggacgtttgtagccactcacacgccc

SEQ ID NO: 331813 - DNA, 30 bp, Artificial Sequence
  Synthetic oligonucleotide
gcagatagggtcgaactggtagacacgccc

SEQ ID NO: 331814 - DNA, 30 bp, Artificial Sequence
  Synthetic oligonucleotide
ttcggtttgaaggcttatgctgtcacgccc

SEQ ID NO: 331815 - DNA, 30 bp, Artificial Sequence
  Synthetic oligonucleotide
tcagaagtgtcctgacgaaatgcgacgccc

SEQ ID NO: 331816 - DNA, 30 bp, Artificial Sequence
  Synthetic oligonucleotide
agttataaagttcgatcaatatatacgccc

SEQ ID NO: 331817 - DNA, 30 bp, Artificial Sequence
  Synthetic oligonucleotide
ttattccccaggacacagagttgtacgccc

SEQ ID NO: 331818 - DNA, 30 bp, Artificial Sequence
  Synthetic oligonucleotide
gctgggtgccatttgcgactagttacgccc

SEQ ID NO: 331819 - DNA, 30 bp, Artificial Sequence
  Synthetic oligonucleotide
tatgtctgcgattgattgtcgacaccgccc

SEQ ID NO: 331820 - DNA, 30 bp, Artificial Sequence
  Synthetic oligonucleotide
tgctagcggacaatagctcactgaccgccc

SEQ ID NO: 331821 - DNA, 30 bp, Artificial Sequence
  Synthetic oligonucleotide
atttactcggaattagacgacctcccgccc

SEQ ID NO: 331822 - DNA, 30 bp, Artificial Sequence
  Synthetic oligonucleotide
agggcacggcacaccactgtctggccgccc

SEQ ID NO: 331823 - DNA, 30 bp, Artificial Sequence
  Synthetic oligonucleotide
ttcttgaggcttttatcctacggtccgccc

SEQ ID NO: 331824 - DNA, 30 bp, Artificial Sequence
  Synthetic oligonucleotide
atccatcgtctacaaggccggattccgccc

SEQ ID NO: 331825 - DNA, 30 bp, Artificial Sequence
  Synthetic oligonucleotide
caggatacatatatgtcttgttaagcgccc

SEQ ID NO: 331826 - DNA, 30 bp, Artificial Sequence
  Synthetic oligonucleotide
aggggatcggggagtgcacaacgcgcgccc

SEQ ID NO: 331827 - DNA, 30 bp, Artificial Sequence
  Synthetic oligonucleotide
gccggccgagggtttgcgtgatcggcgccc

SEQ ID NO: 331828 - DNA, 30 bp, Artificial Sequence
  Synthetic oligonucleotide
ttcgaaacgtcagtatcgggcagatcgccc

SEQ ID NO: 331829 - DNA, 30 bp, Artificial Sequence
  Synthetic oligonucleotide
gtacttcgtagagtactcgagcgatcgccc

SEQ ID NO: 331830 - DNA, 30 bp, Artificial Sequence
  Synthetic oligonucleotide
gtttcaactaaagccaaaaccacgtcgccc

SEQ ID NO: 331831 - DNA, 30 bp, Artificial Sequence
  Synthetic oligonucleotide
ctcaacagttcggcatcggcagtgtcgccc

SEQ ID NO: 331832 - DNA, 30 bp, Artificial Sequence
  Synthetic oligonucleotide
catgggcaaatctggtaagagtattcgccc

SEQ ID NO: 331833 - DNA, 30 bp, Artificial Sequence
  Synthetic oligonucleotide
taatcgcacaatcgcggtagaacaaggccc

SEQ ID NO: 331834 - DNA, 30 bp, Artificial Sequence
  Synthetic oligonucleotide
gtgtagtcccgagccgacgtagcaaggccc

SEQ ID NO: 331835 - DNA, 30 bp, Artificial Sequence
  Synthetic oligonucleotide
aagcgcccgatttgtgataatgcaaggccc

SEQ ID NO: 331836 - DNA, 30 bp, Artificial Sequence
  Synthetic oligonucleotide
agaggcaggaagttagcgtcgagaaggccc

SEQ ID NO: 331837 - DNA, 30 bp, Artificial Sequence
  Synthetic oligonucleotide
ttatactgtaacacacgtacgaacaggccc

SEQ ID NO: 331838 - DNA, 30 bp, Artificial Sequence
  Synthetic oligonucleotide
ctttatcaggatgtagatgcagagaggccc

SEQ ID NO: 331839 - DNA, 30 bp, Artificial Sequence
  Synthetic oligonucleotide
tactagctaactatgcaggatatgaggccc

SEQ ID NO: 331840 - DNA, 31 bp, Artificial Sequence
  Synthetic oligonucleotide
gacgtttgacaatcagcgcccaagtaggccc

SEQ ID NO: 331841 - DNA, 30 bp, Artificial Sequence
  Synthetic oligonucleotide
gggctgcaggaggctccctatctgcggccc

SEQ ID NO: 331842 - DNA, 30 bp, Artificial Sequence
  Synthetic oligonucleotide
gacgcggagctgggaagtgcagtagggccc

SEQ ID NO: 331843 - DNA, 30 bp, Artificial Sequence
  Synthetic oligonucleotide
cggtgaggctagattcgcgcctgggggccc

SEQ ID NO: 331844 - DNA, 30 bp, Artificial Sequence
  Synthetic oligonucleotide
caaactgtagacaaccggtcaattgggccc

SEQ ID NO: 331845 - DNA, 30 bp, Artificial Sequence
  Synthetic oligonucleotide
tcaatgtaaatatgacagtaagttgggccc

SEQ ID NO: 331846 - DNA, 30 bp, Artificial Sequence
  Synthetic oligonucleotide
tgtccttaacgtaatcgtgacaaatggccc

SEQ ID NO: 331847 - DNA, 30 bp, Artificial Sequence
  Synthetic oligonucleotide
gaaaggacgttcaattcactgcaatggccc

SEQ ID NO: 331848 - DNA, 30 bp, Artificial Sequence
  Synthetic oligonucleotide
ctgggccgccgggattgagtaaactggccc

SEQ ID NO: 331849 - DNA, 30 bp, Artificial Sequence
  Synthetic oligonucleotide
taatgaggatcaaaggtaaaactctggccc

SEQ ID NO: 331850 - DNA, 30 bp, Artificial Sequence
  Synthetic oligonucleotide
gacattggatggccagctctaaggtggccc

SEQ ID NO: 331851 - DNA, 30 bp, Artificial Sequence
  Synthetic oligonucleotide
cgaaggtatgagtgtcgtcacccttggccc

SEQ ID NO: 331852 - DNA, 30 bp, Artificial Sequence
  Synthetic oligonucleotide
taccaccgagtacaaaatatcgacatgccc

SEQ ID NO: 331853 - DNA, 30 bp, Artificial Sequence
  Synthetic oligonucleotide
agcgcggagatgaaagtttgactcatgccc

SEQ ID NO: 331854 - DNA, 30 bp, Artificial Sequence
  Synthetic oligonucleotide
gacaatacgccttaggttccgaaactgccc

SEQ ID NO: 331855 - DNA, 30 bp, Artificial Sequence
  Synthetic oligonucleotide
tttgtgcggtttttcaatccagacctgccc

SEQ ID NO: 331856 - DNA, 30 bp, Artificial Sequence
  Synthetic oligonucleotide
cgggttacaggggcgatagtttatctgccc

SEQ ID NO: 331857 - DNA, 30 bp, Artificial Sequence
  Synthetic oligonucleotide
taggctcaattacctttttgacctctgccc

SEQ ID NO: 331858 - DNA, 30 bp, Artificial Sequence
  Synthetic oligonucleotide
aggtatatacgctagtatgcacgagtgccc

SEQ ID NO: 331859 - DNA, 30 bp, Artificial Sequence
  Synthetic oligonucleotide
cggccgccatacaattcatacggagtgccc

SEQ ID NO: 331860 - DNA, 30 bp, Artificial Sequence
  Synthetic oligonucleotide
ggcagctaagctcatcgttgattcgtgccc

SEQ ID NO: 331861 - DNA, 30 bp, Artificial Sequence
  Synthetic oligonucleotide
actcagagcgcccgtgtacagttcgtgccc

SEQ ID NO: 331862 - DNA, 30 bp, Artificial Sequence
  Synthetic oligonucleotide
atcgacctcttaggcccatcaaccttgccc

SEQ ID NO: 331863 - DNA, 30 bp, Artificial Sequence
  Synthetic oligonucleotide
tggaggtctattttgaaaacagggttgccc

SEQ ID NO: 331864 - DNA, 30 bp, Artificial Sequence
  Synthetic oligonucleotide
caaacttgccccgcgctcgaaattttgccc

SEQ ID NO: 331865 - DNA, 30 bp, Artificial Sequence
  Synthetic oligonucleotide
cagtcgcgttcctacttgtactaaaatccc

SEQ ID NO: 331866 - DNA, 30 bp, Artificial Sequence
  Synthetic oligonucleotide
cctggaattttcaatgttttgctaaatccc

SEQ ID NO: 331867 - DNA, 30 bp, Artificial Sequence
  Synthetic oligonucleotide
gaatgttccgcggtcaacatcgccaatccc

SEQ ID NO: 331868 - DNA, 30 bp, Artificial Sequence
  Synthetic oligonucleotide
ctccgcattgtctccggagtgtagaatccc

SEQ ID NO: 331869 - DNA, 30 bp, Artificial Sequence
  Synthetic oligonucleotide
ggttactgggctcacgctacgccgaatccc

SEQ ID NO: 331870 - DNA, 30 bp, Artificial Sequence
  Synthetic oligonucleotide
cagcaacaatgctgtggagcagggaatccc

SEQ ID NO: 331871 - DNA, 30 bp, Artificial Sequence
  Synthetic oligonucleotide
ggttaagaggtccggttcaccgataatccc

SEQ ID NO: 331872 - DNA, 30 bp, Artificial Sequence
  Synthetic oligonucleotide
acacattgactgcaccatcacgctaatccc

SEQ ID NO: 331873 - DNA, 30 bp, Artificial Sequence
  Synthetic oligonucleotide
tcggaaaatccgctcaagggtgttaatccc

SEQ ID NO: 331874 - DNA, 30 bp, Artificial Sequence
  Synthetic oligonucleotide
cccgatcgaagaccactggcttttaatccc

SEQ ID NO: 331875 - DNA, 30 bp, Artificial Sequence
  Synthetic oligonucleotide
gcaatgtatgtacatttggcaggacatccc

SEQ ID NO: 331876 - DNA, 30 bp, Artificial Sequence
  Synthetic oligonucleotide
ttcagcactacccccgacgctactcatccc

SEQ ID NO: 331877 - DNA, 30 bp, Artificial Sequence
  Synthetic oligonucleotide
tggcttggagttctgttccattttcatccc

SEQ ID NO: 331878 - DNA, 30 bp, Artificial Sequence
  Synthetic oligonucleotide
tatgctcggggcacgcgttaaaaggatccc

SEQ ID NO: 331879 - DNA, 30 bp, Artificial Sequence
  Synthetic oligonucleotide
agccagttatcccattatactgctgatccc

SEQ ID NO: 331880 - DNA, 30 bp, Artificial Sequence
  Synthetic oligonucleotide
gcaatttgtctctggtgacacatatatccc

SEQ ID NO: 331881 - DNA, 30 bp, Artificial Sequence
  Synthetic oligonucleotide
ttaatcgcaaacaactggcgtgactatccc

SEQ ID NO: 331882 - DNA, 30 bp, Artificial Sequence
  Synthetic oligonucleotide
ccaatgtatgccagttccttatagtatccc

SEQ ID NO: 331883 - DNA, 30 bp, Artificial Sequence
  Synthetic oligonucleotide
ctccaaacagaatgtctcgctacgtatccc

SEQ ID NO: 331884 - DNA, 30 bp, Artificial Sequence
  Synthetic oligonucleotide
ggtccatatcgccattttagtcgttatccc

SEQ ID NO: 331885 - DNA, 30 bp, Artificial Sequence
  Synthetic oligonucleotide
cagtcggatatcagcgctagtgtttatccc

SEQ ID NO: 331886 - DNA, 30 bp, Artificial Sequence
  Synthetic oligonucleotide
tagcatgcttctttaaaagcgtacactccc

SEQ ID NO: 331887 - DNA, 30 bp, Artificial Sequence
  Synthetic oligonucleotide
gctctactccgaggaattatcaccactccc

SEQ ID NO: 331888 - DNA, 30 bp, Artificial Sequence
  Synthetic oligonucleotide
gccacccaataaaaagccgcggatactccc

SEQ ID NO: 331889 - DNA, 30 bp, Artificial Sequence
  Synthetic oligonucleotide
ctcagcccccctgggactcaggctactccc

SEQ ID NO: 331890 - DNA, 30 bp, Artificial Sequence
  Synthetic oligonucleotide
cagtctaaataccttccacgacgtactccc

SEQ ID NO: 331891 - DNA, 30 bp, Artificial Sequence
  Synthetic oligonucleotide
agccctagggcgggagcctactttactccc

SEQ ID NO: 331892 - DNA, 30 bp, Artificial Sequence
  Synthetic oligonucleotide
cagtcggcctagttggcagcgggacctccc

SEQ ID NO: 331893 - DNA, 30 bp, Artificial Sequence
  Synthetic oligonucleotide
cgcattacacgctgtatggctggacctccc

SEQ ID NO: 331894 - DNA, 28 bp, Artificial Sequence
  Synthetic oligonucleotide
ggcttgttcaattgtctctgtgcctccc

SEQ ID NO: 331895 - DNA, 30 bp, Artificial Sequence
  Synthetic oligonucleotide
ttatcggtgtcggattaggcacttcctccc

SEQ ID NO: 331896 - DNA, 30 bp, Artificial Sequence
  Synthetic oligonucleotide
aaaatttcaaagtggtcgggttcagctccc

SEQ ID NO: 331897 - DNA, 30 bp, Artificial Sequence
  Synthetic oligonucleotide
gccacctagctggtggaactacccgctccc

SEQ ID NO: 331898 - DNA, 30 bp, Artificial Sequence
  Synthetic oligonucleotide
tgaacgcaacctcatatttaggttgctccc

SEQ ID NO: 331899 - DNA, 30 bp, Artificial Sequence
  Synthetic oligonucleotide
atttttcaaattgtagttggtgttgctccc

SEQ ID NO: 331900 - DNA, 30 bp, Artificial Sequence
  Synthetic oligonucleotide
cacatggtaacccggtggggttaatctccc

SEQ ID NO: 331901 - DNA, 30 bp, Artificial Sequence
  Synthetic oligonucleotide
cataccgcgttcggtgtaaatggctctccc

SEQ ID NO: 331902 - DNA, 30 bp, Artificial Sequence
  Synthetic oligonucleotide
gtttaaccacatgtccataaattctctccc

SEQ ID NO: 331903 - DNA, 30 bp, Artificial Sequence
  Synthetic oligonucleotide
gcatgatggattgcccagtcgaggtctccc

SEQ ID NO: 331904 - DNA, 30 bp, Artificial Sequence
  Synthetic oligonucleotide
tcttacaacagtacatacccgtattctccc

SEQ ID NO: 331905 - DNA, 30 bp, Artificial Sequence
  Synthetic oligonucleotide
ctcggccgcatgtcaaagcgtgcttctccc

SEQ ID NO: 331906 - DNA, 30 bp, Artificial Sequence
  Synthetic oligonucleotide
ggataatgaaatgagcgtacattaagtccc

SEQ ID NO: 331907 - DNA, 30 bp, Artificial Sequence
  Synthetic oligonucleotide
gcttgcggttttagcggaccccctagtccc

SEQ ID NO: 331908 - DNA, 30 bp, Artificial Sequence
  Synthetic oligonucleotide
gatacattggtgatgtaaacaagtagtccc

SEQ ID NO: 331909 - DNA, 30 bp, Artificial Sequence
  Synthetic oligonucleotide
tcagattgcgagctttaacccgaacgtccc

SEQ ID NO: 331910 - DNA, 30 bp, Artificial Sequence
  Synthetic oligonucleotide
cataattgggatgaattaatggaccgtccc

SEQ ID NO: 331911 - DNA, 30 bp, Artificial Sequence
  Synthetic oligonucleotide
ctgagcgaggggcgcattccggcccgtccc

SEQ ID NO: 331912 - DNA, 30 bp, Artificial Sequence
  Synthetic oligonucleotide
gtcaatcaacaacaggcctgagaaggtccc

SEQ ID NO: 331913 - DNA, 30 bp, Artificial Sequence
  Synthetic oligonucleotide
cacaccttagaaagttagtcattcggtccc

SEQ ID NO: 331914 - DNA, 30 bp, Artificial Sequence
  Synthetic oligonucleotide
tggtggatcttagagcaatcgaagggtccc

SEQ ID NO: 331915 - DNA, 30 bp, Artificial Sequence
  Synthetic oligonucleotide
atcgcgttccagttatgaaaatgctgtccc

SEQ ID NO: 331916 - DNA, 30 bp, Artificial Sequence
  Synthetic oligonucleotide
cgggtcggaccggtaacctcagtctgtccc

SEQ ID NO: 331917 - DNA, 30 bp, Artificial Sequence
  Synthetic oligonucleotide
acagtgactacatctctaacttcgtgtccc

SEQ ID NO: 331918 - DNA, 30 bp, Artificial Sequence
  Synthetic oligonucleotide
tggccctcagtctctgttgtatggtgtccc

SEQ ID NO: 331919 - DNA, 30 bp, Artificial Sequence
  Synthetic oligonucleotide
ttcttgagaagcctggaacacgaaattccc

SEQ ID NO: 331920 - DNA, 30 bp, Artificial Sequence
  Synthetic oligonucleotide
atcccgcagccctgaatgcaggaaattccc

SEQ ID NO: 331921 - DNA, 30 bp, Artificial Sequence
  Synthetic oligonucleotide
tggagcaatggtctccgcaatacaattccc

SEQ ID NO: 331922 - DNA, 30 bp, Artificial Sequence
  Synthetic oligonucleotide
gctagctaaagaatgctggtaggaattccc

SEQ ID NO: 331923 - DNA, 30 bp, Artificial Sequence
  Synthetic oligonucleotide
cgggaaacgtcgctgctgcgggccattccc

SEQ ID NO: 331924 - DNA, 30 bp, Artificial Sequence
  Synthetic oligonucleotide
aagacagtggctagatggttattgattccc

SEQ ID NO: 331925 - DNA, 30 bp, Artificial Sequence
  Synthetic oligonucleotide
aaccaagctgtccaacccgccgttattccc

SEQ ID NO: 331926 - DNA, 30 bp, Artificial Sequence
  Synthetic oligonucleotide
ccccgtaggaaaagtagagcagaacttccc

SEQ ID NO: 331927 - DNA, 30 bp, Artificial Sequence
  Synthetic oligonucleotide
tatgagcgtgttctgcaaaatcgacttccc

SEQ ID NO: 331928 - DNA, 30 bp, Artificial Sequence
  Synthetic oligonucleotide
gggggcgtactagcggctggcgttcttccc

SEQ ID NO: 331929 - DNA, 30 bp, Artificial Sequence
  Synthetic oligonucleotide
aagggtcctagcatgcggtaggaagttccc

SEQ ID NO: 331930 - DNA, 30 bp, Artificial Sequence
  Synthetic oligonucleotide
atacacatttcttgaaggcggtgcgttccc

SEQ ID NO: 331931 - DNA, 30 bp, Artificial Sequence
  Synthetic oligonucleotide
gaacagtagacgagatgtcgtctggttccc

SEQ ID NO: 331932 - DNA, 30 bp, Artificial Sequence
  Synthetic oligonucleotide
acgccgaaatactttttggtattggttccc

SEQ ID NO: 331933 - DNA, 30 bp, Artificial Sequence
  Synthetic oligonucleotide
cggttggagaccgctcatcgagatgttccc

SEQ ID NO: 331934 - DNA, 30 bp, Artificial Sequence
  Synthetic oligonucleotide
gcgagtcacaccgatcatgggtatgttccc

SEQ ID NO: 331935 - DNA, 30 bp, Artificial Sequence
  Synthetic oligonucleotide
cgtttaacatatcggagatcaaaatttccc

SEQ ID NO: 331936 - DNA, 30 bp, Artificial Sequence
  Synthetic oligonucleotide
ggccgttcggagctagagtcggaatttccc

SEQ ID NO: 331937 - DNA, 30 bp, Artificial Sequence
  Synthetic oligonucleotide
actcgtaggcctaggtaaagattctttccc

SEQ ID NO: 331938 - DNA, 30 bp, Artificial Sequence
  Synthetic oligonucleotide
taaaacggatcccaccacgaccggtttccc

SEQ ID NO: 331939 - DNA, 30 bp, Artificial Sequence
  Synthetic oligonucleotide
aacaccggtcgtcgcttcaaatggtttccc

SEQ ID NO: 331940 - DNA, 30 bp, Artificial Sequence
  Synthetic oligonucleotide
tactgggtaatgttgtggtataattttccc

SEQ ID NO: 331941 - DNA, 30 bp, Artificial Sequence
  Synthetic oligonucleotide
agagacacacgcgaccgcaggttttttccc

SEQ ID NO: 331942 - DNA, 30 bp, Artificial Sequence
  Synthetic oligonucleotide
catttaaaaagacaactagaacaaaaagcc

SEQ ID NO: 331943 - DNA, 30 bp, Artificial Sequence
  Synthetic oligonucleotide
aaggtgtgtaagtttaatctcaacaaagcc

SEQ ID NO: 331944 - DNA, 31 bp, Artificial Sequence
  Synthetic oligonucleotide
atgtctatgcatgtttgcctggagcaaagcc

SEQ ID NO: 331945 - DNA, 30 bp, Artificial Sequence
  Synthetic oligonucleotide
gccacgccaagactctcaggagcgaaagcc

SEQ ID NO: 331946 - DNA, 30 bp, Artificial Sequence
  Synthetic oligonucleotide
acgagtcttctcccaccatggatgaaagcc

SEQ ID NO: 331947 - DNA, 30 bp, Artificial Sequence
  Synthetic oligonucleotide
ccaccagcagttgaaacagcatgtaaagcc

SEQ ID NO: 331948 - DNA, 30 bp, Artificial Sequence
  Synthetic oligonucleotide
tcacttctacgtatttctcgtacacaagcc

SEQ ID NO: 331949 - DNA, 30 bp, Artificial Sequence
  Synthetic oligonucleotide
tatgcgaagtagttgggtcaacaggaagcc

SEQ ID NO: 331950 - DNA, 31 bp, Artificial Sequence
  Synthetic oligonucleotide
tatattggaggtaccaaacaactgggaagcc

SEQ ID NO: 331951 - DNA, 30 bp, Artificial Sequence
  Synthetic oligonucleotide
tagctgaccggtcaatcgtgcggtgaagcc

SEQ ID NO: 331952 - DNA, 30 bp, Artificial Sequence
  Synthetic oligonucleotide
attcatatatccctgttcgtgctctaagcc

SEQ ID NO: 331953 - DNA, 30 bp, Artificial Sequence
  Synthetic oligonucleotide
tcccataactgtgcaacttcggtctaagcc

SEQ ID NO: 331954 - DNA, 30 bp, Artificial Sequence
  Synthetic oligonucleotide
acaattcgatcgttcattctatggtaagcc

SEQ ID NO: 331955 - DNA, 30 bp, Artificial Sequence
  Synthetic oligonucleotide
aggtacaactatagcctatcttgttaagcc

SEQ ID NO: 331956 - DNA, 30 bp, Artificial Sequence
  Synthetic oligonucleotide
ctctccatcatccggggagtgcaaacagcc

SEQ ID NO: 331957 - DNA, 30 bp, Artificial Sequence
  Synthetic oligonucleotide
atcgtagaaaagtagccgcatacaacagcc

SEQ ID NO: 331958 - DNA, 30 bp, Artificial Sequence
  Synthetic oligonucleotide
cggggtggacaataacgccgtgtaacagcc

SEQ ID NO: 331959 - DNA, 30 bp, Artificial Sequence
  Synthetic oligonucleotide
gtggttagccctcaacgcggttgcacagcc

SEQ ID NO: 331960 - DNA, 30 bp, Artificial Sequence
  Synthetic oligonucleotide
cacaacggctcgcatccgaccacgacagcc

SEQ ID NO: 331961 - DNA, 30 bp, Artificial Sequence
  Synthetic oligonucleotide
tttgacggctttaaaacacgtgtgacagcc

SEQ ID NO: 331962 - DNA, 30 bp, Artificial Sequence
  Synthetic oligonucleotide
cacacgggggataattgtaatgctacagcc

SEQ ID NO: 331963 - DNA, 30 bp, Artificial Sequence
  Synthetic oligonucleotide
tcaggactgaatctccgcaagagtacagcc

SEQ ID NO: 331964 - DNA, 30 bp, Artificial Sequence
  Synthetic oligonucleotide
caagaagacgctccccgatgcccaccagcc

SEQ ID NO: 331965 - DNA, 30 bp, Artificial Sequence
  Synthetic oligonucleotide
aataaggatcttgtgcggtgtggaccagcc

SEQ ID NO: 331966 - DNA, 30 bp, Artificial Sequence
  Synthetic oligonucleotide
gaactgcgcaggcaaatgaaggagccagcc

SEQ ID NO: 331967 - DNA, 30 bp, Artificial Sequence
  Synthetic oligonucleotide
tcggatggggagttaataaaatcgccagcc

SEQ ID NO: 331968 - DNA, 30 bp, Artificial Sequence
  Synthetic oligonucleotide
tctggtttcactaacgttgttgggccagcc

SEQ ID NO: 331969 - DNA, 30 bp, Artificial Sequence
  Synthetic oligonucleotide
tccacggcgaccctatccgagatgccagcc

SEQ ID NO: 331970 - DNA, 30 bp, Artificial Sequence
  Synthetic oligonucleotide
taattaaatgtcatacgacatatgccagcc

SEQ ID NO: 331971 - DNA, 30 bp, Artificial Sequence
  Synthetic oligonucleotide
cccttcagtatcgaggcgtgattgccagcc

SEQ ID NO: 331972 - DNA, 30 bp, Artificial Sequence
  Synthetic oligonucleotide
ggtctgcaagctctgcaagtatctccagcc

SEQ ID NO: 331973 - DNA, 30 bp, Artificial Sequence
  Synthetic oligonucleotide
tttgcgtatcacaattaccaactagcagcc

SEQ ID NO: 331974 - DNA, 30 bp, Artificial Sequence
  Synthetic oligonucleotide
cctatatctttctaaaggctagtagcagcc

SEQ ID NO: 331975 - DNA, 30 bp, Artificial Sequence
  Synthetic oligonucleotide
acaactaatttaagtttacgatcggcagcc

SEQ ID NO: 331976 - DNA, 30 bp, Artificial Sequence
  Synthetic oligonucleotide
tgggttgaattagggtctggcgaatcagcc

SEQ ID NO: 331977 - DNA, 30 bp, Artificial Sequence
  Synthetic oligonucleotide
aggtcgggtcaagtcatgcttgtcagagcc

SEQ ID NO: 331978 - DNA, 30 bp, Artificial Sequence
  Synthetic oligonucleotide
atctggagggggaagggaaggacgagagcc

SEQ ID NO: 331979 - DNA, 30 bp, Artificial Sequence
  Synthetic oligonucleotide
agtgatcattcattttgcagccgtagagcc

SEQ ID NO: 331980 - DNA, 30 bp, Artificial Sequence
  Synthetic oligonucleotide
cccacagtgtctagtcgattaattagagcc

SEQ ID NO: 331981 - DNA, 30 bp, Artificial Sequence
  Synthetic oligonucleotide
attcatgatatgagtcgagtgattagagcc

SEQ ID NO: 331982 - DNA, 30 bp, Artificial Sequence
  Synthetic oligonucleotide
ggctaaagacggggcctggttcttagagcc

SEQ ID NO: 331983 - DNA, 30 bp, Artificial Sequence
  Synthetic oligonucleotide
cgtatcgaataggagcctacgtttagagcc

SEQ ID NO: 331984 - DNA, 30 bp, Artificial Sequence
  Synthetic oligonucleotide
gtcgaaaaaccaccaacttggggacgagcc

SEQ ID NO: 331985 - DNA, 30 bp, Artificial Sequence
  Synthetic oligonucleotide
aaaggggcctctcctgataacatccgagcc

SEQ ID NO: 331986 - DNA, 30 bp, Artificial Sequence
  Synthetic oligonucleotide
cagctaattatcccagtgctacatcgagcc

SEQ ID NO: 331987 - DNA, 30 bp, Artificial Sequence
  Synthetic oligonucleotide
tttcaaagatagtatgtgctagatcgagcc

SEQ ID NO: 331988 - DNA, 30 bp, Artificial Sequence
  Synthetic oligonucleotide
aatcaagtatgtgtaaagggttctcgagcc

SEQ ID NO: 331989 - DNA, 30 bp, Artificial Sequence
  Synthetic oligonucleotide
tgaatcgcttccctacgggtgcttcgagcc

SEQ ID NO: 331990 - DNA, 30 bp, Artificial Sequence
  Synthetic oligonucleotide
gctccgcagacaatgtgcacagttcgagcc

SEQ ID NO: 331991 - DNA, 30 bp, Artificial Sequence
  Synthetic oligonucleotide
tggtgttacgaaatctggacaaaaggagcc

SEQ ID NO: 331992 - DNA, 31 bp, Artificial Sequence
  Synthetic oligonucleotide
agtctctaacaaacgattactccaaggagcc

SEQ ID NO: 331993 - DNA, 30 bp, Artificial Sequence
  Synthetic oligonucleotide
ctgatctgaacatgtgcctactaaggagcc

SEQ ID NO: 331994 - DNA, 30 bp, Artificial Sequence
  Synthetic oligonucleotide
ggaatgcggatcttaggcataagaggagcc

SEQ ID NO: 331995 - DNA, 30 bp, Artificial Sequence
  Synthetic oligonucleotide
cgaggcctgattaaccctaacgacggagcc

SEQ ID NO: 331996 - DNA, 30 bp, Artificial Sequence
  Synthetic oligonucleotide
aaagatcttgttgatgagacaagcggagcc

SEQ ID NO: 331997 - DNA, 30 bp, Artificial Sequence
  Synthetic oligonucleotide
tttccaatacgtgagcacgacgtcggagcc

SEQ ID NO: 331998 - DNA, 30 bp, Artificial Sequence
  Synthetic oligonucleotide
caaagcgccattagtccagccgggggagcc

SEQ ID NO: 331999 - DNA, 30 bp, Artificial Sequence
  Synthetic oligonucleotide
tccggtactgtaagtcaagtcctatgagcc

SEQ ID NO: 332000 - DNA, 30 bp, Artificial Sequence
  Synthetic oligonucleotide
ccttgtgcgataaaggggcaaaactgagcc

SEQ ID NO: 332001 - DNA, 31 bp, Artificial Sequence
  Synthetic oligonucleotide
cccgtacaacggtatgagaagtgggtgagcc

SEQ ID NO: 332002 - DNA, 30 bp, Artificial Sequence
  Synthetic oligonucleotide
actgacattaaagttctgcgattttgagcc

SEQ ID NO: 332003 - DNA, 30 bp, Artificial Sequence
  Synthetic oligonucleotide
ttccaaaaactgacctcaccgttgatagcc

SEQ ID NO: 332004 - DNA, 30 bp, Artificial Sequence
  Synthetic oligonucleotide
ggattcaaagcctaaagcgttcttatagcc

SEQ ID NO: 332005 - DNA, 30 bp, Artificial Sequence
  Synthetic oligonucleotide
ggcaggcccatcagtgagcgcccactagcc

SEQ ID NO: 332006 - DNA, 30 bp, Artificial Sequence
  Synthetic oligonucleotide
ttacatctatgtggaatcgaacaagtagcc

SEQ ID NO: 332007 - DNA, 30 bp, Artificial Sequence
  Synthetic oligonucleotide
gaaaagccttgctcattgcgaacagtagcc

SEQ ID NO: 332008 - DNA, 30 bp, Artificial Sequence
  Synthetic oligonucleotide
gtctgagaaagtacattgtgaagagtagcc

SEQ ID NO: 332009 - DNA, 30 bp, Artificial Sequence
  Synthetic oligonucleotide
gcacgtggggcgccaggttgactcgtagcc

SEQ ID NO: 332010 - DNA, 30 bp, Artificial Sequence
  Synthetic oligonucleotide
ctaacctgtatactggagcttggtgtagcc

SEQ ID NO: 332011 - DNA, 30 bp, Artificial Sequence
  Synthetic oligonucleotide
ggtggccctacaggtagggtcattgtagcc

SEQ ID NO: 332012 - DNA, 30 bp, Artificial Sequence
  Synthetic oligonucleotide
caaaacgagattgtccctaatttattagcc

SEQ ID NO: 332013 - DNA, 30 bp, Artificial Sequence
  Synthetic oligonucleotide
ggtggacccttacacagaggtcacttagcc

SEQ ID NO: 332014 - DNA, 30 bp, Artificial Sequence
  Synthetic oligonucleotide
tgtggtctccaagtatttaacggtttagcc

SEQ ID NO: 332015 - DNA, 30 bp, Artificial Sequence
  Synthetic oligonucleotide
actaggggtgctatctatgagttaaacgcc

SEQ ID NO: 332016 - DNA, 30 bp, Artificial Sequence
  Synthetic oligonucleotide
ttcgatcgattgttttatagtttaaacgcc

SEQ ID NO: 332017 - DNA, 30 bp, Artificial Sequence
  Synthetic oligonucleotide
gtgcgttataaagggatgctcgccaacgcc

SEQ ID NO: 332018 - DNA, 30 bp, Artificial Sequence
  Synthetic oligonucleotide
gggaggtactacgtcggctccgttaacgcc

SEQ ID NO: 332019 - DNA, 30 bp, Artificial Sequence
  Synthetic oligonucleotide
gcggagggactagaacatccatttaacgcc

SEQ ID NO: 332020 - DNA, 30 bp, Artificial Sequence
  Synthetic oligonucleotide
tatcttttgagaaacttctgcaaacacgcc

SEQ ID NO: 332021 - DNA, 30 bp, Artificial Sequence
  Synthetic oligonucleotide
ctttacccagaggtcccggtgtcacacgcc

SEQ ID NO: 332022 - DNA, 30 bp, Artificial Sequence
  Synthetic oligonucleotide
aagtcaaggtgttttccaatctaccacgcc

SEQ ID NO: 332023 - DNA, 30 bp, Artificial Sequence
  Synthetic oligonucleotide
aataatagattctctaacgatccccacgcc

SEQ ID NO: 332024 - DNA, 30 bp, Artificial Sequence
  Synthetic oligonucleotide
gatgagccacagtagtgggcaaagcacgcc

SEQ ID NO: 332025 - DNA, 30 bp, Artificial Sequence
  Synthetic oligonucleotide
ttgatacagcgcagagcgagtgcgcacgcc

SEQ ID NO: 332026 - DNA, 30 bp, Artificial Sequence
  Synthetic oligonucleotide
caataccacggcggactatgtaggcacgcc

SEQ ID NO: 332027 - DNA, 30 bp, Artificial Sequence
  Synthetic oligonucleotide
ccatctgtcatacatggcaagcggcacgcc

SEQ ID NO: 332028 - DNA, 30 bp, Artificial Sequence
  Synthetic oligonucleotide
ctagtattgttggatgtcggtactcacgcc

SEQ ID NO: 332029 - DNA, 30 bp, Artificial Sequence
  Synthetic oligonucleotide
aaccgaagctacggcgcttaacgtcacgcc

SEQ ID NO: 332030 - DNA, 30 bp, Artificial Sequence
  Synthetic oligonucleotide
aataaacacacaccgccatccggtcacgcc

SEQ ID NO: 332031 - DNA, 30 bp, Artificial Sequence
  Synthetic oligonucleotide
aagcgggatgttgtgttacgttgtcacgcc

SEQ ID NO: 332032 - DNA, 30 bp, Artificial Sequence
  Synthetic oligonucleotide
cacctaaggcagctccagaggcaagacgcc

SEQ ID NO: 332033 - DNA, 30 bp, Artificial Sequence
  Synthetic oligonucleotide
tgcgtgctggtccgtaatcaacgagacgcc

SEQ ID NO: 332034 - DNA, 30 bp, Artificial Sequence
  Synthetic oligonucleotide
gccggaatgtagggtatacgtggcgacgcc

SEQ ID NO: 332035 - DNA, 30 bp, Artificial Sequence
  Synthetic oligonucleotide
cggctttggtaaaagcgatagccggacgcc

SEQ ID NO: 332036 - DNA, 30 bp, Artificial Sequence
  Synthetic oligonucleotide
gggccgccgtccagatacgacttggacgcc

SEQ ID NO: 332037 - DNA, 30 bp, Artificial Sequence
  Synthetic oligonucleotide
catcagactttccggtagagctcatacgcc

SEQ ID NO: 332038 - DNA, 30 bp, Artificial Sequence
  Synthetic oligonucleotide
ctttacgccggagagcaagagtcctacgcc

SEQ ID NO: 332039 - DNA, 30 bp, Artificial Sequence
  Synthetic oligonucleotide
acatttcaacgttaccaaatcagctacgcc

SEQ ID NO: 332040 - DNA, 30 bp, Artificial Sequence
  Synthetic oligonucleotide
tgcgtagtacttgcgcgcgtaaagtacgcc

SEQ ID NO: 332041 - DNA, 30 bp, Artificial Sequence
  Synthetic oligonucleotide
gaccaccagcgcgcggaggaggtgaccgcc

SEQ ID NO: 332042 - DNA, 30 bp, Artificial Sequence
  Synthetic oligonucleotide
atgtattttgcggagaatccgtgtaccgcc

SEQ ID NO: 332043 - DNA, 30 bp, Artificial Sequence
  Synthetic oligonucleotide
tgggagtagatacctaatagtggacccgcc

SEQ ID NO: 332044 - DNA, 30 bp, Artificial Sequence
  Synthetic oligonucleotide
caccccggcacacactcgtggtaccccgcc

SEQ ID NO: 332045 - DNA, 30 bp, Artificial Sequence
  Synthetic oligonucleotide
atacgatttattcaaatcattggtcccgcc

SEQ ID NO: 332046 - DNA, 30 bp, Artificial Sequence
  Synthetic oligonucleotide
atggctacgatatatggagtcgaagccgcc

SEQ ID NO: 332047 - DNA, 30 bp, Artificial Sequence
  Synthetic oligonucleotide
ctattaccagtcacttcgtctatcgccgcc

SEQ ID NO: 332048 - DNA, 30 bp, Artificial Sequence
  Synthetic oligonucleotide
tgtggtcgtgggtggcacatgagtgccgcc

SEQ ID NO: 332049 - DNA, 30 bp, Artificial Sequence
  Synthetic oligonucleotide
cctaggtggcatcagtttgtgtgtgccgcc

SEQ ID NO: 332050 - DNA, 30 bp, Artificial Sequence
  Synthetic oligonucleotide
ggcctttctccaagtatcaagtcctccgcc

SEQ ID NO: 332051 - DNA, 30 bp, Artificial Sequence
  Synthetic oligonucleotide
ggttctgccatgcgcattcggcgctccgcc

SEQ ID NO: 332052 - DNA, 30 bp, Artificial Sequence
  Synthetic oligonucleotide
tctaacttgattgttgcatggttctccgcc

SEQ ID NO: 332053 - DNA, 30 bp, Artificial Sequence
  Synthetic oligonucleotide
gttggtcggcccgcattaattgcgtccgcc

SEQ ID NO: 332054 - DNA, 30 bp, Artificial Sequence
  Synthetic oligonucleotide
tccatgtttgaaagtacagactgaagcgcc

SEQ ID NO: 332055 - DNA, 30 bp, Artificial Sequence
  Synthetic oligonucleotide
cggccccatcaccgaccgatctgaagcgcc

SEQ ID NO: 332056 - DNA, 30 bp, Artificial Sequence
  Synthetic oligonucleotide
tataggtaacaatcggcatgtaacagcgcc

SEQ ID NO: 332057 - DNA, 30 bp, Artificial Sequence
  Synthetic oligonucleotide
agtgatcctaccactcagtggcacagcgcc

SEQ ID NO: 332058 - DNA, 30 bp, Artificial Sequence
  Synthetic oligonucleotide
gtgttactccccgatagcacaaggagcgcc

SEQ ID NO: 332059 - DNA, 30 bp, Artificial Sequence
  Synthetic oligonucleotide
atgcttctcgcaggtttgaataggagcgcc

SEQ ID NO: 332060 - DNA, 30 bp, Artificial Sequence
  Synthetic oligonucleotide
tccgtacgtcctgaaccctgactgagcgcc

SEQ ID NO: 332061 - DNA, 30 bp, Artificial Sequence
  Synthetic oligonucleotide
ataaagaagatcgtaagcccagtgagcgcc

SEQ ID NO: 332062 - DNA, 30 bp, Artificial Sequence
  Synthetic oligonucleotide
cgacttggctagtcgctttttcttagcgcc

SEQ ID NO: 332063 - DNA, 30 bp, Artificial Sequence
  Synthetic oligonucleotide
ctccgccacttcagaatagattttagcgcc

SEQ ID NO: 332064 - DNA, 30 bp, Artificial Sequence
  Synthetic oligonucleotide
agtattatggagctcaccataggacgcgcc

SEQ ID NO: 332065 - DNA, 30 bp, Artificial Sequence
  Synthetic oligonucleotide
aagacctttcccaatagatagctacgcgcc

SEQ ID NO: 332066 - DNA, 30 bp, Artificial Sequence
  Synthetic oligonucleotide
acacacggctcctggcgctcggaccgcgcc

SEQ ID NO: 332067 - DNA, 31 bp, Artificial Sequence
  Synthetic oligonucleotide
tagggctctggtggcttcactgtcgcgcgcc

SEQ ID NO: 332068 - DNA, 30 bp, Artificial Sequence
  Synthetic oligonucleotide
agaactgtccggcggacagccttgcgcgcc

SEQ ID NO: 332069 - DNA, 30 bp, Artificial Sequence
  Synthetic oligonucleotide
aaactgattgtcagatgtgcttacggcgcc

SEQ ID NO: 332070 - DNA, 30 bp, Artificial Sequence
  Synthetic oligonucleotide
gagcgctgggcccggacatagttcggcgcc

SEQ ID NO: 332071 - DNA, 30 bp, Artificial Sequence
  Synthetic oligonucleotide
cccgtgccgaagtaggtacggcagggcgcc

SEQ ID NO: 332072 - DNA, 30 bp, Artificial Sequence
  Synthetic oligonucleotide
atttacacaacctcccgatttagctgcgcc

SEQ ID NO: 332073 - DNA, 30 bp, Artificial Sequence
  Synthetic oligonucleotide
caagacggcagtccaggcaagctctgcgcc

SEQ ID NO: 332074 - DNA, 30 bp, Artificial Sequence
  Synthetic oligonucleotide
ggaggttagcgcccgccgcctaggtgcgcc

SEQ ID NO: 332075 - DNA, 30 bp, Artificial Sequence
  Synthetic oligonucleotide
gtcagggtggcaccatgcctggtgtgcgcc

SEQ ID NO: 332076 - DNA, 30 bp, Artificial Sequence
  Synthetic oligonucleotide
gatcttttttgttccgggaattcaatcgcc

SEQ ID NO: 332077 - DNA, 30 bp, Artificial Sequence
  Synthetic oligonucleotide
tatttattgtgatccatggaggccatcgcc

SEQ ID NO: 332078 - DNA, 30 bp, Artificial Sequence
  Synthetic oligonucleotide
taaacaactttacggggaccactcatcgcc

SEQ ID NO: 332079 - DNA, 30 bp, Artificial Sequence
  Synthetic oligonucleotide
acatcccggctagctttagacccgatcgcc

SEQ ID NO: 332080 - DNA, 30 bp, Artificial Sequence
  Synthetic oligonucleotide
ccacgcaggtgtagaccaccggggatcgcc

SEQ ID NO: 332081 - DNA, 31 bp, Artificial Sequence
  Synthetic oligonucleotide
aactatcatgaagattgagcaatcactcgcc

SEQ ID NO: 332082 - DNA, 30 bp, Artificial Sequence
  Synthetic oligonucleotide
agcattcgggcgtctaaccgtatcctcgcc

SEQ ID NO: 332083 - DNA, 30 bp, Artificial Sequence
  Synthetic oligonucleotide
tagtaaatcattcactgcggcgtgctcgcc

SEQ ID NO: 332084 - DNA, 30 bp, Artificial Sequence
  Synthetic oligonucleotide
gaggaacgtgtcaagccaggggtgctcgcc

SEQ ID NO: 332085 - DNA, 30 bp, Artificial Sequence
  Synthetic oligonucleotide
attcagcagtagtactgcctggttctcgcc

SEQ ID NO: 332086 - DNA, 30 bp, Artificial Sequence
  Synthetic oligonucleotide
gctagggcgcgagacaccagtttagtcgcc

SEQ ID NO: 332087 - DNA, 30 bp, Artificial Sequence
  Synthetic oligonucleotide
agcgaaggccctcccggtttggacgtcgcc

SEQ ID NO: 332088 - DNA, 30 bp, Artificial Sequence
  Synthetic oligonucleotide
aatactttgctagtagcgcgttacgtcgcc

SEQ ID NO: 332089 - DNA, 30 bp, Artificial Sequence
  Synthetic oligonucleotide
gttcaaaatgcgtgttcaacagtcgtcgcc

SEQ ID NO: 332090 - DNA, 30 bp, Artificial Sequence
  Synthetic oligonucleotide
ctggaatgcatacaccgattttcggtcgcc

SEQ ID NO: 332091 - DNA, 30 bp, Artificial Sequence
  Synthetic oligonucleotide
tgttcgtggtaagtttgttatgtggtcgcc

SEQ ID NO: 332092 - DNA, 30 bp, Artificial Sequence
  Synthetic oligonucleotide
aaatgtgtaaagtgcaaagtgggtgtcgcc

SEQ ID NO: 332093 - DNA, 30 bp, Artificial Sequence
  Synthetic oligonucleotide
tcccactgtcgtcacataaacgaattcgcc

SEQ ID NO: 332094 - DNA, 30 bp, Artificial Sequence
  Synthetic oligonucleotide
catgcgtcggaaatcgcgagacacttcgcc

SEQ ID NO: 332095 - DNA, 30 bp, Artificial Sequence
  Synthetic oligonucleotide
tttcatagttgacaagggtactacttcgcc

SEQ ID NO: 332096 - DNA, 30 bp, Artificial Sequence
  Synthetic oligonucleotide
aattgcggagcgggaagccaaaagttcgcc

SEQ ID NO: 332097 - DNA, 30 bp, Artificial Sequence
  Synthetic oligonucleotide
ctatacgagcattagctctgtacgttcgcc

SEQ ID NO: 332098 - DNA, 30 bp, Artificial Sequence
  Synthetic oligonucleotide
tgctgcgtaaagcagtatcggctgttcgcc

SEQ ID NO: 332099 - DNA, 30 bp, Artificial Sequence
  Synthetic oligonucleotide
taaccgtctttacagacgatgtatttcgcc

SEQ ID NO: 332100 - DNA, 30 bp, Artificial Sequence
  Synthetic oligonucleotide
taatgatatgtattgcaagagagtttcgcc

SEQ ID NO: 332101 - DNA, 30 bp, Artificial Sequence
  Synthetic oligonucleotide
cggaaacttatcactgtcaaacttttcgcc

SEQ ID NO: 332102 - DNA, 30 bp, Artificial Sequence
  Synthetic oligonucleotide
tcttatgaatacgcacgcgtgtcaaaggcc

SEQ ID NO: 332103 - DNA, 30 bp, Artificial Sequence
  Synthetic oligonucleotide
ataatataacatagtcattaatgaaaggcc

SEQ ID NO: 332104 - DNA, 30 bp, Artificial Sequence
  Synthetic oligonucleotide
tggaggtggcgaatttgtaaccgcaaggcc

SEQ ID NO: 332105 - DNA, 30 bp, Artificial Sequence
  Synthetic oligonucleotide
ttggataaaacggactttgaggcgaaggcc

SEQ ID NO: 332106 - DNA, 30 bp, Artificial Sequence
  Synthetic oligonucleotide
atcaaaagccgctacactctaggtaaggcc

SEQ ID NO: 332107 - DNA, 30 bp, Artificial Sequence
  Synthetic oligonucleotide
gcggtataacggcagccagtcgcacaggcc

SEQ ID NO: 332108 - DNA, 30 bp, Artificial Sequence
  Synthetic oligonucleotide
aacgcaccgtagcaatagcaacgacaggcc

SEQ ID NO: 332109 - DNA, 30 bp, Artificial Sequence
  Synthetic oligonucleotide
cggaagctgctgtaagcacgcctacaggcc

SEQ ID NO: 332110 - DNA, 30 bp, Artificial Sequence
  Synthetic oligonucleotide
ctaattcacccaacctactggaaccaggcc

SEQ ID NO: 332111 - DNA, 30 bp, Artificial Sequence
  Synthetic oligonucleotide
gctcggtccgcgggattgtacggccaggcc

SEQ ID NO: 332112 - DNA, 30 bp, Artificial Sequence
  Synthetic oligonucleotide
gctacctaggacttcgccctttgccaggcc

SEQ ID NO: 332113 - DNA, 30 bp, Artificial Sequence
  Synthetic oligonucleotide
gctatgtggtttttgctcgtagtccaggcc

SEQ ID NO: 332114 - DNA, 30 bp, Artificial Sequence
  Synthetic oligonucleotide
cgtaagagccgaaagccaatgatgcaggcc

SEQ ID NO: 332115 - DNA, 30 bp, Artificial Sequence
  Synthetic oligonucleotide
tttccgttggatagtgggcaaaatcaggcc

SEQ ID NO: 332116 - DNA, 30 bp, Artificial Sequence
  Synthetic oligonucleotide
accgaaatacgctatcctggaaatcaggcc

SEQ ID NO: 332117 - DNA, 30 bp, Artificial Sequence
  Synthetic oligonucleotide
gcacctcagaccagtgcccaaagtcaggcc

SEQ ID NO: 332118 - DNA, 30 bp, Artificial Sequence
  Synthetic oligonucleotide
caggatgaacaagttcttactcttcaggcc

SEQ ID NO: 332119 - DNA, 30 bp, Artificial Sequence
  Synthetic oligonucleotide
gtcctgtacttccccctgtgcaaagaggcc

SEQ ID NO: 332120 - DNA, 30 bp, Artificial Sequence
  Synthetic oligonucleotide
ggcgattttgttgattagtacaccgaggcc

SEQ ID NO: 332121 - DNA, 30 bp, Artificial Sequence
  Synthetic oligonucleotide
ggcactacaggcgacgaactctaggaggcc

SEQ ID NO: 332122 - DNA, 30 bp, Artificial Sequence
  Synthetic oligonucleotide
ggtgaaagtccctagccagtgtgggaggcc

SEQ ID NO: 332123 - DNA, 30 bp, Artificial Sequence
  Synthetic oligonucleotide
taacgatatttggggccgattgtggaggcc

SEQ ID NO: 332124 - DNA, 30 bp, Artificial Sequence
  Synthetic oligonucleotide
ctacgatgttaggttactccatatgaggcc

SEQ ID NO: 332125 - DNA, 30 bp, Artificial Sequence
  Synthetic oligonucleotide
gtcccagattgaagtaaaacgctataggcc

SEQ ID NO: 332126 - DNA, 30 bp, Artificial Sequence
  Synthetic oligonucleotide
tacggtacatcagcctctcgtagctaggcc

SEQ ID NO: 332127 - DNA, 30 bp, Artificial Sequence
  Synthetic oligonucleotide
ggtacgtgtatagcccggggtttctaggcc

SEQ ID NO: 332128 - DNA, 30 bp, Artificial Sequence
  Synthetic oligonucleotide
caggccgtcgtgaatgtgcttacttaggcc

SEQ ID NO: 332129 - DNA, 30 bp, Artificial Sequence
  Synthetic oligonucleotide
cccgtcgttgcattggatttcgaaacggcc

SEQ ID NO: 332130 - DNA, 30 bp, Artificial Sequence
  Synthetic oligonucleotide
gaccaacattatgggtaactctaaacggcc

SEQ ID NO: 332131 - DNA, 30 bp, Artificial Sequence
  Synthetic oligonucleotide
ccgacactctagtatcgacgggcaacggcc

SEQ ID NO: 332132 - DNA, 30 bp, Artificial Sequence
  Synthetic oligonucleotide
gttagaagccatgtatggtgaggaacggcc

SEQ ID NO: 332133 - DNA, 30 bp, Artificial Sequence
  Synthetic oligonucleotide
gtgtacactaacccttcgtaatgcacggcc

SEQ ID NO: 332134 - DNA, 30 bp, Artificial Sequence
  Synthetic oligonucleotide
tagagtaagaagcactctacgatcacggcc

SEQ ID NO: 332135 - DNA, 30 bp, Artificial Sequence
  Synthetic oligonucleotide
acgaggtgcctgttggttgtgatcacggcc

SEQ ID NO: 332136 - DNA, 30 bp, Artificial Sequence
  Synthetic oligonucleotide
gtcgtggggctgtatccatgcaagacggcc

SEQ ID NO: 332137 - DNA, 31 bp, Artificial Sequence
  Synthetic oligonucleotide
tgtaacttatttctctaccacagggacggcc

SEQ ID NO: 332138 - DNA, 30 bp, Artificial Sequence
  Synthetic oligonucleotide
aaaaagacatcggttgttccagtgacggcc

SEQ ID NO: 332139 - DNA, 30 bp, Artificial Sequence
  Synthetic oligonucleotide
gtacataattaaccagatgtagatacggcc

SEQ ID NO: 332140 - DNA, 30 bp, Artificial Sequence
  Synthetic oligonucleotide
gtagcagatggcttgacggggagtacggcc

SEQ ID NO: 332141 - DNA, 30 bp, Artificial Sequence
  Synthetic oligonucleotide
aggccggcaatgaaagctaggtaaccggcc

SEQ ID NO: 332142 - DNA, 30 bp, Artificial Sequence
  Synthetic oligonucleotide
gggaatgccggatccggaaagtggccggcc

SEQ ID NO: 332143 - DNA, 30 bp, Artificial Sequence
  Synthetic oligonucleotide
gtgggagatctttgtaaggcacgagcggcc

SEQ ID NO: 332144 - DNA, 30 bp, Artificial Sequence
  Synthetic oligonucleotide
ataccgcttaaactgactttaaacgcggcc

SEQ ID NO: 332145 - DNA, 30 bp, Artificial Sequence
  Synthetic oligonucleotide
aggaaggtgcgagcggcgcacggcgcggcc

SEQ ID NO: 332146 - DNA, 30 bp, Artificial Sequence
  Synthetic oligonucleotide
ttcctgtctgcagacagctcagaggcggcc

SEQ ID NO: 332147 - DNA, 30 bp, Artificial Sequence
  Synthetic oligonucleotide
gggttcgtcgcatcaagaactacggcggcc

SEQ ID NO: 332148 - DNA, 30 bp, Artificial Sequence
  Synthetic oligonucleotide
gctagtgggctcccggtatctggggcggcc

SEQ ID NO: 332149 - DNA, 30 bp, Artificial Sequence
  Synthetic oligonucleotide
gctagggctatcctcaagagaatatcggcc

SEQ ID NO: 332150 - DNA, 31 bp, Artificial Sequence
  Synthetic oligonucleotide
ctcagggcatttataggcgagggactcggcc

SEQ ID NO: 332151 - DNA, 30 bp, Artificial Sequence
  Synthetic oligonucleotide
actgacatactgagctagtatgcctcggcc

SEQ ID NO: 332152 - DNA, 30 bp, Artificial Sequence
  Synthetic oligonucleotide
aagcaatgagagtactcaaagagctcggcc

SEQ ID NO: 332153 - DNA, 30 bp, Artificial Sequence
  Synthetic oligonucleotide
cacgttaggacatttttcccaacgtcggcc

SEQ ID NO: 332154 - DNA, 30 bp, Artificial Sequence
  Synthetic oligonucleotide
atctaagcgtgttaaacttaggggtcggcc

SEQ ID NO: 332155 - DNA, 30 bp, Artificial Sequence
  Synthetic oligonucleotide
gagtggactacaggttgtttaggttcggcc

SEQ ID NO: 332156 - DNA, 30 bp, Artificial Sequence
  Synthetic oligonucleotide
gtttgcatcgctaacaatgaaccaagggcc

SEQ ID NO: 332157 - DNA, 30 bp, Artificial Sequence
  Synthetic oligonucleotide
agggatagtaaagagccctagtacagggcc

SEQ ID NO: 332158 - DNA, 30 bp, Artificial Sequence
  Synthetic oligonucleotide
tatgcacgatcataaccagttcccagggcc

SEQ ID NO: 332159 - DNA, 30 bp, Artificial Sequence
  Synthetic oligonucleotide
tctataaatcaaaccggtcaaagacgggcc

SEQ ID NO: 332160 - DNA, 30 bp, Artificial Sequence
  Synthetic oligonucleotide
gaaccgcttcacaaattagatcaccgggcc

SEQ ID NO: 332161 - DNA, 30 bp, Artificial Sequence
  Synthetic oligonucleotide
cagctggggattagtgcaatgtaccgggcc

SEQ ID NO: 332162 - DNA, 30 bp, Artificial Sequence
  Synthetic oligonucleotide
tggttctgttgagaagacgttagccgggcc

SEQ ID NO: 332163 - DNA, 30 bp, Artificial Sequence
  Synthetic oligonucleotide
gcttgtggctaagtgctccttcgtcgggcc

SEQ ID NO: 332164 - DNA, 30 bp, Artificial Sequence
  Synthetic oligonucleotide
ggacagtcatggaacgccaggcgcggggcc

SEQ ID NO: 332165 - DNA, 30 bp, Artificial Sequence
  Synthetic oligonucleotide
ttcgccactattatagggtacctatgggcc

SEQ ID NO: 332166 - DNA, 30 bp, Artificial Sequence
  Synthetic oligonucleotide
atctaactgggaagtaaggtcgcgtgggcc

SEQ ID NO: 332167 - DNA, 30 bp, Artificial Sequence
  Synthetic oligonucleotide
ttgcaagcgcttgttagcggcgtgtgggcc

SEQ ID NO: 332168 - DNA, 30 bp, Artificial Sequence
  Synthetic oligonucleotide
gctcgcgcaattaaataggccatttgggcc

SEQ ID NO: 332169 - DNA, 30 bp, Artificial Sequence
  Synthetic oligonucleotide
ttgggtgggtcttcattagggggaatggcc

SEQ ID NO: 332170 - DNA, 31 bp, Artificial Sequence
  Synthetic oligonucleotide
tttcaccatcaaaagctaggagtgaatggcc

SEQ ID NO: 332171 - DNA, 30 bp, Artificial Sequence
  Synthetic oligonucleotide
ctttgatgatgaattgcctattgaatggcc

SEQ ID NO: 332172 - DNA, 30 bp, Artificial Sequence
  Synthetic oligonucleotide
tctagcttaagagcctcttgctgcatggcc

SEQ ID NO: 332173 - DNA, 30 bp, Artificial Sequence
  Synthetic oligonucleotide
ttaaggaacctggcgcgatgtatcatggcc

SEQ ID NO: 332174 - DNA, 30 bp, Artificial Sequence
  Synthetic oligonucleotide
ctctgagattccttgcgctcccggatggcc

SEQ ID NO: 332175 - DNA, 30 bp, Artificial Sequence
  Synthetic oligonucleotide
aagggcgattattcgtataggaatatggcc

SEQ ID NO: 332176 - DNA, 30 bp, Artificial Sequence
  Synthetic oligonucleotide
tgatcgctaattgtgacggctacactggcc

SEQ ID NO: 332177 - DNA, 29 bp, Artificial Sequence
  Synthetic oligonucleotide
gggtctgagggcccggacaatacctggcc

SEQ ID NO: 332178 - DNA, 30 bp, Artificial Sequence
  Synthetic oligonucleotide
cacttaccgtcccggacgggcttcctggcc

SEQ ID NO: 332179 - DNA, 30 bp, Artificial Sequence
  Synthetic oligonucleotide
atcaacctgcatctggttacgactctggcc

SEQ ID NO: 332180 - DNA, 30 bp, Artificial Sequence
  Synthetic oligonucleotide
ttcggaaaaaggcgggtgcatcctctggcc

SEQ ID NO: 332181 - DNA, 30 bp, Artificial Sequence
  Synthetic oligonucleotide
ggtttatcggctcgtcgcccaaaagtggcc

SEQ ID NO: 332182 - DNA, 30 bp, Artificial Sequence
  Synthetic oligonucleotide
agggtcatcacgctaaactgtcgcgtggcc

SEQ ID NO: 332183 - DNA, 30 bp, Artificial Sequence
  Synthetic oligonucleotide
aaggacccagggcttccagagtaattggcc

SEQ ID NO: 332184 - DNA, 30 bp, Artificial Sequence
  Synthetic oligonucleotide
agtgtcatagatctaaaatgaaacttggcc

SEQ ID NO: 332185 - DNA, 30 bp, Artificial Sequence
  Synthetic oligonucleotide
tggtcccggccccgtcggtttaacttggcc

SEQ ID NO: 332186 - DNA, 30 bp, Artificial Sequence
  Synthetic oligonucleotide
ccctgcttgtacactgctagacacttggcc

SEQ ID NO: 332187 - DNA, 30 bp, Artificial Sequence
  Synthetic oligonucleotide
acctggtgtaatgtttactagcagttggcc

SEQ ID NO: 332188 - DNA, 30 bp, Artificial Sequence
  Synthetic oligonucleotide
taaccttcttaggatgacctccatttggcc

SEQ ID NO: 332189 - DNA, 30 bp, Artificial Sequence
  Synthetic oligonucleotide
ataatcatgcagttaggagctggtttggcc

SEQ ID NO: 332190 - DNA, 30 bp, Artificial Sequence
  Synthetic oligonucleotide
agtaagataatgtctaggacttgcaatgcc

SEQ ID NO: 332191 - DNA, 30 bp, Artificial Sequence
  Synthetic oligonucleotide
atcatccacttggctagtacaatcaatgcc

SEQ ID NO: 332192 - DNA, 30 bp, Artificial Sequence
  Synthetic oligonucleotide
tttaaagttgcgatatagatatagaatgcc

SEQ ID NO: 332193 - DNA, 30 bp, Artificial Sequence
  Synthetic oligonucleotide
acgggatctcccctagtagaaatgaatgcc

SEQ ID NO: 332194 - DNA, 30 bp, Artificial Sequence
  Synthetic oligonucleotide
ttccaaacaggttatggaccatataatgcc

SEQ ID NO: 332195 - DNA, 30 bp, Artificial Sequence
  Synthetic oligonucleotide
gtcagaaggactgtaaaaggtgctaatgcc

SEQ ID NO: 332196 - DNA, 30 bp, Artificial Sequence
  Synthetic oligonucleotide
aacggatcagttacggaagcatttaatgcc

SEQ ID NO: 332197 - DNA, 30 bp, Artificial Sequence
  Synthetic oligonucleotide
agtaggtacggtgttagtcatggacatgcc

SEQ ID NO: 332198 - DNA, 30 bp, Artificial Sequence
  Synthetic oligonucleotide
aaaacggcaactacaggcacataccatgcc

SEQ ID NO: 332199 - DNA, 30 bp, Artificial Sequence
  Synthetic oligonucleotide
tcatgttagttggcgcaaacaaggcatgcc

SEQ ID NO: 332200 - DNA, 30 bp, Artificial Sequence
  Synthetic oligonucleotide
gggattcacaagataatccgtcgtcatgcc

SEQ ID NO: 332201 - DNA, 30 bp, Artificial Sequence
  Synthetic oligonucleotide
agattcgaggtccatttggatggtcatgcc

SEQ ID NO: 332202 - DNA, 30 bp, Artificial Sequence
  Synthetic oligonucleotide
ggccatacgcttagttacagggaggatgcc

SEQ ID NO: 332203 - DNA, 30 bp, Artificial Sequence
  Synthetic oligonucleotide
gctgtcatcgaaaaatctgttcgggatgcc

SEQ ID NO: 332204 - DNA, 30 bp, Artificial Sequence
  Synthetic oligonucleotide
atcaaggcgcattcgggactaaaatatgcc

SEQ ID NO: 332205 - DNA, 30 bp, Artificial Sequence
  Synthetic oligonucleotide
atcggttcaagaacgcccagagcatatgcc

SEQ ID NO: 332206 - DNA, 30 bp, Artificial Sequence
  Synthetic oligonucleotide
gatggtacagattgcgcaggttgatatgcc

SEQ ID NO: 332207 - DNA, 30 bp, Artificial Sequence
  Synthetic oligonucleotide
ctgcttggcgtgtagtccgaccggtatgcc

SEQ ID NO: 332208 - DNA, 30 bp, Artificial Sequence
  Synthetic oligonucleotide
ggtcaacaccatatcgatttgttgtatgcc

SEQ ID NO: 332209 - DNA, 30 bp, Artificial Sequence
  Synthetic oligonucleotide
ttgcacgcaaataaaagatggcattatgcc

SEQ ID NO: 332210 - DNA, 30 bp, Artificial Sequence
  Synthetic oligonucleotide
gttaagggattacgaacaaagtcttatgcc

SEQ ID NO: 332211 - DNA, 30 bp, Artificial Sequence
  Synthetic oligonucleotide
aaacgcctttcgaaaggtgtcagttatgcc

SEQ ID NO: 332212 - DNA, 30 bp, Artificial Sequence
  Synthetic oligonucleotide
gcgtagataacactttagggtccaactgcc

SEQ ID NO: 332213 - DNA, 30 bp, Artificial Sequence
  Synthetic oligonucleotide
ctcaatggtgtcgtggcgggggcaactgcc

SEQ ID NO: 332214 - DNA, 30 bp, Artificial Sequence
  Synthetic oligonucleotide
cggtagaaggtggtgaaacggcccactgcc

SEQ ID NO: 332215 - DNA, 30 bp, Artificial Sequence
  Synthetic oligonucleotide
gttgtctatcccatttagggatgcactgcc

SEQ ID NO: 332216 - DNA, 30 bp, Artificial Sequence
  Synthetic oligonucleotide
tacagattcacacggttaaaaggccctgcc

SEQ ID NO: 332217 - DNA, 30 bp, Artificial Sequence
  Synthetic oligonucleotide
cgctaagggtggatcaaatgcgagcctgcc

SEQ ID NO: 332218 - DNA, 30 bp, Artificial Sequence
  Synthetic oligonucleotide
gacggtttccgacgtaaagtcgggcctgcc

SEQ ID NO: 332219 - DNA, 30 bp, Artificial Sequence
  Synthetic oligonucleotide
taaaactatggttacaatgacgtcgctgcc

SEQ ID NO: 332220 - DNA, 30 bp, Artificial Sequence
  Synthetic oligonucleotide
attaaacaagaactcagaccaatggctgcc

SEQ ID NO: 332221 - DNA, 30 bp, Artificial Sequence
  Synthetic oligonucleotide
gcatctgacatcgaaatagcgaaatctgcc

SEQ ID NO: 332222 - DNA, 30 bp, Artificial Sequence
  Synthetic oligonucleotide
agcccttacgtaatactgttcaattctgcc

SEQ ID NO: 332223 - DNA, 30 bp, Artificial Sequence
  Synthetic oligonucleotide
gcatgagtccattgagggagcgcttctgcc

SEQ ID NO: 332224 - DNA, 30 bp, Artificial Sequence
  Synthetic oligonucleotide
acctgctgatttgtactaactttttctgcc

SEQ ID NO: 332225 - DNA, 30 bp, Artificial Sequence
  Synthetic oligonucleotide
gcacaaaataggtggcttaagtcaagtgcc

SEQ ID NO: 332226 - DNA, 30 bp, Artificial Sequence
  Synthetic oligonucleotide
gtctatacctatgggaccttaataagtgcc

SEQ ID NO: 332227 - DNA, 30 bp, Artificial Sequence
  Synthetic oligonucleotide
ggtgtattccgccgaaggtgatacagtgcc

SEQ ID NO: 332228 - DNA, 30 bp, Artificial Sequence
  Synthetic oligonucleotide
tccgggaaccacaagtgtccacgcagtgcc

SEQ ID NO: 332229 - DNA, 30 bp, Artificial Sequence
  Synthetic oligonucleotide
aacgtgtcccatacgtagacgttgagtgcc

SEQ ID NO: 332230 - DNA, 30 bp, Artificial Sequence
  Synthetic oligonucleotide
aatacggtattctgtccactctatagtgcc

SEQ ID NO: 332231 - DNA, 30 bp, Artificial Sequence
  Synthetic oligonucleotide
cttcgaacatcacccagttttaaccgtgcc

SEQ ID NO: 332232 - DNA, 30 bp, Artificial Sequence
  Synthetic oligonucleotide
tgctgttacggcgtcgaaaaatcccgtgcc

SEQ ID NO: 332233 - DNA, 30 bp, Artificial Sequence
  Synthetic oligonucleotide
agccggccccgagatgtgttcggccgtgcc

SEQ ID NO: 332234 - DNA, 30 bp, Artificial Sequence
  Synthetic oligonucleotide
gaaaactctagtgcccgaactggccgtgcc

SEQ ID NO: 332235 - DNA, 30 bp, Artificial Sequence
  Synthetic oligonucleotide
ttaaagtaccggaggtgggggtggcgtgcc

SEQ ID NO: 332236 - DNA, 30 bp, Artificial Sequence
  Synthetic oligonucleotide
ctgttgctcacaatttagtcagatcgtgcc

SEQ ID NO: 332237 - DNA, 30 bp, Artificial Sequence
  Synthetic oligonucleotide
tcaagtattacgcgataatcttatcgtgcc

SEQ ID NO: 332238 - DNA, 30 bp, Artificial Sequence
  Synthetic oligonucleotide
ccgcaaccgcattacgccgactgcggtgcc

SEQ ID NO: 332239 - DNA, 30 bp, Artificial Sequence
  Synthetic oligonucleotide
catatcaactcaaatacgttcatcggtgcc

SEQ ID NO: 332240 - DNA, 30 bp, Artificial Sequence
  Synthetic oligonucleotide
gtattgctcccaaggcgcgatactggtgcc

SEQ ID NO: 332241 - DNA, 30 bp, Artificial Sequence
  Synthetic oligonucleotide
tagccagttagattgtgttcgtttggtgcc

SEQ ID NO: 332242 - DNA, 30 bp, Artificial Sequence
  Synthetic oligonucleotide
tgaaggtgcctgggttaacaatgctgtgcc

SEQ ID NO: 332243 - DNA, 30 bp, Artificial Sequence
  Synthetic oligonucleotide
gaaatcaggctccacattctcatctgtgcc

SEQ ID NO: 332244 - DNA, 30 bp, Artificial Sequence
  Synthetic oligonucleotide
ttacgtaataagccagaataaaattgtgcc

SEQ ID NO: 332245 - DNA, 30 bp, Artificial Sequence
  Synthetic oligonucleotide
tacgcacagcaagtaggacagcatattgcc

SEQ ID NO: 332246 - DNA, 30 bp, Artificial Sequence
  Synthetic oligonucleotide
atcgtactaaactcggaaccgcctattgcc

SEQ ID NO: 332247 - DNA, 30 bp, Artificial Sequence
  Synthetic oligonucleotide
attccgtgatttcgaggggcgacacttgcc

SEQ ID NO: 332248 - DNA, 30 bp, Artificial Sequence
  Synthetic oligonucleotide
taatctaaagtgggctcgatagctgttgcc

SEQ ID NO: 332249 - DNA, 30 bp, Artificial Sequence
  Synthetic oligonucleotide
gcgctatacacgagctcacatcttgttgcc

SEQ ID NO: 332250 - DNA, 30 bp, Artificial Sequence
  Synthetic oligonucleotide
atccttggaagctattccgtccgatttgcc

SEQ ID NO: 332251 - DNA, 30 bp, Artificial Sequence
  Synthetic oligonucleotide
cccatctcaaccgaatttcgattatttgcc

SEQ ID NO: 332252 - DNA, 30 bp, Artificial Sequence
  Synthetic oligonucleotide
atgggcaccctgattacagtgccctttgcc

SEQ ID NO: 332253 - DNA, 30 bp, Artificial Sequence
  Synthetic oligonucleotide
tggcgagatagcttgctgtcagcgtttgcc

SEQ ID NO: 332254 - DNA, 30 bp, Artificial Sequence
  Synthetic oligonucleotide
gttatttacgtaggtaatctgtggtttgcc

SEQ ID NO: 332255 - DNA, 30 bp, Artificial Sequence
  Synthetic oligonucleotide
tgacgtcaaacaccaatggccgtgtttgcc

SEQ ID NO: 332256 - DNA, 30 bp, Artificial Sequence
  Synthetic oligonucleotide
gctaaaggataacggcattgttgttttgcc

SEQ ID NO: 332257 - DNA, 30 bp, Artificial Sequence
  Synthetic oligonucleotide
ttttgggcaatgtacggactacaaaaatcc

SEQ ID NO: 332258 - DNA, 30 bp, Artificial Sequence
  Synthetic oligonucleotide
gacgggagcagttggatgggatcaaaatcc

SEQ ID NO: 332259 - DNA, 30 bp, Artificial Sequence
  Synthetic oligonucleotide
tatgtggtatatgtggcgtgtgccaaatcc

SEQ ID NO: 332260 - DNA, 30 bp, Artificial Sequence
  Synthetic oligonucleotide
aatgcaggattggcataaataatcaaatcc

SEQ ID NO: 332261 - DNA, 30 bp, Artificial Sequence
  Synthetic oligonucleotide
ccagccagatggcattcagttccgaaatcc

SEQ ID NO: 332262 - DNA, 30 bp, Artificial Sequence
  Synthetic oligonucleotide
agaagtgtccacgtggttttcccccaatcc

SEQ ID NO: 332263 - DNA, 30 bp, Artificial Sequence
  Synthetic oligonucleotide
tcactagaacccacgtcaaccttccaatcc

SEQ ID NO: 332264 - DNA, 30 bp, Artificial Sequence
  Synthetic oligonucleotide
ttatagcacgtggcacgcagatagcaatcc

SEQ ID NO: 332265 - DNA, 30 bp, Artificial Sequence
  Synthetic oligonucleotide
ttcagttaattgtcagaaaactagcaatcc

SEQ ID NO: 332266 - DNA, 30 bp, Artificial Sequence
  Synthetic oligonucleotide
ctgaagccgacctaaggtaaatcgcaatcc

SEQ ID NO: 332267 - DNA, 30 bp, Artificial Sequence
  Synthetic oligonucleotide
ggattaaacattgtgctcacagggcaatcc

SEQ ID NO: 332268 - DNA, 30 bp, Artificial Sequence
  Synthetic oligonucleotide
atcatactcgaattggtattactgcaatcc

SEQ ID NO: 332269 - DNA, 30 bp, Artificial Sequence
  Synthetic oligonucleotide
atacgttaataccacatgtgattagaatcc

SEQ ID NO: 332270 - DNA, 31 bp, Artificial Sequence
  Synthetic oligonucleotide
tttgtactacaaacactgctcacccgaatcc

SEQ ID NO: 332271 - DNA, 30 bp, Artificial Sequence
  Synthetic oligonucleotide
gaagatgattcatgagatagcctcgaatcc

SEQ ID NO: 332272 - DNA, 30 bp, Artificial Sequence
  Synthetic oligonucleotide
aagctaattcgcagagtcccattcgaatcc

SEQ ID NO: 332273 - DNA, 30 bp, Artificial Sequence
  Synthetic oligonucleotide
agatcagcatcattagttcctacggaatcc

SEQ ID NO: 332274 - DNA, 30 bp, Artificial Sequence
  Synthetic oligonucleotide
gagcataattctctcaggaaaaactaatcc

SEQ ID NO: 332275 - DNA, 30 bp, Artificial Sequence
  Synthetic oligonucleotide
tttagcagatggattcattgtgattaatcc

SEQ ID NO: 332276 - DNA, 30 bp, Artificial Sequence
  Synthetic oligonucleotide
ttgtaaatggtcattcagccagacacatcc

SEQ ID NO: 332277 - DNA, 30 bp, Artificial Sequence
  Synthetic oligonucleotide
ctttgtggtgaaaaaggcctaaccacatcc

SEQ ID NO: 332278 - DNA, 30 bp, Artificial Sequence
  Synthetic oligonucleotide
agattacaacgtgggatcagaggcacatcc

SEQ ID NO: 332279 - DNA, 30 bp, Artificial Sequence
  Synthetic oligonucleotide
gtatcctttgttctgaagaggggcacatcc

SEQ ID NO: 332280 - DNA, 30 bp, Artificial Sequence
  Synthetic oligonucleotide
gggttaagtgtatgttcctgtttcacatcc

SEQ ID NO: 332281 - DNA, 30 bp, Artificial Sequence
  Synthetic oligonucleotide
ctgtttttattaggtcctatacgtacatcc

SEQ ID NO: 332282 - DNA, 30 bp, Artificial Sequence
  Synthetic oligonucleotide
acctggggacctagctcctatataccatcc

SEQ ID NO: 332283 - DNA, 30 bp, Artificial Sequence
  Synthetic oligonucleotide
agctgcgtccgatcacacgatcacccatcc

SEQ ID NO: 332284 - DNA, 30 bp, Artificial Sequence
  Synthetic oligonucleotide
aatgcagggcgctatagtggtgccccatcc

SEQ ID NO: 332285 - DNA, 30 bp, Artificial Sequence
  Synthetic oligonucleotide
gcgtcgttatggatcccttcgagcccatcc

SEQ ID NO: 332286 - DNA, 30 bp, Artificial Sequence
  Synthetic oligonucleotide
caggtagagtcgaattgaggttggccatcc

SEQ ID NO: 332287 - DNA, 30 bp, Artificial Sequence
  Synthetic oligonucleotide
actgtacagatacgacggcagactccatcc

SEQ ID NO: 332288 - DNA, 30 bp, Artificial Sequence
  Synthetic oligonucleotide
aaagaaataagacactcggtgagtccatcc

SEQ ID NO: 332289 - DNA, 30 bp, Artificial Sequence
  Synthetic oligonucleotide
ttataagaggcaccatttgtagtagcatcc

SEQ ID NO: 332290 - DNA, 30 bp, Artificial Sequence
  Synthetic oligonucleotide
tccactatggcgtaatggcctctcgcatcc

SEQ ID NO: 332291 - DNA, 30 bp, Artificial Sequence
  Synthetic oligonucleotide
gttcgactatttctgcggtaacgggcatcc

SEQ ID NO: 332292 - DNA, 30 bp, Artificial Sequence
  Synthetic oligonucleotide
tagactgcggtcttgcctgtaggctcatcc

SEQ ID NO: 332293 - DNA, 30 bp, Artificial Sequence
  Synthetic oligonucleotide
gagatttgcaggtgcgaccgattgtcatcc

SEQ ID NO: 332294 - DNA, 30 bp, Artificial Sequence
  Synthetic oligonucleotide
attccatgtgggcggtcgcggaattcatcc

SEQ ID NO: 332295 - DNA, 30 bp, Artificial Sequence
  Synthetic oligonucleotide
tcggccctcagtcgagggtttaattcatcc

SEQ ID NO: 332296 - DNA, 30 bp, Artificial Sequence
  Synthetic oligonucleotide
tgtgatatttctacatgagtaacttcatcc

SEQ ID NO: 332297 - DNA, 30 bp, Artificial Sequence
  Synthetic oligonucleotide
tcacactctcacagtcgcattactagatcc

SEQ ID NO: 332298 - DNA, 30 bp, Artificial Sequence
  Synthetic oligonucleotide
cgagtatgctaccaagcgccatgtagatcc

SEQ ID NO: 332299 - DNA, 30 bp, Artificial Sequence
  Synthetic oligonucleotide
ctgcactctcgcctccttcactgtagatcc

SEQ ID NO: 332300 - DNA, 30 bp, Artificial Sequence
  Synthetic oligonucleotide
gaaagccacgaagtcgttgcgcttcgatcc

SEQ ID NO: 332301 - DNA, 30 bp, Artificial Sequence
  Synthetic oligonucleotide
atgatgtctggcaacgcaaagaaaggatcc

SEQ ID NO: 332302 - DNA, 30 bp, Artificial Sequence
  Synthetic oligonucleotide
ggaataactcggagaaagcggccaggatcc

SEQ ID NO: 332303 - DNA, 30 bp, Artificial Sequence
  Synthetic oligonucleotide
gagtacattttgtagttaattaacggatcc

SEQ ID NO: 332304 - DNA, 30 bp, Artificial Sequence
  Synthetic oligonucleotide
gcatctttccgatcgagggcagacggatcc

SEQ ID NO: 332305 - DNA, 30 bp, Artificial Sequence
  Synthetic oligonucleotide
tgcccaatggtgtagataagctacggatcc

SEQ ID NO: 332306 - DNA, 30 bp, Artificial Sequence
  Synthetic oligonucleotide
aatttgggttcgtagagcaatacgggatcc

SEQ ID NO: 332307 - DNA, 30 bp, Artificial Sequence
  Synthetic oligonucleotide
gagtcttcaatttgcgaacgtgcgggatcc

SEQ ID NO: 332308 - DNA, 30 bp, Artificial Sequence
  Synthetic oligonucleotide
gagatattggtgcttgttatgaggggatcc

SEQ ID NO: 332309 - DNA, 30 bp, Artificial Sequence
  Synthetic oligonucleotide
atagtacgaggatcatgtagaatgggatcc

SEQ ID NO: 332310 - DNA, 30 bp, Artificial Sequence
  Synthetic oligonucleotide
gtggggaggtgtttctttaacggtggatcc

SEQ ID NO: 332311 - DNA, 30 bp, Artificial Sequence
  Synthetic oligonucleotide
tcgatccgttttaggtggtgtcaatgatcc

SEQ ID NO: 332312 - DNA, 30 bp, Artificial Sequence
  Synthetic oligonucleotide
ggaacgtaaaccatccaggtgatatgatcc

SEQ ID NO: 332313 - DNA, 30 bp, Artificial Sequence
  Synthetic oligonucleotide
aaaatgtgtaccgtatgcattcactgatcc

SEQ ID NO: 332314 - DNA, 30 bp, Artificial Sequence
  Synthetic oligonucleotide
cagatagtctgatgcggtcacgcttgatcc

SEQ ID NO: 332315 - DNA, 30 bp, Artificial Sequence
  Synthetic oligonucleotide
cgggtgtcgtcatatctcagggcaatatcc

SEQ ID NO: 332316 - DNA, 30 bp, Artificial Sequence
  Synthetic oligonucleotide
ccccggcacagaccgacaaggctcatatcc

SEQ ID NO: 332317 - DNA, 30 bp, Artificial Sequence
  Synthetic oligonucleotide
gcatactatcctatgcaaagaaagatatcc

SEQ ID NO: 332318 - DNA, 30 bp, Artificial Sequence
  Synthetic oligonucleotide
tcaggtcctcgttatagcgaacggatatcc

SEQ ID NO: 332319 - DNA, 30 bp, Artificial Sequence
  Synthetic oligonucleotide
cgagttgcagtacttgtagtaggtatatcc

SEQ ID NO: 332320 - DNA, 30 bp, Artificial Sequence
  Synthetic oligonucleotide
gggttgtccgtggctattcccgttatatcc

SEQ ID NO: 332321 - DNA, 30 bp, Artificial Sequence
  Synthetic oligonucleotide
aaacacagatcggttaggtagaaactatcc

SEQ ID NO: 332322 - DNA, 30 bp, Artificial Sequence
  Synthetic oligonucleotide
tagttcgaccgaccttgacgataactatcc

SEQ ID NO: 332323 - DNA, 30 bp, Artificial Sequence
  Synthetic oligonucleotide
ccacactggacgcctgttaggccactatcc

SEQ ID NO: 332324 - DNA, 30 bp, Artificial Sequence
  Synthetic oligonucleotide
cagaataaaagggctaagcgtttactatcc

SEQ ID NO: 332325 - DNA, 30 bp, Artificial Sequence
  Synthetic oligonucleotide
cacaactgagaccatctacccaacctatcc

SEQ ID NO: 332326 - DNA, 30 bp, Artificial Sequence
  Synthetic oligonucleotide
aagttgctgggacgactttctacgctatcc

SEQ ID NO: 332327 - DNA, 30 bp, Artificial Sequence
  Synthetic oligonucleotide
ttttcggtgaggtccccaatgtggctatcc

SEQ ID NO: 332328 - DNA, 30 bp, Artificial Sequence
  Synthetic oligonucleotide
aatcaattccgagatccccaacttctatcc

SEQ ID NO: 332329 - DNA, 29 bp, Artificial Sequence
  Synthetic oligonucleotide
agtacccggccttccctatgaaagtatcc

SEQ ID NO: 332330 - DNA, 30 bp, Artificial Sequence
  Synthetic oligonucleotide
aacgtagtactcgcccgttagatagtatcc

SEQ ID NO: 332331 - DNA, 30 bp, Artificial Sequence
  Synthetic oligonucleotide
aagtacgcggttgacgacggcaacgtatcc

SEQ ID NO: 332332 - DNA, 30 bp, Artificial Sequence
  Synthetic oligonucleotide
cggcgcttacgagagattgttctcgtatcc

SEQ ID NO: 332333 - DNA, 30 bp, Artificial Sequence
  Synthetic oligonucleotide
tgtgtttgtagtaatgagatctcggtatcc

SEQ ID NO: 332334 - DNA, 30 bp, Artificial Sequence
  Synthetic oligonucleotide
ccgggagactatcgcagtgaggtggtatcc

SEQ ID NO: 332335 - DNA, 30 bp, Artificial Sequence
  Synthetic oligonucleotide
aactcctcgcgtcccaatgttattgtatcc

SEQ ID NO: 332336 - DNA, 30 bp, Artificial Sequence
  Synthetic oligonucleotide
ggttctagacccgcccaattcggattatcc

SEQ ID NO: 332337 - DNA, 30 bp, Artificial Sequence
  Synthetic oligonucleotide
attagagcaccagagctactatgattatcc

SEQ ID NO: 332338 - DNA, 30 bp, Artificial Sequence
  Synthetic oligonucleotide
agcttgcgtatgatccaactggtcttatcc

SEQ ID NO: 332339 - DNA, 30 bp, Artificial Sequence
  Synthetic oligonucleotide
tgactctgcgcctcaaaataagagttatcc

SEQ ID NO: 332340 - DNA, 30 bp, Artificial Sequence
  Synthetic oligonucleotide
aggaccctcttctcaaaacttaatttatcc

SEQ ID NO: 332341 - DNA, 30 bp, Artificial Sequence
  Synthetic oligonucleotide
gaatagacgataaacaaagattctttatcc

SEQ ID NO: 332342 - DNA, 30 bp, Artificial Sequence
  Synthetic oligonucleotide
taggatcccatatggacgagaaaaaactcc

SEQ ID NO: 332343 - DNA, 30 bp, Artificial Sequence
  Synthetic oligonucleotide
ttagtatcgactcttggaccagaaaactcc

SEQ ID NO: 332344 - DNA, 30 bp, Artificial Sequence
  Synthetic oligonucleotide
tatggactataaattggccaaacaaactcc

SEQ ID NO: 332345 - DNA, 30 bp, Artificial Sequence
  Synthetic oligonucleotide
tcggtcacggacccaagaagggcgaactcc

SEQ ID NO: 332346 - DNA, 29 bp, Artificial Sequence
  Synthetic oligonucleotide
atacttgcttaagtcgccgacttaactcc

SEQ ID NO: 332347 - DNA, 30 bp, Artificial Sequence
  Synthetic oligonucleotide
gggtttagcccgcaccgacatatacactcc

SEQ ID NO: 332348 - DNA, 30 bp, Artificial Sequence
  Synthetic oligonucleotide
taactacccagggacgccgtggtccactcc

SEQ ID NO: 332349 - DNA, 30 bp, Artificial Sequence
  Synthetic oligonucleotide
gcttcccagagaaccccgacgctgcactcc

SEQ ID NO: 332350 - DNA, 30 bp, Artificial Sequence
  Synthetic oligonucleotide
tcagtgcattagtgctctgtcgtgcactcc

SEQ ID NO: 332351 - DNA, 30 bp, Artificial Sequence
  Synthetic oligonucleotide
gtcgagaacgaagatagtcgggatcactcc

SEQ ID NO: 332352 - DNA, 30 bp, Artificial Sequence
  Synthetic oligonucleotide
actttaagggtaccgaatgggtaagactcc

SEQ ID NO: 332353 - DNA, 30 bp, Artificial Sequence
  Synthetic oligonucleotide
acaccgtttctccctcaccggagcgactcc

SEQ ID NO: 332354 - DNA, 30 bp, Artificial Sequence
  Synthetic oligonucleotide
ggtacactccgagcatgcgacgcggactcc

SEQ ID NO: 332355 - DNA, 30 bp, Artificial Sequence
  Synthetic oligonucleotide
ggtcatcattagtatgagcctagggactcc

SEQ ID NO: 332356 - DNA, 30 bp, Artificial Sequence
  Synthetic oligonucleotide
agttccgtcgttcattgaacagtggactcc

SEQ ID NO: 332357 - DNA, 30 bp, Artificial Sequence
  Synthetic oligonucleotide
cacaaccctgttcgtttaggataatactcc

SEQ ID NO: 332358 - DNA, 30 bp, Artificial Sequence
  Synthetic oligonucleotide
tagtcagtgaatcgcgtcggtttctactcc

SEQ ID NO: 332359 - DNA, 30 bp, Artificial Sequence
  Synthetic oligonucleotide
gctggacgtaggaagacgattcggtactcc

SEQ ID NO: 332360 - DNA, 30 bp, Artificial Sequence
  Synthetic oligonucleotide
cttgtccgttattgcacacaaacttactcc

SEQ ID NO: 332361 - DNA, 30 bp, Artificial Sequence
  Synthetic oligonucleotide
gtgccacccctgtgttgggacggttactcc

SEQ ID NO: 332362 - DNA, 30 bp, Artificial Sequence
  Synthetic oligonucleotide
ctgcacgcgtggagaggtcgtctttactcc

SEQ ID NO: 332363 - DNA, 30 bp, Artificial Sequence
  Synthetic oligonucleotide
gaacagggcgttacaagcgggcctacctcc

SEQ ID NO: 332364 - DNA, 30 bp, Artificial Sequence
  Synthetic oligonucleotide
tgtgttcgggctcaacaccaaccaccctcc

SEQ ID NO: 332365 - DNA, 30 bp, Artificial Sequence
  Synthetic oligonucleotide
taatgtgtatcatgcgggccatcaccctcc

SEQ ID NO: 332366 - DNA, 30 bp, Artificial Sequence
  Synthetic oligonucleotide
atacgtacggttcggccccaaagaccctcc

SEQ ID NO: 332367 - DNA, 30 bp, Artificial Sequence
  Synthetic oligonucleotide
gacttgctcgtcgggcgcgtgtctccctcc

SEQ ID NO: 332368 - DNA, 30 bp, Artificial Sequence
  Synthetic oligonucleotide
aatacggtggggagttggggaattccctcc

SEQ ID NO: 332369 - DNA, 30 bp, Artificial Sequence
  Synthetic oligonucleotide
cagtcgcggaggccgcgttggtttccctcc

SEQ ID NO: 332370 - DNA, 30 bp, Artificial Sequence
  Synthetic oligonucleotide
agacactcaccctcgttttagaccgcctcc

SEQ ID NO: 332371 - DNA, 30 bp, Artificial Sequence
  Synthetic oligonucleotide
gttaccctggagtaacacgttgaggcctcc

SEQ ID NO: 332372 - DNA, 30 bp, Artificial Sequence
  Synthetic oligonucleotide
tgtttagttctaggatgctagatatcctcc

SEQ ID NO: 332373 - DNA, 30 bp, Artificial Sequence
  Synthetic oligonucleotide
cgtccacacagtattaaaggcttctcctcc

SEQ ID NO: 332374 - DNA, 30 bp, Artificial Sequence
  Synthetic oligonucleotide
gtatgattgcgcacccgtaatgggtcctcc

SEQ ID NO: 332375 - DNA, 30 bp, Artificial Sequence
  Synthetic oligonucleotide
ctaagtaagtgaccctcaaggaattcctcc

SEQ ID NO: 332376 - DNA, 30 bp, Artificial Sequence
  Synthetic oligonucleotide
aaaacatcaaataggtcgtaggaaagctcc

SEQ ID NO: 332377 - DNA, 30 bp, Artificial Sequence
  Synthetic oligonucleotide
ccagaagtagagcgctcattgcacagctcc

SEQ ID NO: 332378 - DNA, 30 bp, Artificial Sequence
  Synthetic oligonucleotide
aaccgctacatgaggaggctacccagctcc

SEQ ID NO: 332379 - DNA, 30 bp, Artificial Sequence
  Synthetic oligonucleotide
atcctggtgggagccagccggttcagctcc

SEQ ID NO: 332380 - DNA, 30 bp, Artificial Sequence
  Synthetic oligonucleotide
tgtttatcaggccggagcgaagagagctcc

SEQ ID NO: 332381 - DNA, 30 bp, Artificial Sequence
  Synthetic oligonucleotide
ccactcaggtcatgtattcgtctgagctcc

SEQ ID NO: 332382 - DNA, 30 bp, Artificial Sequence
  Synthetic oligonucleotide
agtttggctcacggatcttgcggtagctcc

SEQ ID NO: 332383 - DNA, 30 bp, Artificial Sequence
  Synthetic oligonucleotide
taccagattcagtaggtctgatcacgctcc

SEQ ID NO: 332384 - DNA, 30 bp, Artificial Sequence
  Synthetic oligonucleotide
cgtacagggtggagatatttcttccgctcc

SEQ ID NO: 332385 - DNA, 30 bp, Artificial Sequence
  Synthetic oligonucleotide
ctagattgtgaccgagaatatgagcgctcc

SEQ ID NO: 332386 - DNA, 30 bp, Artificial Sequence
  Synthetic oligonucleotide
agatctccggttctcttcctgaggcgctcc

SEQ ID NO: 332387 - DNA, 30 bp, Artificial Sequence
  Synthetic oligonucleotide
catacacttcacatgcgtaaacttcgctcc

SEQ ID NO: 332388 - DNA, 30 bp, Artificial Sequence
  Synthetic oligonucleotide
gcggggttcggggttttattgctcggctcc

SEQ ID NO: 332389 - DNA, 30 bp, Artificial Sequence
  Synthetic oligonucleotide
ggcgacgacagtgtgtagaattagggctcc

SEQ ID NO: 332390 - DNA, 31 bp, Artificial Sequence
  Synthetic oligonucleotide
acactttattatgactagatggtatggctcc

SEQ ID NO: 332391 - DNA, 30 bp, Artificial Sequence
  Synthetic oligonucleotide
agtaggataggtctaagaggacgtggctcc

SEQ ID NO: 332392 - DNA, 30 bp, Artificial Sequence
  Synthetic oligonucleotide
ggataatcatctacgggaccccgtggctcc

SEQ ID NO: 332393 - DNA, 30 bp, Artificial Sequence
  Synthetic oligonucleotide
tctacgaatgttgagtgactctgctgctcc

SEQ ID NO: 332394 - DNA, 30 bp, Artificial Sequence
  Synthetic oligonucleotide
aatgcgggcgagctatctgtctgctgctcc

SEQ ID NO: 332395 - DNA, 30 bp, Artificial Sequence
  Synthetic oligonucleotide
gcgcggcggattcactaggcaccgtgctcc

SEQ ID NO: 332396 - DNA, 30 bp, Artificial Sequence
  Synthetic oligonucleotide
caaggcgttccacacaatgagccgtgctcc

SEQ ID NO: 332397 - DNA, 30 bp, Artificial Sequence
  Synthetic oligonucleotide
cgccagaaacggcacgaatcatcgtgctcc

SEQ ID NO: 332398 - DNA, 30 bp, Artificial Sequence
  Synthetic oligonucleotide
gagcaactcgtagggatccgtaggtgctcc

SEQ ID NO: 332399 - DNA, 30 bp, Artificial Sequence
  Synthetic oligonucleotide
tgtgatatttgagtgcggctcaattgctcc

SEQ ID NO: 332400 - DNA, 30 bp, Artificial Sequence
  Synthetic oligonucleotide
cgaatataacctagcttgcggtcaatctcc

SEQ ID NO: 332401 - DNA, 30 bp, Artificial Sequence
  Synthetic oligonucleotide
cataggacctacgaaaggacgcccatctcc

SEQ ID NO: 332402 - DNA, 30 bp, Artificial Sequence
  Synthetic oligonucleotide
ttttcctggttgtggacggtttgcatctcc

SEQ ID NO: 332403 - DNA, 30 bp, Artificial Sequence
  Synthetic oligonucleotide
atatggtcatcccggcgttgtgaactctcc

SEQ ID NO: 332404 - DNA, 30 bp, Artificial Sequence
  Synthetic oligonucleotide
gcgacaagaattattatcggctacctctcc

SEQ ID NO: 332405 - DNA, 30 bp, Artificial Sequence
  Synthetic oligonucleotide
acacaattctgagaatattatcctctctcc

SEQ ID NO: 332406 - DNA, 30 bp, Artificial Sequence
  Synthetic oligonucleotide
agcggttaatgggtctcgcagaaagtctcc

SEQ ID NO: 332407 - DNA, 30 bp, Artificial Sequence
  Synthetic oligonucleotide
taacacccccaaggatttggtttagtctcc

SEQ ID NO: 332408 - DNA, 30 bp, Artificial Sequence
  Synthetic oligonucleotide
tgcgtcacgttaatcatcctccctgtctcc

SEQ ID NO: 332409 - DNA, 30 bp, Artificial Sequence
  Synthetic oligonucleotide
tcgtcagagtagtgcccgaacagtgtctcc

SEQ ID NO: 332410 - DNA, 30 bp, Artificial Sequence
  Synthetic oligonucleotide
ggcagcctactgaggtgagaaatgttctcc

SEQ ID NO: 332411 - DNA, 30 bp, Artificial Sequence
  Synthetic oligonucleotide
catgagagaggggattccacctctttctcc

SEQ ID NO: 332412 - DNA, 31 bp, Artificial Sequence
  Synthetic oligonucleotide
gtgaacagggcaggaaactaaaggtttctcc

SEQ ID NO: 332413 - DNA, 30 bp, Artificial Sequence
  Synthetic oligonucleotide
ggccgttggtcaaaagatggctaaaagtcc

SEQ ID NO: 332414 - DNA, 30 bp, Artificial Sequence
  Synthetic oligonucleotide
ggtcctcatggctcatgcaaaccaaagtcc

SEQ ID NO: 332415 - DNA, 30 bp, Artificial Sequence
  Synthetic oligonucleotide
gaatagtaccacgtagacgacataaagtcc

SEQ ID NO: 332416 - DNA, 30 bp, Artificial Sequence
  Synthetic oligonucleotide
atctccggcaagcccagaaattccaagtcc

SEQ ID NO: 332417 - DNA, 30 bp, Artificial Sequence
  Synthetic oligonucleotide
cccactcacgtccaaacaatttagaagtcc

SEQ ID NO: 332418 - DNA, 30 bp, Artificial Sequence
  Synthetic oligonucleotide
tggcacgcttttactctaggatcgaagtcc

SEQ ID NO: 332419 - DNA, 30 bp, Artificial Sequence
  Synthetic oligonucleotide
gcaaggcgtggttattagacgtcgaagtcc

SEQ ID NO: 332420 - DNA, 30 bp, Artificial Sequence
  Synthetic oligonucleotide
gaagtatgctgcatctaacgcaaacagtcc

SEQ ID NO: 332421 - DNA, 30 bp, Artificial Sequence
  Synthetic oligonucleotide
gtctttaagggaccgaggccgatccagtcc

SEQ ID NO: 332422 - DNA, 30 bp, Artificial Sequence
  Synthetic oligonucleotide
gatcagattaatggggacgcgttccagtcc

SEQ ID NO: 332423 - DNA, 30 bp, Artificial Sequence
  Synthetic oligonucleotide
ccgaatcggggcagatgatataatcagtcc

SEQ ID NO: 332424 - DNA, 30 bp, Artificial Sequence
  Synthetic oligonucleotide
gcaactgttaaatttgcaactcatcagtcc

SEQ ID NO: 332425 - DNA, 30 bp, Artificial Sequence
  Synthetic oligonucleotide
attaagggataccaggacgtgtatcagtcc

SEQ ID NO: 332426 - DNA, 30 bp, Artificial Sequence
  Synthetic oligonucleotide
gaccgggcaatcgcgagaagttttcagtcc

SEQ ID NO: 332427 - DNA, 30 bp, Artificial Sequence
  Synthetic oligonucleotide
cagcgggagcatgttctgtgtcgcgagtcc

SEQ ID NO: 332428 - DNA, 30 bp, Artificial Sequence
  Synthetic oligonucleotide
tgatgaggttaggatgatggagaggagtcc

SEQ ID NO: 332429 - DNA, 30 bp, Artificial Sequence
  Synthetic oligonucleotide
agtcggttagcgctactaagtatggagtcc

SEQ ID NO: 332430 - DNA, 30 bp, Artificial Sequence
  Synthetic oligonucleotide
aagcctgcgagggcagaccttgatgagtcc

SEQ ID NO: 332431 - DNA, 30 bp, Artificial Sequence
  Synthetic oligonucleotide
cagcaatcccctttcgtcagtgtatagtcc

SEQ ID NO: 332432 - DNA, 30 bp, Artificial Sequence
  Synthetic oligonucleotide
acctcctgcggactggcctcttcctagtcc

SEQ ID NO: 332433 - DNA, 30 bp, Artificial Sequence
  Synthetic oligonucleotide
tacagggttgaataagtggatagctagtcc

SEQ ID NO: 332434 - DNA, 30 bp, Artificial Sequence
  Synthetic oligonucleotide
atccggttctcaggtccgctaaagtagtcc

SEQ ID NO: 332435 - DNA, 30 bp, Artificial Sequence
  Synthetic oligonucleotide
tttgccttgttagacagggtggggtagtcc

SEQ ID NO: 332436 - DNA, 30 bp, Artificial Sequence
  Synthetic oligonucleotide
tttcaaagagctacacgaacttggtagtcc

SEQ ID NO: 332437 - DNA, 30 bp, Artificial Sequence
  Synthetic oligonucleotide
tgtggacatgccttacgcatacacacgtcc

SEQ ID NO: 332438 - DNA, 30 bp, Artificial Sequence
  Synthetic oligonucleotide
tccggccaattaaatgggcgtaagacgtcc

SEQ ID NO: 332439 - DNA, 30 bp, Artificial Sequence
  Synthetic oligonucleotide
ggtaagatgtcggtgccgcgtactacgtcc

SEQ ID NO: 332440 - DNA, 30 bp, Artificial Sequence
  Synthetic oligonucleotide
ttgacctcatgatgcgtacgtgctacgtcc

SEQ ID NO: 332441 - DNA, 30 bp, Artificial Sequence
  Synthetic oligonucleotide
aagcaggtacatggtgagacttgaccgtcc

SEQ ID NO: 332442 - DNA, 30 bp, Artificial Sequence
  Synthetic oligonucleotide
cagcgttaggtgttacgcaagttgccgtcc

SEQ ID NO: 332443 - DNA, 30 bp, Artificial Sequence
  Synthetic oligonucleotide
aatgcaacataatcgcttgaggctccgtcc

SEQ ID NO: 332444 - DNA, 30 bp, Artificial Sequence
  Synthetic oligonucleotide
gatcccattagcatgagaagaggagcgtcc

SEQ ID NO: 332445 - DNA, 30 bp, Artificial Sequence
  Synthetic oligonucleotide
tggtactattgtagttggtgatgcgcgtcc

SEQ ID NO: 332446 - DNA, 30 bp, Artificial Sequence
  Synthetic oligonucleotide
aagttaagagacgcggtaccagatgcgtcc

SEQ ID NO: 332447 - DNA, 30 bp, Artificial Sequence
  Synthetic oligonucleotide
gacaaacctggcaaatgctgagttgcgtcc

SEQ ID NO: 332448 - DNA, 30 bp, Artificial Sequence
  Synthetic oligonucleotide
agtaataaccttaatgaatttatatcgtcc

SEQ ID NO: 332449 - DNA, 30 bp, Artificial Sequence
  Synthetic oligonucleotide
cgccgcggacagttaccggacgactcgtcc

SEQ ID NO: 332450 - DNA, 30 bp, Artificial Sequence
  Synthetic oligonucleotide
cgatagaccgcgaaggcttgatactcgtcc

SEQ ID NO: 332451 - DNA, 30 bp, Artificial Sequence
  Synthetic oligonucleotide
cttcaagggtagcggcgatccttctcgtcc

SEQ ID NO: 332452 - DNA, 30 bp, Artificial Sequence
  Synthetic oligonucleotide
ttcacttgtccacctgacatttcgtcgtcc

SEQ ID NO: 332453 - DNA, 30 bp, Artificial Sequence
  Synthetic oligonucleotide
tcctgtccgggcattggcaaacattcgtcc

SEQ ID NO: 332454 - DNA, 29 bp, Artificial Sequence
  Synthetic oligonucleotide
aagagaaggtttgaagaggctcaaggtcc

SEQ ID NO: 332455 - DNA, 30 bp, Artificial Sequence
  Synthetic oligonucleotide
cctcacccaacgctctgcgtgggaaggtcc

SEQ ID NO: 332456 - DNA, 30 bp, Artificial Sequence
  Synthetic oligonucleotide
attttattaggtcctacgaaacacaggtcc

SEQ ID NO: 332457 - DNA, 30 bp, Artificial Sequence
  Synthetic oligonucleotide
aggacttgttgttactttgttgagaggtcc

SEQ ID NO: 332458 - DNA, 30 bp, Artificial Sequence
  Synthetic oligonucleotide
tattaataccttgagtagtatatgaggtcc

SEQ ID NO: 332459 - DNA, 30 bp, Artificial Sequence
  Synthetic oligonucleotide
gcatcgggcaggttacaggtgttgaggtcc

SEQ ID NO: 332460 - DNA, 30 bp, Artificial Sequence
  Synthetic oligonucleotide
atatccgggcaaatgcatcggtctaggtcc

SEQ ID NO: 332461 - DNA, 31 bp, Artificial Sequence
  Synthetic oligonucleotide
ccaaggagtgcagataggtttgggccggtcc

SEQ ID NO: 332462 - DNA, 30 bp, Artificial Sequence
  Synthetic oligonucleotide
ttgtttcggcgttttacgaattgccggtcc

SEQ ID NO: 332463 - DNA, 30 bp, Artificial Sequence
  Synthetic oligonucleotide
tttaactggcctaggcttgctatccggtcc

SEQ ID NO: 332464 - DNA, 30 bp, Artificial Sequence
  Synthetic oligonucleotide
tcccccctcgatgcaagtatctagcggtcc

SEQ ID NO: 332465 - DNA, 30 bp, Artificial Sequence
  Synthetic oligonucleotide
actgtctcgagagtgcctttgttgcggtcc

SEQ ID NO: 332466 - DNA, 30 bp, Artificial Sequence
  Synthetic oligonucleotide
tgtgatatgtatgcttgtacggaggggtcc

SEQ ID NO: 332467 - DNA, 30 bp, Artificial Sequence
  Synthetic oligonucleotide
gcgtactttctagtgaaaggtgatgggtcc

SEQ ID NO: 332468 - DNA, 30 bp, Artificial Sequence
  Synthetic oligonucleotide
gggccccgcgcatcgagtttagctgggtcc

SEQ ID NO: 332469 - DNA, 30 bp, Artificial Sequence
  Synthetic oligonucleotide
accacccgtgtaagcgataatattgggtcc

SEQ ID NO: 332470 - DNA, 30 bp, Artificial Sequence
  Synthetic oligonucleotide
catcacaaggttccttcgtgcaactggtcc

SEQ ID NO: 332471 - DNA, 30 bp, Artificial Sequence
  Synthetic oligonucleotide
tcgctgcggagtacttaccggttctggtcc

SEQ ID NO: 332472 - DNA, 30 bp, Artificial Sequence
  Synthetic oligonucleotide
ttagagggtcagagcccgtccaggtggtcc

SEQ ID NO: 332473 - DNA, 30 bp, Artificial Sequence
  Synthetic oligonucleotide
aaacaaatctgcagttttcggaggtggtcc

SEQ ID NO: 332474 - DNA, 30 bp, Artificial Sequence
  Synthetic oligonucleotide
gcagctgcgtaccggtgggtatgttggtcc

SEQ ID NO: 332475 - DNA, 30 bp, Artificial Sequence
  Synthetic oligonucleotide
cacatgcaattccttggcgctgggatgtcc

SEQ ID NO: 332476 - DNA, 30 bp, Artificial Sequence
  Synthetic oligonucleotide
ctgcttcgtgcgaccaaagaaaatatgtcc

SEQ ID NO: 332477 - DNA, 30 bp, Artificial Sequence
  Synthetic oligonucleotide
gttaggatggtgaatcgttcaccactgtcc

SEQ ID NO: 332478 - DNA, 30 bp, Artificial Sequence
  Synthetic oligonucleotide
aacttcgaaccagaacgccacgctctgtcc

SEQ ID NO: 332479 - DNA, 30 bp, Artificial Sequence
  Synthetic oligonucleotide
gtatctaccggaggataaccaagagtgtcc

SEQ ID NO: 332480 - DNA, 30 bp, Artificial Sequence
  Synthetic oligonucleotide
gaggccagcgaccttgtatattgagtgtcc

SEQ ID NO: 332481 - DNA, 30 bp, Artificial Sequence
  Synthetic oligonucleotide
gaaaattaacgcctagaaagaaaattgtcc

SEQ ID NO: 332482 - DNA, 30 bp, Artificial Sequence
  Synthetic oligonucleotide
attgcatcaggtgctaggttgaaattgtcc

SEQ ID NO: 332483 - DNA, 30 bp, Artificial Sequence
  Synthetic oligonucleotide
gttggcctatagatcgagcagtcattgtcc

SEQ ID NO: 332484 - DNA, 30 bp, Artificial Sequence
  Synthetic oligonucleotide
tattctgtgtggattcaattcgtattgtcc

SEQ ID NO: 332485 - DNA, 30 bp, Artificial Sequence
  Synthetic oligonucleotide
ctcgcgattacgatcgtgactaacttgtcc

SEQ ID NO: 332486 - DNA, 30 bp, Artificial Sequence
  Synthetic oligonucleotide
tacatactctttacccaacaattcttgtcc

SEQ ID NO: 332487 - DNA, 30 bp, Artificial Sequence
  Synthetic oligonucleotide
cgtttctaagtacgatgttgcaggttgtcc

SEQ ID NO: 332488 - DNA, 30 bp, Artificial Sequence
  Synthetic oligonucleotide
agattgctgagctgagccttgctgttgtcc

SEQ ID NO: 332489 - DNA, 30 bp, Artificial Sequence
  Synthetic oligonucleotide
tggtcccgcaaactttgggagcgaaattcc

SEQ ID NO: 332490 - DNA, 30 bp, Artificial Sequence
  Synthetic oligonucleotide
ctttcactgaagtttgacttacccaattcc

SEQ ID NO: 332491 - DNA, 30 bp, Artificial Sequence
  Synthetic oligonucleotide
cttgtacagacgaccgatcatcagaattcc

SEQ ID NO: 332492 - DNA, 30 bp, Artificial Sequence
  Synthetic oligonucleotide
acagaaatctggcggtcttaatagaattcc

SEQ ID NO: 332493 - DNA, 30 bp, Artificial Sequence
  Synthetic oligonucleotide
agacatccatgggaagtttgcgcgaattcc

SEQ ID NO: 332494 - DNA, 30 bp, Artificial Sequence
  Synthetic oligonucleotide
tcaatacatagccatcgtaccgtgaattcc

SEQ ID NO: 332495 - DNA, 30 bp, Artificial Sequence
  Synthetic oligonucleotide
atggcggcttacatcgctgacgaacattcc

SEQ ID NO: 332496 - DNA, 30 bp, Artificial Sequence
  Synthetic oligonucleotide
agatcaaatttgacttggacatgacattcc

SEQ ID NO: 332497 - DNA, 30 bp, Artificial Sequence
  Synthetic oligonucleotide
atagtgcatcaaattctgggctaccattcc

SEQ ID NO: 332498 - DNA, 30 bp, Artificial Sequence
  Synthetic oligonucleotide
tctacatagagtagcattgagccccattcc

SEQ ID NO: 332499 - DNA, 30 bp, Artificial Sequence
  Synthetic oligonucleotide
ccccagccccagcaatttagcccagattcc

SEQ ID NO: 332500 - DNA, 30 bp, Artificial Sequence
  Synthetic oligonucleotide
cgacttcttgcgctaaatcctccagattcc

SEQ ID NO: 332501 - DNA, 30 bp, Artificial Sequence
  Synthetic oligonucleotide
ttgtggctgggtggtggcgggggagattcc

SEQ ID NO: 332502 - DNA, 30 bp, Artificial Sequence
  Synthetic oligonucleotide
cttacacacacgtccagttagctagattcc

SEQ ID NO: 332503 - DNA, 30 bp, Artificial Sequence
  Synthetic oligonucleotide
gccatcgtatgtttatcaaagtcggattcc

SEQ ID NO: 332504 - DNA, 30 bp, Artificial Sequence
  Synthetic oligonucleotide
ttgctcgggtttacatactacagatattcc

SEQ ID NO: 332505 - DNA, 30 bp, Artificial Sequence
  Synthetic oligonucleotide
gctggtaacgtgtgtatattgctatattcc

SEQ ID NO: 332506 - DNA, 30 bp, Artificial Sequence
  Synthetic oligonucleotide
tagggtcattaagggcggctagtatattcc

SEQ ID NO: 332507 - DNA, 30 bp, Artificial Sequence
  Synthetic oligonucleotide
gctagaggcagctgccataggaagtattcc

SEQ ID NO: 332508 - DNA, 30 bp, Artificial Sequence
  Synthetic oligonucleotide
tgttatagaatttttcgagaacagtattcc

SEQ ID NO: 332509 - DNA, 30 bp, Artificial Sequence
  Synthetic oligonucleotide
tggggggggtcgagggtccatcagtattcc

SEQ ID NO: 332510 - DNA, 30 bp, Artificial Sequence
  Synthetic oligonucleotide
gaaatgctcctttcgtacgttgggtattcc

SEQ ID NO: 332511 - DNA, 30 bp, Artificial Sequence
  Synthetic oligonucleotide
cccgtacgctagaagatcacgcacacttcc

SEQ ID NO: 332512 - DNA, 30 bp, Artificial Sequence
  Synthetic oligonucleotide
actagtataatcgaaaggtccggcacttcc

SEQ ID NO: 332513 - DNA, 30 bp, Artificial Sequence
  Synthetic oligonucleotide
ctacggagggcatcgcttggcaggacttcc

SEQ ID NO: 332514 - DNA, 30 bp, Artificial Sequence
  Synthetic oligonucleotide
tctgaatagagaggcgagtagagtacttcc

SEQ ID NO: 332515 - DNA, 30 bp, Artificial Sequence
  Synthetic oligonucleotide
ggccacggtcttcacgtctacgcaccttcc

SEQ ID NO: 332516 - DNA, 30 bp, Artificial Sequence
  Synthetic oligonucleotide
tgcaccacgtaatcagtcaaggatccttcc

SEQ ID NO: 332517 - DNA, 30 bp, Artificial Sequence
  Synthetic oligonucleotide
gtaaggagacgaatggctcaggctccttcc

SEQ ID NO: 332518 - DNA, 30 bp, Artificial Sequence
  Synthetic oligonucleotide
acatattgtagcactaatttacgtccttcc

SEQ ID NO: 332519 - DNA, 30 bp, Artificial Sequence
  Synthetic oligonucleotide
gagaacggcagaggcgagagtttagcttcc

SEQ ID NO: 332520 - DNA, 30 bp, Artificial Sequence
  Synthetic oligonucleotide
aatgattaaaaagaaactggaagggcttcc

SEQ ID NO: 332521 - DNA, 30 bp, Artificial Sequence
  Synthetic oligonucleotide
gggttcggatgttcgggatattgggcttcc

SEQ ID NO: 332522 - DNA, 30 bp, Artificial Sequence
  Synthetic oligonucleotide
aaaagtagagttggagagttatggtcttcc

SEQ ID NO: 332523 - DNA, 30 bp, Artificial Sequence
  Synthetic oligonucleotide
tcaccttagtgagtatctgatttgtcttcc

SEQ ID NO: 332524 - DNA, 30 bp, Artificial Sequence
  Synthetic oligonucleotide
gtgtttagggtttaatttacacgttcttcc

SEQ ID NO: 332525 - DNA, 30 bp, Artificial Sequence
  Synthetic oligonucleotide
gcaagtgatgaatgtataacgtgttcttcc

SEQ ID NO: 332526 - DNA, 30 bp, Artificial Sequence
  Synthetic oligonucleotide
atccaagatgagattagacagggcagttcc

SEQ ID NO: 332527 - DNA, 30 bp, Artificial Sequence
  Synthetic oligonucleotide
aatgattgagggcagatgaactgcagttcc

SEQ ID NO: 332528 - DNA, 30 bp, Artificial Sequence
  Synthetic oligonucleotide
taaagagctgagttcacgcaatatagttcc

SEQ ID NO: 332529 - DNA, 30 bp, Artificial Sequence
  Synthetic oligonucleotide
gtgtgcgtgtcggacttcatcattagttcc

SEQ ID NO: 332530 - DNA, 30 bp, Artificial Sequence
  Synthetic oligonucleotide
ccggaacccacttgtcatataaaccgttcc

SEQ ID NO: 332531 - DNA, 30 bp, Artificial Sequence
  Synthetic oligonucleotide
ttgaccgcgactacgtctcattcccgttcc

SEQ ID NO: 332532 - DNA, 30 bp, Artificial Sequence
  Synthetic oligonucleotide
ttaaggcaagaaactcctggtggccgttcc

SEQ ID NO: 332533 - DNA, 30 bp, Artificial Sequence
  Synthetic oligonucleotide
agggtagtactcctgttagattcaggttcc

SEQ ID NO: 332534 - DNA, 30 bp, Artificial Sequence
  Synthetic oligonucleotide
agtggcctctcgaccagcccattaggttcc

SEQ ID NO: 332535 - DNA, 30 bp, Artificial Sequence
  Synthetic oligonucleotide
tttaaccccgcgtggaaagacctcggttcc

SEQ ID NO: 332536 - DNA, 30 bp, Artificial Sequence
  Synthetic oligonucleotide
cactactcaataaaactggaacagggttcc

SEQ ID NO: 332537 - DNA, 30 bp, Artificial Sequence
  Synthetic oligonucleotide
agagcgagaggtggcatgtatttgggttcc

SEQ ID NO: 332538 - DNA, 30 bp, Artificial Sequence
  Synthetic oligonucleotide
gatagtgggcgttggcgatgtattggttcc

SEQ ID NO: 332539 - DNA, 30 bp, Artificial Sequence
  Synthetic oligonucleotide
acttaagtcaatataaattattttggttcc

SEQ ID NO: 332540 - DNA, 30 bp, Artificial Sequence
  Synthetic oligonucleotide
ttaactatattcggatgatgttgatgttcc

SEQ ID NO: 332541 - DNA, 30 bp, Artificial Sequence
  Synthetic oligonucleotide
gtatcaatggcgccctaatgcctttgttcc

SEQ ID NO: 332542 - DNA, 30 bp, Artificial Sequence
  Synthetic oligonucleotide
gacaagcttgttttttctcggctaatttcc

SEQ ID NO: 332543 - DNA, 30 bp, Artificial Sequence
  Synthetic oligonucleotide
gatgcattcacagtaaacttctccatttcc

SEQ ID NO: 332544 - DNA, 30 bp, Artificial Sequence
  Synthetic oligonucleotide
cccgggggtaccaccatgtttgagatttcc

SEQ ID NO: 332545 - DNA, 30 bp, Artificial Sequence
  Synthetic oligonucleotide
accgcgcgggagtgtttataggggatttcc

SEQ ID NO: 332546 - DNA, 30 bp, Artificial Sequence
  Synthetic oligonucleotide
atgtgtaagtgagggggtatcactatttcc

SEQ ID NO: 332547 - DNA, 30 bp, Artificial Sequence
  Synthetic oligonucleotide
acaccgccagccagcttgggaagactttcc

SEQ ID NO: 332548 - DNA, 30 bp, Artificial Sequence
  Synthetic oligonucleotide
atgctccgagagtcatggacgactctttcc

SEQ ID NO: 332549 - DNA, 30 bp, Artificial Sequence
  Synthetic oligonucleotide
ccgtgaagtgtgggccgagtgggtctttcc

SEQ ID NO: 332550 - DNA, 30 bp, Artificial Sequence
  Synthetic oligonucleotide
cgcgcgatggtactccctataagagtttcc

SEQ ID NO: 332551 - DNA, 30 bp, Artificial Sequence
  Synthetic oligonucleotide
atgtacaacgggttgagaaggaccgtttcc

SEQ ID NO: 332552 - DNA, 30 bp, Artificial Sequence
  Synthetic oligonucleotide
aaaatggttgatagaaacagccccgtttcc

SEQ ID NO: 332553 - DNA, 30 bp, Artificial Sequence
  Synthetic oligonucleotide
tgcacatgggaacaggctgtgtcggtttcc

SEQ ID NO: 332554 - DNA, 30 bp, Artificial Sequence
  Synthetic oligonucleotide
cgatcctgctcctggaattcatatgtttcc

SEQ ID NO: 332555 - DNA, 30 bp, Artificial Sequence
  Synthetic oligonucleotide
gtccacataatagttatttgtactgtttcc

SEQ ID NO: 332556 - DNA, 28 bp, Artificial Sequence
  Synthetic oligonucleotide
gaaaggcgaaaagatagaccgtgtttcc

SEQ ID NO: 332557 - DNA, 30 bp, Artificial Sequence
  Synthetic oligonucleotide
tagttgtgggtgagctatcctgacttttcc

SEQ ID NO: 332558 - DNA, 30 bp, Artificial Sequence
  Synthetic oligonucleotide
gctcggagtcacgatgggcgttacttttcc

SEQ ID NO: 332559 - DNA, 30 bp, Artificial Sequence
  Synthetic oligonucleotide
tggacctgcgacacgcgatggatcttttcc

SEQ ID NO: 332560 - DNA, 30 bp, Artificial Sequence
  Synthetic oligonucleotide
ttcttacagaaacagtactgttcgttttcc

SEQ ID NO: 332561 - DNA, 30 bp, Artificial Sequence
  Synthetic oligonucleotide
agcgtcgaaaaaagttgagttggtttttcc

SEQ ID NO: 332562 - DNA, 30 bp, Artificial Sequence
  Synthetic oligonucleotide
gaggtcacaaacaaatgccggattttttcc

SEQ ID NO: 332563 - DNA, 30 bp, Artificial Sequence
  Synthetic oligonucleotide
tttcatcaactgctaagtaacggaaaaagc

SEQ ID NO: 332564 - DNA, 30 bp, Artificial Sequence
  Synthetic oligonucleotide
tacttcccctacatcaattttgggaaaagc

SEQ ID NO: 332565 - DNA, 30 bp, Artificial Sequence
  Synthetic oligonucleotide
caggaaatgtacgagtattataataaaagc

SEQ ID NO: 332566 - DNA, 30 bp, Artificial Sequence
  Synthetic oligonucleotide
ggcgtaacaagttcgggttatactaaaagc

SEQ ID NO: 332567 - DNA, 30 bp, Artificial Sequence
  Synthetic oligonucleotide
attagaaacttatcccttaacaaacaaagc

SEQ ID NO: 332568 - DNA, 31 bp, Artificial Sequence
  Synthetic oligonucleotide
gacatttttgttaacggggaatcaacaaagc

SEQ ID NO: 332569 - DNA, 30 bp, Artificial Sequence
  Synthetic oligonucleotide
gcgctctcgttagatagtatcgaacaaagc

SEQ ID NO: 332570 - DNA, 30 bp, Artificial Sequence
  Synthetic oligonucleotide
tacaaatccgtggtcctgttcatgcaaagc

SEQ ID NO: 332571 - DNA, 30 bp, Artificial Sequence
  Synthetic oligonucleotide
caatgacggcacaacggttttattcaaagc

SEQ ID NO: 332572 - DNA, 30 bp, Artificial Sequence
  Synthetic oligonucleotide
tagtatgtatctgggggaatgtgagaaagc

SEQ ID NO: 332573 - DNA, 30 bp, Artificial Sequence
  Synthetic oligonucleotide
gcaatcacttaacggtaatatgtataaagc

SEQ ID NO: 332574 - DNA, 30 bp, Artificial Sequence
  Synthetic oligonucleotide
tcggcgatacgatctgagcaggtgtaaagc

SEQ ID NO: 332575 - DNA, 30 bp, Artificial Sequence
  Synthetic oligonucleotide
agagtgcctcgggcacctttattgtaaagc

SEQ ID NO: 332576 - DNA, 30 bp, Artificial Sequence
  Synthetic oligonucleotide
atggtatacgcttcaactatacattaaagc

SEQ ID NO: 332577 - DNA, 30 bp, Artificial Sequence
  Synthetic oligonucleotide
cggatgtattcacagcgccgttcttaaagc

SEQ ID NO: 332578 - DNA, 30 bp, Artificial Sequence
  Synthetic oligonucleotide
ttacataatgcaagctttgcgcgttaaagc

SEQ ID NO: 332579 - DNA, 30 bp, Artificial Sequence
  Synthetic oligonucleotide
tgcatcccgcatgatagtgcgtgaacaagc

SEQ ID NO: 332580 - DNA, 30 bp, Artificial Sequence
  Synthetic oligonucleotide
gaatagattattgggcacatggccacaagc

SEQ ID NO: 332581 - DNA, 30 bp, Artificial Sequence
  Synthetic oligonucleotide
gccccttataaaacgcctgttgccacaagc

SEQ ID NO: 332582 - DNA, 30 bp, Artificial Sequence
  Synthetic oligonucleotide
cactttctctagccgagggcgcccccaagc

SEQ ID NO: 332583 - DNA, 30 bp, Artificial Sequence
  Synthetic oligonucleotide
ggaaccgcactgcagccagaatgcccaagc

SEQ ID NO: 332584 - DNA, 30 bp, Artificial Sequence
  Synthetic oligonucleotide
ggctttttgtacactgcgttactgccaagc

SEQ ID NO: 332585 - DNA, 30 bp, Artificial Sequence
  Synthetic oligonucleotide
ctaatatcctggtattgagaaaatccaagc

SEQ ID NO: 332586 - DNA, 30 bp, Artificial Sequence
  Synthetic oligonucleotide
tatcttgacacaccaaagccgatagcaagc

SEQ ID NO: 332587 - DNA, 30 bp, Artificial Sequence
  Synthetic oligonucleotide
gacacgggagggtatgggaggttagcaagc

SEQ ID NO: 332588 - DNA, 30 bp, Artificial Sequence
  Synthetic oligonucleotide
ccttccatctggtaacgtgtcttcgcaagc

SEQ ID NO: 332589 - DNA, 30 bp, Artificial Sequence
  Synthetic oligonucleotide
taattgttaatacaccaggacaatgcaagc

SEQ ID NO: 332590 - DNA, 30 bp, Artificial Sequence
  Synthetic oligonucleotide
gagtacgtggcaacttacataggatcaagc

SEQ ID NO: 332591 - DNA, 30 bp, Artificial Sequence
  Synthetic oligonucleotide
tggactctgtgtgcgtgatgatgatcaagc

SEQ ID NO: 332592 - DNA, 30 bp, Artificial Sequence
  Synthetic oligonucleotide
cgaagttagcttatccattgttgatcaagc

SEQ ID NO: 332593 - DNA, 30 bp, Artificial Sequence
  Synthetic oligonucleotide
cacgagcacatataggcgcctgactcaagc

SEQ ID NO: 332594 - DNA, 30 bp, Artificial Sequence
  Synthetic oligonucleotide
agcaccacccaggcaccgtccctcagaagc

SEQ ID NO: 332595 - DNA, 30 bp, Artificial Sequence
  Synthetic oligonucleotide
gccaaattggttgctctcgataagagaagc

SEQ ID NO: 332596 - DNA, 30 bp, Artificial Sequence
  Synthetic oligonucleotide
acatcgggctgataatcgctaccgagaagc

SEQ ID NO: 332597 - DNA, 30 bp, Artificial Sequence
  Synthetic oligonucleotide
ctgtccccaatttgcaatgattggagaagc

SEQ ID NO: 332598 - DNA, 30 bp, Artificial Sequence
  Synthetic oligonucleotide
tttgagatgggggtatatacgatgagaagc

SEQ ID NO: 332599 - DNA, 30 bp, Artificial Sequence
  Synthetic oligonucleotide
gaatgatggtttacatatcggtgtagaagc

SEQ ID NO: 332600 - DNA, 30 bp, Artificial Sequence
  Synthetic oligonucleotide
attatactaatggtgctattggttagaagc

SEQ ID NO: 332601 - DNA, 30 bp, Artificial Sequence
  Synthetic oligonucleotide
tcagaccgccagacgagtgtataacgaagc

SEQ ID NO: 332602 - DNA, 30 bp, Artificial Sequence
  Synthetic oligonucleotide
ccgtgaccttcaacagtctatacacgaagc

SEQ ID NO: 332603 - DNA, 30 bp, Artificial Sequence
  Synthetic oligonucleotide
ctcaggaatgatgtttagtgtctacgaagc

SEQ ID NO: 332604 - DNA, 30 bp, Artificial Sequence
  Synthetic oligonucleotide
ccataggattggcattcgtatgtacgaagc

SEQ ID NO: 332605 - DNA, 30 bp, Artificial Sequence
  Synthetic oligonucleotide
gtgtgagtacgtagcaagtgtgtacgaagc

SEQ ID NO: 332606 - DNA, 30 bp, Artificial Sequence
  Synthetic oligonucleotide
gggtaggaaggtgctgggtaagaccgaagc

SEQ ID NO: 332607 - DNA, 30 bp, Artificial Sequence
  Synthetic oligonucleotide
gctttgatcacgaggtctctgaagcgaagc

SEQ ID NO: 332608 - DNA, 30 bp, Artificial Sequence
  Synthetic oligonucleotide
atacacccgtattggacgttaaggcgaagc

SEQ ID NO: 332609 - DNA, 30 bp, Artificial Sequence
  Synthetic oligonucleotide
acggtcgtgtgccgacaaaagtggcgaagc

SEQ ID NO: 332610 - DNA, 30 bp, Artificial Sequence
  Synthetic oligonucleotide
tatttagggctcgagcgatttctaggaagc

SEQ ID NO: 332611 - DNA, 30 bp, Artificial Sequence
  Synthetic oligonucleotide
ttccgtaagggtgcggtgagcgtcggaagc

SEQ ID NO: 332612 - DNA, 30 bp, Artificial Sequence
  Synthetic oligonucleotide
ttatatgtaagtatgataacatcgggaagc

SEQ ID NO: 332613 - DNA, 30 bp, Artificial Sequence
  Synthetic oligonucleotide
gaagtaccgctgtggatagttcctggaagc

SEQ ID NO: 332614 - DNA, 30 bp, Artificial Sequence
  Synthetic oligonucleotide
gcggtctaaaacaaactatacgttggaagc

SEQ ID NO: 332615 - DNA, 30 bp, Artificial Sequence
  Synthetic oligonucleotide
taggtcaagaccctgagggtcgttggaagc

SEQ ID NO: 332616 - DNA, 30 bp, Artificial Sequence
  Synthetic oligonucleotide
agttgcggatatttaacgacgcaatgaagc

SEQ ID NO: 332617 - DNA, 30 bp, Artificial Sequence
  Synthetic oligonucleotide
tcagcctaataatatttccaatgatgaagc

SEQ ID NO: 332618 - DNA, 30 bp, Artificial Sequence
  Synthetic oligonucleotide
gaatagtatagtcaaatcagtagctgaagc

SEQ ID NO: 332619 - DNA, 30 bp, Artificial Sequence
  Synthetic oligonucleotide
ttcaaggtagttcctagtcaagtctgaagc

SEQ ID NO: 332620 - DNA, 30 bp, Artificial Sequence
  Synthetic oligonucleotide
accaaaatgctccccgaggagtattgaagc

SEQ ID NO: 332621 - DNA, 30 bp, Artificial Sequence
  Synthetic oligonucleotide
gatcaggctttcaaagatctaccttgaagc

SEQ ID NO: 332622 - DNA, 30 bp, Artificial Sequence
  Synthetic oligonucleotide
gccggtaggctcccgtgccatgcttgaagc

SEQ ID NO: 332623 - DNA, 30 bp, Artificial Sequence
  Synthetic oligonucleotide
gttgataccagtctgtgtcatgaaataagc

SEQ ID NO: 332624 - DNA, 30 bp, Artificial Sequence
  Synthetic oligonucleotide
ttggatgggctaagcgctacggtaataagc

SEQ ID NO: 332625 - DNA, 30 bp, Artificial Sequence
  Synthetic oligonucleotide
cagtttgagagttttagtgagagcataagc

SEQ ID NO: 332626 - DNA, 30 bp, Artificial Sequence
  Synthetic oligonucleotide
tgcgaatgtaacttcgccggggtcataagc

SEQ ID NO: 332627 - DNA, 30 bp, Artificial Sequence
  Synthetic oligonucleotide
actaaagttttataagccaggaggataagc

SEQ ID NO: 332628 - DNA, 30 bp, Artificial Sequence
  Synthetic oligonucleotide
aattgctgttccgtatcgtaacggataagc

SEQ ID NO: 332629 - DNA, 30 bp, Artificial Sequence
  Synthetic oligonucleotide
tgggcgattcctttttccctagacctaagc

SEQ ID NO: 332630 - DNA, 30 bp, Artificial Sequence
  Synthetic oligonucleotide
acatatcggtggcagcggctacagctaagc

SEQ ID NO: 332631 - DNA, 30 bp, Artificial Sequence
  Synthetic oligonucleotide
aattccgaggaccgttataaagtgctaagc

SEQ ID NO: 332632 - DNA, 30 bp, Artificial Sequence
  Synthetic oligonucleotide
gcatagcatgtttctggtccgacagtaagc

SEQ ID NO: 332633 - DNA, 30 bp, Artificial Sequence
  Synthetic oligonucleotide
atggcttcagacgtgggtagcatcgtaagc

SEQ ID NO: 332634 - DNA, 30 bp, Artificial Sequence
  Synthetic oligonucleotide
ataatgtaccaaagtttgcaaaaggtaagc

SEQ ID NO: 332635 - DNA, 30 bp, Artificial Sequence
  Synthetic oligonucleotide
caaatttgctgatatgcgagatatgtaagc

SEQ ID NO: 332636 - DNA, 30 bp, Artificial Sequence
  Synthetic oligonucleotide
gagtactgcgtgcaccagtactgtgtaagc

SEQ ID NO: 332637 - DNA, 30 bp, Artificial Sequence
  Synthetic oligonucleotide
tttgaccaactaggtcgtaacattgtaagc

SEQ ID NO: 332638 - DNA, 30 bp, Artificial Sequence
  Synthetic oligonucleotide
gaagcagtctaactaatatggaaattaagc

SEQ ID NO: 332639 - DNA, 30 bp, Artificial Sequence
  Synthetic oligonucleotide
tggggcacgacctttgttcaatacttaagc

SEQ ID NO: 332640 - DNA, 30 bp, Artificial Sequence
  Synthetic oligonucleotide
ataaccgctccagtatggtacggcttaagc

SEQ ID NO: 332641 - DNA, 30 bp, Artificial Sequence
  Synthetic oligonucleotide
tgaactgtcataaataacatgggcttaagc

SEQ ID NO: 332642 - DNA, 30 bp, Artificial Sequence
  Synthetic oligonucleotide
ccaggagctagcaactcatacagaaacagc

SEQ ID NO: 332643 - DNA, 30 bp, Artificial Sequence
  Synthetic oligonucleotide
tagtgagcgggcgcatgggaggtcaacagc

SEQ ID NO: 332644 - DNA, 30 bp, Artificial Sequence
  Synthetic oligonucleotide
tgcggcgcagacaacggcgtccgtaacagc

SEQ ID NO: 332645 - DNA, 30 bp, Artificial Sequence
  Synthetic oligonucleotide
tggtgtacgaggacgtcaatggaacacagc

SEQ ID NO: 332646 - DNA, 30 bp, Artificial Sequence
  Synthetic oligonucleotide
ccttgcagttccttattgttatcacacagc

SEQ ID NO: 332647 - DNA, 30 bp, Artificial Sequence
  Synthetic oligonucleotide
tggtctcagcatgtcggaaatttacacagc

SEQ ID NO: 332648 - DNA, 30 bp, Artificial Sequence
  Synthetic oligonucleotide
gcgaagtggctccacatgtgctcccacagc

SEQ ID NO: 332649 - DNA, 30 bp, Artificial Sequence
  Synthetic oligonucleotide
agtaatttgtttttgtgagagtgccacagc

SEQ ID NO: 332650 - DNA, 30 bp, Artificial Sequence
  Synthetic oligonucleotide
acataggcgacatcgcgggcccagcacagc

SEQ ID NO: 332651 - DNA, 30 bp, Artificial Sequence
  Synthetic oligonucleotide
tgttaagcgattcgcctatgggggcacagc

SEQ ID NO: 332652 - DNA, 29 bp, Artificial Sequence
  Synthetic oligonucleotide
ctcccttcacaccggtaggacttcacagc

SEQ ID NO: 332653 - DNA, 30 bp, Artificial Sequence
  Synthetic oligonucleotide
tgtgtacatatagtaaaatggctagacagc

SEQ ID NO: 332654 - DNA, 30 bp, Artificial Sequence
  Synthetic oligonucleotide
tgctttctgtgacatatctgtagcgacagc

SEQ ID NO: 332655 - DNA, 30 bp, Artificial Sequence
  Synthetic oligonucleotide
cgttgagtggttaggggctttctcgacagc

SEQ ID NO: 332656 - DNA, 30 bp, Artificial Sequence
  Synthetic oligonucleotide
tactagcagttcaactgactagcggacagc

SEQ ID NO: 332657 - DNA, 30 bp, Artificial Sequence
  Synthetic oligonucleotide
ctgacgcaggaaccatcgtgctcggacagc

SEQ ID NO: 332658 - DNA, 30 bp, Artificial Sequence
  Synthetic oligonucleotide
agagggtgtaatgcggctacttgtgacagc

SEQ ID NO: 332659 - DNA, 30 bp, Artificial Sequence
  Synthetic oligonucleotide
taggaactgatcatcaggttcagctacagc

SEQ ID NO: 332660 - DNA, 30 bp, Artificial Sequence
  Synthetic oligonucleotide
cgacctttcactctaccagcactctacagc

SEQ ID NO: 332661 - DNA, 30 bp, Artificial Sequence
  Synthetic oligonucleotide
cccttatggttgcataaggaggtctacagc

SEQ ID NO: 332662 - DNA, 30 bp, Artificial Sequence
  Synthetic oligonucleotide
accgggtgccgatttgcacacacgtacagc

SEQ ID NO: 332663 - DNA, 30 bp, Artificial Sequence
  Synthetic oligonucleotide
gccccggaccccgaagggaagacgtacagc

SEQ ID NO: 332664 - DNA, 30 bp, Artificial Sequence
  Synthetic oligonucleotide
actcgtaggttcattgccgcacccaccagc

SEQ ID NO: 332665 - DNA, 25 bp, Artificial Sequence
  Synthetic oligonucleotide
gctagcccgctgcgaagcgaccagc

SEQ ID NO: 332666 - DNA, 30 bp, Artificial Sequence
  Synthetic oligonucleotide
ccccacccataataagatccgcggaccagc

SEQ ID NO: 332667 - DNA, 30 bp, Artificial Sequence
  Synthetic oligonucleotide
aacagttagatttggtggggcgaacccagc

SEQ ID NO: 332668 - DNA, 30 bp, Artificial Sequence
  Synthetic oligonucleotide
atccgatgccacgtcatgtactcacccagc

SEQ ID NO: 332669 - DNA, 30 bp, Artificial Sequence
  Synthetic oligonucleotide
gttgattactacggatcctggaaccccagc

SEQ ID NO: 332670 - DNA, 30 bp, Artificial Sequence
  Synthetic oligonucleotide
acaggtttgtacgtaggcaaggggcccagc

SEQ ID NO: 332671 - DNA, 30 bp, Artificial Sequence
  Synthetic oligonucleotide
tcttacttcgtggtgcctttcctgcccagc

SEQ ID NO: 332672 - DNA, 30 bp, Artificial Sequence
  Synthetic oligonucleotide
cgcaggtggagcgttatggttcgtcccagc

SEQ ID NO: 332673 - DNA, 30 bp, Artificial Sequence
  Synthetic oligonucleotide
cccagcacgaggcatcctcgggttcccagc

SEQ ID NO: 332674 - DNA, 30 bp, Artificial Sequence
  Synthetic oligonucleotide
ctgttacacgaagagtagtaaccagccagc

SEQ ID NO: 332675 - DNA, 30 bp, Artificial Sequence
  Synthetic oligonucleotide
ttagcctgctagtagcacgtctaggccagc

SEQ ID NO: 332676 - DNA, 30 bp, Artificial Sequence
  Synthetic oligonucleotide
cagacgttgcactatgaagcaacggccagc

SEQ ID NO: 332677 - DNA, 30 bp, Artificial Sequence
  Synthetic oligonucleotide
tcagctcaacaaaagggtttggctgccagc

SEQ ID NO: 332678 - DNA, 30 bp, Artificial Sequence
  Synthetic oligonucleotide
ttcacccccggtccgtggatcggtgccagc

SEQ ID NO: 332679 - DNA, 30 bp, Artificial Sequence
  Synthetic oligonucleotide
ggctttttataaagtcatacagtatccagc

SEQ ID NO: 332680 - DNA, 30 bp, Artificial Sequence
  Synthetic oligonucleotide
aaaccttacaaccagtatgctcgctccagc

SEQ ID NO: 332681 - DNA, 30 bp, Artificial Sequence
  Synthetic oligonucleotide
atacgttggacaggattttggtggtccagc

SEQ ID NO: 332682 - DNA, 30 bp, Artificial Sequence
  Synthetic oligonucleotide
cagatctgatacagtccacatatgtccagc

SEQ ID NO: 332683 - DNA, 30 bp, Artificial Sequence
  Synthetic oligonucleotide
gcgagcgtttgcgttccttgctattccagc

SEQ ID NO: 332684 - DNA, 30 bp, Artificial Sequence
  Synthetic oligonucleotide
gtgataacgagcgatgcagtaatttccagc

SEQ ID NO: 332685 - DNA, 30 bp, Artificial Sequence
  Synthetic oligonucleotide
tttctgaatgtctttacgcaaaccagcagc

SEQ ID NO: 332686 - DNA, 30 bp, Artificial Sequence
  Synthetic oligonucleotide
agatttttaaagctcgggaggagcagcagc

SEQ ID NO: 332687 - DNA, 30 bp, Artificial Sequence
  Synthetic oligonucleotide
tgccagctcgaaggcactacgctgagcagc

SEQ ID NO: 332688 - DNA, 30 bp, Artificial Sequence
  Synthetic oligonucleotide
taatcaaaaactccttggcaaggtagcagc

SEQ ID NO: 332689 - DNA, 30 bp, Artificial Sequence
  Synthetic oligonucleotide
ctagacgtcagatacaaacgcacccgcagc

SEQ ID NO: 332690 - DNA, 30 bp, Artificial Sequence
  Synthetic oligonucleotide
ctcttaagctgttaacctggggcgcgcagc

SEQ ID NO: 332691 - DNA, 30 bp, Artificial Sequence
  Synthetic oligonucleotide
aaaggcggcgcggcaaatcatgacggcagc

SEQ ID NO: 332692 - DNA, 30 bp, Artificial Sequence
  Synthetic oligonucleotide
aagaaggggtcccgccgagatatcggcagc

SEQ ID NO: 332693 - DNA, 30 bp, Artificial Sequence
  Synthetic oligonucleotide
aggtattttaatagccgcgtgctcggcagc

SEQ ID NO: 332694 - DNA, 30 bp, Artificial Sequence
  Synthetic oligonucleotide
tctcctgaagtagttgccgatgtgggcagc

SEQ ID NO: 332695 - DNA, 30 bp, Artificial Sequence
  Synthetic oligonucleotide
gaagcgacagatgtggacccaaatggcagc

SEQ ID NO: 332696 - DNA, 30 bp, Artificial Sequence
  Synthetic oligonucleotide
cttgcggagttcgcaattgctagtggcagc

SEQ ID NO: 332697 - DNA, 30 bp, Artificial Sequence
  Synthetic oligonucleotide
gtaacgagaaagtcagtttacacgtgcagc

SEQ ID NO: 332698 - DNA, 30 bp, Artificial Sequence
  Synthetic oligonucleotide
gggaaccagtctgattttcagtaaatcagc

SEQ ID NO: 332699 - DNA, 30 bp, Artificial Sequence
  Synthetic oligonucleotide
gcccaaagtcgatgggacagctgaatcagc

SEQ ID NO: 332700 - DNA, 30 bp, Artificial Sequence
  Synthetic oligonucleotide
accatagtggtctgatcaggcatcatcagc

SEQ ID NO: 332701 - DNA, 30 bp, Artificial Sequence
  Synthetic oligonucleotide
ccacatcatcgatcaagtgaatggatcagc

SEQ ID NO: 332702 - DNA, 30 bp, Artificial Sequence
  Synthetic oligonucleotide
gaaaaggccttagggcatatctggatcagc

SEQ ID NO: 332703 - DNA, 30 bp, Artificial Sequence
  Synthetic oligonucleotide
ctgaactatgtttatgtttagtggatcagc

SEQ ID NO: 332704 - DNA, 30 bp, Artificial Sequence
  Synthetic oligonucleotide
aacagctgaactccggcacttactatcagc

SEQ ID NO: 332705 - DNA, 30 bp, Artificial Sequence
  Synthetic oligonucleotide
tctgagaagcttaggggtgcagttatcagc

SEQ ID NO: 332706 - DNA, 30 bp, Artificial Sequence
  Synthetic oligonucleotide
agagagtacttccgtttatctgttatcagc

SEQ ID NO: 332707 - DNA, 30 bp, Artificial Sequence
  Synthetic oligonucleotide
agcgtacacccctttcaggtgatgctcagc

SEQ ID NO: 332708 - DNA, 29 bp, Artificial Sequence
  Synthetic oligonucleotide
aaattaggataatgatttcaattctcagc

SEQ ID NO: 332709 - DNA, 30 bp, Artificial Sequence
  Synthetic oligonucleotide
ataattgctgttgtgccattttacgtcagc

SEQ ID NO: 332710 - DNA, 30 bp, Artificial Sequence
  Synthetic oligonucleotide
gaatcagtcaaaatgaaatggtccgtcagc

SEQ ID NO: 332711 - DNA, 30 bp, Artificial Sequence
  Synthetic oligonucleotide
agcgaagctttcatatttatggaggtcagc

SEQ ID NO: 332712 - DNA, 30 bp, Artificial Sequence
  Synthetic oligonucleotide
ggttaaaaagtcacacgacttaaattcagc

SEQ ID NO: 332713 - DNA, 30 bp, Artificial Sequence
  Synthetic oligonucleotide
aatttcacaggaccaaaccttcaattcagc

SEQ ID NO: 332714 - DNA, 30 bp, Artificial Sequence
  Synthetic oligonucleotide
ttgttcgactacggcaatctccgcttcagc

SEQ ID NO: 332715 - DNA, 30 bp, Artificial Sequence
  Synthetic oligonucleotide
ccaacgtcggacgttgagggctcgttcagc

SEQ ID NO: 332716 - DNA, 30 bp, Artificial Sequence
  Synthetic oligonucleotide
aagcatggcagaaataactgaaggttcagc

SEQ ID NO: 332717 - DNA, 30 bp, Artificial Sequence
  Synthetic oligonucleotide
ggatcataccgcctatgagaattgttcagc

SEQ ID NO: 332718 - DNA, 30 bp, Artificial Sequence
  Synthetic oligonucleotide
ttctggaagtaagtatagagatctttcagc

SEQ ID NO: 332719 - DNA, 30 bp, Artificial Sequence
  Synthetic oligonucleotide
aaaggtggatacccgccagaaagtttcagc

SEQ ID NO: 332720 - DNA, 30 bp, Artificial Sequence
  Synthetic oligonucleotide
aagacaaggcacggaataaagtgtttcagc

SEQ ID NO: 332721 - DNA, 30 bp, Artificial Sequence
  Synthetic oligonucleotide
ttacgtctactgtcagtaacggttttcagc

SEQ ID NO: 332722 - DNA, 30 bp, Artificial Sequence
  Synthetic oligonucleotide
cttgacatcctgagacggtattttttcagc

SEQ ID NO: 332723 - DNA, 30 bp, Artificial Sequence
  Synthetic oligonucleotide
aggtgctcaggaccaactcggacgaagagc

SEQ ID NO: 332724 - DNA, 30 bp, Artificial Sequence
  Synthetic oligonucleotide
tggcctgtggtttatctcttgtttaagagc

SEQ ID NO: 332725 - DNA, 30 bp, Artificial Sequence
  Synthetic oligonucleotide
agtatcggtcattggacgcttcaacagagc

SEQ ID NO: 332726 - DNA, 30 bp, Artificial Sequence
  Synthetic oligonucleotide
cataatctgatagtgaaggctcgacagagc

SEQ ID NO: 332727 - DNA, 30 bp, Artificial Sequence
  Synthetic oligonucleotide
tgggtcgttaattagtttagcgaccagagc

SEQ ID NO: 332728 - DNA, 30 bp, Artificial Sequence
  Synthetic oligonucleotide
atggcattagcgcaagggaagctgcagagc

SEQ ID NO: 332729 - DNA, 30 bp, Artificial Sequence
  Synthetic oligonucleotide
acgattaatgggtaagatccggtgcagagc

SEQ ID NO: 332730 - DNA, 30 bp, Artificial Sequence
  Synthetic oligonucleotide
agctctcaacctgcggtaatctgagagagc

SEQ ID NO: 332731 - DNA, 30 bp, Artificial Sequence
  Synthetic oligonucleotide
tcttatggtagctggccacctcgcgagagc

SEQ ID NO: 332732 - DNA, 30 bp, Artificial Sequence
  Synthetic oligonucleotide
gtttaatccttcggtttcccggtcgagagc

SEQ ID NO: 332733 - DNA, 30 bp, Artificial Sequence
  Synthetic oligonucleotide
tttaaagagctgagatagaatctggagagc

SEQ ID NO: 332734 - DNA, 30 bp, Artificial Sequence
  Synthetic oligonucleotide
tgcgcatgtgatcatcaaactaaatagagc

SEQ ID NO: 332735 - DNA, 30 bp, Artificial Sequence
  Synthetic oligonucleotide
tatcgggcgattggatatagtcactagagc

SEQ ID NO: 332736 - DNA, 30 bp, Artificial Sequence
  Synthetic oligonucleotide
gaaggggggcgtttgccctgtcggtagagc

SEQ ID NO: 332737 - DNA, 30 bp, Artificial Sequence
  Synthetic oligonucleotide
taattggttattaaaaaacgcaattagagc

SEQ ID NO: 332738 - DNA, 30 bp, Artificial Sequence
  Synthetic oligonucleotide
cggctagatgacggccagactacaacgagc

SEQ ID NO: 332739 - DNA, 30 bp, Artificial Sequence
  Synthetic oligonucleotide
ggccgggctcattctgagctgcgaacgagc

SEQ ID NO: 332740 - DNA, 30 bp, Artificial Sequence
  Synthetic oligonucleotide
ctgcttgaagcagagggggcccagacgagc

SEQ ID NO: 332741 - DNA, 30 bp, Artificial Sequence
  Synthetic oligonucleotide
ccaagctcaacccattgtatggcgacgagc

SEQ ID NO: 332742 - DNA, 30 bp, Artificial Sequence
  Synthetic oligonucleotide
gggaccggtgtgagagtttaccctacgagc

SEQ ID NO: 332743 - DNA, 30 bp, Artificial Sequence
  Synthetic oligonucleotide
atcctaacatcctaattactaccaccgagc

SEQ ID NO: 332744 - DNA, 30 bp, Artificial Sequence
  Synthetic oligonucleotide
accaaaattgtaactgggtactgaccgagc

SEQ ID NO: 332745 - DNA, 30 bp, Artificial Sequence
  Synthetic oligonucleotide
agaggattattccattggcgttacccgagc

SEQ ID NO: 332746 - DNA, 30 bp, Artificial Sequence
  Synthetic oligonucleotide
ttgcccggaccgctaactggcaccccgagc

SEQ ID NO: 332747 - DNA, 30 bp, Artificial Sequence
  Synthetic oligonucleotide
ggcatcagccagcgcagggcaaagccgagc

SEQ ID NO: 332748 - DNA, 30 bp, Artificial Sequence
  Synthetic oligonucleotide
ctcctaacgttcttattctagacagcgagc

SEQ ID NO: 332749 - DNA, 30 bp, Artificial Sequence
  Synthetic oligonucleotide
gtttcaaaaggtatgagtggagtagcgagc

SEQ ID NO: 332750 - DNA, 30 bp, Artificial Sequence
  Synthetic oligonucleotide
cgaaacaaccttagtatacccgtagcgagc

SEQ ID NO: 332751 - DNA, 30 bp, Artificial Sequence
  Synthetic oligonucleotide
tctcgtctacactgggcagcatacgcgagc

SEQ ID NO: 332752 - DNA, 30 bp, Artificial Sequence
  Synthetic oligonucleotide
cacgtaaacttctgtgccacggctgcgagc

SEQ ID NO: 332753 - DNA, 30 bp, Artificial Sequence
  Synthetic oligonucleotide
gtcaaaaaggtctgagtcggtccatcgagc

SEQ ID NO: 332754 - DNA, 30 bp, Artificial Sequence
  Synthetic oligonucleotide
tgaatgagggcgtcggtgcagaattcgagc

SEQ ID NO: 332755 - DNA, 30 bp, Artificial Sequence
  Synthetic oligonucleotide
gcgcttacgggtcgttcgtggccaaggagc

SEQ ID NO: 332756 - DNA, 30 bp, Artificial Sequence
  Synthetic oligonucleotide
atttatgagagtaataaggttagaaggagc

SEQ ID NO: 332757 - DNA, 30 bp, Artificial Sequence
  Synthetic oligonucleotide
tgttataaggatcttatgtatataaggagc

SEQ ID NO: 332758 - DNA, 30 bp, Artificial Sequence
  Synthetic oligonucleotide
taaaaatggacaaagggtgcggcgaggagc

SEQ ID NO: 332759 - DNA, 30 bp, Artificial Sequence
  Synthetic oligonucleotide
cggggatgaggggctagaacatggaggagc

SEQ ID NO: 332760 - DNA, 30 bp, Artificial Sequence
  Synthetic oligonucleotide
cagcgcgcgacagaacctccgttgaggagc

SEQ ID NO: 332761 - DNA, 30 bp, Artificial Sequence
  Synthetic oligonucleotide
catcgcgagtgtgcgagcgctcgtaggagc

SEQ ID NO: 332762 - DNA, 30 bp, Artificial Sequence
  Synthetic oligonucleotide
ggttagtagcagaccactgagagacggagc

SEQ ID NO: 332763 - DNA, 30 bp, Artificial Sequence
  Synthetic oligonucleotide
ctcgttgaaagatgcagggtgagacggagc

SEQ ID NO: 332764 - DNA, 30 bp, Artificial Sequence
  Synthetic oligonucleotide
aatcatgactaatcggaatgcaagcggagc

SEQ ID NO: 332765 - DNA, 30 bp, Artificial Sequence
  Synthetic oligonucleotide
agtctgtcatgaattaggaccgtgcggagc

SEQ ID NO: 332766 - DNA, 30 bp, Artificial Sequence
  Synthetic oligonucleotide
gatgcaacaactcaacgccccaaagggagc

SEQ ID NO: 332767 - DNA, 30 bp, Artificial Sequence
  Synthetic oligonucleotide
gcgacgcctcgttgcggcggcaaagggagc

SEQ ID NO: 332768 - DNA, 30 bp, Artificial Sequence
  Synthetic oligonucleotide
gccaaatttagggcgcttgttatagggagc

SEQ ID NO: 332769 - DNA, 30 bp, Artificial Sequence
  Synthetic oligonucleotide
cagtccttttatgcggtatatgttgggagc

SEQ ID NO: 332770 - DNA, 30 bp, Artificial Sequence
  Synthetic oligonucleotide
agcagagtttgagaggtacagtcatggagc

SEQ ID NO: 332771 - DNA, 30 bp, Artificial Sequence
  Synthetic oligonucleotide
aagtgcgcagtgcgaaaactgagatggagc

SEQ ID NO: 332772 - DNA, 30 bp, Artificial Sequence
  Synthetic oligonucleotide
cctgtgcttctaccgattctagtatggagc

SEQ ID NO: 332773 - DNA, 30 bp, Artificial Sequence
  Synthetic oligonucleotide
cggtcatgatgtcggatttcgttctggagc

SEQ ID NO: 332774 - DNA, 30 bp, Artificial Sequence
  Synthetic oligonucleotide
tctgggctacaggcgggaattaagtggagc

SEQ ID NO: 332775 - DNA, 30 bp, Artificial Sequence
  Synthetic oligonucleotide
ccggtacgttaacccagctcatagtggagc

SEQ ID NO: 332776 - DNA, 30 bp, Artificial Sequence
  Synthetic oligonucleotide
tggaaggttttggcgcaccgacattggagc

SEQ ID NO: 332777 - DNA, 30 bp, Artificial Sequence
  Synthetic oligonucleotide
agggtttcaagtatatggagatcaatgagc

SEQ ID NO: 332778 - DNA, 30 bp, Artificial Sequence
  Synthetic oligonucleotide
cttcgtttaggtgccaagtcctgaatgagc

SEQ ID NO: 332779 - DNA, 30 bp, Artificial Sequence
  Synthetic oligonucleotide
ccaatggatatcaacggacggaagatgagc

SEQ ID NO: 332780 - DNA, 30 bp, Artificial Sequence
  Synthetic oligonucleotide
tcgctaggcgctatctgcggatcgatgagc

SEQ ID NO: 332781 - DNA, 31 bp, Artificial Sequence
  Synthetic oligonucleotide
gttatcgcaatcaatgcgtatatcgatgagc

SEQ ID NO: 332782 - DNA, 30 bp, Artificial Sequence
  Synthetic oligonucleotide
atacgttcttccatctgatgagggatgagc

SEQ ID NO: 332783 - DNA, 30 bp, Artificial Sequence
  Synthetic oligonucleotide
taatttgttatctaagagagcttgatgagc

SEQ ID NO: 332784 - DNA, 30 bp, Artificial Sequence
  Synthetic oligonucleotide
tgaatatatttataattcactcttatgagc

SEQ ID NO: 332785 - DNA, 30 bp, Artificial Sequence
  Synthetic oligonucleotide
tttgctgtcgcgtgcgggcgagttatgagc

SEQ ID NO: 332786 - DNA, 30 bp, Artificial Sequence
  Synthetic oligonucleotide
gaaatgattaagggcgggatggcactgagc

SEQ ID NO: 332787 - DNA, 30 bp, Artificial Sequence
  Synthetic oligonucleotide
gtttactcgctacggcacaccggactgagc

SEQ ID NO: 332788 - DNA, 30 bp, Artificial Sequence
  Synthetic oligonucleotide
tacgctggagtggcggctagattcctgagc

SEQ ID NO: 332789 - DNA, 30 bp, Artificial Sequence
  Synthetic oligonucleotide
cagaataatatatacgttctttatctgagc

SEQ ID NO: 332790 - DNA, 30 bp, Artificial Sequence
  Synthetic oligonucleotide
caacattcattgtctattacaatagtgagc

SEQ ID NO: 332791 - DNA, 30 bp, Artificial Sequence
  Synthetic oligonucleotide
agtttttacaaggttcaatcagtagtgagc

SEQ ID NO: 332792 - DNA, 30 bp, Artificial Sequence
  Synthetic oligonucleotide
tcttcgattgttcggcttatcgacgtgagc

SEQ ID NO: 332793 - DNA, 30 bp, Artificial Sequence
  Synthetic oligonucleotide
catgtgatagtaggggcagaaggcgtgagc

SEQ ID NO: 332794 - DNA, 30 bp, Artificial Sequence
  Synthetic oligonucleotide
cctttttcacatcgaaaaaaataggtgagc

SEQ ID NO: 332795 - DNA, 30 bp, Artificial Sequence
  Synthetic oligonucleotide
caggctactaggagagatggggcggtgagc

SEQ ID NO: 332796 - DNA, 30 bp, Artificial Sequence
  Synthetic oligonucleotide
aggagctcccgtgaatggaggcgggtgagc

SEQ ID NO: 332797 - DNA, 30 bp, Artificial Sequence
  Synthetic oligonucleotide
atagatcaatgtctcacgagtaatgtgagc

SEQ ID NO: 332798 - DNA, 30 bp, Artificial Sequence
  Synthetic oligonucleotide
agaagaataaccgggtgtttgcacttgagc

SEQ ID NO: 332799 - DNA, 30 bp, Artificial Sequence
  Synthetic oligonucleotide
ctggcagtgttctgcgtggaatccttgagc

SEQ ID NO: 332800 - DNA, 30 bp, Artificial Sequence
  Synthetic oligonucleotide
ggagagtataatggatctttgagcttgagc

SEQ ID NO: 332801 - DNA, 30 bp, Artificial Sequence
  Synthetic oligonucleotide
actcctggctatgttcggtgttagttgagc

SEQ ID NO: 332802 - DNA, 30 bp, Artificial Sequence
  Synthetic oligonucleotide
gggaggctataaagagcctcggttttgagc

SEQ ID NO: 332803 - DNA, 30 bp, Artificial Sequence
  Synthetic oligonucleotide
caggcgtgactttaggctgcaaaaaatagc

SEQ ID NO: 332804 - DNA, 30 bp, Artificial Sequence
  Synthetic oligonucleotide
ataaatcggtaacgttcctagacaaatagc

SEQ ID NO: 332805 - DNA, 30 bp, Artificial Sequence
  Synthetic oligonucleotide
gttcaggacacctcattacttctaaatagc

SEQ ID NO: 332806 - DNA, 30 bp, Artificial Sequence
  Synthetic oligonucleotide
gtgtactgtgacgtccaagcaaacaatagc

SEQ ID NO: 332807 - DNA, 30 bp, Artificial Sequence
  Synthetic oligonucleotide
cttctattgtgcaacctggggtgcaatagc

SEQ ID NO: 332808 - DNA, 30 bp, Artificial Sequence
  Synthetic oligonucleotide
caatttaaacctatcaaccatcggaatagc

SEQ ID NO: 332809 - DNA, 30 bp, Artificial Sequence
  Synthetic oligonucleotide
gcggacccactcaggtgctatggtaatagc

SEQ ID NO: 332810 - DNA, 30 bp, Artificial Sequence
  Synthetic oligonucleotide
ggtcaggtccgtaccgacatggttaatagc

SEQ ID NO: 332811 - DNA, 30 bp, Artificial Sequence
  Synthetic oligonucleotide
agttagcggtcacggctgaatagacatagc

SEQ ID NO: 332812 - DNA, 30 bp, Artificial Sequence
  Synthetic oligonucleotide
cgacactagggtgctcttaggacgcatagc

SEQ ID NO: 332813 - DNA, 30 bp, Artificial Sequence
  Synthetic oligonucleotide
tagtatcacgggagggaaagttgtcatagc

SEQ ID NO: 332814 - DNA, 30 bp, Artificial Sequence
  Synthetic oligonucleotide
ggggtaaaggcgggggatgggccagatagc

SEQ ID NO: 332815 - DNA, 30 bp, Artificial Sequence
  Synthetic oligonucleotide
gcgcgtcgtgcagcagtggtgtcagatagc

SEQ ID NO: 332816 - DNA, 30 bp, Artificial Sequence
  Synthetic oligonucleotide
aatgagtcgacgcccgtcccgaacgatagc

SEQ ID NO: 332817 - DNA, 30 bp, Artificial Sequence
  Synthetic oligonucleotide
agagcggagagtaacggtctcttggatagc

SEQ ID NO: 332818 - DNA, 30 bp, Artificial Sequence
  Synthetic oligonucleotide
gggtagcgtatcgtaataaacgatgatagc

SEQ ID NO: 332819 - DNA, 31 bp, Artificial Sequence
  Synthetic oligonucleotide
aaatcccgaagataattgtatatctgatagc

SEQ ID NO: 332820 - DNA, 30 bp, Artificial Sequence
  Synthetic oligonucleotide
tcttcgtggttggtgaaaggcagatatagc

SEQ ID NO: 332821 - DNA, 30 bp, Artificial Sequence
  Synthetic oligonucleotide
taatactatagggcacatccacactatagc

SEQ ID NO: 332822 - DNA, 30 bp, Artificial Sequence
  Synthetic oligonucleotide
gcactaaaagggaagtaccaaacctatagc

SEQ ID NO: 332823 - DNA, 30 bp, Artificial Sequence
  Synthetic oligonucleotide
gatggctaatccgcctgagtgcgctatagc

SEQ ID NO: 332824 - DNA, 30 bp, Artificial Sequence
  Synthetic oligonucleotide
gccccggtttgagatatgtatccgtatagc

SEQ ID NO: 332825 - DNA, 30 bp, Artificial Sequence
  Synthetic oligonucleotide
ccagcagacaatcctctagatatgtatagc

SEQ ID NO: 332826 - DNA, 30 bp, Artificial Sequence
  Synthetic oligonucleotide
tctgaagacaacggcttcgtaaattatagc

SEQ ID NO: 332827 - DNA, 30 bp, Artificial Sequence
  Synthetic oligonucleotide
tccccgcgtggattatcgccacattatagc

SEQ ID NO: 332828 - DNA, 30 bp, Artificial Sequence
  Synthetic oligonucleotide
ggacgattcttaatgaatacgcattatagc

SEQ ID NO: 332829 - DNA, 30 bp, Artificial Sequence
  Synthetic oligonucleotide
ggaatatgcgtagggatgcgggcttatagc

SEQ ID NO: 332830 - DNA, 30 bp, Artificial Sequence
  Synthetic oligonucleotide
gactcagaaccattcgacttttgttatagc

SEQ ID NO: 332831 - DNA, 30 bp, Artificial Sequence
  Synthetic oligonucleotide
ggatgaaggacctgataaatcacaactagc

SEQ ID NO: 332832 - DNA, 30 bp, Artificial Sequence
  Synthetic oligonucleotide
taataaataactttaaattgcacgactagc

SEQ ID NO: 332833 - DNA, 30 bp, Artificial Sequence
  Synthetic oligonucleotide
tatactaacgcattgtaaggtcgtactagc

SEQ ID NO: 332834 - DNA, 30 bp, Artificial Sequence
  Synthetic oligonucleotide
cgaaagccttcttattgtattggtactagc

SEQ ID NO: 332835 - DNA, 30 bp, Artificial Sequence
  Synthetic oligonucleotide
atacatatgatagactgttaaagacctagc

SEQ ID NO: 332836 - DNA, 30 bp, Artificial Sequence
  Synthetic oligonucleotide
gttggtctccgaataagacagggacctagc

SEQ ID NO: 332837 - DNA, 29 bp, Artificial Sequence
  Synthetic oligonucleotide
ggccattgtaccttaatggtggagctagc

SEQ ID NO: 332838 - DNA, 30 bp, Artificial Sequence
  Synthetic oligonucleotide
attctgaagacttacggggaattagctagc

SEQ ID NO: 332839 - DNA, 30 bp, Artificial Sequence
  Synthetic oligonucleotide
tcaactacgtaacgggaatgtaacgctagc

SEQ ID NO: 332840 - DNA, 28 bp, Artificial Sequence
  Synthetic oligonucleotide
atacgtccgcggatttggaaaggctagc

SEQ ID NO: 332841 - DNA, 30 bp, Artificial Sequence
  Synthetic oligonucleotide
tatgtaaatagctcccaactggcggctagc

SEQ ID NO: 332842 - DNA, 30 bp, Artificial Sequence
  Synthetic oligonucleotide
tctgtgctatatagtgacgtcctggctagc

SEQ ID NO: 332843 - DNA, 30 bp, Artificial Sequence
  Synthetic oligonucleotide
gtgtcctcgtgctttcgccccgcatctagc

SEQ ID NO: 332844 - DNA, 30 bp, Artificial Sequence
  Synthetic oligonucleotide
gggttggctgctcgcgattaaacttctagc

SEQ ID NO: 332845 - DNA, 30 bp, Artificial Sequence
  Synthetic oligonucleotide
gacgccttcacgtaccaccgcgcttctagc

SEQ ID NO: 332846 - DNA, 31 bp, Artificial Sequence
  Synthetic oligonucleotide
tgcacctgctcgtcgcgtatgattttctagc

SEQ ID NO: 332847 - DNA, 30 bp, Artificial Sequence
  Synthetic oligonucleotide
agatgcgtgggaaactttattccaagtagc

SEQ ID NO: 332848 - DNA, 30 bp, Artificial Sequence
  Synthetic oligonucleotide
gaattgctatgattgcgctcatgaagtagc

SEQ ID NO: 332849 - DNA, 30 bp, Artificial Sequence
  Synthetic oligonucleotide
tttatgcaaaaggtgtgttaaattagtagc

SEQ ID NO: 332850 - DNA, 30 bp, Artificial Sequence
  Synthetic oligonucleotide
gtagcgcttggggcattcgagttacgtagc

SEQ ID NO: 332851 - DNA, 30 bp, Artificial Sequence
  Synthetic oligonucleotide
agttaggtatgacgaatcgattagcgtagc

SEQ ID NO: 332852 - DNA, 30 bp, Artificial Sequence
  Synthetic oligonucleotide
acataggttttcgggaaatccccgcgtagc

SEQ ID NO: 332853 - DNA, 30 bp, Artificial Sequence
  Synthetic oligonucleotide
gcgcgcgggtactcgttggtcgggcgtagc

SEQ ID NO: 332854 - DNA, 30 bp, Artificial Sequence
  Synthetic oligonucleotide
tgtacgttaacttgtgactgatatcgtagc

SEQ ID NO: 332855 - DNA, 30 bp, Artificial Sequence
  Synthetic oligonucleotide
gagaacgcttaagtttacgcttatcgtagc

SEQ ID NO: 332856 - DNA, 30 bp, Artificial Sequence
  Synthetic oligonucleotide
ttactccgcactgtcgtggtctccggtagc

SEQ ID NO: 332857 - DNA, 30 bp, Artificial Sequence
  Synthetic oligonucleotide
acaatagaggtgctcggtaagtgcggtagc

SEQ ID NO: 332858 - DNA, 30 bp, Artificial Sequence
  Synthetic oligonucleotide
gaacaagtttaggcgacgctgactggtagc

SEQ ID NO: 332859 - DNA, 30 bp, Artificial Sequence
  Synthetic oligonucleotide
accgattgcaaagcagggctcaaatgtagc

SEQ ID NO: 332860 - DNA, 30 bp, Artificial Sequence
  Synthetic oligonucleotide
tttatgataagagaatgcatcttatgtagc

SEQ ID NO: 332861 - DNA, 30 bp, Artificial Sequence
  Synthetic oligonucleotide
tacgcctgttcgttgataatattgtgtagc

SEQ ID NO: 332862 - DNA, 30 bp, Artificial Sequence
  Synthetic oligonucleotide
acaacataggtctgttgcagcgattgtagc

SEQ ID NO: 332863 - DNA, 30 bp, Artificial Sequence
  Synthetic oligonucleotide
catacatctgctacggtagaaggttgtagc

SEQ ID NO: 332864 - DNA, 30 bp, Artificial Sequence
  Synthetic oligonucleotide
catattgaagttggtgttgtgcaaattagc

SEQ ID NO: 332865 - DNA, 30 bp, Artificial Sequence
  Synthetic oligonucleotide
ttgaagtcaagatccatcgctgccattagc

SEQ ID NO: 332866 - DNA, 30 bp, Artificial Sequence
  Synthetic oligonucleotide
agcgatgctaagttacattcatccattagc

SEQ ID NO: 332867 - DNA, 30 bp, Artificial Sequence
  Synthetic oligonucleotide
gtctctgctcatgaggttactagcattagc

SEQ ID NO: 332868 - DNA, 30 bp, Artificial Sequence
  Synthetic oligonucleotide
tattgaggaagattcagcttctagattagc

SEQ ID NO: 332869 - DNA, 30 bp, Artificial Sequence
  Synthetic oligonucleotide
gcttgtttcttgtgagggacaccgattagc

SEQ ID NO: 332870 - DNA, 30 bp, Artificial Sequence
  Synthetic oligonucleotide
cttcgacttacagggcccagaccgattagc

SEQ ID NO: 332871 - DNA, 30 bp, Artificial Sequence
  Synthetic oligonucleotide
tgttgctgtctccctgatgtacctattagc

SEQ ID NO: 332872 - DNA, 30 bp, Artificial Sequence
  Synthetic oligonucleotide
tacggactccttgtaacagttccacttagc

SEQ ID NO: 332873 - DNA, 30 bp, Artificial Sequence
  Synthetic oligonucleotide
atggtggatgctaagtttgagcagcttagc

SEQ ID NO: 332874 - DNA, 31 bp, Artificial Sequence
  Synthetic oligonucleotide
ggtggcgcgccgcaatcatgtaaatcttagc

SEQ ID NO: 332875 - DNA, 30 bp, Artificial Sequence
  Synthetic oligonucleotide
ggcgataggtgcgatttagagtttcttagc

SEQ ID NO: 332876 - DNA, 30 bp, Artificial Sequence
  Synthetic oligonucleotide
tcatttagaaaaaacaaatctctagttagc

SEQ ID NO: 332877 - DNA, 30 bp, Artificial Sequence
  Synthetic oligonucleotide
ccctcgggccatccgtagacataggttagc

SEQ ID NO: 332878 - DNA, 30 bp, Artificial Sequence
  Synthetic oligonucleotide
tacattcgcatagaggggcttgatgttagc

SEQ ID NO: 332879 - DNA, 30 bp, Artificial Sequence
  Synthetic oligonucleotide
aatggaaccattccttctagctctgttagc

SEQ ID NO: 332880 - DNA, 30 bp, Artificial Sequence
  Synthetic oligonucleotide
gtagtacacaattcacctgaatactttagc

SEQ ID NO: 332881 - DNA, 30 bp, Artificial Sequence
  Synthetic oligonucleotide
caggacccataactgcaggagttctttagc

SEQ ID NO: 332882 - DNA, 30 bp, Artificial Sequence
  Synthetic oligonucleotide
attgccagactgtggaccctgcagtttagc

SEQ ID NO: 332883 - DNA, 30 bp, Artificial Sequence
  Synthetic oligonucleotide
tggtagtatggtggtcatcggctgtttagc

SEQ ID NO: 332884 - DNA, 30 bp, Artificial Sequence
  Synthetic oligonucleotide
tcgaggcctgctcatgctcggtattttagc

SEQ ID NO: 332885 - DNA, 30 bp, Artificial Sequence
  Synthetic oligonucleotide
ggttcccgagactagttgggaccttttagc

SEQ ID NO: 332886 - DNA, 30 bp, Artificial Sequence
  Synthetic oligonucleotide
tcacctggtgtgtatactacgtgttttagc

SEQ ID NO: 332887 - DNA, 30 bp, Artificial Sequence
  Synthetic oligonucleotide
ctgtaaattttgcggcatcgtatttttagc

SEQ ID NO: 332888 - DNA, 30 bp, Artificial Sequence
  Synthetic oligonucleotide
ctattgagtgttgcgaggtgactttttagc

SEQ ID NO: 332889 - DNA, 30 bp, Artificial Sequence
  Synthetic oligonucleotide
actcatgaatccgcagcggaccaaaaacgc

SEQ ID NO: 332890 - DNA, 30 bp, Artificial Sequence
  Synthetic oligonucleotide
gttgccaagcgatgtgaatagtgaaaacgc

SEQ ID NO: 332891 - DNA, 30 bp, Artificial Sequence
  Synthetic oligonucleotide
ggcgaataaaaggtgtatatgttaaaacgc

SEQ ID NO: 332892 - DNA, 30 bp, Artificial Sequence
  Synthetic oligonucleotide
gcaaagtgtactactgtcatgaccaaacgc

SEQ ID NO: 332893 - DNA, 31 bp, Artificial Sequence
  Synthetic oligonucleotide
ggttttgtgggtgaacgagcctggcaaacgc

SEQ ID NO: 332894 - DNA, 30 bp, Artificial Sequence
  Synthetic oligonucleotide
gcagctcacctatatagcacaaagaaacgc

SEQ ID NO: 332895 - DNA, 30 bp, Artificial Sequence
  Synthetic oligonucleotide
cctcctgtgcctgcggtaagaaagaaacgc

SEQ ID NO: 332896 - DNA, 30 bp, Artificial Sequence
  Synthetic oligonucleotide
ggggaccaccacccggtgaattagaaacgc

SEQ ID NO: 332897 - DNA, 30 bp, Artificial Sequence
  Synthetic oligonucleotide
ttgagaatctgccgatattctgcgaaacgc

SEQ ID NO: 332898 - DNA, 30 bp, Artificial Sequence
  Synthetic oligonucleotide
ctagaataacccccattactagggaaacgc

SEQ ID NO: 332899 - DNA, 30 bp, Artificial Sequence
  Synthetic oligonucleotide
gctgtcaacaggccaaatggtaaacaacgc

SEQ ID NO: 332900 - DNA, 30 bp, Artificial Sequence
  Synthetic oligonucleotide
cattcgtaatgttatcttggaacacaacgc

SEQ ID NO: 332901 - DNA, 30 bp, Artificial Sequence
  Synthetic oligonucleotide
taggagcttgagattatctgctaccaacgc

SEQ ID NO: 332902 - DNA, 30 bp, Artificial Sequence
  Synthetic oligonucleotide
ccagccgcaatggcggttcctttgcaacgc

SEQ ID NO: 332903 - DNA, 30 bp, Artificial Sequence
  Synthetic oligonucleotide
agagcagggtacaactacattagtcaacgc

SEQ ID NO: 332904 - DNA, 30 bp, Artificial Sequence
  Synthetic oligonucleotide
gctagatctgtaggatctgcgacagaacgc

SEQ ID NO: 332905 - DNA, 30 bp, Artificial Sequence
  Synthetic oligonucleotide
gtggattatggtatactccgccccgaacgc

SEQ ID NO: 332906 - DNA, 30 bp, Artificial Sequence
  Synthetic oligonucleotide
tgtgtgcgcgcacatgcagcaaaggaacgc

SEQ ID NO: 332907 - DNA, 30 bp, Artificial Sequence
  Synthetic oligonucleotide
taggctaaccgggcccgtgtttcggaacgc

SEQ ID NO: 332908 - DNA, 30 bp, Artificial Sequence
  Synthetic oligonucleotide
acctcatatcaagttgagccgactgaacgc

SEQ ID NO: 332909 - DNA, 30 bp, Artificial Sequence
  Synthetic oligonucleotide
ttaaatggtgctagaattggttgtgaacgc

SEQ ID NO: 332910 - DNA, 30 bp, Artificial Sequence
  Synthetic oligonucleotide
cgattggttttgacgtgtgaaaaataacgc

SEQ ID NO: 332911 - DNA, 30 bp, Artificial Sequence
  Synthetic oligonucleotide
aggcccctattgagggtgccttgctaacgc

SEQ ID NO: 332912 - DNA, 30 bp, Artificial Sequence
  Synthetic oligonucleotide
cggccctcttcgggcacatccatctaacgc

SEQ ID NO: 332913 - DNA, 30 bp, Artificial Sequence
  Synthetic oligonucleotide
atcggtgggtggtgtacccgtacgtaacgc

SEQ ID NO: 332914 - DNA, 30 bp, Artificial Sequence
  Synthetic oligonucleotide
ccggagcggttgatttcggtatcgtaacgc

SEQ ID NO: 332915 - DNA, 30 bp, Artificial Sequence
  Synthetic oligonucleotide
gcagtcaatggaactagacgatggtaacgc

SEQ ID NO: 332916 - DNA, 30 bp, Artificial Sequence
  Synthetic oligonucleotide
catgttcgatcttccgccacctcaacacgc

SEQ ID NO: 332917 - DNA, 30 bp, Artificial Sequence
  Synthetic oligonucleotide
tacactgaaggtaggggcagctgaacacgc

SEQ ID NO: 332918 - DNA, 30 bp, Artificial Sequence
  Synthetic oligonucleotide
actggtgatttcatggtggcttgaacacgc

SEQ ID NO: 332919 - DNA, 30 bp, Artificial Sequence
  Synthetic oligonucleotide
ggcatagatgtcggtgaatgattaacacgc

SEQ ID NO: 332920 - DNA, 30 bp, Artificial Sequence
  Synthetic oligonucleotide
tgccattacgtgctcaaagttatcacacgc

SEQ ID NO: 332921 - DNA, 30 bp, Artificial Sequence
  Synthetic oligonucleotide
accaggaagaatcccatatcgttgacacgc

SEQ ID NO: 332922 - DNA, 30 bp, Artificial Sequence
  Synthetic oligonucleotide
cattcatcggaacttcaagcggctacacgc

SEQ ID NO: 332923 - DNA, 30 bp, Artificial Sequence
  Synthetic oligonucleotide
ccattgtagtccatacaattcataccacgc

SEQ ID NO: 332924 - DNA, 30 bp, Artificial Sequence
  Synthetic oligonucleotide
cgcttctgaagacttcatcgtcagccacgc

SEQ ID NO: 332925 - DNA, 30 bp, Artificial Sequence
  Synthetic oligonucleotide
ccgaaagtgtccgaaataagggtgccacgc

SEQ ID NO: 332926 - DNA, 30 bp, Artificial Sequence
  Synthetic oligonucleotide
tgcgctcacgatccagtcggtgtgccacgc

SEQ ID NO: 332927 - DNA, 30 bp, Artificial Sequence
  Synthetic oligonucleotide
gatgccttagaaatcattaggtatccacgc

SEQ ID NO: 332928 - DNA, 30 bp, Artificial Sequence
  Synthetic oligonucleotide
ggtcagttgtcgttcctaggaacagcacgc

SEQ ID NO: 332929 - DNA, 30 bp, Artificial Sequence
  Synthetic oligonucleotide
cgcctcgacggaatttggtgcagagcacgc

SEQ ID NO: 332930 - DNA, 30 bp, Artificial Sequence
  Synthetic oligonucleotide
aaaatccataatcaagaatagcgagcacgc

SEQ ID NO: 332931 - DNA, 30 bp, Artificial Sequence
  Synthetic oligonucleotide
tatcctgagtaaagcggggggtccgcacgc

SEQ ID NO: 332932 - DNA, 30 bp, Artificial Sequence
  Synthetic oligonucleotide
ggtcatgaataacacaccaagggcgcacgc

SEQ ID NO: 332933 - DNA, 30 bp, Artificial Sequence
  Synthetic oligonucleotide
atgagtgatatcactggcatcaaggcacgc

SEQ ID NO: 332934 - DNA, 30 bp, Artificial Sequence
  Synthetic oligonucleotide
tagcttaacttgaagaagattaaggcacgc

SEQ ID NO: 332935 - DNA, 30 bp, Artificial Sequence
  Synthetic oligonucleotide
atagctagagggcaagcgtgtacggcacgc

SEQ ID NO: 332936 - DNA, 31 bp, Artificial Sequence
  Synthetic oligonucleotide
aatggcgcggtaacaatcttctccggcacgc

SEQ ID NO: 332937 - DNA, 30 bp, Artificial Sequence
  Synthetic oligonucleotide
gaccatacatctcccaggaagcgggcacgc

SEQ ID NO: 332938 - DNA, 30 bp, Artificial Sequence
  Synthetic oligonucleotide
agtgatatgggatgtagaacgcgggcacgc

SEQ ID NO: 332939 - DNA, 30 bp, Artificial Sequence
  Synthetic oligonucleotide
gttgcgagctgggtcatataggaatcacgc

SEQ ID NO: 332940 - DNA, 30 bp, Artificial Sequence
  Synthetic oligonucleotide
gaagcaaacagaggtcatgaacgatcacgc

SEQ ID NO: 332941 - DNA, 30 bp, Artificial Sequence
  Synthetic oligonucleotide
tatgtccaaaggacggtagggctatcacgc

SEQ ID NO: 332942 - DNA, 30 bp, Artificial Sequence
  Synthetic oligonucleotide
aatgaccaacagagccccaacgtctcacgc

SEQ ID NO: 332943 - DNA, 30 bp, Artificial Sequence
  Synthetic oligonucleotide
gcaatccatggagatttcatacagtcacgc

SEQ ID NO: 332944 - DNA, 30 bp, Artificial Sequence
  Synthetic oligonucleotide
tatctggcctattaggcaactatgtcacgc

SEQ ID NO: 332945 - DNA, 30 bp, Artificial Sequence
  Synthetic oligonucleotide
acggctgggtaccgcaacgttctgtcacgc

SEQ ID NO: 332946 - DNA, 30 bp, Artificial Sequence
  Synthetic oligonucleotide
aaggggccacgtatctaacatgcttcacgc

SEQ ID NO: 332947 - DNA, 30 bp, Artificial Sequence
  Synthetic oligonucleotide
atggatgcgacttaattatttctaagacgc

SEQ ID NO: 332948 - DNA, 30 bp, Artificial Sequence
  Synthetic oligonucleotide
ggatcatcgtgaatcgcttgcgatagacgc

SEQ ID NO: 332949 - DNA, 30 bp, Artificial Sequence
  Synthetic oligonucleotide
ttggtctgcaacgggctcgtacgacgacgc

SEQ ID NO: 332950 - DNA, 30 bp, Artificial Sequence
  Synthetic oligonucleotide
cgcaggtggcacattgatttcaggcgacgc

SEQ ID NO: 332951 - DNA, 30 bp, Artificial Sequence
  Synthetic oligonucleotide
gcgggggagcgcacatgatactggcgacgc

SEQ ID NO: 332952 - DNA, 30 bp, Artificial Sequence
  Synthetic oligonucleotide
agggcgggggaaggtggcgggtatcgacgc

SEQ ID NO: 332953 - DNA, 30 bp, Artificial Sequence
  Synthetic oligonucleotide
tgtccgcgcacaaaataagtctaaggacgc

SEQ ID NO: 332954 - DNA, 30 bp, Artificial Sequence
  Synthetic oligonucleotide
cgtaagctacggaacacgtcacccggacgc

SEQ ID NO: 332955 - DNA, 30 bp, Artificial Sequence
  Synthetic oligonucleotide
tggcgaggaattgatcaataatccggacgc

SEQ ID NO: 332956 - DNA, 30 bp, Artificial Sequence
  Synthetic oligonucleotide
aacgctaggtgaggaaaatgtcggggacgc

SEQ ID NO: 332957 - DNA, 30 bp, Artificial Sequence
  Synthetic oligonucleotide
tcgcatggggtaacgcgcgagcaatgacgc

SEQ ID NO: 332958 - DNA, 30 bp, Artificial Sequence
  Synthetic oligonucleotide
acaacatagcgggacacaataacctgacgc

SEQ ID NO: 332959 - DNA, 30 bp, Artificial Sequence
  Synthetic oligonucleotide
gcagagggggtaccagaggccgcctgacgc

SEQ ID NO: 332960 - DNA, 30 bp, Artificial Sequence
  Synthetic oligonucleotide
cgtgcaattcgaacgaggtaatattgacgc

SEQ ID NO: 332961 - DNA, 30 bp, Artificial Sequence
  Synthetic oligonucleotide
atgcacaagtgttcacatggctaaatacgc

SEQ ID NO: 332962 - DNA, 30 bp, Artificial Sequence
  Synthetic oligonucleotide
aaaacagtgtcctatcgtcgagacatacgc

SEQ ID NO: 332963 - DNA, 30 bp, Artificial Sequence
  Synthetic oligonucleotide
ggtcggactgtcaaagaatttgggatacgc

SEQ ID NO: 332964 - DNA, 30 bp, Artificial Sequence
  Synthetic oligonucleotide
tgaacagatgctatttaaggtaatctacgc

SEQ ID NO: 332965 - DNA, 30 bp, Artificial Sequence
  Synthetic oligonucleotide
tatcttgtctggttaataaacggtctacgc

SEQ ID NO: 332966 - DNA, 30 bp, Artificial Sequence
  Synthetic oligonucleotide
cattcggactcaaaccagtaggttctacgc

SEQ ID NO: 332967 - DNA, 30 bp, Artificial Sequence
  Synthetic oligonucleotide
tctgagataagtcccgttggtccggtacgc

SEQ ID NO: 332968 - DNA, 30 bp, Artificial Sequence
  Synthetic oligonucleotide
cttgaaccacaaggtcttaaccgtgtacgc

SEQ ID NO: 332969 - DNA, 30 bp, Artificial Sequence
  Synthetic oligonucleotide
cggatggtagctgagggtagcaaattacgc

SEQ ID NO: 332970 - DNA, 30 bp, Artificial Sequence
  Synthetic oligonucleotide
atcgcccagtaggggtgtcggtcgttacgc

SEQ ID NO: 332971 - DNA, 29 bp, Artificial Sequence
  Synthetic oligonucleotide
tggaatgacgggggttggccaggttacgc

SEQ ID NO: 332972 - DNA, 30 bp, Artificial Sequence
  Synthetic oligonucleotide
taaaccggaggtgtgactaaccggttacgc

SEQ ID NO: 332973 - DNA, 30 bp, Artificial Sequence
  Synthetic oligonucleotide
agcgatgtctatgaacaatcatgtttacgc

SEQ ID NO: 332974 - DNA, 30 bp, Artificial Sequence
  Synthetic oligonucleotide
cgtggggaaacgatatatgccattttacgc

SEQ ID NO: 332975 - DNA, 30 bp, Artificial Sequence
  Synthetic oligonucleotide
tgagtctaggcagactagaaccgaaaccgc

SEQ ID NO: 332976 - DNA, 30 bp, Artificial Sequence
  Synthetic oligonucleotide
tcactgcctctacgcgtgattgacaaccgc

SEQ ID NO: 332977 - DNA, 30 bp, Artificial Sequence
  Synthetic oligonucleotide
atgtttgtgggtgagagaactcagaaccgc

SEQ ID NO: 332978 - DNA, 30 bp, Artificial Sequence
  Synthetic oligonucleotide
ccactgtttggcgaccatccagcgaaccgc

SEQ ID NO: 332979 - DNA, 30 bp, Artificial Sequence
  Synthetic oligonucleotide
cgatgtttatgagatactataactaaccgc

SEQ ID NO: 332980 - DNA, 30 bp, Artificial Sequence
  Synthetic oligonucleotide
agaatctgtgcgaacgagatctgtaaccgc

SEQ ID NO: 332981 - DNA, 30 bp, Artificial Sequence
  Synthetic oligonucleotide
cctataattatgctactgtcaccacaccgc

SEQ ID NO: 332982 - DNA, 30 bp, Artificial Sequence
  Synthetic oligonucleotide
aagatgcattttacaacttagagacaccgc

SEQ ID NO: 332983 - DNA, 30 bp, Artificial Sequence
  Synthetic oligonucleotide
gcatctcaaacgttatgtactggacaccgc

SEQ ID NO: 332984 - DNA, 30 bp, Artificial Sequence
  Synthetic oligonucleotide
ggattcttgtggagttgtcgtaagcaccgc

SEQ ID NO: 332985 - DNA, 30 bp, Artificial Sequence
  Synthetic oligonucleotide
tccagatagatgacgtagtggcatcaccgc

SEQ ID NO: 332986 - DNA, 30 bp, Artificial Sequence
  Synthetic oligonucleotide
gccagcccagaaagctcttaagtggaccgc

SEQ ID NO: 332987 - DNA, 30 bp, Artificial Sequence
  Synthetic oligonucleotide
tgaccgcaataaggcggcccctgtgaccgc

SEQ ID NO: 332988 - DNA, 30 bp, Artificial Sequence
  Synthetic oligonucleotide
aatactgggccgcaatctcacaagtaccgc

SEQ ID NO: 332989 - DNA, 30 bp, Artificial Sequence
  Synthetic oligonucleotide
attcacatacaatttcgcccatggtaccgc

SEQ ID NO: 332990 - DNA, 30 bp, Artificial Sequence
  Synthetic oligonucleotide
cagccaaaactgcggatacgggtttaccgc

SEQ ID NO: 332991 - DNA, 30 bp, Artificial Sequence
  Synthetic oligonucleotide
gctatggagtaagttgctcttttttaccgc

SEQ ID NO: 332992 - DNA, 30 bp, Artificial Sequence
  Synthetic oligonucleotide
cacattgcgaccttatttctgtacacccgc

SEQ ID NO: 332993 - DNA, 30 bp, Artificial Sequence
  Synthetic oligonucleotide
gggttggcgaaataggtgcttacaccccgc

SEQ ID NO: 332994 - DNA, 30 bp, Artificial Sequence
  Synthetic oligonucleotide
gccctgaacccgcgtcgggtggacccccgc

SEQ ID NO: 332995 - DNA, 30 bp, Artificial Sequence
  Synthetic oligonucleotide
taccttccagcgcagttattaccagcccgc

SEQ ID NO: 332996 - DNA, 30 bp, Artificial Sequence
  Synthetic oligonucleotide
tctacttattggcgggaacgtatagcccgc

SEQ ID NO: 332997 - DNA, 30 bp, Artificial Sequence
  Synthetic oligonucleotide
gggttttggtccatgtttgacaacgcccgc

SEQ ID NO: 332998 - DNA, 30 bp, Artificial Sequence
  Synthetic oligonucleotide
aggatcactgaataatttgaatgggcccgc

SEQ ID NO: 332999 - DNA, 30 bp, Artificial Sequence
  Synthetic oligonucleotide
cggacacctgtccttatgaagctggcccgc

SEQ ID NO: 333000 - DNA, 30 bp, Artificial Sequence
  Synthetic oligonucleotide
acgtacccggtttggtatggcaatgcccgc

SEQ ID NO: 333001 - DNA, 30 bp, Artificial Sequence
  Synthetic oligonucleotide
gaaagttcggcgccattcgtaagtgcccgc

SEQ ID NO: 333002 - DNA, 30 bp, Artificial Sequence
  Synthetic oligonucleotide
gcttatacactgtcacagggtgcgtcccgc

SEQ ID NO: 333003 - DNA, 30 bp, Artificial Sequence
  Synthetic oligonucleotide
gaggcttgcccggcatcagagcaaagccgc

SEQ ID NO: 333004 - DNA, 30 bp, Artificial Sequence
  Synthetic oligonucleotide
tagtaacaattggggtgaaacggaagccgc

SEQ ID NO: 333005 - DNA, 30 bp, Artificial Sequence
  Synthetic oligonucleotide
gatacgggcacatgttaatgtgacagccgc

SEQ ID NO: 333006 - DNA, 30 bp, Artificial Sequence
  Synthetic oligonucleotide
cccatggtcttccttctgatagccagccgc

SEQ ID NO: 333007 - DNA, 30 bp, Artificial Sequence
  Synthetic oligonucleotide
cacttgatggtaattagactaagcagccgc

SEQ ID NO: 333008 - DNA, 30 bp, Artificial Sequence
  Synthetic oligonucleotide
tggtcaagttcgcttggtgatagcagccgc

SEQ ID NO: 333009 - DNA, 30 bp, Artificial Sequence
  Synthetic oligonucleotide
tcctgacgcgttataggtgcaggcagccgc

SEQ ID NO: 333010 - DNA, 30 bp, Artificial Sequence
  Synthetic oligonucleotide
agcaggttaggcactacgccgctcagccgc

SEQ ID NO: 333011 - DNA, 30 bp, Artificial Sequence
  Synthetic oligonucleotide
ttagttaattagactccgagttctagccgc

SEQ ID NO: 333012 - DNA, 30 bp, Artificial Sequence
  Synthetic oligonucleotide
cctacgagtctgtaaatatgtagtagccgc

SEQ ID NO: 333013 - DNA, 30 bp, Artificial Sequence
  Synthetic oligonucleotide
ggcagaccgcaaaggaaggttcttagccgc

SEQ ID NO: 333014 - DNA, 30 bp, Artificial Sequence
  Synthetic oligonucleotide
caggaccgctggtggatagcaccacgccgc

SEQ ID NO: 333015 - DNA, 30 bp, Artificial Sequence
  Synthetic oligonucleotide
aagaggttctgcggtctacagtttggccgc

SEQ ID NO: 333016 - DNA, 30 bp, Artificial Sequence
  Synthetic oligonucleotide
tggcctgcgcgataagccgaagactgccgc

SEQ ID NO: 333017 - DNA, 30 bp, Artificial Sequence
  Synthetic oligonucleotide
gggccggtatatgaagctcgtccctgccgc

SEQ ID NO: 333018 - DNA, 30 bp, Artificial Sequence
  Synthetic oligonucleotide
gttgcattgccttaaggtctcttttgccgc

SEQ ID NO: 333019 - DNA, 30 bp, Artificial Sequence
  Synthetic oligonucleotide
gggtaagttcccccttttgacggaatccgc

SEQ ID NO: 333020 - DNA, 30 bp, Artificial Sequence
  Synthetic oligonucleotide
ctggacaatcttaattcatggcgcatccgc

SEQ ID NO: 333021 - DNA, 31 bp, Artificial Sequence
  Synthetic oligonucleotide
tccagaaaatcctgcttcggttgggatccgc

SEQ ID NO: 333022 - DNA, 30 bp, Artificial Sequence
  Synthetic oligonucleotide
cggtgaacacaaataggtgggatgatccgc

SEQ ID NO: 333023 - DNA, 30 bp, Artificial Sequence
  Synthetic oligonucleotide
agatcacgcggttaaagctgtttgatccgc

SEQ ID NO: 333024 - DNA, 30 bp, Artificial Sequence
  Synthetic oligonucleotide
catctggacggtggggtcattgacctccgc

SEQ ID NO: 333025 - DNA, 30 bp, Artificial Sequence
  Synthetic oligonucleotide
ggaactcctagcaccacgggttcgctccgc

SEQ ID NO: 333026 - DNA, 30 bp, Artificial Sequence
  Synthetic oligonucleotide
ccgccagccgttcacacgtcccttctccgc

SEQ ID NO: 333027 - DNA, 30 bp, Artificial Sequence
  Synthetic oligonucleotide
ggttcagtgccgttccgcatttttctccgc

SEQ ID NO: 333028 - DNA, 30 bp, Artificial Sequence
  Synthetic oligonucleotide
gcgaaggttcggtagtgacacacagtccgc

SEQ ID NO: 333029 - DNA, 30 bp, Artificial Sequence
  Synthetic oligonucleotide
tacaccgcggcaatgccctgacgagtccgc

SEQ ID NO: 333030 - DNA, 30 bp, Artificial Sequence
  Synthetic oligonucleotide
cggggtgctgaggcaggtcgtcacgtccgc

SEQ ID NO: 333031 - DNA, 30 bp, Artificial Sequence
  Synthetic oligonucleotide
gtggcgttcgctgctcagacagacgtccgc

SEQ ID NO: 333032 - DNA, 30 bp, Artificial Sequence
  Synthetic oligonucleotide
gttcgaacatagaaaccgcatcttgtccgc

SEQ ID NO: 333033 - DNA, 30 bp, Artificial Sequence
  Synthetic oligonucleotide
tcgggattttcgcttaggtgaaaattccgc

SEQ ID NO: 333034 - DNA, 30 bp, Artificial Sequence
  Synthetic oligonucleotide
caacagttctaaaactttgccaaattccgc

SEQ ID NO: 333035 - DNA, 30 bp, Artificial Sequence
  Synthetic oligonucleotide
cttgtatgccggaagtaagttggattccgc

SEQ ID NO: 333036 - DNA, 30 bp, Artificial Sequence
  Synthetic oligonucleotide
gttaatgccctacagtctcaggacttccgc

SEQ ID NO: 333037 - DNA, 30 bp, Artificial Sequence
  Synthetic oligonucleotide
agggcagcgtatacacaactttccttccgc

SEQ ID NO: 333038 - DNA, 30 bp, Artificial Sequence
  Synthetic oligonucleotide
cccctagaccgaaagactaggtggttccgc

SEQ ID NO: 333039 - DNA, 30 bp, Artificial Sequence
  Synthetic oligonucleotide
gagtttatagaagacctgaccaaaaagcgc

SEQ ID NO: 333040 - DNA, 30 bp, Artificial Sequence
  Synthetic oligonucleotide
agggttgcgcacgcgtagcgtacaaagcgc

SEQ ID NO: 333041 - DNA, 30 bp, Artificial Sequence
  Synthetic oligonucleotide
gactaggccagattacttgggaacaagcgc

SEQ ID NO: 333042 - DNA, 30 bp, Artificial Sequence
  Synthetic oligonucleotide
gtactaacctgggtctgaaagatcaagcgc

SEQ ID NO: 333043 - DNA, 30 bp, Artificial Sequence
  Synthetic oligonucleotide
attgcgttcattgctcgagagatcaagcgc

SEQ ID NO: 333044 - DNA, 30 bp, Artificial Sequence
  Synthetic oligonucleotide
ataaatcattcacccggggtcgtcaagcgc

SEQ ID NO: 333045 - DNA, 30 bp, Artificial Sequence
  Synthetic oligonucleotide
aaccgataccgctgaggtctatggaagcgc

SEQ ID NO: 333046 - DNA, 31 bp, Artificial Sequence
  Synthetic oligonucleotide
cacaaatggcctgtggtttagattgaagcgc

SEQ ID NO: 333047 - DNA, 30 bp, Artificial Sequence
  Synthetic oligonucleotide
ctttagtgcattgcgtgttacttgaagcgc

SEQ ID NO: 333048 - DNA, 30 bp, Artificial Sequence
  Synthetic oligonucleotide
aagcatgctatctgcatcgagaaacagcgc

SEQ ID NO: 333049 - DNA, 30 bp, Artificial Sequence
  Synthetic oligonucleotide
cccgaggggtctggaaacgagcaacagcgc

SEQ ID NO: 333050 - DNA, 30 bp, Artificial Sequence
  Synthetic oligonucleotide
gtactcgctgcgacaaatcggttacagcgc

SEQ ID NO: 333051 - DNA, 30 bp, Artificial Sequence
  Synthetic oligonucleotide
ggagattacatcagttcctgattccagcgc

SEQ ID NO: 333052 - DNA, 30 bp, Artificial Sequence
  Synthetic oligonucleotide
gcccataggccagttgtctactgagagcgc

SEQ ID NO: 333053 - DNA, 30 bp, Artificial Sequence
  Synthetic oligonucleotide
tcactaaggaggcgacccggcaccgagcgc

SEQ ID NO: 333054 - DNA, 30 bp, Artificial Sequence
  Synthetic oligonucleotide
accatcgcattaacgagtgtcacggagcgc

SEQ ID NO: 333055 - DNA, 30 bp, Artificial Sequence
  Synthetic oligonucleotide
agaaagacgtctgggtttagcaatgagcgc

SEQ ID NO: 333056 - DNA, 30 bp, Artificial Sequence
  Synthetic oligonucleotide
taggaacccgaagatgggctcactgagcgc

SEQ ID NO: 333057 - DNA, 30 bp, Artificial Sequence
  Synthetic oligonucleotide
tgcgactgtatcaatagcgagcctgagcgc

SEQ ID NO: 333058 - DNA, 30 bp, Artificial Sequence
  Synthetic oligonucleotide
tcgagtgcgtagcggaggcggcaatagcgc

SEQ ID NO: 333059 - DNA, 30 bp, Artificial Sequence
  Synthetic oligonucleotide
cagtgtgtgtgtatacgtgtgcgatagcgc

SEQ ID NO: 333060 - DNA, 30 bp, Artificial Sequence
  Synthetic oligonucleotide
agaaacacagtgactggttgcatatagcgc

SEQ ID NO: 333061 - DNA, 30 bp, Artificial Sequence
  Synthetic oligonucleotide
cgatcagtgacgaccaccagtcgctagcgc

SEQ ID NO: 333062 - DNA, 30 bp, Artificial Sequence
  Synthetic oligonucleotide
agtaatgcataagcctatcatgcgtagcgc

SEQ ID NO: 333063 - DNA, 30 bp, Artificial Sequence
  Synthetic oligonucleotide
gccaacgggtgtcatagtcctgtgtagcgc

SEQ ID NO: 333064 - DNA, 30 bp, Artificial Sequence
  Synthetic oligonucleotide
gcacaagatcgtaacaagcggtgttagcgc

SEQ ID NO: 333065 - DNA, 30 bp, Artificial Sequence
  Synthetic oligonucleotide
cagcggattgtatcgcatatcggaacgcgc

SEQ ID NO: 333066 - DNA, 30 bp, Artificial Sequence
  Synthetic oligonucleotide
gagtgccacctgtgtataaagataacgcgc

SEQ ID NO: 333067 - DNA, 30 bp, Artificial Sequence
  Synthetic oligonucleotide
ggactttcaaggcagctgaaggggacgcgc

SEQ ID NO: 333068 - DNA, 30 bp, Artificial Sequence
  Synthetic oligonucleotide
aagagagtccttgcagttattgacccgcgc

SEQ ID NO: 333069 - DNA, 30 bp, Artificial Sequence
  Synthetic oligonucleotide
ccggctcaggctacggaatctgtgccgcgc

SEQ ID NO: 333070 - DNA, 30 bp, Artificial Sequence
  Synthetic oligonucleotide
atctagttagttaagcacaaatgcgcgcgc

SEQ ID NO: 333071 - DNA, 30 bp, Artificial Sequence
  Synthetic oligonucleotide
gtctaagaaatcaacatattatcggcgcgc

SEQ ID NO: 333072 - DNA, 30 bp, Artificial Sequence
  Synthetic oligonucleotide
acgttgataggttgtttggggcaatcgcgc

SEQ ID NO: 333073 - DNA, 30 bp, Artificial Sequence
  Synthetic oligonucleotide
attcattcctccttaagggttgtatcgcgc

SEQ ID NO: 333074 - DNA, 30 bp, Artificial Sequence
  Synthetic oligonucleotide
aggtcataaggagtgccctcaccctcgcgc

SEQ ID NO: 333075 - DNA, 30 bp, Artificial Sequence
  Synthetic oligonucleotide
gtgcgtatatgagaataagcacgctcgcgc

SEQ ID NO: 333076 - DNA, 30 bp, Artificial Sequence
  Synthetic oligonucleotide
gggtaccgcctaaggccgtggacgtcgcgc

SEQ ID NO: 333077 - DNA, 30 bp, Artificial Sequence
  Synthetic oligonucleotide
cttggtcgcgacatggaatggtcttcgcgc

SEQ ID NO: 333078 - DNA, 30 bp, Artificial Sequence
  Synthetic oligonucleotide
gttaaaaagctcatctttgagccaaggcgc

SEQ ID NO: 333079 - DNA, 30 bp, Artificial Sequence
  Synthetic oligonucleotide
gtacgggggtatttagcctcatacaggcgc

SEQ ID NO: 333080 - DNA, 30 bp, Artificial Sequence
  Synthetic oligonucleotide
ggtcagagccggatcttgatagtcaggcgc

SEQ ID NO: 333081 - DNA, 30 bp, Artificial Sequence
  Synthetic oligonucleotide
gggcgaggaccccgaagggtgtaagggcgc

SEQ ID NO: 333082 - DNA, 30 bp, Artificial Sequence
  Synthetic oligonucleotide
tacgtgcagccgttgtttataccagggcgc

SEQ ID NO: 333083 - DNA, 30 bp, Artificial Sequence
  Synthetic oligonucleotide
actctcatcatattccgcgaaatagggcgc

SEQ ID NO: 333084 - DNA, 30 bp, Artificial Sequence
  Synthetic oligonucleotide
acgaaattacgcagtctgagttacgggcgc

SEQ ID NO: 333085 - DNA, 30 bp, Artificial Sequence
  Synthetic oligonucleotide
taattttctaccctcgccgtgttcgggcgc

SEQ ID NO: 333086 - DNA, 30 bp, Artificial Sequence
  Synthetic oligonucleotide
ccgaagctccttaaaaagctcgaggggcgc

SEQ ID NO: 333087 - DNA, 29 bp, Artificial Sequence
  Synthetic oligonucleotide
agcattaactagggattaatccggggcgc

SEQ ID NO: 333088 - DNA, 30 bp, Artificial Sequence
  Synthetic oligonucleotide
atgcgtgaaaacttatgccactcggggcgc

SEQ ID NO: 333089 - DNA, 30 bp, Artificial Sequence
  Synthetic oligonucleotide
gaggtaggagaattgggcgcatctgggcgc

SEQ ID NO: 333090 - DNA, 30 bp, Artificial Sequence
  Synthetic oligonucleotide
ggcattatttcaagtcatggaagtgggcgc

SEQ ID NO: 333091 - DNA, 30 bp, Artificial Sequence
  Synthetic oligonucleotide
gattgggattcagtcttggtgtcgtggcgc

SEQ ID NO: 333092 - DNA, 30 bp, Artificial Sequence
  Synthetic oligonucleotide
tccggaggtcatctttgggaaatgtggcgc

SEQ ID NO: 333093 - DNA, 30 bp, Artificial Sequence
  Synthetic oligonucleotide
ttgcgtagaattaatgtgcatctgtggcgc

SEQ ID NO: 333094 - DNA, 30 bp, Artificial Sequence
  Synthetic oligonucleotide
gtctacgcccttctgcccggtgattggcgc

SEQ ID NO: 333095 - DNA, 30 bp, Artificial Sequence
  Synthetic oligonucleotide
tgggataaaaacgcatgctcgctttggcgc

SEQ ID NO: 333096 - DNA, 30 bp, Artificial Sequence
  Synthetic oligonucleotide
ataggcgcacacaacttgagattaatgcgc

SEQ ID NO: 333097 - DNA, 30 bp, Artificial Sequence
  Synthetic oligonucleotide
gctatctgttccacaggtgatccactgcgc

SEQ ID NO: 333098 - DNA, 30 bp, Artificial Sequence
  Synthetic oligonucleotide
agcaataaaggaacggacccgggcctgcgc

SEQ ID NO: 333099 - DNA, 30 bp, Artificial Sequence
  Synthetic oligonucleotide
ttctgaggtgtaggcgtatacgggctgcgc

SEQ ID NO: 333100 - DNA, 30 bp, Artificial Sequence
  Synthetic oligonucleotide
atagttttaatcctgagttggcatctgcgc

SEQ ID NO: 333101 - DNA, 30 bp, Artificial Sequence
  Synthetic oligonucleotide
cgtatggggtgggagcggtccggagtgcgc

SEQ ID NO: 333102 - DNA, 30 bp, Artificial Sequence
  Synthetic oligonucleotide
tagaattcgcgggtgttaatcttagtgcgc

SEQ ID NO: 333103 - DNA, 30 bp, Artificial Sequence
  Synthetic oligonucleotide
cacatagggtgcgtgtatatgcatgtgcgc

SEQ ID NO: 333104 - DNA, 30 bp, Artificial Sequence
  Synthetic oligonucleotide
atagttagttttagattcctgggtgtgcgc

SEQ ID NO: 333105 - DNA, 30 bp, Artificial Sequence
  Synthetic oligonucleotide
tgtatcgtcacaagagactcgcttgtgcgc

SEQ ID NO: 333106 - DNA, 30 bp, Artificial Sequence
  Synthetic oligonucleotide
acgcagtagaagggcggttagccattgcgc

SEQ ID NO: 333107 - DNA, 30 bp, Artificial Sequence
  Synthetic oligonucleotide
cgcggcaacgtcgtcaattaactaaatcgc

SEQ ID NO: 333108 - DNA, 30 bp, Artificial Sequence
  Synthetic oligonucleotide
tgattgcgcgtacctccaaagcccaatcgc

SEQ ID NO: 333109 - DNA, 30 bp, Artificial Sequence
  Synthetic oligonucleotide
tatgtcaaaataaattgttgcacgaatcgc

SEQ ID NO: 333110 - DNA, 30 bp, Artificial Sequence
  Synthetic oligonucleotide
attttcatgcctcgcatcgagttgaatcgc

SEQ ID NO: 333111 - DNA, 30 bp, Artificial Sequence
  Synthetic oligonucleotide
tcgtatgtccgttgtgcaggtttgaatcgc

SEQ ID NO: 333112 - DNA, 30 bp, Artificial Sequence
  Synthetic oligonucleotide
ttgcccgaagctattatttatgaacatcgc

SEQ ID NO: 333113 - DNA, 30 bp, Artificial Sequence
  Synthetic oligonucleotide
caattatttcactctcggggataacatcgc

SEQ ID NO: 333114 - DNA, 30 bp, Artificial Sequence
  Synthetic oligonucleotide
ctcgtgcaagcggatcggcgcagacatcgc

SEQ ID NO: 333115 - DNA, 30 bp, Artificial Sequence
  Synthetic oligonucleotide
ggatgctaactgggttgcagtttacatcgc

SEQ ID NO: 333116 - DNA, 30 bp, Artificial Sequence
  Synthetic oligonucleotide
ccgccatccccgttcatatctaatcatcgc

SEQ ID NO: 333117 - DNA, 30 bp, Artificial Sequence
  Synthetic oligonucleotide
aaagtaatataatatgtcaatcgagatcgc

SEQ ID NO: 333118 - DNA, 30 bp, Artificial Sequence
  Synthetic oligonucleotide
aattcggccctacagcgaacttgagatcgc

SEQ ID NO: 333119 - DNA, 30 bp, Artificial Sequence
  Synthetic oligonucleotide
atcactcattacccgtcgatggtagatcgc

SEQ ID NO: 333120 - DNA, 30 bp, Artificial Sequence
  Synthetic oligonucleotide
gggaaagactctatcgcgtacaacgatcgc

SEQ ID NO: 333121 - DNA, 30 bp, Artificial Sequence
  Synthetic oligonucleotide
atagaagttaaggtccaccgtgaggatcgc

SEQ ID NO: 333122 - DNA, 30 bp, Artificial Sequence
  Synthetic oligonucleotide
cgccagacacctggctacagcctgtatcgc

SEQ ID NO: 333123 - DNA, 30 bp, Artificial Sequence
  Synthetic oligonucleotide
ggccagcgcgtccgccctcaattgtatcgc

SEQ ID NO: 333124 - DNA, 30 bp, Artificial Sequence
  Synthetic oligonucleotide
gagcacttgcgttctttgggtgcttatcgc

SEQ ID NO: 333125 - DNA, 30 bp, Artificial Sequence
  Synthetic oligonucleotide
gttctgattcaattacagcacgacactcgc

SEQ ID NO: 333126 - DNA, 30 bp, Artificial Sequence
  Synthetic oligonucleotide
tatcattagacaacccttgaggatactcgc

SEQ ID NO: 333127 - DNA, 30 bp, Artificial Sequence
  Synthetic oligonucleotide
aaatagcttgaacctggaacaagtactcgc

SEQ ID NO: 333128 - DNA, 30 bp, Artificial Sequence
  Synthetic oligonucleotide
gaattatccgggtctcgggttgatcctcgc

SEQ ID NO: 333129 - DNA, 30 bp, Artificial Sequence
  Synthetic oligonucleotide
tttacatgccccgtttactgatttcctcgc

SEQ ID NO: 333130 - DNA, 30 bp, Artificial Sequence
  Synthetic oligonucleotide
tatcctctttcgcgtaagggttgggctcgc

SEQ ID NO: 333131 - DNA, 30 bp, Artificial Sequence
  Synthetic oligonucleotide
gctgattaactagtagattttctggctcgc

SEQ ID NO: 333132 - DNA, 30 bp, Artificial Sequence
  Synthetic oligonucleotide
acgaagacacctttcctgtggtatgctcgc

SEQ ID NO: 333133 - DNA, 30 bp, Artificial Sequence
  Synthetic oligonucleotide
cttttatctgcgagattcttgtcatctcgc

SEQ ID NO: 333134 - DNA, 30 bp, Artificial Sequence
  Synthetic oligonucleotide
atgcatgatggtcatccgagattctctcgc

SEQ ID NO: 333135 - DNA, 30 bp, Artificial Sequence
  Synthetic oligonucleotide
cgataaggccagaacagggattggtctcgc

SEQ ID NO: 333136 - DNA, 30 bp, Artificial Sequence
  Synthetic oligonucleotide
tacgcaggcgtactatatcacttgtctcgc

SEQ ID NO: 333137 - DNA, 30 bp, Artificial Sequence
  Synthetic oligonucleotide
atgctggtgaagggacccgtcacttctcgc

SEQ ID NO: 333138 - DNA, 30 bp, Artificial Sequence
  Synthetic oligonucleotide
ggtagacgtgtataaatttctaaaagtcgc

SEQ ID NO: 333139 - DNA, 30 bp, Artificial Sequence
  Synthetic oligonucleotide
tgagggttagcaggctatacggaaagtcgc

SEQ ID NO: 333140 - DNA, 30 bp, Artificial Sequence
  Synthetic oligonucleotide
tgatggagtgtagtttatggtgaaagtcgc

SEQ ID NO: 333141 - DNA, 30 bp, Artificial Sequence
  Synthetic oligonucleotide
ggaagaaaggatacagcttagataagtcgc

SEQ ID NO: 333142 - DNA, 30 bp, Artificial Sequence
  Synthetic oligonucleotide
cttaacacggggttttttaagctaagtcgc

SEQ ID NO: 333143 - DNA, 30 bp, Artificial Sequence
  Synthetic oligonucleotide
gcgaacgcagtagagcattcgaccagtcgc

SEQ ID NO: 333144 - DNA, 30 bp, Artificial Sequence
  Synthetic oligonucleotide
gttcgctcacaaattggagttggcagtcgc

SEQ ID NO: 333145 - DNA, 30 bp, Artificial Sequence
  Synthetic oligonucleotide
cttcagggtaaatactgccattgcagtcgc

SEQ ID NO: 333146 - DNA, 30 bp, Artificial Sequence
  Synthetic oligonucleotide
actgggcataacaggtagacgcgacgtcgc

SEQ ID NO: 333147 - DNA, 30 bp, Artificial Sequence
  Synthetic oligonucleotide
aagggcaaaatgggctgactgccgcgtcgc

SEQ ID NO: 333148 - DNA, 30 bp, Artificial Sequence
  Synthetic oligonucleotide
aatgcgctgtcgtcattagttagtcgtcgc

SEQ ID NO: 333149 - DNA, 30 bp, Artificial Sequence
  Synthetic oligonucleotide
taagagtatgaggaacagccttttcgtcgc

SEQ ID NO: 333150 - DNA, 30 bp, Artificial Sequence
  Synthetic oligonucleotide
gcaaccacttagagaactgtaaaaggtcgc

SEQ ID NO: 333151 - DNA, 30 bp, Artificial Sequence
  Synthetic oligonucleotide
gggtagaccacagccaggcattgatgtcgc

SEQ ID NO: 333152 - DNA, 30 bp, Artificial Sequence
  Synthetic oligonucleotide
aacgatagcagataggcaccgatatgtcgc

SEQ ID NO: 333153 - DNA, 30 bp, Artificial Sequence
  Synthetic oligonucleotide
ttagatgtggacctgacttgatggattcgc

SEQ ID NO: 333154 - DNA, 30 bp, Artificial Sequence
  Synthetic oligonucleotide
tactgatgtcacctagtattactgattcgc

SEQ ID NO: 333155 - DNA, 30 bp, Artificial Sequence
  Synthetic oligonucleotide
taggaatagttatagatataacctattcgc

SEQ ID NO: 333156 - DNA, 30 bp, Artificial Sequence
  Synthetic oligonucleotide
tgtcttaattagataatgaactctattcgc

SEQ ID NO: 333157 - DNA, 30 bp, Artificial Sequence
  Synthetic oligonucleotide
cgcttggctgcctattaaggggttattcgc

SEQ ID NO: 333158 - DNA, 30 bp, Artificial Sequence
  Synthetic oligonucleotide
aggacatctctatcttagaactgccttcgc

SEQ ID NO: 333159 - DNA, 30 bp, Artificial Sequence
  Synthetic oligonucleotide
tttaatcgcactgagccaacctgtcttcgc

SEQ ID NO: 333160 - DNA, 30 bp, Artificial Sequence
  Synthetic oligonucleotide
cgtgagcaccgttgtgtttcgattcttcgc

SEQ ID NO: 333161 - DNA, 30 bp, Artificial Sequence
  Synthetic oligonucleotide
ggtaccgcaaaactgatcactgttgttcgc

SEQ ID NO: 333162 - DNA, 30 bp, Artificial Sequence
  Synthetic oligonucleotide
attgtaaatatatatagggggctatttcgc

SEQ ID NO: 333163 - DNA, 30 bp, Artificial Sequence
  Synthetic oligonucleotide
acagcgccttagggctaggggatctttcgc

SEQ ID NO: 333164 - DNA, 30 bp, Artificial Sequence
  Synthetic oligonucleotide
gcacggttgtccgcagacgggaagtttcgc

SEQ ID NO: 333165 - DNA, 30 bp, Artificial Sequence
  Synthetic oligonucleotide
ctgtccagagatcatgctgagctttttcgc

SEQ ID NO: 333166 - DNA, 30 bp, Artificial Sequence
  Synthetic oligonucleotide
gagggatggacggggtacagcttcaaaggc

SEQ ID NO: 333167 - DNA, 30 bp, Artificial Sequence
  Synthetic oligonucleotide
ggtccgtcatacagggtaatctagaaaggc

SEQ ID NO: 333168 - DNA, 30 bp, Artificial Sequence
  Synthetic oligonucleotide
attgtgtcgattagttttcaggtgaaaggc

SEQ ID NO: 333169 - DNA, 30 bp, Artificial Sequence
  Synthetic oligonucleotide
gcaatatagggcggtaggtggcataaaggc

SEQ ID NO: 333170 - DNA, 30 bp, Artificial Sequence
  Synthetic oligonucleotide
tcagttagtcgggttgattatcataaaggc

SEQ ID NO: 333171 - DNA, 30 bp, Artificial Sequence
  Synthetic oligonucleotide
ttggcaatcacatggtttccttataaaggc

SEQ ID NO: 333172 - DNA, 30 bp, Artificial Sequence
  Synthetic oligonucleotide
gagaactaatctggataggaacaacaaggc

SEQ ID NO: 333173 - DNA, 30 bp, Artificial Sequence
  Synthetic oligonucleotide
gatcaatacaaacgatcccgcagacaaggc

SEQ ID NO: 333174 - DNA, 30 bp, Artificial Sequence
  Synthetic oligonucleotide
ttcaaagttgtttatggatatagacaaggc

SEQ ID NO: 333175 - DNA, 30 bp, Artificial Sequence
  Synthetic oligonucleotide
cgatgggccagtgttaccaggtaccaaggc

SEQ ID NO: 333176 - DNA, 30 bp, Artificial Sequence
  Synthetic oligonucleotide
gcggttcctcgagttcggaacgttcaaggc

SEQ ID NO: 333177 - DNA, 30 bp, Artificial Sequence
  Synthetic oligonucleotide
tagggagcggcatgcgtggtatcagaaggc

SEQ ID NO: 333178 - DNA, 30 bp, Artificial Sequence
  Synthetic oligonucleotide
gctgtcaatcccgagactaaacgagaaggc

SEQ ID NO: 333179 - DNA, 30 bp, Artificial Sequence
  Synthetic oligonucleotide
ttgccctacgtcgtatctggaggcgaaggc

SEQ ID NO: 333180 - DNA, 30 bp, Artificial Sequence
  Synthetic oligonucleotide
ttacacttaaaggttacagtagtggaaggc

SEQ ID NO: 333181 - DNA, 30 bp, Artificial Sequence
  Synthetic oligonucleotide
aggtcgttcacctctgctatggatgaaggc

SEQ ID NO: 333182 - DNA, 30 bp, Artificial Sequence
  Synthetic oligonucleotide
gagtggatagtgccatcggcttaataaggc

SEQ ID NO: 333183 - DNA, 30 bp, Artificial Sequence
  Synthetic oligonucleotide
atccagacggtagcgctcagacactaaggc

SEQ ID NO: 333184 - DNA, 30 bp, Artificial Sequence
  Synthetic oligonucleotide
ggcaaacactacgacacgccttactaaggc

SEQ ID NO: 333185 - DNA, 30 bp, Artificial Sequence
  Synthetic oligonucleotide
taaattctgtgtagacaaaaatgctaaggc

SEQ ID NO: 333186 - DNA, 30 bp, Artificial Sequence
  Synthetic oligonucleotide
ggttagttattcctcgactcgcattaaggc

SEQ ID NO: 333187 - DNA, 30 bp, Artificial Sequence
  Synthetic oligonucleotide
gggagttctgagcacaaggggtattaaggc

SEQ ID NO: 333188 - DNA, 30 bp, Artificial Sequence
  Synthetic oligonucleotide
accttctacggcaccgacttcaagacaggc

SEQ ID NO: 333189 - DNA, 30 bp, Artificial Sequence
  Synthetic oligonucleotide
acatggtttgacgaggcgtaggcgacaggc

SEQ ID NO: 333190 - DNA, 30 bp, Artificial Sequence
  Synthetic oligonucleotide
attcaggctaaggcgtatccgtcgacaggc

SEQ ID NO: 333191 - DNA, 30 bp, Artificial Sequence
  Synthetic oligonucleotide
aggcgctacctttccttcaatactacaggc

SEQ ID NO: 333192 - DNA, 30 bp, Artificial Sequence
  Synthetic oligonucleotide
tggtctccccttgtgcgacgggctacaggc

SEQ ID NO: 333193 - DNA, 30 bp, Artificial Sequence
  Synthetic oligonucleotide
agtcaactgaagcaccttgccggtacaggc

SEQ ID NO: 333194 - DNA, 30 bp, Artificial Sequence
  Synthetic oligonucleotide
cctgtcacaattacataattctgtacaggc

SEQ ID NO: 333195 - DNA, 30 bp, Artificial Sequence
  Synthetic oligonucleotide
taggcaacttttgaaggggtggacccaggc

SEQ ID NO: 333196 - DNA, 30 bp, Artificial Sequence
  Synthetic oligonucleotide
ctgcaccgatggtttaatctatctccaggc

SEQ ID NO: 333197 - DNA, 30 bp, Artificial Sequence
  Synthetic oligonucleotide
ctgtggctgaaggcggctgcgacagcaggc

SEQ ID NO: 333198 - DNA, 30 bp, Artificial Sequence
  Synthetic oligonucleotide
cgttcagccgggtaaatacgttgggcaggc

SEQ ID NO: 333199 - DNA, 30 bp, Artificial Sequence
  Synthetic oligonucleotide
ccttggatgaggcactacgatacatcaggc

SEQ ID NO: 333200 - DNA, 30 bp, Artificial Sequence
  Synthetic oligonucleotide
cggccttcgtatgttatgcatcgatcaggc

SEQ ID NO: 333201 - DNA, 30 bp, Artificial Sequence
  Synthetic oligonucleotide
acaatgacctcacctgccctgtgatcaggc

SEQ ID NO: 333202 - DNA, 30 bp, Artificial Sequence
  Synthetic oligonucleotide
tattcgattgcaggacgcgagacgtcaggc

SEQ ID NO: 333203 - DNA, 30 bp, Artificial Sequence
  Synthetic oligonucleotide
tatagcagaacgtaatgggcctggtcaggc

SEQ ID NO: 333204 - DNA, 30 bp, Artificial Sequence
  Synthetic oligonucleotide
gtcaaataatgtcagacgttaatgtcaggc

SEQ ID NO: 333205 - DNA, 30 bp, Artificial Sequence
  Synthetic oligonucleotide
ttgcctatgtccgttgtgggaaaaagaggc

SEQ ID NO: 333206 - DNA, 30 bp, Artificial Sequence
  Synthetic oligonucleotide
gttcgaagttttcctcactgtgcaagaggc

SEQ ID NO: 333207 - DNA, 30 bp, Artificial Sequence
  Synthetic oligonucleotide
gaggtcgatgcacgtcggtaagtaagaggc

SEQ ID NO: 333208 - DNA, 30 bp, Artificial Sequence
  Synthetic oligonucleotide
gaggaaactaatgcgagattgaccagaggc

SEQ ID NO: 333209 - DNA, 30 bp, Artificial Sequence
  Synthetic oligonucleotide
gtctcagcatttgctcactacggacgaggc

SEQ ID NO: 333210 - DNA, 30 bp, Artificial Sequence
  Synthetic oligonucleotide
cgaagacgtgaggccgagtctccccgaggc

SEQ ID NO: 333211 - DNA, 30 bp, Artificial Sequence
  Synthetic oligonucleotide
ttgcaagaatcgtcggtttatccgcgaggc

SEQ ID NO: 333212 - DNA, 30 bp, Artificial Sequence
  Synthetic oligonucleotide
gctaaccttataggatgcttagaaggaggc

SEQ ID NO: 333213 - DNA, 30 bp, Artificial Sequence
  Synthetic oligonucleotide
gtagatctccgtggctgcaagttaggaggc

SEQ ID NO: 333214 - DNA, 30 bp, Artificial Sequence
  Synthetic oligonucleotide
gcaggatgctattcaacagtccacggaggc

SEQ ID NO: 333215 - DNA, 30 bp, Artificial Sequence
  Synthetic oligonucleotide
accaatgagcacagtgatgaattcggaggc

SEQ ID NO: 333216 - DNA, 30 bp, Artificial Sequence
  Synthetic oligonucleotide
ttattgcctgtcaataccttgaatggaggc

SEQ ID NO: 333217 - DNA, 30 bp, Artificial Sequence
  Synthetic oligonucleotide
actttgagtggctccgtcagacatggaggc

SEQ ID NO: 333218 - DNA, 30 bp, Artificial Sequence
  Synthetic oligonucleotide
caccacatgaagagaacagatcatggaggc

SEQ ID NO: 333219 - DNA, 30 bp, Artificial Sequence
  Synthetic oligonucleotide
gccacgtgtgtcagagtcgccggtggaggc

SEQ ID NO: 333220 - DNA, 30 bp, Artificial Sequence
  Synthetic oligonucleotide
gccgcatccagagccgcctaaattggaggc

SEQ ID NO: 333221 - DNA, 30 bp, Artificial Sequence
  Synthetic oligonucleotide
gtagctgtggatgtcgagtcaattggaggc

SEQ ID NO: 333222 - DNA, 30 bp, Artificial Sequence
  Synthetic oligonucleotide
ccgacggggactagccgtcggcactgaggc

SEQ ID NO: 333223 - DNA, 30 bp, Artificial Sequence
  Synthetic oligonucleotide
gcgcttgcgaagacatagagtttctgaggc

SEQ ID NO: 333224 - DNA, 30 bp, Artificial Sequence
  Synthetic oligonucleotide
ggcatatgggtatggcgggatgcaataggc

SEQ ID NO: 333225 - DNA, 30 bp, Artificial Sequence
  Synthetic oligonucleotide
aaacactgagctggccggagtcacataggc

SEQ ID NO: 333226 - DNA, 30 bp, Artificial Sequence
  Synthetic oligonucleotide
aggcccgactaggccacataggccataggc

SEQ ID NO: 333227 - DNA, 30 bp, Artificial Sequence
  Synthetic oligonucleotide
gcggtaacgtcgtcgacgaatgccataggc

SEQ ID NO: 333228 - DNA, 30 bp, Artificial Sequence
  Synthetic oligonucleotide
agggttatgctgacatcgccagagataggc

SEQ ID NO: 333229 - DNA, 30 bp, Artificial Sequence
  Synthetic oligonucleotide
aacgtatgtaaaagcttttaaaggataggc

SEQ ID NO: 333230 - DNA, 30 bp, Artificial Sequence
  Synthetic oligonucleotide
gattcccgcgggttcaatgcatatataggc

SEQ ID NO: 333231 - DNA, 30 bp, Artificial Sequence
  Synthetic oligonucleotide
ctaagagcggacttttgttttactataggc

SEQ ID NO: 333232 - DNA, 30 bp, Artificial Sequence
  Synthetic oligonucleotide
acttgcaactcggtaagaagggctataggc

SEQ ID NO: 333233 - DNA, 30 bp, Artificial Sequence
  Synthetic oligonucleotide
tgctccgctagagtccgtgaatttataggc

SEQ ID NO: 333234 - DNA, 30 bp, Artificial Sequence
  Synthetic oligonucleotide
gcatcttatgtcagaagaacgcgactaggc

SEQ ID NO: 333235 - DNA, 30 bp, Artificial Sequence
  Synthetic oligonucleotide
ggccgatatgtggtgcgatggggactaggc

SEQ ID NO: 333236 - DNA, 30 bp, Artificial Sequence
  Synthetic oligonucleotide
cggggtaaaatcatgcggcgtagcctaggc

SEQ ID NO: 333237 - DNA, 30 bp, Artificial Sequence
  Synthetic oligonucleotide
ggttagtacgtgaagctcacagtcctaggc

SEQ ID NO: 333238 - DNA, 30 bp, Artificial Sequence
  Synthetic oligonucleotide
gagtccagtaatattgaatctacgctaggc

SEQ ID NO: 333239 - DNA, 30 bp, Artificial Sequence
  Synthetic oligonucleotide
ggagccccggagtaccgacacgttctaggc

SEQ ID NO: 333240 - DNA, 30 bp, Artificial Sequence
  Synthetic oligonucleotide
taacaatgttagagtcgccactccgtaggc

SEQ ID NO: 333241 - DNA, 30 bp, Artificial Sequence
  Synthetic oligonucleotide
ccaattgtaagtcccgtacctaaggtaggc

SEQ ID NO: 333242 - DNA, 30 bp, Artificial Sequence
  Synthetic oligonucleotide
gagcgtcgcgcgcccaaagccagggtaggc

SEQ ID NO: 333243 - DNA, 30 bp, Artificial Sequence
  Synthetic oligonucleotide
taatgcggcatcccaataccccgggtaggc

SEQ ID NO: 333244 - DNA, 30 bp, Artificial Sequence
  Synthetic oligonucleotide
cacatagcctagttttttaatggtgtaggc

SEQ ID NO: 333245 - DNA, 30 bp, Artificial Sequence
  Synthetic oligonucleotide
gggcttcccgaagatgttaggaaattaggc

SEQ ID NO: 333246 - DNA, 30 bp, Artificial Sequence
  Synthetic oligonucleotide
ctgtcgggacatacacggtgtcaattaggc

SEQ ID NO: 333247 - DNA, 30 bp, Artificial Sequence
  Synthetic oligonucleotide
agcaggcgggctttatcatccgcattaggc

SEQ ID NO: 333248 - DNA, 30 bp, Artificial Sequence
  Synthetic oligonucleotide
gatagtatgtaccagatggaccgaaacggc

SEQ ID NO: 333249 - DNA, 30 bp, Artificial Sequence
  Synthetic oligonucleotide
ttaaggcgaaccttttagcgttgaaacggc

SEQ ID NO: 333250 - DNA, 30 bp, Artificial Sequence
  Synthetic oligonucleotide
aggggaatttagctggcttaatccaacggc

SEQ ID NO: 333251 - DNA, 30 bp, Artificial Sequence
  Synthetic oligonucleotide
tctttatgcgttaggtaatcccgcaacggc

SEQ ID NO: 333252 - DNA, 30 bp, Artificial Sequence
  Synthetic oligonucleotide
aaaaccatataactattctctatcaacggc

SEQ ID NO: 333253 - DNA, 30 bp, Artificial Sequence
  Synthetic oligonucleotide
gggtcaggggtctgtcaggatgagaacggc

SEQ ID NO: 333254 - DNA, 30 bp, Artificial Sequence
  Synthetic oligonucleotide
gcattgtagcgcgcccaaggaagtaacggc

SEQ ID NO: 333255 - DNA, 30 bp, Artificial Sequence
  Synthetic oligonucleotide
aaaccgatcaaggtattcgaagaacacggc

SEQ ID NO: 333256 - DNA, 30 bp, Artificial Sequence
  Synthetic oligonucleotide
ttcctgcactatatcagaaaagcacacggc

SEQ ID NO: 333257 - DNA, 30 bp, Artificial Sequence
  Synthetic oligonucleotide
aagggagaaatgggaggggacggacacggc

SEQ ID NO: 333258 - DNA, 30 bp, Artificial Sequence
  Synthetic oligonucleotide
tacgcggagtacagacaaacatatcacggc

SEQ ID NO: 333259 - DNA, 30 bp, Artificial Sequence
  Synthetic oligonucleotide
aaaaatgaactgcacgagattggagacggc

SEQ ID NO: 333260 - DNA, 30 bp, Artificial Sequence
  Synthetic oligonucleotide
gcagctgcggaagtactgctagtcgacggc

SEQ ID NO: 333261 - DNA, 30 bp, Artificial Sequence
  Synthetic oligonucleotide
cgttgcctaaggtgtttcgacgtggacggc

SEQ ID NO: 333262 - DNA, 30 bp, Artificial Sequence
  Synthetic oligonucleotide
gcaatgaaggaagtccatggaaatgacggc

SEQ ID NO: 333263 - DNA, 30 bp, Artificial Sequence
  Synthetic oligonucleotide
cggtgttacatatacatccggtcatacggc

SEQ ID NO: 333264 - DNA, 30 bp, Artificial Sequence
  Synthetic oligonucleotide
acatcaagatcgtgaatcatgttctacggc

SEQ ID NO: 333265 - DNA, 30 bp, Artificial Sequence
  Synthetic oligonucleotide
ttaacggttggtaactagaagtcgtacggc

SEQ ID NO: 333266 - DNA, 30 bp, Artificial Sequence
  Synthetic oligonucleotide
gcgaatcttttgctcgattatatttacggc

SEQ ID NO: 333267 - DNA, 30 bp, Artificial Sequence
  Synthetic oligonucleotide
aagtcggttttctcaagttagcaaaccggc

SEQ ID NO: 333268 - DNA, 30 bp, Artificial Sequence
  Synthetic oligonucleotide
cactatgaaagggtaagcgtagcaaccggc

SEQ ID NO: 333269 - DNA, 30 bp, Artificial Sequence
  Synthetic oligonucleotide
gaacgatcgcctacgacgcatgcgaccggc

SEQ ID NO: 333270 - DNA, 30 bp, Artificial Sequence
  Synthetic oligonucleotide
taactgcctgaagattgatgtcctaccggc

SEQ ID NO: 333271 - DNA, 30 bp, Artificial Sequence
  Synthetic oligonucleotide
ctcgattctcatgaagttctgtgacccggc

SEQ ID NO: 333272 - DNA, 30 bp, Artificial Sequence
  Synthetic oligonucleotide
ggttatactagtcagaaggataggcccggc

SEQ ID NO: 333273 - DNA, 30 bp, Artificial Sequence
  Synthetic oligonucleotide
gcgcggagataggcaacacaagggcccggc

SEQ ID NO: 333274 - DNA, 30 bp, Artificial Sequence
  Synthetic oligonucleotide
ccttactcttggagagctagctctcccggc

SEQ ID NO: 333275 - DNA, 30 bp, Artificial Sequence
  Synthetic oligonucleotide
gcagaggagttggtccatattccggccggc

SEQ ID NO: 333276 - DNA, 30 bp, Artificial Sequence
  Synthetic oligonucleotide
ggtcctctttttctgcataaaaactccggc

SEQ ID NO: 333277 - DNA, 30 bp, Artificial Sequence
  Synthetic oligonucleotide
atcgcgctagtggcgctaaagaactccggc

SEQ ID NO: 333278 - DNA, 30 bp, Artificial Sequence
  Synthetic oligonucleotide
gtgactcgaggtacgtaaccctactccggc

SEQ ID NO: 333279 - DNA, 30 bp, Artificial Sequence
  Synthetic oligonucleotide
cattaaacattttcaccggtctgctccggc

SEQ ID NO: 333280 - DNA, 30 bp, Artificial Sequence
  Synthetic oligonucleotide
gcgagtcaggtaggcagaaaatagtccggc

SEQ ID NO: 333281 - DNA, 30 bp, Artificial Sequence
  Synthetic oligonucleotide
ggaacgtgggcccgtctatgggggtccggc

SEQ ID NO: 333282 - DNA, 30 bp, Artificial Sequence
  Synthetic oligonucleotide
agttgatttaattaaacaagtatgtccggc

SEQ ID NO: 333283 - DNA, 30 bp, Artificial Sequence
  Synthetic oligonucleotide
cacagtaccgaccatgactgaagaagcggc

SEQ ID NO: 333284 - DNA, 30 bp, Artificial Sequence
  Synthetic oligonucleotide
ctgcacataccgaccttggagctcagcggc

SEQ ID NO: 333285 - DNA, 30 bp, Artificial Sequence
  Synthetic oligonucleotide
aagtagttacgaaatcgtcgcgctagcggc

SEQ ID NO: 333286 - DNA, 30 bp, Artificial Sequence
  Synthetic oligonucleotide
tggtaggaagtcgcagtcactagtagcggc

SEQ ID NO: 333287 - DNA, 30 bp, Artificial Sequence
  Synthetic oligonucleotide
agcaaagcatacccaccacacggtagcggc

SEQ ID NO: 333288 - DNA, 30 bp, Artificial Sequence
  Synthetic oligonucleotide
aatcgatggcggaaatagccacttagcggc

SEQ ID NO: 333289 - DNA, 30 bp, Artificial Sequence
  Synthetic oligonucleotide
cgtagtctcatccccgcctgtgtacgcggc

SEQ ID NO: 333290 - DNA, 30 bp, Artificial Sequence
  Synthetic oligonucleotide
agtagctcccgcctgtaagggccgcgcggc

SEQ ID NO: 333291 - DNA, 30 bp, Artificial Sequence
  Synthetic oligonucleotide
gcgcgtttctcatagcctcgagcgcgcggc

SEQ ID NO: 333292 - DNA, 30 bp, Artificial Sequence
  Synthetic oligonucleotide
ccgtcctggagagttgacagccaaggcggc

SEQ ID NO: 333293 - DNA, 30 bp, Artificial Sequence
  Synthetic oligonucleotide
ctggtaattatctatcgtttactctgcggc

SEQ ID NO: 333294 - DNA, 30 bp, Artificial Sequence
  Synthetic oligonucleotide
ttacaggagaataggtaaacaagttgcggc

SEQ ID NO: 333295 - DNA, 30 bp, Artificial Sequence
  Synthetic oligonucleotide
ctagtacccaccgaaccttggttttgcggc

SEQ ID NO: 333296 - DNA, 30 bp, Artificial Sequence
  Synthetic oligonucleotide
tggtagtcgatgaaagttttgttttgcggc

SEQ ID NO: 333297 - DNA, 30 bp, Artificial Sequence
  Synthetic oligonucleotide
cacatggctaatctgttggtgacaatcggc

SEQ ID NO: 333298 - DNA, 30 bp, Artificial Sequence
  Synthetic oligonucleotide
ctacagatcggccgttgtctcagaatcggc

SEQ ID NO: 333299 - DNA, 30 bp, Artificial Sequence
  Synthetic oligonucleotide
gcgtcacgccgctgatgggccgtaatcggc

SEQ ID NO: 333300 - DNA, 30 bp, Artificial Sequence
  Synthetic oligonucleotide
aaaggcgtatttcgggcgggaaacatcggc

SEQ ID NO: 333301 - DNA, 30 bp, Artificial Sequence
  Synthetic oligonucleotide
ggctagagccacgcgagctgaggcatcggc

SEQ ID NO: 333302 - DNA, 30 bp, Artificial Sequence
  Synthetic oligonucleotide
cagctgttggcaattagttgatgcatcggc

SEQ ID NO: 333303 - DNA, 30 bp, Artificial Sequence
  Synthetic oligonucleotide
cgtgtacctcaacgcgcctcgatcatcggc

SEQ ID NO: 333304 - DNA, 30 bp, Artificial Sequence
  Synthetic oligonucleotide
ttccaaagatattaattgtacaagatcggc

SEQ ID NO: 333305 - DNA, 30 bp, Artificial Sequence
  Synthetic oligonucleotide
cacaggtcttccgtggggcatcctatcggc

SEQ ID NO: 333306 - DNA, 30 bp, Artificial Sequence
  Synthetic oligonucleotide
tgtatcatggttacacagctgagtatcggc

SEQ ID NO: 333307 - DNA, 30 bp, Artificial Sequence
  Synthetic oligonucleotide
aaacggggacggtaggacccgcgtatcggc

SEQ ID NO: 333308 - DNA, 30 bp, Artificial Sequence
  Synthetic oligonucleotide
attgttataaatgagataaatgcactcggc

SEQ ID NO: 333309 - DNA, 30 bp, Artificial Sequence
  Synthetic oligonucleotide
catgtcggatagcaacagacgctactcggc

SEQ ID NO: 333310 - DNA, 30 bp, Artificial Sequence
  Synthetic oligonucleotide
acccctgtagctcctaggctaaggctcggc

SEQ ID NO: 333311 - DNA, 30 bp, Artificial Sequence
  Synthetic oligonucleotide
agagaccaggtgtcctgcccggggctcggc

SEQ ID NO: 333312 - DNA, 30 bp, Artificial Sequence
  Synthetic oligonucleotide
ctgatcagggccaatggttcggttctcggc

SEQ ID NO: 333313 - DNA, 30 bp, Artificial Sequence
  Synthetic oligonucleotide
aactagccttatgttatcggcaaagtcggc

SEQ ID NO: 333314 - DNA, 30 bp, Artificial Sequence
  Synthetic oligonucleotide
gttcggaacaaactatagactgcagtcggc

SEQ ID NO: 333315 - DNA, 30 bp, Artificial Sequence
  Synthetic oligonucleotide
gttattgaacgagcaagatgcgtagtcggc

SEQ ID NO: 333316 - DNA, 30 bp, Artificial Sequence
  Synthetic oligonucleotide
actcgtgccccgaacaattagatcgtcggc

SEQ ID NO: 333317 - DNA, 30 bp, Artificial Sequence
  Synthetic oligonucleotide
gtgggttggacgtgttaccgagaggtcggc

SEQ ID NO: 333318 - DNA, 30 bp, Artificial Sequence
  Synthetic oligonucleotide
gccggcaagatactgtctgtacaattcggc

SEQ ID NO: 333319 - DNA, 30 bp, Artificial Sequence
  Synthetic oligonucleotide
gtgtcagcggtagggtgttgagaattcggc

SEQ ID NO: 333320 - DNA, 30 bp, Artificial Sequence
  Synthetic oligonucleotide
attcggtgcaacgtgtcggtttcgttcggc

SEQ ID NO: 333321 - DNA, 30 bp, Artificial Sequence
  Synthetic oligonucleotide
cgctgtacgaaagaggtcagtgctttcggc

SEQ ID NO: 333322 - DNA, 30 bp, Artificial Sequence
  Synthetic oligonucleotide
attaaagctgctggaagtttcggaaagggc

SEQ ID NO: 333323 - DNA, 30 bp, Artificial Sequence
  Synthetic oligonucleotide
tggtcggaataccagcggtcgcccaagggc

SEQ ID NO: 333324 - DNA, 30 bp, Artificial Sequence
  Synthetic oligonucleotide
gcaaaccccgtaaggagtatccgcaagggc

SEQ ID NO: 333325 - DNA, 30 bp, Artificial Sequence
  Synthetic oligonucleotide
ataatacattacaaggacagcaggaagggc

SEQ ID NO: 333326 - DNA, 30 bp, Artificial Sequence
  Synthetic oligonucleotide
gggggacgccgttataggaaaattaagggc

SEQ ID NO: 333327 - DNA, 30 bp, Artificial Sequence
  Synthetic oligonucleotide
ttaagtgtctggacagtgatagcacagggc

SEQ ID NO: 333328 - DNA, 30 bp, Artificial Sequence
  Synthetic oligonucleotide
aagtaataataggaggtatctcagcagggc

SEQ ID NO: 333329 - DNA, 30 bp, Artificial Sequence
  Synthetic oligonucleotide
accgctagcggggaaatgcgcacgcagggc

SEQ ID NO: 333330 - DNA, 30 bp, Artificial Sequence
  Synthetic oligonucleotide
ttaatagccaaatgattgttccaagagggc

SEQ ID NO: 333331 - DNA, 30 bp, Artificial Sequence
  Synthetic oligonucleotide
cccgtttctgattgcatgtcaggagagggc

SEQ ID NO: 333332 - DNA, 30 bp, Artificial Sequence
  Synthetic oligonucleotide
acaaccttgggactcgtgcctggggagggc

SEQ ID NO: 333333 - DNA, 30 bp, Artificial Sequence
  Synthetic oligonucleotide
tggttattaaacaaaattgtacttgagggc

SEQ ID NO: 333334 - DNA, 30 bp, Artificial Sequence
  Synthetic oligonucleotide
atatctttatagagcgcgaaaaaatagggc

SEQ ID NO: 333335 - DNA, 30 bp, Artificial Sequence
  Synthetic oligonucleotide
taatagatcgcggtagttgtcagctagggc

SEQ ID NO: 333336 - DNA, 30 bp, Artificial Sequence
  Synthetic oligonucleotide
gcttcagattggcacacctttagctagggc

SEQ ID NO: 333337 - DNA, 30 bp, Artificial Sequence
  Synthetic oligonucleotide
ggcatcttaaccgtgcgtctgatcacgggc

SEQ ID NO: 333338 - DNA, 30 bp, Artificial Sequence
  Synthetic oligonucleotide
tggacatatggcagctaggcgttcacgggc

SEQ ID NO: 333339 - DNA, 30 bp, Artificial Sequence
  Synthetic oligonucleotide
aaacttttggaataaaacagaacgacgggc

SEQ ID NO: 333340 - DNA, 30 bp, Artificial Sequence
  Synthetic oligonucleotide
tcacccgctgtaggaccaacgtggacgggc

SEQ ID NO: 333341 - DNA, 30 bp, Artificial Sequence
  Synthetic oligonucleotide
gctattgaacatcccctttgttgtacgggc

SEQ ID NO: 333342 - DNA, 30 bp, Artificial Sequence
  Synthetic oligonucleotide
gaggccatatgcatttacctgtccccgggc

SEQ ID NO: 333343 - DNA, 30 bp, Artificial Sequence
  Synthetic oligonucleotide
agtccgaggggcgggcagacgagcccgggc

SEQ ID NO: 333344 - DNA, 30 bp, Artificial Sequence
  Synthetic oligonucleotide
tattgacctacaggtgcattgctgccgggc

SEQ ID NO: 333345 - DNA, 30 bp, Artificial Sequence
  Synthetic oligonucleotide
tgggtgaggggaatggtggtggatccgggc

SEQ ID NO: 333346 - DNA, 30 bp, Artificial Sequence
  Synthetic oligonucleotide
tatgtcgagagtcaattgatagcagcgggc

SEQ ID NO: 333347 - DNA, 30 bp, Artificial Sequence
  Synthetic oligonucleotide
aagcgctgcaccggcttaacgatagcgggc

SEQ ID NO: 333348 - DNA, 30 bp, Artificial Sequence
  Synthetic oligonucleotide
taagcgcgggagggggcgtgctccgcgggc

SEQ ID NO: 333349 - DNA, 30 bp, Artificial Sequence
  Synthetic oligonucleotide
gtgtgaggtatgcaggggagccgggcgggc

SEQ ID NO: 333350 - DNA, 30 bp, Artificial Sequence
  Synthetic oligonucleotide
gacgttaatggacggagtgtcttggcgggc

SEQ ID NO: 333351 - DNA, 30 bp, Artificial Sequence
  Synthetic oligonucleotide
ataatgcctagtcccagggtcgctgcgggc

SEQ ID NO: 333352 - DNA, 30 bp, Artificial Sequence
  Synthetic oligonucleotide
aagtttatatcaatggaaacacgatcgggc

SEQ ID NO: 333353 - DNA, 30 bp, Artificial Sequence
  Synthetic oligonucleotide
gctcgatttctgatttgggacaactcgggc

SEQ ID NO: 333354 - DNA, 30 bp, Artificial Sequence
  Synthetic oligonucleotide
gttagcagtcctcaagtccctacctcgggc

SEQ ID NO: 333355 - DNA, 30 bp, Artificial Sequence
  Synthetic oligonucleotide
agccttgcactttgagcacactgttcgggc

SEQ ID NO: 333356 - DNA, 30 bp, Artificial Sequence
  Synthetic oligonucleotide
atgcgatgcaggaccggccattaaaggggc

SEQ ID NO: 333357 - DNA, 30 bp, Artificial Sequence
  Synthetic oligonucleotide
taagtacaccagatatgagactcaaggggc

SEQ ID NO: 333358 - DNA, 30 bp, Artificial Sequence
  Synthetic oligonucleotide
cgaatgagaggctatgcccacggaaggggc

SEQ ID NO: 333359 - DNA, 30 bp, Artificial Sequence
  Synthetic oligonucleotide
ggatgatctgggtttcatgttggaaggggc

SEQ ID NO: 333360 - DNA, 30 bp, Artificial Sequence
  Synthetic oligonucleotide
cggctccttgagccctcttcgctaaggggc

SEQ ID NO: 333361 - DNA, 30 bp, Artificial Sequence
  Synthetic oligonucleotide
cgggcagcctgtaaacgaagtaagaggggc

SEQ ID NO: 333362 - DNA, 30 bp, Artificial Sequence
  Synthetic oligonucleotide
ccgtctttctaaccagacatgcagaggggc

SEQ ID NO: 333363 - DNA, 30 bp, Artificial Sequence
  Synthetic oligonucleotide
gcttgagttctctaggggagcacgaggggc

SEQ ID NO: 333364 - DNA, 30 bp, Artificial Sequence
  Synthetic oligonucleotide
agttaccccgattgatggatcgggaggggc

SEQ ID NO: 333365 - DNA, 30 bp, Artificial Sequence
  Synthetic oligonucleotide
ggggacaaatcggctgtccgaggtaggggc

SEQ ID NO: 333366 - DNA, 30 bp, Artificial Sequence
  Synthetic oligonucleotide
gacacccacagagtcacttaaaaacggggc

SEQ ID NO: 333367 - DNA, 30 bp, Artificial Sequence
  Synthetic oligonucleotide
acgggaaatgtcatccctcacacacggggc

SEQ ID NO: 333368 - DNA, 30 bp, Artificial Sequence
  Synthetic oligonucleotide
gactgggcagataatgggactacacggggc

SEQ ID NO: 333369 - DNA, 30 bp, Artificial Sequence
  Synthetic oligonucleotide
gtgggggctagggggtaatcatgacggggc

SEQ ID NO: 333370 - DNA, 30 bp, Artificial Sequence
  Synthetic oligonucleotide
ccgccgagcttagtcacgtccctccggggc

SEQ ID NO: 333371 - DNA, 30 bp, Artificial Sequence
  Synthetic oligonucleotide
aagccttagtagaagctaggcaagcggggc

SEQ ID NO: 333372 - DNA, 30 bp, Artificial Sequence
  Synthetic oligonucleotide
atgccttcgcgttataggcaaacgcggggc

SEQ ID NO: 333373 - DNA, 30 bp, Artificial Sequence
  Synthetic oligonucleotide
ggcaatacggttctaggattatcgcggggc

SEQ ID NO: 333374 - DNA, 30 bp, Artificial Sequence
  Synthetic oligonucleotide
gggtcatttatcctgtattgatggcggggc

SEQ ID NO: 333375 - DNA, 30 bp, Artificial Sequence
  Synthetic oligonucleotide
ttgcaggggccgcgacggaaacttcggggc

SEQ ID NO: 333376 - DNA, 30 bp, Artificial Sequence
  Synthetic oligonucleotide
ttatgcaagcgcggactccagagagggggc

SEQ ID NO: 333377 - DNA, 30 bp, Artificial Sequence
  Synthetic oligonucleotide
aggacgaacgtagcagttaaatccgggggc

SEQ ID NO: 333378 - DNA, 30 bp, Artificial Sequence
  Synthetic oligonucleotide
aacgcgtggctggatcactgtaaggggggc

SEQ ID NO: 333379 - DNA, 30 bp, Artificial Sequence
  Synthetic oligonucleotide
tactaagcactagctgtatttcaggggggc

SEQ ID NO: 333380 - DNA, 30 bp, Artificial Sequence
  Synthetic oligonucleotide
ttgagcatcttttgtaagtaaggtgggggc

SEQ ID NO: 333381 - DNA, 30 bp, Artificial Sequence
  Synthetic oligonucleotide
ataaaccctcgacttccagccacgtggggc

SEQ ID NO: 333382 - DNA, 30 bp, Artificial Sequence
  Synthetic oligonucleotide
acgattagagtcggatctaggaggtggggc

SEQ ID NO: 333383 - DNA, 30 bp, Artificial Sequence
  Synthetic oligonucleotide
cgggttttgaagcccagagcggggtggggc

SEQ ID NO: 333384 - DNA, 30 bp, Artificial Sequence
  Synthetic oligonucleotide
tttctaaaaatctcaaagagatattggggc

SEQ ID NO: 333385 - DNA, 30 bp, Artificial Sequence
  Synthetic oligonucleotide
tccatcggatatacgcgtagagtttggggc

SEQ ID NO: 333386 - DNA, 30 bp, Artificial Sequence
  Synthetic oligonucleotide
tcccttgggaagcggtaggtcgacatgggc

SEQ ID NO: 333387 - DNA, 30 bp, Artificial Sequence
  Synthetic oligonucleotide
agggttagttacgctaaggattacatgggc

SEQ ID NO: 333388 - DNA, 30 bp, Artificial Sequence
  Synthetic oligonucleotide
gtagtctatggcctgagcacgaggatgggc

SEQ ID NO: 333389 - DNA, 30 bp, Artificial Sequence
  Synthetic oligonucleotide
agatcttcttgtgtagttactcatatgggc

SEQ ID NO: 333390 - DNA, 30 bp, Artificial Sequence
  Synthetic oligonucleotide
gaacatatttatactcatgtcgatatgggc

SEQ ID NO: 333391 - DNA, 30 bp, Artificial Sequence
  Synthetic oligonucleotide
tatgttatgatcatgaacggatatatgggc

SEQ ID NO: 333392 - DNA, 30 bp, Artificial Sequence
  Synthetic oligonucleotide
gtcatatgctccaacccgtggattatgggc

SEQ ID NO: 333393 - DNA, 30 bp, Artificial Sequence
  Synthetic oligonucleotide
aatcaacgcgggccacaggacgcactgggc

SEQ ID NO: 333394 - DNA, 30 bp, Artificial Sequence
  Synthetic oligonucleotide
caaacgaatttaaacaaaggatcactgggc

SEQ ID NO: 333395 - DNA, 30 bp, Artificial Sequence
  Synthetic oligonucleotide
agtcaaaagtgccctactaaacgactgggc

SEQ ID NO: 333396 - DNA, 29 bp, Artificial Sequence
  Synthetic oligonucleotide
ggctctattcatataaaaatctgctgggc

SEQ ID NO: 333397 - DNA, 30 bp, Artificial Sequence
  Synthetic oligonucleotide
ccacgattaaaatgttgtctctacgtgggc

SEQ ID NO: 333398 - DNA, 30 bp, Artificial Sequence
  Synthetic oligonucleotide
tcagtgcgggatacttatatatccgtgggc

SEQ ID NO: 333399 - DNA, 30 bp, Artificial Sequence
  Synthetic oligonucleotide
tccgtcgtgcggtatgtgcgtaatgtgggc

SEQ ID NO: 333400 - DNA, 30 bp, Artificial Sequence
  Synthetic oligonucleotide
cagactaaagtaatccatcttggattgggc

SEQ ID NO: 333401 - DNA, 30 bp, Artificial Sequence
  Synthetic oligonucleotide
ggttgacgacatttggattttaagttgggc

SEQ ID NO: 333402 - DNA, 30 bp, Artificial Sequence
  Synthetic oligonucleotide
agatgttgagtgctcgccattgttttgggc

SEQ ID NO: 333403 - DNA, 30 bp, Artificial Sequence
  Synthetic oligonucleotide
gcagctactagatatttttagaacaatggc

SEQ ID NO: 333404 - DNA, 30 bp, Artificial Sequence
  Synthetic oligonucleotide
tctccgtaaagccagctaatagtgaatggc

SEQ ID NO: 333405 - DNA, 30 bp, Artificial Sequence
  Synthetic oligonucleotide
aagctcattcgtttagcaataaaacatggc

SEQ ID NO: 333406 - DNA, 30 bp, Artificial Sequence
  Synthetic oligonucleotide
atcttccaaaaatggtaagctgaacatggc

SEQ ID NO: 333407 - DNA, 30 bp, Artificial Sequence
  Synthetic oligonucleotide
gagccgacaggtatgaggttggtacatggc

SEQ ID NO: 333408 - DNA, 30 bp, Artificial Sequence
  Synthetic oligonucleotide
gccacttcggaccattgcgagcggcatggc

SEQ ID NO: 333409 - DNA, 30 bp, Artificial Sequence
  Synthetic oligonucleotide
tctttagcgagtagcccattttctcatggc

SEQ ID NO: 333410 - DNA, 30 bp, Artificial Sequence
  Synthetic oligonucleotide
ggtacaaaattgcgcgcgctttaagatggc

SEQ ID NO: 333411 - DNA, 30 bp, Artificial Sequence
  Synthetic oligonucleotide
ctatcgggtggtcgcatagtcgcagatggc

SEQ ID NO: 333412 - DNA, 30 bp, Artificial Sequence
  Synthetic oligonucleotide
tatggagacaaagcgtttctaatagatggc

SEQ ID NO: 333413 - DNA, 30 bp, Artificial Sequence
  Synthetic oligonucleotide
tgatcatccgccgagggcactcccgatggc

SEQ ID NO: 333414 - DNA, 30 bp, Artificial Sequence
  Synthetic oligonucleotide
tactcttcctggcacataggagtcgatggc

SEQ ID NO: 333415 - DNA, 30 bp, Artificial Sequence
  Synthetic oligonucleotide
ggggttataccttcccgttgccaggatggc

SEQ ID NO: 333416 - DNA, 30 bp, Artificial Sequence
  Synthetic oligonucleotide
ttttcatggtggtacaaggattgggatggc

SEQ ID NO: 333417 - DNA, 30 bp, Artificial Sequence
  Synthetic oligonucleotide
gccaaggagacttcttcagcacatgatggc

SEQ ID NO: 333418 - DNA, 30 bp, Artificial Sequence
  Synthetic oligonucleotide
cggttagggaagcccatagtgtttgatggc

SEQ ID NO: 333419 - DNA, 30 bp, Artificial Sequence
  Synthetic oligonucleotide
cctcaccgtttagccaatgtgaaatatggc

SEQ ID NO: 333420 - DNA, 30 bp, Artificial Sequence
  Synthetic oligonucleotide
agggttggacggaaagcgaacccatatggc

SEQ ID NO: 333421 - DNA, 30 bp, Artificial Sequence
  Synthetic oligonucleotide
catccacacatcctactggtagcttatggc

SEQ ID NO: 333422 - DNA, 30 bp, Artificial Sequence
  Synthetic oligonucleotide
gtaggggccgtaccgcgttcgagaactggc

SEQ ID NO: 333423 - DNA, 30 bp, Artificial Sequence
  Synthetic oligonucleotide
ggggtagccaggctcgcctgcggaactggc

SEQ ID NO: 333424 - DNA, 30 bp, Artificial Sequence
  Synthetic oligonucleotide
tatatacaagataagtgataatggactggc

SEQ ID NO: 333425 - DNA, 30 bp, Artificial Sequence
  Synthetic oligonucleotide
ccaaagcttcgatcagtattccgtactggc

SEQ ID NO: 333426 - DNA, 30 bp, Artificial Sequence
  Synthetic oligonucleotide
ggcgtagtaaggggagggaggaaccctggc

SEQ ID NO: 333427 - DNA, 30 bp, Artificial Sequence
  Synthetic oligonucleotide
agataccgctgaaccattaggaaccctggc

SEQ ID NO: 333428 - DNA, 30 bp, Artificial Sequence
  Synthetic oligonucleotide
ggtagcagtgtaggattcacccaccctggc

SEQ ID NO: 333429 - DNA, 30 bp, Artificial Sequence
  Synthetic oligonucleotide
gtcaaattcgggaccgcgtctcgccctggc

SEQ ID NO: 333430 - DNA, 30 bp, Artificial Sequence
  Synthetic oligonucleotide
gtaggaaccatagtagtccacctgcctggc

SEQ ID NO: 333431 - DNA, 30 bp, Artificial Sequence
  Synthetic oligonucleotide
gtacttaagccaggacaggtctgagctggc

SEQ ID NO: 333432 - DNA, 30 bp, Artificial Sequence
  Synthetic oligonucleotide
gacacttacgacaaaactcttgtagctggc

SEQ ID NO: 333433 - DNA, 30 bp, Artificial Sequence
  Synthetic oligonucleotide
ctgtgtaagtttccgtatgtggccgctggc

SEQ ID NO: 333434 - DNA, 30 bp, Artificial Sequence
  Synthetic oligonucleotide
gcacccctggttaggatctctcatgctggc

SEQ ID NO: 333435 - DNA, 30 bp, Artificial Sequence
  Synthetic oligonucleotide
ggcccggggggcagtcctctgctatctggc

SEQ ID NO: 333436 - DNA, 30 bp, Artificial Sequence
  Synthetic oligonucleotide
gaaggttgaatatagtttccttactctggc

SEQ ID NO: 333437 - DNA, 30 bp, Artificial Sequence
  Synthetic oligonucleotide
tgtggcaattgctaaacccggttgtctggc

SEQ ID NO: 333438 - DNA, 30 bp, Artificial Sequence
  Synthetic oligonucleotide
ggtacatagatagttacagtcgattctggc

SEQ ID NO: 333439 - DNA, 30 bp, Artificial Sequence
  Synthetic oligonucleotide
gctgtcagtatttctagggagccttctggc

SEQ ID NO: 333440 - DNA, 30 bp, Artificial Sequence
  Synthetic oligonucleotide
cgtctagcggccgggttgctgcgttctggc

SEQ ID NO: 333441 - DNA, 30 bp, Artificial Sequence
  Synthetic oligonucleotide
aatttgggcgccgggaattaataaagtggc

SEQ ID NO: 333442 - DNA, 30 bp, Artificial Sequence
  Synthetic oligonucleotide
ttagagtagcactagagcacaatcagtggc

SEQ ID NO: 333443 - DNA, 30 bp, Artificial Sequence
  Synthetic oligonucleotide
accacaccactggcgcggtggttcagtggc

SEQ ID NO: 333444 - DNA, 30 bp, Artificial Sequence
  Synthetic oligonucleotide
ccggtccgcctctcacgatcaaagagtggc

SEQ ID NO: 333445 - DNA, 30 bp, Artificial Sequence
  Synthetic oligonucleotide
caatggaatggggtaagaaaataacgtggc

SEQ ID NO: 333446 - DNA, 30 bp, Artificial Sequence
  Synthetic oligonucleotide
actgattgattgttaatcgacaggcgtggc

SEQ ID NO: 333447 - DNA, 30 bp, Artificial Sequence
  Synthetic oligonucleotide
tcgcgaacgcaccttggaaaaaaaggtggc

SEQ ID NO: 333448 - DNA, 30 bp, Artificial Sequence
  Synthetic oligonucleotide
tggtgacaattttcatatgttgaaggtggc

SEQ ID NO: 333449 - DNA, 30 bp, Artificial Sequence
  Synthetic oligonucleotide
tcttctggtaataggtaagactaaggtggc

SEQ ID NO: 333450 - DNA, 30 bp, Artificial Sequence
  Synthetic oligonucleotide
gaatatgagggatcttaaattataggtggc

SEQ ID NO: 333451 - DNA, 30 bp, Artificial Sequence
  Synthetic oligonucleotide
tcaaagtcgtcatatcatagggacggtggc

SEQ ID NO: 333452 - DNA, 30 bp, Artificial Sequence
  Synthetic oligonucleotide
ggatactttttagaggcctatggcggtggc

SEQ ID NO: 333453 - DNA, 30 bp, Artificial Sequence
  Synthetic oligonucleotide
ttacgccacagcagtgctagatgcggtggc

SEQ ID NO: 333454 - DNA, 30 bp, Artificial Sequence
  Synthetic oligonucleotide
tgtggatttgatcgactaagttgcggtggc

SEQ ID NO: 333455 - DNA, 30 bp, Artificial Sequence
  Synthetic oligonucleotide
agggtacgcttacggggactttatggtggc

SEQ ID NO: 333456 - DNA, 30 bp, Artificial Sequence
  Synthetic oligonucleotide
cgaagttttgccgcggcatgggcatgtggc

SEQ ID NO: 333457 - DNA, 30 bp, Artificial Sequence
  Synthetic oligonucleotide
ggatccgatgtagcttcagcatggtgtggc

SEQ ID NO: 333458 - DNA, 30 bp, Artificial Sequence
  Synthetic oligonucleotide
acctaggcgacaccacggggcatgtgtggc

SEQ ID NO: 333459 - DNA, 30 bp, Artificial Sequence
  Synthetic oligonucleotide
actccggtttcagtgaggaccttgtgtggc

SEQ ID NO: 333460 - DNA, 30 bp, Artificial Sequence
  Synthetic oligonucleotide
aaagcagaagtctaatacctactttgtggc

SEQ ID NO: 333461 - DNA, 30 bp, Artificial Sequence
  Synthetic oligonucleotide
cgagtgttacagcagatgtttctttgtggc

SEQ ID NO: 333462 - DNA, 30 bp, Artificial Sequence
  Synthetic oligonucleotide
tcagttggccatcatgaaatagtttgtggc

SEQ ID NO: 333463 - DNA, 30 bp, Artificial Sequence
  Synthetic oligonucleotide
catacgtggatggagtggcgattttgtggc

SEQ ID NO: 333464 - DNA, 30 bp, Artificial Sequence
  Synthetic oligonucleotide
tgttgtaaggcctaccagcggcaaattggc

SEQ ID NO: 333465 - DNA, 30 bp, Artificial Sequence
  Synthetic oligonucleotide
tcagtttatgctcctcaaaggaacattggc

SEQ ID NO: 333466 - DNA, 30 bp, Artificial Sequence
  Synthetic oligonucleotide
aaagaccgcgctagtctggtcctcattggc

SEQ ID NO: 333467 - DNA, 30 bp, Artificial Sequence
  Synthetic oligonucleotide
tagtaacattgggcacaaactaggattggc

SEQ ID NO: 333468 - DNA, 30 bp, Artificial Sequence
  Synthetic oligonucleotide
gatgtgccttatgacttaccgcaagttggc

SEQ ID NO: 333469 - DNA, 30 bp, Artificial Sequence
  Synthetic oligonucleotide
aaaccggctttgcgacttttcttagttggc

SEQ ID NO: 333470 - DNA, 30 bp, Artificial Sequence
  Synthetic oligonucleotide
ttagaatcgtgggttggaagggacgttggc

SEQ ID NO: 333471 - DNA, 30 bp, Artificial Sequence
  Synthetic oligonucleotide
ctgcttgttccatggtttatcgcggttggc

SEQ ID NO: 333472 - DNA, 30 bp, Artificial Sequence
  Synthetic oligonucleotide
cggacaggcactgaatgtggggtggttggc

SEQ ID NO: 333473 - DNA, 30 bp, Artificial Sequence
  Synthetic oligonucleotide
atgcgaggcttgcatagcttaaaatttggc

SEQ ID NO: 333474 - DNA, 30 bp, Artificial Sequence
  Synthetic oligonucleotide
atctggaggtatacagcgcctcactttggc

SEQ ID NO: 333475 - DNA, 30 bp, Artificial Sequence
  Synthetic oligonucleotide
cgcgtcagtatcggggttagtgtgtttggc

SEQ ID NO: 333476 - DNA, 30 bp, Artificial Sequence
  Synthetic oligonucleotide
gtaaaggcacaggattgggggagttttggc

SEQ ID NO: 333477 - DNA, 30 bp, Artificial Sequence
  Synthetic oligonucleotide
aaaccggtctgggtatatccgagaaaatgc

SEQ ID NO: 333478 - DNA, 30 bp, Artificial Sequence
  Synthetic oligonucleotide
ggctggtaacggtcttgcgataacaaatgc

SEQ ID NO: 333479 - DNA, 30 bp, Artificial Sequence
  Synthetic oligonucleotide
agagttgggggacgccatggacacaaatgc

SEQ ID NO: 333480 - DNA, 30 bp, Artificial Sequence
  Synthetic oligonucleotide
tgggtactactgtgatacgcgtacaaatgc

SEQ ID NO: 333481 - DNA, 30 bp, Artificial Sequence
  Synthetic oligonucleotide
gttccaccccacgagatctggggcaaatgc

SEQ ID NO: 333482 - DNA, 30 bp, Artificial Sequence
  Synthetic oligonucleotide
agcgactatcacagagctatctagaaatgc

SEQ ID NO: 333483 - DNA, 30 bp, Artificial Sequence
  Synthetic oligonucleotide
ctcgtttgaaggggaaggggccttaaatgc

SEQ ID NO: 333484 - DNA, 30 bp, Artificial Sequence
  Synthetic oligonucleotide
gcaccagagtaagttatattagaagaatgc

SEQ ID NO: 333485 - DNA, 30 bp, Artificial Sequence
  Synthetic oligonucleotide
ggacatattgagtctgctgagggagaatgc

SEQ ID NO: 333486 - DNA, 30 bp, Artificial Sequence
  Synthetic oligonucleotide
cctccgatgatccggttggacttagaatgc

SEQ ID NO: 333487 - DNA, 30 bp, Artificial Sequence
  Synthetic oligonucleotide
gtatcttgagcttacgagggctacgaatgc

SEQ ID NO: 333488 - DNA, 30 bp, Artificial Sequence
  Synthetic oligonucleotide
tgttggcccaccatgggtcggcgggaatgc

SEQ ID NO: 333489 - DNA, 30 bp, Artificial Sequence
  Synthetic oligonucleotide
caggattggcacaactttcagttggaatgc

SEQ ID NO: 333490 - DNA, 30 bp, Artificial Sequence
  Synthetic oligonucleotide
gggtaaagacgggtttgtatgactgaatgc

SEQ ID NO: 333491 - DNA, 30 bp, Artificial Sequence
  Synthetic oligonucleotide
atgtcctgcgggtgaggcttcattgaatgc

SEQ ID NO: 333492 - DNA, 30 bp, Artificial Sequence
  Synthetic oligonucleotide
acgggcggtaccgggtgtgttgaataatgc

SEQ ID NO: 333493 - DNA, 30 bp, Artificial Sequence
  Synthetic oligonucleotide
tatagcacacccgaggattcccgataatgc

SEQ ID NO: 333494 - DNA, 30 bp, Artificial Sequence
  Synthetic oligonucleotide
gattttccagtcaaccgcacatcctaatgc

SEQ ID NO: 333495 - DNA, 30 bp, Artificial Sequence
  Synthetic oligonucleotide
ttatccagacacgaacagagcaattaatgc

SEQ ID NO: 333496 - DNA, 30 bp, Artificial Sequence
  Synthetic oligonucleotide
tgtactactgaagagtaaaggtattaatgc

SEQ ID NO: 333497 - DNA, 30 bp, Artificial Sequence
  Synthetic oligonucleotide
cgcttggcacacatgaaagtaagaacatgc

SEQ ID NO: 333498 - DNA, 30 bp, Artificial Sequence
  Synthetic oligonucleotide
tccccctgagaccattgacacggcacatgc

SEQ ID NO: 333499 - DNA, 30 bp, Artificial Sequence
  Synthetic oligonucleotide
catccggtcgtatcgttgtgcgtcacatgc

SEQ ID NO: 333500 - DNA, 30 bp, Artificial Sequence
  Synthetic oligonucleotide
accggcaagctggacttgtctttcacatgc

SEQ ID NO: 333501 - DNA, 30 bp, Artificial Sequence
  Synthetic oligonucleotide
aatgtttttcagttgttttaaggtacatgc

SEQ ID NO: 333502 - DNA, 30 bp, Artificial Sequence
  Synthetic oligonucleotide
tggggttccaacatcatagcgggtacatgc

SEQ ID NO: 333503 - DNA, 30 bp, Artificial Sequence
  Synthetic oligonucleotide
gaccaggccaagaactgtaggcacccatgc

SEQ ID NO: 333504 - DNA, 30 bp, Artificial Sequence
  Synthetic oligonucleotide
agtgagtgggagaaggggcaccgcccatgc

SEQ ID NO: 333505 - DNA, 30 bp, Artificial Sequence
  Synthetic oligonucleotide
atgttaaaagggctatcggtttagccatgc

SEQ ID NO: 333506 - DNA, 30 bp, Artificial Sequence
  Synthetic oligonucleotide
aaagaagaggcttttcgggctactccatgc

SEQ ID NO: 333507 - DNA, 30 bp, Artificial Sequence
  Synthetic oligonucleotide
aacacaatcaacggtaatcttgttccatgc

SEQ ID NO: 333508 - DNA, 30 bp, Artificial Sequence
  Synthetic oligonucleotide
ggtgactcctgcgcaccgccggaagcatgc

SEQ ID NO: 333509 - DNA, 30 bp, Artificial Sequence
  Synthetic oligonucleotide
ctgtagcgacgagcttcgaggacagcatgc

SEQ ID NO: 333510 - DNA, 30 bp, Artificial Sequence
  Synthetic oligonucleotide
tggtaaggtctaaggacatgttcagcatgc

SEQ ID NO: 333511 - DNA, 30 bp, Artificial Sequence
  Synthetic oligonucleotide
gggaaggtgtagtctggacctaccgcatgc

SEQ ID NO: 333512 - DNA, 30 bp, Artificial Sequence
  Synthetic oligonucleotide
gggaataattgaggaatctgattgtcatgc

SEQ ID NO: 333513 - DNA, 30 bp, Artificial Sequence
  Synthetic oligonucleotide
gttgactgcctctgatactcgataagatgc

SEQ ID NO: 333514 - DNA, 30 bp, Artificial Sequence
  Synthetic oligonucleotide
gaaggatcgttggtgtataaccacagatgc

SEQ ID NO: 333515 - DNA, 30 bp, Artificial Sequence
  Synthetic oligonucleotide
agcaaatgagtctcgaccattcggagatgc

SEQ ID NO: 333516 - DNA, 30 bp, Artificial Sequence
  Synthetic oligonucleotide
tcattcggaaatgctaagtatactagatgc

SEQ ID NO: 333517 - DNA, 30 bp, Artificial Sequence
  Synthetic oligonucleotide
tttaaaaccagtgcggagggcgctagatgc

SEQ ID NO: 333518 - DNA, 30 bp, Artificial Sequence
  Synthetic oligonucleotide
caataactagaaaatttaatagcacgatgc

SEQ ID NO: 333519 - DNA, 30 bp, Artificial Sequence
  Synthetic oligonucleotide
tgatgtagtagtatagtctacaaccgatgc

SEQ ID NO: 333520 - DNA, 30 bp, Artificial Sequence
  Synthetic oligonucleotide
tgatgtaaatacgtacgggtgcaccgatgc

SEQ ID NO: 333521 - DNA, 30 bp, Artificial Sequence
  Synthetic oligonucleotide
gctcagcttcaaaacgatcggccaggatgc

SEQ ID NO: 333522 - DNA, 30 bp, Artificial Sequence
  Synthetic oligonucleotide
catcccttgggaagctgggtcttaggatgc

SEQ ID NO: 333523 - DNA, 30 bp, Artificial Sequence
  Synthetic oligonucleotide
gtgactaccctaatccatcggggcggatgc

SEQ ID NO: 333524 - DNA, 30 bp, Artificial Sequence
  Synthetic oligonucleotide
tctatacgcgtcgccattactatcggatgc

SEQ ID NO: 333525 - DNA, 30 bp, Artificial Sequence
  Synthetic oligonucleotide
tatggttgtggtggaatactagtgggatgc

SEQ ID NO: 333526 - DNA, 30 bp, Artificial Sequence
  Synthetic oligonucleotide
gtttcaatcgtagcccgaggaggatgatgc

SEQ ID NO: 333527 - DNA, 30 bp, Artificial Sequence
  Synthetic oligonucleotide
tatcgaagcacgaaatagacccgctgatgc

SEQ ID NO: 333528 - DNA, 30 bp, Artificial Sequence
  Synthetic oligonucleotide
ggagcaatggggatttctaggttgtgatgc

SEQ ID NO: 333529 - DNA, 30 bp, Artificial Sequence
  Synthetic oligonucleotide
gatggtacagcattgtagtggatttgatgc

SEQ ID NO: 333530 - DNA, 30 bp, Artificial Sequence
  Synthetic oligonucleotide
cgctttccagagctataacagaaaatatgc

SEQ ID NO: 333531 - DNA, 30 bp, Artificial Sequence
  Synthetic oligonucleotide
ctcatgtttgaacaggttccccgaatatgc

SEQ ID NO: 333532 - DNA, 30 bp, Artificial Sequence
  Synthetic oligonucleotide
ccgacaggaaaattgatcgaaggaatatgc

SEQ ID NO: 333533 - DNA, 30 bp, Artificial Sequence
  Synthetic oligonucleotide
attagtcctgaaacggcctatcagatatgc

SEQ ID NO: 333534 - DNA, 30 bp, Artificial Sequence
  Synthetic oligonucleotide
gcaggcgacccctagaaacggagtatatgc

SEQ ID NO: 333535 - DNA, 30 bp, Artificial Sequence
  Synthetic oligonucleotide
catgctaactgcggcgtaaacggtatatgc

SEQ ID NO: 333536 - DNA, 30 bp, Artificial Sequence
  Synthetic oligonucleotide
aaaattggccatttgggtcgtcaactatgc

SEQ ID NO: 333537 - DNA, 30 bp, Artificial Sequence
  Synthetic oligonucleotide
caattcccaacatcctttttatacctatgc

SEQ ID NO: 333538 - DNA, 30 bp, Artificial Sequence
  Synthetic oligonucleotide
gaaagcagtaacagcaattgcaccctatgc

SEQ ID NO: 333539 - DNA, 30 bp, Artificial Sequence
  Synthetic oligonucleotide
tggcgggccataggatcacgttccctatgc

SEQ ID NO: 333540 - DNA, 30 bp, Artificial Sequence
  Synthetic oligonucleotide
agcacctgcaccaggcaatgccgcctatgc

SEQ ID NO: 333541 - DNA, 30 bp, Artificial Sequence
  Synthetic oligonucleotide
ttaacgttattcgtctaacctgtgctatgc

SEQ ID NO: 333542 - DNA, 30 bp, Artificial Sequence
  Synthetic oligonucleotide
acagttcaatccctcagacaggatctatgc

SEQ ID NO: 333543 - DNA, 30 bp, Artificial Sequence
  Synthetic oligonucleotide
tgtacagataagttagaacacgttctatgc

SEQ ID NO: 333544 - DNA, 30 bp, Artificial Sequence
  Synthetic oligonucleotide
aagaaatactagcatgggttggcagtatgc

SEQ ID NO: 333545 - DNA, 30 bp, Artificial Sequence
  Synthetic oligonucleotide
gtgggatacgagtctgcaggcgtagtatgc

SEQ ID NO: 333546 - DNA, 30 bp, Artificial Sequence
  Synthetic oligonucleotide
agccaaattgaaccccttttaaccgtatgc

SEQ ID NO: 333547 - DNA, 30 bp, Artificial Sequence
  Synthetic oligonucleotide
aaaaaggcgtaaacagaatctgtcgtatgc

SEQ ID NO: 333548 - DNA, 30 bp, Artificial Sequence
  Synthetic oligonucleotide
gcgcatcctgttagtgttggatcggtatgc

SEQ ID NO: 333549 - DNA, 30 bp, Artificial Sequence
  Synthetic oligonucleotide
atgcccctggcgttaaggggggtggtatgc

SEQ ID NO: 333550 - DNA, 30 bp, Artificial Sequence
  Synthetic oligonucleotide
gcacaatcttcggtccaaaaaggtgtatgc

SEQ ID NO: 333551 - DNA, 30 bp, Artificial Sequence
  Synthetic oligonucleotide
gcatatccttcgccgggacgccgattatgc

SEQ ID NO: 333552 - DNA, 30 bp, Artificial Sequence
  Synthetic oligonucleotide
tcaacgctaaaccactcacctatcttatgc

SEQ ID NO: 333553 - DNA, 30 bp, Artificial Sequence
  Synthetic oligonucleotide
gattgaacaccatctgaggtagtcttatgc

SEQ ID NO: 333554 - DNA, 30 bp, Artificial Sequence
  Synthetic oligonucleotide
taagacaccgggcgagcccgatctttatgc

SEQ ID NO: 333555 - DNA, 30 bp, Artificial Sequence
  Synthetic oligonucleotide
tagttccgatgtgaaagaacttttttatgc

SEQ ID NO: 333556 - DNA, 30 bp, Artificial Sequence
  Synthetic oligonucleotide
accgaacaattaccgttgaggtaaaactgc

SEQ ID NO: 333557 - DNA, 30 bp, Artificial Sequence
  Synthetic oligonucleotide
tatgccagaagcggactatctggcaactgc

SEQ ID NO: 333558 - DNA, 30 bp, Artificial Sequence
  Synthetic oligonucleotide
gccgtttttatgaggccctaaaggaactgc

SEQ ID NO: 333559 - DNA, 30 bp, Artificial Sequence
  Synthetic oligonucleotide
atgggccctgtagtgttgcggcgtaactgc

SEQ ID NO: 333560 - DNA, 30 bp, Artificial Sequence
  Synthetic oligonucleotide
aagaagcatcgataaacagtgcgtaactgc

SEQ ID NO: 333561 - DNA, 30 bp, Artificial Sequence
  Synthetic oligonucleotide
gagctagcccgtgccacagacacacactgc

SEQ ID NO: 333562 - DNA, 30 bp, Artificial Sequence
  Synthetic oligonucleotide
accagacatcagcgggaggctgcacactgc

SEQ ID NO: 333563 - DNA, 30 bp, Artificial Sequence
  Synthetic oligonucleotide
agctatgatattccaacaaacgatcactgc

SEQ ID NO: 333564 - DNA, 30 bp, Artificial Sequence
  Synthetic oligonucleotide
atcaccttaactagttacacactagactgc

SEQ ID NO: 333565 - DNA, 30 bp, Artificial Sequence
  Synthetic oligonucleotide
gtagagcgaccacgcccgtgtcacgactgc

SEQ ID NO: 333566 - DNA, 30 bp, Artificial Sequence
  Synthetic oligonucleotide
ccggacgagtaactgtttatattggactgc

SEQ ID NO: 333567 - DNA, 30 bp, Artificial Sequence
  Synthetic oligonucleotide
ggttgcggcgacacggggttgcgatactgc

SEQ ID NO: 333568 - DNA, 30 bp, Artificial Sequence
  Synthetic oligonucleotide
ccactggagtacggaggcctaatatactgc

SEQ ID NO: 333569 - DNA, 30 bp, Artificial Sequence
  Synthetic oligonucleotide
agccaaggatcgttaaggatcatatactgc

SEQ ID NO: 333570 - DNA, 30 bp, Artificial Sequence
  Synthetic oligonucleotide
ttcccggtttggcgtcatcaggtatactgc

SEQ ID NO: 333571 - DNA, 30 bp, Artificial Sequence
  Synthetic oligonucleotide
gagacatgtccaactagctacccgtactgc

SEQ ID NO: 333572 - DNA, 30 bp, Artificial Sequence
  Synthetic oligonucleotide
gagttcggtgtggcggactctttaacctgc

SEQ ID NO: 333573 - DNA, 30 bp, Artificial Sequence
  Synthetic oligonucleotide
tatcaaggcccgcagggcccaggcacctgc

SEQ ID NO: 333574 - DNA, 30 bp, Artificial Sequence
  Synthetic oligonucleotide
gcagcccactgaccgactctcctcacctgc

SEQ ID NO: 333575 - DNA, 30 bp, Artificial Sequence
  Synthetic oligonucleotide
tcattcagtagctcttgcaaccaaccctgc

SEQ ID NO: 333576 - DNA, 30 bp, Artificial Sequence
  Synthetic oligonucleotide
tctagactgacaagtgatacgtcaccctgc

SEQ ID NO: 333577 - DNA, 30 bp, Artificial Sequence
  Synthetic oligonucleotide
cgcttaggcgggcctgaacagcgaccctgc

SEQ ID NO: 333578 - DNA, 30 bp, Artificial Sequence
  Synthetic oligonucleotide
cagaaaccagctagggtccgtcccccctgc

SEQ ID NO: 333579 - DNA, 30 bp, Artificial Sequence
  Synthetic oligonucleotide
cgctggaaacggttagaacatgtcccctgc

SEQ ID NO: 333580 - DNA, 30 bp, Artificial Sequence
  Synthetic oligonucleotide
ctgttctagcattcgagtcgcaagccctgc

SEQ ID NO: 333581 - DNA, 30 bp, Artificial Sequence
  Synthetic oligonucleotide
acggccgaccgtcacacatgtgggccctgc

SEQ ID NO: 333582 - DNA, 30 bp, Artificial Sequence
  Synthetic oligonucleotide
tctaggacggacaaaaggtgggatccctgc

SEQ ID NO: 333583 - DNA, 30 bp, Artificial Sequence
  Synthetic oligonucleotide
tcttctcactggtacattgaatcagcctgc

SEQ ID NO: 333584 - DNA, 30 bp, Artificial Sequence
  Synthetic oligonucleotide
agagtaacattcagcgcggatgcatcctgc

SEQ ID NO: 333585 - DNA, 30 bp, Artificial Sequence
  Synthetic oligonucleotide
ggggtgcatgtgatatagcaaaattcctgc

SEQ ID NO: 333586 - DNA, 30 bp, Artificial Sequence
  Synthetic oligonucleotide
tagaatccgaaggacatgccactaagctgc

SEQ ID NO: 333587 - DNA, 30 bp, Artificial Sequence
  Synthetic oligonucleotide
tgtgctaattccacaatatagagccgctgc

SEQ ID NO: 333588 - DNA, 30 bp, Artificial Sequence
  Synthetic oligonucleotide
gcctgtgacgggaaaaaccccacgcgctgc

SEQ ID NO: 333589 - DNA, 30 bp, Artificial Sequence
  Synthetic oligonucleotide
ctactgatacagtccacaataaggcgctgc

SEQ ID NO: 333590 - DNA, 30 bp, Artificial Sequence
  Synthetic oligonucleotide
caacttaaaatgccatcattccgaggctgc

SEQ ID NO: 333591 - DNA, 30 bp, Artificial Sequence
  Synthetic oligonucleotide
agggacgacccttgaagcgacaacggctgc

SEQ ID NO: 333592 - DNA, 30 bp, Artificial Sequence
  Synthetic oligonucleotide
accgccctgtcctctagccgttccggctgc

SEQ ID NO: 333593 - DNA, 30 bp, Artificial Sequence
  Synthetic oligonucleotide
aatgcttcctaggacttaaatcatggctgc

SEQ ID NO: 333594 - DNA, 30 bp, Artificial Sequence
  Synthetic oligonucleotide
gcggtatgtcgtacatgtatccacatctgc

SEQ ID NO: 333595 - DNA, 30 bp, Artificial Sequence
  Synthetic oligonucleotide
tttcatgtacacattaaccttgagatctgc

SEQ ID NO: 333596 - DNA, 30 bp, Artificial Sequence
  Synthetic oligonucleotide
cgcctttaggttcctgtgcaaactatctgc

SEQ ID NO: 333597 - DNA, 30 bp, Artificial Sequence
  Synthetic oligonucleotide
ttggcacgggtcttatcgatacctatctgc

SEQ ID NO: 333598 - DNA, 30 bp, Artificial Sequence
  Synthetic oligonucleotide
ggtgttgcacgtcatgatgagcttatctgc

SEQ ID NO: 333599 - DNA, 30 bp, Artificial Sequence
  Synthetic oligonucleotide
atgcatgaatttgattacgaaatactctgc

SEQ ID NO: 333600 - DNA, 31 bp, Artificial Sequence
  Synthetic oligonucleotide
gatacggtattggatcatccacggtctctgc

SEQ ID NO: 333601 - DNA, 30 bp, Artificial Sequence
  Synthetic oligonucleotide
ggggcacaagcagttaaacttgcagtctgc

SEQ ID NO: 333602 - DNA, 30 bp, Artificial Sequence
  Synthetic oligonucleotide
ggagctttgtgtcttccgcatgaggtctgc

SEQ ID NO: 333603 - DNA, 30 bp, Artificial Sequence
  Synthetic oligonucleotide
cgtgggagagcctcctaacggtcggtctgc

SEQ ID NO: 333604 - DNA, 30 bp, Artificial Sequence
  Synthetic oligonucleotide
ccttatcttaatcacaatttatgggtctgc

SEQ ID NO: 333605 - DNA, 30 bp, Artificial Sequence
  Synthetic oligonucleotide
gaaaacccgaggaatatgctgtcattctgc

SEQ ID NO: 333606 - DNA, 30 bp, Artificial Sequence
  Synthetic oligonucleotide
aagcctttggaggaccagggggcgttctgc

SEQ ID NO: 333607 - DNA, 30 bp, Artificial Sequence
  Synthetic oligonucleotide
gtgtgaaccgcgaatgagggggcgttctgc

SEQ ID NO: 333608 - DNA, 30 bp, Artificial Sequence
  Synthetic oligonucleotide
tgccgagaaacatgcttggtaaaaaagtgc

SEQ ID NO: 333609 - DNA, 30 bp, Artificial Sequence
  Synthetic oligonucleotide
gatccagtggataggcaagatcaaaagtgc

SEQ ID NO: 333610 - DNA, 30 bp, Artificial Sequence
  Synthetic oligonucleotide
tggccgactaatggtaaagttttcaagtgc

SEQ ID NO: 333611 - DNA, 30 bp, Artificial Sequence
  Synthetic oligonucleotide
cgttcgtttccagtctcctacgttaagtgc

SEQ ID NO: 333612 - DNA, 30 bp, Artificial Sequence
  Synthetic oligonucleotide
ctaccgtgtaatcgtgacgggctacagtgc

SEQ ID NO: 333613 - DNA, 30 bp, Artificial Sequence
  Synthetic oligonucleotide
acgatatcgtggcacacgcacgtacagtgc

SEQ ID NO: 333614 - DNA, 30 bp, Artificial Sequence
  Synthetic oligonucleotide
ataggaaggactttcatgcgtgagcagtgc

SEQ ID NO: 333615 - DNA, 30 bp, Artificial Sequence
  Synthetic oligonucleotide
cagaactgcctgaagaacaaaccgcagtgc

SEQ ID NO: 333616 - DNA, 30 bp, Artificial Sequence
  Synthetic oligonucleotide
gtcaacagtcgttatggaagggggcagtgc

SEQ ID NO: 333617 - DNA, 30 bp, Artificial Sequence
  Synthetic oligonucleotide
caaagcgtaggattgcgagcagtagagtgc

SEQ ID NO: 333618 - DNA, 30 bp, Artificial Sequence
  Synthetic oligonucleotide
tcctgtatttaaattatatgagaggagtgc

SEQ ID NO: 333619 - DNA, 30 bp, Artificial Sequence
  Synthetic oligonucleotide
gtagggcgactttgcaggataagctagtgc

SEQ ID NO: 333620 - DNA, 30 bp, Artificial Sequence
  Synthetic oligonucleotide
cgtcatgtatcacgattaggggattagtgc

SEQ ID NO: 333621 - DNA, 30 bp, Artificial Sequence
  Synthetic oligonucleotide
tcaaggcggtttgaatatctacgttagtgc

SEQ ID NO: 333622 - DNA, 30 bp, Artificial Sequence
  Synthetic oligonucleotide
gccacactatgtccgagcactatttagtgc

SEQ ID NO: 333623 - DNA, 30 bp, Artificial Sequence
  Synthetic oligonucleotide
gaaacatacgtggccctggtttacacgtgc

SEQ ID NO: 333624 - DNA, 30 bp, Artificial Sequence
  Synthetic oligonucleotide
atgaaaagcgtacataatcctgcgacgtgc

SEQ ID NO: 333625 - DNA, 30 bp, Artificial Sequence
  Synthetic oligonucleotide
gcatgcattagggggctggcaactacgtgc

SEQ ID NO: 333626 - DNA, 30 bp, Artificial Sequence
  Synthetic oligonucleotide
ggagaccacaatgcctagggcagtacgtgc

SEQ ID NO: 333627 - DNA, 30 bp, Artificial Sequence
  Synthetic oligonucleotide
ggtgttacggcaggtgtgaaccttacgtgc

SEQ ID NO: 333628 - DNA, 30 bp, Artificial Sequence
  Synthetic oligonucleotide
gagtcttcccagatttgctgcgttacgtgc

SEQ ID NO: 333629 - DNA, 30 bp, Artificial Sequence
  Synthetic oligonucleotide
ctacaggtagagtatagcaccataccgtgc

SEQ ID NO: 333630 - DNA, 30 bp, Artificial Sequence
  Synthetic oligonucleotide
tagtgatgatcgtgctttactgggccgtgc

SEQ ID NO: 333631 - DNA, 30 bp, Artificial Sequence
  Synthetic oligonucleotide
actccccggtataggcaagttaatccgtgc

SEQ ID NO: 333632 - DNA, 30 bp, Artificial Sequence
  Synthetic oligonucleotide
agtcgaagccacgctctcaccgttccgtgc

SEQ ID NO: 333633 - DNA, 30 bp, Artificial Sequence
  Synthetic oligonucleotide
aaatggagggtccgggattctaaggcgtgc

SEQ ID NO: 333634 - DNA, 30 bp, Artificial Sequence
  Synthetic oligonucleotide
acctggtaattagacaccatacgatcgtgc

SEQ ID NO: 333635 - DNA, 30 bp, Artificial Sequence
  Synthetic oligonucleotide
aacattttagctcggcttcgcgactcgtgc

SEQ ID NO: 333636 - DNA, 30 bp, Artificial Sequence
  Synthetic oligonucleotide
atggaccagtgccacttatgtgcctcgtgc

SEQ ID NO: 333637 - DNA, 30 bp, Artificial Sequence
  Synthetic oligonucleotide
tggggaacgggtgttataccgggctcgtgc

SEQ ID NO: 333638 - DNA, 30 bp, Artificial Sequence
  Synthetic oligonucleotide
gcgtcgagattgttactcctgacgtcgtgc

SEQ ID NO: 333639 - DNA, 30 bp, Artificial Sequence
  Synthetic oligonucleotide
ttgagttgacttagtttcaactggtcgtgc

SEQ ID NO: 333640 - DNA, 30 bp, Artificial Sequence
  Synthetic oligonucleotide
tcttagtgcctcgggtacttaggttcgtgc

SEQ ID NO: 333641 - DNA, 30 bp, Artificial Sequence
  Synthetic oligonucleotide
atagcgccgagtcatggtggagtttcgtgc

SEQ ID NO: 333642 - DNA, 30 bp, Artificial Sequence
  Synthetic oligonucleotide
ttcttccgaagggctagaactaaaaggtgc

SEQ ID NO: 333643 - DNA, 30 bp, Artificial Sequence
  Synthetic oligonucleotide
tatgcacactagggatacatgtcaaggtgc

SEQ ID NO: 333644 - DNA, 30 bp, Artificial Sequence
  Synthetic oligonucleotide
atagatcacagatcccatgtagtcaggtgc

SEQ ID NO: 333645 - DNA, 30 bp, Artificial Sequence
  Synthetic oligonucleotide
cctggggattgacagtatttgaagaggtgc

SEQ ID NO: 333646 - DNA, 30 bp, Artificial Sequence
  Synthetic oligonucleotide
ccctagaccggacttgtgcttgggaggtgc

SEQ ID NO: 333647 - DNA, 30 bp, Artificial Sequence
  Synthetic oligonucleotide
cggaaggatccgtagtaaaagcctaggtgc

SEQ ID NO: 333648 - DNA, 30 bp, Artificial Sequence
  Synthetic oligonucleotide
agtggcagtcgcaaattcgcatctaggtgc

SEQ ID NO: 333649 - DNA, 30 bp, Artificial Sequence
  Synthetic oligonucleotide
aattcgggcttaacttcggttgtccggtgc

SEQ ID NO: 333650 - DNA, 30 bp, Artificial Sequence
  Synthetic oligonucleotide
accatatcgcgcagtagtgtcccgcggtgc

SEQ ID NO: 333651 - DNA, 30 bp, Artificial Sequence
  Synthetic oligonucleotide
ttgttgatgtaatgtcccttaaggcggtgc

SEQ ID NO: 333652 - DNA, 30 bp, Artificial Sequence
  Synthetic oligonucleotide
agcatggagaagcgacaaacacgtcggtgc

SEQ ID NO: 333653 - DNA, 30 bp, Artificial Sequence
  Synthetic oligonucleotide
gtcgtgatccgcggcagtgtcggagggtgc

SEQ ID NO: 333654 - DNA, 30 bp, Artificial Sequence
  Synthetic oligonucleotide
ggaattggatgacgtcgcgggttagggtgc

SEQ ID NO: 333655 - DNA, 30 bp, Artificial Sequence
  Synthetic oligonucleotide
aggccttggacgtagtcgtgtcaggggtgc

SEQ ID NO: 333656 - DNA, 30 bp, Artificial Sequence
  Synthetic oligonucleotide
cccctaggcagtcgtatcataggctggtgc

SEQ ID NO: 333657 - DNA, 30 bp, Artificial Sequence
  Synthetic oligonucleotide
aacggatcagcacggcgccaggaaatgtgc

SEQ ID NO: 333658 - DNA, 30 bp, Artificial Sequence
  Synthetic oligonucleotide
tcgctgagcacccaattgtaacgcatgtgc

SEQ ID NO: 333659 - DNA, 30 bp, Artificial Sequence
  Synthetic oligonucleotide
tccagcgtggacacgacttaagcgatgtgc

SEQ ID NO: 333660 - DNA, 30 bp, Artificial Sequence
  Synthetic oligonucleotide
gaagagctggtaagtaataaactgatgtgc

SEQ ID NO: 333661 - DNA, 30 bp, Artificial Sequence
  Synthetic oligonucleotide
aaccgaaatgagcatcacaagtatatgtgc

SEQ ID NO: 333662 - DNA, 30 bp, Artificial Sequence
  Synthetic oligonucleotide
actatagttatctccaaaaaggctatgtgc

SEQ ID NO: 333663 - DNA, 30 bp, Artificial Sequence
  Synthetic oligonucleotide
ggaggatcctccggggctgagtgcctgtgc

SEQ ID NO: 333664 - DNA, 30 bp, Artificial Sequence
  Synthetic oligonucleotide
gacgaagcatagtccgtatattagctgtgc

SEQ ID NO: 333665 - DNA, 30 bp, Artificial Sequence
  Synthetic oligonucleotide
ggtagtagcaacgactttcaaaggctgtgc

SEQ ID NO: 333666 - DNA, 30 bp, Artificial Sequence
  Synthetic oligonucleotide
catcaccccgtgtgttccgtcgctctgtgc

SEQ ID NO: 333667 - DNA, 30 bp, Artificial Sequence
  Synthetic oligonucleotide
gtaatgcggggtggactacctctagtgtgc

SEQ ID NO: 333668 - DNA, 30 bp, Artificial Sequence
  Synthetic oligonucleotide
agcattcattcctccgtcgcagtagtgtgc

SEQ ID NO: 333669 - DNA, 30 bp, Artificial Sequence
  Synthetic oligonucleotide
attgttcattttgagcaagtaaccgtgtgc

SEQ ID NO: 333670 - DNA, 30 bp, Artificial Sequence
  Synthetic oligonucleotide
tagggatgtgccggtggcaggtccgtgtgc

SEQ ID NO: 333671 - DNA, 30 bp, Artificial Sequence
  Synthetic oligonucleotide
gtagattgctaatatagcgacggggtgtgc

SEQ ID NO: 333672 - DNA, 30 bp, Artificial Sequence
  Synthetic oligonucleotide
catctattgttgtatgaaagcggggtgtgc

SEQ ID NO: 333673 - DNA, 30 bp, Artificial Sequence
  Synthetic oligonucleotide
agtaggtcgtggggtttcaattatgtgtgc

SEQ ID NO: 333674 - DNA, 30 bp, Artificial Sequence
  Synthetic oligonucleotide
atatcagcggtccagttagattgtgtgtgc

SEQ ID NO: 333675 - DNA, 30 bp, Artificial Sequence
  Synthetic oligonucleotide
ttgacacgtgtatcgtttattgaattgtgc

SEQ ID NO: 333676 - DNA, 30 bp, Artificial Sequence
  Synthetic oligonucleotide
taactgctagcgatcgtcttggcgttgtgc

SEQ ID NO: 333677 - DNA, 30 bp, Artificial Sequence
  Synthetic oligonucleotide
cacccacgtcgattgatacaggggttgtgc

SEQ ID NO: 333678 - DNA, 30 bp, Artificial Sequence
  Synthetic oligonucleotide
aggaaaattaactggtcatgtctgttgtgc

SEQ ID NO: 333679 - DNA, 30 bp, Artificial Sequence
  Synthetic oligonucleotide
tatttgggctttggtagcacaagtttgtgc

SEQ ID NO: 333680 - DNA, 30 bp, Artificial Sequence
  Synthetic oligonucleotide
caccagacagtatcatgtgttagtttgtgc

SEQ ID NO: 333681 - DNA, 30 bp, Artificial Sequence
  Synthetic oligonucleotide
ttaatttatcttcgttgatggtaaaattgc

SEQ ID NO: 333682 - DNA, 30 bp, Artificial Sequence
  Synthetic oligonucleotide
gggcagtctcggttcagaccgcgaaattgc

SEQ ID NO: 333683 - DNA, 30 bp, Artificial Sequence
  Synthetic oligonucleotide
gctcgcacaatgccctgagcgaataattgc

SEQ ID NO: 333684 - DNA, 29 bp, Artificial Sequence
  Synthetic oligonucleotide
gtagtggtggaacctacgagtgccattgc

SEQ ID NO: 333685 - DNA, 30 bp, Artificial Sequence
  Synthetic oligonucleotide
gtcgcccgtaaaacacctatagggcattgc

SEQ ID NO: 333686 - DNA, 30 bp, Artificial Sequence
  Synthetic oligonucleotide
ccacagaataccagcgagattctgcattgc

SEQ ID NO: 333687 - DNA, 30 bp, Artificial Sequence
  Synthetic oligonucleotide
attgggcaatgtcttagtaaggctcattgc

SEQ ID NO: 333688 - DNA, 30 bp, Artificial Sequence
  Synthetic oligonucleotide
tccacatgacatgaagacctttccgattgc

SEQ ID NO: 333689 - DNA, 30 bp, Artificial Sequence
  Synthetic oligonucleotide
aagaagagtttgttttatgcatgcgattgc

SEQ ID NO: 333690 - DNA, 30 bp, Artificial Sequence
  Synthetic oligonucleotide
cctgggttaacagctagtcgttcggattgc

SEQ ID NO: 333691 - DNA, 30 bp, Artificial Sequence
  Synthetic oligonucleotide
ctccgagtgtctcctcttttacttgattgc

SEQ ID NO: 333692 - DNA, 30 bp, Artificial Sequence
  Synthetic oligonucleotide
aacggcgacggcgttctgcacctatattgc

SEQ ID NO: 333693 - DNA, 31 bp, Artificial Sequence
  Synthetic oligonucleotide
gccaaatgtattagtccaggccgagtattgc

SEQ ID NO: 333694 - DNA, 30 bp, Artificial Sequence
  Synthetic oligonucleotide
atatcgttagctagggcaaaacggtattgc

SEQ ID NO: 333695 - DNA, 30 bp, Artificial Sequence
  Synthetic oligonucleotide
aagtcaaagtcggcgaagtggctgtattgc

SEQ ID NO: 333696 - DNA, 30 bp, Artificial Sequence
  Synthetic oligonucleotide
cactcctgaaccagggcactctattattgc

SEQ ID NO: 333697 - DNA, 30 bp, Artificial Sequence
  Synthetic oligonucleotide
catgctttttcaactctacggttttattgc

SEQ ID NO: 333698 - DNA, 30 bp, Artificial Sequence
  Synthetic oligonucleotide
cattagaaccatagtatgacattaacttgc

SEQ ID NO: 333699 - DNA, 30 bp, Artificial Sequence
  Synthetic oligonucleotide
tccgaaagtaagcactagggagatacttgc

SEQ ID NO: 333700 - DNA, 30 bp, Artificial Sequence
  Synthetic oligonucleotide
cgcatacggtcttcgattgcgacgccttgc

SEQ ID NO: 333701 - DNA, 30 bp, Artificial Sequence
  Synthetic oligonucleotide
tcttccaactcgcccgcgtccgatccttgc

SEQ ID NO: 333702 - DNA, 30 bp, Artificial Sequence
  Synthetic oligonucleotide
atcgtactacctcaagccaggagggcttgc

SEQ ID NO: 333703 - DNA, 30 bp, Artificial Sequence
  Synthetic oligonucleotide
aggatccaagatcaggtcttcgcatcttgc

SEQ ID NO: 333704 - DNA, 30 bp, Artificial Sequence
  Synthetic oligonucleotide
agcgcatacaagctcagctgtctatcttgc

SEQ ID NO: 333705 - DNA, 30 bp, Artificial Sequence
  Synthetic oligonucleotide
tcgcctctgctcagtttacacgtatcttgc

SEQ ID NO: 333706 - DNA, 30 bp, Artificial Sequence
  Synthetic oligonucleotide
taaccactacccgtacccgtaagctcttgc

SEQ ID NO: 333707 - DNA, 30 bp, Artificial Sequence
  Synthetic oligonucleotide
ttcgtacatccagagcggatcttctcttgc

SEQ ID NO: 333708 - DNA, 30 bp, Artificial Sequence
  Synthetic oligonucleotide
gaactaatagccactggtttcaggtcttgc

SEQ ID NO: 333709 - DNA, 30 bp, Artificial Sequence
  Synthetic oligonucleotide
ccgttgtcttggacggttggccggtcttgc

SEQ ID NO: 333710 - DNA, 30 bp, Artificial Sequence
  Synthetic oligonucleotide
gcatcgctggttgtccgcacgtgaagttgc

SEQ ID NO: 333711 - DNA, 30 bp, Artificial Sequence
  Synthetic oligonucleotide
ttatttggtcgccatcccttggtaagttgc

SEQ ID NO: 333712 - DNA, 30 bp, Artificial Sequence
  Synthetic oligonucleotide
tcaccggcaaatagtttggctaccagttgc

SEQ ID NO: 333713 - DNA, 30 bp, Artificial Sequence
  Synthetic oligonucleotide
atcctgaggacaacgtagagttccagttgc

SEQ ID NO: 333714 - DNA, 31 bp, Artificial Sequence
  Synthetic oligonucleotide
ttttggctctggaccattcaacgcgagttgc

SEQ ID NO: 333715 - DNA, 30 bp, Artificial Sequence
  Synthetic oligonucleotide
gcaagacacgtaggagactgcttgagttgc

SEQ ID NO: 333716 - DNA, 30 bp, Artificial Sequence
  Synthetic oligonucleotide
gaaaccctcatctagggatgcaatagttgc

SEQ ID NO: 333717 - DNA, 30 bp, Artificial Sequence
  Synthetic oligonucleotide
ggtatatggtaattgacgtaacatagttgc

SEQ ID NO: 333718 - DNA, 30 bp, Artificial Sequence
  Synthetic oligonucleotide
gtacttaatagcatatcagtccaacgttgc

SEQ ID NO: 333719 - DNA, 30 bp, Artificial Sequence
  Synthetic oligonucleotide
gtgatcacaggacaagcgctagaacgttgc

SEQ ID NO: 333720 - DNA, 30 bp, Artificial Sequence
  Synthetic oligonucleotide
ctgattcgaagaataaggttatcacgttgc

SEQ ID NO: 333721 - DNA, 30 bp, Artificial Sequence
  Synthetic oligonucleotide
caacgggccgaaggacggacataccgttgc

SEQ ID NO: 333722 - DNA, 30 bp, Artificial Sequence
  Synthetic oligonucleotide
ttgtatacgaccaaaagcaatattcgttgc

SEQ ID NO: 333723 - DNA, 30 bp, Artificial Sequence
  Synthetic oligonucleotide
tggtatggagggaatcttctggtcggttgc

SEQ ID NO: 333724 - DNA, 30 bp, Artificial Sequence
  Synthetic oligonucleotide
ttacaaccctacgcatgcttgacatgttgc

SEQ ID NO: 333725 - DNA, 30 bp, Artificial Sequence
  Synthetic oligonucleotide
tggcaaccttcgtagacagcttcgtgttgc

SEQ ID NO: 333726 - DNA, 30 bp, Artificial Sequence
  Synthetic oligonucleotide
ttaacatgggtcataaacttgatgtgttgc

SEQ ID NO: 333727 - DNA, 30 bp, Artificial Sequence
  Synthetic oligonucleotide
aggacccaaattctagcggtttcttgttgc

SEQ ID NO: 333728 - DNA, 30 bp, Artificial Sequence
  Synthetic oligonucleotide
tagttaaaatcccgtgtacaagtttgttgc

SEQ ID NO: 333729 - DNA, 30 bp, Artificial Sequence
  Synthetic oligonucleotide
gtcaccggctcgtaacctgacacaatttgc

SEQ ID NO: 333730 - DNA, 30 bp, Artificial Sequence
  Synthetic oligonucleotide
tatcctgctgcgatactaggtagaatttgc

SEQ ID NO: 333731 - DNA, 30 bp, Artificial Sequence
  Synthetic oligonucleotide
cacggctcggagagtaatccagctatttgc

SEQ ID NO: 333732 - DNA, 30 bp, Artificial Sequence
  Synthetic oligonucleotide
ttgctcggtgcgattaagcgcggactttgc

SEQ ID NO: 333733 - DNA, 30 bp, Artificial Sequence
  Synthetic oligonucleotide
ggtagttctctgatctcaggcaagctttgc

SEQ ID NO: 333734 - DNA, 30 bp, Artificial Sequence
  Synthetic oligonucleotide
ggtaggtaatgcagaactgcagacgtttgc

SEQ ID NO: 333735 - DNA, 30 bp, Artificial Sequence
  Synthetic oligonucleotide
caacaacgcacgtagtgccaacgcgtttgc

SEQ ID NO: 333736 - DNA, 30 bp, Artificial Sequence
  Synthetic oligonucleotide
agacacgtctgacacccgccggaggtttgc

SEQ ID NO: 333737 - DNA, 30 bp, Artificial Sequence
  Synthetic oligonucleotide
tccagaggaccataagggtcagcggtttgc

SEQ ID NO: 333738 - DNA, 30 bp, Artificial Sequence
  Synthetic oligonucleotide
gggatgggagatacccgtagggcggtttgc

SEQ ID NO: 333739 - DNA, 30 bp, Artificial Sequence
  Synthetic oligonucleotide
ggtgcccaaaggcacgacaccagggtttgc

SEQ ID NO: 333740 - DNA, 30 bp, Artificial Sequence
  Synthetic oligonucleotide
acctactattcacattcaagttatgtttgc

SEQ ID NO: 333741 - DNA, 30 bp, Artificial Sequence
  Synthetic oligonucleotide
cttgcactacacagaatcagagctgtttgc

SEQ ID NO: 333742 - DNA, 30 bp, Artificial Sequence
  Synthetic oligonucleotide
cgcatttctgtctattgttgcagtgtttgc

SEQ ID NO: 333743 - DNA, 30 bp, Artificial Sequence
  Synthetic oligonucleotide
gtacgggagtttcgatccacgatattttgc

SEQ ID NO: 333744 - DNA, 30 bp, Artificial Sequence
  Synthetic oligonucleotide
atcggcaagattcaaattgctcacttttgc

SEQ ID NO: 333745 - DNA, 30 bp, Artificial Sequence
  Synthetic oligonucleotide
cagtcccgtaatccgattgagcccttttgc

SEQ ID NO: 333746 - DNA, 30 bp, Artificial Sequence
  Synthetic oligonucleotide
ttagaagtgaaggtatgatcaaagttttgc

SEQ ID NO: 333747 - DNA, 30 bp, Artificial Sequence
  Synthetic oligonucleotide
gtaccacgggattctacatggacgttttgc

SEQ ID NO: 333748 - DNA, 30 bp, Artificial Sequence
  Synthetic oligonucleotide
gacaattgagtgacagatagctggttttgc

SEQ ID NO: 333749 - DNA, 30 bp, Artificial Sequence
  Synthetic oligonucleotide
gtgcctatagataaaccgagttatttttgc

SEQ ID NO: 333750 - DNA, 30 bp, Artificial Sequence
  Synthetic oligonucleotide
taaattggagatgacatcatatgtttttgc

SEQ ID NO: 333751 - DNA, 30 bp, Artificial Sequence
  Synthetic oligonucleotide
gcgcacgactcttattatcaccgaaaaatc

SEQ ID NO: 333752 - DNA, 30 bp, Artificial Sequence
  Synthetic oligonucleotide
agttgcaatatgccagacagaataaaaatc

SEQ ID NO: 333753 - DNA, 30 bp, Artificial Sequence
  Synthetic oligonucleotide
ccgtctgtttggttgcctcctataaaaatc

SEQ ID NO: 333754 - DNA, 30 bp, Artificial Sequence
  Synthetic oligonucleotide
agtctcaattattaacatatgctaaaaatc

SEQ ID NO: 333755 - DNA, 30 bp, Artificial Sequence
  Synthetic oligonucleotide
ataacaaagtgtgggggtccattaaaaatc

SEQ ID NO: 333756 - DNA, 30 bp, Artificial Sequence
  Synthetic oligonucleotide
catgtgacgataggaatcgttgacaaaatc

SEQ ID NO: 333757 - DNA, 30 bp, Artificial Sequence
  Synthetic oligonucleotide
caatacacctaatctctgggccgcaaaatc

SEQ ID NO: 333758 - DNA, 30 bp, Artificial Sequence
  Synthetic oligonucleotide
cgtagccatacgccacagtctcataaaatc

SEQ ID NO: 333759 - DNA, 30 bp, Artificial Sequence
  Synthetic oligonucleotide
ggtaggttttgactatggagtcctaaaatc

SEQ ID NO: 333760 - DNA, 30 bp, Artificial Sequence
  Synthetic oligonucleotide
ggtcaaacttaacagctgcaggttaaaatc

SEQ ID NO: 333761 - DNA, 30 bp, Artificial Sequence
  Synthetic oligonucleotide
tcatccatagtagagcatctttcacaaatc

SEQ ID NO: 333762 - DNA, 30 bp, Artificial Sequence
  Synthetic oligonucleotide
agatcacattgcgtccactttcgacaaatc

SEQ ID NO: 333763 - DNA, 30 bp, Artificial Sequence
  Synthetic oligonucleotide
gagactgtactattaatggtaaaccaaatc

SEQ ID NO: 333764 - DNA, 30 bp, Artificial Sequence
  Synthetic oligonucleotide
aggcggggcgcatttcaaagcctccaaatc

SEQ ID NO: 333765 - DNA, 30 bp, Artificial Sequence
  Synthetic oligonucleotide
tttaattgttggttggagtctcggcaaatc

SEQ ID NO: 333766 - DNA, 30 bp, Artificial Sequence
  Synthetic oligonucleotide
ttaggggcccgttactcgggtattcaaatc

SEQ ID NO: 333767 - DNA, 30 bp, Artificial Sequence
  Synthetic oligonucleotide
ccaaagatggccaaggaatctggcgaaatc

SEQ ID NO: 333768 - DNA, 30 bp, Artificial Sequence
  Synthetic oligonucleotide
tggttaccggtttcgggtcgatgcgaaatc

SEQ ID NO: 333769 - DNA, 30 bp, Artificial Sequence
  Synthetic oligonucleotide
tactagcagggtcgccagctcttcgaaatc

SEQ ID NO: 333770 - DNA, 30 bp, Artificial Sequence
  Synthetic oligonucleotide
gtgcaatgcctataacaagcgattgaaatc

SEQ ID NO: 333771 - DNA, 30 bp, Artificial Sequence
  Synthetic oligonucleotide
tgaaaggctttcgtcgttgatcgctaaatc

SEQ ID NO: 333772 - DNA, 30 bp, Artificial Sequence
  Synthetic oligonucleotide
gttacccatcattcatgagtcatctaaatc

SEQ ID NO: 333773 - DNA, 30 bp, Artificial Sequence
  Synthetic oligonucleotide
tctagccctagattgtgtttgtggtaaatc

SEQ ID NO: 333774 - DNA, 30 bp, Artificial Sequence
  Synthetic oligonucleotide
ttcttatagctcagtgatggcgcttaaatc

SEQ ID NO: 333775 - DNA, 30 bp, Artificial Sequence
  Synthetic oligonucleotide
gctcgtaaacgagaacgggttcgttaaatc

SEQ ID NO: 333776 - DNA, 30 bp, Artificial Sequence
  Synthetic oligonucleotide
caaagaggtgatgggctttgggtttaaatc

SEQ ID NO: 333777 - DNA, 30 bp, Artificial Sequence
  Synthetic oligonucleotide
atagaacgttaatgattagcggaaacaatc

SEQ ID NO: 333778 - DNA, 30 bp, Artificial Sequence
  Synthetic oligonucleotide
gcaattaaataaaaactagggacaacaatc

SEQ ID NO: 333779 - DNA, 30 bp, Artificial Sequence
  Synthetic oligonucleotide
actaatacaattcgttcatatccaacaatc

SEQ ID NO: 333780 - DNA, 30 bp, Artificial Sequence
  Synthetic oligonucleotide
gtagacaaaggtcccttataagacacaatc

SEQ ID NO: 333781 - DNA, 30 bp, Artificial Sequence
  Synthetic oligonucleotide
agacggaactgagacagatgcatcacaatc

SEQ ID NO: 333782 - DNA, 30 bp, Artificial Sequence
  Synthetic oligonucleotide
caccctttacgtgcgagtattaagacaatc

SEQ ID NO: 333783 - DNA, 30 bp, Artificial Sequence
  Synthetic oligonucleotide
gaaacggtccttggtggagcgctgacaatc

SEQ ID NO: 333784 - DNA, 30 bp, Artificial Sequence
  Synthetic oligonucleotide
cgatcgcaatcagtcctccttaatacaatc

SEQ ID NO: 333785 - DNA, 30 bp, Artificial Sequence
  Synthetic oligonucleotide
cttccggctgatcgccatgggtatacaatc

SEQ ID NO: 333786 - DNA, 30 bp, Artificial Sequence
  Synthetic oligonucleotide
taaccacctttatcaaggacactaccaatc

SEQ ID NO: 333787 - DNA, 30 bp, Artificial Sequence
  Synthetic oligonucleotide
gcagtttctcccgaataattgctaccaatc

SEQ ID NO: 333788 - DNA, 31 bp, Artificial Sequence
  Synthetic oligonucleotide
cgtttaaatagagatggctcactcgccaatc

SEQ ID NO: 333789 - DNA, 30 bp, Artificial Sequence
  Synthetic oligonucleotide
gtcatagcatcgtcaatagtcgatccaatc

SEQ ID NO: 333790 - DNA, 30 bp, Artificial Sequence
  Synthetic oligonucleotide
gagctcaaagagtaccatcgggatccaatc

SEQ ID NO: 333791 - DNA, 30 bp, Artificial Sequence
  Synthetic oligonucleotide
aaaagcttcatattcccacctccagcaatc

SEQ ID NO: 333792 - DNA, 30 bp, Artificial Sequence
  Synthetic oligonucleotide
cggtgagtagctgcagtcgaacgcgcaatc

SEQ ID NO: 333793 - DNA, 30 bp, Artificial Sequence
  Synthetic oligonucleotide
gtttgaaggccgcgctaaaactgcgcaatc

SEQ ID NO: 333794 - DNA, 30 bp, Artificial Sequence
  Synthetic oligonucleotide
acggttatgagttcacaaccacgggcaatc

SEQ ID NO: 333795 - DNA, 30 bp, Artificial Sequence
  Synthetic oligonucleotide
aggttacattaaatgtatgtacgtgcaatc

SEQ ID NO: 333796 - DNA, 30 bp, Artificial Sequence
  Synthetic oligonucleotide
ttgcccctggtcccactgttgtttgcaatc

SEQ ID NO: 333797 - DNA, 30 bp, Artificial Sequence
  Synthetic oligonucleotide
aatagctcgcgtaggaaccatcaatcaatc

SEQ ID NO: 333798 - DNA, 30 bp, Artificial Sequence
  Synthetic oligonucleotide
cagtccctttacataaatcgagaatcaatc

SEQ ID NO: 333799 - DNA, 30 bp, Artificial Sequence
  Synthetic oligonucleotide
aatcacgtataaaagagccacccctcaatc

SEQ ID NO: 333800 - DNA, 30 bp, Artificial Sequence
  Synthetic oligonucleotide
aaatacagcataccaggggactcttcaatc

SEQ ID NO: 333801 - DNA, 30 bp, Artificial Sequence
  Synthetic oligonucleotide
aatgattgaagaattagcaatagttcaatc

SEQ ID NO: 333802 - DNA, 30 bp, Artificial Sequence
  Synthetic oligonucleotide
aacagattttcttaaacggttagaagaatc

SEQ ID NO: 333803 - DNA, 30 bp, Artificial Sequence
  Synthetic oligonucleotide
gtaatataccatacatcataaaccagaatc

SEQ ID NO: 333804 - DNA, 30 bp, Artificial Sequence
  Synthetic oligonucleotide
gatcctactggtaattacatcaccagaatc

SEQ ID NO: 333805 - DNA, 30 bp, Artificial Sequence
  Synthetic oligonucleotide
ttccacgcgctccgaatgccttccagaatc

SEQ ID NO: 333806 - DNA, 30 bp, Artificial Sequence
  Synthetic oligonucleotide
gctaaatgcagtcctattaatcggagaatc

SEQ ID NO: 333807 - DNA, 30 bp, Artificial Sequence
  Synthetic oligonucleotide
aatgttgccaacagatgtggccatagaatc

SEQ ID NO: 333808 - DNA, 30 bp, Artificial Sequence
  Synthetic oligonucleotide
cgagcccccctataggctattcgacgaatc

SEQ ID NO: 333809 - DNA, 30 bp, Artificial Sequence
  Synthetic oligonucleotide
tttcgcagtcaccgcgtattgatacgaatc

SEQ ID NO: 333810 - DNA, 30 bp, Artificial Sequence
  Synthetic oligonucleotide
gtaagtcggagagcaaggcgtatacgaatc

SEQ ID NO: 333811 - DNA, 30 bp, Artificial Sequence
  Synthetic oligonucleotide
gacatattcctaggcttgatgcaccgaatc

SEQ ID NO: 333812 - DNA, 30 bp, Artificial Sequence
  Synthetic oligonucleotide
atcgcggaggtttttaaacggatccgaatc

SEQ ID NO: 333813 - DNA, 30 bp, Artificial Sequence
  Synthetic oligonucleotide
gagagtttcccaccttaggatattcgaatc

SEQ ID NO: 333814 - DNA, 30 bp, Artificial Sequence
  Synthetic oligonucleotide
tgccgattgacttctcgctcaaacggaatc

SEQ ID NO: 333815 - DNA, 30 bp, Artificial Sequence
  Synthetic oligonucleotide
cactaaacagacgtgggtcccatcggaatc

SEQ ID NO: 333816 - DNA, 30 bp, Artificial Sequence
  Synthetic oligonucleotide
tcaggagggagcatatatgttgtcggaatc

SEQ ID NO: 333817 - DNA, 30 bp, Artificial Sequence
  Synthetic oligonucleotide
gaaggatctgaatctgtggaacatggaatc

SEQ ID NO: 333818 - DNA, 30 bp, Artificial Sequence
  Synthetic oligonucleotide
ggtgctcttggcggcttcctagatggaatc

SEQ ID NO: 333819 - DNA, 30 bp, Artificial Sequence
  Synthetic oligonucleotide
atatccgggctcgaatgtattcttggaatc

SEQ ID NO: 333820 - DNA, 30 bp, Artificial Sequence
  Synthetic oligonucleotide
gcaccgattaaatacagtatggttggaatc

SEQ ID NO: 333821 - DNA, 30 bp, Artificial Sequence
  Synthetic oligonucleotide
ggatgatccggacagaacttggcatgaatc

SEQ ID NO: 333822 - DNA, 30 bp, Artificial Sequence
  Synthetic oligonucleotide
gtagcttacaccagccacaccatatgaatc

SEQ ID NO: 333823 - DNA, 30 bp, Artificial Sequence
  Synthetic oligonucleotide
tggggcacatcacgttaaaacgtatgaatc

SEQ ID NO: 333824 - DNA, 30 bp, Artificial Sequence
  Synthetic oligonucleotide
taatctatcaaaacactgcctgtatgaatc

SEQ ID NO: 333825 - DNA, 30 bp, Artificial Sequence
  Synthetic oligonucleotide
gtggcggatatagcacctgtcacttgaatc

SEQ ID NO: 333826 - DNA, 30 bp, Artificial Sequence
  Synthetic oligonucleotide
aaagggtcaattcgtcttggacgttgaatc

SEQ ID NO: 333827 - DNA, 30 bp, Artificial Sequence
  Synthetic oligonucleotide
accgccccggggtactcatggaaaataatc

SEQ ID NO: 333828 - DNA, 30 bp, Artificial Sequence
  Synthetic oligonucleotide
ggttacaaataacggccatatgaaataatc

SEQ ID NO: 333829 - DNA, 30 bp, Artificial Sequence
  Synthetic oligonucleotide
atctggtagatcaaagcgctaagcataatc

SEQ ID NO: 333830 - DNA, 30 bp, Artificial Sequence
  Synthetic oligonucleotide
gtcagatgaaaaagtgagcgcggcataatc

SEQ ID NO: 333831 - DNA, 30 bp, Artificial Sequence
  Synthetic oligonucleotide
gggtaaccgttcgaggcgaaggagataatc

SEQ ID NO: 333832 - DNA, 31 bp, Artificial Sequence
  Synthetic oligonucleotide
tactcagtgcaacgtagtcttctggataatc

SEQ ID NO: 333833 - DNA, 30 bp, Artificial Sequence
  Synthetic oligonucleotide
tttgcaccacggaaggatggagtgataatc

SEQ ID NO: 333834 - DNA, 30 bp, Artificial Sequence
  Synthetic oligonucleotide
ttcagatgagagagccggtacaatataatc

SEQ ID NO: 333835 - DNA, 30 bp, Artificial Sequence
  Synthetic oligonucleotide
ggtagttaactaaggtcgctagaactaatc

SEQ ID NO: 333836 - DNA, 30 bp, Artificial Sequence
  Synthetic oligonucleotide
tcttgtcttcatggacacacaacactaatc

SEQ ID NO: 333837 - DNA, 30 bp, Artificial Sequence
  Synthetic oligonucleotide
ggtgtcggggcaccagtcgtcttactaatc

SEQ ID NO: 333838 - DNA, 30 bp, Artificial Sequence
  Synthetic oligonucleotide
ggttatttttgcacttaacaaccgctaatc

SEQ ID NO: 333839 - DNA, 30 bp, Artificial Sequence
  Synthetic oligonucleotide
tgcgttccgcggtaaactcctccgctaatc

SEQ ID NO: 333840 - DNA, 30 bp, Artificial Sequence
  Synthetic oligonucleotide
accgcgagtagaccagacagatatctaatc

SEQ ID NO: 333841 - DNA, 30 bp, Artificial Sequence
  Synthetic oligonucleotide
atatgttcaagatcaagtaagaaagtaatc

SEQ ID NO: 333842 - DNA, 30 bp, Artificial Sequence
  Synthetic oligonucleotide
tctcgctgggggtacagaccgtaagtaatc

SEQ ID NO: 333843 - DNA, 30 bp, Artificial Sequence
  Synthetic oligonucleotide
aactggatgcctacacttttcggagtaatc

SEQ ID NO: 333844 - DNA, 30 bp, Artificial Sequence
  Synthetic oligonucleotide
cagttctgtcggtatgttttttacgtaatc

SEQ ID NO: 333845 - DNA, 30 bp, Artificial Sequence
  Synthetic oligonucleotide
ccaagctttgagtgcggtaccgccgtaatc

SEQ ID NO: 333846 - DNA, 30 bp, Artificial Sequence
  Synthetic oligonucleotide
accctagcgattttcagtcttgtcgtaatc

SEQ ID NO: 333847 - DNA, 30 bp, Artificial Sequence
  Synthetic oligonucleotide
cactggaactttatcacgcagtaggtaatc

SEQ ID NO: 333848 - DNA, 30 bp, Artificial Sequence
  Synthetic oligonucleotide
cgctcatcgcagagttactgatcggtaatc

SEQ ID NO: 333849 - DNA, 30 bp, Artificial Sequence
  Synthetic oligonucleotide
tgaatacatgacttagcacgtcgtgtaatc

SEQ ID NO: 333850 - DNA, 30 bp, Artificial Sequence
  Synthetic oligonucleotide
gccttgcggacggatctagcggaattaatc

SEQ ID NO: 333851 - DNA, 30 bp, Artificial Sequence
  Synthetic oligonucleotide
ggaatacaatcggtgacccgagcattaatc

SEQ ID NO: 333852 - DNA, 30 bp, Artificial Sequence
  Synthetic oligonucleotide
tctaataacaaaactgcgccacgcttaatc

SEQ ID NO: 333853 - DNA, 30 bp, Artificial Sequence
  Synthetic oligonucleotide
ttcacggtttggatagtgtgtgtcttaatc

SEQ ID NO: 333854 - DNA, 30 bp, Artificial Sequence
  Synthetic oligonucleotide
tgtagtcaccttccacaaagaaggttaatc

SEQ ID NO: 333855 - DNA, 30 bp, Artificial Sequence
  Synthetic oligonucleotide
tcggtatataattgcactcacgtgttaatc

SEQ ID NO: 333856 - DNA, 30 bp, Artificial Sequence
  Synthetic oligonucleotide
tagttcaccgtatagaagcgtgctttaatc

SEQ ID NO: 333857 - DNA, 30 bp, Artificial Sequence
  Synthetic oligonucleotide
gtcacgatcggcggagcaacagttttaatc

SEQ ID NO: 333858 - DNA, 30 bp, Artificial Sequence
  Synthetic oligonucleotide
caggcgcttcctccgccctggacaaacatc

SEQ ID NO: 333859 - DNA, 30 bp, Artificial Sequence
  Synthetic oligonucleotide
agagcgacggggctatatgaggcaaacatc

SEQ ID NO: 333860 - DNA, 30 bp, Artificial Sequence
  Synthetic oligonucleotide
tctcatgatataccacatctgttaaacatc

SEQ ID NO: 333861 - DNA, 30 bp, Artificial Sequence
  Synthetic oligonucleotide
cttttaggtcgagtattttcacacaacatc

SEQ ID NO: 333862 - DNA, 30 bp, Artificial Sequence
  Synthetic oligonucleotide
gctcagaaatcgtattaatcatcgaacatc

SEQ ID NO: 333863 - DNA, 30 bp, Artificial Sequence
  Synthetic oligonucleotide
agccataataggcgctgtgaaatgaacatc

SEQ ID NO: 333864 - DNA, 30 bp, Artificial Sequence
  Synthetic oligonucleotide
aaaaatatacgatgactgcgcatgaacatc

SEQ ID NO: 333865 - DNA, 30 bp, Artificial Sequence
  Synthetic oligonucleotide
aaaacgtagctgccggaaacgtaacacatc

SEQ ID NO: 333866 - DNA, 30 bp, Artificial Sequence
  Synthetic oligonucleotide
ctatgaccgttttcatcgagaagacacatc

SEQ ID NO: 333867 - DNA, 30 bp, Artificial Sequence
  Synthetic oligonucleotide
ggcccgtaaacttatgtgtagaaccacatc

SEQ ID NO: 333868 - DNA, 30 bp, Artificial Sequence
  Synthetic oligonucleotide
ccactccggaccatgtttcatacccacatc

SEQ ID NO: 333869 - DNA, 30 bp, Artificial Sequence
  Synthetic oligonucleotide
acattacgttacacacagaggttccacatc

SEQ ID NO: 333870 - DNA, 30 bp, Artificial Sequence
  Synthetic oligonucleotide
atgtgggtgtcagtggtctccgagcacatc

SEQ ID NO: 333871 - DNA, 30 bp, Artificial Sequence
  Synthetic oligonucleotide
tggaaattgctacggaggcccgtgcacatc

SEQ ID NO: 333872 - DNA, 30 bp, Artificial Sequence
  Synthetic oligonucleotide
aatgtggggtatgtggcatcattgcacatc

SEQ ID NO: 333873 - DNA, 30 bp, Artificial Sequence
  Synthetic oligonucleotide
gctgttcgtacatcacaggctactcacatc

SEQ ID NO: 333874 - DNA, 30 bp, Artificial Sequence
  Synthetic oligonucleotide
cctccatgctaaatggggccaacagacatc

SEQ ID NO: 333875 - DNA, 30 bp, Artificial Sequence
  Synthetic oligonucleotide
cctagaggaatacaatatttgttagacatc

SEQ ID NO: 333876 - DNA, 30 bp, Artificial Sequence
  Synthetic oligonucleotide
tcgcctaagagaccccttatgcccgacatc

SEQ ID NO: 333877 - DNA, 30 bp, Artificial Sequence
  Synthetic oligonucleotide
ggttctgaggtcatatgtagcttggacatc

SEQ ID NO: 333878 - DNA, 30 bp, Artificial Sequence
  Synthetic oligonucleotide
atacacggataggagcctaagcttgacatc

SEQ ID NO: 333879 - DNA, 30 bp, Artificial Sequence
  Synthetic oligonucleotide
ttaatggagaggaatgtttggggatacatc

SEQ ID NO: 333880 - DNA, 30 bp, Artificial Sequence
  Synthetic oligonucleotide
gttaaggaagcgagttcgagattatacatc

SEQ ID NO: 333881 - DNA, 30 bp, Artificial Sequence
  Synthetic oligonucleotide
agacgtgctacccgtagtatgccctacatc

SEQ ID NO: 333882 - DNA, 30 bp, Artificial Sequence
  Synthetic oligonucleotide
gtagatacgggaatgtctgtgatctacatc

SEQ ID NO: 333883 - DNA, 30 bp, Artificial Sequence
  Synthetic oligonucleotide
tctttgtatttcgtccctagctagtacatc

SEQ ID NO: 333884 - DNA, 30 bp, Artificial Sequence
  Synthetic oligonucleotide
cgttgtttggcttgactctagaggtacatc

SEQ ID NO: 333885 - DNA, 30 bp, Artificial Sequence
  Synthetic oligonucleotide
atgaccgcgggactaaggtcctcttacatc

SEQ ID NO: 333886 - DNA, 30 bp, Artificial Sequence
  Synthetic oligonucleotide
aacagatgtcagaatcaacgagtttacatc

SEQ ID NO: 333887 - DNA, 30 bp, Artificial Sequence
  Synthetic oligonucleotide
catacatacaatgtgggctagaacaccatc

SEQ ID NO: 333888 - DNA, 30 bp, Artificial Sequence
  Synthetic oligonucleotide
attcgccctgctgggtatagtaagaccatc

SEQ ID NO: 333889 - DNA, 30 bp, Artificial Sequence
  Synthetic oligonucleotide
aacatttaagctcaccttcggaataccatc

SEQ ID NO: 333890 - DNA, 30 bp, Artificial Sequence
  Synthetic oligonucleotide
gcagcacgataacgctaacaaacccccatc

SEQ ID NO: 333891 - DNA, 30 bp, Artificial Sequence
  Synthetic oligonucleotide
ttgtaatgccataataccgcttgagccatc

SEQ ID NO: 333892 - DNA, 30 bp, Artificial Sequence
  Synthetic oligonucleotide
caacggaacctctagcctgtcgacgccatc

SEQ ID NO: 333893 - DNA, 30 bp, Artificial Sequence
  Synthetic oligonucleotide
taaacaagcgtgagaaccgttcgcgccatc

SEQ ID NO: 333894 - DNA, 30 bp, Artificial Sequence
  Synthetic oligonucleotide
atcttctagtcaggggttgtagtcgccatc

SEQ ID NO: 333895 - DNA, 30 bp, Artificial Sequence
  Synthetic oligonucleotide
acctcctctcttatcgctattgaatccatc

SEQ ID NO: 333896 - DNA, 30 bp, Artificial Sequence
  Synthetic oligonucleotide
cttctcggcggtgtctatcgctaatccatc

SEQ ID NO: 333897 - DNA, 30 bp, Artificial Sequence
  Synthetic oligonucleotide
ggtgactatcaaaacacgccctcatccatc

SEQ ID NO: 333898 - DNA, 30 bp, Artificial Sequence
  Synthetic oligonucleotide
gaacattaggcagttcttatattatccatc

SEQ ID NO: 333899 - DNA, 30 bp, Artificial Sequence
  Synthetic oligonucleotide
tcaacagcggtctttattgtgatttccatc

SEQ ID NO: 333900 - DNA, 30 bp, Artificial Sequence
  Synthetic oligonucleotide
cataagagcatagttgatggacaaagcatc

SEQ ID NO: 333901 - DNA, 30 bp, Artificial Sequence
  Synthetic oligonucleotide
atcaatccaaacgcggtacgcgtaagcatc

SEQ ID NO: 333902 - DNA, 30 bp, Artificial Sequence
  Synthetic oligonucleotide
ctcatattgtaataggcactgtgcagcatc

SEQ ID NO: 333903 - DNA, 30 bp, Artificial Sequence
  Synthetic oligonucleotide
tagtacagtctatttgggacgttcagcatc

SEQ ID NO: 333904 - DNA, 30 bp, Artificial Sequence
  Synthetic oligonucleotide
cgctcatttagccctacttccgggagcatc

SEQ ID NO: 333905 - DNA, 30 bp, Artificial Sequence
  Synthetic oligonucleotide
catactatctggacatttacttgtagcatc

SEQ ID NO: 333906 - DNA, 30 bp, Artificial Sequence
  Synthetic oligonucleotide
tatttttcaaggagaaagcgtgttagcatc

SEQ ID NO: 333907 - DNA, 30 bp, Artificial Sequence
  Synthetic oligonucleotide
ccgctgggtaaccatgcaaagtaccgcatc

SEQ ID NO: 333908 - DNA, 30 bp, Artificial Sequence
  Synthetic oligonucleotide
tgaatcggtgctttagactttttgcgcatc

SEQ ID NO: 333909 - DNA, 30 bp, Artificial Sequence
  Synthetic oligonucleotide
agatgagcagctctggaagttggtcgcatc

SEQ ID NO: 333910 - DNA, 30 bp, Artificial Sequence
  Synthetic oligonucleotide
atcaaaaccgtagttaaaagttgtcgcatc

SEQ ID NO: 333911 - DNA, 30 bp, Artificial Sequence
  Synthetic oligonucleotide
ctgtaaacagcctgcagccaactaggcatc

SEQ ID NO: 333912 - DNA, 30 bp, Artificial Sequence
  Synthetic oligonucleotide
cacagcaaccttgacgtaacaggcggcatc

SEQ ID NO: 333913 - DNA, 30 bp, Artificial Sequence
  Synthetic oligonucleotide
cttaaggacaagagagtagggggcggcatc

SEQ ID NO: 333914 - DNA, 30 bp, Artificial Sequence
  Synthetic oligonucleotide
atggtcactttgtaagtaccattcggcatc

SEQ ID NO: 333915 - DNA, 30 bp, Artificial Sequence
  Synthetic oligonucleotide
actaccctctgccgagaaggctagggcatc

SEQ ID NO: 333916 - DNA, 30 bp, Artificial Sequence
  Synthetic oligonucleotide
tggccgcacacacaatgcggtgcgggcatc

SEQ ID NO: 333917 - DNA, 30 bp, Artificial Sequence
  Synthetic oligonucleotide
aaagcgggactgggtctccaggggggcatc

SEQ ID NO: 333918 - DNA, 30 bp, Artificial Sequence
  Synthetic oligonucleotide
ggactgtggggtatgcggctctggggcatc

SEQ ID NO: 333919 - DNA, 30 bp, Artificial Sequence
  Synthetic oligonucleotide
tgaaaatgcgggccgcggttcctgggcatc

SEQ ID NO: 333920 - DNA, 30 bp, Artificial Sequence
  Synthetic oligonucleotide
attttgcacttctcgacttaatctggcatc

SEQ ID NO: 333921 - DNA, 30 bp, Artificial Sequence
  Synthetic oligonucleotide
ctactcggcagagtttaataccgtggcatc

SEQ ID NO: 333922 - DNA, 30 bp, Artificial Sequence
  Synthetic oligonucleotide
tgtacagtagacacgcgatgagttggcatc

SEQ ID NO: 333923 - DNA, 30 bp, Artificial Sequence
  Synthetic oligonucleotide
ggggcacgaattcggctgcggcaatgcatc

SEQ ID NO: 333924 - DNA, 30 bp, Artificial Sequence
  Synthetic oligonucleotide
acgattaacgcggaccactgcggctgcatc

SEQ ID NO: 333925 - DNA, 30 bp, Artificial Sequence
  Synthetic oligonucleotide
gaaagcgaaagtgttgacgtaatctgcatc

SEQ ID NO: 333926 - DNA, 30 bp, Artificial Sequence
  Synthetic oligonucleotide
acgctttcgggctaggtcgttctctgcatc

SEQ ID NO: 333927 - DNA, 30 bp, Artificial Sequence
  Synthetic oligonucleotide
taaacgcgatgtagcctagtgtcgtgcatc

SEQ ID NO: 333928 - DNA, 30 bp, Artificial Sequence
  Synthetic oligonucleotide
gttacgagccgctcctagcaacattgcatc

SEQ ID NO: 333929 - DNA, 30 bp, Artificial Sequence
  Synthetic oligonucleotide
gacatggcatttcaggagggacgttgcatc

SEQ ID NO: 333930 - DNA, 30 bp, Artificial Sequence
  Synthetic oligonucleotide
caacggacactattttttaaagacatcatc

SEQ ID NO: 333931 - DNA, 30 bp, Artificial Sequence
  Synthetic oligonucleotide
tataccatggtacgagcactcaggatcatc

SEQ ID NO: 333932 - DNA, 30 bp, Artificial Sequence
  Synthetic oligonucleotide
tcgtcgaagtccataaagcggttactcatc

SEQ ID NO: 333933 - DNA, 30 bp, Artificial Sequence
  Synthetic oligonucleotide
agaattaacgtatatcgcgcgacgctcatc

SEQ ID NO: 333934 - DNA, 30 bp, Artificial Sequence
  Synthetic oligonucleotide
accgccactcatcgatctagaactctcatc

SEQ ID NO: 333935 - DNA, 30 bp, Artificial Sequence
  Synthetic oligonucleotide
ataatgtgcttctgcatggaaggagtcatc

SEQ ID NO: 333936 - DNA, 30 bp, Artificial Sequence
  Synthetic oligonucleotide
ggcattgcgtattccacggaccacgtcatc

SEQ ID NO: 333937 - DNA, 30 bp, Artificial Sequence
  Synthetic oligonucleotide
gaaatgtagtaggagaccaagttcgtcatc

SEQ ID NO: 333938 - DNA, 30 bp, Artificial Sequence
  Synthetic oligonucleotide
tgcagcctccggtaatacctcagggtcatc

SEQ ID NO: 333939 - DNA, 30 bp, Artificial Sequence
  Synthetic oligonucleotide
tagggatccaagcgtttaccgactgtcatc

SEQ ID NO: 333940 - DNA, 30 bp, Artificial Sequence
  Synthetic oligonucleotide
gagcgataagctattcgggaaagtgtcatc

SEQ ID NO: 333941 - DNA, 30 bp, Artificial Sequence
  Synthetic oligonucleotide
tctacccgggtcacactaatcagtgtcatc

SEQ ID NO: 333942 - DNA, 30 bp, Artificial Sequence
  Synthetic oligonucleotide
aaaagggcgtgctcacagccctaattcatc

SEQ ID NO: 333943 - DNA, 30 bp, Artificial Sequence
  Synthetic oligonucleotide
aatcgacggtctaactgacgagcattcatc

SEQ ID NO: 333944 - DNA, 30 bp, Artificial Sequence
  Synthetic oligonucleotide
ataccgacaggtattacgcgcagattcatc

SEQ ID NO: 333945 - DNA, 30 bp, Artificial Sequence
  Synthetic oligonucleotide
taaattgtggagccagtataacatttcatc

SEQ ID NO: 333946 - DNA, 30 bp, Artificial Sequence
  Synthetic oligonucleotide
atatttctaacctacagccatggtttcatc

SEQ ID NO: 333947 - DNA, 30 bp, Artificial Sequence
  Synthetic oligonucleotide
gctggttaaactatgtcagtgattttcatc

SEQ ID NO: 333948 - DNA, 30 bp, Artificial Sequence
  Synthetic oligonucleotide
catggcagttattcgggtgctgcaaagatc

SEQ ID NO: 333949 - DNA, 30 bp, Artificial Sequence
  Synthetic oligonucleotide
gggatgagagaagtggcaagcaataagatc

SEQ ID NO: 333950 - DNA, 30 bp, Artificial Sequence
  Synthetic oligonucleotide
cggagtgtgcggacttcgaaatcacagatc

SEQ ID NO: 333951 - DNA, 30 bp, Artificial Sequence
  Synthetic oligonucleotide
cagtccgtccaattggacgtaccgcagatc

SEQ ID NO: 333952 - DNA, 30 bp, Artificial Sequence
  Synthetic oligonucleotide
ggaaatacgctggctccctattcgcagatc

SEQ ID NO: 333953 - DNA, 30 bp, Artificial Sequence
  Synthetic oligonucleotide
gtggcacccgctttgagcaactgtcagatc

SEQ ID NO: 333954 - DNA, 30 bp, Artificial Sequence
  Synthetic oligonucleotide
aagatgtacgcacaccaaacaattcagatc

SEQ ID NO: 333955 - DNA, 30 bp, Artificial Sequence
  Synthetic oligonucleotide
ataaagcaggaattgataaacgcagagatc

SEQ ID NO: 333956 - DNA, 30 bp, Artificial Sequence
  Synthetic oligonucleotide
acatctcagatacttattagattagagatc

SEQ ID NO: 333957 - DNA, 30 bp, Artificial Sequence
  Synthetic oligonucleotide
aaaatcgggcatggacagaagaccgagatc

SEQ ID NO: 333958 - DNA, 30 bp, Artificial Sequence
  Synthetic oligonucleotide
ttggcttcgccgacgcacgggaccgagatc

SEQ ID NO: 333959 - DNA, 30 bp, Artificial Sequence
  Synthetic oligonucleotide
accgatttggaacggacagaaagcgagatc

SEQ ID NO: 333960 - DNA, 29 bp, Artificial Sequence
  Synthetic oligonucleotide
tttaggagcttttgaatcgtaatgagatc

SEQ ID NO: 333961 - DNA, 30 bp, Artificial Sequence
  Synthetic oligonucleotide
ttttgtaccctattgtatttaagtgagatc

SEQ ID NO: 333962 - DNA, 30 bp, Artificial Sequence
  Synthetic oligonucleotide
cttttggcgatcaggtttgtgagtgagatc

SEQ ID NO: 333963 - DNA, 30 bp, Artificial Sequence
  Synthetic oligonucleotide
atcgacatctgttagtgcgaaacatagatc

SEQ ID NO: 333964 - DNA, 30 bp, Artificial Sequence
  Synthetic oligonucleotide
cagggagggactaggtagggccgctagatc

SEQ ID NO: 333965 - DNA, 30 bp, Artificial Sequence
  Synthetic oligonucleotide
gtattgggagcatgtagagtcaagtagatc

SEQ ID NO: 333966 - DNA, 30 bp, Artificial Sequence
  Synthetic oligonucleotide
tgaactttatctgtaccggtgtcgtagatc

SEQ ID NO: 333967 - DNA, 30 bp, Artificial Sequence
  Synthetic oligonucleotide
gtcactggtgttaccttaccttcgtagatc

SEQ ID NO: 333968 - DNA, 30 bp, Artificial Sequence
  Synthetic oligonucleotide
tatcagggcaagctggtgacaacttagatc

SEQ ID NO: 333969 - DNA, 30 bp, Artificial Sequence
  Synthetic oligonucleotide
acgcgctcactgagcccttctggttagatc

SEQ ID NO: 333970 - DNA, 30 bp, Artificial Sequence
  Synthetic oligonucleotide
acttaatggcctaaacgtcaaatttagatc

SEQ ID NO: 333971 - DNA, 30 bp, Artificial Sequence
  Synthetic oligonucleotide
gggtggcgaaaaacaggtaatatttagatc

SEQ ID NO: 333972 - DNA, 30 bp, Artificial Sequence
  Synthetic oligonucleotide
gtgcaagaggcagagctctgattttagatc

SEQ ID NO: 333973 - DNA, 30 bp, Artificial Sequence
  Synthetic oligonucleotide
tacgcagttggttagccgaaggacacgatc

SEQ ID NO: 333974 - DNA, 30 bp, Artificial Sequence
  Synthetic oligonucleotide
atgtcaattccccgaactggtcgcacgatc

SEQ ID NO: 333975 - DNA, 30 bp, Artificial Sequence
  Synthetic oligonucleotide
ttacgttcgcaagggaaagcgctcacgatc

SEQ ID NO: 333976 - DNA, 30 bp, Artificial Sequence
  Synthetic oligonucleotide
tgggaaccgcgcagacgacaaagtacgatc

SEQ ID NO: 333977 - DNA, 30 bp, Artificial Sequence
  Synthetic oligonucleotide
ggtctgcggcggaaactaaagaacccgatc

SEQ ID NO: 333978 - DNA, 30 bp, Artificial Sequence
  Synthetic oligonucleotide
ggcgagatagatcttcttagtaacccgatc

SEQ ID NO: 333979 - DNA, 30 bp, Artificial Sequence
  Synthetic oligonucleotide
cagatatcaagctgtaagtcggacccgatc

SEQ ID NO: 333980 - DNA, 30 bp, Artificial Sequence
  Synthetic oligonucleotide
attgttcgacaagaaccggggtacccgatc

SEQ ID NO: 333981 - DNA, 30 bp, Artificial Sequence
  Synthetic oligonucleotide
tagttgtgtcgactctctctcgccccgatc

SEQ ID NO: 333982 - DNA, 30 bp, Artificial Sequence
  Synthetic oligonucleotide
gaaggaccctcgcagtacagaggcgcgatc

SEQ ID NO: 333983 - DNA, 30 bp, Artificial Sequence
  Synthetic oligonucleotide
tcagaccgctccggtgtgtaataggcgatc

SEQ ID NO: 333984 - DNA, 30 bp, Artificial Sequence
  Synthetic oligonucleotide
aacagcccgtggaaagaatctttggcgatc

SEQ ID NO: 333985 - DNA, 30 bp, Artificial Sequence
  Synthetic oligonucleotide
taatagctgccgtattaagtccatgcgatc

SEQ ID NO: 333986 - DNA, 30 bp, Artificial Sequence
  Synthetic oligonucleotide
tcaagctgtaacagtcgggaataatcgatc

SEQ ID NO: 333987 - DNA, 30 bp, Artificial Sequence
  Synthetic oligonucleotide
acgagttggacaatacttagcagatcgatc

SEQ ID NO: 333988 - DNA, 30 bp, Artificial Sequence
  Synthetic oligonucleotide
tctaagttcgtagcagagcgcttatcgatc

SEQ ID NO: 333989 - DNA, 30 bp, Artificial Sequence
  Synthetic oligonucleotide
gtcgtaatgcgtacctgatcctgttcgatc

SEQ ID NO: 333990 - DNA, 30 bp, Artificial Sequence
  Synthetic oligonucleotide
ctaattcagaacctatcatgaatttcgatc

SEQ ID NO: 333991 - DNA, 30 bp, Artificial Sequence
  Synthetic oligonucleotide
tagattgggccactcacaataaaaaggatc

SEQ ID NO: 333992 - DNA, 30 bp, Artificial Sequence
  Synthetic oligonucleotide
aagtatggatgggtcacggttccaaggatc

SEQ ID NO: 333993 - DNA, 30 bp, Artificial Sequence
  Synthetic oligonucleotide
gattatgtgtcacgctgttacaaacggatc

SEQ ID NO: 333994 - DNA, 30 bp, Artificial Sequence
  Synthetic oligonucleotide
ggttttcaaaggcacaccttcgagcggatc

SEQ ID NO: 333995 - DNA, 30 bp, Artificial Sequence
  Synthetic oligonucleotide
tcctactccatgcaatatagtgggcggatc

SEQ ID NO: 333996 - DNA, 30 bp, Artificial Sequence
  Synthetic oligonucleotide
tctgttacatgagtgatgcccgatcggatc

SEQ ID NO: 333997 - DNA, 30 bp, Artificial Sequence
  Synthetic oligonucleotide
gtcttgtctaaaaacggcgagtttcggatc

SEQ ID NO: 333998 - DNA, 30 bp, Artificial Sequence
  Synthetic oligonucleotide
ctgggcaataaagtgcctgaggccgggatc

SEQ ID NO: 333999 - DNA, 30 bp, Artificial Sequence
  Synthetic oligonucleotide
tgcgtctgtattggtaaagagagggggatc

SEQ ID NO: 334000 - DNA, 30 bp, Artificial Sequence
  Synthetic oligonucleotide
tctactcaggcagtctagaacttggggatc

SEQ ID NO: 334001 - DNA, 30 bp, Artificial Sequence
  Synthetic oligonucleotide
ccgttgttcgttatatcgcttagtgggatc

SEQ ID NO: 334002 - DNA, 30 bp, Artificial Sequence
  Synthetic oligonucleotide
ggtgctgcaatgcacttccaaaggtggatc

SEQ ID NO: 334003 - DNA, 30 bp, Artificial Sequence
  Synthetic oligonucleotide
tgacgcatcagtggatggccagggtggatc

SEQ ID NO: 334004 - DNA, 30 bp, Artificial Sequence
  Synthetic oligonucleotide
tatctcgtgaactggtattgtacttggatc

SEQ ID NO: 334005 - DNA, 30 bp, Artificial Sequence
  Synthetic oligonucleotide
tagtcccctgtaggcccattactcatgatc

SEQ ID NO: 334006 - DNA, 30 bp, Artificial Sequence
  Synthetic oligonucleotide
gtatggaaggtacctatttatcatatgatc

SEQ ID NO: 334007 - DNA, 30 bp, Artificial Sequence
  Synthetic oligonucleotide
cgagattagtttttataatgaactatgatc

SEQ ID NO: 334008 - DNA, 30 bp, Artificial Sequence
  Synthetic oligonucleotide
tacctacccgccgtgaggacttgtatgatc

SEQ ID NO: 334009 - DNA, 30 bp, Artificial Sequence
  Synthetic oligonucleotide
agatcttacttatgtgtattaagactgatc

SEQ ID NO: 334010 - DNA, 30 bp, Artificial Sequence
  Synthetic oligonucleotide
atgacgaaatattactgatgagtactgatc

SEQ ID NO: 334011 - DNA, 30 bp, Artificial Sequence
  Synthetic oligonucleotide
gcgactaagaggactacgacggtcctgatc

SEQ ID NO: 334012 - DNA, 30 bp, Artificial Sequence
  Synthetic oligonucleotide
tcattatctagtcgcgctttcaagctgatc

SEQ ID NO: 334013 - DNA, 30 bp, Artificial Sequence
  Synthetic oligonucleotide
attttcggttcagagactagttcgctgatc

SEQ ID NO: 334014 - DNA, 30 bp, Artificial Sequence
  Synthetic oligonucleotide
taacgtgtccgcgtgtatgctgcagtgatc

SEQ ID NO: 334015 - DNA, 30 bp, Artificial Sequence
  Synthetic oligonucleotide
gccaggagcgactccatatcctacgtgatc

SEQ ID NO: 334016 - DNA, 30 bp, Artificial Sequence
  Synthetic oligonucleotide
ccttgggccttatcactgtggaccgtgatc

SEQ ID NO: 334017 - DNA, 30 bp, Artificial Sequence
  Synthetic oligonucleotide
ctaaccacgggtgccatgtttaaggtgatc

SEQ ID NO: 334018 - DNA, 30 bp, Artificial Sequence
  Synthetic oligonucleotide
aaatttgtgggtccacgagcccgggtgatc

SEQ ID NO: 334019 - DNA, 30 bp, Artificial Sequence
  Synthetic oligonucleotide
gtatataaccatgagaatccgaaattgatc

SEQ ID NO: 334020 - DNA, 30 bp, Artificial Sequence
  Synthetic oligonucleotide
aggtacccataatgcctcgtatgattgatc

SEQ ID NO: 334021 - DNA, 30 bp, Artificial Sequence
  Synthetic oligonucleotide
aaatcacgataagagttatgtgacttgatc

SEQ ID NO: 334022 - DNA, 30 bp, Artificial Sequence
  Synthetic oligonucleotide
ccggaagagttgcatatttgccgcttgatc

SEQ ID NO: 334023 - DNA, 30 bp, Artificial Sequence
  Synthetic oligonucleotide
ggtctccttgaaggccgaaaagggttgatc

SEQ ID NO: 334024 - DNA, 30 bp, Artificial Sequence
  Synthetic oligonucleotide
tgcatatgtgcgtagttatcactgttgatc

SEQ ID NO: 334025 - DNA, 30 bp, Artificial Sequence
  Synthetic oligonucleotide
ggcggatatctccccggcgtaggtttgatc

SEQ ID NO: 334026 - DNA, 30 bp, Artificial Sequence
  Synthetic oligonucleotide
attggtttgcgtccgacagggggaaatatc

SEQ ID NO: 334027 - DNA, 30 bp, Artificial Sequence
  Synthetic oligonucleotide
gcagtccaatgcaacggagcatgcaatatc

SEQ ID NO: 334028 - DNA, 30 bp, Artificial Sequence
  Synthetic oligonucleotide
tctggactggttgtagatattgagaatatc

SEQ ID NO: 334029 - DNA, 30 bp, Artificial Sequence
  Synthetic oligonucleotide
gtgcagttacacggcccacaggggaatatc

SEQ ID NO: 334030 - DNA, 30 bp, Artificial Sequence
  Synthetic oligonucleotide
gcgcccggtacctcataagacctgaatatc

SEQ ID NO: 334031 - DNA, 30 bp, Artificial Sequence
  Synthetic oligonucleotide
ccaaacgcatgtagatcttacctgaatatc

SEQ ID NO: 334032 - DNA, 30 bp, Artificial Sequence
  Synthetic oligonucleotide
tatacacgataagtaccggaatctaatatc

SEQ ID NO: 334033 - DNA, 30 bp, Artificial Sequence
  Synthetic oligonucleotide
ttcaccccggtgccctgtgcgggacatatc

SEQ ID NO: 334034 - DNA, 30 bp, Artificial Sequence
  Synthetic oligonucleotide
gtgttagaacgatatggtcttcctcatatc

SEQ ID NO: 334035 - DNA, 30 bp, Artificial Sequence
  Synthetic oligonucleotide
gacacgatccgtattcgcccagtagatatc

SEQ ID NO: 334036 - DNA, 30 bp, Artificial Sequence
  Synthetic oligonucleotide
atttcgcgtgaggaaaggtaacacgatatc

SEQ ID NO: 334037 - DNA, 30 bp, Artificial Sequence
  Synthetic oligonucleotide
ccagcatatcggtgacataacttggatatc

SEQ ID NO: 334038 - DNA, 31 bp, Artificial Sequence
  Synthetic oligonucleotide
gagcatatattgccagccaagagatgatatc

SEQ ID NO: 334039 - DNA, 30 bp, Artificial Sequence
  Synthetic oligonucleotide
atcatgcttgatgggatgtgggcatatatc

SEQ ID NO: 334040 - DNA, 29 bp, Artificial Sequence
  Synthetic oligonucleotide
ccctgcccgattaggagccaatgtatatc

SEQ ID NO: 334041 - DNA, 30 bp, Artificial Sequence
  Synthetic oligonucleotide
agtacaatgcccgcaggaacaggttatatc

SEQ ID NO: 334042 - DNA, 30 bp, Artificial Sequence
  Synthetic oligonucleotide
aagacgctgcctactagtgcgaaaactatc

SEQ ID NO: 334043 - DNA, 30 bp, Artificial Sequence
  Synthetic oligonucleotide
ggacttggcgcgttatagcaagcaactatc

SEQ ID NO: 334044 - DNA, 30 bp, Artificial Sequence
  Synthetic oligonucleotide
atcgtgaggttgcaaatcaagcgaactatc

SEQ ID NO: 334045 - DNA, 30 bp, Artificial Sequence
  Synthetic oligonucleotide
taataacttgcgacaaactaaaggactatc

SEQ ID NO: 334046 - DNA, 30 bp, Artificial Sequence
  Synthetic oligonucleotide
tatatggttttatggggaggtcggactatc

SEQ ID NO: 334047 - DNA, 30 bp, Artificial Sequence
  Synthetic oligonucleotide
tgacggtcgcagtggatactagggactatc

SEQ ID NO: 334048 - DNA, 30 bp, Artificial Sequence
  Synthetic oligonucleotide
cgtgacgcccaaatgggcgataatactatc

SEQ ID NO: 334049 - DNA, 30 bp, Artificial Sequence
  Synthetic oligonucleotide
atcacaggacaacatcggatgcgacctatc

SEQ ID NO: 334050 - DNA, 30 bp, Artificial Sequence
  Synthetic oligonucleotide
agtgagttcctaatgagcacgcaccctatc

SEQ ID NO: 334051 - DNA, 30 bp, Artificial Sequence
  Synthetic oligonucleotide
gattgaaagcattcagtgacgggccctatc

SEQ ID NO: 334052 - DNA, 30 bp, Artificial Sequence
  Synthetic oligonucleotide
ataatgtaggcgttccatacccctcctatc

SEQ ID NO: 334053 - DNA, 30 bp, Artificial Sequence
  Synthetic oligonucleotide
cttagatcgtagaagtatagaaaagctatc

SEQ ID NO: 334054 - DNA, 30 bp, Artificial Sequence
  Synthetic oligonucleotide
ctttacgtgagacccgattatgaagctatc

SEQ ID NO: 334055 - DNA, 30 bp, Artificial Sequence
  Synthetic oligonucleotide
taggtcagcgctcttgtcaccttagctatc

SEQ ID NO: 334056 - DNA, 30 bp, Artificial Sequence
  Synthetic oligonucleotide
tcatttggctataaggattccacggctatc

SEQ ID NO: 334057 - DNA, 30 bp, Artificial Sequence
  Synthetic oligonucleotide
cagacaggtagctacatttttcgtgctatc

SEQ ID NO: 334058 - DNA, 30 bp, Artificial Sequence
  Synthetic oligonucleotide
cactcacgctctatggtgtaccgatctatc

SEQ ID NO: 334059 - DNA, 30 bp, Artificial Sequence
  Synthetic oligonucleotide
agtacatgcaagctagtttgcggatctatc

SEQ ID NO: 334060 - DNA, 30 bp, Artificial Sequence
  Synthetic oligonucleotide
tcattgctgatgaatgttttcatatctatc

SEQ ID NO: 334061 - DNA, 30 bp, Artificial Sequence
  Synthetic oligonucleotide
ttgggatttatgtgatacacattgtctatc

SEQ ID NO: 334062 - DNA, 30 bp, Artificial Sequence
  Synthetic oligonucleotide
ggtgagctgctaattgcaccttattctatc

SEQ ID NO: 334063 - DNA, 30 bp, Artificial Sequence
  Synthetic oligonucleotide
ttcgtaccatagattggcgggacaagtatc

SEQ ID NO: 334064 - DNA, 30 bp, Artificial Sequence
  Synthetic oligonucleotide
cgcgtaatgggaataaccgcgtcaagtatc

SEQ ID NO: 334065 - DNA, 30 bp, Artificial Sequence
  Synthetic oligonucleotide
agtcaatcggctgtatgccccagaagtatc

SEQ ID NO: 334066 - DNA, 30 bp, Artificial Sequence
  Synthetic oligonucleotide
tgtcagataccgactaagtcgcgaagtatc

SEQ ID NO: 334067 - DNA, 30 bp, Artificial Sequence
  Synthetic oligonucleotide
ccggccatctcgtctacgcgaataagtatc

SEQ ID NO: 334068 - DNA, 30 bp, Artificial Sequence
  Synthetic oligonucleotide
cacggacccaatcccgggggcggcagtatc

SEQ ID NO: 334069 - DNA, 30 bp, Artificial Sequence
  Synthetic oligonucleotide
gcattactcgcgctcgtgccaaggagtatc

SEQ ID NO: 334070 - DNA, 30 bp, Artificial Sequence
  Synthetic oligonucleotide
gtaattcaacttgcgccgagtaatagtatc

SEQ ID NO: 334071 - DNA, 30 bp, Artificial Sequence
  Synthetic oligonucleotide
ataacgaaggccagtgtctgcagtagtatc

SEQ ID NO: 334072 - DNA, 30 bp, Artificial Sequence
  Synthetic oligonucleotide
agaatttcaggaccgtcaatctttagtatc

SEQ ID NO: 334073 - DNA, 30 bp, Artificial Sequence
  Synthetic oligonucleotide
attcgacgaggaatcacttggtttagtatc

SEQ ID NO: 334074 - DNA, 30 bp, Artificial Sequence
  Synthetic oligonucleotide
gctcggccttgtctttcaaaaacacgtatc

SEQ ID NO: 334075 - DNA, 30 bp, Artificial Sequence
  Synthetic oligonucleotide
acttcttgctagtagttggctcgacgtatc

SEQ ID NO: 334076 - DNA, 30 bp, Artificial Sequence
  Synthetic oligonucleotide
ggttgagtagccctggtaaactggcgtatc

SEQ ID NO: 334077 - DNA, 30 bp, Artificial Sequence
  Synthetic oligonucleotide
cgtgacgcttgatgtttattactgcgtatc

SEQ ID NO: 334078 - DNA, 30 bp, Artificial Sequence
  Synthetic oligonucleotide
taagtagatagatccggaggtccaggtatc

SEQ ID NO: 334079 - DNA, 30 bp, Artificial Sequence
  Synthetic oligonucleotide
gcctaactttgtgccacagagagaggtatc

SEQ ID NO: 334080 - DNA, 30 bp, Artificial Sequence
  Synthetic oligonucleotide
gcagattaaaatccctccccgttaggtatc

SEQ ID NO: 334081 - DNA, 30 bp, Artificial Sequence
  Synthetic oligonucleotide
cacggaaatgcaccagttctgtacggtatc

SEQ ID NO: 334082 - DNA, 30 bp, Artificial Sequence
  Synthetic oligonucleotide
agggcactccttgcgtctggttccggtatc

SEQ ID NO: 334083 - DNA, 30 bp, Artificial Sequence
  Synthetic oligonucleotide
tgaagatactgaaggctaaatggcggtatc

SEQ ID NO: 334084 - DNA, 30 bp, Artificial Sequence
  Synthetic oligonucleotide
aagccgtcaaacgctagttactgcggtatc

SEQ ID NO: 334085 - DNA, 30 bp, Artificial Sequence
  Synthetic oligonucleotide
attgaaacggaagagcagtgattgggtatc

SEQ ID NO: 334086 - DNA, 30 bp, Artificial Sequence
  Synthetic oligonucleotide
gaggtgtacggtccggtcgcgcaatgtatc

SEQ ID NO: 334087 - DNA, 30 bp, Artificial Sequence
  Synthetic oligonucleotide
caccatggtcctgtataatggcaatgtatc

SEQ ID NO: 334088 - DNA, 30 bp, Artificial Sequence
  Synthetic oligonucleotide
ctttctggtaagggtaagtgcagatgtatc

SEQ ID NO: 334089 - DNA, 30 bp, Artificial Sequence
  Synthetic oligonucleotide
agtagccggctgggagtctagcgatgtatc

SEQ ID NO: 334090 - DNA, 30 bp, Artificial Sequence
  Synthetic oligonucleotide
ctgcagccgcataccatcagactatgtatc

SEQ ID NO: 334091 - DNA, 30 bp, Artificial Sequence
  Synthetic oligonucleotide
ccctctgcgaatcaacggggaaggtgtatc

SEQ ID NO: 334092 - DNA, 30 bp, Artificial Sequence
  Synthetic oligonucleotide
agaagtccagggcagaatcatctgtgtatc

SEQ ID NO: 334093 - DNA, 30 bp, Artificial Sequence
  Synthetic oligonucleotide
gacgcaagaccccagcggcaatattgtatc

SEQ ID NO: 334094 - DNA, 30 bp, Artificial Sequence
  Synthetic oligonucleotide
gttacactagcctcagtttcttcttgtatc

SEQ ID NO: 334095 - DNA, 30 bp, Artificial Sequence
  Synthetic oligonucleotide
catgaaagacgattggataaatggattatc

SEQ ID NO: 334096 - DNA, 30 bp, Artificial Sequence
  Synthetic oligonucleotide
atcgagtcaagtcatacccccttgattatc

SEQ ID NO: 334097 - DNA, 30 bp, Artificial Sequence
  Synthetic oligonucleotide
ctatgtccagatattcgtactcaacttatc

SEQ ID NO: 334098 - DNA, 30 bp, Artificial Sequence
  Synthetic oligonucleotide
aacacgacaagctcgcggcacatgcttatc

SEQ ID NO: 334099 - DNA, 30 bp, Artificial Sequence
  Synthetic oligonucleotide
cagtttttggacagaccggtagtcgttatc

SEQ ID NO: 334100 - DNA, 30 bp, Artificial Sequence
  Synthetic oligonucleotide
cgaagcggggcttttaccatttaggttatc

SEQ ID NO: 334101 - DNA, 30 bp, Artificial Sequence
  Synthetic oligonucleotide
ggcgataattcctaggtggcttcggttatc

SEQ ID NO: 334102 - DNA, 30 bp, Artificial Sequence
  Synthetic oligonucleotide
acagttgcctctcagattgctaatgttatc

SEQ ID NO: 334103 - DNA, 30 bp, Artificial Sequence
  Synthetic oligonucleotide
gcagtattcggacgcctaactggatttatc

SEQ ID NO: 334104 - DNA, 30 bp, Artificial Sequence
  Synthetic oligonucleotide
agtctgcagggtcactccagccactttatc

SEQ ID NO: 334105 - DNA, 30 bp, Artificial Sequence
  Synthetic oligonucleotide
ttgcggtacatcgtaaaaactagctttatc

SEQ ID NO: 334106 - DNA, 30 bp, Artificial Sequence
  Synthetic oligonucleotide
agttacaattgaatacctgatccgtttatc

SEQ ID NO: 334107 - DNA, 30 bp, Artificial Sequence
  Synthetic oligonucleotide
acggtattcagttctatgacgtgaaaactc

SEQ ID NO: 334108 - DNA, 30 bp, Artificial Sequence
  Synthetic oligonucleotide
atccacactatgtgctaagatatcaaactc

SEQ ID NO: 334109 - DNA, 30 bp, Artificial Sequence
  Synthetic oligonucleotide
gaaactctaggcctcttgggtgagaaactc

SEQ ID NO: 334110 - DNA, 30 bp, Artificial Sequence
  Synthetic oligonucleotide
taaatagtaccttgcgattaggggaaactc

SEQ ID NO: 334111 - DNA, 30 bp, Artificial Sequence
  Synthetic oligonucleotide
aggcgctacggaccaactaggttgaaactc

SEQ ID NO: 334112 - DNA, 30 bp, Artificial Sequence
  Synthetic oligonucleotide
tgatgagggtggacactgcataataaactc

SEQ ID NO: 334113 - DNA, 30 bp, Artificial Sequence
  Synthetic oligonucleotide
gcgtgcggtaaccacgtgtctaataaactc

SEQ ID NO: 334114 - DNA, 30 bp, Artificial Sequence
  Synthetic oligonucleotide
ttaggttccgacgatgagattgctaaactc

SEQ ID NO: 334115 - DNA, 30 bp, Artificial Sequence
  Synthetic oligonucleotide
aatacggatccctatttgagctgtaaactc

SEQ ID NO: 334116 - DNA, 30 bp, Artificial Sequence
  Synthetic oligonucleotide
cacgtgactgcttgtagtaggtgtaaactc

SEQ ID NO: 334117 - DNA, 30 bp, Artificial Sequence
  Synthetic oligonucleotide
aacggtttggtgactactcgcgaacaactc

SEQ ID NO: 334118 - DNA, 30 bp, Artificial Sequence
  Synthetic oligonucleotide
ataggtcatacggtgagccaatgccaactc

SEQ ID NO: 334119 - DNA, 30 bp, Artificial Sequence
  Synthetic oligonucleotide
aggtactgcgccgccgataaattccaactc

SEQ ID NO: 334120 - DNA, 30 bp, Artificial Sequence
  Synthetic oligonucleotide
tacaagtatcacctagtaagtgagcaactc

SEQ ID NO: 334121 - DNA, 30 bp, Artificial Sequence
  Synthetic oligonucleotide
gcagtttcaatatactgcgatctgcaactc

SEQ ID NO: 334122 - DNA, 30 bp, Artificial Sequence
  Synthetic oligonucleotide
cccttataggtcaaacatctgcaagaactc

SEQ ID NO: 334123 - DNA, 30 bp, Artificial Sequence
  Synthetic oligonucleotide
ggtttgcgtagtgactcaggcggagaactc

SEQ ID NO: 334124 - DNA, 30 bp, Artificial Sequence
  Synthetic oligonucleotide
cgcaaccagttgatacctgttcccgaactc

SEQ ID NO: 334125 - DNA, 30 bp, Artificial Sequence
  Synthetic oligonucleotide
attagccctttatgctggaagatggaactc

SEQ ID NO: 334126 - DNA, 30 bp, Artificial Sequence
  Synthetic oligonucleotide
agaacctgactgtttggcataggataactc

SEQ ID NO: 334127 - DNA, 30 bp, Artificial Sequence
  Synthetic oligonucleotide
attggacgtacagcgaccaccaactaactc

SEQ ID NO: 334128 - DNA, 30 bp, Artificial Sequence
  Synthetic oligonucleotide
ctaatcattcagaccaggtgtgactaactc

SEQ ID NO: 334129 - DNA, 30 bp, Artificial Sequence
  Synthetic oligonucleotide
attggtgctcggaccttcagttcctaactc

SEQ ID NO: 334130 - DNA, 30 bp, Artificial Sequence
  Synthetic oligonucleotide
agctgtttaggcaattcttaattctaactc

SEQ ID NO: 334131 - DNA, 30 bp, Artificial Sequence
  Synthetic oligonucleotide
tatataactgccatggtttttaagtaactc

SEQ ID NO: 334132 - DNA, 30 bp, Artificial Sequence
  Synthetic oligonucleotide
cgcctagctggggccaaggagccgtaactc

SEQ ID NO: 334133 - DNA, 30 bp, Artificial Sequence
  Synthetic oligonucleotide
ctaaataccaatcgcctgcccgggtaactc

SEQ ID NO: 334134 - DNA, 30 bp, Artificial Sequence
  Synthetic oligonucleotide
acatatcacctgcagtggataggttaactc

SEQ ID NO: 334135 - DNA, 30 bp, Artificial Sequence
  Synthetic oligonucleotide
actctcgatgcatgtcaacccttaacactc

SEQ ID NO: 334136 - DNA, 30 bp, Artificial Sequence
  Synthetic oligonucleotide
taactataatgcatattccttttaacactc

SEQ ID NO: 334137 - DNA, 30 bp, Artificial Sequence
  Synthetic oligonucleotide
agtgggattacctcgcagagtaccacactc

SEQ ID NO: 334138 - DNA, 30 bp, Artificial Sequence
  Synthetic oligonucleotide
tacgaagctcgtagtagctagagcacactc

SEQ ID NO: 334139 - DNA, 30 bp, Artificial Sequence
  Synthetic oligonucleotide
gtagggcgtaatggtcgtgagacgacactc

SEQ ID NO: 334140 - DNA, 30 bp, Artificial Sequence
  Synthetic oligonucleotide
acatggggaaaattctaatataggacactc

SEQ ID NO: 334141 - DNA, 30 bp, Artificial Sequence
  Synthetic oligonucleotide
gaggagtaggtaatattgaggcggacactc

SEQ ID NO: 334142 - DNA, 30 bp, Artificial Sequence
  Synthetic oligonucleotide
tccgttattcaatgcaccagtctaccactc

SEQ ID NO: 334143 - DNA, 30 bp, Artificial Sequence
  Synthetic oligonucleotide
cgtactaacatttagcacggcaacccactc

SEQ ID NO: 334144 - DNA, 30 bp, Artificial Sequence
  Synthetic oligonucleotide
agacctctattcgtttatttttacccactc

SEQ ID NO: 334145 - DNA, 30 bp, Artificial Sequence
  Synthetic oligonucleotide
accagatgcgatgaggtagtcgccgcactc

SEQ ID NO: 334146 - DNA, 30 bp, Artificial Sequence
  Synthetic oligonucleotide
cctgttccgatatgtacatcacaggcactc

SEQ ID NO: 334147 - DNA, 30 bp, Artificial Sequence
  Synthetic oligonucleotide
tgcgcatttggcatattcagcgaggcactc

SEQ ID NO: 334148 - DNA, 30 bp, Artificial Sequence
  Synthetic oligonucleotide
cggcctcgacttttttggcgctaggcactc

SEQ ID NO: 334149 - DNA, 30 bp, Artificial Sequence
  Synthetic oligonucleotide
aaaagaagttgcttgaagacgtgatcactc

SEQ ID NO: 334150 - DNA, 30 bp, Artificial Sequence
  Synthetic oligonucleotide
gctaacggcatcattgccagtgtctcactc

SEQ ID NO: 334151 - DNA, 30 bp, Artificial Sequence
  Synthetic oligonucleotide
aacgtgttctatatctgatccgattcactc

SEQ ID NO: 334152 - DNA, 30 bp, Artificial Sequence
  Synthetic oligonucleotide
ctcctgggcagcctatatgtatattcactc

SEQ ID NO: 334153 - DNA, 30 bp, Artificial Sequence
  Synthetic oligonucleotide
caagcgaacatctgccattcacgttcactc

SEQ ID NO: 334154 - DNA, 30 bp, Artificial Sequence
  Synthetic oligonucleotide
cgagcgacttctcggaaccgttaaagactc

SEQ ID NO: 334155 - DNA, 30 bp, Artificial Sequence
  Synthetic oligonucleotide
taacaagtctggtaagaggttaccagactc

SEQ ID NO: 334156 - DNA, 30 bp, Artificial Sequence
  Synthetic oligonucleotide
cgtcaataggacttattaacaggcagactc

SEQ ID NO: 334157 - DNA, 30 bp, Artificial Sequence
  Synthetic oligonucleotide
atctaaccccgtgaatacaacgtcagactc

SEQ ID NO: 334158 - DNA, 30 bp, Artificial Sequence
  Synthetic oligonucleotide
ctcctcagtcgaggactctaagttagactc

SEQ ID NO: 334159 - DNA, 30 bp, Artificial Sequence
  Synthetic oligonucleotide
gtaatctaatttgtggtcaccaaacgactc

SEQ ID NO: 334160 - DNA, 30 bp, Artificial Sequence
  Synthetic oligonucleotide
taccctgaagccaatccgttgcaacgactc

SEQ ID NO: 334161 - DNA, 30 bp, Artificial Sequence
  Synthetic oligonucleotide
tcaaatcaggtagaagggacggtgcgactc

SEQ ID NO: 334162 - DNA, 30 bp, Artificial Sequence
  Synthetic oligonucleotide
ggctgacactatttaagtagcattcgactc

SEQ ID NO: 334163 - DNA, 30 bp, Artificial Sequence
  Synthetic oligonucleotide
cattgccatcttgtgcgaccgtcaggactc

SEQ ID NO: 334164 - DNA, 30 bp, Artificial Sequence
  Synthetic oligonucleotide
cgcgcagggggccgagaagtcgatggactc

SEQ ID NO: 334165 - DNA, 30 bp, Artificial Sequence
  Synthetic oligonucleotide
cgagccagggccttcttgatggctggactc

SEQ ID NO: 334166 - DNA, 30 bp, Artificial Sequence
  Synthetic oligonucleotide
ccatgcatgctcgcactagcaggctgactc

SEQ ID NO: 334167 - DNA, 30 bp, Artificial Sequence
  Synthetic oligonucleotide
aaaggagggtatcggatctggttgtgactc

SEQ ID NO: 334168 - DNA, 30 bp, Artificial Sequence
  Synthetic oligonucleotide
ggctcacactgcgacttacactattgactc

SEQ ID NO: 334169 - DNA, 30 bp, Artificial Sequence
  Synthetic oligonucleotide
gatgtgaccgcattatcactaacttgactc

SEQ ID NO: 334170 - DNA, 30 bp, Artificial Sequence
  Synthetic oligonucleotide
tcaggcgctaaggtctcccaccgttgactc

SEQ ID NO: 334171 - DNA, 30 bp, Artificial Sequence
  Synthetic oligonucleotide
cgggggcgatagcggtattttgtttgactc

SEQ ID NO: 334172 - DNA, 30 bp, Artificial Sequence
  Synthetic oligonucleotide
tacattgacccctaacacgacgtaatactc

SEQ ID NO: 334173 - DNA, 30 bp, Artificial Sequence
  Synthetic oligonucleotide
gtatagtgtatgctaacctacaccatactc

SEQ ID NO: 334174 - DNA, 30 bp, Artificial Sequence
  Synthetic oligonucleotide
tatatgtaccctaaaagcgatggcatactc

SEQ ID NO: 334175 - DNA, 30 bp, Artificial Sequence
  Synthetic oligonucleotide
gcgatgctacactggcaagctgtcatactc

SEQ ID NO: 334176 - DNA, 30 bp, Artificial Sequence
  Synthetic oligonucleotide
ttgggactttcgactgccaagtcgatactc

SEQ ID NO: 334177 - DNA, 30 bp, Artificial Sequence
  Synthetic oligonucleotide
taggttagtaccaaagccgtgtggatactc

SEQ ID NO: 334178 - DNA, 30 bp, Artificial Sequence
  Synthetic oligonucleotide
cccacacaagagcgtaggagagctatactc

SEQ ID NO: 334179 - DNA, 30 bp, Artificial Sequence
  Synthetic oligonucleotide
tataatcgaatcgttatgttatgtatactc

SEQ ID NO: 334180 - DNA, 30 bp, Artificial Sequence
  Synthetic oligonucleotide
actaatcctctttgatgtagtcaactactc

SEQ ID NO: 334181 - DNA, 30 bp, Artificial Sequence
  Synthetic oligonucleotide
tccgattgtaacacagatatttaactactc

SEQ ID NO: 334182 - DNA, 30 bp, Artificial Sequence
  Synthetic oligonucleotide
ttccgactactagaccgccggcgcctactc

SEQ ID NO: 334183 - DNA, 30 bp, Artificial Sequence
  Synthetic oligonucleotide
aggaagcactattgcgattgacagctactc

SEQ ID NO: 334184 - DNA, 30 bp, Artificial Sequence
  Synthetic oligonucleotide
atggggccgacggcccagcggactctactc

SEQ ID NO: 334185 - DNA, 30 bp, Artificial Sequence
  Synthetic oligonucleotide
agaacaatgttggttaaacatgcagtactc

SEQ ID NO: 334186 - DNA, 30 bp, Artificial Sequence
  Synthetic oligonucleotide
ttacttattctagttataagtcgagtactc

SEQ ID NO: 334187 - DNA, 30 bp, Artificial Sequence
  Synthetic oligonucleotide
tccggtccattagtatctggattcgtactc

SEQ ID NO: 334188 - DNA, 30 bp, Artificial Sequence
  Synthetic oligonucleotide
gtgatggtagggtcttctccggcattactc

SEQ ID NO: 334189 - DNA, 30 bp, Artificial Sequence
  Synthetic oligonucleotide
agcgtatggtacgtaacgtataacttactc

SEQ ID NO: 334190 - DNA, 30 bp, Artificial Sequence
  Synthetic oligonucleotide
tccacggcctgatcacctcccaagttactc

SEQ ID NO: 334191 - DNA, 30 bp, Artificial Sequence
  Synthetic oligonucleotide
ccactacacaccataaactcatcgttactc

SEQ ID NO: 334192 - DNA, 30 bp, Artificial Sequence
  Synthetic oligonucleotide
agtggatgtttatctagacgacgtttactc

SEQ ID NO: 334193 - DNA, 30 bp, Artificial Sequence
  Synthetic oligonucleotide
cgggaaatatacagtaacccgtttttactc

SEQ ID NO: 334194 - DNA, 30 bp, Artificial Sequence
  Synthetic oligonucleotide
tgttataactgacaataaaagaaaaacctc

SEQ ID NO: 334195 - DNA, 30 bp, Artificial Sequence
  Synthetic oligonucleotide
ggtactggaccctatctgcccgacaacctc

SEQ ID NO: 334196 - DNA, 30 bp, Artificial Sequence
  Synthetic oligonucleotide
cactctagaactaagtcgggatagaacctc

SEQ ID NO: 334197 - DNA, 30 bp, Artificial Sequence
  Synthetic oligonucleotide
ccagagatagacagaactcatggtaacctc

SEQ ID NO: 334198 - DNA, 30 bp, Artificial Sequence
  Synthetic oligonucleotide
tacgattatcgtaacaaataaattaacctc

SEQ ID NO: 334199 - DNA, 30 bp, Artificial Sequence
  Synthetic oligonucleotide
cgcacactccattttgctgcagaacacctc

SEQ ID NO: 334200 - DNA, 30 bp, Artificial Sequence
  Synthetic oligonucleotide
tagcgaggggcggagaatatccggcacctc

SEQ ID NO: 334201 - DNA, 30 bp, Artificial Sequence
  Synthetic oligonucleotide
tcattcgggtgtgtgcggaaactgcacctc

SEQ ID NO: 334202 - DNA, 30 bp, Artificial Sequence
  Synthetic oligonucleotide
cctacctggtgacgttggatcagtcacctc

SEQ ID NO: 334203 - DNA, 30 bp, Artificial Sequence
  Synthetic oligonucleotide
actcacgcgtgatgaagcaaaggagacctc

SEQ ID NO: 334204 - DNA, 30 bp, Artificial Sequence
  Synthetic oligonucleotide
atctgggaaggccttctcctccgcgacctc

SEQ ID NO: 334205 - DNA, 30 bp, Artificial Sequence
  Synthetic oligonucleotide
gcttctggaattagaattcagatcgacctc

SEQ ID NO: 334206 - DNA, 30 bp, Artificial Sequence
  Synthetic oligonucleotide
tattagtgacattagtgaaaaacgtacctc

SEQ ID NO: 334207 - DNA, 30 bp, Artificial Sequence
  Synthetic oligonucleotide
gaaattaaacggtgaggctaagggtacctc

SEQ ID NO: 334208 - DNA, 30 bp, Artificial Sequence
  Synthetic oligonucleotide
cgctgctaaaagcttggaatccattacctc

SEQ ID NO: 334209 - DNA, 30 bp, Artificial Sequence
  Synthetic oligonucleotide
aatgtgatacggagggttcgctattacctc

SEQ ID NO: 334210 - DNA, 30 bp, Artificial Sequence
  Synthetic oligonucleotide
cgatggctcccagattacggaaaaaccctc

SEQ ID NO: 334211 - DNA, 30 bp, Artificial Sequence
  Synthetic oligonucleotide
atcctaccagtaacctagcgtgaaaccctc

SEQ ID NO: 334212 - DNA, 30 bp, Artificial Sequence
  Synthetic oligonucleotide
aagtagtgatcacctcgacattaaaccctc

SEQ ID NO: 334213 - DNA, 30 bp, Artificial Sequence
  Synthetic oligonucleotide
gggaccggctcgttctgatggacaaccctc

SEQ ID NO: 334214 - DNA, 30 bp, Artificial Sequence
  Synthetic oligonucleotide
ctctgcaatggagcccagttggcgaccctc

SEQ ID NO: 334215 - DNA, 30 bp, Artificial Sequence
  Synthetic oligonucleotide
actgtggcatctcggtttgcagctaccctc

SEQ ID NO: 334216 - DNA, 30 bp, Artificial Sequence
  Synthetic oligonucleotide
caaaggcagaaaaagtagttagctaccctc

SEQ ID NO: 334217 - DNA, 30 bp, Artificial Sequence
  Synthetic oligonucleotide
ttatgcactggccctggcggacttaccctc

SEQ ID NO: 334218 - DNA, 30 bp, Artificial Sequence
  Synthetic oligonucleotide
atctgcaaagaagttgatttgcatcccctc

SEQ ID NO: 334219 - DNA, 30 bp, Artificial Sequence
  Synthetic oligonucleotide
ctgccagttttctgttcagcggaagccctc

SEQ ID NO: 334220 - DNA, 30 bp, Artificial Sequence
  Synthetic oligonucleotide
ggttactttagcctccggctttcagccctc

SEQ ID NO: 334221 - DNA, 31 bp, Artificial Sequence
  Synthetic oligonucleotide
gcgggtccacaatctgatccgcctagccctc

SEQ ID NO: 334222 - DNA, 30 bp, Artificial Sequence
  Synthetic oligonucleotide
taagccagccagtatcggattttagccctc

SEQ ID NO: 334223 - DNA, 30 bp, Artificial Sequence
  Synthetic oligonucleotide
gagagtgaaatgggttttaagatcgccctc

SEQ ID NO: 334224 - DNA, 30 bp, Artificial Sequence
  Synthetic oligonucleotide
tgggtgggttagtgccggcaggaggccctc

SEQ ID NO: 334225 - DNA, 30 bp, Artificial Sequence
  Synthetic oligonucleotide
gtcgtaacagtatgagtgttcccggccctc

SEQ ID NO: 334226 - DNA, 30 bp, Artificial Sequence
  Synthetic oligonucleotide
taaattgaaagatggcagccattggccctc

SEQ ID NO: 334227 - DNA, 31 bp, Artificial Sequence
  Synthetic oligonucleotide
aaatagagttgtttgtaggggacatgccctc

SEQ ID NO: 334228 - DNA, 30 bp, Artificial Sequence
  Synthetic oligonucleotide
tactgggatttgtcgggtgcttcaagcctc

SEQ ID NO: 334229 - DNA, 30 bp, Artificial Sequence
  Synthetic oligonucleotide
cgtgattggcctataataagatgaagcctc

SEQ ID NO: 334230 - DNA, 30 bp, Artificial Sequence
  Synthetic oligonucleotide
attcaccgcggtctctggagcgggagcctc

SEQ ID NO: 334231 - DNA, 30 bp, Artificial Sequence
  Synthetic oligonucleotide
gatgaaccacaggggcgccgtgcccgcctc

SEQ ID NO: 334232 - DNA, 30 bp, Artificial Sequence
  Synthetic oligonucleotide
gtggctatgctggtgcccatggcgcgcctc

SEQ ID NO: 334233 - DNA, 30 bp, Artificial Sequence
  Synthetic oligonucleotide
aatgagataagtcatccagtaaggcgcctc

SEQ ID NO: 334234 - DNA, 30 bp, Artificial Sequence
  Synthetic oligonucleotide
gccggctcgcgaacgttaaatgtgcgcctc

SEQ ID NO: 334235 - DNA, 30 bp, Artificial Sequence
  Synthetic oligonucleotide
tacagtagtcattccttcttcgaaggcctc

SEQ ID NO: 334236 - DNA, 30 bp, Artificial Sequence
  Synthetic oligonucleotide
tattccttgctgaagcgtaatagaggcctc

SEQ ID NO: 334237 - DNA, 30 bp, Artificial Sequence
  Synthetic oligonucleotide
cattacttttacctgccaattcgtggcctc

SEQ ID NO: 334238 - DNA, 30 bp, Artificial Sequence
  Synthetic oligonucleotide
gagtaatcagggaccataggcattggcctc

SEQ ID NO: 334239 - DNA, 30 bp, Artificial Sequence
  Synthetic oligonucleotide
caagaagacagcgtctacaaacaatgcctc

SEQ ID NO: 334240 - DNA, 30 bp, Artificial Sequence
  Synthetic oligonucleotide
tttgacgggtattcatccgagcagtgcctc

SEQ ID NO: 334241 - DNA, 30 bp, Artificial Sequence
  Synthetic oligonucleotide
gctagcccgcattttgctcactcgtgcctc

SEQ ID NO: 334242 - DNA, 30 bp, Artificial Sequence
  Synthetic oligonucleotide
ctcagtttatgcgaaagacgattttgcctc

SEQ ID NO: 334243 - DNA, 30 bp, Artificial Sequence
  Synthetic oligonucleotide
gttatgccgcaagtgacttagccaatcctc

SEQ ID NO: 334244 - DNA, 30 bp, Artificial Sequence
  Synthetic oligonucleotide
tctatcttgttccgttgggcgacgatcctc

SEQ ID NO: 334245 - DNA, 30 bp, Artificial Sequence
  Synthetic oligonucleotide
tcgtaattgttttagtagaccgtgatcctc

SEQ ID NO: 334246 - DNA, 30 bp, Artificial Sequence
  Synthetic oligonucleotide
tagcgctaggcccgtcctagtttgatcctc

SEQ ID NO: 334247 - DNA, 30 bp, Artificial Sequence
  Synthetic oligonucleotide
tcagtgtggtttaggatattgtatatcctc

SEQ ID NO: 334248 - DNA, 30 bp, Artificial Sequence
  Synthetic oligonucleotide
gataagaagtgtaagaattcgaacctcctc

SEQ ID NO: 334249 - DNA, 30 bp, Artificial Sequence
  Synthetic oligonucleotide
caaaaaccacggagttgagcgatcctcctc

SEQ ID NO: 334250 - DNA, 30 bp, Artificial Sequence
  Synthetic oligonucleotide
gaattaaatcgttatgcctactcgctcctc

SEQ ID NO: 334251 - DNA, 30 bp, Artificial Sequence
  Synthetic oligonucleotide
gcctattatcaattcaaagaatctctcctc

SEQ ID NO: 334252 - DNA, 30 bp, Artificial Sequence
  Synthetic oligonucleotide
ttaaacaatctcttggaaagaacagtcctc

SEQ ID NO: 334253 - DNA, 30 bp, Artificial Sequence
  Synthetic oligonucleotide
tttcggagaggtccgtgctagttcgtcctc

SEQ ID NO: 334254 - DNA, 30 bp, Artificial Sequence
  Synthetic oligonucleotide
cctggtttggtgaactgcaacttattcctc

SEQ ID NO: 334255 - DNA, 30 bp, Artificial Sequence
  Synthetic oligonucleotide
agtgttcgcgagcgtagtgacgtgttcctc

SEQ ID NO: 334256 - DNA, 30 bp, Artificial Sequence
  Synthetic oligonucleotide
gaaggactaagcctgcaacttgtgttcctc

SEQ ID NO: 334257 - DNA, 30 bp, Artificial Sequence
  Synthetic oligonucleotide
ggttctaacgtcctggcccgtcgtttcctc

SEQ ID NO: 334258 - DNA, 30 bp, Artificial Sequence
  Synthetic oligonucleotide
catacatttttggtgagcggtctaaagctc

SEQ ID NO: 334259 - DNA, 30 bp, Artificial Sequence
  Synthetic oligonucleotide
tgttaaaacccaagtatctctgccaagctc

SEQ ID NO: 334260 - DNA, 30 bp, Artificial Sequence
  Synthetic oligonucleotide
tcgaatataccgctcgggcatcctaagctc

SEQ ID NO: 334261 - DNA, 30 bp, Artificial Sequence
  Synthetic oligonucleotide
gaagtgagtatgcaggttaatgctaagctc

SEQ ID NO: 334262 - DNA, 30 bp, Artificial Sequence
  Synthetic oligonucleotide
aacacctggaatttcagttcattacagctc

SEQ ID NO: 334263 - DNA, 30 bp, Artificial Sequence
  Synthetic oligonucleotide
cgcactgcataatgtgcgtcagcccagctc

SEQ ID NO: 334264 - DNA, 30 bp, Artificial Sequence
  Synthetic oligonucleotide
tatgttatcactagaatcatcaagcagctc

SEQ ID NO: 334265 - DNA, 30 bp, Artificial Sequence
  Synthetic oligonucleotide
taagggtggagtagtccagccgatcagctc

SEQ ID NO: 334266 - DNA, 30 bp, Artificial Sequence
  Synthetic oligonucleotide
gaaaacgtgagtccagcttctactcagctc

SEQ ID NO: 334267 - DNA, 30 bp, Artificial Sequence
  Synthetic oligonucleotide
attatgagaacgtttggccaaagagagctc

SEQ ID NO: 334268 - DNA, 30 bp, Artificial Sequence
  Synthetic oligonucleotide
ggtgagatgcgtaagagttcgtgagagctc

SEQ ID NO: 334269 - DNA, 30 bp, Artificial Sequence
  Synthetic oligonucleotide
atttttaggcctgaacttaagcacgagctc

SEQ ID NO: 334270 - DNA, 30 bp, Artificial Sequence
  Synthetic oligonucleotide
cacgatggcaacatgtccccccccgagctc

SEQ ID NO: 334271 - DNA, 30 bp, Artificial Sequence
  Synthetic oligonucleotide
ttttaaagcgagtcccattcagaggagctc

SEQ ID NO: 334272 - DNA, 30 bp, Artificial Sequence
  Synthetic oligonucleotide
ctgtaatgcagggccgtgagttcggagctc

SEQ ID NO: 334273 - DNA, 30 bp, Artificial Sequence
  Synthetic oligonucleotide
cctagcaaagtaggtcccgaacgggagctc

SEQ ID NO: 334274 - DNA, 30 bp, Artificial Sequence
  Synthetic oligonucleotide
ctcgagactggcatgcggagatatgagctc

SEQ ID NO: 334275 - DNA, 30 bp, Artificial Sequence
  Synthetic oligonucleotide
gggcgccggcctaccagtagttctgagctc

SEQ ID NO: 334276 - DNA, 30 bp, Artificial Sequence
  Synthetic oligonucleotide
cagggatcgatcctaccggcgcactagctc

SEQ ID NO: 334277 - DNA, 30 bp, Artificial Sequence
  Synthetic oligonucleotide
ttcctgtggacatgccgcttaagctagctc

SEQ ID NO: 334278 - DNA, 30 bp, Artificial Sequence
  Synthetic oligonucleotide
agcactaatgcgaactgatgctgctagctc

SEQ ID NO: 334279 - DNA, 30 bp, Artificial Sequence
  Synthetic oligonucleotide
tttcagacactggggcgcaagtagtagctc

SEQ ID NO: 334280 - DNA, 30 bp, Artificial Sequence
  Synthetic oligonucleotide
agactgttcgaccgtgataatgcgtagctc

SEQ ID NO: 334281 - DNA, 30 bp, Artificial Sequence
  Synthetic oligonucleotide
ccggagagccaatggagggcattgtagctc

SEQ ID NO: 334282 - DNA, 30 bp, Artificial Sequence
  Synthetic oligonucleotide
aaggggctgtataagtccatcaaaacgctc

SEQ ID NO: 334283 - DNA, 30 bp, Artificial Sequence
  Synthetic oligonucleotide
tgttgttggcatgtagagtagcgaacgctc

SEQ ID NO: 334284 - DNA, 30 bp, Artificial Sequence
  Synthetic oligonucleotide
ttttcggcaactcacaccagtgccccgctc

SEQ ID NO: 334285 - DNA, 30 bp, Artificial Sequence
  Synthetic oligonucleotide
acgctcttatgcgacaactaacgcccgctc

SEQ ID NO: 334286 - DNA, 30 bp, Artificial Sequence
  Synthetic oligonucleotide
agcgacttgcaattagtggcgacgccgctc

SEQ ID NO: 334287 - DNA, 30 bp, Artificial Sequence
  Synthetic oligonucleotide
gcaactattatgcacgggtgccggccgctc

SEQ ID NO: 334288 - DNA, 30 bp, Artificial Sequence
  Synthetic oligonucleotide
tggttgcagacaggaagcagggcagcgctc

SEQ ID NO: 334289 - DNA, 30 bp, Artificial Sequence
  Synthetic oligonucleotide
acttaggtcactgtgcaaaatgcagcgctc

SEQ ID NO: 334290 - DNA, 30 bp, Artificial Sequence
  Synthetic oligonucleotide
tgtatatacggggggtcgcggggcgcgctc

SEQ ID NO: 334291 - DNA, 30 bp, Artificial Sequence
  Synthetic oligonucleotide
ttgagatagaaagggacctacatcgcgctc

SEQ ID NO: 334292 - DNA, 30 bp, Artificial Sequence
  Synthetic oligonucleotide
tactaatccgtttcatcggggtttgcgctc

SEQ ID NO: 334293 - DNA, 30 bp, Artificial Sequence
  Synthetic oligonucleotide
tacagatgtgctctcggaataggctcgctc

SEQ ID NO: 334294 - DNA, 30 bp, Artificial Sequence
  Synthetic oligonucleotide
gttgtccatgttatcacaatgtggtcgctc

SEQ ID NO: 334295 - DNA, 30 bp, Artificial Sequence
  Synthetic oligonucleotide
cagggtataattctatgatactattcgctc

SEQ ID NO: 334296 - DNA, 30 bp, Artificial Sequence
  Synthetic oligonucleotide
gaacaaacctgttgccaacttaaaaggctc

SEQ ID NO: 334297 - DNA, 30 bp, Artificial Sequence
  Synthetic oligonucleotide
gcgagggctcttgctccccggataaggctc

SEQ ID NO: 334298 - DNA, 30 bp, Artificial Sequence
  Synthetic oligonucleotide
gaccgaattttatgggccattactaggctc

SEQ ID NO: 334299 - DNA, 30 bp, Artificial Sequence
  Synthetic oligonucleotide
tatgctaacttataaaggcagagtaggctc

SEQ ID NO: 334300 - DNA, 30 bp, Artificial Sequence
  Synthetic oligonucleotide
gaagtgtcacattgggtagagagtaggctc

SEQ ID NO: 334301 - DNA, 30 bp, Artificial Sequence
  Synthetic oligonucleotide
ggtcaacgcacccaggcgctagaacggctc

SEQ ID NO: 334302 - DNA, 30 bp, Artificial Sequence
  Synthetic oligonucleotide
acggactcgagtaagggctcgtcacggctc

SEQ ID NO: 334303 - DNA, 30 bp, Artificial Sequence
  Synthetic oligonucleotide
tcaacaggattccttctgacgatacggctc

SEQ ID NO: 334304 - DNA, 30 bp, Artificial Sequence
  Synthetic oligonucleotide
gaaacaatctccgggtaggatgcgcggctc

SEQ ID NO: 334305 - DNA, 30 bp, Artificial Sequence
  Synthetic oligonucleotide
gtccgaattcgttctaatgaccggcggctc

SEQ ID NO: 334306 - DNA, 30 bp, Artificial Sequence
  Synthetic oligonucleotide
cgtactgggggaatagtttatctgcggctc

SEQ ID NO: 334307 - DNA, 30 bp, Artificial Sequence
  Synthetic oligonucleotide
ttgcatcctcatgcggttgcgcttcggctc

SEQ ID NO: 334308 - DNA, 30 bp, Artificial Sequence
  Synthetic oligonucleotide
actgcagtccgtaacagcggtatagggctc

SEQ ID NO: 334309 - DNA, 30 bp, Artificial Sequence
  Synthetic oligonucleotide
cactagcaccgccccgaggtgttagggctc

SEQ ID NO: 334310 - DNA, 30 bp, Artificial Sequence
  Synthetic oligonucleotide
ggacagagctatcaggaaggcgacgggctc

SEQ ID NO: 334311 - DNA, 30 bp, Artificial Sequence
  Synthetic oligonucleotide
acgtggtaatgttatttatcgtccgggctc

SEQ ID NO: 334312 - DNA, 30 bp, Artificial Sequence
  Synthetic oligonucleotide
agtagcatgtatctgtgagcaatcgggctc

SEQ ID NO: 334313 - DNA, 30 bp, Artificial Sequence
  Synthetic oligonucleotide
ttaagacgcatggggagacgtcaggggctc

SEQ ID NO: 334314 - DNA, 30 bp, Artificial Sequence
  Synthetic oligonucleotide
ataggctagcatccataattgaatgggctc

SEQ ID NO: 334315 - DNA, 30 bp, Artificial Sequence
  Synthetic oligonucleotide
ctaggccaaaaatgccacggcgttgggctc

SEQ ID NO: 334316 - DNA, 30 bp, Artificial Sequence
  Synthetic oligonucleotide
tgcggtgtcagttgtggggttaaatggctc

SEQ ID NO: 334317 - DNA, 28 bp, Artificial Sequence
  Synthetic oligonucleotide
aacagcgcgctgctgggagcaatggctc

SEQ ID NO: 334318 - DNA, 30 bp, Artificial Sequence
  Synthetic oligonucleotide
agctggttctattagattggcttctggctc

SEQ ID NO: 334319 - DNA, 30 bp, Artificial Sequence
  Synthetic oligonucleotide
tctcgaggcactacgtgcctttagtggctc

SEQ ID NO: 334320 - DNA, 30 bp, Artificial Sequence
  Synthetic oligonucleotide
aaaccatagctataggttcatgcttggctc

SEQ ID NO: 334321 - DNA, 30 bp, Artificial Sequence
  Synthetic oligonucleotide
ctgccaccggctaaccgtcaaagttggctc

SEQ ID NO: 334322 - DNA, 30 bp, Artificial Sequence
  Synthetic oligonucleotide
gggtggggagtgcaatcagtccgttggctc

SEQ ID NO: 334323 - DNA, 30 bp, Artificial Sequence
  Synthetic oligonucleotide
agcaaaatatgtgcagtacgtcggatgctc

SEQ ID NO: 334324 - DNA, 30 bp, Artificial Sequence
  Synthetic oligonucleotide
cgtgtcaggaattcggactccgggatgctc

SEQ ID NO: 334325 - DNA, 30 bp, Artificial Sequence
  Synthetic oligonucleotide
gctatctgtacttatgactgcattatgctc

SEQ ID NO: 334326 - DNA, 30 bp, Artificial Sequence
  Synthetic oligonucleotide
gacctcctttatgctgagaacagactgctc

SEQ ID NO: 334327 - DNA, 30 bp, Artificial Sequence
  Synthetic oligonucleotide
tcgcacgaaaacgcgtatcagcggctgctc

SEQ ID NO: 334328 - DNA, 30 bp, Artificial Sequence
  Synthetic oligonucleotide
acccaatagtaaactattgatactctgctc

SEQ ID NO: 334329 - DNA, 30 bp, Artificial Sequence
  Synthetic oligonucleotide
gaagacagtgtaggacttgaaggagtgctc

SEQ ID NO: 334330 - DNA, 30 bp, Artificial Sequence
  Synthetic oligonucleotide
gacgatacaggacgtcccccccaggtgctc

SEQ ID NO: 334331 - DNA, 30 bp, Artificial Sequence
  Synthetic oligonucleotide
cccgcggctggacgagagaagcaggtgctc

SEQ ID NO: 334332 - DNA, 30 bp, Artificial Sequence
  Synthetic oligonucleotide
tgtctgcgacggtttttattgagggtgctc

SEQ ID NO: 334333 - DNA, 30 bp, Artificial Sequence
  Synthetic oligonucleotide
accatagagttttaaaacgaacttgtgctc

SEQ ID NO: 334334 - DNA, 30 bp, Artificial Sequence
  Synthetic oligonucleotide
gtcttgcatcttagcggggggagattgctc

SEQ ID NO: 334335 - DNA, 30 bp, Artificial Sequence
  Synthetic oligonucleotide
cctgcatgtctcggttttatgatattgctc

SEQ ID NO: 334336 - DNA, 30 bp, Artificial Sequence
  Synthetic oligonucleotide
ccaagggactggtacaatcttgtattgctc

SEQ ID NO: 334337 - DNA, 30 bp, Artificial Sequence
  Synthetic oligonucleotide
tgccatactttcagtcctccgggcttgctc

SEQ ID NO: 334338 - DNA, 31 bp, Artificial Sequence
  Synthetic oligonucleotide
cgcagggttctcccctcagtaacagttgctc

SEQ ID NO: 334339 - DNA, 30 bp, Artificial Sequence
  Synthetic oligonucleotide
gcgaagtagcactgctgtggcacgttgctc

SEQ ID NO: 334340 - DNA, 29 bp, Artificial Sequence
  Synthetic oligonucleotide
acgtagacaaagatctcgcaggtttgctc

SEQ ID NO: 334341 - DNA, 30 bp, Artificial Sequence
  Synthetic oligonucleotide
gttaggcagtcatgcccgggtacaaatctc

SEQ ID NO: 334342 - DNA, 30 bp, Artificial Sequence
  Synthetic oligonucleotide
gccaagaaggaactcgcgtcgcccaatctc

SEQ ID NO: 334343 - DNA, 30 bp, Artificial Sequence
  Synthetic oligonucleotide
taaggggataaacatcctactcccaatctc

SEQ ID NO: 334344 - DNA, 30 bp, Artificial Sequence
  Synthetic oligonucleotide
cttggggctactgcctataagtccaatctc

SEQ ID NO: 334345 - DNA, 30 bp, Artificial Sequence
  Synthetic oligonucleotide
ctgtgtatcggtgactaatacatcaatctc

SEQ ID NO: 334346 - DNA, 30 bp, Artificial Sequence
  Synthetic oligonucleotide
tgaattggttcttggctgatcccgaatctc

SEQ ID NO: 334347 - DNA, 30 bp, Artificial Sequence
  Synthetic oligonucleotide
ctcgagaatatgccatccaacaataatctc

SEQ ID NO: 334348 - DNA, 30 bp, Artificial Sequence
  Synthetic oligonucleotide
atacgtaatatataacaggttcctaatctc

SEQ ID NO: 334349 - DNA, 30 bp, Artificial Sequence
  Synthetic oligonucleotide
caacggggcattatcgcaggacttaatctc

SEQ ID NO: 334350 - DNA, 30 bp, Artificial Sequence
  Synthetic oligonucleotide
gtcgagtactgaacaaggcccacgcatctc

SEQ ID NO: 334351 - DNA, 30 bp, Artificial Sequence
  Synthetic oligonucleotide
acactcttttggagagtgcatacagatctc

SEQ ID NO: 334352 - DNA, 30 bp, Artificial Sequence
  Synthetic oligonucleotide
tggcacatgagggtgtcttccatagatctc

SEQ ID NO: 334353 - DNA, 30 bp, Artificial Sequence
  Synthetic oligonucleotide
accgtagagttctcaaccgccaaggatctc

SEQ ID NO: 334354 - DNA, 30 bp, Artificial Sequence
  Synthetic oligonucleotide
ggtatggaggaatcagtggtattggatctc

SEQ ID NO: 334355 - DNA, 30 bp, Artificial Sequence
  Synthetic oligonucleotide
tacaatatggtgtacttagctatctatctc

SEQ ID NO: 334356 - DNA, 30 bp, Artificial Sequence
  Synthetic oligonucleotide
catgggaagggggggtgcagcaagtatctc

SEQ ID NO: 334357 - DNA, 30 bp, Artificial Sequence
  Synthetic oligonucleotide
cacgtcgttccttttagttagttgtatctc

SEQ ID NO: 334358 - DNA, 30 bp, Artificial Sequence
  Synthetic oligonucleotide
caccgcccaccacctaatacatcttatctc

SEQ ID NO: 334359 - DNA, 30 bp, Artificial Sequence
  Synthetic oligonucleotide
gatcgtgcgatcgcacgaacacgttatctc

SEQ ID NO: 334360 - DNA, 30 bp, Artificial Sequence
  Synthetic oligonucleotide
gcgtggaacatgttcgtgaactatactctc

SEQ ID NO: 334361 - DNA, 30 bp, Artificial Sequence
  Synthetic oligonucleotide
cgaagagactaaacccccggtagtactctc

SEQ ID NO: 334362 - DNA, 30 bp, Artificial Sequence
  Synthetic oligonucleotide
gcttgagccctcgttcgtgagcgtactctc

SEQ ID NO: 334363 - DNA, 30 bp, Artificial Sequence
  Synthetic oligonucleotide
ggtttcaaagggtgagtggaggttactctc

SEQ ID NO: 334364 - DNA, 30 bp, Artificial Sequence
  Synthetic oligonucleotide
tctctgcgtgggctcactagcgaccctctc

SEQ ID NO: 334365 - DNA, 30 bp, Artificial Sequence
  Synthetic oligonucleotide
ggaccttcgatttcgtcatgcaccgctctc

SEQ ID NO: 334366 - DNA, 30 bp, Artificial Sequence
  Synthetic oligonucleotide
ttacgtctgcgaaatacattcccggctctc

SEQ ID NO: 334367 - DNA, 30 bp, Artificial Sequence
  Synthetic oligonucleotide
agagatacgcatccgcgcatatgggctctc

SEQ ID NO: 334368 - DNA, 30 bp, Artificial Sequence
  Synthetic oligonucleotide
tgtaccaagaggttattatgggttgctctc

SEQ ID NO: 334369 - DNA, 30 bp, Artificial Sequence
  Synthetic oligonucleotide
ggaacatctgaactagacggcacatctctc

SEQ ID NO: 334370 - DNA, 30 bp, Artificial Sequence
  Synthetic oligonucleotide
ggaacaatgagtcgatgtgtactatctctc

SEQ ID NO: 334371 - DNA, 30 bp, Artificial Sequence
  Synthetic oligonucleotide
cagcgcagtacgtagattaaatagtctctc

SEQ ID NO: 334372 - DNA, 30 bp, Artificial Sequence
  Synthetic oligonucleotide
aagttaaggacattagcgtttcggtctctc

SEQ ID NO: 334373 - DNA, 30 bp, Artificial Sequence
  Synthetic oligonucleotide
gtctcaaagatagatcaaacggtttctctc

SEQ ID NO: 334374 - DNA, 30 bp, Artificial Sequence
  Synthetic oligonucleotide
tataaattgccagtcgatgacaaaagtctc

SEQ ID NO: 334375 - DNA, 30 bp, Artificial Sequence
  Synthetic oligonucleotide
taagtttgcgattaccaacaaaccagtctc

SEQ ID NO: 334376 - DNA, 30 bp, Artificial Sequence
  Synthetic oligonucleotide
ctgctttgcgaagtatcgcttcagagtctc

SEQ ID NO: 334377 - DNA, 30 bp, Artificial Sequence
  Synthetic oligonucleotide
ccggaaattatagcggctcaatagagtctc

SEQ ID NO: 334378 - DNA, 30 bp, Artificial Sequence
  Synthetic oligonucleotide
tggttaatcttgtcgggatggcctagtctc

SEQ ID NO: 334379 - DNA, 30 bp, Artificial Sequence
  Synthetic oligonucleotide
gggatccggcgtatctatatcgggcgtctc

SEQ ID NO: 334380 - DNA, 30 bp, Artificial Sequence
  Synthetic oligonucleotide
gcctcttggaaaccatctatccctcgtctc

SEQ ID NO: 334381 - DNA, 30 bp, Artificial Sequence
  Synthetic oligonucleotide
ctttatgggacgtccattcggaaaggtctc

SEQ ID NO: 334382 - DNA, 30 bp, Artificial Sequence
  Synthetic oligonucleotide
caagtttggctctttgtgaattcgggtctc

SEQ ID NO: 334383 - DNA, 30 bp, Artificial Sequence
  Synthetic oligonucleotide
gggcggccttcttgaaacgtagtgggtctc

SEQ ID NO: 334384 - DNA, 30 bp, Artificial Sequence
  Synthetic oligonucleotide
gataaccacccacaagtacgtgatggtctc

SEQ ID NO: 334385 - DNA, 30 bp, Artificial Sequence
  Synthetic oligonucleotide
ggaatggttacttccagaaagcaatgtctc

SEQ ID NO: 334386 - DNA, 30 bp, Artificial Sequence
  Synthetic oligonucleotide
agatgccttgcggaacgtgtcgtatgtctc

SEQ ID NO: 334387 - DNA, 30 bp, Artificial Sequence
  Synthetic oligonucleotide
cactttgattatcgagtgtgtaactgtctc

SEQ ID NO: 334388 - DNA, 30 bp, Artificial Sequence
  Synthetic oligonucleotide
taaaaaagacgccatcccatcctgtgtctc

SEQ ID NO: 334389 - DNA, 30 bp, Artificial Sequence
  Synthetic oligonucleotide
tagtacttccctcagctaggaagttgtctc

SEQ ID NO: 334390 - DNA, 30 bp, Artificial Sequence
  Synthetic oligonucleotide
tgggtgacctacgaggcttggtccattctc

SEQ ID NO: 334391 - DNA, 30 bp, Artificial Sequence
  Synthetic oligonucleotide
cgttaaagatctctgctatgtttcattctc

SEQ ID NO: 334392 - DNA, 30 bp, Artificial Sequence
  Synthetic oligonucleotide
cggcgtcccctttttcccgtaaatattctc

SEQ ID NO: 334393 - DNA, 30 bp, Artificial Sequence
  Synthetic oligonucleotide
atatcactacatcgatcacaggatattctc

SEQ ID NO: 334394 - DNA, 30 bp, Artificial Sequence
  Synthetic oligonucleotide
aacacaagtgaattatgcggggtacttctc

SEQ ID NO: 334395 - DNA, 30 bp, Artificial Sequence
  Synthetic oligonucleotide
gcgtccgtccatcttactggatcccttctc

SEQ ID NO: 334396 - DNA, 30 bp, Artificial Sequence
  Synthetic oligonucleotide
ttcgatagggaggttcagccctgccttctc

SEQ ID NO: 334397 - DNA, 30 bp, Artificial Sequence
  Synthetic oligonucleotide
tgggcgtttcaactcaacggattccttctc

SEQ ID NO: 334398 - DNA, 30 bp, Artificial Sequence
  Synthetic oligonucleotide
acagataatttcttgtatgtagggcttctc

SEQ ID NO: 334399 - DNA, 30 bp, Artificial Sequence
  Synthetic oligonucleotide
aagtgcctcttaaataggtagtacgttctc

SEQ ID NO: 334400 - DNA, 31 bp, Artificial Sequence
  Synthetic oligonucleotide
tagaactattgtattacaaggcggcgttctc

SEQ ID NO: 334401 - DNA, 30 bp, Artificial Sequence
  Synthetic oligonucleotide
ctgcaatatgatcgtaacactttggttctc

SEQ ID NO: 334402 - DNA, 30 bp, Artificial Sequence
  Synthetic oligonucleotide
ttgaccaacaatagtgttatgtgatttctc

SEQ ID NO: 334403 - DNA, 30 bp, Artificial Sequence
  Synthetic oligonucleotide
gtatcccttcacatcaggggttgctttctc

SEQ ID NO: 334404 - DNA, 30 bp, Artificial Sequence
  Synthetic oligonucleotide
ctacacatgcaaaaaaagttccggtttctc

SEQ ID NO: 334405 - DNA, 30 bp, Artificial Sequence
  Synthetic oligonucleotide
acaagctaggtaacctggcgtgcttttctc

SEQ ID NO: 334406 - DNA, 30 bp, Artificial Sequence
  Synthetic oligonucleotide
atgtagagaatgaagtcaaggtcttttctc

SEQ ID NO: 334407 - DNA, 30 bp, Artificial Sequence
  Synthetic oligonucleotide
ctatgagcactttagatccccagaaaagtc

SEQ ID NO: 334408 - DNA, 30 bp, Artificial Sequence
  Synthetic oligonucleotide
atgatattggaaagcagtttagtaaaagtc

SEQ ID NO: 334409 - DNA, 30 bp, Artificial Sequence
  Synthetic oligonucleotide
cttgaactgttgcgtcaacacctgaaagtc

SEQ ID NO: 334410 - DNA, 30 bp, Artificial Sequence
  Synthetic oligonucleotide
atgtggagatcgttggatagcgataaagtc

SEQ ID NO: 334411 - DNA, 30 bp, Artificial Sequence
  Synthetic oligonucleotide
tcagcagactacccaatttaggctaaagtc

SEQ ID NO: 334412 - DNA, 30 bp, Artificial Sequence
  Synthetic oligonucleotide
ccaccaaatatattttatcaatgtaaagtc

SEQ ID NO: 334413 - DNA, 30 bp, Artificial Sequence
  Synthetic oligonucleotide
aaataactaccggaagcgaccgttaaagtc

SEQ ID NO: 334414 - DNA, 30 bp, Artificial Sequence
  Synthetic oligonucleotide
gtacaacatacgcgcggcaaatgacaagtc

SEQ ID NO: 334415 - DNA, 30 bp, Artificial Sequence
  Synthetic oligonucleotide
acctcggtcggggctttgcgaagccaagtc

SEQ ID NO: 334416 - DNA, 30 bp, Artificial Sequence
  Synthetic oligonucleotide
gtcaacgcgtttgactgtctccagcaagtc

SEQ ID NO: 334417 - DNA, 30 bp, Artificial Sequence
  Synthetic oligonucleotide
atctcactccgaacaaggcaagatcaagtc

SEQ ID NO: 334418 - DNA, 30 bp, Artificial Sequence
  Synthetic oligonucleotide
gagcattcgggctaggaatattatcaagtc

SEQ ID NO: 334419 - DNA, 30 bp, Artificial Sequence
  Synthetic oligonucleotide
tagaagctaaatcacacatgacccgaagtc

SEQ ID NO: 334420 - DNA, 30 bp, Artificial Sequence
  Synthetic oligonucleotide
tggttgttgtccgccccagaacgcgaagtc

SEQ ID NO: 334421 - DNA, 30 bp, Artificial Sequence
  Synthetic oligonucleotide
cgatgatgtttatcttggaccacataagtc

SEQ ID NO: 334422 - DNA, 30 bp, Artificial Sequence
  Synthetic oligonucleotide
cagtatatagatcatgaattgacttaagtc

SEQ ID NO: 334423 - DNA, 30 bp, Artificial Sequence
  Synthetic oligonucleotide
gcttcttgttgtcactttacgagttaagtc

SEQ ID NO: 334424 - DNA, 30 bp, Artificial Sequence
  Synthetic oligonucleotide
gcacgctagggatagtatatctgttaagtc

SEQ ID NO: 334425 - DNA, 30 bp, Artificial Sequence
  Synthetic oligonucleotide
gccggccagatatgttaaccaatttaagtc

SEQ ID NO: 334426 - DNA, 30 bp, Artificial Sequence
  Synthetic oligonucleotide
ctttaactatggcatgtcttcctttaagtc

SEQ ID NO: 334427 - DNA, 30 bp, Artificial Sequence
  Synthetic oligonucleotide
tgcgtgctagctatgactcctcgaacagtc

SEQ ID NO: 334428 - DNA, 30 bp, Artificial Sequence
  Synthetic oligonucleotide
taagcgcttcctttaggacgtgccacagtc

SEQ ID NO: 334429 - DNA, 30 bp, Artificial Sequence
  Synthetic oligonucleotide
gcaaagtggggtttgtacgaaaggacagtc

SEQ ID NO: 334430 - DNA, 30 bp, Artificial Sequence
  Synthetic oligonucleotide
ttatttagaggcgtagcataaatgacagtc

SEQ ID NO: 334431 - DNA, 30 bp, Artificial Sequence
  Synthetic oligonucleotide
tattgacataacctcgcccaatccccagtc

SEQ ID NO: 334432 - DNA, 30 bp, Artificial Sequence
  Synthetic oligonucleotide
aaggggccctgttatgttccggtgccagtc

SEQ ID NO: 334433 - DNA, 30 bp, Artificial Sequence
  Synthetic oligonucleotide
aaggctgatctttttattgtcggtccagtc

SEQ ID NO: 334434 - DNA, 30 bp, Artificial Sequence
  Synthetic oligonucleotide
catcacttatgctagattaggacagcagtc

SEQ ID NO: 334435 - DNA, 30 bp, Artificial Sequence
  Synthetic oligonucleotide
agcaaagtctaacggaatgaccacgcagtc

SEQ ID NO: 334436 - DNA, 30 bp, Artificial Sequence
  Synthetic oligonucleotide
gctgatgcaagccgcgtacgaagcgcagtc

SEQ ID NO: 334437 - DNA, 30 bp, Artificial Sequence
  Synthetic oligonucleotide
aacaagggctaaacctagtgggaggcagtc

SEQ ID NO: 334438 - DNA, 30 bp, Artificial Sequence
  Synthetic oligonucleotide
tgtattgttcttctctctccactggcagtc

SEQ ID NO: 334439 - DNA, 30 bp, Artificial Sequence
  Synthetic oligonucleotide
aagatcgactaagctattcgactggcagtc

SEQ ID NO: 334440 - DNA, 30 bp, Artificial Sequence
  Synthetic oligonucleotide
gatggctgcgtctttggctacctggcagtc

SEQ ID NO: 334441 - DNA, 30 bp, Artificial Sequence
  Synthetic oligonucleotide
ggcgaggtctttgggatggtggttgcagtc

SEQ ID NO: 334442 - DNA, 30 bp, Artificial Sequence
  Synthetic oligonucleotide
tttcaatacgttagggctcgggaatcagtc

SEQ ID NO: 334443 - DNA, 30 bp, Artificial Sequence
  Synthetic oligonucleotide
gtatacgagtacggtcatttatcatcagtc

SEQ ID NO: 334444 - DNA, 30 bp, Artificial Sequence
  Synthetic oligonucleotide
gcttttatagaatgtgagtctctatcagtc

SEQ ID NO: 334445 - DNA, 31 bp, Artificial Sequence
  Synthetic oligonucleotide
atgcccatgagttatggagggaacctcagtc

SEQ ID NO: 334446 - DNA, 30 bp, Artificial Sequence
  Synthetic oligonucleotide
ggtatgccttgcgtgtaaacgaagtcagtc

SEQ ID NO: 334447 - DNA, 30 bp, Artificial Sequence
  Synthetic oligonucleotide
gttcctgcacttgggggcatacagtcagtc

SEQ ID NO: 334448 - DNA, 30 bp, Artificial Sequence
  Synthetic oligonucleotide
ctttagactgccagattcggatcgtcagtc

SEQ ID NO: 334449 - DNA, 30 bp, Artificial Sequence
  Synthetic oligonucleotide
ttgccacatccgcatgctcccgggtcagtc

SEQ ID NO: 334450 - DNA, 30 bp, Artificial Sequence
  Synthetic oligonucleotide
cgactctaatgtctttgagagtggtcagtc

SEQ ID NO: 334451 - DNA, 30 bp, Artificial Sequence
  Synthetic oligonucleotide
tcgtttagccacggttaagccttgtcagtc

SEQ ID NO: 334452 - DNA, 30 bp, Artificial Sequence
  Synthetic oligonucleotide
cgaggtcatcctattattgaagcgagagtc

SEQ ID NO: 334453 - DNA, 30 bp, Artificial Sequence
  Synthetic oligonucleotide
ccgcgtgcgatgccgcttactactagagtc

SEQ ID NO: 334454 - DNA, 30 bp, Artificial Sequence
  Synthetic oligonucleotide
caaactcgatataacctggggtgtagagtc

SEQ ID NO: 334455 - DNA, 30 bp, Artificial Sequence
  Synthetic oligonucleotide
gaaatgctgtaccaccggtacttccgagtc

SEQ ID NO: 334456 - DNA, 30 bp, Artificial Sequence
  Synthetic oligonucleotide
tatcacacatgtcaagattttcgtcgagtc

SEQ ID NO: 334457 - DNA, 30 bp, Artificial Sequence
  Synthetic oligonucleotide
agaatgcaagggctacgactcaacggagtc

SEQ ID NO: 334458 - DNA, 30 bp, Artificial Sequence
  Synthetic oligonucleotide
ggctgttaagttgtcatttggtgcggagtc

SEQ ID NO: 334459 - DNA, 30 bp, Artificial Sequence
  Synthetic oligonucleotide
caatagggagtttccctagcagtcggagtc

SEQ ID NO: 334460 - DNA, 30 bp, Artificial Sequence
  Synthetic oligonucleotide
tttcttggtagggtacggggctagggagtc

SEQ ID NO: 334461 - DNA, 30 bp, Artificial Sequence
  Synthetic oligonucleotide
atatagagcgatttagttaggcatggagtc

SEQ ID NO: 334462 - DNA, 30 bp, Artificial Sequence
  Synthetic oligonucleotide
tcccactatttgagggtattgatatgagtc

SEQ ID NO: 334463 - DNA, 30 bp, Artificial Sequence
  Synthetic oligonucleotide
gattggatcctttttatgattatttgagtc

SEQ ID NO: 334464 - DNA, 30 bp, Artificial Sequence
  Synthetic oligonucleotide
cacgagctagcatcgttggcagaaatagtc

SEQ ID NO: 334465 - DNA, 30 bp, Artificial Sequence
  Synthetic oligonucleotide
atcggtcaaaatctcatacggtatatagtc

SEQ ID NO: 334466 - DNA, 30 bp, Artificial Sequence
  Synthetic oligonucleotide
tgaggtgaggagagttacaccggtatagtc

SEQ ID NO: 334467 - DNA, 30 bp, Artificial Sequence
  Synthetic oligonucleotide
tcttactgactatcattctattgtatagtc

SEQ ID NO: 334468 - DNA, 30 bp, Artificial Sequence
  Synthetic oligonucleotide
catctagaagctactagtccacacgtagtc

SEQ ID NO: 334469 - DNA, 30 bp, Artificial Sequence
  Synthetic oligonucleotide
acgtgattgacttaggcagctggcgtagtc

SEQ ID NO: 334470 - DNA, 30 bp, Artificial Sequence
  Synthetic oligonucleotide
cagcactgacgttgcggcctcgtggtagtc

SEQ ID NO: 334471 - DNA, 30 bp, Artificial Sequence
  Synthetic oligonucleotide
ttcgtaaaataaaggttgggcgatgtagtc

SEQ ID NO: 334472 - DNA, 30 bp, Artificial Sequence
  Synthetic oligonucleotide
tgctgctatacggttccgataagtgtagtc

SEQ ID NO: 334473 - DNA, 30 bp, Artificial Sequence
  Synthetic oligonucleotide
cctgcattgaaaccaaaccgctcattagtc

SEQ ID NO: 334474 - DNA, 30 bp, Artificial Sequence
  Synthetic oligonucleotide
gcacttaggaggaaacggagttcattagtc

SEQ ID NO: 334475 - DNA, 30 bp, Artificial Sequence
  Synthetic oligonucleotide
aactcagtcaaagagggatcaggattagtc

SEQ ID NO: 334476 - DNA, 30 bp, Artificial Sequence
  Synthetic oligonucleotide
tcagtggaccgcgtgacgtccgtattagtc

SEQ ID NO: 334477 - DNA, 30 bp, Artificial Sequence
  Synthetic oligonucleotide
tccgattgcatggtttaaagcgcaaacgtc

SEQ ID NO: 334478 - DNA, 30 bp, Artificial Sequence
  Synthetic oligonucleotide
tgcccggcaagaagcattaatataaacgtc

SEQ ID NO: 334479 - DNA, 30 bp, Artificial Sequence
  Synthetic oligonucleotide
gctgaggattaagttgttaaactcaacgtc

SEQ ID NO: 334480 - DNA, 30 bp, Artificial Sequence
  Synthetic oligonucleotide
gaatttggaaggaggggtctccagaacgtc

SEQ ID NO: 334481 - DNA, 30 bp, Artificial Sequence
  Synthetic oligonucleotide
aaattgaccatacgcgaatccccgaacgtc

SEQ ID NO: 334482 - DNA, 30 bp, Artificial Sequence
  Synthetic oligonucleotide
caaaatttgaagaacagggctagacacgtc

SEQ ID NO: 334483 - DNA, 30 bp, Artificial Sequence
  Synthetic oligonucleotide
acggtgccttgactgccagcaggccacgtc

SEQ ID NO: 334484 - DNA, 30 bp, Artificial Sequence
  Synthetic oligonucleotide
tacttaaggggacatacttctaatcacgtc

SEQ ID NO: 334485 - DNA, 30 bp, Artificial Sequence
  Synthetic oligonucleotide
atgttgacctccggactcgttgttcacgtc

SEQ ID NO: 334486 - DNA, 30 bp, Artificial Sequence
  Synthetic oligonucleotide
gttccgcaaattgcccaatgcagagacgtc

SEQ ID NO: 334487 - DNA, 30 bp, Artificial Sequence
  Synthetic oligonucleotide
ctatgtgctgcaaaatgtggcaccgacgtc

SEQ ID NO: 334488 - DNA, 30 bp, Artificial Sequence
  Synthetic oligonucleotide
acacgtaggcttcaaggaccgtgcgacgtc

SEQ ID NO: 334489 - DNA, 30 bp, Artificial Sequence
  Synthetic oligonucleotide
ttaagtgagttagtaaacttaacggacgtc

SEQ ID NO: 334490 - DNA, 30 bp, Artificial Sequence
  Synthetic oligonucleotide
tctccctaaataagcaacgacggggacgtc

SEQ ID NO: 334491 - DNA, 30 bp, Artificial Sequence
  Synthetic oligonucleotide
tataagcttcaggtgaggtgtctggacgtc

SEQ ID NO: 334492 - DNA, 30 bp, Artificial Sequence
  Synthetic oligonucleotide
tggccgcgggtatacaggcggggtgacgtc

SEQ ID NO: 334493 - DNA, 30 bp, Artificial Sequence
  Synthetic oligonucleotide
tgtatgcgaactagaggtgtgcgctacgtc

SEQ ID NO: 334494 - DNA, 30 bp, Artificial Sequence
  Synthetic oligonucleotide
gacaaggggaagaggctattactctacgtc

SEQ ID NO: 334495 - DNA, 30 bp, Artificial Sequence
  Synthetic oligonucleotide
gggttaataagctgcgctattaggtacgtc

SEQ ID NO: 334496 - DNA, 30 bp, Artificial Sequence
  Synthetic oligonucleotide
agcatatggtaccgtggcgcagggtacgtc

SEQ ID NO: 334497 - DNA, 30 bp, Artificial Sequence
  Synthetic oligonucleotide
tagtcctgacagcgtgcattgtggtacgtc

SEQ ID NO: 334498 - DNA, 31 bp, Artificial Sequence
  Synthetic oligonucleotide
aacttctagaataccaacttaaccttacgtc

SEQ ID NO: 334499 - DNA, 30 bp, Artificial Sequence
  Synthetic oligonucleotide
tggtggtaatgacccgtctgggacaccgtc

SEQ ID NO: 334500 - DNA, 30 bp, Artificial Sequence
  Synthetic oligonucleotide
ttaccacattctttaacgctttacaccgtc

SEQ ID NO: 334501 - DNA, 30 bp, Artificial Sequence
  Synthetic oligonucleotide
tactacgtgtggctgtatcgcgccaccgtc

SEQ ID NO: 334502 - DNA, 30 bp, Artificial Sequence
  Synthetic oligonucleotide
ctatccagggtctccaggaagtgtaccgtc

SEQ ID NO: 334503 - DNA, 30 bp, Artificial Sequence
  Synthetic oligonucleotide
acccatagctcgatcttaataatacccgtc

SEQ ID NO: 334504 - DNA, 30 bp, Artificial Sequence
  Synthetic oligonucleotide
cagccaggcggtcgaatggggctacccgtc

SEQ ID NO: 334505 - DNA, 30 bp, Artificial Sequence
  Synthetic oligonucleotide
gtcagtgacaaaaagctgacagcgcccgtc

SEQ ID NO: 334506 - DNA, 30 bp, Artificial Sequence
  Synthetic oligonucleotide
gagtaatgaccgtccatattggctcccgtc

SEQ ID NO: 334507 - DNA, 30 bp, Artificial Sequence
  Synthetic oligonucleotide
aagggtgttaacctacgtccttaggccgtc

SEQ ID NO: 334508 - DNA, 30 bp, Artificial Sequence
  Synthetic oligonucleotide
cgcatagctatacacgcgtcttcatccgtc

SEQ ID NO: 334509 - DNA, 30 bp, Artificial Sequence
  Synthetic oligonucleotide
atcgggttgaccgcgttgccgagatccgtc

SEQ ID NO: 334510 - DNA, 30 bp, Artificial Sequence
  Synthetic oligonucleotide
ctcgctgtgtttatttgagattgatccgtc

SEQ ID NO: 334511 - DNA, 30 bp, Artificial Sequence
  Synthetic oligonucleotide
gacaggtcttagttaaacgctacgtccgtc

SEQ ID NO: 334512 - DNA, 30 bp, Artificial Sequence
  Synthetic oligonucleotide
atttaaccatcggtagcacattggtccgtc

SEQ ID NO: 334513 - DNA, 30 bp, Artificial Sequence
  Synthetic oligonucleotide
tagcttagtaaggcctacagactcagcgtc

SEQ ID NO: 334514 - DNA, 30 bp, Artificial Sequence
  Synthetic oligonucleotide
aaaatgcatcttccatcgccgacgagcgtc

SEQ ID NO: 334515 - DNA, 30 bp, Artificial Sequence
  Synthetic oligonucleotide
cccttgcgtgcgggtaaacagccgagcgtc

SEQ ID NO: 334516 - DNA, 30 bp, Artificial Sequence
  Synthetic oligonucleotide
tagtatgaactgtggagccatatacgcgtc

SEQ ID NO: 334517 - DNA, 30 bp, Artificial Sequence
  Synthetic oligonucleotide
ttatagtactgaaatgaatacctacgcgtc

SEQ ID NO: 334518 - DNA, 30 bp, Artificial Sequence
  Synthetic oligonucleotide
aaacacagctatccacgtcaattgcgcgtc

SEQ ID NO: 334519 - DNA, 30 bp, Artificial Sequence
  Synthetic oligonucleotide
ggaagtagatattggtttaaaactcgcgtc

SEQ ID NO: 334520 - DNA, 30 bp, Artificial Sequence
  Synthetic oligonucleotide
gctcagagccggatgagtgagtccggcgtc

SEQ ID NO: 334521 - DNA, 26 bp, Artificial Sequence
  Synthetic oligonucleotide
tacggagtgcctagacgtcgggcgtc

SEQ ID NO: 334522 - DNA, 30 bp, Artificial Sequence
  Synthetic oligonucleotide
cccgtggaacagtacacctcatggggcgtc

SEQ ID NO: 334523 - DNA, 30 bp, Artificial Sequence
  Synthetic oligonucleotide
taaatgatcgatttagtgctatcatgcgtc

SEQ ID NO: 334524 - DNA, 30 bp, Artificial Sequence
  Synthetic oligonucleotide
cgtcacatagcccgtcagttcacctgcgtc

SEQ ID NO: 334525 - DNA, 30 bp, Artificial Sequence
  Synthetic oligonucleotide
tgtggtgcggaaatgcggtgtatctgcgtc

SEQ ID NO: 334526 - DNA, 30 bp, Artificial Sequence
  Synthetic oligonucleotide
cgactaggtaattggttaccattaatcgtc

SEQ ID NO: 334527 - DNA, 30 bp, Artificial Sequence
  Synthetic oligonucleotide
ctgaggcctataggggttttaaccatcgtc

SEQ ID NO: 334528 - DNA, 30 bp, Artificial Sequence
  Synthetic oligonucleotide
tgggcgctcagtgatataaccagcatcgtc

SEQ ID NO: 334529 - DNA, 30 bp, Artificial Sequence
  Synthetic oligonucleotide
agggtgaggggatccattgcgcgcatcgtc

SEQ ID NO: 334530 - DNA, 30 bp, Artificial Sequence
  Synthetic oligonucleotide
ttgaattaggcatacagtactttgctcgtc

SEQ ID NO: 334531 - DNA, 30 bp, Artificial Sequence
  Synthetic oligonucleotide
gtctgttaaaaaacggcccataatctcgtc

SEQ ID NO: 334532 - DNA, 30 bp, Artificial Sequence
  Synthetic oligonucleotide
ttaagggaggcgaaccccagccttctcgtc

SEQ ID NO: 334533 - DNA, 30 bp, Artificial Sequence
  Synthetic oligonucleotide
acatagaagtatacttttctagttgtcgtc

SEQ ID NO: 334534 - DNA, 30 bp, Artificial Sequence
  Synthetic oligonucleotide
ccgaaccaagaggactctcagaggttcgtc

SEQ ID NO: 334535 - DNA, 30 bp, Artificial Sequence
  Synthetic oligonucleotide
gcgagctagaggatacccagtttgttcgtc

SEQ ID NO: 334536 - DNA, 30 bp, Artificial Sequence
  Synthetic oligonucleotide
cagatgtccggtacggcacagaatttcgtc

SEQ ID NO: 334537 - DNA, 30 bp, Artificial Sequence
  Synthetic oligonucleotide
atcatgcggcatacgccaaactacaaggtc

SEQ ID NO: 334538 - DNA, 30 bp, Artificial Sequence
  Synthetic oligonucleotide
ctaatgcacaactttcgttttatcaaggtc

SEQ ID NO: 334539 - DNA, 30 bp, Artificial Sequence
  Synthetic oligonucleotide
atgggaactttcgactgcggccggaaggtc

SEQ ID NO: 334540 - DNA, 30 bp, Artificial Sequence
  Synthetic oligonucleotide
tgccccatacagagactttgacataaggtc

SEQ ID NO: 334541 - DNA, 30 bp, Artificial Sequence
  Synthetic oligonucleotide
ctttttaattctcatgaacaagaccaggtc

SEQ ID NO: 334542 - DNA, 30 bp, Artificial Sequence
  Synthetic oligonucleotide
ccctcgagtcacagcacgagcaggcaggtc

SEQ ID NO: 334543 - DNA, 30 bp, Artificial Sequence
  Synthetic oligonucleotide
ataagtaagagtttttgcgtcttgcaggtc

SEQ ID NO: 334544 - DNA, 30 bp, Artificial Sequence
  Synthetic oligonucleotide
ggagtgttcatgctcagcgagttgcaggtc

SEQ ID NO: 334545 - DNA, 30 bp, Artificial Sequence
  Synthetic oligonucleotide
aagtctattcgcaagaacaaaccagaggtc

SEQ ID NO: 334546 - DNA, 30 bp, Artificial Sequence
  Synthetic oligonucleotide
acacggtcttctgaggagttacccgaggtc

SEQ ID NO: 334547 - DNA, 30 bp, Artificial Sequence
  Synthetic oligonucleotide
tgacgcttctacgtcgcgtctagggaggtc

SEQ ID NO: 334548 - DNA, 30 bp, Artificial Sequence
  Synthetic oligonucleotide
tattgttcgctcagtaagccgatggaggtc

SEQ ID NO: 334549 - DNA, 30 bp, Artificial Sequence
  Synthetic oligonucleotide
ggacttgttgaaacggcatcttgctaggtc

SEQ ID NO: 334550 - DNA, 30 bp, Artificial Sequence
  Synthetic oligonucleotide
ggctaggaaatatgctgaaatttctaggtc

SEQ ID NO: 334551 - DNA, 30 bp, Artificial Sequence
  Synthetic oligonucleotide
ctaagttggtcaaatggcgtcagttaggtc

SEQ ID NO: 334552 - DNA, 30 bp, Artificial Sequence
  Synthetic oligonucleotide
cgtgtatcccggaacggctcgataacggtc

SEQ ID NO: 334553 - DNA, 30 bp, Artificial Sequence
  Synthetic oligonucleotide
gtgctcagtgaggtgggtgataggacggtc

SEQ ID NO: 334554 - DNA, 30 bp, Artificial Sequence
  Synthetic oligonucleotide
gataattggtggatcattgtgctgacggtc

SEQ ID NO: 334555 - DNA, 30 bp, Artificial Sequence
  Synthetic oligonucleotide
ataaaggtcaaggaggttctcataccggtc

SEQ ID NO: 334556 - DNA, 30 bp, Artificial Sequence
  Synthetic oligonucleotide
gaagcacactatgaggaactcgtcccggtc

SEQ ID NO: 334557 - DNA, 30 bp, Artificial Sequence
  Synthetic oligonucleotide
agatttcatgcaatagaaacttcgccggtc

SEQ ID NO: 334558 - DNA, 30 bp, Artificial Sequence
  Synthetic oligonucleotide
acgcacgcaaacttccagcagaatccggtc

SEQ ID NO: 334559 - DNA, 30 bp, Artificial Sequence
  Synthetic oligonucleotide
gtttcttggattcaaggcgctaatccggtc

SEQ ID NO: 334560 - DNA, 30 bp, Artificial Sequence
  Synthetic oligonucleotide
caaggaattgtgcccttgttggtagcggtc

SEQ ID NO: 334561 - DNA, 30 bp, Artificial Sequence
  Synthetic oligonucleotide
ctcggataagacgcttcggggcaggcggtc

SEQ ID NO: 334562 - DNA, 30 bp, Artificial Sequence
  Synthetic oligonucleotide
tgttactagcaattgtcggtggaggcggtc

SEQ ID NO: 334563 - DNA, 30 bp, Artificial Sequence
  Synthetic oligonucleotide
gtcatccaagagctctgccagctggcggtc

SEQ ID NO: 334564 - DNA, 30 bp, Artificial Sequence
  Synthetic oligonucleotide
gaaaagagactgtaccgacccttggcggtc

SEQ ID NO: 334565 - DNA, 30 bp, Artificial Sequence
  Synthetic oligonucleotide
gcatgtaactgtcgtccgcggtatgcggtc

SEQ ID NO: 334566 - DNA, 30 bp, Artificial Sequence
  Synthetic oligonucleotide
gcggtttcgtcaatgagtgcgaaatcggtc

SEQ ID NO: 334567 - DNA, 30 bp, Artificial Sequence
  Synthetic oligonucleotide
ctaacaattagagacatttcggcatcggtc

SEQ ID NO: 334568 - DNA, 30 bp, Artificial Sequence
  Synthetic oligonucleotide
atttctacaagtgatactaggtcgtcggtc

SEQ ID NO: 334569 - DNA, 30 bp, Artificial Sequence
  Synthetic oligonucleotide
cagaccagtaatgagactgagcattcggtc

SEQ ID NO: 334570 - DNA, 30 bp, Artificial Sequence
  Synthetic oligonucleotide
tggcggctgaagctgacgtttgaaagggtc

SEQ ID NO: 334571 - DNA, 30 bp, Artificial Sequence
  Synthetic oligonucleotide
actcctgtggataaattgtgataaagggtc

SEQ ID NO: 334572 - DNA, 30 bp, Artificial Sequence
  Synthetic oligonucleotide
ttctcccgaaatccacatatgcgcagggtc

SEQ ID NO: 334573 - DNA, 30 bp, Artificial Sequence
  Synthetic oligonucleotide
acataaggacccttcagtgactgcagggtc

SEQ ID NO: 334574 - DNA, 30 bp, Artificial Sequence
  Synthetic oligonucleotide
atagtgtatgcgcgacttcgcaggagggtc

SEQ ID NO: 334575 - DNA, 30 bp, Artificial Sequence
  Synthetic oligonucleotide
tgtaattcacctatgcacgggcttagggtc

SEQ ID NO: 334576 - DNA, 30 bp, Artificial Sequence
  Synthetic oligonucleotide
cgctatgtcaccccttccgagccacgggtc

SEQ ID NO: 334577 - DNA, 30 bp, Artificial Sequence
  Synthetic oligonucleotide
ttgcacatcgcagggcgggtgtgacgggtc

SEQ ID NO: 334578 - DNA, 30 bp, Artificial Sequence
  Synthetic oligonucleotide
gtgctgattcgcgagcataccatacgggtc

SEQ ID NO: 334579 - DNA, 30 bp, Artificial Sequence
  Synthetic oligonucleotide
atactgacaactgtactagctgcccgggtc

SEQ ID NO: 334580 - DNA, 30 bp, Artificial Sequence
  Synthetic oligonucleotide
agatgcgaagactcacactgtggccgggtc

SEQ ID NO: 334581 - DNA, 30 bp, Artificial Sequence
  Synthetic oligonucleotide
gtacgaagggaggctcgtttcatccgggtc

SEQ ID NO: 334582 - DNA, 30 bp, Artificial Sequence
  Synthetic oligonucleotide
cggaccttattgcgataccactctcgggtc

SEQ ID NO: 334583 - DNA, 30 bp, Artificial Sequence
  Synthetic oligonucleotide
tagttgctggcctatgattgttctcgggtc

SEQ ID NO: 334584 - DNA, 30 bp, Artificial Sequence
  Synthetic oligonucleotide
ttcctactacggtccgaaaagctaggggtc

SEQ ID NO: 334585 - DNA, 30 bp, Artificial Sequence
  Synthetic oligonucleotide
aagtcctaaatacgtgtgggatatggggtc

SEQ ID NO: 334586 - DNA, 30 bp, Artificial Sequence
  Synthetic oligonucleotide
gagggcccaagatttcggtcagctggggtc

SEQ ID NO: 334587 - DNA, 30 bp, Artificial Sequence
  Synthetic oligonucleotide
tcggcgaatctctgcatcaggggtggggtc

SEQ ID NO: 334588 - DNA, 30 bp, Artificial Sequence
  Synthetic oligonucleotide
gagatatttggttccggccgaaaatgggtc

SEQ ID NO: 334589 - DNA, 30 bp, Artificial Sequence
  Synthetic oligonucleotide
ctataagccagagttccaagagaatgggtc

SEQ ID NO: 334590 - DNA, 30 bp, Artificial Sequence
  Synthetic oligonucleotide
gacgccagcactgtggtaatagcatgggtc

SEQ ID NO: 334591 - DNA, 30 bp, Artificial Sequence
  Synthetic oligonucleotide
aaatagttatggagcattgatggatgggtc

SEQ ID NO: 334592 - DNA, 30 bp, Artificial Sequence
  Synthetic oligonucleotide
taattcggaggtgttcccgtgatctgggtc

SEQ ID NO: 334593 - DNA, 30 bp, Artificial Sequence
  Synthetic oligonucleotide
tatgcttaacttgagctttagatgtgggtc

SEQ ID NO: 334594 - DNA, 30 bp, Artificial Sequence
  Synthetic oligonucleotide
aaccgcggcactcaacgttctgtgtgggtc

SEQ ID NO: 334595 - DNA, 30 bp, Artificial Sequence
  Synthetic oligonucleotide
cttgtgaggtgagaacgtggagtttgggtc

SEQ ID NO: 334596 - DNA, 30 bp, Artificial Sequence
  Synthetic oligonucleotide
aggcggttggggcgcctacgaggaatggtc

SEQ ID NO: 334597 - DNA, 30 bp, Artificial Sequence
  Synthetic oligonucleotide
aactattagtcaaggccctgaaagatggtc

SEQ ID NO: 334598 - DNA, 30 bp, Artificial Sequence
  Synthetic oligonucleotide
tcaaagaatgagtgtgtaggtgttatggtc

SEQ ID NO: 334599 - DNA, 30 bp, Artificial Sequence
  Synthetic oligonucleotide
tcggtgccacttcaaattactaaactggtc

SEQ ID NO: 334600 - DNA, 30 bp, Artificial Sequence
  Synthetic oligonucleotide
tgtgtagccgtagattcgactagactggtc

SEQ ID NO: 334601 - DNA, 30 bp, Artificial Sequence
  Synthetic oligonucleotide
gtactcgcggctccgcgtggatatctggtc

SEQ ID NO: 334602 - DNA, 30 bp, Artificial Sequence
  Synthetic oligonucleotide
gtcagtatcgcattgtcggtacctctggtc

SEQ ID NO: 334603 - DNA, 30 bp, Artificial Sequence
  Synthetic oligonucleotide
atcggctccggtaagctgaccaaagtggtc

SEQ ID NO: 334604 - DNA, 30 bp, Artificial Sequence
  Synthetic oligonucleotide
gggataggcacttacgacattcgagtggtc

SEQ ID NO: 334605 - DNA, 30 bp, Artificial Sequence
  Synthetic oligonucleotide
cgtcggaaataagttgttcttatagtggtc

SEQ ID NO: 334606 - DNA, 30 bp, Artificial Sequence
  Synthetic oligonucleotide
cttatgacagtagttccgatgaaggtggtc

SEQ ID NO: 334607 - DNA, 30 bp, Artificial Sequence
  Synthetic oligonucleotide
gaaggagtcagtgctcatagttaggtggtc

SEQ ID NO: 334608 - DNA, 30 bp, Artificial Sequence
  Synthetic oligonucleotide
aataacggaggacggaattaaagggtggtc

SEQ ID NO: 334609 - DNA, 30 bp, Artificial Sequence
  Synthetic oligonucleotide
ttggtgtcgtgagtgtgggattgtgtggtc

SEQ ID NO: 334610 - DNA, 30 bp, Artificial Sequence
  Synthetic oligonucleotide
accttcaatccctggggttcggttgtggtc

SEQ ID NO: 334611 - DNA, 30 bp, Artificial Sequence
  Synthetic oligonucleotide
gggaccatcttccatgaagtacacttggtc

SEQ ID NO: 334612 - DNA, 30 bp, Artificial Sequence
  Synthetic oligonucleotide
cacggcccctttagttggcatgtcttggtc

SEQ ID NO: 334613 - DNA, 30 bp, Artificial Sequence
  Synthetic oligonucleotide
cttcggttaaacagtgttcaggcgttggtc

SEQ ID NO: 334614 - DNA, 30 bp, Artificial Sequence
  Synthetic oligonucleotide
tctgtttccggtcaatctgtcgatttggtc

SEQ ID NO: 334615 - DNA, 30 bp, Artificial Sequence
  Synthetic oligonucleotide
taagccacccttttcccccacttcaatgtc

SEQ ID NO: 334616 - DNA, 30 bp, Artificial Sequence
  Synthetic oligonucleotide
aaccttgctgtcagagtcatcagtaatgtc

SEQ ID NO: 334617 - DNA, 30 bp, Artificial Sequence
  Synthetic oligonucleotide
gttccccggctcggaataaatattaatgtc

SEQ ID NO: 334618 - DNA, 30 bp, Artificial Sequence
  Synthetic oligonucleotide
tgatatttgttattaaggcatcgacatgtc

SEQ ID NO: 334619 - DNA, 30 bp, Artificial Sequence
  Synthetic oligonucleotide
ttccgtagtagtccgattagaggacatgtc

SEQ ID NO: 334620 - DNA, 30 bp, Artificial Sequence
  Synthetic oligonucleotide
accgatccgttcctcattcagttccatgtc

SEQ ID NO: 334621 - DNA, 30 bp, Artificial Sequence
  Synthetic oligonucleotide
cttccttcgggtaattggactaaagatgtc

SEQ ID NO: 334622 - DNA, 30 bp, Artificial Sequence
  Synthetic oligonucleotide
agcacaatttgcgattttgttcgagatgtc

SEQ ID NO: 334623 - DNA, 30 bp, Artificial Sequence
  Synthetic oligonucleotide
ggccaggcaacatgctgcttccgcgatgtc

SEQ ID NO: 334624 - DNA, 30 bp, Artificial Sequence
  Synthetic oligonucleotide
agcaagggaaaggtcctagaggaggatgtc

SEQ ID NO: 334625 - DNA, 30 bp, Artificial Sequence
  Synthetic oligonucleotide
ggtatgaatcgctgtggcataccggatgtc

SEQ ID NO: 334626 - DNA, 30 bp, Artificial Sequence
  Synthetic oligonucleotide
gcccgacgctatataagtctgaatgatgtc

SEQ ID NO: 334627 - DNA, 30 bp, Artificial Sequence
  Synthetic oligonucleotide
tgggcggagttagtgtgcgatccatatgtc

SEQ ID NO: 334628 - DNA, 30 bp, Artificial Sequence
  Synthetic oligonucleotide
ttgggtggtacccccgaactatgatatgtc

SEQ ID NO: 334629 - DNA, 30 bp, Artificial Sequence
  Synthetic oligonucleotide
gaaaataaagattggcctcatatatatgtc

SEQ ID NO: 334630 - DNA, 30 bp, Artificial Sequence
  Synthetic oligonucleotide
agcaatgtaagtagcttacatttctatgtc

SEQ ID NO: 334631 - DNA, 30 bp, Artificial Sequence
  Synthetic oligonucleotide
ttaagttagcaaagtactcacttttatgtc

SEQ ID NO: 334632 - DNA, 30 bp, Artificial Sequence
  Synthetic oligonucleotide
tctgtctccaaatagtcattgtacactgtc

SEQ ID NO: 334633 - DNA, 30 bp, Artificial Sequence
  Synthetic oligonucleotide
ccacaaactagaattagtattatcactgtc

SEQ ID NO: 334634 - DNA, 30 bp, Artificial Sequence
  Synthetic oligonucleotide
ttggtaacaccaatgttattggctactgtc

SEQ ID NO: 334635 - DNA, 30 bp, Artificial Sequence
  Synthetic oligonucleotide
gaattggcaagtctatcacgtgtacctgtc

SEQ ID NO: 334636 - DNA, 30 bp, Artificial Sequence
  Synthetic oligonucleotide
tttcgctcgaatctgggacgggctcctgtc

SEQ ID NO: 334637 - DNA, 30 bp, Artificial Sequence
  Synthetic oligonucleotide
cccactacgtttgaggggcaaggcgctgtc

SEQ ID NO: 334638 - DNA, 30 bp, Artificial Sequence
  Synthetic oligonucleotide
ctcatgcggtcacttgtttggattgctgtc

SEQ ID NO: 334639 - DNA, 30 bp, Artificial Sequence
  Synthetic oligonucleotide
ctaaagctccggacacgtgaagttgctgtc

SEQ ID NO: 334640 - DNA, 30 bp, Artificial Sequence
  Synthetic oligonucleotide
gcggacggtagccttcatacggtatctgtc

SEQ ID NO: 334641 - DNA, 30 bp, Artificial Sequence
  Synthetic oligonucleotide
tttattgagaactcaggggtaatctctgtc

SEQ ID NO: 334642 - DNA, 30 bp, Artificial Sequence
  Synthetic oligonucleotide
agccgacagattccacattgagggtctgtc

SEQ ID NO: 334643 - DNA, 30 bp, Artificial Sequence
  Synthetic oligonucleotide
ctcgtgaacttatcaatgaacctgtctgtc

SEQ ID NO: 334644 - DNA, 30 bp, Artificial Sequence
  Synthetic oligonucleotide
ttaggactccattcagggggatcttctgtc

SEQ ID NO: 334645 - DNA, 30 bp, Artificial Sequence
  Synthetic oligonucleotide
aggagtaccaggcgaaaattttcttctgtc

SEQ ID NO: 334646 - DNA, 30 bp, Artificial Sequence
  Synthetic oligonucleotide
ggtagggggtcaggtagggcgctaagtgtc

SEQ ID NO: 334647 - DNA, 30 bp, Artificial Sequence
  Synthetic oligonucleotide
ggtcggagggtcggctgtagccccagtgtc

SEQ ID NO: 334648 - DNA, 30 bp, Artificial Sequence
  Synthetic oligonucleotide
cctttgtttcgatggcttcaccctagtgtc

SEQ ID NO: 334649 - DNA, 30 bp, Artificial Sequence
  Synthetic oligonucleotide
tttcgagttttggccatcgatcctagtgtc

SEQ ID NO: 334650 - DNA, 30 bp, Artificial Sequence
  Synthetic oligonucleotide
agccacctggtaaatggatgtggacgtgtc

SEQ ID NO: 334651 - DNA, 30 bp, Artificial Sequence
  Synthetic oligonucleotide
gtgagtttgactggaagagagcttcgtgtc

SEQ ID NO: 334652 - DNA, 30 bp, Artificial Sequence
  Synthetic oligonucleotide
tagcaaatctcgggcgagagttgaggtgtc

SEQ ID NO: 334653 - DNA, 30 bp, Artificial Sequence
  Synthetic oligonucleotide
gcggacctgcttatcgcccagctaggtgtc

SEQ ID NO: 334654 - DNA, 30 bp, Artificial Sequence
  Synthetic oligonucleotide
gtgttatgcactttttaccgtcacggtgtc

SEQ ID NO: 334655 - DNA, 30 bp, Artificial Sequence
  Synthetic oligonucleotide
tgttgatgatggaatgtgtataagggtgtc

SEQ ID NO: 334656 - DNA, 30 bp, Artificial Sequence
  Synthetic oligonucleotide
ggtcgctagtgtgaggccggcacgggtgtc

SEQ ID NO: 334657 - DNA, 30 bp, Artificial Sequence
  Synthetic oligonucleotide
ttatgattgagtcatttcccccgctgtgtc

SEQ ID NO: 334658 - DNA, 30 bp, Artificial Sequence
  Synthetic oligonucleotide
cctaaaccaaacttacttgcacagtgtgtc

SEQ ID NO: 334659 - DNA, 30 bp, Artificial Sequence
  Synthetic oligonucleotide
gatgtttggtaacaatggagtgagtgtgtc

SEQ ID NO: 334660 - DNA, 30 bp, Artificial Sequence
  Synthetic oligonucleotide
tcattagtgtaggagagggggtgttgtgtc

SEQ ID NO: 334661 - DNA, 30 bp, Artificial Sequence
  Synthetic oligonucleotide
aagctcaatacaagttaacatgtaattgtc

SEQ ID NO: 334662 - DNA, 30 bp, Artificial Sequence
  Synthetic oligonucleotide
tctagtagtgctcaaatagtaaacattgtc

SEQ ID NO: 334663 - DNA, 30 bp, Artificial Sequence
  Synthetic oligonucleotide
gacttatactcaaaagccacggacattgtc

SEQ ID NO: 334664 - DNA, 30 bp, Artificial Sequence
  Synthetic oligonucleotide
ccactatgagctagaagcgtggacattgtc

SEQ ID NO: 334665 - DNA, 30 bp, Artificial Sequence
  Synthetic oligonucleotide
ggaccgcttctaatctacttttacattgtc

SEQ ID NO: 334666 - DNA, 30 bp, Artificial Sequence
  Synthetic oligonucleotide
gaacggcttggctatgaagcgcgcattgtc

SEQ ID NO: 334667 - DNA, 30 bp, Artificial Sequence
  Synthetic oligonucleotide
cggaaatgacaccgtctattccttattgtc

SEQ ID NO: 334668 - DNA, 30 bp, Artificial Sequence
  Synthetic oligonucleotide
tctgtacgggggagatggggttcccttgtc

SEQ ID NO: 334669 - DNA, 30 bp, Artificial Sequence
  Synthetic oligonucleotide
tcaaattcggtgggtgcagcacgtcttgtc

SEQ ID NO: 334670 - DNA, 30 bp, Artificial Sequence
  Synthetic oligonucleotide
accttgcacccgtgacgacattgtcttgtc

SEQ ID NO: 334671 - DNA, 30 bp, Artificial Sequence
  Synthetic oligonucleotide
tttttaattccgtgagtggagattcttgtc

SEQ ID NO: 334672 - DNA, 30 bp, Artificial Sequence
  Synthetic oligonucleotide
tatggcattcctgtgctacggacagttgtc

SEQ ID NO: 334673 - DNA, 30 bp, Artificial Sequence
  Synthetic oligonucleotide
cggcgggaaaccgccctgaccgtagttgtc

SEQ ID NO: 334674 - DNA, 30 bp, Artificial Sequence
  Synthetic oligonucleotide
actttgcgtgtggggcctttcgccgttgtc

SEQ ID NO: 334675 - DNA, 30 bp, Artificial Sequence
  Synthetic oligonucleotide
gagagcagctgtgtctgacgtcgcgttgtc

SEQ ID NO: 334676 - DNA, 30 bp, Artificial Sequence
  Synthetic oligonucleotide
tgccaacacgctacgtggtcgcaggttgtc

SEQ ID NO: 334677 - DNA, 30 bp, Artificial Sequence
  Synthetic oligonucleotide
acttacacgtgcggctttccgggtgttgtc

SEQ ID NO: 334678 - DNA, 30 bp, Artificial Sequence
  Synthetic oligonucleotide
gaacaagttccgaaacggagacgatttgtc

SEQ ID NO: 334679 - DNA, 30 bp, Artificial Sequence
  Synthetic oligonucleotide
gtggctctgggaagtcgttaaggatttgtc

SEQ ID NO: 334680 - DNA, 30 bp, Artificial Sequence
  Synthetic oligonucleotide
accgtggtcagttgttattcgatatttgtc

SEQ ID NO: 334681 - DNA, 30 bp, Artificial Sequence
  Synthetic oligonucleotide
tgccaattgtcactttgggcttactttgtc

SEQ ID NO: 334682 - DNA, 30 bp, Artificial Sequence
  Synthetic oligonucleotide
atgggcagcgattatgacgtgatctttgtc

SEQ ID NO: 334683 - DNA, 30 bp, Artificial Sequence
  Synthetic oligonucleotide
ggtatgcgcttaggcgcgctcatgtttgtc

SEQ ID NO: 334684 - DNA, 30 bp, Artificial Sequence
  Synthetic oligonucleotide
ctcaaatctccatgatcttctacaaaattc

SEQ ID NO: 334685 - DNA, 30 bp, Artificial Sequence
  Synthetic oligonucleotide
cactgtttggagctttggctggcaaaattc

SEQ ID NO: 334686 - DNA, 30 bp, Artificial Sequence
  Synthetic oligonucleotide
caggtatgggagccatttaagagaaaattc

SEQ ID NO: 334687 - DNA, 30 bp, Artificial Sequence
  Synthetic oligonucleotide
gcaaagattggaggttcatgggtaaaattc

SEQ ID NO: 334688 - DNA, 30 bp, Artificial Sequence
  Synthetic oligonucleotide
tggcagctagccggtttggcaagcaaattc

SEQ ID NO: 334689 - DNA, 30 bp, Artificial Sequence
  Synthetic oligonucleotide
gtgtaacgagccggttgtcatttcaaattc

SEQ ID NO: 334690 - DNA, 30 bp, Artificial Sequence
  Synthetic oligonucleotide
cacgacacggatgtacatgacctgaaattc

SEQ ID NO: 334691 - DNA, 30 bp, Artificial Sequence
  Synthetic oligonucleotide
tagtaacttgcagtttgccacttgaaattc

SEQ ID NO: 334692 - DNA, 30 bp, Artificial Sequence
  Synthetic oligonucleotide
gggtgctataatacttcgcgggataaattc

SEQ ID NO: 334693 - DNA, 30 bp, Artificial Sequence
  Synthetic oligonucleotide
cctcggtctggagagatcgcaggtaaattc

SEQ ID NO: 334694 - DNA, 30 bp, Artificial Sequence
  Synthetic oligonucleotide
tgcgcccatcgtccttatggtggacaattc

SEQ ID NO: 334695 - DNA, 30 bp, Artificial Sequence
  Synthetic oligonucleotide
cggttcaaatggttttagatccaccaattc

SEQ ID NO: 334696 - DNA, 31 bp, Artificial Sequence
  Synthetic oligonucleotide
tgatgtccgatcatcggacgtatgccaattc

SEQ ID NO: 334697 - DNA, 30 bp, Artificial Sequence
  Synthetic oligonucleotide
gcttggaggcaaaggacttaattccaattc

SEQ ID NO: 334698 - DNA, 30 bp, Artificial Sequence
  Synthetic oligonucleotide
atgcgaattaatacattagctagtcaattc

SEQ ID NO: 334699 - DNA, 30 bp, Artificial Sequence
  Synthetic oligonucleotide
aaaacagaagtactattacggtgtcaattc

SEQ ID NO: 334700 - DNA, 30 bp, Artificial Sequence
  Synthetic oligonucleotide
accagccgatgagaacgtacctgggaattc

SEQ ID NO: 334701 - DNA, 30 bp, Artificial Sequence
  Synthetic oligonucleotide
atcgtcattagtaattgtcagtgataattc

SEQ ID NO: 334702 - DNA, 30 bp, Artificial Sequence
  Synthetic oligonucleotide
gcttcgagcatctagaaatgtacctaattc

SEQ ID NO: 334703 - DNA, 30 bp, Artificial Sequence
  Synthetic oligonucleotide
ttatatatgggtcttgagtgcttgtaattc

SEQ ID NO: 334704 - DNA, 30 bp, Artificial Sequence
  Synthetic oligonucleotide
aaccagaggctggcagacagagccacattc

SEQ ID NO: 334705 - DNA, 30 bp, Artificial Sequence
  Synthetic oligonucleotide
gcggcccggctcaggacacctctcacattc

SEQ ID NO: 334706 - DNA, 30 bp, Artificial Sequence
  Synthetic oligonucleotide
caactaacatccgacgaggccctgacattc

SEQ ID NO: 334707 - DNA, 30 bp, Artificial Sequence
  Synthetic oligonucleotide
aagttgtagtatctctcactcttgacattc

SEQ ID NO: 334708 - DNA, 30 bp, Artificial Sequence
  Synthetic oligonucleotide
tacccgtcaatcttcaggagttctacattc

SEQ ID NO: 334709 - DNA, 30 bp, Artificial Sequence
  Synthetic oligonucleotide
agatgcgcaattatcaccataatcccattc

SEQ ID NO: 334710 - DNA, 30 bp, Artificial Sequence
  Synthetic oligonucleotide
gcactagcggtgtgttatagtatcccattc

SEQ ID NO: 334711 - DNA, 30 bp, Artificial Sequence
  Synthetic oligonucleotide
agcgtcgacgctgggctcagtcatccattc

SEQ ID NO: 334712 - DNA, 30 bp, Artificial Sequence
  Synthetic oligonucleotide
gcccttacgacggctcgtgaacaagcattc

SEQ ID NO: 334713 - DNA, 30 bp, Artificial Sequence
  Synthetic oligonucleotide
cgtctatagggtacagggattcaagcattc

SEQ ID NO: 334714 - DNA, 30 bp, Artificial Sequence
  Synthetic oligonucleotide
acaatacgcctgggtgataaacgagcattc

SEQ ID NO: 334715 - DNA, 30 bp, Artificial Sequence
  Synthetic oligonucleotide
gccgaatccagcaattaatgggccgcattc

SEQ ID NO: 334716 - DNA, 30 bp, Artificial Sequence
  Synthetic oligonucleotide
cgaaggcccgaatttgcgcacagcgcattc

SEQ ID NO: 334717 - DNA, 30 bp, Artificial Sequence
  Synthetic oligonucleotide
gacgctatggaagagggtgcggtcgcattc

SEQ ID NO: 334718 - DNA, 30 bp, Artificial Sequence
  Synthetic oligonucleotide
gacccggctaacacgcgtggagaggcattc

SEQ ID NO: 334719 - DNA, 30 bp, Artificial Sequence
  Synthetic oligonucleotide
attaacacggctacaatgcccgtggcattc

SEQ ID NO: 334720 - DNA, 30 bp, Artificial Sequence
  Synthetic oligonucleotide
tgactttaaggagagaaaacagactcattc

SEQ ID NO: 334721 - DNA, 30 bp, Artificial Sequence
  Synthetic oligonucleotide
gcagactatgaactgccgatgacctcattc

SEQ ID NO: 334722 - DNA, 30 bp, Artificial Sequence
  Synthetic oligonucleotide
gtaagtgcttggcgaatttttggctcattc

SEQ ID NO: 334723 - DNA, 30 bp, Artificial Sequence
  Synthetic oligonucleotide
atacagggtctccagaagaacgagtcattc

SEQ ID NO: 334724 - DNA, 30 bp, Artificial Sequence
  Synthetic oligonucleotide
atatgaacgaaacggctcgataggtcattc

SEQ ID NO: 334725 - DNA, 30 bp, Artificial Sequence
  Synthetic oligonucleotide
gcgttaagatccctcttaagcgggtcattc

SEQ ID NO: 334726 - DNA, 30 bp, Artificial Sequence
  Synthetic oligonucleotide
gtcgcgctccagttgcttcatgcttcattc

SEQ ID NO: 334727 - DNA, 30 bp, Artificial Sequence
  Synthetic oligonucleotide
acacgtcattgactgttcaccagttcattc

SEQ ID NO: 334728 - DNA, 30 bp, Artificial Sequence
  Synthetic oligonucleotide
ccgtgacaagattaaacctcacccagattc

SEQ ID NO: 334729 - DNA, 30 bp, Artificial Sequence
  Synthetic oligonucleotide
acgtatagtttttgccgtgtgcccagattc

SEQ ID NO: 334730 - DNA, 30 bp, Artificial Sequence
  Synthetic oligonucleotide
taagcagccaaatcggagcctgagagattc

SEQ ID NO: 334731 - DNA, 30 bp, Artificial Sequence
  Synthetic oligonucleotide
agagttctcaaaattagcagggatagattc

SEQ ID NO: 334732 - DNA, 30 bp, Artificial Sequence
  Synthetic oligonucleotide
tggtggacgccaactcacccatttagattc

SEQ ID NO: 334733 - DNA, 29 bp, Artificial Sequence
  Synthetic oligonucleotide
accattcaggtcaaaatgacgaccgattc

SEQ ID NO: 334734 - DNA, 30 bp, Artificial Sequence
  Synthetic oligonucleotide
caaggttgtaaccatgagggagcccgattc

SEQ ID NO: 334735 - DNA, 30 bp, Artificial Sequence
  Synthetic oligonucleotide
gccaagtctagtgaacccctgtttcgattc

SEQ ID NO: 334736 - DNA, 30 bp, Artificial Sequence
  Synthetic oligonucleotide
ggtattgaaccaccgaatgaatgaggattc

SEQ ID NO: 334737 - DNA, 30 bp, Artificial Sequence
  Synthetic oligonucleotide
acgcctcagcagatgtgtgatagcggattc

SEQ ID NO: 334738 - DNA, 30 bp, Artificial Sequence
  Synthetic oligonucleotide
gtatcatatgtgggtactgacaggggattc

SEQ ID NO: 334739 - DNA, 30 bp, Artificial Sequence
  Synthetic oligonucleotide
ttgcgggaaaggttcgctctcttgggattc

SEQ ID NO: 334740 - DNA, 30 bp, Artificial Sequence
  Synthetic oligonucleotide
ttcagtatcaggatgtgtttcgaatgattc

SEQ ID NO: 334741 - DNA, 30 bp, Artificial Sequence
  Synthetic oligonucleotide
tcggccattaaaggttttcatctatgattc

SEQ ID NO: 334742 - DNA, 30 bp, Artificial Sequence
  Synthetic oligonucleotide
gagccgaggtacgctggtgctatttgattc

SEQ ID NO: 334743 - DNA, 30 bp, Artificial Sequence
  Synthetic oligonucleotide
ggcgtggaggaatcgggcagaaaaatattc

SEQ ID NO: 334744 - DNA, 30 bp, Artificial Sequence
  Synthetic oligonucleotide
ttatggattgtgaaggttgtcgaaatattc

SEQ ID NO: 334745 - DNA, 30 bp, Artificial Sequence
  Synthetic oligonucleotide
tggtgcgagtgactgcgtccggaaatattc

SEQ ID NO: 334746 - DNA, 30 bp, Artificial Sequence
  Synthetic oligonucleotide
gcgtgcaccaagaatcctctttcaatattc

SEQ ID NO: 334747 - DNA, 30 bp, Artificial Sequence
  Synthetic oligonucleotide
tatattaaaccgaagacatcacccatattc

SEQ ID NO: 334748 - DNA, 30 bp, Artificial Sequence
  Synthetic oligonucleotide
tgtgctcccctcgattggtgccccatattc

SEQ ID NO: 334749 - DNA, 30 bp, Artificial Sequence
  Synthetic oligonucleotide
ctagttggcgccagctacggccgtatattc

SEQ ID NO: 334750 - DNA, 30 bp, Artificial Sequence
  Synthetic oligonucleotide
aacacacggcgcggcgagcagcgtatattc

SEQ ID NO: 334751 - DNA, 30 bp, Artificial Sequence
  Synthetic oligonucleotide
cataagtcaggcttgaggtttcgtatattc

SEQ ID NO: 334752 - DNA, 30 bp, Artificial Sequence
  Synthetic oligonucleotide
gaggactcatgcattctcagaattatattc

SEQ ID NO: 334753 - DNA, 30 bp, Artificial Sequence
  Synthetic oligonucleotide
atactattcaagtgtacataggcactattc

SEQ ID NO: 334754 - DNA, 30 bp, Artificial Sequence
  Synthetic oligonucleotide
ggacgacggaaggctgcaatcttactattc

SEQ ID NO: 334755 - DNA, 30 bp, Artificial Sequence
  Synthetic oligonucleotide
aacgggccgcagtgagcgatcaacctattc

SEQ ID NO: 334756 - DNA, 30 bp, Artificial Sequence
  Synthetic oligonucleotide
cgggggtgtcttgcctgcaaccacctattc

SEQ ID NO: 334757 - DNA, 30 bp, Artificial Sequence
  Synthetic oligonucleotide
cgaaaatgagtagacgcaagtcagctattc

SEQ ID NO: 334758 - DNA, 30 bp, Artificial Sequence
  Synthetic oligonucleotide
gtttactggacaaggagcgttggtctattc

SEQ ID NO: 334759 - DNA, 30 bp, Artificial Sequence
  Synthetic oligonucleotide
tctaggtgcccggcttacaagcaagtattc

SEQ ID NO: 334760 - DNA, 31 bp, Artificial Sequence
  Synthetic oligonucleotide
aggaattgagggaagaccggcaagagtattc

SEQ ID NO: 334761 - DNA, 30 bp, Artificial Sequence
  Synthetic oligonucleotide
gtgcgcgctctaattttttctagagtattc

SEQ ID NO: 334762 - DNA, 30 bp, Artificial Sequence
  Synthetic oligonucleotide
gctagattcgtacaccgtagcgtagtattc

SEQ ID NO: 334763 - DNA, 30 bp, Artificial Sequence
  Synthetic oligonucleotide
atgaacgacccctcgctcggttgcgtattc

SEQ ID NO: 334764 - DNA, 30 bp, Artificial Sequence
  Synthetic oligonucleotide
gcttcgggtcataagatatcgcaggtattc

SEQ ID NO: 334765 - DNA, 30 bp, Artificial Sequence
  Synthetic oligonucleotide
attgttccagagcaagggctttgggtattc

SEQ ID NO: 334766 - DNA, 30 bp, Artificial Sequence
  Synthetic oligonucleotide
tgggcaatggcgatgtggacagtggtattc

SEQ ID NO: 334767 - DNA, 30 bp, Artificial Sequence
  Synthetic oligonucleotide
gagccaatgagaccgcttcaacaattattc

SEQ ID NO: 334768 - DNA, 30 bp, Artificial Sequence
  Synthetic oligonucleotide
cttttagtcaaatacaatagtatattattc

SEQ ID NO: 334769 - DNA, 30 bp, Artificial Sequence
  Synthetic oligonucleotide
cagtaataaccagtgtttagtgtcttattc

SEQ ID NO: 334770 - DNA, 30 bp, Artificial Sequence
  Synthetic oligonucleotide
acacgtgcgtgagtctactattagttattc

SEQ ID NO: 334771 - DNA, 30 bp, Artificial Sequence
  Synthetic oligonucleotide
ttggggtgcggttgggtgtgcatgttattc

SEQ ID NO: 334772 - DNA, 30 bp, Artificial Sequence
  Synthetic oligonucleotide
acatgaattccactactatacactttattc

SEQ ID NO: 334773 - DNA, 30 bp, Artificial Sequence
  Synthetic oligonucleotide
ggagcttcggcaggatccgtagctttattc

SEQ ID NO: 334774 - DNA, 30 bp, Artificial Sequence
  Synthetic oligonucleotide
gtgcgcacaacaatatgtcgccacaacttc

SEQ ID NO: 334775 - DNA, 30 bp, Artificial Sequence
  Synthetic oligonucleotide
agctaccactgaaaacacagcaggaacttc

SEQ ID NO: 334776 - DNA, 30 bp, Artificial Sequence
  Synthetic oligonucleotide
ccacaccgttaggagttgattaggaacttc

SEQ ID NO: 334777 - DNA, 30 bp, Artificial Sequence
  Synthetic oligonucleotide
aaccgaagcgttgactgcacactacacttc

SEQ ID NO: 334778 - DNA, 30 bp, Artificial Sequence
  Synthetic oligonucleotide
cttcagccgccgatgctgggctggcacttc

SEQ ID NO: 334779 - DNA, 30 bp, Artificial Sequence
  Synthetic oligonucleotide
aaagatatgcaactcaaccggtctcacttc

SEQ ID NO: 334780 - DNA, 30 bp, Artificial Sequence
  Synthetic oligonucleotide
aagtggattattcgtagcttaggtcacttc

SEQ ID NO: 334781 - DNA, 30 bp, Artificial Sequence
  Synthetic oligonucleotide
gtgaggcagtacccggattcaatcgacttc

SEQ ID NO: 334782 - DNA, 30 bp, Artificial Sequence
  Synthetic oligonucleotide
ttactgccgttaaggacggtataggacttc

SEQ ID NO: 334783 - DNA, 30 bp, Artificial Sequence
  Synthetic oligonucleotide
agtgagcaatatgcttattattaggacttc

SEQ ID NO: 334784 - DNA, 30 bp, Artificial Sequence
  Synthetic oligonucleotide
atccagctgaattataaaagagctgacttc

SEQ ID NO: 334785 - DNA, 30 bp, Artificial Sequence
  Synthetic oligonucleotide
agaatcgtgtatgtaaatttacttgacttc

SEQ ID NO: 334786 - DNA, 30 bp, Artificial Sequence
  Synthetic oligonucleotide
taagactcttcgtgtttatgtgcatacttc

SEQ ID NO: 334787 - DNA, 30 bp, Artificial Sequence
  Synthetic oligonucleotide
gattctcgtgtccacctgggcctatacttc

SEQ ID NO: 334788 - DNA, 30 bp, Artificial Sequence
  Synthetic oligonucleotide
gaggggacgtatgcacagatattatacttc

SEQ ID NO: 334789 - DNA, 30 bp, Artificial Sequence
  Synthetic oligonucleotide
cacggattttttactaacccttgctacttc

SEQ ID NO: 334790 - DNA, 30 bp, Artificial Sequence
  Synthetic oligonucleotide
cttaaaccatacgtatctggcaagtacttc

SEQ ID NO: 334791 - DNA, 30 bp, Artificial Sequence
  Synthetic oligonucleotide
tgaattacgcggtgggttggagcgtacttc

SEQ ID NO: 334792 - DNA, 30 bp, Artificial Sequence
  Synthetic oligonucleotide
tagccccgtgaaggccggacaatttacttc

SEQ ID NO: 334793 - DNA, 30 bp, Artificial Sequence
  Synthetic oligonucleotide
ccatttgtaggcgaaataaacgacaccttc

SEQ ID NO: 334794 - DNA, 30 bp, Artificial Sequence
  Synthetic oligonucleotide
gcagtgaaaggtccaacggtatacaccttc

SEQ ID NO: 334795 - DNA, 30 bp, Artificial Sequence
  Synthetic oligonucleotide
gaggagtgtattaattatatactcaccttc

SEQ ID NO: 334796 - DNA, 30 bp, Artificial Sequence
  Synthetic oligonucleotide
ggtgcctcagccgatttatgaaagaccttc

SEQ ID NO: 334797 - DNA, 30 bp, Artificial Sequence
  Synthetic oligonucleotide
tttagtgcattaggagcacgggagaccttc

SEQ ID NO: 334798 - DNA, 30 bp, Artificial Sequence
  Synthetic oligonucleotide
gaacgatcgccagcgaacgtagcgaccttc

SEQ ID NO: 334799 - DNA, 30 bp, Artificial Sequence
  Synthetic oligonucleotide
aatgaagatcaaattccgtgattgaccttc

SEQ ID NO: 334800 - DNA, 30 bp, Artificial Sequence
  Synthetic oligonucleotide
atagaattagagtatatttgttataccttc

SEQ ID NO: 334801 - DNA, 30 bp, Artificial Sequence
  Synthetic oligonucleotide
tcgtttccgtttatcttcagctctaccttc

SEQ ID NO: 334802 - DNA, 30 bp, Artificial Sequence
  Synthetic oligonucleotide
caaaactagtctcgagggctcattaccttc

SEQ ID NO: 334803 - DNA, 30 bp, Artificial Sequence
  Synthetic oligonucleotide
gtgtaggtgttttaaaccaccgttaccttc

SEQ ID NO: 334804 - DNA, 30 bp, Artificial Sequence
  Synthetic oligonucleotide
tggcgcgtttaatttgtgcggatacccttc

SEQ ID NO: 334805 - DNA, 30 bp, Artificial Sequence
  Synthetic oligonucleotide
cgtttgtactcacctctccagtaccccttc

SEQ ID NO: 334806 - DNA, 30 bp, Artificial Sequence
  Synthetic oligonucleotide
actgagccgtcacggaagctttaccccttc

SEQ ID NO: 334807 - DNA, 30 bp, Artificial Sequence
  Synthetic oligonucleotide
cttgaatcctggggcatagttatccccttc

SEQ ID NO: 334808 - DNA, 30 bp, Artificial Sequence
  Synthetic oligonucleotide
gatatttaggtggcagtgtcgcggcccttc

SEQ ID NO: 334809 - DNA, 30 bp, Artificial Sequence
  Synthetic oligonucleotide
taatcatagttaaactgggtggtgcccttc

SEQ ID NO: 334810 - DNA, 30 bp, Artificial Sequence
  Synthetic oligonucleotide
tgtacgacggtagttggaaggatagccttc

SEQ ID NO: 334811 - DNA, 30 bp, Artificial Sequence
  Synthetic oligonucleotide
agtatcactcactattcgatgacatccttc

SEQ ID NO: 334812 - DNA, 30 bp, Artificial Sequence
  Synthetic oligonucleotide
tacggaggagaataactcaaattatccttc

SEQ ID NO: 334813 - DNA, 30 bp, Artificial Sequence
  Synthetic oligonucleotide
agtaggagttttttcaatgaggtgtccttc

SEQ ID NO: 334814 - DNA, 30 bp, Artificial Sequence
  Synthetic oligonucleotide
tggtacggaacttctgatctgagcagcttc

SEQ ID NO: 334815 - DNA, 30 bp, Artificial Sequence
  Synthetic oligonucleotide
atgctcaagttcagattttgatcgagcttc

SEQ ID NO: 334816 - DNA, 30 bp, Artificial Sequence
  Synthetic oligonucleotide
gataacgaactattttacatgtcaggcttc

SEQ ID NO: 334817 - DNA, 30 bp, Artificial Sequence
  Synthetic oligonucleotide
ataggtgaggagacgcggggagacggcttc

SEQ ID NO: 334818 - DNA, 30 bp, Artificial Sequence
  Synthetic oligonucleotide
cttgtctttgagggggtgtggcccggcttc

SEQ ID NO: 334819 - DNA, 30 bp, Artificial Sequence
  Synthetic oligonucleotide
aaacttcataagttcaggacctagggcttc

SEQ ID NO: 334820 - DNA, 30 bp, Artificial Sequence
  Synthetic oligonucleotide
ctgttggcacgaccagaattcgcgggcttc

SEQ ID NO: 334821 - DNA, 30 bp, Artificial Sequence
  Synthetic oligonucleotide
tttccccatcgttcgcgaattggtggcttc

SEQ ID NO: 334822 - DNA, 30 bp, Artificial Sequence
  Synthetic oligonucleotide
gtcacaattgtatgacccgtgtcatgcttc

SEQ ID NO: 334823 - DNA, 30 bp, Artificial Sequence
  Synthetic oligonucleotide
tggaactcacctatttgaagcatatgcttc

SEQ ID NO: 334824 - DNA, 30 bp, Artificial Sequence
  Synthetic oligonucleotide
ccaaactattgagaccgtgcagtctgcttc

SEQ ID NO: 334825 - DNA, 30 bp, Artificial Sequence
  Synthetic oligonucleotide
cctctggtccgacaaggtgccaggtgcttc

SEQ ID NO: 334826 - DNA, 30 bp, Artificial Sequence
  Synthetic oligonucleotide
atttcggcttctagcgttttggggtgcttc

SEQ ID NO: 334827 - DNA, 30 bp, Artificial Sequence
  Synthetic oligonucleotide
cgcggtgcgagatacgcccatatgtgcttc

SEQ ID NO: 334828 - DNA, 30 bp, Artificial Sequence
  Synthetic oligonucleotide
ggggtgactctcgggaagcccaattgcttc

SEQ ID NO: 334829 - DNA, 30 bp, Artificial Sequence
  Synthetic oligonucleotide
gtgctgagaaggtagcgagttgcaatcttc

SEQ ID NO: 334830 - DNA, 30 bp, Artificial Sequence
  Synthetic oligonucleotide
atggaaaaataaaagtccggggggatcttc

SEQ ID NO: 334831 - DNA, 30 bp, Artificial Sequence
  Synthetic oligonucleotide
gataggtcgaattaatcagactggatcttc

SEQ ID NO: 334832 - DNA, 30 bp, Artificial Sequence
  Synthetic oligonucleotide
ggcatcatgtacggttatgacctactcttc

SEQ ID NO: 334833 - DNA, 30 bp, Artificial Sequence
  Synthetic oligonucleotide
atgcttgatggacagctaccgattctcttc

SEQ ID NO: 334834 - DNA, 30 bp, Artificial Sequence
  Synthetic oligonucleotide
ctggcgccctcgagggtaaagctcgtcttc

SEQ ID NO: 334835 - DNA, 29 bp, Artificial Sequence
  Synthetic oligonucleotide
tccctggttaggccagttcctgggtcttc

SEQ ID NO: 334836 - DNA, 30 bp, Artificial Sequence
  Synthetic oligonucleotide
agcagtagatgattgtaccggatggtcttc

SEQ ID NO: 334837 - DNA, 30 bp, Artificial Sequence
  Synthetic oligonucleotide
gccttacactcaatccattgataattcttc

SEQ ID NO: 334838 - DNA, 30 bp, Artificial Sequence
  Synthetic oligonucleotide
ctacccactcgcttaccatgtggattcttc

SEQ ID NO: 334839 - DNA, 30 bp, Artificial Sequence
  Synthetic oligonucleotide
tttgccaagagtgttcggcgtttcttcttc

SEQ ID NO: 334840 - DNA, 30 bp, Artificial Sequence
  Synthetic oligonucleotide
aaataatcattaccagataatgggttcttc

SEQ ID NO: 334841 - DNA, 30 bp, Artificial Sequence
  Synthetic oligonucleotide
tctccgctcatctctcgggtgcaaaagttc

SEQ ID NO: 334842 - DNA, 30 bp, Artificial Sequence
  Synthetic oligonucleotide
tagagtcatgcgtagccgcgcataaagttc

SEQ ID NO: 334843 - DNA, 30 bp, Artificial Sequence
  Synthetic oligonucleotide
gctgtgcgcatggccttggagtacaagttc

SEQ ID NO: 334844 - DNA, 30 bp, Artificial Sequence
  Synthetic oligonucleotide
taacaggttggtagagccatgcagaagttc

SEQ ID NO: 334845 - DNA, 30 bp, Artificial Sequence
  Synthetic oligonucleotide
gggaggggatccgcggatgtctgtaagttc

SEQ ID NO: 334846 - DNA, 30 bp, Artificial Sequence
  Synthetic oligonucleotide
cgagatgtttcgggcctaaaagttaagttc

SEQ ID NO: 334847 - DNA, 30 bp, Artificial Sequence
  Synthetic oligonucleotide
ggccgggcaagactttgtaaaaaacagttc

SEQ ID NO: 334848 - DNA, 30 bp, Artificial Sequence
  Synthetic oligonucleotide
acaatgaagtataattttgcggaacagttc

SEQ ID NO: 334849 - DNA, 30 bp, Artificial Sequence
  Synthetic oligonucleotide
acagtctaaccgcaccaatctaaccagttc

SEQ ID NO: 334850 - DNA, 30 bp, Artificial Sequence
  Synthetic oligonucleotide
gccgagacgcgggtgagtcaccatcagttc

SEQ ID NO: 334851 - DNA, 30 bp, Artificial Sequence
  Synthetic oligonucleotide
gaatagaaggacactatggcgtctcagttc

SEQ ID NO: 334852 - DNA, 30 bp, Artificial Sequence
  Synthetic oligonucleotide
acaaatctttatactcagatcattcagttc

SEQ ID NO: 334853 - DNA, 30 bp, Artificial Sequence
  Synthetic oligonucleotide
ctagcggaggtcgggaatcatattcagttc

SEQ ID NO: 334854 - DNA, 30 bp, Artificial Sequence
  Synthetic oligonucleotide
acgagcagaatttatagttgtgtagagttc

SEQ ID NO: 334855 - DNA, 30 bp, Artificial Sequence
  Synthetic oligonucleotide
aaatttgctgtgtattcacctttagagttc

SEQ ID NO: 334856 - DNA, 30 bp, Artificial Sequence
  Synthetic oligonucleotide
acaaactctggtgtacataacgccgagttc

SEQ ID NO: 334857 - DNA, 30 bp, Artificial Sequence
  Synthetic oligonucleotide
cctgttacatgtcaataaagtgaggagttc

SEQ ID NO: 334858 - DNA, 30 bp, Artificial Sequence
  Synthetic oligonucleotide
agcagaagtttcactagcattgcggagttc

SEQ ID NO: 334859 - DNA, 30 bp, Artificial Sequence
  Synthetic oligonucleotide
aagtcaatttacggcataggattggagttc

SEQ ID NO: 334860 - DNA, 30 bp, Artificial Sequence
  Synthetic oligonucleotide
cacttcgattaggtcagaacgtcatagttc

SEQ ID NO: 334861 - DNA, 30 bp, Artificial Sequence
  Synthetic oligonucleotide
ctcatcatgacagacagcttgttatagttc

SEQ ID NO: 334862 - DNA, 30 bp, Artificial Sequence
  Synthetic oligonucleotide
accgaatatgagcgcactctcaggtagttc

SEQ ID NO: 334863 - DNA, 30 bp, Artificial Sequence
  Synthetic oligonucleotide
aggcacgcttaatggttaaatagttagttc

SEQ ID NO: 334864 - DNA, 30 bp, Artificial Sequence
  Synthetic oligonucleotide
ttggagggtcaaaatagcaatccaacgttc

SEQ ID NO: 334865 - DNA, 30 bp, Artificial Sequence
  Synthetic oligonucleotide
cagcgctgaacattatctacccgcacgttc

SEQ ID NO: 334866 - DNA, 30 bp, Artificial Sequence
  Synthetic oligonucleotide
gtaaacgggaataggacgttgggcacgttc

SEQ ID NO: 334867 - DNA, 30 bp, Artificial Sequence
  Synthetic oligonucleotide
ggcacacaagggcctgaacattcgacgttc

SEQ ID NO: 334868 - DNA, 30 bp, Artificial Sequence
  Synthetic oligonucleotide
tgagccagccgtaaaatccccaggacgttc

SEQ ID NO: 334869 - DNA, 30 bp, Artificial Sequence
  Synthetic oligonucleotide
ggtattcaattgctttacttaaatacgttc

SEQ ID NO: 334870 - DNA, 30 bp, Artificial Sequence
  Synthetic oligonucleotide
gcaattgccaacccttaaaaattaccgttc

SEQ ID NO: 334871 - DNA, 30 bp, Artificial Sequence
  Synthetic oligonucleotide
gtcaggctcacgtggtttaagatcgcgttc

SEQ ID NO: 334872 - DNA, 30 bp, Artificial Sequence
  Synthetic oligonucleotide
agctgtgagaacgcgagggacttggcgttc

SEQ ID NO: 334873 - DNA, 30 bp, Artificial Sequence
  Synthetic oligonucleotide
actccaccataagttctgtatagctcgttc

SEQ ID NO: 334874 - DNA, 30 bp, Artificial Sequence
  Synthetic oligonucleotide
gacggtattagcgcactttgaagcaggttc

SEQ ID NO: 334875 - DNA, 30 bp, Artificial Sequence
  Synthetic oligonucleotide
atcagaggcctatttcgcggcggcaggttc

SEQ ID NO: 334876 - DNA, 30 bp, Artificial Sequence
  Synthetic oligonucleotide
ggcggggttcaattgggtgctgagaggttc

SEQ ID NO: 334877 - DNA, 30 bp, Artificial Sequence
  Synthetic oligonucleotide
gtgcagtgtcctctaggaaaagcgaggttc

SEQ ID NO: 334878 - DNA, 30 bp, Artificial Sequence
  Synthetic oligonucleotide
aaggcacaagagataattacacggaggttc

SEQ ID NO: 334879 - DNA, 30 bp, Artificial Sequence
  Synthetic oligonucleotide
gcatccttagatgagacggaatggaggttc

SEQ ID NO: 334880 - DNA, 30 bp, Artificial Sequence
  Synthetic oligonucleotide
cgtaaccgcttttccattaggcctaggttc

SEQ ID NO: 334881 - DNA, 30 bp, Artificial Sequence
  Synthetic oligonucleotide
cagttgttctatgtaatttgctcgcggttc

SEQ ID NO: 334882 - DNA, 30 bp, Artificial Sequence
  Synthetic oligonucleotide
agtgctaatcaacgataatgaactcggttc

SEQ ID NO: 334883 - DNA, 30 bp, Artificial Sequence
  Synthetic oligonucleotide
ctcataaactagtcaaaagggagtcggttc

SEQ ID NO: 334884 - DNA, 30 bp, Artificial Sequence
  Synthetic oligonucleotide
aggtggggtatcggcaggattgttcggttc

SEQ ID NO: 334885 - DNA, 30 bp, Artificial Sequence
  Synthetic oligonucleotide
gacggccggcggccggggggagaagggttc

SEQ ID NO: 334886 - DNA, 30 bp, Artificial Sequence
  Synthetic oligonucleotide
ggcggcacgcgatccttgtgttaagggttc

SEQ ID NO: 334887 - DNA, 30 bp, Artificial Sequence
  Synthetic oligonucleotide
gagcgacattaagctgctaaaaacgggttc

SEQ ID NO: 334888 - DNA, 30 bp, Artificial Sequence
  Synthetic oligonucleotide
tgtctagagcatcgaggtggagtcgggttc

SEQ ID NO: 334889 - DNA, 30 bp, Artificial Sequence
  Synthetic oligonucleotide
tgtaagtatggtccagtggagtgggggttc

SEQ ID NO: 334890 - DNA, 30 bp, Artificial Sequence
  Synthetic oligonucleotide
taactggaattgggctcgatagctgggttc

SEQ ID NO: 334891 - DNA, 30 bp, Artificial Sequence
  Synthetic oligonucleotide
tgactagccaggggatcaatcaaatggttc

SEQ ID NO: 334892 - DNA, 30 bp, Artificial Sequence
  Synthetic oligonucleotide
gctaagaaagcgcaggccgagagatggttc

SEQ ID NO: 334893 - DNA, 30 bp, Artificial Sequence
  Synthetic oligonucleotide
aagcagctagtaccgtcgtcacactggttc

SEQ ID NO: 334894 - DNA, 29 bp, Artificial Sequence
  Synthetic oligonucleotide
caggagttcttctaacccgaagctggttc

SEQ ID NO: 334895 - DNA, 30 bp, Artificial Sequence
  Synthetic oligonucleotide
gcttcaatatacgttccagagatgtggttc

SEQ ID NO: 334896 - DNA, 30 bp, Artificial Sequence
  Synthetic oligonucleotide
gtgtacaccgatttgaatggaagttggttc

SEQ ID NO: 334897 - DNA, 30 bp, Artificial Sequence
  Synthetic oligonucleotide
cagtctaacagggctgagtcagcaatgttc

SEQ ID NO: 334898 - DNA, 30 bp, Artificial Sequence
  Synthetic oligonucleotide
gtctagagcgcgtatgaaaacataatgttc

SEQ ID NO: 334899 - DNA, 30 bp, Artificial Sequence
  Synthetic oligonucleotide
cgtctatttctggcggttgactccatgttc

SEQ ID NO: 334900 - DNA, 30 bp, Artificial Sequence
  Synthetic oligonucleotide
aaaagccagccagcggatgttcctatgttc

SEQ ID NO: 334901 - DNA, 30 bp, Artificial Sequence
  Synthetic oligonucleotide
gatagaaaacaaggggaatccctgctgttc

SEQ ID NO: 334902 - DNA, 30 bp, Artificial Sequence
  Synthetic oligonucleotide
cccctcgtcgttgagcggaatagagtgttc

SEQ ID NO: 334903 - DNA, 30 bp, Artificial Sequence
  Synthetic oligonucleotide
acacgcccaactagaatctcacacgtgttc

SEQ ID NO: 334904 - DNA, 30 bp, Artificial Sequence
  Synthetic oligonucleotide
ggggaccagaatcatgactgttacgtgttc

SEQ ID NO: 334905 - DNA, 30 bp, Artificial Sequence
  Synthetic oligonucleotide
gggtcggaatttcttaactgtacggtgttc

SEQ ID NO: 334906 - DNA, 30 bp, Artificial Sequence
  Synthetic oligonucleotide
tcggtcgatgcatacaaggacagattgttc

SEQ ID NO: 334907 - DNA, 30 bp, Artificial Sequence
  Synthetic oligonucleotide
aagtaaagataagtgggtccggtattgttc

SEQ ID NO: 334908 - DNA, 30 bp, Artificial Sequence
  Synthetic oligonucleotide
ctagggtgcaataagtatcgtcccttgttc

SEQ ID NO: 334909 - DNA, 30 bp, Artificial Sequence
  Synthetic oligonucleotide
taattaggggggaaacttaccggcttgttc

SEQ ID NO: 334910 - DNA, 30 bp, Artificial Sequence
  Synthetic oligonucleotide
tgcactgaaagccaataattatagttgttc

SEQ ID NO: 334911 - DNA, 30 bp, Artificial Sequence
  Synthetic oligonucleotide
taggctctttttatttgttgcccgttgttc

SEQ ID NO: 334912 - DNA, 30 bp, Artificial Sequence
  Synthetic oligonucleotide
aagcgtccgaaacaccgtagggcgttgttc

SEQ ID NO: 334913 - DNA, 30 bp, Artificial Sequence
  Synthetic oligonucleotide
cttggtagagacagtaacagaacaaatttc

SEQ ID NO: 334914 - DNA, 30 bp, Artificial Sequence
  Synthetic oligonucleotide
ttaggcctcatacccctgacctcaaatttc

SEQ ID NO: 334915 - DNA, 30 bp, Artificial Sequence
  Synthetic oligonucleotide
attggtctgacaccctggtcccgaaatttc

SEQ ID NO: 334916 - DNA, 30 bp, Artificial Sequence
  Synthetic oligonucleotide
tcagggtctaaatagccgtccgacaatttc

SEQ ID NO: 334917 - DNA, 30 bp, Artificial Sequence
  Synthetic oligonucleotide
agttaacggtacccaggtggcaccaatttc

SEQ ID NO: 334918 - DNA, 30 bp, Artificial Sequence
  Synthetic oligonucleotide
ttgtagcagcgtttgatgttcaagaatttc

SEQ ID NO: 334919 - DNA, 30 bp, Artificial Sequence
  Synthetic oligonucleotide
taacactctcacttggataagaaccatttc

SEQ ID NO: 334920 - DNA, 30 bp, Artificial Sequence
  Synthetic oligonucleotide
ccagtctcggggcgacctagtccgcatttc

SEQ ID NO: 334921 - DNA, 30 bp, Artificial Sequence
  Synthetic oligonucleotide
gttaactctgtaacgacaggttggcatttc

SEQ ID NO: 334922 - DNA, 30 bp, Artificial Sequence
  Synthetic oligonucleotide
ctcaggatttgcgtggagacactagatttc

SEQ ID NO: 334923 - DNA, 30 bp, Artificial Sequence
  Synthetic oligonucleotide
tcataaggaaataattagcgtggcgatttc

SEQ ID NO: 334924 - DNA, 30 bp, Artificial Sequence
  Synthetic oligonucleotide
agtgcggattctcgatgacgggtcgatttc

SEQ ID NO: 334925 - DNA, 30 bp, Artificial Sequence
  Synthetic oligonucleotide
aatcgtgggacaattcttaaaaaggatttc

SEQ ID NO: 334926 - DNA, 30 bp, Artificial Sequence
  Synthetic oligonucleotide
ggagtacccgacagagatcgcacggatttc

SEQ ID NO: 334927 - DNA, 30 bp, Artificial Sequence
  Synthetic oligonucleotide
tatgaaagtgccagttgcgcctcggatttc

SEQ ID NO: 334928 - DNA, 30 bp, Artificial Sequence
  Synthetic oligonucleotide
gcgttgcaagcaaatatcataggggatttc

SEQ ID NO: 334929 - DNA, 30 bp, Artificial Sequence
  Synthetic oligonucleotide
cagtgtgtcatggacacgagcctggatttc

SEQ ID NO: 334930 - DNA, 30 bp, Artificial Sequence
  Synthetic oligonucleotide
gtcaaggagtgctttgattccacctatttc

SEQ ID NO: 334931 - DNA, 30 bp, Artificial Sequence
  Synthetic oligonucleotide
tctgaagataggacagacaggaggtatttc

SEQ ID NO: 334932 - DNA, 30 bp, Artificial Sequence
  Synthetic oligonucleotide
cccaaaacatgtatatcccctctttatttc

SEQ ID NO: 334933 - DNA, 30 bp, Artificial Sequence
  Synthetic oligonucleotide
agactatccatcaagcagacagcaactttc

SEQ ID NO: 334934 - DNA, 30 bp, Artificial Sequence
  Synthetic oligonucleotide
atggttgtgttcgggtgcccagtaactttc

SEQ ID NO: 334935 - DNA, 30 bp, Artificial Sequence
  Synthetic oligonucleotide
atcgtgtgtaactcgataatggccactttc

SEQ ID NO: 334936 - DNA, 30 bp, Artificial Sequence
  Synthetic oligonucleotide
gctctcggcactaagacagattccactttc

SEQ ID NO: 334937 - DNA, 30 bp, Artificial Sequence
  Synthetic oligonucleotide
cagggggcattcgtgttcgatgggactttc

SEQ ID NO: 334938 - DNA, 31 bp, Artificial Sequence
  Synthetic oligonucleotide
acccataagcctcctagccttatcacctttc

SEQ ID NO: 334939 - DNA, 30 bp, Artificial Sequence
  Synthetic oligonucleotide
atataactgacagtttgtacgagacctttc

SEQ ID NO: 334940 - DNA, 30 bp, Artificial Sequence
  Synthetic oligonucleotide
cccttgatccattatatcatcaaccctttc

SEQ ID NO: 334941 - DNA, 30 bp, Artificial Sequence
  Synthetic oligonucleotide
atcgacaatgagaaactgcacgcccctttc

SEQ ID NO: 334942 - DNA, 30 bp, Artificial Sequence
  Synthetic oligonucleotide
atccatccctggtagcattgacagcctttc

SEQ ID NO: 334943 - DNA, 30 bp, Artificial Sequence
  Synthetic oligonucleotide
gctggggtagtgggtttgtgttggcctttc

SEQ ID NO: 334944 - DNA, 28 bp, Artificial Sequence
  Synthetic oligonucleotide
acctagatagaagcacgtgtctcctttc

SEQ ID NO: 334945 - DNA, 30 bp, Artificial Sequence
  Synthetic oligonucleotide
tacgcggttgaacctttgtcatcagctttc

SEQ ID NO: 334946 - DNA, 30 bp, Artificial Sequence
  Synthetic oligonucleotide
acatggcgggacgggggcatgggagctttc

SEQ ID NO: 334947 - DNA, 30 bp, Artificial Sequence
  Synthetic oligonucleotide
gcccgaagggcgggcggtccagtagctttc

SEQ ID NO: 334948 - DNA, 30 bp, Artificial Sequence
  Synthetic oligonucleotide
ggatctcggtacatgaaccaagcggctttc

SEQ ID NO: 334949 - DNA, 30 bp, Artificial Sequence
  Synthetic oligonucleotide
cccctgggagtccaaggaccgaaatctttc

SEQ ID NO: 334950 - DNA, 30 bp, Artificial Sequence
  Synthetic oligonucleotide
tcgctaatgatagcgttcgaaaagtctttc

SEQ ID NO: 334951 - DNA, 30 bp, Artificial Sequence
  Synthetic oligonucleotide
ggccagtgtacggttatatgtttgtctttc

SEQ ID NO: 334952 - DNA, 30 bp, Artificial Sequence
  Synthetic oligonucleotide
ggctaaacggttgtaggcaaaaccagtttc

SEQ ID NO: 334953 - DNA, 30 bp, Artificial Sequence
  Synthetic oligonucleotide
gcgcgtcttgaggttcagggaatcagtttc

SEQ ID NO: 334954 - DNA, 30 bp, Artificial Sequence
  Synthetic oligonucleotide
gtcggcgagcaacagttggttcagagtttc

SEQ ID NO: 334955 - DNA, 30 bp, Artificial Sequence
  Synthetic oligonucleotide
ttgacaaattcatagtcattttcgagtttc

SEQ ID NO: 334956 - DNA, 30 bp, Artificial Sequence
  Synthetic oligonucleotide
aagtctctgatgataatcgactctagtttc

SEQ ID NO: 334957 - DNA, 27 bp, Artificial Sequence
  Synthetic oligonucleotide
aacgggtcggcattgaccgaacgtttc

SEQ ID NO: 334958 - DNA, 30 bp, Artificial Sequence
  Synthetic oligonucleotide
aattagtggccatccgtccgattgcgtttc

SEQ ID NO: 334959 - DNA, 30 bp, Artificial Sequence
  Synthetic oligonucleotide
tggaacgaggtccggatgttgcctcgtttc

SEQ ID NO: 334960 - DNA, 30 bp, Artificial Sequence
  Synthetic oligonucleotide
gcacagcatgccggaggtgcctgtcgtttc

SEQ ID NO: 334961 - DNA, 30 bp, Artificial Sequence
  Synthetic oligonucleotide
gtcggggacgatgtgttcaaggcaggtttc

SEQ ID NO: 334962 - DNA, 30 bp, Artificial Sequence
  Synthetic oligonucleotide
ataaccctgctataccccgtaaccggtttc

SEQ ID NO: 334963 - DNA, 30 bp, Artificial Sequence
  Synthetic oligonucleotide
catggttagagcataaggcaagtcggtttc

SEQ ID NO: 334964 - DNA, 30 bp, Artificial Sequence
  Synthetic oligonucleotide
catcctgtaatcatacggagtaagggtttc

SEQ ID NO: 334965 - DNA, 30 bp, Artificial Sequence
  Synthetic oligonucleotide
gcaactccatggcgccggtaatagggtttc

SEQ ID NO: 334966 - DNA, 30 bp, Artificial Sequence
  Synthetic oligonucleotide
atttttgcatcgcgagactttgcgggtttc

SEQ ID NO: 334967 - DNA, 30 bp, Artificial Sequence
  Synthetic oligonucleotide
gagaaccagttcggatagattctgggtttc

SEQ ID NO: 334968 - DNA, 30 bp, Artificial Sequence
  Synthetic oligonucleotide
aaaagtgacatggataacggccctggtttc

SEQ ID NO: 334969 - DNA, 30 bp, Artificial Sequence
  Synthetic oligonucleotide
ggagtaagtctaatgtccagataatgtttc

SEQ ID NO: 334970 - DNA, 30 bp, Artificial Sequence
  Synthetic oligonucleotide
gactgaatggaggcgtataggacatgtttc

SEQ ID NO: 334971 - DNA, 30 bp, Artificial Sequence
  Synthetic oligonucleotide
ctgcataagtctagggtgaaaagatgtttc

SEQ ID NO: 334972 - DNA, 30 bp, Artificial Sequence
  Synthetic oligonucleotide
gtcaccccaactgcgttggaaagctgtttc

SEQ ID NO: 334973 - DNA, 30 bp, Artificial Sequence
  Synthetic oligonucleotide
aagactgcaatgcaaacggaagcgtgtttc

SEQ ID NO: 334974 - DNA, 30 bp, Artificial Sequence
  Synthetic oligonucleotide
gttggtgacatggaacctagcttttgtttc

SEQ ID NO: 334975 - DNA, 30 bp, Artificial Sequence
  Synthetic oligonucleotide
agaaatagaccaaaatagacctgaattttc

SEQ ID NO: 334976 - DNA, 30 bp, Artificial Sequence
  Synthetic oligonucleotide
ggaggatgcgaagttgtcccttgaattttc

SEQ ID NO: 334977 - DNA, 30 bp, Artificial Sequence
  Synthetic oligonucleotide
tgccacgtagactgaagatagctaattttc

SEQ ID NO: 334978 - DNA, 30 bp, Artificial Sequence
  Synthetic oligonucleotide
tcggtgggatccacgagtcgtcacattttc

SEQ ID NO: 334979 - DNA, 30 bp, Artificial Sequence
  Synthetic oligonucleotide
agggcgggttctctttataaggtcattttc

SEQ ID NO: 334980 - DNA, 30 bp, Artificial Sequence
  Synthetic oligonucleotide
atcacccggttgtgctcggtgttcattttc

SEQ ID NO: 334981 - DNA, 30 bp, Artificial Sequence
  Synthetic oligonucleotide
aagtttaaaacaatccaaaccgagattttc

SEQ ID NO: 334982 - DNA, 30 bp, Artificial Sequence
  Synthetic oligonucleotide
gggagtctcatggtggtaggccctattttc

SEQ ID NO: 334983 - DNA, 30 bp, Artificial Sequence
  Synthetic oligonucleotide
agcgacgcagtgcagcgtcatttacttttc

SEQ ID NO: 334984 - DNA, 30 bp, Artificial Sequence
  Synthetic oligonucleotide
gggaggttatctgctacgtgtctgcttttc

SEQ ID NO: 334985 - DNA, 30 bp, Artificial Sequence
  Synthetic oligonucleotide
tgatccaggcaccggccagcgctagttttc

SEQ ID NO: 334986 - DNA, 30 bp, Artificial Sequence
  Synthetic oligonucleotide
caaatcccaaatgggattagtgtagttttc

SEQ ID NO: 334987 - DNA, 30 bp, Artificial Sequence
  Synthetic oligonucleotide
agtaataaacgtcgtcgtagtgccgttttc

SEQ ID NO: 334988 - DNA, 30 bp, Artificial Sequence
  Synthetic oligonucleotide
atatttactcgccagggggaagtcgttttc

SEQ ID NO: 334989 - DNA, 30 bp, Artificial Sequence
  Synthetic oligonucleotide
gtaatggcctcgggtacacaaaatgttttc

SEQ ID NO: 334990 - DNA, 30 bp, Artificial Sequence
  Synthetic oligonucleotide
cgacctgcagttagtgtcggctatgttttc

SEQ ID NO: 334991 - DNA, 30 bp, Artificial Sequence
  Synthetic oligonucleotide
cgagctgactcagaaaaggctgctgttttc

SEQ ID NO: 334992 - DNA, 30 bp, Artificial Sequence
  Synthetic oligonucleotide
aacagggggtccacgttcctactatttttc

SEQ ID NO: 334993 - DNA, 30 bp, Artificial Sequence
  Synthetic oligonucleotide
tcatggtgatcgtagatgtgatattttttc

SEQ ID NO: 334994 - DNA, 30 bp, Artificial Sequence
  Synthetic oligonucleotide
taccaagaaatatgttaaaaacaaaaaaag

SEQ ID NO: 334995 - DNA, 30 bp, Artificial Sequence
  Synthetic oligonucleotide
aaatagtgccagttgtacagagaaaaaaag

SEQ ID NO: 334996 - DNA, 30 bp, Artificial Sequence
  Synthetic oligonucleotide
gacctccgccagtaagcctcaagaaaaaag

SEQ ID NO: 334997 - DNA, 30 bp, Artificial Sequence
  Synthetic oligonucleotide
ttctcgttgtgcacctaaaaaaacaaaaag

SEQ ID NO: 334998 - DNA, 30 bp, Artificial Sequence
  Synthetic oligonucleotide
acaaattaagtttataaccggcagaaaaag

SEQ ID NO: 334999 - DNA, 30 bp, Artificial Sequence
  Synthetic oligonucleotide
gtttttgggagtcatcattgtgggaaaaag

SEQ ID NO: 335000 - DNA, 30 bp, Artificial Sequence
  Synthetic oligonucleotide
atgtggtaatggacaatgtcgccacaaaag

SEQ ID NO: 335001 - DNA, 30 bp, Artificial Sequence
  Synthetic oligonucleotide
ggtctccgtagtcctggtggtttacaaaag

SEQ ID NO: 335002 - DNA, 30 bp, Artificial Sequence
  Synthetic oligonucleotide
aactactagcatctcctcggctaccaaaag

SEQ ID NO: 335003 - DNA, 30 bp, Artificial Sequence
  Synthetic oligonucleotide
ttatcggtgtatgcgcctagcaagcaaaag

SEQ ID NO: 335004 - DNA, 30 bp, Artificial Sequence
  Synthetic oligonucleotide
cgaccagtgatcgggacggaaacgcaaaag

SEQ ID NO: 335005 - DNA, 30 bp, Artificial Sequence
  Synthetic oligonucleotide
tttagcgtttctcaggataatctgcaaaag

SEQ ID NO: 335006 - DNA, 30 bp, Artificial Sequence
  Synthetic oligonucleotide
ttaatcaggagtaatcccgtcgtgcaaaag

SEQ ID NO: 335007 - DNA, 30 bp, Artificial Sequence
  Synthetic oligonucleotide
cgtcaagataatcatttacaaaatcaaaag

SEQ ID NO: 335008 - DNA, 30 bp, Artificial Sequence
  Synthetic oligonucleotide
acctgggccaactagttatttaatcaaaag

SEQ ID NO: 335009 - DNA, 30 bp, Artificial Sequence
  Synthetic oligonucleotide
ccaacgtcggttctttcggatggagaaaag

SEQ ID NO: 335010 - DNA, 30 bp, Artificial Sequence
  Synthetic oligonucleotide
cggtccactaattatgtacaatacgaaaag

SEQ ID NO: 335011 - DNA, 30 bp, Artificial Sequence
  Synthetic oligonucleotide
tatgtgttagctttctgaatgtaggaaaag
